United States Patent Application Publication US 2012/0227134 A1 - sequence listing, part 4

SEQ ID NO: 10439 - DNA, 1440 bp, Dorea formicigenerans ATCC 27755
  CDS (1)..(1440): transl_table=11
atggcgtcagaagacagtatttttaagacagtagaaggagtatttggtatgaatttaattgaaattcgcgaattatacaagaaccaggaagcatacctggataaagaaattaccgttgggggatgggtaagaagtatccgagactccaaagcatttggctttattgtcatcaatgatggaacattttttacaccacttcaggtcgtatatcatgatgatatggagaactttgaggagatttcaaaactcaatgtaggagcagctgttgttgtaacaggtacactggttgcaacaccacaggcaaaacagccatttgagattcaggcgaagactgtaacagtagaaggtgcttccgcgccggattatccgcttcagaagaagcgtcacagctttgagtaccttcgtactattgcacatttaagaccgagaacaaacacattccaggcagtattccgtgttcgttccctgacggcatacgcacttcacaaatttttccaggagagaggattcgtgtatgtacatacaccgatcattacaggaagtgattgtgaaggagccggagagatgttccgcgtaacaacgatggacatggaaaatgtaccgaagacagaagatggtgcagtagattatacacaggatttcttcggaaaagagacaagccttaccgtaagcggacagttaaatgcagagacatacgcacaggcatttggaaatgtttatacatttggacctacattccgcgcagagaactccaacacaacaagacatgcggcagagttctggatgttagagcctgagatggcatttgcagatctggaggacgacatggaccttgcagaagacatgttaaaatatgtcatcaattatgtgatggaaaacgcaccggaagagatgaatttcttcaattcatttgtagacaaagggctgatcgatcgactgaccaacgttgcaacatctgaatttgcacgaatcacatacacagatgcaattgagattctaaagaagcacaacgataaattcgagttcaaagtatcatggggaatcgatcttcagacagagcacgagcgctatctgacagaggaagtatacaaacgcccagtatttgtaacagattatccgaaagatatcaaagcattctacatgaaacagaacccagatggaaagaccgtggcagcagtcgattgcctcgtaccaggaattggtgagatcatcggaggaagccagagagaagacgattacgagaagcttgcaacacgcatggaagaactcggaatgaagacagaagattacggattctacatggaccttagaaaatacggatccacaagacatgccggattcggacttggattcgagagatgcatcatgtatctgacaggaatgggcaatatccgtgacgtagtaccattcccaagaacagtaaataactgcgagttataa

SEQ ID NO: 10440 - protein, 479 aa, Dorea formicigenerans ATCC 27755
MASEDSIFKTVEGVFGMNLIEIRELYKNQEAYLDKEITVGGWVRSIRDSKAFGFIVINDGTFFTPLQVVYHDDMENFEEISKLNVGAAVVVTGTLVATPQAKQPFEIQAKTVTVEGASAPDYPLQKKRHSFEYLRTIAHLRPRTNTFQAVFRVRSLTAYALHKFFQERGFVYVHTPIITGSDCEGAGEMFRVTTMDMENVPKTEDGAVDYTQDFFGKETSLTVSGQLNAETYAQAFGNVYTFGPTFRAENSNTTRHAAEFWMLEPEMAFADLEDDMDLAEDMLKYVINYVMENAPEEMNFFNSFVDKGLIDRLTNVATSEFARITYTDAIEILKKHNDKFEFKVSWGIDLQTEHERYLTEEVYKRPVFVTDYPKDIKAFYMKQNPDGKTVAAVDCLVPGIGEIIGGSQREDDYEKLATRMEELGMKTEDYGFYMDLRKYGSTRHAGFGLGFERCIMYLTGMGNIRDVVPFPRTVNNCEL

SEQ ID NO: 10441 - DNA, 1386 bp, Anaerostipes caccae DSM 14662
  CDS (1)..(1386): transl_table=11
gtgcagatattaacagggagacagatttataaacagtataaagagtataaccagaaagaactgagtctgtgcggatgggtcaggagcaaccgggactccagggactttgggtttcttgtgatcaacgacggaactttttttgaaccaatccagatcgtatacggcaaagaactttcaaactttactgaggtgaaaaagctgtctgtcgggaccgcggtgattgtgaaaggaattctcacagagacaccggatgccagacagccgtttgagatacaggcagagtccgtagaagtggagggtgaatctccgtctgattatccgcttcagaagaaacggcattcgtttgaatatctgagaacgatcgcccatttaaggccgagggccaacacatttcaggcggtgtacagagtccgttcgctgattgcctatgctatccataagttttttatggagagagattttgtctatgtgcacacaccgatcatttcgggacaggactgtgagggcgcaggggaaatgtttcaggtgacaacgcttgacctggaggaactttcccagggtaaaaagctggattacagagaagatttttttgagagagaaaccagcctcacagtcagcggacagctgaatggagaagcctttgcccaggctttccgaaatatctatacgtttggaccgacatttcgggcggaggaaagcaacactaccaggcatgcggcagaattttggatgatcgaaccggagatggcttttgcagacctggaagataatatgctgcttgcggaacatatgatcaaatatatcattcaatatgttttggagcaggctccggaagaaatgggattttttaataaatttgtagacaaaggtctgctggaccgcctgcaccatgtggcggagtcagaatttgcaaggattacctacacagaggccatagatattttgaaagagcacaataatatgtttcaatatccggtatcctggggaactgatttacagacagagcatgagcggtatctgacggaaaaagtatttaagaaacctgtatttgtgacagactatccgaaggagattaaggcattttatatgaaacagaatccggatggaaagacggtggcggcagtggatcttttggtgccgggaatcggggagatcatcgggggaagccagagagaggatgatctggagaaacttcaaatgcggatgggcgagctggaaatgaatctgtctgactatgatttttatctggatttgagaaagtacggttccaccagacattcaggatttgggcttggatttgagagaatggtgatgtacttgacgggaatggcaaatatccgggatgtgataccgtttccgaggactgcgggaaaatgtgagttttaa

SEQ ID NO: 10442 - protein, 461 aa, Anaerostipes caccae DSM 14662
MQILTGRQIYKQYKEYNQKELSLCGWVRSNRDSRDFGFLVINDGTFFEPIQIVYGKELSNFTEVKKLSVGTAVIVKGILTETPDARQPFEIQAESVEVEGESPSDYPLQKKRHSFEYLRTIAHLRPRANTFQAVYRVRSLIAYAIHKFFMERDFVYVHTPIISGQDCEGAGEMFQVTTLDLEELSQGKKLDYREDFFERETSLTVSGQLNGEAFAQAFRNIYTFGPTFRAEESNTTRHAAEFWMIEPEMAFADLEDNMLLAEHMIKYIIQYVLEQAPEEMGFFNKFVDKGLLDRLHHVAESEFARITYTEAIDILKEHNNMFQYPVSWGTDLQTEHERYLTEKVFKKPVFVTDYPKEIKAFYMKQNPDGKTVAAVDLLVPGIGEIIGGSQREDDLEKLQMRMGELEMNLSDYDFYLDLRKYGSTRHSGFGLGFERMVMYLTGMANIRDVIPFPRTAGKCEF

SEQ ID NO: 10443 - DNA, 1386 bp, Clostridium sp. SS2/1
  CDS (1)..(1386): transl_table=11
atggaaatgatgacaggaagaacattatttcgaaattacaaagaatatgatcagaaagaagtagagatctgcggctgggtaaaaagcaatcgtggatcaaagaaattcggatttctggttattaatgatggtacattttttgaaccgattcaggttgtatatgatcaggagatgggcaactttgatacggtcagcaaattaaatgttggaacagctgtgatcgttaatggaactgtgatcgtgacaccagatgcgaaacagccatttgagattcatgcaaagagtgtagaagtcgagggagaatgcccatccgattatccattacagaaaaaacgtcatacattagaatatttaagatctatctctcatttaagaccaagaacgaatacgtttcaggcagtattcagagttcgttctcagattgcatatgcgatccataaattctttcaggaacgtgattttgtatacgtgcatacaccattgatcacaggacaggactgtgaaggtgctggagagatgttccaggtaacaacgatggatcttaacaagatcgctgaagaaggaaaagttgattatgaacaggatttctttaagaagccagtcagcttaaccgtcagcggacagcttgcaggagagacttttgcacaggcattccgcaatatttatacatttggaccaactttcagagctgaagattccaatacaacaagacatgcagcagaattctggatgatcgagccagagatcgcatttgcagatcttgaggataatatgatccttgcagagcagatgatcaagtatatcatcaattatgtgatggagcatgcacaggaagaattacagttctttaataaattcgtagataaaggattattagaacgtttgaaccatgtagtatcttctgattttggaagagttacttatacagaagcagtgaaattattagaagaacataatgatgaattcgaatataaagtatcttggggaattgatcttcagacagagcatgaacgttatctgacagagaagatctttaagaaaccagtgtttgtcacagactatccaaaagagatcaaagcattttatatgaagatgaatgaagacaacaagacggttgcagccatggatcttttagtgccagctattggagagatcatcgggggaagccagagagaagatgatcttgcgaaactggaagagagaatcacagaattaggtatgaaaccagaagattatgatttctatttagatcttcgcaaatatggttccacaagacacgcaggatttggtcttggatttgaacgtatggtaatgtacgcaacaggaattgctaatatcagagatgtcattccatatccaagaacagtaggaaaatgtcaatattaa

SEQ ID NO: 10444 - protein, 461 aa, Clostridium sp. SS2/1
MEMMTGRTLFRNYKEYDQKEVEICGWVKSNRGSKKFGFLVINDGTFFEPIQVVYDQEMGNFDTVSKLNVGTAVIVNGTVIVTPDAKQPFEIHAKSVEVEGECPSDYPLQKKRHTLEYLRSISHLRPRTNTFQAVFRVRSQIAYAIHKFFQERDFVYVHTPLITGQDCEGAGEMFQVTTMDLNKIAEEGKVDYEQDFFKKPVSLTVSGQLAGETFAQAFRNIYTFGPTFRAEDSNTTRHAAEFWMIEPEIAFADLEDNMILAEQMIKYIINYVMEHAQEELQFFNKFVDKGLLERLNHVVSSDFGRVTYTEAVKLLEEHNDEFEYKVSWGIDLQTEHERYLTEKIFKKPVFVTDYPKEIKAFYMKMNEDNKTVAAMDLLVPAIGEIIGGSQREDDLAKLEERITELGMKPEDYDFYLDLRKYGSTRHAGFGLGFERMVMYATGIANIRDVIPYPRTVGKCQY

SEQ ID NO: 10445 - DNA, 1392 bp, Clostridium botulinum NCTC 2916
  CDS (1)..(1392): transl_table=11
atggatataactttagtaaaatcactttatagagaaacagaaaaatacatggataaagaagttaaaattaatggatgggtaagaactgtaagagattctaaaaactttgcctttgtagaagtaaatgacggaagtttctttaaaaatgttcaagtaatacttgagtcttctttagaaaattttaaggaactatgtaaaatgccaataagtacatcagtagaagtagagggaataattcaacctacaccaaatgcaaagcaacctttcgaaataaaggctacaaaggtttcaatagaaggtaaatcaagcacagattatcctctacaaaagaaaagacatacctttgaatatttaagaactatagctcatttgagaccaagaagtaatgctttttcagcagtatttagagtacgttctttagcagcttatgcagtgcataaatttttccaagaaagaggatttgtttatacaaatactccaataataacaggtagtgactgcgaaggggcaggagaaatgttccaattaactactatggatttaaacaatataccaaaaactgaagaaggaaaaatagatttttcaaaggatttctttgggtcacctgcaaaccttacagtaagtggtcagctttcagccgaaacttttgctttagcttttagaaacgtatatacttttggaccaacttttagagctgaaaattcaaacactgcaagacacgcatcagaattttggatgatagaacctgaaatggcatttgcagaacttacagattatttagataatgcagaggatatggttaaatttgtaataaactatgtaatggaaaatgctccagaagaaatggcattcttcaatagtttcgtagataaaggtttatttgataggttagataatgttgtaaactctgacttcaagagaataacttatacagaagcagttgaattacttcaaaaatcaggagcaaaatttgattatgaagtagaatggggaatagaccttcaaactgaacatgaaagatatttaacagaacaaatatttaaaaaaccagtatttgtaacagattatccaaaggacataaaagctttctatatgagattaaatgatgatggaaaaactgttgcagcagcagatttacttgtaccaggagtaggagaaattataggtggaagccaaagggaagaaagattagatgtattagaaaaaagaatggaagaattaaacctaaataaagaagattactggtggtatttagaattaagaaaatatggagaaactaaacactcaggatatggtttaggtttcgaaagaatattaatgtacatcacaggaatgactaatataagagacgtaataccattcccaagaactccaggctcagctgaattctaa

SEQ ID NO: 10446 - protein, 463 aa, Clostridium botulinum NCTC 2916
MDITLVKSLYRETEKYMDKEVKINGWVRTVRDSKNFAFVEVNDGSFFKNVQVILESSLENFKELCKMPISTSVEVEGIIQPTPNAKQPFEIKATKVSIEGKSSTDYPLQKKRHTFEYLRTIAHLRPRSNAFSAVFRVRSLAAYAVHKFFQERGFVYTNTPIITGSDCEGAGEMFQLTTMDLNNIPKTEEGKIDFSKDFFGSPANLTVSGQLSAETFALAFRNVYTFGPTFRAENSNTARHASEFWMIEPEMAFAELTDYLDNAEDMVKFVINYVMENAPEEMAFFNSFVDKGLFDRLDNVVNSDFKRITYTEAVELLQKSGAKFDYEVEWGIDLQTEHERYLTEQIFKKPVFVTDYPKDIKAFYMRLNDDGKTVAAADLLVPGVGEIIGGSQREERLDVLEKRMEELNLNKEDYWWYLELRKYGETKHSGYGLGFERILMYITGMTNIRDVIPFPRTPGSAEF

SEQ ID NO: 10447 - DNA, 1392 bp, Clostridium botulinum C str. Eklund
  CDS (1)..(1392): transl_table=11
atggaaacagtattagttaaacaactttacagagaaacagaaaaatttgcagaaaaagaagttaaaataagtggatggataagaacacttagagcctcaaataaatttggatttatagaagttaatgacggaagtttctttaaaaatattcaagttgtatttggtgctgaacttgaaaactttaaggaaatatcaaaatatgctattagttcaagtgtaactatagagggagaattagtaataacagaaggagcaaaacaaccttttgaaattcacgctaaaaaagtagtattagaaggaaaatctgatgctgattatccacttcaaaagaaaagacatacttttgaatacttaagaagcatagctcatttaagaccaagaagtaacgctttttcagcagtatttagagtacgttcattagcagcatatgctatacataagtttttccaagatcaaggatttgtttatgttcatacaccaattatcacaggaagtgactgtgaaggtgcaggagaaatgtttagagtaacaaccttggatatggaaaatcttccaaaagatgaacaaggaaatgtagattacaaacaagacttttttggaaaacaatcaaatcttacagtaagtggacagcttgaagccgaaatatatgctttagcatttagaaatgtttacacatttggacctacatttagagcagaaaactctaatacagcaagacacgcatcagaattctggatgatagaacctgaaatggcttttgctgaacttaaggactatatggatgtagcagaagaaatggttaaatacataattaattatgtaagagataatgctccagaagaaatggaattctttaataaatttattgataaagggttattagaaagattagataatgttgtaaattctcattttgctagaataagctatacagaagctgtagaaatccttcaaaagtcaggagcggaatttgaatatccagttgaatggggaatagatcttcaaacagaacatgaaagatatttaacagaacaaatatacaaaaaaccagtattcgtaacagattatccaaaggacattaaagcattctacatgagaatgaatgatgataataaaactgttgcagcagccgatcttttagttccaggtatcggagaaataattggaggaagccaaagagaagaaagacttgatattcttgaagctagaatggctgaacttggacttgaaagagaagattactggtggtatttagaacttagaaaatatggagaaactaagcatgctggatacggtcttggatttgaaagaatgataatgtacttaacaggaatgagcaacataagagacgtattaccattcccaagaactccaggagtttctgaattttaa

SEQ ID NO: 10448 - protein, 463 aa, Clostridium botulinum C str. Eklund
METVLVKQLYRETEKFAEKEVKISGWIRTLRASNKFGFIEVNDGSFFKNIQVVFGAELENFKEISKYAISSSVTIEGELVITEGAKQPFEIHAKKVVLEGKSDADYPLQKKRHTFEYLRSIAHLRPRSNAFSAVFRVRSLAAYAIHKFFQDQGFVYVHTPIITGSDCEGAGEMFRVTTLDMENLPKDEQGNVDYKQDFFGKQSNLTVSGQLEAEIYALAFRNVYTFGPTFRAENSNTARHASEFWMIEPEMAFAELKDYMDVAEEMVKYIINYVRDNAPEEMEFFNKFIDKGLLERLDNVVNSHFARISYTEAVEILQKSGAEFEYPVEWGIDLQTEHERYLTEQIYKKPVFVTDYPKDIKAFYMRMNDDNKTVAAADLLVPGIGEIIGGSQREERLDILEARMAELGLEREDYWWYLELRKYGETKHAGYGLGFERMIMYLTGMSNIRDVLPFPRTPGVSEF

SEQ ID NO: 10449 - DNA, 1386 bp, Epulopiscium sp. 'N.t. morphotype B'
  CDS (1)..(1386): transl_table=11
atgactataatttctattagactgctataccaagatatatccaattttaaagaggtggaggttgcaggctggatccgttctgtacgtgattctaaaacatttggctttatcgacctaaacgatggcacattctttaagggggttcaagttgtattcgatgacactatgcccaactttaaggaaatagcaaagcttggagtcggcgcatctatcatagtaaaagggagcgtggttttaactcctgaccaaaaacaaccgtttgaaattaaagcttctgctattactatagaaggcgaatgtccaccagattatcctctacaaaagaagcgccactcatttgagttcttgcgagagattgcttatctaagaccgcgcaccaacacttttgcggcagtgtttagggttcgttctcttgttgcttatgccatacacaaatttttccaagacagacatttcgtatatgtacacactccaataatcactgccaatgattgtgaaggcgccggagagatgtttcgcgttaccacactctcggcaacagaaccaaaattgctcaaaaatggcgaagtcgactttagcgaagatttctttggcaaaatggcgtcacttactgttagcggacaattgagtgcagaaacctttgcccttgctttcagagatgtatacacatttggacctacctttagagctgaaaattctaatactcctaggcatgctgccgagttctggatgattgaaccagaaattgcttttgctgacctcgaagataatatgcatctagccgaagatatgcttaaatttgtaattcagtatgtgcttgataatgctccagaggaaatggccttcttcaatagcttcgtcgacaaaggcatcaaagatagattaatatccattctcaagtctaatttcggccaagtcacttacaccgacgctatcgatatattgcaaaaatctggtcaaaagtttgaatataaagtagaatggggagtggatctacaaacagaacacgaacgatatttaaccgaaaaacactttaagaagcctgtattcgtcatcgattatcctaaagatatcaaagcattctatatgcgattaaacgctgataacaaaaccgttgctgcaatggatctgctagttcctggcgttggagagcttattggaggcagtcaaagagaagagcgactagatgtccttaagctacgaatgaaagaatgccatctcaacgaagaagactacttctggtatctaaacctcagaaaatttggtggcactagacattctggctttggccttggcttcgagcgacttgttatgtaccttactggcatgactaatatcagagatgtcatcccatatcctagaacaaccggttctgcagaattttaa

SEQ ID NO: 10450 - protein, 461 aa, Epulopiscium sp. 'N.t. morphotype B'
MTIISIRLLYQDISNFKEVEVAGWIRSVRDSKTFGFIDLNDGTFFKGVQVVFDDTMPNFKEIAKLGVGASIIVKGSVVLTPDQKQPFEIKASAITIEGECPPDYPLQKKRHSFEFLREIAYLRPRTNTFAAVFRVRSLVAYAIHKFFQDRHFVYVHTPIITANDCEGAGEMFRVTTLSATEPKLLKNGEVDFSEDFFGKMASLTVSGQLSAETFALAFRDVYTFGPTFRAENSNTPRHAAEFWMIEPEIAFADLEDNMHLAEDMLKFVIQYVLDNAPEEMAFFNSFVDKGIKDRLISILKSNFGQVTYTDAIDILQKSGQKFEYKVEWGVDLQTEHERYLTEKHFKKPVFVIDYPKDIKAFYMRLNADNKTVAAMDLLVPGVGELIGGSQREERLDVLKLRMKECHLNEEDYFWYLNLRKFGGTRHSGFGLGFERLVMYLTGMTNIRDVIPYPRTTGSAEF

SEQ ID NO: 10451 - DNA, 1485 bp, Gemmata obscuriglobus UQM 2246
  CDS (1)..(1485): transl_table=11
gtggaccgccgcaaccgcccggcgctgaacgccggggtgcccgacggctacactaccgacagcagttccgaagcagggagcaaatctgtggacaagatcagcgtttccgacgcccgccgggccgaagcggtcggccggcacgtccggcttcagggctgggtgcgcacccggcgcgactcgaagggcgggttcagcttcatcgaactgaacgacggctcgtgccagggcaacgtgcaggtggtggcccccggcgaactcgccaactacgagtctgtggtgaagcacctccacaccggggccagcgtgcgcatcgacggcgaggtgaaggcgtcgcccgccaaggggcaggccacggaggtgctcgcggcgagcgtggagctgatcggcgacgccgatgtcaacacctacccgctccagaagaaggggcacagtttcgagtttctgcggggcatcgcgcacctgcggccccgcaccaacacgctcggggccgtcgcccgcgtgcggcaccaggtgtcgatctcgatccaccagttcttccacgagcgcgggttctactacgtccacacgccggtcatcaccgccagcgactgcgagggcgccggcgcgatgttccgcgtcagcaccatcgaccccgaggcgccgccgaaggccgaagggaaggtggactacaagcaggacttcttcggcaagccggcgtacctgacggtgagcgggcaacttcagggcgaggcgttcgcgtgcgcgctggggaagatctacaccttcggccccaccttccgggcggagaactcgaacaccccgcggcacctcgccgagttctggatgatcgagcccgagatggccttctacgacctcaccgacaacatggacctcgcggaggcgttcctgaagcggatcatctccgacgccatgacgtactgccttgaagacctcaagttcttcgcggagaagttggagaacaacaaggggctgttcgagaagctggagaacgtgctcaacaacgggttcaagcgggtgtcgtacacggagggcgtggacatcctgctgaagagcggcaagacgtgggagtacccggtggcgtggggcgtggacctccagagcgagcacgagcgctacttggccgagcagcacttcaagtgcccggtgatcctgtacgactacccgcgcacgctgaagccgttctacatgaaggtgaacgacgacgggaagaccgtgcgcgcgatggacgtgctggtgcccggggtgggggagatcatcggcggcagccagcgcgaggagcgcctggacgtgctcgaatcgcggatgcgggagcaggggctgccgccggagggatacgagtggtatctggacctgcgccgctacggcacggttccccactcggggttcgggctggggctcgagcgcacgatcctgttcctgagcgggatggcgaacatccgcgacgtgatcccgttcccacgcacccccggcaacgcggagtattaa

SEQ ID NO: 10452 - protein, 494 aa, Gemmata obscuriglobus UQM 2246
MDRRNRPALNAGVPDGYTTDSSSEAGSKSVDKISVSDARRAEAVGRHVRLQGWVRTRRDSKGGFSFIELNDGSCQGNVQVVAPGELANYESVVKHLHTGASVRIDGEVKASPAKGQATEVLAASVELIGDADVNTYPLQKKGHSFEFLRGIAHLRPRTNTLGAVARVRHQVSISIHQFFHERGFYYVHTPVITASDCEGAGAMFRVSTIDPEAPPKAEGKVDYKQDFFGKPAYLTVSGQLQGEAFACALGKIYTFGPTFRAENSNTPRHLAEFWMIEPEMAFYDLTDNMDLAEAFLKRIISDAMTYCLEDLKFFAEKLENNKGLFEKLENVLNNGFKRVSYTEGVDILLKSGKTWEYPVAWGVDLQSEHERYLAEQHFKCPVILYDYPRTLKPFYMKVNDDGKTVRAMDVLVPGVGEIIGGSQREERLDVLESRMREQGLPPEGYEWYLDLRRYGTVPHSGFGLGLERTILFLSGMANIRDVIPFPRTPGNAEY

SEQ ID NO: 10453 - DNA, 1392 bp, Anaerofustis stercorihominis DSM 17244
  CDS (1)..(1392): transl_table=11
gtgaaaataaatacaaagcatttatttgaaaattttaaaagctatgaaaataaagaaataactataaacggatggataaaaacaatacgttcatccaatcaattcgggtttattgaaataaatgacggtactaattttaaaaatgtacaagtcgttgtagaaaaagacagtatagataattatgaagaagtaactaaatttcatgcttccagcggtatagaagtaaacgggattttggttttaacgccggatatgaaacaggattttgaaataaaggctacaaaagtaagtcttttagccgatagcgacggctcgtatccgcttcaaaagaagagacattcctttgaatatctaagagaaatcgcgcatttaagacctaggggaaatagtttcaatgctgttttcagactacgttctttgatttcctttgcaatccatgaattcttccaaacaagagattttgtatatgtgaatacacctcttataaccgcaagtgactgcgaaggtgcgggagagatgtttcaggtaacgactttggacatgaaaaatccgcctttaaatgaagaagatagtattgattatacaaaagactttttcggtgctgagacttatttgaccgtttcgggtcagcttcaggcggaagcttatgcgcttgcctttaaaaatgtttatacattcggacctactttcagagcggaaaattcgaatacaccgcgtcacgcggcggaattttggatggtcgagccggaaatcgcctttgccgatttgaatgacgatatggatcttgcggaagatttaatgaaatatgtgataaattatgcacttgaaaaagcgggaaatgaaatagaattttttaataaatttgtggataaagggcttgttgaaaggctaaagggtatagtaaattccacatttaaaaggatttcttacaccgaagcgatagaaatacttgaaaaagccgacgttgaatttgaatatccggtaaaatgggggcttgacctccaaacggaacatgaaaggtatttgacggagaaacattttggtgcacccgtgttcgtgacggattatcctaaggaaattaaagctttttatatgaggatgaacgatgataataagactgttgccgcggtggatttacttgttcccggtgtgggagaaataataggcggcagtcaaagagaagaaagatatgatgttttggtttcaagaatggaagagctcggtatgaacagtggcagcatggactggtacttggatcttagaaagtacggaggcgtaaaacatgcagggttcggtcttggatttgaaagacttataatgtatttgtcgggaatgaaaaatataagagatgtcattcctttcccaagaacagtaaataatgcaaaattttag

SEQ ID NO: 10454 - protein, 463 aa, Anaerofustis stercorihominis DSM 17244
MKINTKHLFENFKSYENKEITINGWIKTIRSSNQFGFIEINDGTNFKNVQVVVEKDSIDNYEEVTKFHASSGIEVNGILVLTPDMKQDFEIKATKVSLLADSDGSYPLQKKRHSFEYLREIAHLRPRGNSFNAVFRLRSLISFAIHEFFQTRDFVYVNTPLITASDCEGAGEMFQVTTLDMKNPPLNEEDSIDYTKDFFGAETYLTVSGQLQAEAYALAFKNVYTFGPTFRAENSNTPRHAAEFWMVEPEIAFADLNDDMDLAEDLMKYVINYALEKAGNEIEFFNKFVDKGLVERLKGIVNSTFKRISYTEAIEILEKADVEFEYPVKWGLDLQTEHERYLTEKHFGAPVFVTDYPKEIKAFYMRMNDDNKTVAAVDLLVPGVGEIIGGSQREERYDVLVSRMEELGMNSGSMDWYLDLRKYGGVKHAGFGLGFERLIMYLSGMKNIRDVIPFPRTVNNAKF

SEQ ID NO: 10455 - DNA, 1395 bp, Clostridium butyricum 5521
  CDS (1)..(1395): transl_table=11
atggcaaaatcaactttaattagaagcctttatagaaatgctgatgatttcttatcaaaggatgtaacaatatcaggatggatcagaactttaagagcatctaatgcttttggattcatagaaataaatgatggttcattttttaaaaacattcaaatagtatttgatgaaaagttagacaattttaaggaaatttcaaaattacctataagttcgtctcttactataactggaactttagttgctacacctgatgctaagcaaccatttgaagtacaggcaaaagaaataattatagaaggaatgtcaaactcagactatcctctacaaaagaaaagacacacttttgaatatttaagaagcattgctcatttaagaccaagaagtaatgcattctctgcaactttcagagttcgttctgttgctgcttatgcaatacataagttcttccaagaacaaaacttcgtatatacacacactccaatcataactggtagtgactgtgaaggtgctggagaaatgttcagagttacaactttagatccaaaaactcctgaattaacaaaagaaggtaacgttgattacactaaagatttctttggaaaagaaactaatcttactgtttctggtcaattaaatgctgaatgctttgctttagcatttagaaatatatatacattcggaccaacattcagagctgaaaattctaacactacaagacacgctgctgaattctggatgatagaacctgaaatagcttttgctgacctacaagatgatatggaacttgcagaagcaatgcttaagtatgtaatccaatatgtaatagatgaatgtccagaagaaatgcaattcttcaactcatttgttgacaaaggattattagaaagattaaatcacgtagtttcttctgactttgctagagtaacttatacagaagctgttgaaatattagaaaaatgcggaaaagaatttgattatcctgtatcttggggaatcgacttacaaacagaacatgaaagatatcttactgaagaacacttcaagaaacctctatttgtaactgattatccaaaagatattaaagcattctatatgagaatgaatgatgataacaagactgttgctgcaacagatcttttagttcctggaatcggtgaaatcatcggaggaagtcaaagagaagaaagacttgatgttttagaagctagaatggctgaattaggtcttgctaaagaagattactggtggtacttagaattaagaaaatacggagaaactaaacatgctggattcggtttaggattcgaaagattaattatgtacattactggtatgactaacataagagacgtaataccattccctagaactcctggaacttctgaattctag

SEQ ID NO: 10456 - protein, 464 aa, Clostridium butyricum 5521
MAKSTLIRSLYRNADDFLSKDVTISGWIRTLRASNAFGFIEINDGSFFKNIQIVFDEKLDNFKEISKLPISSSLTITGTLVATPDAKQPFEVQAKEIIIEGMSNSDYPLQKKRHTFEYLRSIAHLRPRSNAFSATFRVRSVAAYAIHKFFQEQNFVYTHTPIITGSDCEGAGEMFRVTTLDPKTPELTKEGNVDYTKDFFGKETNLTVSGQLNAECFALAFRNIYTFGPTFRAENSNTTRHAAEFWMIEPEIAFADLQDDMELAEAMLKYVIQYVIDECPEEMQFFNSFVDKGLLERLNHVVSSDFARVTYTEAVEILEKCGKEFDYPVSWGIDLQTEHERYLTEEHFKKPLFVTDYPKDIKAFYMRMNDDNKTVAATDLLVPGIGEIIGGSQREERLDVLEARMAELGLAKEDYWWYLELRKYGETKHAGFGLGFERLIMYITGMTNIRDVIPFPRTPGTSEF

SEQ ID NO: 10457 - DNA, 1392 bp, Clostridium sporogenes ATCC 15579
  CDS (1)..(1392): transl_table=11
atggatataactttagtaaaatcactttacagagaaactgaaaaatacatggataaagaagttaaaattaatggatgggtaagaacagtaagagattctaaaaattttgcctttgtagaagtaaatgacggaagtttctttaaaaatgttcaagtaatacttgaatcttctttagaaaactttaaagaactatgtaaaatgccaataagtacatcagtagaagtagagggaatagttcaacctacaccaaatgcaaagcaaccttttgaaataaaggctacaagagtttccatagaaggtaaatcaagcacagattatcctctacaaaagaaaagacatacttttgaatatttaagaactatagctcatttaagaccaagaagtaatgctttctcagcagtatttagagtgcgttctttagcagcttatgcagtgcataaattttttcaagaaagaggatttgtttatacaaatactccaataataacaggtagtgactgcgaaggcgcaggagaaatgttccaattaactactatggatttaaacaacataccaaaaactgaagaaggaaaaatagatttttcaaaggatttctttggatcacctgcaaaccttacagtaagtggtcagctttcagcagaaacttttgctttagcttttagaaacgtatatacttttggaccaacttttagagcagaaaactcaaatactgcaagacacgcatcagaattttggatgatagaacctgagatggcctttgcagaacttacagattacttagataatgcagaagatatggttaagtttgtaataaactatgtaatggaaaatgctccagaagaaatggcatttttcaatagtttcgtagataaaggcttatttgataggttagataacgttataaactctgatttcaagagaataacttatacagaagcagtagaattacttcaaaaatcaggagcaaaatttgattatccagtagaatggggaatagaccttcaaactgaacatgaaagatatttaacagaacaaatatttaaaaaaccagtatttgtaacagattatccaaaggatataaaagctttctatatgagattaaatgatgatggaaaaactgttgcagcagcggacttacttgtaccaggagtaggagaaataataggtggaagccaaagagaagaaagactagatgtattagaaaaaagaatggaagaattaaacctaaataaagaagactactggtggtatttagagctaagaaaatacggagaaactaaacattcaggatacggtttaggctttgaaagaatattaatgtatattacaggaatgactaatataagagacgtaataccattcccaagaactccaggatcagctgaattttaa

SEQ ID NO: 10458 - protein, 463 aa, Clostridium sporogenes ATCC 15579
MDITLVKSLYRETEKYMDKEVKINGWVRTVRDSKNFAFVEVNDGSFFKNVQVILESSLENFKELCKMPISTSVEVEGIVQPTPNAKQPFEIKATRVSIEGKSSTDYPLQKKRHTFEYLRTIAHLRPRSNAFSAVFRVRSLAAYAVHKFFQERGFVYTNTPIITGSDCEGAGEMFQLTTMDLNNIPKTEEGKIDFSKDFFGSPANLTVSGQLSAETFALAFRNVYTFGPTFRAENSNTARHASEFWMIEPEMAFAELTDYLDNAEDMVKFVINYVMENAPEEMAFFNSFVDKGLFDRLDNVINSDFKRITYTEAVELLQKSGAKFDYPVEWGIDLQTEHERYLTEQIFKKPVFVTDYPKDIKAFYMRLNDDGKTVAAADLLVPGVGEIIGGSQREERLDVLEKRMEELNLNKEDYWWYLELRKYGETKHSGYGLGFERILMYITGMTNIRDVIPFPRTPGSAEF

SEQ ID NO: 10459 - DNA, 1389 bp, Borrelia burgdorferi 80a
  CDS (1)..(1389): transl_table=11
atgtttgcaagcattaaagatattttaaaaaacccaattttaaacagcaatgttacaataaacggctggattagaaccaaaagaagtaatggcaaaattggatttatagaaattaatgatggttcaacgcttaaaggaattcaagctgtaataaacgaagaagaaaatcaatttagtgaaaaagatctaaaaaaattaacaacaggaacaagtatatcgttaacgggcctattagtagaaagtcctgcaaaagggcaaaattatgaaataaaaacacatagttttaatgtaatcggggaaacagacccagaaacttacccattgcaaaagaaaagacattcttttgaatttttaagagaaataccccatttaagaatacgaaccaacacatttggagctattgctagggtaagaaataaaatttcatacaaaattcatgaatatttccaaaaaaatggttttttttatattaatacaccaataattacatcaaatgatggggaaggtgctggagaaatgtttagagtttccacactaaaatttaataaactaaacaatgcacctagcaatattgattttaaagacgatttttttggaaaagaagcttttctctctgtcactggccaattgcatggggaagcatatgcaatggctttatctaaaatatatacattcggaccaacatttagagcagaaaattctaacaccacacgccacgcttcagaattttggatgatagaaccagaaatggctttttataagcttaacgacaatattgccctagcagaagatctcttgaaatatcttttaagttcaattttaaacgaatgctcacaagatatggattttttagaaaattacattgaaaaaggtttaattaaaaaattagaaaatgtaataaattcaaattttgaggttattacctataccaaagcaattgaaattcttgaaaactcaaaaaaaaattttgaaataaaaccttgctggggaatagatttgcaaacagatcacgaaagatacctaacagaagagacttttaaaaaaccggtagtggtcattgattatccaaaaaatttcaaagcattttacatgaaagcaaataaagacaataaaactgttaaaggaatggacatacttgttccaaaaattggagagattatagggggaagcgaaagagaagatgaccttcaaaaattagaaaatagaataaaagaattaaacttaaacattgaacatctaaactggtatcttgatctaagaagatttggctcggctcctcattctggctttggacttggacttgaaagattggtgcaatactcaacaggaatatctaatataagagattcaataccattcccaaggactcctaaaaatctttatttttaa

SEQ ID NO: 10460 - protein, 462 aa, Borrelia burgdorferi 80a
MFASIKDILKNPILNSNVTINGWIRTKRSNGKIGFIEINDGSTLKGIQAVINEEENQFSEKDLKKLTTGTSISLTGLLVESPAKGQNYEIKTHSFNVIGETDPETYPLQKKRHSFEFLREIPHLRIRTNTFGAIARVRNKISYKIHEYFQKNGFFYINTPIITSNDGEGAGEMFRVSTLKFNKLNNAPSNIDFKDDFFGKEAFLSVTGQLHGEAYAMALSKIYTFGPTFRAENSNTTRHASEFWMIEPEMAFYKLNDNIALAEDLLKYLLSSILNECSQDMDFLENYIEKGLIKKLENVINSNFEVITYTKAIEILENSKKNFEIKPCWGIDLQTDHERYLTEETFKKPVVVIDYPKNFKAFYMKANKDNKTVKGMDILVPKIGEIIGGSEREDDLQKLENRIKELNLNIEHLNWYLDLRRFGSAPHSGFGLGLERLVQYSTGISNIRDSIPFPRTPKNLYF

SEQ ID NO: 10461 - DNA, 1392 bp, Clostridium nexile DSM 1787
  CDS (1)..(1392): transl_table=11
atggaattagtaacagtcaaagagctttataagcatcgggaacaatatttagacaaagaaattacagtgggcggctggattcgcagtatcagagattcaaagacatttggatttattgttgtaaatgacggaacattttttgagacactgcaggttgtttaccatgatacaatggagaattttgcagatatatctaagttaaatgtaggtgcggcaattattgtaaaaggaacacttgtagcaacaccgcaggcaaaacagccgtttgagattcaggcaacagaagttgtggtagaaggagcgtcagcaccggattatccgcttcagaaaaagcgtcacagctttgaatatttaagaacaatctcacatttgcgtccgagaacaaacacgtttcaggcagtatttagagtacgttctttgatcgcatatgcaattcatcagttctttcaggaaagagggtttgtgtatgtacacacaccaatcattacaggaagcgactgtgaaggtgccggagagatgttccgtgtgacaacattggatatggagaatattccgaaaaacgaagatggaactgtagattacagtcaggatttctttaataaagagacaagccttacagtgagcggacagttgaatggtgagacatatgcgcaggcattccgcaatatctatacatttggtccgacattccgtgcagagaattcgaacactacacgtcatgcggcagaattttggatggtagaaccggagattgcatttgcagatttagacgataatatgatgcttgcagaggcgatgttaaaatacatcatcaactatgtattagagaacgcaccggaagagatgaatttcttcaactcatttgtagataagggccttttggatcgtctgcacaatgtggcaagctctgattttgcacgtgtgacctatacagaggcaattgaaatattagaaaagaacaatgacaaatttgattataaagtatcgtggggagcagatttacagacagaacatgagcgttaccttacagaagaggtttacaaacgtcctgtgtttgtaacagattatccgaaagatatcaaggcattttacatgaagatgaacgatgacaataagacagtggctgctgttgactgtcttgttcctggaatcggtgagatcatcggcggaagtcagagagaagataactacgaaaaactcttggcgcgtatgaatgagatgggcttgaaaccggaagagtaccagttctatctggatcttagaaaatatggttctacaagacatgccggattcggacttggatttgaacgctgtgtaatgtacttaacaggaatgtcgaacatcagagacgttttaccattcccaagaacagtgaataactgcgaattataa

SEQ ID NO: 10462 - protein, 463 aa, Clostridium nexile DSM 1787
MELVTVKELYKHREQYLDKEITVGGWIRSIRDSKTFGFIVVNDGTFFETLQVVYHDTMENFADISKLNVGAAIIVKGTLVATPQAKQPFEIQATEVVVEGASAPDYPLQKKRHSFEYLRTISHLRPRTNTFQAVFRVRSLIAYAIHQFFQERGFVYVHTPIITGSDCEGAGEMFRVTTLDMENIPKNEDGTVDYSQDFFNKETSLTVSGQLNGETYAQAFRNIYTFGPTFRAENSNTTRHAAEFWMVEPEIAFADLDDNMMLAEAMLKYIINYVLENAPEEMNFFNSFVDKGLLDRLHNVASSDFARVTYTEAIEILEKNNDKFDYKVSWGADLQTEHERYLTEEVYKRPVFVTDYPKDIKAFYMKMNDDNKTVAAVDCLVPGIGEIIGGSQREDNYEKLLARMNEMGLKPEEYQFYLDLRKYGSTRHAGFGLGFERCVMYLTGMSNIRDVLPFPRTVNNCEL

SEQ ID NO: 10463 - DNA, 1389 bp, Anaerococcus hydrogenalis DSM 7454
  CDS (1)..(1389): transl_table=11
atgaaattatcagagattaaaaaagatgttgaaaaatacattgaccaagaaattacagcccaaggctggataagacaagcaagatttacaaaaaatgttggttttatcgaattaaatgatggaacaatttttaaaaatttacaagttgttataggaaaagacttagaaaactttgaaagcatacaaaaagaacacttgtcagcttctttaaaggttattggtaagcttgtcaaaactaataatgcaaagcaagcctatgagcttcaagcaaataaagtagaagttttgggtcatagtgatgagaattttccaatccaaaaacaaagacaatctcttgaatatatgagaactattcctcatttaagagttagaactaatacttatagggctgtttttagattaagatcaaaacttgcctatgcccttcataaattcttccaagaaagagaatttatttacttaaatgcgcctttaattactgcttcagatactgaaggtgctggggaaatgttccaagttacaactcaaaacttagaaaaaccaaatcttgataaggatggtaaggttaattattcaaaagatttctttggaaaaaaatcatatctaactgtatcaggacaacttgaagctgaagattatgctcttgctctttcaaatatctatacttttggtccaacatttagggctgaagaatcaaatacaccaagacatgctgcagaattttggatgcttgaacctgaacttgcctttgcagattataatgtatgtatggatgtggctgaagaaatgatgaaatatatgattgaatatgttttagaaaattgtaaggatgagattgaatttttcaatgaaagaatagatgatactttgatcgaaagacttacaaaggttaaaaatgctaaatttgcaagaattacctatacagatgcaattgaaaaattaaaaaatgctgatgttgattttgaatatccagtagaatggggaattgaccttcaaactgaacatgaaagatatttatcagaaaaaatagttgatggtcctgtttttgtaacagattatccaaaagatattaaggcgttttatatgagaagaaataatgacggaaaaactgtagctgcctttgatatgcttgttcctgcagtaggtgagcttataggtggaagtcaaagggaagaaagatatgacgagcttgtaaaatctatggaagataatggattgaaaattgatgaatatcaaaattacctagatttaagaaaatatggaacagttgttcattcaggatatggacttggctttgaaagggctgtaatgtatcttacaggaatgaaaaatatccgtgacgttataccttacccaagaacagttaattcttttgcatcaaaaaattaa

SEQ ID NO: 10464 - protein, 462 aa, Anaerococcus hydrogenalis DSM 7454
MKLSEIKKDVEKYIDQEITAQGWIRQARFTKNVGFIELNDGTIFKNLQVVIGKDLENFESIQKEHLSASLKVIGKLVKTNNAKQAYELQANKVEVLGHSDENFPIQKQRQSLEYMRTIPHLRVRTNTYRAVFRLRSKLAYALHKFFQEREFIYLNAPLITASDTEGAGEMFQVTTQNLEKPNLDKDGKVNYSKDFFGKKSYLTVSGQLEAEDYALALSNIYTFGPTFRAEESNTPRHAAEFWMLEPELAFADYNVCMDVAEEMMKYMIEYVLENCKDEIEFFNERIDDTLIERLTKVKNAKFARITYTDAIEKLKNADVDFEYPVEWGIDLQTEHERYLSEKIVDGPVFVTDYPKDIKAFYMRRNNDGKTVAAFDMLVPAVGELIGGSQREERYDELVKSMEDNGLKIDEYQNYLDLRKYGTVVHSGYGLGFERAVMYLTGMKNIRDVIPYPRTVNSFASKN

SEQ ID NO: 10465 - DNA, 1401 bp, Salmonella enterica subsp. enterica serovar Typhi str. M223
  CDS (1)..(1401): transl_table=11
atgagcgttgtgcctgtagccgacgtactccagggccgcgtagccgttgaccaagaagtcaccgtgcgcggatgggtgcgtacccgccgagattcaaaagctggcatctccttcctcgccgtttatgacggctcctgctttgatcctgtacaggctgtcattaataattctctgcccaattataatgaagaagtattacacctgacgacaggctgctccgtggtagtaacaggtaaggttgtcgcgtcgccgggacaggggcaaagtttcgaaatccaggccacgaaagtagaggtcgcaggctgggtggaaaatccggatacctacccgatggcggcaaaacgccatagcattgagtatctgcgtgaagtcgcgcatctgcgcccgcgcaccaacctgattggcgcggtagcgcgcgtccgccatactctggcgcaggcgctgcatcgcttcttcgatgagcagggtttcttttgggtctctaccccgctgattaccgcttccgataccgaaggcgctggcgaaatgttccgcgtctcaacgttggatctggaaaacctgccgcgtaacgaccagggcagagtagattttgacaaagacttttttggcaaagaatcattcctgaccgtctccggccagctcaatggtgaaacctatgcctgtgcgctgtccaaaatctatacttttgggccgaccttccgcgcggaaaattccaacaccagccgccacctggcggagttctggatgctggagccggaagtggcgttcgccgatctggaagacaacgcccgtctggcggaagccatgctgaaatatgtcttcaaggcggttctggaagagcgtgcggatgacatgaagttctttgccgaacgcgtggataaagacgctatcgctcgtctggagcgttttgtctccaccgactttgctcaggtggattacaccgatgcggtcgccattctggaacgctgtggtaagacatttgaaaacccggtgttctggggcgtcgacctttcttccgaacacgaacgttatctggcggaagagcatttcaaagcgccggtagtggtgaaaaactatccgaaagaaattaaagcgttttacatgcgccttaacgaagatggcaaaaccgtggcggccatggatgtgctggcgccgggaatcggcgaaatcatcggtggttcccagcgtgaagagcgtctggatgtgctggatgcccgtatggccgaaatggggctgaataaagaggattactggtggtatcgcgacttgcgtcgctacggtactgtaccgcattccggctttggcctgggctttgaacgccttatcgcttacgtcacgggtgtgcaaaacgtgcgcgatgttattccgttcccacggaccccacgcaacgccagcttctga

SEQ ID NO: 10466 - protein, 466 aa, Salmonella enterica subsp. enterica serovar Typhi str. M223
MSVVPVADVLQGRVAVDQEVTVRGWVRTRRDSKAGISFLAVYDGSCFDPVQAVINNSLPNYNEEVLHLTTGCSVVVTGKVVASPGQGQSFEIQATKVEVAGWVENPDTYPMAAKRHSIEYLREVAHLRPRTNLIGAVARVRHTLAQALHRFFDEQGFFWVSTPLITASDTEGAGEMFRVSTLDLENLPRNDQGRVDFDKDFFGKESFLTVSGQLNGETYACALSKIYTFGPTFRAENSNTSRHLAEFWMLEPEVAFADLEDNARLAEAMLKYVFKAVLEERADDMKFFAERVDKDAIARLERFVSTDFAQVDYTDAVAILERCGKTFENPVFWGVDLSSEHERYLAEEHFKAPVVVKNYPKEIKAFYMRLNEDGKTVAAMDVLAPGIGEIIGGSQREERLDVLDARMAEMGLNKEDYWWYRDLRRYGTVPHSGFGLGFERLIAYVTGVQNVRDVIPFPRTPRNASF

SEQ ID NO: 10467 - DNA, 1389 bp, Borrelia afzelii ACA-1
  CDS (1)..(1389): transl_table=11
atgtttgcaagcattaaagatattttagaaaatccaattttaaacagcaatgttacaataaatggctggattagaactaaaaggagtaatggtaagattggatttatagaaattaatgatggctcaacgcttaaaggaattcaagccgtaataaatgaagaagaaaatcaatttgacgagaaagatctaaaaaacctaacaacaggagcaagcatatcgttaacgggcctattagtggaaagtcctgcaaaagggcaaaattatgaaataaaaacatgtggttttaatgtaatcggagaagcagatccaaaaacttacccattgcaaaaaaaaagacatacttttgaatttttaagagaaatcccccatttaagaatacgaactaatacatttggagctgtagccagggtaagaaataaaatttcatacaaaattcatgaatatttccaaaaaaatggttttttttatattaatacaccaataattacatcaaatgatggggaaggtgctggagaaatgtttagggtttccacactgaaatttaataaaccaaacaatgaccttggtaatattgattttaaagatgatttttttggcaaagaagcttttctttctgtcactggtcaattgcatggagaagcatatgcaatggctttatctaaaatatatacattcggcccaacatttcgagcagaaaattctaacaccacacgccatgcttcagagttttggatgatagaaccagaaatggctttttacaagcttaacgacaatattaccctagcagaagatctcttaaaatatcttttaagttcaattttaaacgaatgctcacaagatatggattttttagaaaattacattgaaaaaggactaattaaaaaactagaaaacgtaataaattcaaattttgaggttattacctacactaaagcaattgaaattcttgaaagctcaaaaaaaaattttgaaataaaaccttattggggaatagatttgcaaacagagcacgagagatttttaacagaagagacttttaaaaaaccagtagtggtcattgattatccaaaaaatttcaaagcattttacatgaaaataaacaaagacaataaaactgtcaaaggaatggatgtacttgttcccaaaattggagagattatagggggaagcgaaagagaggataacttacaaaaattagaaaatagaataaaagaattaaatttaaacattgagcatctaaactggtatcttgatctaagaagatttggttccactcctcattccggttttggacttggacttgaaagatttgtgcaatactcaacaggaatatctaatataagagattcaataccatttccaagaactcctaaaaatctttatttttaa

SEQ ID NO: 10468 - protein, 462 aa, Borrelia afzelii ACA-1
MFASIKDILENPILNSNVTINGWIRTKRSNGKIGFIEINDGSTLKGIQAVINEEENQFDEKDLKNLTTGASISLTGLLVESPAKGQNYEIKTCGFNVIGEADPKTYPLQKKRHTFEFLREIPHLRIRTNTFGAVARVRNKISYKIHEYFQKNGFFYINTPIITSNDGEGAGEMFRVSTLKFNKPNNDLGNIDFKDDFFGKEAFLSVTGQLHGEAYAMALSKIYTFGPTFRAENSNTTRHASEFWMIEPEMAFYKLNDNITLAEDLLKYLLSSILNECSQDMDFLENYIEKGLIKKLENVINSNFEVITYTKAIEILESSKKNFEIKPYWGIDLQTEHERFLTEETFKKPVVVIDYPKNFKAFYMKINKDNKTVKGMDVLVPKIGEIIGGSEREDNLQKLENRIKELNLNIEHLNWYLDLRRFGSTPHSGFGLGLERFVQYSTGISNIRDSIPFPRTPKNLYF

SEQ ID NO: 10469 - DNA, 1389 bp, Borrelia burgdorferi 156a
  CDS (1)..(1389): transl_table=11
atgtttgcaagcattaaagatattttaaaaaacccaattttaaatagcaatgttacaataaacggctggattagaaccaaaagaagtaatggcaaaattggatttatagaaattaatgatggttcaacgcttaaaggaattcaagctgtaataaacgaagaagaaaatcaatttagtgaaaaagatctaaaaaaattaacaacaggaacaagtatatcgttaacgggcctattagtagaaagtcctgcaaaagggcaaaattatgaaataaaaacacatagttttaatgtaattggagaaacagacccagaaatttacccattgcaaaagaaaagacattcttttgaatttctaagagaaataccccatttaagaatacgaaccaacacatttggagctattgctagggtaagaaacaaaatttcatacaaaattcatgaatatttccaaaaaaatggttttttttatattaatacaccaataattacatcaaatgatggggaaggtgctggagaaatgtttagggtttccacactaaaatttaataaactaaacaatgcacctagcaatattgattttaaagacgatttttttggaaaagaagcttttctctctgtcactggtcaattgcatggggaagcatatgcaatggctttatctaaaatatatacattcggaccaacatttagagcagaaaattctaacaccacacgccacgcttcagaattttggatgatagaaccagaaatggctttttataagcttaacgacaatattgccctagcagaagatctcttgaaatatcttttaagttcaattttaaacgaatgctcacaagatatggattttttagaaaattacattgaaaaaggtttaattaaaaaactagaaaatgtaataaattcaaattttgaggttattacctatactaaagcaattgaaattcttgaaaactcaaaaaaaaattttgaaataaaaccttactggggaatagatttgcaaacagatcacgaaagatacctaacagaagagacttttaaaaaaccggtagtggtcattgattatccaaaaaatttcaaagcattttacatgaaagcaaataaagacaataaaactgttaaaggaatggacatacttgttccaaaaattggagagattatagggggaagcgaaagagaagatgacctgcaaaaattagaaaatagaataaaagaattaaacttaaacattgaacatctaaactggtatcttgatctaagaagatttggctcggctcctcattctggctttggacttggacttgaaagattggtgcaatactcaacaggaatatctaatataagagattcaataccattcccaaggactcctaaaaatctttatttttaa

SEQ ID NO: 10470 - protein, 462 aa, Borrelia burgdorferi 156a
MFASIKDILKNPILNSNVTINGWIRTKRSNGKIGFIEINDGSTLKGIQAVINEEENQFSEKDLKKLTTGTSISLTGLLVESPAKGQNYEIKTHSFNVIGETDPEIYPLQKKRHSFEFLREIPHLRIRTNTFGAIARVRNKISYKIHEYFQKNGFFYINTPIITSNDGEGAGEMFRVSTLKFNKLNNAPSNIDFKDDFFGKEAFLSVTGQLHGEAYAMALSKIYTFGPTFRAENSNTTRHASEFWMIEPEMAFYKLNDNIALAEDLLKYLLSSILNECSQDMDFLENYIEKGLIKKLENVINSNFEVITYTKAIEILENSKKNFEIKPYWGIDLQTDHERYLTEETFKKPVVVIDYPKNFKAFYMKANKDNKTVKGMDILVPKIGEIIGGSEREDDLQKLENRIKELNLNIEHLNWYLDLRRFGSAPHSGFGLGLERLVQYSTGISNIRDSIPFPRTPKNLYF

SEQ ID NO: 10471 - DNA, 1389 bp, Borrelia garinii PBr
  CDS (1)..(1389): transl_table=11
atgttttcaagcattaaagatattttagaaaatccaattttaaacagcaatgttacaataaacggctggattagaactaagagaagtaatggtaagattggatttatagaaattaatgatggctcaacgcttaaaggaattcaagctgtaataaacgaagaagaaaatcaatttactgaaaaagatctgaaaaaactaacaacaggggcaagtatatcgttaacgggcctattagtagaaagtcctgcaaaaggacaaaattatgaaataaaaacatatagttttaatgtaatcggagaaacagattcaaaaacttacccattgcaaaaaaagagacatacttttgaattcttaagagaaatacctcatttaagaataagaaccaatacatttggagccattgctagggtaagaaataaaatttcatacaagattcatgaatatttccaaaaaaatggttttttttacattaatacaccaataattacatcaaatgatggggaaggtgctggggaaatgtttagagtttccacactaaaatttaataagccaaacaattcgcttagcaatattgatttcaaagacgatttttttggaaaagaagcttttctctctgtcaccggtcaattgcacggagaagcgtatgcaatggctttatctaaaatatatacattcggaccaacatttcgagcagaaaattctaacaccacacgccacgcttcagaattttggatgatagaaccggaaatggctttttgcaagcttaacgacaatattagtctagcagaagatctcttaaaataccttttaagttcaattttaaacgaatgctcacaagatatggattttttagaaaattacattgaaaaaggtttaattaaaaaactagaaaacgtaataaattcaaattttgaagttattacctatactaaagcaattgcaattcttgaaaactcaaaaaaaatttttgacataaaaccttgctggggaatagatttgcaaacagatcacgaaagatacttaacagaggaaatttttaaaaaaccagtagtggtcattgattatccaaaaaatttcaaagcattttacatgaaaataaacaaagacaataaaaccgtaaaaggaatggacatacttgttccaagaattggagagattatagggggaagcgaaagagaagatgacttgcaaaaattagaaaatagaataaaagaattaaacctaaacattgagcatctaaactggtatcttgatctaagaagatttggttctactccccattctggttttggacttggacttgaaagattggtgcaatacacaacaggaatatccaatataagagattcaataccattcccaagaactcctaaaaatctttatttttaa

SEQ ID NO: 10472 - protein, 462 aa, Borrelia garinii PBr
MFSSIKDILENPILNSNVTINGWIRTKRSNGKIGFIEINDGSTLKGIQAVINEEENQFTEKDLKKLTTGASISLTGLLVESPAKGQNYEIKTYSFNVIGETDSKTYPLQKKRHTFEFLREIPHLRIRTNTFGAIARVRNKISYKIHEYFQKNGFFYINTPIITSNDGEGAGEMFRVSTLKFNKPNNSLSNIDFKDDFFGKEAFLSVTGQLHGEAYAMALSKIYTFGPTFRAENSNTTRHASEFWMIEPEMAFCKLNDNISLAEDLLKYLLSSILNECSQDMDFLENYIEKGLIKKLENVINSNFEVITYTKAIAILENSKKIFDIKPCWGIDLQTDHERYLTEEIFKKPVVVIDYPKNFKAFYMKINKDNKTVKGMDILVPRIGEIIGGSEREDDLQKLENRIKELNLNIEHLNWYLDLRRFGSTPHSGFGLGLERLVQYTTGISNIRDSIPFPRTPKNLYF

SEQ ID NO: 10473 - DNA, 1458 bp, Borrelia garinii Far04
  CDS (1)..(1458): transl_table=11
atgttttcaagcattaaagatattttagaaaatccaattttaaacagcaatgttacaataaacggctggattagaactaagagaagtaatggtaagattggatttatagaaattaatgatggctcaacgcttaaaggaattcaagctgtaataaacgaagaagaaaatcaatttactgaaaaagatctgaaaaaactaacaacaggggcaagtatatcgttaacgggcctattagtggaaagtcctgcaaaaggacaaaattatgaaataaaaacatatagttttaatgtaatcggagaaacagattcaaaaacttacccattgcaaaaaaagagacatacttttgaattcttaagagaaatacctcatttaagaataagaaccaatacatttggagccattgctagggtaagaaataaaatttcatacaagattcatgaatatttccaaaaaaatggttttttttatattaatacaccaataattacatcaaatgatggggaaggtgctggggaaatgtttagagtttccacactaaaatttaataagccaaacaattcgcttggcaatattgatttcaaagacgatttttttggaaaagaagcttttctctctgtcaccggtcaattgcacggagaagcgtatgcaatggctttatctaaaatatatacatttggaccaacatttcgagcagaaaactctaacaccacacgccacgcttcagaattttggatgatagaaccggaaatggctttttgcaagcttaacgacaatattagtctagcagaagatctcttaaaatatcttttaagttcaattttaaatgaatgctcacaagatatggattttttagaaaattacattgaaaaaggtttaattaaaaaactagaaaacgtaataaattcaaattttgaagttattacctatactaaagcaattgcaattcttgaaaactcaaaaaaaaattttgacataaagccttgctggggaatagatttacaaacagatcacgaaagatacttaacagaggaaatttttaaaaaaccagtagtggtcattgattatccaaaaaatttcaaagcattttacatgaaaataaacaaagacaataaaaccgtaaaaggaatggacatacttgttccaagaattggagagattataggaggaagcgaaagagaagatgacttgcaaaaattagaaaatagaataaaagaattaaacctaaacattgagcatctaaactggtatcttgatctaagaagatttggttctactccccattctggttttggacttggacttgaaagattggtgcaatacacaacaggaatatccaatataagagattcaataccattcccaagaactcctaaaaatctttattttaataaaataaaaggaagcaaggaaatgagattaataaaactctacaaattaatgatactctttcttttttaa

SEQ ID NO: 10474 - protein, 485 aa, Borrelia garinii Far04
MFSSIKDILENPILNSNVTINGWIRTKRSNGKIGFIEINDGSTLKGIQAVINEEENQFTEKDLKKLTTGASISLTGLLVESPAKGQNYEIKTYSFNVIGETDSKTYPLQKKRHTFEFLREIPHLRIRTNTFGAIARVRNKISYKIHEYFQKNGFFYINTPIITSNDGEGAGEMFRVSTLKFNKPNNSLGNIDFKDDFFGKEAFLSVTGQLHGEAYAMALSKIYTFGPTFRAENSNTTRHASEFWMIEPEMAFCKLNDNISLAEDLLKYLLSSILNECSQDMDFLENYIEKGLIKKLENVINSNFEVITYTKAIAILENSKKNFDIKPCWGIDLQTDHERYLTEEIFKKPVVVIDYPKNFKAFYMKINKDNKTVKGMDILVPRIGEIIGGSEREDDLQKLENRIKELNLNIEHLNWYLDLRRFGSTPHSGFGLGLERLVQYTTGISNIRDSIPFPRTPKNLYFNKIKGSKEMRLIKLYKLMILFLF

SEQ ID NO: 10475 - DNA, 1392 bp, Blautia hansenii DSM 20583
  CDS (1)..(1392): transl_table=11
atgcagttaacaacagtaaaagagatttacagaaacagagaagaatatctggataaagaagttactgtgggcggttgggtaagaagtgtccgtgactctaaaacattcggatttattgtgcttcatgacggaagcttttttgaaaccttacaggttgtataccatgatacaatggaaaactttcaggcaatctcaaaattgaatgtaggtgcagctatcgtagtaaagggaactttagttgcaacaccacaggctaaacagccttttgaaattcaggcaacagagattatggtagagggtgattcagcagcagactatccgttgcagaaaaaacgccactccatggaatatttaagaacaatctctcatttaagaccgagaacaaatacttttcaggcggtattcagagtgcgttctttaattgcttatgctattcatcagttctttcaggaacagggatttgtatatgtgcacacaccattgattacaggaagcgactgtgaaggtgcgggagaaatgttccaggttacaaccatggacttaaatgacattccgaaaacagaagagggaaaagtggatttttcacaggatttcttcaaaaaacctacaaaccttacagtaagcggacagttaaacggagaaacttttgcacaggcattccgtaacatctatactttcggacctactttccgtgcagaaaactccaacacaacacgtcacgcagcagaattttggatgattgagccggaaatggcattttcagatttagatgacaatatggcgctggcagagtccatgctgaaatatgttatccgttacgttctggaaaacgcaccggaagaaatgaacttctttaactctttcgtagataaaggacttttagacagattgaacaacgtattaaattccgagttcggacacgttacttatacagaagccattgaaattctggaaaaggcaaacgacaagtttgactataaagtatactggggctgtgatttacagacagaacatgaaagatatttaacagagcaggtttacaaacgccctgtatttgttacagattatccaaaggaaatcaaagctttctacatgaaacagaacgaggatggaaaaacagttgcagctatggactgccttgttccgggaattggtgaaatcatcggaggaagtcagagagaggactcttacgaaaaattaagccaaagaatgaaagaaatgaacttaaacgaagaagattacggattttatctggatttgcgtaaatatggttctactcgtcattccggttttggactgggatttgaaagatgtgttatgtacttaacaggtatgcagaacattcgtgacgttattccgttcccaagaactgtaaacaactgtgaattataa

SEQ ID NO: 10476 - protein, 463 aa, Blautia hansenii DSM 20583
MQLTTVKEIYRNREEYLDKEVTVGGWVRSVRDSKTFGFIVLHDGSFFETLQVVYHDTMENFQAISKLNVGAAIVVKGTLVATPQAKQPFEIQATEIMVEGDSAADYPLQKKRHSMEYLRTISHLRPRTNTFQAVFRVRSLIAYAIHQFFQEQGFVYVHTPLITGSDCEGAGEMFQVTTMDLNDIPKTEEGKVDFSQDFFKKPTNLTVSGQLNGETFAQAFRNIYTFGPTFRAENSNTTRHAAEFWMIEPEMAFSDLDDNMALAESMLKYVIRYVLENAPEEMNFFNSFVDKGLLDRLNNVLNSEFGHVTYTEAIEILEKANDKFDYKVYWGCDLQTEHERYLTEQVYKRPVFVTDYPKEIKAFYMKQNEDGKTVAAMDCLVPGIGEIIGGSQREDSYEKLSQRMKEMNLNEEDYGFYLDLRKYGSTRHSGFGLGFERCVMYLTGMQNIRDVIPFPRTVNNCEL

SEQ ID NO: 10477 - DNA, 1389 bp, Borrelia burgdorferi 72a
  CDS (1)..(1389): transl_table=11
atgtttgcaagcattaaagatattttaaaaaacccaattttaaacagcaatgttacaataaacggctggattagaaccaaaagaagtaatggcaaaattggatttatagaaattaatgatggttcaacgcttaaaggaattcaagctgtaataaacgaagaagaaaatcaatttagtgaaaaagatctaaaaaaattaacaacaggaacaagtatatcgttaacgggcctattagtagaaagtcctgcaaaagggcaaaattatgaaataaaaacacatagttttaatgtaatcggggaaacagacccagaaacttacccattgcaaaagaaaagacattcttttgaatttctaagagaaataccccatttaagaatacgaaccaacacatttggagctattgctagggtaagaaataaaatttcatacaaaattcatgaatatttccaaaaaaatggttttttttatattaatacaccaataattacatcaaatgatggggaaggtgctggagaaatgtttagagtttccacactaaaatttaataaactaaacaatacgcttagcaatattgattttaaagacgatttttttggaaaagaagcttttctctctgtcactggccaattgcatggggaagcatatgcaatggctttatctaaaatatatacattcggaccaacatttagagcagaaaattctaacaccacacgccacgcttcagaattttggatgatagaaccagaaatggctttttataagcttaacgacaatattgccctagcagaagatctcttgaaatatcttttaagttcaattttaaacgaatgctcacaagatatggattttttagaaaattacattgaaaaaggtttaattaaaaaattagaaaatgtaataaattcaaattttgaggttattacatatactaaagcaattgaaattcttgaaaactcaaaaaaaaattttgaaataaaaccttactggggaatagatttgcaaacagatcacgaaagatacctaacagaagagacttttaaaaaaccagtagtggtcattgattatccaaaaaattttaaagcattttacatgaaagcaaataaagacaataaaactgttaaaggaatggacatacttgttccaaaaattggagagattatagggggaagcgaaagagaagatgacctgcaaaaattagaaaatagaataaaagaattaaacttaaacattgaacatctaaactggtatcttgatctaagaagatttggctcggctcctcattctggttttggacttggacttgaaagattggtgcaatactcaacaggaatatctaatataagagattcaataccattcccaaggactcctaaaaatctttatttttaa

SEQ ID NO: 10478 - protein, 462 aa, Borrelia burgdorferi 72a
MFASIKDILKNPILNSNVTINGWIRTKRSNGKIGFIEINDGSTLKGIQAVINEEENQFSEKDLKKLTTGTSISLTGLLVESPAKGQNYEIKTHSFNVIGETDPETYPLQKKRHSFEFLREIPHLRIRTNTFGAIARVRNKISYKIHEYFQKNGFFYINTPIITSNDGEGAGEMFRVSTLKFNKLNNTLSNIDFKDDFFGKEAFLSVTGQLHGEAYAMALSKIYTFGPTFRAENSNTTRHASEFWMIEPEMAFYKLNDNIALAEDLLKYLLSSILNECSQDMDFLENYIEKGLIKKLENVINSNFEVITYTKAIEILENSKKNFEIKPYWGIDLQTDHERYLTEETFKKPVVVIDYPKNFKAFYMKANKDNKTVKGMDILVPKIGEIIGGSEREDDLQKLENRIKELNLNIEHLNWYLDLRRFGSAPHSGFGLGLERLVQYSTGISNIRDSIPFPRTPKNLYF

SEQ ID NO: 10479 - DNA, 1404 bp, Actinobacillus minor 202
  CDS (1)..(1404): transl_table=11
atgtctaaatttccaacaatttcagagattctttctggcaaagttgccgtaggggaagaagtttctgtgcgtggttgggtgcgtacccgccgcgattctaaagccggtttatcattcttagccgtatatgatggttcatgttttgatcctattcaagcgatcatcaataatgacctcgccaattatcaagatgaagtattacgcttaacagcaggttgttctgtgattgtaacgggtgttatcgttgaatctccggcagaagggcaagcggttgaattacaagcaaaatctgttgaagtcgtaggttgggttgaagatccagatacttatccgatggcagcaaaacgccactctatcgaatacttacgtgaagtcgctcacttacgtcctcgtactaacttaatcggggcggtagctcgtgttcgccactgtttagcacaagcaattcaccgtttcttccacgagcaaggtttctattgggttgctacaccattaatcaccgcttcagatactgaaggtgcaggtgaaatgttccgtgtttctaccttagatttagaaaatttaccacgtggtgaagatggtaaagtcgattttagccaagatttctttggtaaagagtctttcttaactgtatctggtcaattaaacggcgagacctatgcttgtgcattaagcaaagtctatacgtttggtccaacattccgtgcagaaaactcaaatactacccgtcacttagcagaattctggatggttgagcctgaatttgcgtttgcaaccttagcagataacgcaaaacttgctgaagacatgttgaaatatgtgttccgtgcggtacttgaagaacgtaaagatgacttaaaattcttcgagaaacacgttgataacacggtaatcagccgtttagagaactttattaattcagacttcgctcaaattgactataccgatgcgattgaagtgttattaaaatcaggtaaaaactttgagttcccagttgaatggggtatcgacctctcttctgaacatgaacgctatcttgcagaagaatactttaaatcgccggtagttgtgaaaaactatccgaaagacatcaaagccttctatatgcgtttaaatgatgatggtaagaccgtagcagcaatggacgtattagccccgggaatcggtgaaatcatcggtggttcacaacgtgaagaacgtttagaggtgttagataaacgcatggtagaaatgggcctaaacccagaagattactggtggtatcgtgatttacgtcgttatggtacagtaccgcactcaggctttggtttaggctttgagcgtttaatcgtatatgtaactggtttacaaaatattcgtgaagtgattccattcccacgtactccacgtaatgcaagcttctaa

SEQ ID NO: 10480 - protein, 467 aa, Actinobacillus minor 202
MSKFPTISEILSGKVAVGEEVSVRGWVRTRRDSKAGLSFLAVYDGSCFDPIQAIINNDLANYQDEVLRLTAGCSVIVTGVIVESPAEGQAVELQAKSVEVVGWVEDPDTYPMAAKRHSIEYLREVAHLRPRTNLIGAVARVRHCLAQAIHRFFHEQGFYWVATPLITASDTEGAGEMFRVSTLDLENLPRGEDGKVDFSQDFFGKESFLTVSGQLNGETYACALSKVYTFGPTFRAENSNTTRHLAEFWMVEPEFAFATLADNAKLAEDMLKYVFRAVLEERKDDLKFFEKHVDNTVISRLENFINSDFAQIDYTDAIEVLLKSGKNFEFPVEWGIDLSSEHERYLAEEYFKSPVVVKNYPKDIKAFYMRLNDDGKTVAAMDVLAPGIGEIIGGSQREERLEVLDKRMVEMGLNPEDYWWYRDLRRYGTVPHSGFGLGFERLIVYVTGLQNIREVIPFPRTPRNASF

SEQ ID NO: 10481 - DNA, 1428 bp, Prevotella copri DSM 18205
  CDS (1)..(1428): transl_table=11
atggaaaaagtaaaaagaactaaagttgtagacttgctcaagagtacagcctacggctcaatcgtgaatgtcaagggatgggttcgtacccatcgtagtagcaaagcagtcgattttatcgctcttaacgatggttctactattaataatattcagatagtagtcgacccatcaaaggtcgatgagaatcagctccgtcaggttactactggtgcttgtatcagcgccgtaggtacgctggtagaaagccagggtgccggacagagtgttgagatccagtgcgagagcatcgagatttacggtctctgcggcagcgactatcctatgcagaagaagggacagagcttcgagtacatgcgtcagtatgctcacctccgtctccgtaccaatacctttggtgccgtaatgcgtatccgccacaacatggcgatggctatccacacctacttccatgagcatggatatttctatttcaatactccgctcatcacagccagcgactgcgagggtgctggtcagatgttccaggttacaaccaagaacctctacaacctgaagaagaccgaggatggcaagattgactattctgatgatttcttcggcaagcagacttcattgaccgtttccggtcagttggagggtgagctcggtgctacagcactcggcgccatctataccttcggtccaaccttccgtgcagagaacagtaatactcctcgccacctggctgagttctggatggtagagcctgaggttgctttcctggatatggacggtttgatggagttggaggaagacttcatcaagtattgtatccgttgggcactggagcattgcaaggacgatcttgctttcttgaacaagatgattgacaagggtctgattgcccgtctggaaggcgtattgaattccgacttcgttcatcttccatataccgagggtatccgtatccttcaggaggctattgccaacggtaagaagtttgagttcccatgcgagtggggtgatgacctggcttcagagcatgagcgtttcctcgtagaggagcacttcaagcgcccggttatcatgaccaactatcctaaggctatcaaggcattctatatgaagatagacgaggaggagagtggtttcggtggcaagagcggtcagaccgttcagggtaccgacgtactgttcccacagattggtgagattatcggtggttctgtccgtgaggagagctatgacaagctgatgggtgagatagaggctcgcaacatccctatgaaggatatgaactggtatctcgatacccgtaagtatggttcatgcccacacgcaggtttcggtctcggtttcgagcgtctgattctcttcgtaaccggtatgcagaatatccgcgacgtgattccattcccacgtacacccaagaacgcagaattctag

SEQ ID NO: 10482 - protein, 475 aa, Prevotella copri DSM 18205
MEKVKRTKVVDLLKSTAYGSIVNVKGWVRTHRSSKAVDFIALNDGSTINNIQIVVDPSKVDENQLRQVTTGACISAVGTLVESQGAGQSVEIQCESIEIYGLCGSDYPMQKKGQSFEYMRQYAHLRLRTNTFGAVMRIRHNMAMAIHTYFHEHGYFYFNTPLITASDCEGAGQMFQVTTKNLYNLKKTEDGKIDYSDDFFGKQTSLTVSGQLEGELGATALGAIYTFGPTFRAENSNTPRHLAEFWMVEPEVAFLDMDGLMELEEDFIKYCIRWALEHCKDDLAFLNKMIDKGLIARLEGVLNSDFVHLPYTEGIRILQEAIANGKKFEFPCEWGDDLASEHERFLVEEHFKRPVIMTNYPKAIKAFYMKIDEEESGFGGKSGQTVQGTDVLFPQIGEIIGGSVREESYDKLMGEIEARNIPMKDMNWYLDTRKYGSCPHAGFGLGFERLILFVTGMQNIRDVIPFPRTPKNAEF

SEQ ID NO: 10483 - DNA, 1389 bp, Borrelia burgdorferi 64b
  CDS (1)..(1389): transl_table=11
atgtttgcaagcattaaagatattttaaaaaacccaattttaaacagcaatgttacaataaacggctggattagaaccaaaagaagtaatggcaaaattggatttatagaaattaatgatggttcaacgcttaaaggaattcaagctgtaataaacgaagaagaaaatcaatttagtgaaaaagatctaaaaaaattaacaacaggaacaagtatatcgttaacgggcctattagtagaaagtcctgcaaaagggcaaaattatgaaataaaaacacatagttttaatgtaatcggggaaacagacccagaaacttacccattgcaaaagaaaagacattcttttgaatttttaagagaaataccccatttaagaatacgaaccaacacatttggagctattgctagggtaagaaacaaaatttcatacaaaattcatgaatatttccaaaaaaatggttttttttatattaatacaccaataattacatcaaatgatggggaaggtgctggagaaatgtttagggtttccacactaaaatttaataaactaaacaatgcacttagcaatattgattttaaagacgatttttttggaaaagaagcttttctctctgtcactggtcaattgcatggggaagcatatgcaatggctttatctaaaatatatacattcggaccaacatttagagcagaaaattctaacaccacacgccacgcttcagaattttggatgatagaaccagaaatggctttttataagcttaacgacaatattgccctagcagaagatctcttgaaatatcttttaagttcaattttaaacgaatgctcacaagatatggattttttagaaaattacattgaaaaaggtttaattaaaaaactagaaaatgtaataaattcaaattttgaggttattacctatactaaagcaattgaaattcttgaaaactcaaaaaaaaattttgaaataaaaccttactggggaatagatttgcaaacagatcacgaaagatacctaacagaagagacttttaaaaaaccggtagtggtcattgattatccaaaaaatttcaaagcattttacatgaaagcaaataaagacaataaaactgttaaaggaatggacatacttgttccaaaaattggagagattatagggggaagcgaaagagaagatgaccttcaaaaattagaaaatagaataaaagaattaaacttaaacattgaacatctaaactggtatcttgatctaagaagatttggctcggctcctcattctggctttggacttggacttgaaagattggtgcaatactcaacaggaatatctaatataagagattcaataccattcccaaggactcctaaaaatctttatttttaa

SEQ ID NO: 10484 - protein, 462 aa, Borrelia burgdorferi 64b
MFASIKDILKNPILNSNVTINGWIRTKRSNGKIGFIEINDGSTLKGIQAVINEEENQFSEKDLKKLTTGTSISLTGLLVESPAKGQNYEIKTHSFNVIGETDPETYPLQKKRHSFEFLREIPHLRIRTNTFGAIARVRNKISYKIHEYFQKNGFFYINTPIITSNDGEGAGEMFRVSTLKFNKLNNALSNIDFKDDFFGKEAFLSVTGQLHGEAYAMALSKIYTFGPTFRAENSNTTRHASEFWMIEPEMAFYKLNDNIALAEDLLKYLLSSILNECSQDMDFLENYIEKGLIKKLENVINSNFEVITYTKAIEILENSKKNFEIKPYWGIDLQTDHERYLTEETFKKPVVVIDYPKNFKAFYMKANKDNKTVKGMDILVPKIGEIIGGSEREDDLQKLENRIKELNLNIEHLNWYLDLRRFGSAPHSGFGLGLERLVQYSTGISNIRDSIPFPRTPKNLYF

SEQ ID NO: 10485 - DNA, 1389 bp, Borrelia valaisiana VS116
  CDS (1)..(1389): transl_table=11
atgtttgcaagcattaaagatattttagaaaatccaattttaaacagtaatgttacaataaacggttggatcagaactacaagaagtaatggtaagattggatttatagaaattaatgatggctcaacacttaagggcattcaagctgtaataaacgaagaagaaaatcaatttagtgaaaaagacctaaaaaaactaacaacaggggcaagtatatcgttaacgggcctattagtagaaagtcctgcaaaaggacaaaattatgaaataaaaacatatagttttaatgtaatcggagatacagatccaaaaacttatccattacaaaaaaaaagacatacttttgaatttttaagagaaatacctcatttaagaatacgaaccaatacatttggagctattgctagggtaagaaataaaatttcatacaaaattcatgaatattttcaaaaaaatgggtttttttatattaacacaccaataattacatcaaatgatggggaaggtgcgggggaaatgtttagagtttccacactaaaatttaataaaccaaacaattcacttagcaatattgattttaaagacgatttttttggaaaagaggctttcctctcagtcaccggtcaattgcacggagaagcatacgcaatggctttatctaaaatatatacatttggcccaacatttagagcagaaaattccaacaccacacgtcacgcttcagaattttggatgatagaaccagaaatggctttttacaaacttaacgacaatattatcctagcagaaaatcttttaaaatatcttttaagttcaattttaaacgaatgctcgcaagatatggattttttagaaaattacattgaaaaaggtttaattaaaaaactagaaaacgtaataaattcaaattttgaggttattacctatactaaagcaattgaaattcttgaaaaatcaaaaaaaaattttgaaataaaaccttactggggaatagatttgcaaacagatcacgagagatacttaacagaagagacttttaaaaaaccagtagtgattattgattatccaaaaaatttcaaagcattttacatgaaaataaacaaagacaataaaaccgttaaaggaatggacatacttgttccaagaattggagagattataggaggaagcgaaagagaagataacttacaaaaattagaaaatagaataaaagaattaaatctaaacattgagcatctaaactggtatcttgatctaagaagatttggctccactcctcattctggttttggacttggacttgaaagattggtacaatactcaacaggaatatctaatataagagattcaataccattcccaaggactcctaaaaacctttatttttaa

SEQ ID NO: 10486 - protein, 462 aa, Borrelia valaisiana VS116
MFASIKDILENPILNSNVTINGWIRTTRSNGKIGFIEINDGSTLKGIQAVINEEENQFSEKDLKKLTTGASISLTGLLVESPAKGQNYEIKTYSFNVIGDTDPKTYPLQKKRHTFEFLREIPHLRIRTNTFGAIARVRNKISYKIHEYFQKNGFFYINTPIITSNDGEGAGEMFRVSTLKFNKPNNSLSNIDFKDDFFGKEAFLSVTGQLHGEAYAMALSKIYTFGPTFRAENSNTTRHASEFWMIEPEMAFYKLNDNIILAENLLKYLLSSILNECSQDMDFLENYIEKGLIKKLENVINSNFEVITYTKAIEILEKSKKNFEIKPYWGIDLQTDHERYLTEETFKKPVVIIDYPKNFKAFYMKINKDNKTVKGMDILVPRIGEIIGGSEREDNLQKLENRIKELNLNIEHLNWYLDLRRFGSTPHSGFGLGLERLVQYSTGISNIRDSIPFPRTPKNLYF

SEQ ID NO: 10487 - DNA, 1389 bp, Borrelia spielmanii A14S
  CDS (1)..(1389): transl_table=11
atgtttgcaagcattaaagatattttagaaaatccaattttaaacaacaatgttacaataaatggttggattagaaccaaaaggagtaatggtaagattggatttatagaagttaatgatggctcaactcttaaaggaattcaagctgtaataaacgaagaagaaaatcaatttgacgaaaaagatctaaaaaaactaacaacaggagcaagcatatcgttaacaggcctattagtagaaagtcctgcaaaaggacaaaattatgaaataaaaacatatagttttaatgtaataggagaagcagatccaaaaacttacccattacaaaaaaaaagacatactttcgaatttttaagagaaatagctcatttaagaatacgaaccaatacatttggggctgtagctaggataagaaacaaaatttcatacaaaattcatgaatatttccaaaaaaatggttttttttatattaatacaccaataattacatcaaacgatggagaaggtgctggagaaatgtttagggtttccacactaaaatttaataaactaaacaattcacttagcaatattgattttaaagacgatttttttggaaaagaagcttttctctctgtcaccggccagttacacggggaagcatatgcaatggctttatctaaaatatatacattcggcccaacatttcgagcagaaaattctaacaccacacgccacgcttcagaattttggatgatagaaccagaaatggctttttacaagcttagcgacaatattgtcttagcagaagatctcttaaaatatcttttaagttcaattttaaacgaatgccctcaagatatggattttttagaaaattacattgaaaaaggattgattaaaaaactagaaaacgtaataaattcaagttttgaagttattacctatactaaagcaattgaaattcttgaaagctcaaaaaaaagttttgaaataaatccttactggggagtagatttacaaacagatcatgagagatacttaacagaagagattttcaaaaaaccagtagtggttattgattatccaaaaaatttcaaagcattttacatgaaaataaacaaagacaataaaaccgtaaaaggaatggatgtacttgttccaagaattggtgagattatagggggaagcgaaagagaagatgacttacaaaaattagaaaatagaataaaagaattaaacctaaacattgagcatctaaactggtatcttgatctaagaaggtttggttccactcctcattctggctttggacttggacttgaaagattggtgcaatactcaacaggaatatctaatataagagattcaataccatttccaagaactcctaaaaatctttatttttaa

SEQ ID NO: 10488 - protein, 462 aa, Borrelia spielmanii A14S
MFASIKDILENPILNNNVTINGWIRTKRSNGKIGFIEVNDGSTLKGIQAVINEEENQFDEKDLKKLTTGASISLTGLLVESPAKGQNYEIKTYSFNVIGEADPKTYPLQKKRHTFEFLREIAHLRIRTNTFGAVARIRNKISYKIHEYFQKNGFFYINTPIITSNDGEGAGEMFRVSTLKFNKLNNSLSNIDFKDDFFGKEAFLSVTGQLHGEAYAMALSKIYTFGPTFRAENSNTTRHASEFWMIEPEMAFYKLSDNIVLAEDLLKYLLSSILNECPQDMDFLENYIEKGLIKKLENVINSSFEVITYTKAIEILESSKKSFEINPYWGVDLQTDHERYLTEEIFKKPVVVIDYPKNFKAFYMKINKDNKTVKGMDVLVPRIGEIIGGSEREDDLQKLENRIKELNLNIEHLNWYLDLRRFGSTPHSGFGLGLERLVQYSTGISNIRDSIPFPRTPKNLYF

SEQ ID NO: 10489 - DNA, 1383 bp, Eubacterium hallii DSM 3353
  CDS (1)..(1383): transl_table=11
atgacaattcgagagatttataagaacagtgaacaatttttaaataaagaagtgaagcttggcggatggattcgcagcatccggggttcaaaacattttggatttcttgtgcttcatgatggaacattttttaaaccaattcaggttgtatatgaggagaaacttgagaattttcaggagatttccaagatgaatgttggagcggcggtgatcgtagagggaacgctagttccaactccgcaggcaaagcagccatttgagattcaggcagctaccgttactttagagggagcttctgcaccagattatccactgcagaagaaacgtcacagcttagaatatttaagaacaatttctcatcttcgtccaagaacaaatacattccaggcagtgttccgtatccgttctatggcagcgtatgcgattcaccagttttttcaggagaggggatttgtttatgttcatacaccgctcattacagcaagtgactgtgaaggagcgggagaaatgttccaggttacaactcttgatttaaataatattccaaaagataaagaaggaaatgttgattttgcacaggacttctttaacaaaccaacgaatctgacagtaagtggccagctcaatgcagaaacatttgcacaggcattccgcaatacctacacatttggaccaactttccgcgcggagaattctaatactgcccgtcatgcagcagaattctggatgattgagccggagatggcatttgcagacttaaaagatgacatggaagtggcagaagcaatgcttaaatatgttatttcctacgttatggagaatgcgccggaagaaatggatttcttaaaccagtttgtagataaaggattaaaagacaggctgaatcatgtgttgaattctgaatttggtcatgtaacgtatacagaagctgtagaaatccttgaaaaacataacgataaatttgaatataaggtatcctggggtacagatttacagacagaacatgaacgttacctcacagaagaagtattcaaacgtcctgtatttgtaaccgattatccaaaggaaatcaaggctttctacatgaagcttaacccagacggaaagaccgtagcagcaatggactgcctcgtgccaggtatcggagaaatcatcggcggcagccagagagaagatgattatgaaatgcttaaaaaacgtatggaagaagttggattggacgaagaaaaatatcagttttacttagatcttcgtaaatacggttccacacatcactcaggattcggacttggattcgagagatgcgtcatgtatctgacaggaatctctaatatcagagatgcgattccattcccaagaacagtgaataattgtgaattgtaa

SEQ ID NO: 10490 - protein, 460 aa, Eubacterium hallii DSM 3353
MTIREIYKNSEQFLNKEVKLGGWIRSIRGSKHFGFLVLHDGTFFKPIQVVYEEKLENFQEISKMNVGAAVIVEGTLVPTPQAKQPFEIQAATVTLEGASAPDYPLQKKRHSLEYLRTISHLRPRTNTFQAVFRIRSMAAYAIHQFFQERGFVYVHTPLITASDCEGAGEMFQVTTLDLNNIPKDKEGNVDFAQDFFNKPTNLTVSGQLNAETFAQAFRNTYTFGPTFRAENSNTARHAAEFWMIEPEMAFADLKDDMEVAEAMLKYVISYVMENAPEEMDFLNQFVDKGLKDRLNHVLNSEFGHVTYTEAVEILEKHNDKFEYKVSWGTDLQTEHERYLTEEVFKRPVFVTDYPKEIKAFYMKLNPDGKTVAAMDCLVPGIGEIIGGSQREDDYEMLKKRMEEVGLDEEKYQFYLDLRKYGSTHHSGFGLGFERCVMYLTGISNIRDAIPFPRTVNNCEL

SEQ ID NO: 10491 - DNA, 1392 bp, Clostridium asparagiforme DSM 15981
  CDS (1)..(1392): transl_table=11
atgaatctggttactgtaaaagaattgtataagacccctgaggcatatctcgacaaagagataaccatcggcggttggattcgcagcctgcgcgactccaaggcttttggttttattgttgtcagcgacggctcctactttgagcccctgcaggttgtttaccacgacaacctgacaaacttcgccgagatcaacaagctgaacgtgggcaccgccgtaatcgtcaccggtaccctggtcgccacgccccaggccaaacagccctttgagatccaggccaccggtgtggtggtggagggcacctccgctccggattatccccttcagaaaaagcgccactcctttgagtacctgcgcaccatctcccatctgcgtcccagaaccaacaccttccaggccgtgttccgcgtgcgctccctgatcgcctacgcaatccaccagtatttccaggaccgcggctttgtttacgtgcacaccccgctgatcacaggcagcgactgcgagggcgcaggtgagatgttccaggtgaccaccatggacttaaacgatattccaaagactgaggacggcaaggtggacttcagccaggacttcttcggcaagcccaccaacctgacggtgagcggacagctgaacgtggagacctacgccatggccttccgcaacgtttacaccttcggccccaccttccgcgccgagaactccaacaccccgcgccatgcggccgaattctggatgatcgagccggagatggccttcgcggacctcgacgacaacatgtgtctggccgaggggctgttaaagtacgtgatccgttacgtgctggagaacgcgcccgctgagatgaacttcttcaaccagttcgtggacaagggtctcttggaccgcctgaaaaatgtgctggaatccgagttcggccacattacctacaccgacgccgtgaagattttagaggagcacaacgaccagttcgactacaaggtatcctggggctgcgaccttcagaccgagcatgagcgctacctgaccgagcaggtattcaaaaaacccgtgttcgtcaccgattatcccaaggagatcaaagccttctatatgaagatgaaccccgacaacaagaccgttgcggccgtggactgcctggtacccggcatcggcgagatcatcggcggcagccagagagaggacgactacgacactctggtggccagaatggacgagctgggcttaaagaaggaggactacgacttctacctggatctgagaaaatacggttccaaccgccacgccggcttcggtctgggctttgagcgctgcgtgatgtacctgaccggtatgaccaacatccgcgacgtgattccgttcccgagaacggttaacaactgtgagctgtaa

SEQ ID NO: 10492 - protein, 463 aa, Clostridium asparagiforme DSM 15981
MNLVTVKELYKTPEAYLDKEITIGGWIRSLRDSKAFGFIVVSDGSYFEPLQVVYHDNLTNFAEINKLNVGTAVIVTGTLVATPQAKQPFEIQATGVVVEGTSAPDYPLQKKRHSFEYLRTISHLRPRTNTFQAVFRVRSLIAYAIHQYFQDRGFVYVHTPLITGSDCEGAGEMFQVTTMDLNDIPKTEDGKVDFSQDFFGKPTNLTVSGQLNVETYAMAFRNVYTFGPTFRAENSNTPRHAAEFWMIEPEMAFADLDDNMCLAEGLLKYVIRYVLENAPAEMNFFNQFVDKGLLDRLKNVLESEFGHITYTDAVKILEEHNDQFDYKVSWGCDLQTEHERYLTEQVFKKPVFVTDYPKEIKAFYMKMNPDNKTVAAVDCLVPGIGEIIGGSQREDDYDTLVARMDELGLKKEDYDFYLDLRKYGSNRHAGFGLGFERCVMYLTGMTNIRDVIPFPRTVNNCEL

SEQ ID NO: 10493 - DNA, 1392 bp, 'Nostoc azollae' 0708
  CDS (1)..(1392): transl_table=11
atgctaaaatctcgcattgctgaaatattaagaactggtcaacctgatgagtctttactaattcaaggttgggtaagaacaaagcgtgaattaaaaggttttgcgtttttagaagttaatgatggttcatcattaggtaatttgcaaattgtcatcaaccaagatttaccaaactacgaaggaatcttaaaacaaatcaataccggtgcttcagtagaagtatcaggtgtgctggtggcttcccaaggaaaaggacagcgcatagaattaaaagctgatgttctgaaaatatacggagatgctgatcccgaaacctatcccctccaaaagaaacgtcattcctttgagtttctacgcaccattgcacatcttcgttcccgaactaactcctttggtgcagtattccgagtgagaaatgcttgcgcgactgctattcatcaattttttcaagaacgggattttttatgggtacatactcccattattaccgctagtgattgtgaaggtgcaggagagctatttagcgttaccaatttggattttaaaaaaattccccgcacaggaaatcaagacattgattatagtcaagatttctttagtaaaccagcttatttaacagtaagtggacaattagaagcagaaattatggcgatggcatttaccaatgtctacacctttggtcccacattccgggcagaaaattctaacacttctcgtcacttagcagaattttggatggttgaaccagaaatggctttttgtgatttagaaggtgatatggatttggcggaagagtttctgaaatatatttttaaatatgtattagaaacttgtacacaagacatggaattttttaatgaacgtattgatagaacagtcttagaaactgctgattacattattagtaatcaatttgaacggttaagttacactgatgcagttaaatttttagaaaaagctgatgttaaatttgactatcctgtcacttggggtactgatttgcaatcagaacatgaacgctatttagcagaacaactgtttaaaaagcctgtggttgtgacagattatcccgctggaatcaaagctttttatatgcgattgagtgatgatgagaaaactgtccgcgctatggatattctcgttccgaaaataggggaaattattggtggttctcaacgggaagaaagactggatgtgttagaaaaacgggttttagaccaaggtatgaacccagaagatctgtggtggtatttagatttgcgtcgttatggaacagttccccatgctggttttggtttggggtttgaaagattggtacagtttatgacgggaatggggaatattcgtgatgtgattcctttcccccgtacaccacaaagcgcagagttttaa

SEQ ID NO: 10494 - protein, 463 aa, 'Nostoc azollae' 0708
MLKSRIAEILRTGQPDESLLIQGWVRTKRELKGFAFLEVNDGSSLGNLQIVINQDLPNYEGILKQINTGASVEVSGVLVASQGKGQRIELKADVLKIYGDADPETYPLQKKRHSFEFLRTIAHLRSRTNSFGAVFRVRNACATAIHQFFQERDFLWVHTPIITASDCEGAGELFSVTNLDFKKIPRTGNQDIDYSQDFFSKPAYLTVSGQLEAEIMAMAFTNVYTFGPTFRAENSNTSRHLAEFWMVEPEMAFCDLEGDMDLAEEFLKYIFKYVLETCTQDMEFFNERIDRTVLETADYIISNQFERLSYTDAVKFLEKADVKFDYPVTWGTDLQSEHERYLAEQLFKKPVVVTDYPAGIKAFYMRLSDDEKTVRAMDILVPKIGEIIGGSQREERLDVLEKRVLDQGMNPEDLWWYLDLRRYGTVPHAGFGLGFERLVQFMTGMGNIRDVIPFPRTPQSAEF

SEQ ID NO: 10495 - DNA, 1389 bp, Borrelia burgdorferi 94a
  CDS (1)..(1389): transl_table=11
atgtttgcaagcattaaagatattttaaaaaacccaattttaaatagcaatgttacaataaacggctggattagaaccaaaagaagtaatggcaaaattggatttatagaaattaatgatggttcaacgcttaaaggaattcaagctgtaataaacgaagaagaaaatcaatttagtgaaaaagatctaaaaaaattaacaacaggaacaagtatatcgttaacgggcctattagtagaaagtcctgcaaaagggcaaaattatgaaataaaaacacatagttttaatgtaatcggggaaacagacccagaaacttacccattgcaaaagaaaagacattcttttgaatttctaagagaaataccccatttaagaatacgaaccaacacatttggagctattgctagggtaagaaataaaatttcatacaaaattcatgaatatttccaaaaaaatggttttttttatattaatacaccaataattacatcaaatgatggggaaggtgctggagaaatgtttagagtttccacactaaaatttaataaactaaacaatacgcttagcaatattgattttaaagacgatttttttggaaaagaagcttttctctctgtcactggccaattgcatggggaagcatatgcaatggctttatctaaaatatatacattcggaccaacatttagagcagaaaattctaacaccacacgccacgcttcagaattttggatgatagaaccagaaatggctttttataagcttaacgacaatattgccttagcagaagatctcttgaaatatcttttaagttcaattttaaacgaatgctcacaagatatggattttttagaaaattacattgaaaaaggtttaattaaaaaattagaaaatgtaataaattcaaattttgagattattacatatactaaagcaattgaaattcttgaaaactcaaaaaaaaattttgaaataaaaccttactggggaatagatttgcaaacagatcacgaaagatacctaacagaagagacttttaaaaaaccagtagtggtcattgattatccaaaaaattttaaagcattttacatgaaagcaaataaagacaataaaactgttaaaggaatggacatacttgttccaaaaattggagagattatagggggaagcgaaagagaagatgacctgcaaaaattagaaaatagaataaaagaattaaacttaaacattgaacatctaaactggtatcttgatctaagaagatttggctcggctcctcattctggttttggacttggacttgaaagattggtgcaatactcaacaggaatatctaatataagagattcaataccattcccaaggactcctaaaaatctttatttttaa

SEQ ID NO: 10496 - protein, 462 aa, Borrelia burgdorferi 94a
MFASIKDILKNPILNSNVTINGWIRTKRSNGKIGFIEINDGSTLKGIQAVINEEENQFSEKDLKKLTTGTSISLTGLLVESPAKGQNYEIKTHSFNVIGETDPETYPLQKKRHSFEFLREIPHLRIRTNTFGAIARVRNKISYKIHEYFQKNGFFYINTPIITSNDGEGAGEMFRVSTLKFNKLNNTLSNIDFKDDFFGKEAFLSVTGQLHGEAYAMALSKIYTFGPTFRAENSNTTRHASEFWMIEPEMAFYKLNDNIALAEDLLKYLLSSILNECSQDMDFLENYIEKGLIKKLENVINSNFEIITYTKAIEILENSKKNFEIKPYWGIDLQTDHERYLTEETFKKPVVVIDYPKNFKAFYMKANKDNKTVKGMDILVPKIGEIIGGSEREDDLQKLENRIKELNLNIEHLNWYLDLRRFGSAPHSGFGLGLERLVQYSTGISNIRDSIPFPRTPKNLYF

SEQ ID NO: 10497 - DNA, 1389 bp, Borrelia burgdorferi 118a
  CDS (1)..(1389): transl_table=11
atgtttgcaagcattaaagatattttaaaaaacccaattttaaatagcaatgttacaataaacggctggattagaaccaaaagaagtaatggcaaaattggatttatagaaattaatgatggttcaacgcttaaaggaattcaagctgtaataaacgaagaagaaaatcaatttagtgaaaaagatctaaaaaaattaacaacaggaacaagtatatcgttaacgggcctattagtagaaagtcctgcaaaagggcaaaattatgaaataaaaacacatagttttaatgtaattggagaaacagacccagaaatttacccattgcaaaagaaaagacattcttttgaatttctaagagaaataccccatttaagaatacgaaccaacacatttggagctattgctagggtaagaaacaaaatttcatacaaaattcatgaatatttccaaaaaaatggttttttttatattaatacaccaataattacatcaaatgatggggaaggtgctggagaaatgtttagggtttccacactaaaatttaataaactaaacaatgcacttagcaatattgattttaaagacgatttttttggaaaagaagcttttctctctgtcactggccaattgcatggggaagcatatgcaatggctttatctaaaatatatacattcggaccaacatttagagcagaaaattctaacaccacacgccacgcttcagaattttggatgatagaaccagaaatggctttttataagcttaacgacaatattgccctagcagaagatctcttgaaatatcttttaagttcaattttaaacgaatgctcacaagatatggattttttagaaaattacattgaaaaaggtttaattaaaaaactagaaaatgtaataaattcaaattttgaggttattacctatactaaagcaattgaaattcttgaaaactcaaaaaaaaattttgaaataaaaccttactggggaatagatttgcaaacagatcacgaaagatacctaacagaagagacttttaaaaaaccggtagtggtcattgattatccaaaaaatttcaaagcattttacatgaaagcaaataaagacaataaaactgttaaaggaatggacatacttgttccaaaaattggagagattatagggggaagcgaaagagaagatgacctgcaaaaattagaaaatagaataaaagaattaaacttaaacattgaacatctaaactggtatcttgatctaagaagatttggctcggctcctcattctggctttggacttggacttgaaagattggtgcaatactcaacaggaatatctaatataagagattcaataccattcccaaggactcctaaaaatctttatttttaa

SEQ ID NO: 10498 - protein, 462 aa, Borrelia burgdorferi 118a
MFASIKDILKNPILNSNVTINGWIRTKRSNGKIGFIEINDGSTLKGIQAVINEEENQFSEKDLKKLTTGTSISLTGLLVESPAKGQNYEIKTHSFNVIGETDPEIYPLQKKRHSFEFLREIPHLRIRTNTFGAIARVRNKISYKIHEYFQKNGFFYINTPIITSNDGEGAGEMFRVSTLKFNKLNNALSNIDFKDDFFGKEAFLSVTGQLHGEAYAMALSKIYTFGPTFRAENSNTTRHASEFWMIEPEMAFYKLNDNIALAEDLLKYLLSSILNECSQDMDFLENYIEKGLIKKLENVINSNFEVITYTKAIEILENSKKNFEIKPYWGIDLQTDHERYLTEETFKKPVVVIDYPKNFKAFYMKANKDNKTVKGMDILVPKIGEIIGGSEREDDLQKLENRIKELNLNIEHLNWYLDLRRFGSAPHSGFGLGLERLVQYSTGISNIRDSIPFPRTPKNLYF

SEQ ID NO: 10499 - DNA, 1365 bp, Ureaplasma urealyticum serovar 8 str. ATCC 27618
  CDS (1)..(1365): transl_table=4
atgcaattaaaaattaaagagatttttgatcaagattatacaaaacttgaaggtcaaaaagtacaaattaaagcttgagttcgttcaaatcgtgattcaaaaaaaattggttttttagttttaaatgatggaagttctctaacaaatttacaagctgtatatcgtgttgataaaattagtaattatgaagaaataactgcggcacgaatgtgagcagcagttgctattgaaggtgtaattaaattaactccaacagctaaacaaccattagaactagaagtattaaatgctcaaattttaaaacaaagtgatgaagattttttattatcaaataatgatttaagtttagaaacattgcgtttaaatgcccatttaagaccaagaacaaatttatttcatgccattatgaaagtgcgagcaacacttgcttttgcagttcatgaatttatgaatcaaaacgaatatagttgattagctgcaccattgtttacaggaaatgatgctgaaggagcaggggaaacttttagtattcaaaaatttgataatgaagaattctttggtaaacaaactcatttatcggtaacagggcaattacaagctgaagcatacgcacaagcttttggtaatgtatatacatttggccctacttttagagctgaaaaatcgcacacaaatcgtcatttagctgaattttgaatgattgaaccagaaatggcttttgttgatttaaaaggtatgcaagatattgttgaaaatttaattaaacatgttattaaggctgttttagaaaaaaatcaacaagaattagaatttttagcacaaagaaacgatgaaaatttaattaaaaaacttcaaaaagttgttgattctaagtttgaacgtattgaatataaagatgcagttaaaattctagctgatgctgttaaaagtggtcatcaattcgaagataatgaaatcttttttggaatggatttaggttcagaacatgaaagatatatgtgcgaaacttatcatcaaggacctgttttcttacaaaattatccaaaagatattaaagcattttatatgaaattaaatgatgatcaacaaactgtagcttcaacagatttactaattccaggtgttggtgaattagtaggtggttcacaacgtgaagataattatgaaaaattattgaaacgatgtcaagaattaaaaatgccaattgaaagtttacaatgatatttagatttacgtcgttttggatattatatgtcatcaggttttggaattggttttgaacgtttagtgatgtatgtaacaggagttaataatattaaagatacaattccatttccacgaagtcatggccaaattgaattttaa

SEQ ID NO: 10500 - protein, 454 aa, Ureaplasma urealyticum serovar 8 str. ATCC 27618
MQLKIKEIFDQDYTKLEGQKVQIKAWVRSNRDSKKIGFLVLNDGSSLTNLQAVYRVDKISNYEEITAARMWAAVAIEGVIKLTPTAKQPLELEVLNAQILKQSDEDFLLSNNDLSLETLRLNAHLRPRTNLFHAIMKVRATLAFAVHEFMNQNEYSWLAAPLFTGNDAEGAGETFSIQKFDNEEFFGKQTHLSVTGQLQAEAYAQAFGNVYTFGPTFRAEKSHTNRHLAEFWMIEPEMAFVDLKGMQDIVENLIKHVIKAVLEKNQQELEFLAQRNDENLIKKLQKVVDSKFERIEYKDAVKILADAVKSGHQFEDNEIFFGMDLGSEHERYMCETYHQGPVFLQNYPKDIKAFYMKLNDDQQTVASTDLLIPGVGELVGGSQREDNYEKLLKRCQELKMPIESLQWYLDLRRFGYYMSSGFGIGFERLVMYVTGVNNIKDTIPFPRSHGQIEF

SEQ ID NO: 10501 - DNA, 1389 bp, Borrelia sp. SV1
  CDS (1)..(1389): transl_table=11
atgtttgcaagcattaaagatattttaaaaaacccaattttaaacagcaatgttacaataaacggctggattagaaccaaaagaagtaacggcaaaattggatttatagaaattaatgatggttcaacgcttaaaggaattcaagctgtaataaacgaagaagaaaatcaatttagtgaaaaagatctaaaaaaattaacaacaggaacaagtatatcgttaacgggcctattagtagaaagtcctgcaaaagggcaaaattatgaaataaaaacacatagttttaatgtaatcggagaaacagacccagaaacttacccattgcaaaagaaaagacattcttttgaatttctaagagaaataccccatttaagaatacgaaccaacacatttggagctattgcgagggtaagaaataaaatttcatacaaaattcatgaatatttccaaaaaaatggttttttttatattaatacaccaataattacatcaaatgatggggaaggtgctggagaaatgtttagagtttccacactaaaatttaataaactaaacaatgcgcctagcaatattgattttaaagacgatttttttggaaaagaagcttttctctctgtcactggccaattgcatggggaagcatacgcaatggctttatctaaaatatatacattcggaccaacatttagagcagaaaattctaacaccacacgccacgcttcagaattttggatgatagaaccagaaatggctttttataagcttaacgacaatattgccctagcagaagatctcttgaaatatcttttaagttcaattttaaacgaatgctcacaagatatggattttttagaaaattacattgaaaaaggtttaattaaaaaactagaaaatgtaataaattcaaattttgaggttattacctatactaaagcaattgaaattcttgaaaactcaaaaaaaaattttgaaataaagccttactggggaatagatttgcaaacagatcacgaaagatacctaacagaagagacttttaaaaaaccggtagtggtcattgattatccaaaaaatttcaaagcattttacatgaaagcaaataaagacaataaaactgttaaaggaatggacatacttgttccaaaaattggagagattatagggggaagcgaaagagaagatgacctgcaaaaattagaaaatagaataaaagaattaaacttaaacattgaacatctaaactggtatattgatctaagaagatttggttcggctcctcattctggttttggacttgggcttgaacgattggtgcaatactcaacaggaatatctaacataagagattcaataccattcccaaggacccctaaaaatctttatttttaa

SEQ ID NO: 10502 - protein, 462 aa, Borrelia sp. SV1
MFASIKDILKNPILNSNVTINGWIRTKRSNGKIGFIEINDGSTLKGIQAVINEEENQFSEKDLKKLTTGTSISLTGLLVESPAKGQNYEIKTHSFNVIGETDPETYPLQKKRHSFEFLREIPHLRIRTNTFGAIARVRNKISYKIHEYFQKNGFFYINTPIITSNDGEGAGEMFRVSTLKFNKLNNAPSNIDFKDDFFGKEAFLSVTGQLHGEAYAMALSKIYTFGPTFRAENSNTTRHASEFWMIEPEMAFYKLNDNIALAEDLLKYLLSSILNECSQDMDFLENYIEKGLIKKLENVINSNFEVITYTKAIEILENSKKNFEIKPYWGIDLQTDHERYLTEETFKKPVVVIDYPKNFKAFYMKANKDNKTVKGMDILVPKIGEIIGGSEREDDLQKLENRIKELNLNIEHLNWYIDLRRFGSAPHSGFGLGLERLVQYSTGISNIRDSIPFPRTPKNLYF

SEQ ID NO: 10503 - DNA, 1437 bp, Clostridium hylemonae DSM 15053
  CDS (1)..(1437): transl_table=11
atgtgttataatgacaacatgaataatataaaggagtcagttggtatggatttgataactatcagagaattgtataaaaacagagaagaatatctggacaaggacattacagtcgggggatgggtgcgcagtatccgggattccaaggcatttggatttatcgtcgtgaatgacgggaccttttttgagccgctgcaggtagtgtaccacaatacgatggataattttgatgagatatcccggcttaacgtaggggccgctatcatagtgacgggtacacttgtagcaacgcctcaggcaaagcagccatttgagatacaggcaaaagagataacagtggaaggagcgtccgcgccggactatccgctccagaagaaacgccacagctttgagtatctgagaacgatcgcgcacctgcgcccgaggaccaatacattccaggctgtattccgcgtgcgttccctcacggcatatgcgctccacaagttcttccaggagagagggtttgtctacgttcataccccgatcataacgggaagcgactgtgaaggagccggagagatgttccgcgtcacaacgctcgacatgcaaagcattccgaaagacgacagcggaaaggttgattattcccaggacttctttggcaaagagacaagcctgacggtcagcggccagctcaacggcgagacatatgcccaggcgttccgcaatatctatacattcggaccgacatttcgggcggagaattccaacacgacccggcatgcggctgagttctggatgatagagccggagatggcctttgcggatctggatgacgatatgatgctggcggaggcaatgctgaaatacgtgatcagttatgtgctggagcaggcgccggaagagatcaatttctttaattcatttgtggacaagggacttctggaaaggctgaacaacgtagtgtcctccgaatttgcgagagtcacctacacagaggcggtggagatcctggagaagaacaacgataaatttgagtataaagtatcctgggggacagaccttcagacagagcatgagcgctatctgacggaagaaatatacaaacgtccggtatttgtgacggattatccgaaggagatcaaggcattttatatgaagcagaacgacgacgggaaaacggttgcggctgtggactgccttgtgccgggtatcggagagatcatcggggggagccagagagaagacgactatgataaactgcttgcaagaatgaaggagatggatctgaaggaagaggattatgaattctatcttgacctcagaaaatatggttccacgagacattccggtttcggcctcgggtttgaacggtgcatcatgtatctgacgggtatgggaaatatccgcgatgtggttccattcccgagaacggtaaacaactgcgagctgtaa

SEQ ID NO: 10504 - protein, 478 aa, Clostridium hylemonae DSM 15053
MCYNDNMNNIKESVGMDLITIRELYKNREEYLDKDITVGGWVRSIRDSKAFGFIVVNDGTFFEPLQVVYHNTMDNFDEISRLNVGAAIIVTGTLVATPQAKQPFEIQAKEITVEGASAPDYPLQKKRHSFEYLRTIAHLRPRTNTFQAVFRVRSLTAYALHKFFQERGFVYVHTPIITGSDCEGAGEMFRVTTLDMQSIPKDDSGKVDYSQDFFGKETSLTVSGQLNGETYAQAFRNIYTFGPTFRAENSNTTRHAAEFWMIEPEMAFADLDDDMMLAEAMLKYVISYVLEQAPEEINFFNSFVDKGLLERLNNVVSSEFARVTYTEAVEILEKNNDKFEYKVSWGTDLQTEHERYLTEEIYKRPVFVTDYPKEIKAFYMKQNDDGKTVAAVDCLVPGIGEIIGGSQREDDYDKLLARMKEMDLKEEDYEFYLDLRKYGSTRHSGFGLGFERCIMYLTGMGNIRDVVPFPRTVNNCEL

SEQ ID NO: 10505 - DNA, 1389 bp, Borrelia burgdorferi 29805
  CDS (1)..(1389): transl_table=11
atgtttacaagcattaaagatattttaaaaaacccaattttaaatagcaatgttacaataaacggctggattagaaccaaaagaagtaatggcaaaattggatttatagaaattaatgatggttcaacgcttaaaggaattcaagctgtaataaacgaagaagaaaatcaatttagtgaaaaagatctaaaaaaattaacaacaggaacaagtatatcgttaacgggcctattagtagaaagtcctgcaaaagggcaaaattatgaaataaaaacacatagttttaatgtaatcggagaaacagacccagaaacttacccattgcaaaagaaaagacattcttttgaatttctaagagaaataccccatttaagaatacgaaccaatacatttggagctattgctagggtaagaaacaaaatttcatacaaaattcatgaatatttccaaaaaaatggttttttttatattaatacaccaataattacatcaaatgatggggaaggtgctggagaaatgtttagggtttccacactaaaatttaataaactaaacaatgcacttagcaatattgattttaaagacgatttttttggaaaagaagcttttctctctgtcactggtcaattgcatggggaagcatatgcaatggctttatctaaaatatatacattcggaccaacatttagagcagaaaattctaacaccacacgccacgcttcagaattttggatgatagaaccagaaatggctttttataagcttaacgacaatattgccctagcagaagatctcttgaaatatcttttaagttcaattttaaacgaatgctcacaagatatggattttttagaaaattacattgaaaaaggtttaattaaaaaactagaaaatgtaataaattcaaattttgaggttattacctatactaaagcaattgaaattcttgaaaactcaaaaaaaaattttgaaataaaaccttactggggaatagatttgcaaacagatcacgaaagatacctaacagaagagacttttaaaaaaccggtagtggtcattgattatccaaaaaatttcaaagcattttacatgaaagcaaataaagacaataaaactgttaaaggaatggacatacttgttccaaaaattggagagattatagggggaagcgaaagagaagatgacctgcaaaaattagaaaatagaataaaagaattaaacttaaacattgaacatctaaactggtatcttgatctaagaagatttggctcggctcctcattctggctttggacttggacttgaaagattggtgcaatactcaacaggaatatctaatataagagattcaataccattcccaaggactcctaaaaatctttatttttaa

SEQ ID NO: 10506 - protein, 462 aa, Borrelia burgdorferi 29805
MFTSIKDILKNPILNSNVTINGWIRTKRSNGKIGFIEINDGSTLKGIQAVINEEENQFSEKDLKKLTTGTSISLTGLLVESPAKGQNYEIKTHSFNVIGETDPETYPLQKKRHSFEFLREIPHLRIRTNTFGAIARVRNKISYKIHEYFQKNGFFYINTPIITSNDGEGAGEMFRVSTLKFNKLNNALSNIDFKDDFFGKEAFLSVTGQLHGEAYAMALSKIYTFGPTFRAENSNTTRHASEFWMIEPEMAFYKLNDNIALAEDLLKYLLSSILNECSQDMDFLENYIEKGLIKKLENVINSNFEVITYTKAIEILENSKKNFEIKPYWGIDLQTDHERYLTEETFKKPVVVIDYPKNFKAFYMKANKDNKTVKGMDILVPKIGEIIGGSEREDDLQKLENRIKELNLNIEHLNWYLDLRRFGSAPHSGFGLGLERLVQYSTGISNIRDSIPFPRTPKNLYF

SEQ ID NO: 10507 - DNA, 1389 bp, Borrelia burgdorferi Bol26
  CDS (1)..(1389): transl_table=11
atgtttgcaagcattaaagatattttaaaaaacccaattttaaacagcaatgttacaataaacggctggattagaaccaaaagaagtaatggcaaaattggatttatagaaattaatgatggttcaacgcttaaaggaattcaagctgtaataaacgaagaagaaaatcaatttagtgaaaaagatctaaaaaaattaacaacaggaacaagtatatcgttaacgggcctattagtagaaagtcctgcaaaagggcaaaattatgaaataaaaacacatagttttaatgtaatcggggaaacagacccagaaacttacccattgcaaaagaaaagacattcttttgaatttttaagagaaataccccatttaagaatacgaaccaacacatttggagctattgctaggataagaaacaaaatttcatacaaaattcatgaatatttccaaaaaaatggttttttttatattaatacaccaataattacatcaaatgatggggaaggtgctggagaaatgtttagggtttccacactaaaatttaataaactaaacaatgcacttagcaatattgattttaaagacgatttttttggaaaagaagcttttctctctgtcactggtcaattgcatggggaagcatatgcaatggctttatctaaaatatatacattcggaccaacatttagagcagaaaattctaacaccacacgccacgcttcagaattttggatgatagaaccagaaatggctttttataagcttaacgacaatattgccctagcagaagatctcttgaaatatcttttaagttcaattttaaacgaatgctcacaagatatggattttttagaaaattacattgaaaaaggtttaattaaaaaactagaaaatgtaataaattcaaattttgaggttattacctatactaaagcaattgaaattcttgaaaactcaaaaaaaaattttgaaataaaaccttactggggaatagatttgcaaacagatcacgaaagatacctaacagaagagacttttaaaaaaccggtagtggtcattgattatccaaaaaatttcaaagcattttacatgaaagcaaataaagacaataaaactgttaaaggaatggacatacttgttccaaaaattggagagattatagggggaagcgaaagagaagatgaccttcaaaaattagaaaatagaataaaagaattaaacttaaacattgaacatctaaactggtatcttgatctaagaagatttggctcggctcctcattctggctttggacttggacttgaaagattggtgcaatactcaacaggaatatctaatataagagattcaataccattcccaaggactcctaaaaatctttatttttaa

SEQ ID NO: 10508 - protein, 462 aa, Borrelia burgdorferi Bol26
MFASIKDILKNPILNSNVTINGWIRTKRSNGKIGFIEINDGSTLKGIQAVINEEENQFSEKDLKKLTTGTSISLTGLLVESPAKGQNYEIKTHSFNVIGETDPETYPLQKKRHSFEFLREIPHLRIRTNTFGAIARIRNKISYKIHEYFQKNGFFYINTPIITSNDGEGAGEMFRVSTLKFNKLNNALSNIDFKDDFFGKEAFLSVTGQLHGEAYAMALSKIYTFGPTFRAENSNTTRHASEFWMIEPEMAFYKLNDNIALAEDLLKYLLSSILNECSQDMDFLENYIEKGLIKKLENVINSNFEVITYTKAIEILENSKKNFEIKPYWGIDLQTDHERYLTEETFKKPVVVIDYPKNFKAFYMKANKDNKTVKGMDILVPKIGEIIGGSEREDDLQKLENRIKELNLNIEHLNWYLDLRRFGSAPHSGFGLGLERLVQYSTGISNIRDSIPFPRTPKNLYF

SEQ ID NO: 10509 - DNA, 1392 bp, Coprococcus comes ATCC 27758
  CDS (1)..(1392): transl_table=11
atggatttggtaacagtaagagaattatacagaaacagagaggaatatctggataaagaagtgaccatcgggggatgggtgcgcagtatccgtgattctaagacatttggatttatcgttgtaaatgatggatctttctttgaaaaccttcaggtagtatatcatgataatatggagaactttggcgaaatttccaagctgaatgttggtgcggcaatcattgtaaaaggaacacttgtcgcaacaccacaggcaaagcagccatttgagatccaggcaacagaagttgttgtagaaggtacctctgcaccggattatccgcttcagaaaaaacgtcacagctttgaatatttaagaagtattgcacatcttcgtccaagaaccaatactttccaggcagtgttcagagtacgctcactgactgcttacgcaatccacaaattcttccaggaaagaggattcgtatatgtacatacaccgctgatcacaggaagtgactgcgagggtgcaggagaaatgttccaggtaacaacactggatatgaacaatgtgccgaaaaatgcagacggaactgttgattattccaaagatttctttggaaaagagacaaaccttaccgtaagcggacagctgaacggtgaaacttatgcacaggcattccgcaacatttacacattcggaccgacattccgtgcggagaattccaacaccacacgtcatgccgccgagttctggatgatcgagccggaaatcgcatttgcagatctggaagatgacatgatccttgcagaaaacatgctgaaatatgttatccgctacgtgatggaaaacgctccggaagagatgaatttcttcaattctttcgtagacaaaggactgatcgaccgtctgaacaacgttgtaaattctgatttcgcaagagttacttacacagaagcaatcgaaatccttgaaaagcacaatgacaaatttgaatacaaagtatcatggggagcagatctgcagacagagcatgaacgttatctgacagaagagatctataaacgtccggtattcgttaccgattatccgaaggagatcaaagctttttacatgaagatgaatgatgataacaagaccgtagcagcagttgactgtctggttcctggaatcggtgagatcatcggaggaagccagagagaggacgactacgataagcttgttgcaagaatgaaagagcttggacttaaggaagaagattacggattctatctggatctgagaaagtacggatctacaagacatgcaggattcggacttggatttgagagatgcatcatgtatcttacaggaatgtccaacattcgtgacgtaattccgttcccaagaactgtgaataactgcgaactgtaa

SEQ ID NO: 10510 - protein, 463 aa, Coprococcus comes ATCC 27758
MDLVTVRELYRNREEYLDKEVTIGGWVRSIRDSKTFGFIVVNDGSFFENLQVVYHDNMENFGEISKLNVGAAIIVKGTLVATPQAKQPFEIQATEVVVEGTSAPDYPLQKKRHSFEYLRSIAHLRPRTNTFQAVFRVRSLTAYAIHKFFQERGFVYVHTPLITGSDCEGAGEMFQVTTLDMNNVPKNADGTVDYSKDFFGKETNLTVSGQLNGETYAQAFRNIYTFGPTFRAENSNTTRHAAEFWMIEPEIAFADLEDDMILAENMLKYVIRYVMENAPEEMNFFNSFVDKGLIDRLNNVVNSDFARVTYTEAIEILEKHNDKFEYKVSWGADLQTEHERYLTEEIYKRPVFVTDYPKEIKAFYMKMNDDNKTVAAVDCLVPGIGEIIGGSQREDDYDKLVARMKELGLKEEDYGFYLDLRKYGSTRHAGFGLGFERCIMYLTGMSNIRDVIPFPRTVNNCEL

SEQ ID NO: 10511 - DNA, 1401 bp, Pectobacterium carotovorum subsp. brasiliensis PBR1692
  CDS (1)..(1401): transl_table=11
atgagcgtagtgcctgtagtcgatgtactgcaaggccgtgtcgccgttgacagcgaagtcaccgtgcgcggctgggtacgtacccggagagattctaaagccggtatctcctttatcgccgtttatgacggctcctgctttaatccattacaggctgtcgttaataataatctctccaattatcaggatgatgtactgcgcctgactaccggttgctccgttgaaatcaccggtaacgtcgtcgcgtctccgggtgaaggacagagcttcgagctgcaagccaccaacgtcaatgttgtcggctgggttgacgatcccgatacctacccgatggcggcaaagcgtcacagcatcgaatatctgcgtgaagtggcgcatttacgtccacgcaccaatctgatcggtgccgttgcccgcgttcgccatacgctggcgcaggcaattcaccgcttcttccacgagaacggttacttctgggtatctaccccgctgattaccgcatccgataccgaaggcgcgggtgaaatgttccgcgtttctactctcgatctggaaaacctgccacgtaccgaacaaggtaaagtggatttcagcgaagatttcttcggtaaagaagcgttcctgaccgtatccggccagctgaatggcgaaacctacgcctgtgcgctgtccaacgtctatacctttggcccaacgttccgtgcggaaaactctaacaccagtcgccatctggctgagttttggatgatcgaaccggaagtcgctttcgcctctttggatgacgtcgcggcgctggccgaaaacctgctgaaatatgttttccaggccgtcctgaatgagcgtgccgatgatatggcgttctttgctgagcgcgttgataaagaagccatcactcgactggaaaaattcgtcagctccgatttcgcacaggtggattacaccgatgccgtcgagatactgctaaattgcggacagcagttcgagaacccggtttactggggcgtggatctctcctctgagcacgagcgttatctggcagagcaacacttcaaagcaccggttgtcgttaaaaactacccgaaagatatcaaggccttctatatgcgtatgaatgacgacggtaaaaccgttgccgcaatggatgttttggcaccgggaatcggtgaaatcatcggtggctctcagcgtgaagagcgtttggctcagttggatagccgtctggaagagatgggactgaataaagaagactactggtggtatcgtgatttacgtcgttacggcaccattccacattccggtttcggtttaggttttgaacgattgattgcttatgttaccggtgtacaaaatgtgcgcgatgtcattcctttcccacgcacaccacggaacgccagtttctaa

SEQ ID NO: 10512 - protein, 466 aa, Pectobacterium carotovorum subsp. brasiliensis PBR1692
MSVVPVVDVLQGRVAVDSEVTVRGWVRTRRDSKAGISFIAVYDGSCFNPLQAVVNNNLSNYQDDVLRLTTGCSVEITGNVVASPGEGQSFELQATNVNVVGWVDDPDTYPMAAKRHSIEYLREVAHLRPRTNLIGAVARVRHTLAQAIHRFFHENGYFWVSTPLITASDTEGAGEMFRVSTLDLENLPRTEQGKVDFSEDFFGKEAFLTVSGQLNGETYACALSNVYTFGPTFRAENSNTSRHLAEFWMIEPEVAFASLDDVAALAENLLKYVFQAVLNERADDMAFFAERVDKEAITRLEKFVSSDFAQVDYTDAVEILLNCGQQFENPVYWGVDLSSEHERYLAEQHFKAPVVVKNYPKDIKAFYMRMNDDGKTVAAMDVLAPGIGEIIGGSQREERLAQLDSRLEEMGLNKEDYWWYRDLRRYGTIPHSGFGLGFERLIAYVTGVQNVRDVIPFPRTPRNASF

SEQ ID NO: 10513 - DNA, 1401 bp, Pectobacterium carotovorum subsp. carotovorum WPP14
  CDS (1)..(1401): transl_table=11
atgagcgtagtgcctgtagtcgatgtactgcaaggccgtgtcgccgttgacagcgaagtcaccgtgcgcggctgggtacgtacccggagagattctaaagccggtatctcctttatcgccgtttatgacggctcctgctttaatccattacaggctgtcgttaataataatctctccaattatcaggatgacgtgctgcgcctgactaccggttgttccgtagaaatcaccggtaatgtcgtcgcgtctccgggtgaaggtcagagcttcgagctacaagccaccaacgtcaacgttgtcggctgggttgacgatcccgatacctacccgatggcggcgaagcgtcacagcatcgaatatctacgtgaagttgcgcacttacgtccgcgtaccaatctgatcggcgccgtggcacgtgttcgccatacgctggcacaggcgattcaccgcttcttccatgagaatggttacttctgggtatctaccccgctgattaccgcatccgataccgaaggcgcgggtgaaatgttccgcgtttctactctcgatctggaaaacctgccgcgtaccgaacaaggtaaagtggatttcagcgaagatttcttcggtaaagaagcattcctgactgtatccggtcagttaaatggcgaaacctacgcctgtgcgctgtccaatgtgtatacctttggtccaaccttccgcgcagaaaactccaacaccagccgccatctggccgagttttggatgatcgaaccggaagtcgctttcgccacgttggatgacgttgccggtctggctgaaaacctgctgaaatatgttttccaggccgtactgaacgaacgtgccgatgatatggcgttcttcgctgaacgtgtcgataaagaagccatcactcgactggaaaaattcgtcagctctgatttcgcacaggttgactacaccgatgccgtcgagatcctgctgaactgcgggaagcagttcgagaacccggtttactggggcgttgacctctcctccgaacatgagcgttatctggcggagcagcacttcaaagcaccggttgtcgttaaaaactacccgaaagacatcaaagccttctacatgcgtatgaatgaagacggtaagaccgttgccgcaatggatgttctggcaccaggaatcggtgaaatcatcggtggttctcagcgtgaagagcgtctggctcaactggatagccgtctggaagagatgggactgaataaagaagactactggtggtatcgtgatttacgtcgttacggcaccattccacattccggtttcggtttaggttttgaacgattgattgcctatgttaccggtgtacaaaatgtgcgcgatgtcattcctttcccacgcacaccacggaacgccagtttctaa

SEQ ID NO: 10514 - protein, 466 aa, Pectobacterium carotovorum subsp. carotovorum WPP14
MSVVPVVDVLQGRVAVDSEVTVRGWVRTRRDSKAGISFIAVYDGSCFNPLQAVVNNNLSNYQDDVLRLTTGCSVEITGNVVASPGEGQSFELQATNVNVVGWVDDPDTYPMAAKRHSIEYLREVAHLRPRTNLIGAVARVRHTLAQAIHRFFHENGYFWVSTPLITASDTEGAGEMFRVSTLDLENLPRTEQGKVDFSEDFFGKEAFLTVSGQLNGETYACALSNVYTFGPTFRAENSNTSRHLAEFWMIEPEVAFATLDDVAGLAENLLKYVFQAVLNERADDMAFFAERVDKEAITRLEKFVSSDFAQVDYTDAVEILLNCGKQFENPVYWGVDLSSEHERYLAEQHFKAPVVVKNYPKDIKAFYMRMNEDGKTVAAMDVLAPGIGEIIGGSQREERLAQLDSRLEEMGLNKEDYWWYRDLRRYGTIPHSGFGLGFERLIAYVTGVQNVRDVIPFPRTPRNASF

SEQ ID NO: 10515 - DNA, 1449 bp, Chryseobacterium gleum ATCC 35910
  CDS (1)..(1449): transl_table=11
atgaaaaagcaaacgatcaaagaaatcctgaaggattacaagaaagtattacatcatgacattacagtttacggatgggtaagatcattccgtgctaatcgctttattgcgcttaatgatggttctacgattaataatttgcagatagttgttgatttcgaaaattttgatgaagcaatcatcaagaatatcagtacggcttcatccctgaaagtagtaggtgaagtggtagaaagccagggagcaggacagtctgtggaaattatcgctaaaaagattattattttaggggataactttacggaagaacttcagagtacaattcttcagcctaagaagcacagtctggagaaacttcgtgagcaggcgcacttaagattcagaacaaacctttttggagcagtgttcagagtacgtcacgcagtaagctttgcagttcactcattcttcaaccagaaccagtttttctatatcaatacaccggttattactggtgctgatgcggaaggggcaggagaaatgtttggagtaaccaactttgatctgaacaatatgccgagaactgaagaaggagagatagattttgcacaggatttcttcggcagaaaaacaaaccttacggtttcaggacagcttgaaggagaaactgcagctatgggattgggaagaatttataccttcggacctactttccgtgcagaaaattccaataccacaagacaccttgccgaattctggatgattgagccggaagtagctttcaacaaccttgaagacaatatcgaccttgcggaagatttcttaaaatatgtgattcagtatgttttggataactgtaaagatgatcttgaattcttagacaagcgttttgaagaagaacaaaagtcaaaaccggaaaaagaaagagcaaaagaaggtcttatcgaaaaacttcagaatgtagtggcaaaacgtttcaaacgtgtaagctatacggaagctattgaaatcttactgaactctaaagaaaataaaaaaggaaaatttgcttacccggttgaaaaatggggaactgatcttcagtctgagcatgaaagataccttgttgaaaaacatttcgaaagcccggtagtattatttgactatccgaaagaaatcaaagctttctatatgaaactgaacgatgacaacaaaaccgttgcagcgatggacgtgcttttcccaggtatcggtgaaatcatcggtggatcagagagagaggcaagattagatgttttaaaacagaaaatggtagatatgcatgtagatgagcacgagctttggtggtatcttgataccagaaaattcggttcagtaccgcatgccggttttggtttaggactggaaagattagttcttttcgtaacaggaatgacgaatatcagagatgtaattcctttccctagaacgccaaaaagcgctgaattctag

SEQ ID NO: 10516 - protein, 482 aa, Chryseobacterium gleum ATCC 35910
MKKQTIKEILKDYKKVLHHDITVYGWVRSFRANRFIALNDGSTINNLQIVVDFENFDEAIIKNISTASSLKVVGEVVESQGAGQSVEIIAKKIIILGDNFTEELQSTILQPKKHSLEKLREQAHLRFRTNLFGAVFRVRHAVSFAVHSFFNQNQFFYINTPVITGADAEGAGEMFGVTNFDLNNMPRTEEGEIDFAQDFFGRKTNLTVSGQLEGETAAMGLGRIYTFGPTFRAENSNTTRHLAEFWMIEPEVAFNNLEDNIDLAEDFLKYVIQYVLDNCKDDLEFLDKRFEEEQKSKPEKERAKEGLIEKLQNVVAKRFKRVSYTEAIEILLNSKENKKGKFAYPVEKWGTDLQSEHERYLVEKHFESPVVLFDYPKEIKAFYMKLNDDNKTVAAMDVLFPGIGEIIGGSEREARLDVLKQKMVDMHVDEHELWWYLDTRKFGSVPHAGFGLGLERLVLFVTGMTNIRDVIPFPRTPKSAEF

SEQ ID NO: 10517 - DNA, 1440 bp, Dyadobacter fermentans DSM 18053
  CDS (1)..(1440): transl_table=11
atgggaccgttgcaaatcaaagaaattttacaaactgcgcctgaaaaccaatcggttgttgtaaagggctgggtaagaacaaaacgagaaagcaaaaacgcaattttcatcgcgttgaatgacgggtcgaccatcaataatattcaggcagtggctgaacccggtcagttttctgccgagctgctgctcacagtaaccaccgggtcgtgccttaaagtaaccggccagctcatcgcgtcacagggtgcgggacaaacggtggaggtaaaaatcaccgacattgaggtgtacggaacggctgatcctgaggaatatccgctgcagccgaagaagcattcactcgaattcctgcgcgagatcgcccaccttcgcccgcgcacaaacactttcagcgcgatcctgcgtatccgtcacgcattggcgttcgcagtgcaccagtatttcaatgaaaaaggctttttctacctgcacacgccggtaattacggcttcggacgctgagggtgctggcgaaatgttccgtgtgaccacgctcgacctgaataacctgccgcgtacggaagaaggtgcgattaattttaaagaagatttcttcggtcgcgaagctaacctgaccgtttcgggccagctggaaggcgagctgggcgcgatggcgctttcgaagatttacacttttggcccaacattccgcgccgaaaactccaacacaacacgccatttggctgaattctggatgattgagccggaaatggcgtttttcgagctggaagacaatatggatttggcggaggattttgtcaaaaaagtgatcacttatgcattgatcaactgcaaagacgacctgaatttccttcaaaaccgcctcattgaagaagaaaagaacaagccgcaaaacgagcgctcgctacctttgctggaaaaactggcattcgtagtggataacccgttcgagcggttgacttataccgaagcaatcgagattttgctgaaatcgaaaccgcaaaaagaaggcaaattccagtttccggtaaccggctggggcatcgatttgtcgagcgagcacgaacgctatctggtcgagaagcatttcaaaaaaccggtgatcctgaccaactatccgcgcgagatcaagtcgttttacatgaaactcgatgaagacggaaaaaccgtgcgcgcaatggacgtgctgttccccggcatcggcgagatcatcggcggtagccagcgtgaagagagttacgaaaagctcctcggccgcgtgaaagaaatcggtatcgatcctgaaaacctgtggtggtacctcgaaacccgcaaattcggcactgcaccgcattcaggcttcggactgggcttcgagcgcctcgtgcagttcgtgactggcatgggcaacatccgcgacgtgatcccattcccacgttaccctaagagcgcagaattttaa

SEQ ID NO: 10518 - protein, 479 aa, Dyadobacter fermentans DSM 18053
MGPLQIKEILQTAPENQSVVVKGWVRTKRESKNAIFIALNDGSTINNIQAVAEPGQFSAELLLTVTTGSCLKVTGQLIASQGAGQTVEVKITDIEVYGTADPEEYPLQPKKHSLEFLREIAHLRPRTNTFSAILRIRHALAFAVHQYFNEKGFFYLHTPVITASDAEGAGEMFRVTTLDLNNLPRTEEGAINFKEDFFGREANLTVSGQLEGELGAMALSKIYTFGPTFRAENSNTTRHLAEFWMIEPEMAFFELEDNMDLAEDFVKKVITYALINCKDDLNFLQNRLIEEEKNKPQNERSLPLLEKLAFVVDNPFERLTYTEAIEILLKSKPQKEGKFQFPVTGWGIDLSSEHERYLVEKHFKKPVILTNYPREIKSFYMKLDEDGKTVRAMDVLFPGIGEIIGGSQREESYEKLLGRVKEIGIDPENLWWYLETRKFGTAPHSGFGLGFERLVQFVTGMGNIRDVIPFPRYPKSAEF

SEQ ID NO: 10519 - DNA, 1362 bp, Denitrovibrio acetiphilus DSM 12809
  CDS (1)..(1362): transl_table=11
atgagaaacaaaatcaaagaccttttaaacgcagagcatcctgagagtgatattactgttcatgggtgggtgcgaagcaaaagagattcgaagaattttacgtttctggaactgaacgacggttcatgtctgaaaaatcttcaggcgattgctgatgaagatatcggaacttacgatgttttaaaggatattaataccggagcatctgttgagataaaaggtgatcttatagaatcaccagggaaaggtcagaagtgggagcttaaggcgaaggcagttgctcttgttggtggtgcagaccaggagacatatcctctgcaaaagaaacgccactcagacgaattcctgcgccagatagctcatctgcgccccagaacgaataaatatggagcgatatttcgtatccgctccgaggcttcatttgctgtgcatcagtttttccgtgagcgtggatttcactatgttcatacaccgataattacaggttctgactgtgagggtgccgggcagatgttccgcgtgacaacccttgaggatacgaaaaaacctgttgcggaagattttttcggcaaagcggcgtatcttacagtttcaggtcagcttgatgctgaaagctatgcgtgtgcacttggcagtgtttatacttttggaccgacattccgcgccgaaaacagtaataccccaaggcacgcagcagagttctggatgattgaaccggaaatggcgtttgctgatattcacgacaatatgactcttgccgaagagtttgtgaagtatcttatctggtttttgatggagaattgcaaagaagaccttgaactgttttttaattttgtcgacaaagagcttgaggccaagcttacaaatatgcttacgaatgattttgagcgtgtcgaatatcgcgaagcggtgaagattcttgagaattccggcgaaaagttcgagtaccctgttgggttcggtgtggatttgcagactgagcatgagagatatctgactgaaaagcactttaaaaagccggtttttgtttataactacccgaaaagcattaagccgttctatatgcgtcagaacgatgatggtgagactgtcgccgctatggatcttcttgtcccttcagttggggagcttatcggcggaagccagcgtgaggagaggcttgatgttctggatagtgctatagaaaagatgggactcagtatggaagaatacggctggtatgctgagctaaggaaatacggcacagtgccccatgcagggttcgggcttgggtttgaacgacttctgatgttcgttacaggtgtgacaaatatcagagatgtaataccttttgccagaactccgaaaaatcttgaattttaa

SEQ ID NO: 10520 - protein, 453 aa, Denitrovibrio acetiphilus DSM 12809
MRNKIKDLLNAEHPESDITVHGWVRSKRDSKNFTFLELNDGSCLKNLQAIADEDIGTYDVLKDINTGASVEIKGDLIESPGKGQKWELKAKAVALVGGADQETYPLQKKRHSDEFLRQIAHLRPRTNKYGAIFRIRSEASFAVHQFFRERGFHYVHTPIITGSDCEGAGQMFRVTTLEDTKKPVAEDFFGKAAYLTVSGQLDAESYACALGSVYTFGPTFRAENSNTPRHAAEFWMIEPEMAFADIHDNMTLAEEFVKYLIWFLMENCKEDLELFFNFVDKELEAKLTNMLTNDFERVEYREAVKILENSGEKFEYPVGFGVDLQTEHERYLTEKHFKKPVFVYNYPKSIKPFYMRQNDDGETVAAMDLLVPSVGELIGGSQREERLDVLDSAIEKMGLSMEEYGWYAELRKYGTVPHAGFGLGFERLLMFVTGVTNIRDVIPFARTPKNLEF

SEQ ID NO: 10521 - DNA, 1404 bp, Atopobium parvulum DSM 20469
  CDS (1)..(1404): transl_table=11
gtggagcgcatcacgatttctgcattgtacgcagatgcagagcaacttggtggccaaaaagttaccgcggccggctgggtacgttcagtaagggatatgaagaattttggcttcgtcacacttaatgacggtagctgcttcaaagacctacaggttgttatgaatcgtgagaaccttagcaattacgaggaggttgcttcttgtggtgttggcgctgctctgattatcgagggcgtccttgagcttactcctgatcgcccacagcctattgagctgcaggcacagactattgtgattgagggaccatccagcccagattatccaatgcagaagaagcgtcagtctcttgaataccttcgtacgcagcagcaccttcgtcctcgcaccaacatgttccgcgccgtcttccgcatccgttctgtggctgcttttgctatccaccagttcttccaggatcgcggctttgtctacgtgaacaccccaatcatcactgcatctgatgctgagggtgcaggcgagatgttccgtgttaccacgcttgatttgaacaacgttccacgtaccgagaagggcgatgtcgactattcaaaggatttctttggtcagtcttctcacctcaccgtttctggtcagcttcaagcggagaacttcgccatggcctttggtgacgtgtacacctttggtccaacgtttcgcgcagagaattccaacacacgtcgccacgctgcagagttttggatgattgagccagagatggctttctgcgaccttgcacaggacatggacgttgcagaagagatgctccgctacgttattgcatacgtgcttgaacattgtccagatgagcttgaaatgctcaataagtttgtggataagggcttgcttgagcgcttgaatcacgttgcaaattcccagttctctcgcgtttcttacactgaggcaattgagattttgcaggaggcagtaaaggctggtcagaagtttgagtaccctgttgagtggggcattgaccttcagactgagcacgagcgttacctcactgagcagcactttggaaagccaatttttgttactgattatccagcagcaattaaggctttctacatgcgtcttaacgacgacggtaagaccgttgctgcagctgactgccttgttccaggcatcggcgagattattggtggctcacagcgagaagatcgtcttgagcttctggagaagcgcattgttgagcttggcatgaatcctgacgattacaagtattacttggatcttcgtcgttacggctcttgcacacactctggctttggtcttggctttgagcgccttgttatgtacctcactggtgtggataacattcgtgacgttattccacatcctcgtaccgttggcaacgccgacttctaa

SEQ ID NO: 10522 - protein, 467 aa, Atopobium parvulum DSM 20469
MERITISALYADAEQLGGQKVTAAGWVRSVRDMKNFGFVTLNDGSCFKDLQVVMNRENLSNYEEVASCGVGAALIIEGVLELTPDRPQPIELQAQTIVIEGPSSPDYPMQKKRQSLEYLRTQQHLRPRTNMFRAVFRIRSVAAFAIHQFFQDRGFVYVNTPIITASDAEGAGEMFRVTTLDLNNVPRTEKGDVDYSKDFFGQSSHLTVSGQLQAENFAMAFGDVYTFGPTFRAENSNTRRHAAEFWMIEPEMAFCDLAQDMDVAEEMLRYVIAYVLEHCPDELEMLNKFVDKGLLERLNHVANSQFSRVSYTEAIEILQEAVKAGQKFEYPVEWGIDLQTEHERYLTEQHFGKPIFVTDYPAAIKAFYMRLNDDGKTVAAADCLVPGIGEIIGGSQREDRLELLEKRIVELGMNPDDYKYYLDLRRYGSCTHSGFGLGFERLVMYLTGVDNIRDVIPHPRTVGNADF

SEQ ID NO: 10523 - DNA, 1446 bp, Sphingobacterium spiritivorum ATCC 33300
  CDS (1)..(1446): transl_table=11
atgaaacacacacgtattaaagaattattgaatgccactgagtttgggcaagaggtcattgtaaagggatgggtaagaaccttccgtaacaatcaatttatagcgatcaatgatggttcttcaatcaataatatccaggcagtagttgattttgaaaatacggatgatgcgttattaaaaagaatcactacaggtgctgctgtacgtgtcaaaggaaccctgattgaatctctgggcaaaggtcagaaggtagaggtcaaagtaacggaacttgatgtgatcggagattcagatcctgaaaaatttcctttacaacccaaaaaacacagtttagaatttttgcgtgaaatcgctcatttacgcttccgtaccggaacattcaatgctattttcaaagtacgtaatgcattgtcatttgcagtacaccgcttcttcaatgaaagagactttgtgtatatgcacactcctattattaccggttcagacgctgaaggtgcgggagaaatgttccgtgtgactactttagacctgaataatcctcctcgtaccgaaaacggtgaaatagattttaaagaagacttcttcggaaaatccactaaccttaccgtatccgggcaattagaaggtgaactggcagctttagcatttggtaatatttatactttcggccccacattccgtgctgaaaactccaatacaacacgtcacctggctgaattctggatgatcgaacctgaaatggctttctatgaactggaagacaatatggatctggctgaagccttattgaaatatgttatacggtatgcgttggaaacctgcccggaagagatagagtttctgaaaaaccgtttactggaagaagagaaaaacaaaccggctgcagatcgttcggacatggatcttattgaaaaactgaaattctgtcttgagaatgaatttgagcgggttaaatatacagatgcgatcgagatcctgaagcgcagcaagccaaatcagaaaaaacagtttaaatatctgattgacgaatggggtgcagatcttcagtcagaacacgaacgttatcttgtggaaaaacattttaagaaaccggtgatccttacagactatccgagagagatcaaatcattctatatgaaacagaacgaaccggatacattaggcagaaacactgttcgtgcgatggatatcctgtttccgggtataggcgaaatggttggcggatcacaacgggaagaaaatctggacaaattactggctcgtatggctgaggtaggaataccggccgaagaaatggaatggttcttggatacccgccgtttcggatcagttcctcactcaggtttcggtgtcggatttgagcgtctggtactattcgtaacaggaatgaccaatatccgtgatgttatcccattcccgagaacaccaaaaaatgctgagttttaa

SEQ ID NO: 10524 - protein, 481 aa, Sphingobacterium spiritivorum ATCC 33300
MKHTRIKELLNATEFGQEVIVKGWVRTFRNNQFIAINDGSSINNIQAVVDFENTDDALLKRITTGAAVRVKGTLIESLGKGQKVEVKVTELDVIGDSDPEKFPLQPKKHSLEFLREIAHLRFRTGTFNAIFKVRNALSFAVHRFFNERDFVYMHTPIITGSDAEGAGEMFRVTTLDLNNPPRTENGEIDFKEDFFGKSTNLTVSGQLEGELAALAFGNIYTFGPTFRAENSNTTRHLAEFWMIEPEMAFYELEDNMDLAEALLKYVIRYALETCPEEIEFLKNRLLEEEKNKPAADRSDMDLIEKLKFCLENEFERVKYTDAIEILKRSKPNQKKQFKYLIDEWGADLQSEHERYLVEKHFKKPVILTDYPREIKSFYMKQNEPDTLGRNTVRAMDILFPGIGEMVGGSQREENLDKLLARMAEVGIPAEEMEWFLDTRRFGSVPHSGFGVGFERLVLFVTGMTNIRDVIPFPRTPKNAEF

SEQ ID NO: 10525 - DNA, 1389 bp, Oribacterium sinus F0268
  CDS (1)..(1389): transl_table=11
atggaaattacaggattaagagacattttcctatcacaggaagaatatctggatacagaggtcatggtcagcggttgggtaagaagtaacagagactccaagaatttcggatttttggtgatttccgacggtaccttctttactccgcttcaggttgtttaccatgacagtctggaaaactttgcccaagccgcaaagcttggtgtcggtgctgcggtaattgtggaaggaaagctggtggctacaccggaagcgaagcagccctttgagttgcaggccagttccattacagtagaaggagatacggaagccagttatcccttacaaaagaaaagacatactttagaatatcttcgtactattccgcatcttcgtccaagaaccaataccttccaggcggtgttccgtattcgttctcaggtagctttcgcccttcactccttcttccaggagcgaggcttcgtttatgtgcatacacccattatcacagcctccgatacagagggcgcaggagaaatgttccaggtaaccaccctgcccttggaatccgttcctatggaaaagggtgaggtgcaatatggagaggatttcttcggtaaaaaaaccagccttaccgtttccggacagttaaacggagaaacctttgcccaggccttccgagatatctataccttcggacctaccttcagagcggagaagtccaacacccaaaggcacgctgcggaattctggatgattgagccggagatggccttcgcagatctggacgatgtcatgtttatcgcggaggatatgctgaaatatgtaattcagtatgttttagtcaatgcgccggaagaattggaattcttaaatcaattcgtggataagggtcttttggatagattaaatcatattgtagagtccgaattcgccagagtaacgtatacggaagcggtagaaattttacaaaaacaaaacgaccgttttgaatataaggtggagtggggctgtgacctgcaaaccgagcatgagcgttacctcaccgaagaagtttacaagcgtcctgtcttcgtaacggattatccgaaggatattaaagctttctacatgaagctgaacgaggacggaaagaccgttgccgcggtggattgtctggttcccggcatcggagaaatcatcggcggttctcaaagagaagatgattatgagaaattaaagaagcgtatggaggagcttaagatggatctggaggaatatgaattctatctggatttaagacgttacggctccacaagacacggcggtttcggtctcggctttgagcgagctgttatgtatattaccggtatgagcaatattcgtgatgtactccccttcccaagaaccgttggaaactgtgaattataa

SEQ ID NO: 10526 - protein, 462 aa, Oribacterium sinus F0268
MEITGLRDIFLSQEEYLDTEVMVSGWVRSNRDSKNFGFLVISDGTFFTPLQVVYHDSLENFAQAAKLGVGAAVIVEGKLVATPEAKQPFELQASSITVEGDTEASYPLQKKRHTLEYLRTIPHLRPRTNTFQAVFRIRSQVAFALHSFFQERGFVYVHTPIITASDTEGAGEMFQVTTLPLESVPMEKGEVQYGEDFFGKKTSLTVSGQLNGETFAQAFRDIYTFGPTFRAEKSNTQRHAAEFWMIEPEMAFADLDDVMFIAEDMLKYVIQYVLVNAPEELEFLNQFVDKGLLDRLNHIVESEFARVTYTEAVEILQKQNDRFEYKVEWGCDLQTEHERYLTEEVYKRPVFVTDYPKDIKAFYMKLNEDGKTVAAVDCLVPGIGEIIGGSQREDDYEKLKKRMEELKMDLEEYEFYLDLRRYGSTRHGGFGLGFERAVMYITGMSNIRDVLPFPRTVGNCEL

SEQ ID NO: 10527 - DNA, 1416 bp, Porphyromonas uenonis 60-3
  CDS (1)..(1416): transl_table=11
atgaataactcactaccacgcactactatcaaggagctcccccagcttgctcagcgtcagctcccccagcccgtctgtgtcaagggttgggtacgtaccaagcgaggcaacaaagctgtctgcttcgttgcgctcaacgatggctcaaccatacacagcatacagatcgtcattgacaagacccagaccgaccccaagctcatcgagcagatcaccacaggcgccgctatcggagtcgtcggcacgctcgtcgcttctcaaggtcaagggcaagagtacgagatacaggctagcgaaataaccatctacggcacctctgatcccgtccgctatccactgcaaaagaaggggcacacgctagagttccttcgtgagatcgctcacttgcgtccacgtaccaacaccttcgcagcagtcctccgcatccgccacaatatggcttatgcgatccacaccttctttcacgagcgtggctacttttacctccacaccccgatcatcacctcaagcgatgccgagggtgctgggcaaatgtttaccgtcaccacgctagacatgaacaagctccccctcgctaaagatgggagcgtggactacagcaaagacttctttggcaagcatacctcactgaccgtatcgggacagctagagggcgagctaggagccatggcgctaggaggtatctacacctttggtcctacctttagagctgagaactctaatactccacggcacctcgcagagttttggatggtcgagcccgaggtcgcctttatggataatgagggcaaccaagacctcgccgaggcgttcaccaagcattgtctccagtgggctcttgatcactgcatggacgaccttgagttcctcgccgagcactacgataaggagctcatcgagcgcatccgcttcgtcgtagagcgtccattcgtacgtaccacctataccgagggtgtcgccatcctcgaggaggccgtccgtaacggcaagaagttcgagttccccgtctactggggagccgacctcgccagcgagcacgagcgctacctcgtcgagcagcactacaatgcgcccgtcattatgaccgactacccgaaggagatcaaggccttctatatgaagcaaaacgaagatggcaagaccgtccgcggtatggacgtcctcttcccgcacatcggtgaaatcatcggaggtagcgagcgtgagaccgacatagacaagctcacggcacgtgcccaggaggtcggcatcaaggacaaggatctgtggtggtacctcgacacccgtcgctatgggtcagcaccacatgcgggcttcggactaggcttcgagagactcctactcttcgtcacaggcatgaccaatatccgtgacgtaatccccttcccccgcacaccaaacaacgctaacttctag

SEQ ID NO: 10528 - protein, 471 aa, Porphyromonas uenonis 60-3
MNNSLPRTTIKELPQLAQRQLPQPVCVKGWVRTKRGNKAVCFVALNDGSTIHSIQIVIDKTQTDPKLIEQITTGAAIGVVGTLVASQGQGQEYEIQASEITIYGTSDPVRYPLQKKGHTLEFLREIAHLRPRTNTFAAVLRIRHNMAYAIHTFFHERGYFYLHTPIITSSDAEGAGQMFTVTTLDMNKLPLAKDGSVDYSKDFFGKHTSLTVSGQLEGELGAMALGGIYTFGPTFRAENSNTPRHLAEFWMVEPEVAFMDNEGNQDLAEAFTKHCLQWALDHCMDDLEFLAEHYDKELIERIRFVVERPFVRTTYTEGVAILEEAVRNGKKFEFPVYWGADLASEHERYLVEQHYNAPVIMTDYPKEIKAFYMKQNEDGKTVRGMDVLFPHIGEIIGGSERETDIDKLTARAQEVGIKDKDLWWYLDTRRYGSAPHAGFGLGFERLLLFVTGMTNIRDVIPFPRTPNNANF

SEQ ID NO: 10529 - DNA, 1425 bp, Capnocytophaga gingivalis ATCC 33624
  CDS (1)..(1425): transl_table=11
atgagtatcaaagaattattacaagaaaagacaaacataggagaagttaccctcagaggatgggtacgtacttttcgcagcaatcgctttatagcccttaatgatggttctactttgtccaacctacaagtggtggtggatttcgaacacactcccgaggagactctcaagcgtatcaccactggtgcggctattgaggttaaagggaaagtagtagaaagccaaggaaaaggtcaatcaatagaagtacaagccactgaggtgaccatcttgggagactgtaatcctgatgagtaccctatccaacctaaaaaacactccttggagttccttcgcgaacaggcacacctaagagtgcgtaccaatgcctttggagctatcatgcgcgtacgctctaccttagcctatgctatacataagtatttccaagaaaaaggtttcttctatgtcaatacccctattatcaccggaagcgatgcagaaggagcaggggagatgttccgtgtcactactctcgatgcaaagaatccgccccttaccgagacaggagaggtagattataagaaagatttcttcggtcgtgagacaaacttaactgtatctggacagctcgaaggagagacctttgcaatgtcattgggcaaaatatatacctttggtcctaccttccgtgcggaaaattccaatacttcccgacacttggctgagttctggatgatagagcctgaaatggctttctatgacctgatagacaatatgaacttggctgaggatttcatcaagaatgtactcaaatatactttggaggtgcgtcgtgaggatattgaatttcttaaccagcgtttcttagaagaagagaagaccaagccacagcaggagcgtagtgagatgtctcttatcgaaaagttagagtttgtcattcacaacgatttcaagcgagtaagctataccgaagcggtggaaattctcaagaactgcaaccacaacaaaaagaagaaattccaatatcttatagatgagtggggagtagatctccagagcgaacacgagcgctacttggtagaaaagcattttggctgtcctgtgattctctatgactatcctgccaagatcaaggccttctatatgcgcctgaacgaggatggaaagacggttcgcgctatggatattcttttccctggcattggagagattgtagggggctctcagcgtgaggagcgctatgaggtactcaagcagaaaatagctgacttaggtatggatgagcagaccctctggtggtacttagagctacgtaagttcggtacagccgtacatagtggttttggtctgggctttgagcgcttggtgctcttcactacgggtatgactaatatccgcgatgtgatcccttatccacgtaccccacagagtgcagagttttaa

SEQ ID NO: 10530 - protein, 474 aa, Capnocytophaga gingivalis ATCC 33624
MSIKELLQEKTNIGEVTLRGWVRTFRSNRFIALNDGSTLSNLQVVVDFEHTPEETLKRITTGAAIEVKGKVVESQGKGQSIEVQATEVTILGDCNPDEYPIQPKKHSLEFLREQAHLRVRTNAFGAIMRVRSTLAYAIHKYFQEKGFFYVNTPIITGSDAEGAGEMFRVTTLDAKNPPLTETGEVDYKKDFFGRETNLTVSGQLEGETFAMSLGKIYTFGPTFRAENSNTSRHLAEFWMIEPEMAFYDLIDNMNLAEDFIKNVLKYTLEVRREDIEFLNQRFLEEEKTKPQQERSEMSLIEKLEFVIHNDFKRVSYTEAVEILKNCNHNKKKKFQYLIDEWGVDLQSEHERYLVEKHFGCPVILYDYPAKIKAFYMRLNEDGKTVRAMDILFPGIGEIVGGSQREERYEVLKQKIADLGMDEQTLWWYLELRKFGTAVHSGFGLGFERLVLFTTGMTNIRDVIPYPRTPQSAEF

SEQ ID NO: 10531 - DNA, 1392 bp, Bacillus thuringiensis IBL 200
  CDS (1)..(1392): transl_table=11
atggaaaacacattagtaaaaagtctgtatagagatacagaaaagtatgcaggtcaaacagtacaagtatcagggtggattcgtaacttacgtgattcaaaagcatttggtttcatcgaattaaacgacggtagcttcttcaaaagcgttcaaatcgttttcgatacagaattagagaactttaaagaaattgcaaagcttccacttagctcttcagtgaaagtagaaggtaaagtaattgcaacgcctggagcgaagcaaccatttgaaattaaagcagaaaaaattgatatcgagggcttatcagattctgattacccacttcaaaagaagcgtcatacgtttgaatacttacgtacaatcgctcacttacgtccaagaacaaatgcattctctgcaacgttccgcgtacgttctatcgcagcatttgcgattcaccagttcttccaagagcgtggattcgtacatgttcacacaccaatcatcactggtagtgatacagaaggtgctggcgaaatgttccgcgtaacaacacaagatttaaacaacgtaccaaaaggtgaagacggacaagttgatgaatcaaaagacttcttcggtaaagaaacaaacttaacagtaagtggacagctgaacgctgaagcgtatgcattagcattccgtgatgtatatacattcggacctacattccgtgcggaaaactcaaacacaactcgccacgctgctgagttctggatggttgagcctgagattgcattcgctgagttaggcgatgtaatggatcttacagaagatatgctgaaatatgcaatgaaatatgtattagagcatgcaccagaagaaatggacttcttcaacagcttcgttgataaaacagttctagagcgtatgaacaacgtgattaactctgacttcggtcgcatcacatatacagaagcaattaaagtacttcaagaatcaggtgctgacttcaaatacccagtagaatggggtattgacttacaaacagagcatgaaagatacttatcagaagaaatcttcaaacgccctgtattcgtaactgactacccgaaagacattaaagcgttctacatgcgtatgaatgaagatggaaaaacagtagctgctactgaccttctagttcctggcatcggcgaattaatcggcggaagtcaacgtgaagaaagaatggacgttttagtagacagaattaaagaattaggtatgaacgaagaggactactggtggtacttagaacttagaaaatacggcggtacaaaacacgctggattcggtctaggtttcgagcgcttcctaatgtacatcactggtatggctaacatccgtgacgtaattccattcccaagaactccaggttcttctgagttctaa

SEQ ID NO: 10532 - protein, 463 aa, Bacillus thuringiensis IBL 200
MENTLVKSLYRDTEKYAGQTVQVSGWIRNLRDSKAFGFIELNDGSFFKSVQIVFDTELENFKEIAKLPLSSSVKVEGKVIATPGAKQPFEIKAEKIDIEGLSDSDYPLQKKRHTFEYLRTIAHLRPRTNAFSATFRVRSIAAFAIHQFFQERGFVHVHTPIITGSDTEGAGEMFRVTTQDLNNVPKGEDGQVDESKDFFGKETNLTVSGQLNAEAYALAFRDVYTFGPTFRAENSNTTRHAAEFWMVEPEIAFAELGDVMDLTEDMLKYAMKYVLEHAPEEMDFFNSFVDKTVLERMNNVINSDFGRITYTEAIKVLQESGADFKYPVEWGIDLQTEHERYLSEEIFKRPVFVTDYPKDIKAFYMRMNEDGKTVAATDLLVPGIGELIGGSQREERMDVLVDRIKELGMNEEDYWWYLELRKYGGTKHAGFGLGFERFLMYITGMANIRDVIPFPRTPGSSEF

SEQ ID NO: 10533 - DNA, 1392 bp, Bacillus thuringiensis Bt407
  CDS (1)..(1392): transl_table=11
atggaaaacacattagtaaaaagtctgtatagagatacagaaaagtatgcaggtcaaacagtacaagtatcagggtggattcgtaacttacgtgattcaaaagcatttggtttcatcgaattaaacgacggtagcttcttcaaaagcgttcaaatcgttttcgatacagaattagagaactttaaagaaattgcaaagcttccacttagctcttcggtgaaagtagaaggtaaagtaattgcaacgcctggagcgaagcaaccatttgaaattaaagcagaaaaaattgatatcgagggcttatcagattctgattacccacttcaaaagaagcgtcatacgtttgaatacttacgtacaatcgctcacttacgtccaagaacaaatgcattctctgcaacgttccgcgtacgttctatcgcagcatttgcgattcaccagttcttccaagagcgtggatttgtacatgtccacacaccaatcatcactggtagtgatacagaaggtgctggcgaaatgttccgcgtaacaacgcaagatttaaataacgtaccaaaaggtgaagacggaaaagttgatgaatcaaaagacttcttcggtaaagaaacaaacttaacagtaagtggacagctgaacgctgaagcgtatgcattagcattccgtgatgtatatacattcggacctacattccgtgcggaaaactcaaacacaactcgccacgctgctgagttctggatggttgagcctgagattgcattcgctgagttaggcgatgtaatggatcttacagaagatatgctgaaatatgcaatgaaatatgtattagagcatgcaccagaagaaatggacttcttcaacagcttcgttgataaaacagttctagagcgtatgaacaacgtgattaactctgacttcggtcgcatcacatatacagaagcaattaaagtacttcaagaatcaggtgctgacttcaaatacccagtagaatggggtattgacttacaaacagagcatgaaagatacttatcagaagagatcttcaaacgccctgtattcgtaactgactacccgaaagacattaaagcgttctacatgcgtatgaatgaagatggaaaaacagtagctgctactgaccttctagttcctggcatcggcgaattaatcggcggaagtcaacgtgaagaaagaatggacgttttagtagacagaattaaagaattaggtatgaacgaagaggactactggtggtacttagaacttagaaaatacggcggtacaaaacacgctggattcggtctaggtttcgagcgcttcctaatgtacatcactggtatggctaacatccgtgacgtaattccattcccaagaactccaggttcttctgagttctaa

SEQ ID NO: 10534 - protein, 463 aa, Bacillus thuringiensis Bt407
MENTLVKSLYRDTEKYAGQTVQVSGWIRNLRDSKAFGFIELNDGSFFKSVQIVFDTELENFKEIAKLPLSSSVKVEGKVIATPGAKQPFEIKAEKIDIEGLSDSDYPLQKKRHTFEYLRTIAHLRPRTNAFSATFRVRSIAAFAIHQFFQERGFVHVHTPIITGSDTEGAGEMFRVTTQDLNNVPKGEDGKVDESKDFFGKETNLTVSGQLNAEAYALAFRDVYTFGPTFRAENSNTTRHAAEFWMVEPEIAFAELGDVMDLTEDMLKYAMKYVLEHAPEEMDFFNSFVDKTVLERMNNVINSDFGRITYTEAIKVLQESGADFKYPVEWGIDLQTEHERYLSEEIFKRPVFVTDYPKDIKAFYMRMNEDGKTVAATDLLVPGIGELIGGSQREERMDVLVDRIKELGMNEEDYWWYLELRKYGGTKHAGFGLGFERFLMYITGMANIRDVIPFPRTPGSSEF

SEQ ID NO: 10535 - DNA, 1392 bp, Bacillus thuringiensis serovar tochigiensis BGSC 4Y1
  CDS (1)..(1392): transl_table=11
atggaaaacacattagtaaaaagtctgtatagagatacagataaatacgcaggtcaaacagtacaagtatcagggtggattcgtaacttacgtgattcaaaagcatttggtttcatcgaattaaacgacggtagcttctttaaaagcgttcaaatcgttttcgatacagaattagataacttcaaagaaattgcaaaacttccacttagttcttcagttaaagtagaaggtaaagtaattgcaacgcctggagcgaagcaaccatttgaaattaaagcagaaaaaattgatatcgagggcttatcagattctgattacccacttcaaaagaagcgtcatacgtttgaatacttacgtacaatcgctcacttacgtccaagaacaaatgcattctctgcaacgttccgcgtacgttctatcgcagcgtttgcaattcaccaattcttccaagagcgtggattcgtacatgttcacacacctatcatcactggtagtgatacagaaggtgcgggcgaaatgttccgcgtaacaacgcaagatttaaacaacgtaccaaaaggcgaagatggacaagttgatgaatcaaaagacttcttcggcaaagaaacaaacttaacagtaagtggacagctgaacgctgaagcttatgcattagcattccgtgatgtatacacattcggacctacattccgtgcagaaaactcaaacacaactcgccacgctgctgagttctggatggttgagcctgagattgcattcgctgaactaggtgacgtaatgaaccttacagaagatatgctgaaatatgcaatgaaatacgtattagagcatgcaccagaagaaatggaattcttcaatagttttgttgataaaacagttctagagcgcatgaacaacgtaattaactctgacttcggtcgtatcacttatacagaagcaattaaagtacttcaagaatcaggtgctgacttcaaatacccagtagaatggggaattgacttacaaacagagcacgaaagatacttatcagaagaaatcttcaaacgccctgtattcgtaactgactatccgaaggacattaaagcattctacatgcgcttaaatgacgacggtaaaacagtagctgctactgaccttctagttcctggcatcggcgaattaatcggcggaagtcaacgtgaagaaagaatggacgttttagtagacagaattaaagaattaggcatgaaagaagaggactactggtggtacttagaacttagaaaatacggcggtacaaaacacgctggattcggtctaggtttcgagcgcttcctaatgtacatcactggcatggctaacatccgtgacgtaattccattcccaagaactccaggttcttctgaattctaa

SEQ ID NO: 10536 - protein, 463 aa, Bacillus thuringiensis serovar tochigiensis BGSC 4Y1
MENTLVKSLYRDTDKYAGQTVQVSGWIRNLRDSKAFGFIELNDGSFFKSVQIVFDTELDNFKEIAKLPLSSSVKVEGKVIATPGAKQPFEIKAEKIDIEGLSDSDYPLQKKRHTFEYLRTIAHLRPRTNAFSATFRVRSIAAFAIHQFFQERGFVHVHTPIITGSDTEGAGEMFRVTTQDLNNVPKGEDGQVDESKDFFGKETNLTVSGQLNAEAYALAFRDVYTFGPTFRAENSNTTRHAAEFWMVEPEIAFAELGDVMNLTEDMLKYAMKYVLEHAPEEMEFFNSFVDKTVLERMNNVINSDFGRITYTEAIKVLQESGADFKYPVEWGIDLQTEHERYLSEEIFKRPVFVTDYPKDIKAFYMRLNDDGKTVAATDLLVPGIGELIGGSQREERMDVLVDRIKELGMKEEDYWWYLELRKYGGTKHAGFGLGFERFLMYITGMANIRDVIPFPRTPGSSEF

SEQ ID NO: 10537 - DNA, 1392 bp, Bacillus pseudomycoides DSM 12442
  CDS (1)..(1392): transl_table=11
atggaaaacacattagtaaaaagtctgtatagagatacagataaatacgcagatcaaacagtacaagtatcaggttggattcgtaacttacgtgattcaaaagcatttggtttcatcgaattaaacgatggtagcttcttcaaaagcgttcaaatcgttttcgatacagaattagataacttcaaagaaattgcaaaacttccacttagctcttcagttaaagtagaaggtaagctagttgcaacccctggagcgaagcaaccatttgaaattaaagcagaaaaaattgacatcgagggcttatcagattctgattacccacttcaaaagaagcgtcacacgtttgaatacttacgtacaatcgctcatttacgtccaagaacaaatgcattctctgcaacattccgcgtgcgttctatcgcagcgtttgcaatccaccaattcttccaagagcgtggattcgtacatgttcacacaccaattattactggtagtgatacagaaggtgcgggcgaaatgttccgcgtaacaacgcaagatatgaacaacttgccaaaaggtgaagacggaaaagttgatgaatcaaaagacttcttcggaaaagaaacaaacttaacagtaagtggacagcttaatgcggaagcttatgcattagcgttccgtgatgtatacacattcggacctacattccgcgcagaaaactcaaacacaactcgccacgcagctgagttctggatggtggagcctgagattgcattcgctgaacttgaagatgtaatggatcttacagaagatatgctgaaatatgcaatgaaatatgtactagagcatgcaccagaagagatggaattcttcaacagctttgtcgataaaacagttctagagcgcatgaacaacgtaattaactctgacttcggccgtatcacatatacagaagcaattaaagtgcttcaagagtcaggtgcagacttcaaatatccagtagaatggggtattgatttacaaacagagcacgaaagatacttgtcagaagaaatcttcaaacgccctgtattcgtaactgactatccgaaagacattaaagcattctacatgcgtatgaatgatgacggtaaaacagtagctgctactgaccttctagttcctggcatcggcgaattaatcggcggtagccaacgtgaagaaagaatggatgttttagtagatagaattaaagaattaggcatgaatgaagaagactattggtggtacttagaacttagaaaatatggcggtacaaaacacgctggattcggtctaggtttcgaacgtttcctaatgtacatcactggtatggcgaacatccgtgacgtaattccattcccaagaactccaggttcttcggagttttaa

SEQ ID NO: 10538 - protein, 463 aa, Bacillus pseudomycoides DSM 12442
MENTLVKSLYRDTDKYADQTVQVSGWIRNLRDSKAFGFIELNDGSFFKSVQIVFDTELDNFKEIAKLPLSSSVKVEGKLVATPGAKQPFEIKAEKIDIEGLSDSDYPLQKKRHTFEYLRTIAHLRPRTNAFSATFRVRSIAAFAIHQFFQERGFVHVHTPIITGSDTEGAGEMFRVTTQDMNNLPKGEDGKVDESKDFFGKETNLTVSGQLNAEAYALAFRDVYTFGPTFRAENSNTTRHAAEFWMVEPEIAFAELEDVMDLTEDMLKYAMKYVLEHAPEEMEFFNSFVDKTVLERMNNVINSDFGRITYTEAIKVLQESGADFKYPVEWGIDLQTEHERYLSEEIFKRPVFVTDYPKDIKAFYMRMNDDGKTVAATDLLVPGIGELIGGSQREERMDVLVDRIKELGMNEEDYWWYLELRKYGGTKHAGFGLGFERFLMYITGMANIRDVIPFPRTPGSSEF

SEQ ID NO: 10539 - DNA, 1392 bp, Bacillus mycoides Rock1-4
  CDS (1)..(1392): transl_table=11
atggaaaacacattagtaaaaagtctgtatagagatacagataaatacgcagatcaaacagtacaagtatcaggttggattcgtaacttacgtgattcaaaagcatttggtttcatcgaattaaacgatggtagcttcttcaaaagcgttcaaatcgttttcgatacagaattagataacttcaaagaaattgcaaaacttccacttagctcttcagttaaagtagaaggtaagctagttgcaacaccaggagcaaaacaaccatttgaaattaaagcagaaaaaatcgatatcgagggcttatcagattctgattacccacttcaaaagaaacgtcatacgtttgaatacttacgtacaatcgctcatttacgcccaagaacaaacgcgttctctgcaacattccgcgtacgttctatcgcagcatttgcaatccaccaattcttccaagagcgtggattcgtacatgttcacacaccaattattactggtagtgatacagaaggtgcgggcgaaatgttccgcgtaacaacgcaagatatgaacaacttgccaaaaggtgaagacggaaaagttgatgaatcaaaagacttcttcggcaaagaaacaaacttaacagtaagtggacagcttaatgcggaagcttatgcattagcgttccgtgatgtatacacattcggacctacattccgcgcagaaaactcaaacacaactcgtcacgcagctgagttctggatggtggagcctgagattgcattcgctgaacttgaagatgtaatggatcttacagaagatatgctgaaatatgcaatgaaacatgtattagagcatgcaccagaagaaatggaattcttcaacagctttgtcgataaaacagttctagagcgcatgaacaacgtaattaactctgacttcggccgtatcacatatacagaagccattaaagtgcttcaagagtcaggtgcagacttcaaatatccagtagaatggggtattgatttacaaacagagcacgaaagatacttatcagaagaaatcttcaaacgccctgtattcgtaactgactatccgaaagacattaaagcattctacatgcgtatgaatgatgacggtaaaacagtagctgctactgaccttctagttcctggcatcggcgaattaatcggcggtagccaacgtgaagaaagaatggacgttttagtagatagaattaaagaattaggcatgaatgaagaagactattggtggtacttagaacttaggaaatatggcggtacaaaacacgctggattcggtctaggtttcgaacgtttcctaatgtacatcactggtatggcgaacatccgtgacgtaattccattcccaagaactccaggttcttcggagttttaa

SEQ ID NO: 10540 - protein, 463 aa, Bacillus mycoides Rock1-4
MENTLVKSLYRDTDKYADQTVQVSGWIRNLRDSKAFGFIELNDGSFFKSVQIVFDTELDNFKEIAKLPLSSSVKVEGKLVATPGAKQPFEIKAEKIDIEGLSDSDYPLQKKRHTFEYLRTIAHLRPRTNAFSATFRVRSIAAFAIHQFFQERGFVHVHTPIITGSDTEGAGEMFRVTTQDMNNLPKGEDGKVDESKDFFGKETNLTVSGQLNAEAYALAFRDVYTFGPTFRAENSNTTRHAAEFWMVEPEIAFAELEDVMDLTEDMLKYAMKHVLEHAPEEMEFFNSFVDKTVLERMNNVINSDFGRITYTEAIKVLQESGADFKYPVEWGIDLQTEHERYLSEEIFKRPVFVTDYPKDIKAFYMRMNDDGKTVAATDLLVPGIGELIGGSQREERMDVLVDRIKELGMNEEDYWWYLELRKYGGTKHAGFGLGFERFLMYITGMANIRDVIPFPRTPGSSEF

SEQ ID NO: 10541 - DNA, 1392 bp, Bacillus mycoides DSM 2048
  CDS (1)..(1392): transl_table=11
atggaaaacacattagtaaaaagtctgtatagagatacagataaatacgcagatcaaacagtacaagtatcgggttggattcgtaacttacgtgattcaaaagcatttggtttcatcgaattaaacgacggtagcttcttcaaaggtgttcaaatcgttttcgatacagaattagagaacttcaaagaaattgcaaagcttccactaagctcttcagttaaagtagaaggtaaagtaattgcaacacctggagcgaagcaaccatttgaaattaaagcagaaaaaattgatatcgagggcttatcagattctgattacccacttcaaaagaagcgtcatacgtttgaatacttacgtacaatcgctcacttacgtccaagaacaaatgcattctcagcaacattccgcgtgcgttctatcgcagcatttgcaattcaccaattcttccaagagcgtggattcgtacatgttcacacaccaattattactggtagtgatacagaaggtgcaggcgaaatgttccgcgtaacaacgcaagatttaaacaacgtagcaaaaggtgaagacggacaagttgacgaatcaaaagacttcttcgctaaagaaacaaacttaacagtaagtggacagctgaacgctgaagcttatgcattagcattccgtgatgtgtacacattcggacctacattccgtgcggaaaactcaaacacaactcgtcacgcagcggagttctggatggttgagcctgagattgcattcgctgagttaggcgatgtaatggatcttacagaagatatgctgaaatatgcaatgaaatacgtactagagcatgcaccagaagaaatggacttcttcaacagcttcgttgataaaacagttctagagcgcatgaacaacgtaatcaactctgacttcggtcgcatcacttatacagaagcaattaaagtacttcaagaatcaggtgctgaattcaaatacccagtagaatggggtattgacttacaaacagagcacgaaagatacttatcagaagaaatcttcaaacgccctgtattcgtaactgactatccgaaagacattaaagcattctacatgcgtatgaacgaagatggtaaaacagtagcagctactgatcttctagttcctggcatcggcgaattaatcggcggaagtcaacgtgaagaaagaatggacgttttagtagacagaattaaagaattaggtatgaacgaagaggactactggtggtacttagaacttagaaaatacggcggtacaaaacacgctggattcggtctaggtttcgagcgcttcctaatgtacatcactggcatggctaacatccgtgacgtaattccattcccaagaactccaggttcttctgagttttaa

SEQ ID NO: 10542 - protein, 463 aa, Bacillus mycoides DSM 2048
MENTLVKSLYRDTDKYADQTVQVSGWIRNLRDSKAFGFIELNDGSFFKGVQIVFDTELENFKEIAKLPLSSSVKVEGKVIATPGAKQPFEIKAEKIDIEGLSDSDYPLQKKRHTFEYLRTIAHLRPRTNAFSATFRVRSIAAFAIHQFFQERGFVHVHTPIITGSDTEGAGEMFRVTTQDLNNVAKGEDGQVDESKDFFAKETNLTVSGQLNAEAYALAFRDVYTFGPTFRAENSNTTRHAAEFWMVEPEIAFAELGDVMDLTEDMLKYAMKYVLEHAPEEMDFFNSFVDKTVLERMNNVINSDFGRITYTEAIKVLQESGAEFKYPVEWGIDLQTEHERYLSEEIFKRPVFVTDYPKDIKAFYMRMNEDGKTVAATDLLVPGIGELIGGSQREERMDVLVDRIKELGMNEEDYWWYLELRKYGGTKHAGFGLGFERFLMYITGMANIRDVIPFPRTPGSSEF

SEQ ID NO: 10543 - DNA, 1392 bp, Bacillus cereus AH1273
  CDS (1)..(1392): transl_table=11
atggaaaacacattagtaaaaagtctgtatagagatacagaaaagtatgcagatcaaacagtacaagtatcagggtggattcgtaacttacgtgattcaaaagcttttggtttcatcgaattaaacgacggtagcttcttcaaaggcgttcaaatcgttttcgatacagagttagaaaacttcaaagaaattgcaaaacttccacttagctcttcagttaaagtagaaggtacagtaattgcaacgcctggagcgaagcaaccatttgaaattaaagcagaaaaaattgatatcgagggcttatcagattctgattacccacttcaaaagaaacgtcacacgtttgaatacttacgtacaatcgctcacttacgtccaagaacaaatgcattctctgcaacgttccgtgtacgttctgtcgcagcatttgcgattcaccagttcttccaagagcgtggattcgtgcatgttcatacaccaatcatcactggtagtgatacagaaggtgcaggcgaaatgttccgcgtaacaacgcaagatttaaacaacgtaccaaaaggtgaagacggacaagttgatgaatcaaaagacttcttcggtaaagaaacaaacttaacagtaagtggacagctgaacgctgaagcttatgcattagcattccgtgacgtatacacattcggacctacattccgtgcggaaaactcaaacacaactcgccacgctgctgagttctggatggttgagcctgagattgcattcgctgaattaggcgacgtaatggatcttacagaagatatgctgaaatatgcaatgaaatacgtactagagcatgcaccagaagaaatggaattcttcaacagcttcgttgataaaacagttctagagcgcatgaacaacgtaatcaactctgacttcggtcgtatcacatatacagaagcaattaaagtgcttcaagagtcaggcgctgacttcaaatacccagtagaatggggtattgacttacaaacagagcacgaaagatacttatcagaagaaatcttcaaacgccctgtattcgtaactgactatccaaaagacattaaagcgttctacatgcgcatgaatgaagatggaaaaacagtagctgctactgaccttctagttcctggcatcggcgaattaatcggcggaagtcaacgtgaagaaagaatggacgttttagtagacagaattaaagaattaggtatgaacgaagaggactactggtggtacttagaacttagaaaatacggcggtacaaaacacgctggattcggcctaggtttcgagcgcttcctaatgtacatcactggcatggctaacatccgtgacgtaattccattcccaagaactccaggttcttctgaattctaa

SEQ ID NO: 10544 - protein, 463 aa, Bacillus cereus AH1273
MENTLVKSLYRDTEKYADQTVQVSGWIRNLRDSKAFGFIELNDGSFFKGVQIVFDTELENFKEIAKLPLSSSVKVEGTVIATPGAKQPFEIKAEKIDIEGLSDSDYPLQKKRHTFEYLRTIAHLRPRTNAFSATFRVRSVAAFAIHQFFQERGFVHVHTPIITGSDTEGAGEMFRVTTQDLNNVPKGEDGQVDESKDFFGKETNLTVSGQLNAEAYALAFRDVYTFGPTFRAENSNTTRHAAEFWMVEPEIAFAELGDVMDLTEDMLKYAMKYVLEHAPEEMEFFNSFVDKTVLERMNNVINSDFGRITYTEAIKVLQESGADFKYPVEWGIDLQTEHERYLSEEIFKRPVFVTDYPKDIKAFYMRMNEDGKTVAATDLLVPGIGELIGGSQREERMDVLVDRIKELGMNEEDYWWYLELRKYGGTKHAGFGLGFERFLMYITGMANIRDVIPFPRTPGSSEF

SEQ ID NO: 10545 - DNA, 1392 bp, Bacillus cereus AH1271
  CDS (1)..(1392): transl_table=11
atggaaaacacattagtaaaaagtctgtatagagatacagataaatacgcaggtcaaacagtacaagtatcagggtggattcgtaacttacgtgattcaaaagcatttggtttcatcgaattaaacgacggtagcttcttcaaaagcgttcaaatcgttttcgatacagagttagaaaacttcaaagaaattgcaaagcttccacttagttcttcagttaaagtagaaggtaaagtaattgcaacgcctggagcgaagcaaccatttgaaattaaagcagaaaaaattgatatcgagggcttatcagattctgattacccacttcaaaagaaacgtcacacgtttgaatacttacgtacaatcgctcacttacgtccaagaacaaatgcattctctgcaacgttccgtgtacgttctgtcgcagcatttgcaattcaccagttcttccaagagcgtggattcgtacatgttcacacaccaatcatcactggtagtgatacagaaggtgcaggcgaaatgttccgcgtaacaacgcaagatttaaacaacgtaccaaaaggcgaagacggacaagttgatgaatcaaaagacttcttcggcaaagaaacaaacttaacagtaagtggacagctgaacgctgaagcttatgcattagcattccgtgatgtatacacattcggacctacattccgtgcggaaaactcaaacacaactcgccacgctgctgagttctggatggttgagccggagattgcattcgctgaattaggcgatgtaatggatcttacagaagatatgctgaaatatgcaatgaaatacgtactagagcatgcaccagaagaaatggaattcttcaacagcttcgttgataaaacagttctagagcgcatgaacaacgtaatcaactctgacttcggtcgtatcacatatacagaagcaattaaagtgcttcaagagtcaggtgctgacttcaaatacccagtagaatggggtattgacttacaaacagagcacgaaagatacttatcagaagaaatcttcaaacgccctgtattcgtaacagactatccaaaagacattaaagcgttctacatgcgtatgaatgaagatggaaaaacagtagctgctactgaccttctagttcctggcatcggcgaattaatcggcggaagtcaacgtgaagaaagaatggacgttttagtagatagaattaaagaactaggcatgaacgaagaggactactggtggtacttagaacttagaaaatacggcggtacaaaacacgctggattcggtctaggtttcgagcgcttcctaatgtacatcactggcatggctaacatccgtgacgtaattccattcccaagaactccaggttcttctgagttctaa

SEQ ID NO: 10546 - protein, 463 aa, Bacillus cereus AH1271
MENTLVKSLYRDTDKYAGQTVQVSGWIRNLRDSKAFGFIELNDGSFFKSVQIVFDTELENFKEIAKLPLSSSVKVEGKVIATPGAKQPFEIKAEKIDIEGLSDSDYPLQKKRHTFEYLRTIAHLRPRTNAFSATFRVRSVAAFAIHQFFQERGFVHVHTPIITGSDTEGAGEMFRVTTQDLNNVPKGEDGQVDESKDFFGKETNLTVSGQLNAEAYALAFRDVYTFGPTFRAENSNTTRHAAEFWMVEPEIAFAELGDVMDLTEDMLKYAMKYVLEHAPEEMEFFNSFVDKTVLERMNNVINSDFGRITYTEAIKVLQESGADFKYPVEWGIDLQTEHERYLSEEIFKRPVFVTDYPKDIKAFYMRMNEDGKTVAATDLLVPGIGELIGGSQREERMDVLVDRIKELGMNEEDYWWYLELRKYGGTKHAGFGLGFERFLMYITGMANIRDVIPFPRTPGSSEF

SEQ ID NO: 10547 - DNA, 1392 bp, Bacillus cereus AH676
  CDS (1)..(1392): transl_table=11
atggaaaacacattagtaaaaagtctgtatagagatacagaaaagtatgcagatcaaacagtacaagtatcagggtggattcgtaacttacgtgattcaaaagcatttggtttcatcgaattaaacgacggtagcttcttcaaaagcgttcaaatcgttttcgatacagaattagagaacttcaaagaaattgcaaaacttccacttagctcttcagttaaagtagaaggtaaagtaattgcaacgcctggagcgaagcaaccatttgaaattaaagcagaaaaaattgatatcgagggcttatcagattctgattacccacttcaaaagaagcgtcatacatttgaatacttacgtacaatcgctcacttacgtccaagaacaaatgcattctctgcaacgttccgcgtacgttctatcgcagcatttgcgattcaccaattcttccaagagcgtggattcgtacatgttcatacacctatcatcactggtagtgatacagaaggtgctggcgaaatgttccgcgtaacaacgcaagatttaaataacctaccaaaaggtgaagacggaaaagttgatgagtcaaaagacttcttcggtaaagaaacaaacttaacagtaagtggacagctgaacgctgaagcttatgcattagcattccgtgatgtatacacattcggacctacattccgtgcggaaaactcaaacacaactcgccacgctgctgagttctggatggttgagcctgagattgcattcgctgaactaggggacgtaatgaaccttacagaagatatgctgaaatatgcaatgaaatacgtattagagcatgcaccagaagaaatggaattcttcaacagcttcgttgataaaacagttcttgagcgcatgaacaacgtaattaactctgacttcggtcgcatcacttatacagaagcaattaaagtgcttcaagaatcaggtgctgatttcaaatacccagtagaatggggaattgacttacaaacagagcacgaaagatacttatcagaagaaatcttcaaacgccctgtattcgtaactgactatccgaaagacattaaagcattctacatgcgtttaaatgaagacggtaaaacagtagctgctactgaccttctagtgcctggcatcggcgaattaatcggcggaagccaacgtgaagaaagaatggacgttttagtagacagaattaaagaattaggtatgaacgaagaggattactggtggtacttagaacttagaaaatacggcggtacaaaacacgctggattcggtctaggtttcgagcgcttcctaatgtacatcactggcatggctaacatccgtgacgtaattccattcccaagaactccaggttcttctgagttctaa

SEQ ID NO: 10548 - protein, 463 aa, Bacillus cereus AH676
MENTLVKSLYRDTEKYADQTVQVSGWIRNLRDSKAFGFIELNDGSFFKSVQIVFDTELENFKEIAKLPLSSSVKVEGKVIATPGAKQPFEIKAEKIDIEGLSDSDYPLQKKRHTFEYLRTIAHLRPRTNAFSATFRVRSIAAFAIHQFFQERGFVHVHTPIITGSDTEGAGEMFRVTTQDLNNLPKGEDGKVDESKDFFGKETNLTVSGQLNAEAYALAFRDVYTFGPTFRAENSNTTRHAAEFWMVEPEIAFAELGDVMNLTEDMLKYAMKYVLEHAPEEMEFFNSFVDKTVLERMNNVINSDFGRITYTEAIKVLQESGADFKYPVEWGIDLQTEHERYLSEEIFKRPVFVTDYPKDIKAFYMRLNEDGKTVAATDLLVPGIGELIGGSQREERMDVLVDRIKELGMNEEDYWWYLELRKYGGTKHAGFGLGFERFLMYITGMANIRDVIPFPRTPGSSEF

SEQ ID NO: 10549 - DNA, 1392 bp, Bacillus cereus AH603
  CDS (1)..(1392): transl_table=11
atggaaaacacattagtaaaaagtctgtatagagatacagataaatacgcagatcaaacagtacaagtatcgggttggattcgtaacttacgtgattcaaaagcatttggtttcatcgaattaaacgacggtagcttcttcaaaggtgttcaaatcgttttcgatacagaattagagaacttcaaagaaattgcaaagcttccactaagctcttcagttaaagtagaaggtaaagtaattgcaacacctggagcgaagcaaccatttgaaattaaagcagaaaaaattgatatcgagggcttatcagattctgattacccacttcaaaagaagcgtcatacgtttgaatacttacgtacaatcgctcacttacgtccaagaacaaatgcattctcagcaacattccgcgtgcgttctatcgcagcatttgcaattcaccaattcttccaagagcgtggatttgtacatgttcacacaccaattattactggtagtgatacagaaggtgcaggcgaaatgttccgcgtaacaacgcaagatttaaacaacgtaccaaaaggtgaagacggacaagttgacgaatcaaaagacttcttcgctaaagaaacaaacttaacagtaagtggacagctgaacgctgaagcttatgcattagcattccgtgatgtttatacattcggacctacattccgtgcggaaaactcaaacacaactcgtcacgcagctgagttctggatggttgagcctgagattgcattcgctgagttaggcgatgtaatggatcttacagaagatatgctgaaatatgcaatgaaatacgtactagagcatgcaccagaagaaatggacttcttcaacagcttcgttgataaaacagttctagagcgcatgaacaacgtaatcaactctgacttcggtcgcatcacttatacagaagcaattaaagtacttcaagaatcaggtgctgaattcaaatacccagtagaatggggtattgacttacaaacagagcacgaaagatacttatcagaagaaatcttcaaacgccctgtattcgtaactgactatccgaaagacattaaagcattctacatgcgtatgaacgaagatggtaaaacagtagcagctactgaccttctagttcctggcatcggcgaattaatcggcggaagtcaacgtgaagaaagaatggacgttttagtagacagaattaaagaattaggtatgaacgaagaggactactggtggtacttagaacttagaaaatacggcggtacaaaacatgctggattcggtctaggtttcgagcgcttcctgatgtacatcactggtatggctaacatccgtgacgtaattccattcccaagaactccaggttcttctgagttttaa

SEQ ID NO: 10550 - protein, 463 aa, Bacillus cereus AH603
MENTLVKSLYRDTDKYADQTVQVSGWIRNLRDSKAFGFIELNDGSFFKGVQIVFDTELENFKEIAKLPLSSSVKVEGKVIATPGAKQPFEIKAEKIDIEGLSDSDYPLQKKRHTFEYLRTIAHLRPRTNAFSATFRVRSIAAFAIHQFFQERGFVHVHTPIITGSDTEGAGEMFRVTTQDLNNVPKGEDGQVDESKDFFAKETNLTVSGQLNAEAYALAFRDVYTFGPTFRAENSNTTRHAAEFWMVEPEIAFAELGDVMDLTEDMLKYAMKYVLEHAPEEMDFFNSFVDKTVLERMNNVINSDFGRITYTEAIKVLQESGAEFKYPVEWGIDLQTEHERYLSEEIFKRPVFVTDYPKDIKAFYMRMNEDGKTVAATDLLVPGIGELIGGSQREERMDVLVDRIKELGMNEEDYWWYLELRKYGGTKHAGFGLGFERFLMYITGMANIRDVIPFPRTPGSSEF

SEQ ID NO: 10551 - DNA, 1392 bp, Bacillus cereus Rock3-44
  CDS (1)..(1392): transl_table=11
atggaaaacacattagtaaaaagtctgtatagagatacagaaaagtatgcagatcaaacagtacaagtatcaggttggattcgtaacttacgtgattcaaaagcatttggtttcatcgaattaaacgacggtagcttcttcaaaagcgttcaaatcgttttcgatacagaattagagaacttcaaagaaattgcaaagcttccacttagctcttcagtcaaagtagaaggtaaagtaattgcaacacctggagcaaagcaaccatttgaaatcaaagcagaaaaaattgatatcgagggcttatcagattctgattacccacttcaaaagaaacgtcatacgtttgaatacttacgtacaatcgcgcacttacgtccaagaacaaatgcattctctgcaacattccgcgtacgttctatcgcagcgtttgcgattcaccagttcttccaagagcgtggattcgtacatgttcacacaccaattattactggtagtgatacagaaggtgcaggcgaaatgttccgtgtaacaacgcaagatttaaacaacgtgccaaaaggtgaagatggacaagtcgatgaatcaaaagacttctttggtaaagaaacaaacttaacagtaagtggacagctgaatgctgaagcttatgcattagcattccgtgatgtgtacacattcggacctacattccgtgctgaaaactcaaacacaactcgccacgcagctgagttctggatggttgagcctgagattgcatttgctgaattaggcgacgtaatgaaccttacagaagatatgctgaaatatgcaatgaaatacgtattagagcatgctccagaagaaatggaattcttcaacagtttcgttgataaaacagttctagagcgcatgaacaacgtaattaactctgactttggccgcatcacatacacagaagcaattaaggtgcttcaagaatcagatgcagacttcaaatacccagtagaatggggtattgatttacaaacagagcacgaaagatacttatcagaagaaatcttcaaacgccctgtattcgtaactgactatccgaaagacattaaagcattctacatgcgcttaaatgatgacggtaaaacagtagcagctactgaccttcttgttcctggcatcggtgaattgatcggcggtagccaacgtgaagaaagaatggatgttttagtagacagaattaaagaattaggcatgaatgaagaagattactggtggtacttagaacttagaaaatatggcggtacaaaacacgctggattcggccttggtttcgaacgtttcctaatgtacatcactggtatggcaaacatccgtgacgtcattccattcccaagaactccaggttcttcagagttttaa

SEQ ID NO: 10552 - protein, 463 aa, Bacillus cereus Rock3-44
MENTLVKSLYRDTEKYADQTVQVSGWIRNLRDSKAFGFIELNDGSFFKSVQIVFDTELENFKEIAKLPLSSSVKVEGKVIATPGAKQPFEIKAEKIDIEGLSDSDYPLQKKRHTFEYLRTIAHLRPRTNAFSATFRVRSIAAFAIHQFFQERGFVHVHTPIITGSDTEGAGEMFRVTTQDLNNVPKGEDGQVDESKDFFGKETNLTVSGQLNAEAYALAFRDVYTFGPTFRAENSNTTRHAAEFWMVEPEIAFAELGDVMNLTEDMLKYAMKYVLEHAPEEMEFFNSFVDKTVLERMNNVINSDFGRITYTEAIKVLQESDADFKYPVEWGIDLQTEHERYLSEEIFKRPVFVTDYPKDIKAFYMRLNDDGKTVAATDLLVPGIGELIGGSQREERMDVLVDRIKELGMNEEDYWWYLELRKYGGTKHAGFGLGFERFLMYITGMANIRDVIPFPRTPGSSEF

SEQ ID NO: 10553 - DNA, 1392 bp, Bacillus cereus Rock3-29
  CDS (1)..(1392): transl_table=11
atggaaaacacattagtaaaaagtctgtatagagatacagaaaagtatgcagatcaaacagtacaagtatcagggtggattcgtaacttacgtgattcaaaagcatttggtttcatcgaattaaacgacggtagcttcttcaaaagcgttcaaatcgttttcgatacagaattagagaacttcaaagaaattgcaaaacttccacttagctcttcagttaaagtagaaggtaaagtaattgcaacgcctggagcgaagcaaccatttgaaattaaagcagaaaaaattgatatcgagggcttatcagattctgattacccacttcaaaagaagcgtcatacgtttgaatacttacgtacaatcgctcacttacgcccaagaacaaatgcattctctgcaacgttccgcgtacgttctatcgcagcatttgcgattcaccaattcttccaagagcgtggattcgtacatgttcacacaccgatcattactggtagtgatacagaaggtgctggcgaaatgttccgtgtaacaacgcaagatttaaacaacgtatcaaaaggtgaagacggacaagttgatgaatcaaaagacttcttcggtaaagaaacaaacttaacagtaagtggacagctgaacgctgaagcttatgcattagcattccgtgatgtatacacattcggacctacattccgtgcggagaactcaaacacaactcgccatgcagctgagttctggatggttgagcctgagattgcatttgctgaattaggcgatgtaatggatcttacagaagatatgctgaaatatgcaatgaaatatgtattagaacatgcaccagaagaaatggacttcttcaacagcttcgttgataaaacagttctagagcgcatgaacaatgtgattaattctgacttcggtcgtatcacttatacagaagcaattaaagtacttcaagaatcaggtgctgactttaaatacccagtagaatggggtattgacttacaaacagagcatgaaagatacttatcagaagaaatcttcaaacgccctgtattcgtaacagactatccaaaagacattaaagcgttctatatgcgtatgaatgaagacggtaaaacagtagctgctactgaccttctagttcctggcatcggcgaattaattggcggaagtcaacgtgaagaaagaatggacgttttagtagaaagaattaaagaactaggcatgaacgaagaggactactggtggtacttagaacttagaaaatacggcggtacaaaacacgctggattcggtctaggtttcgagcgcttcctaatgtacattactggtatggctaacatccgtgacgtaattccattcccaagaactccaggttcttctgagttttaa

SEQ ID NO: 10554 - protein, 463 aa, Bacillus cereus Rock3-29
MENTLVKSLYRDTEKYADQTVQVSGWIRNLRDSKAFGFIELNDGSFFKSVQIVFDTELENFKEIAKLPLSSSVKVEGKVIATPGAKQPFEIKAEKIDIEGLSDSDYPLQKKRHTFEYLRTIAHLRPRTNAFSATFRVRSIAAFAIHQFFQERGFVHVHTPIITGSDTEGAGEMFRVTTQDLNNVSKGEDGQVDESKDFFGKETNLTVSGQLNAEAYALAFRDVYTFGPTFRAENSNTTRHAAEFWMVEPEIAFAELGDVMDLTEDMLKYAMKYVLEHAPEEMDFFNSFVDKTVLERMNNVINSDFGRITYTEAIKVLQESGADFKYPVEWGIDLQTEHERYLSEEIFKRPVFVTDYPKDIKAFYMRMNEDGKTVAATDLLVPGIGELIGGSQREERMDVLVERIKELGMNEEDYWWYLELRKYGGTKHAGFGLGFERFLMYITGMANIRDVIPFPRTPGSSEF

SEQ ID NO: 10555 - DNA, 1392 bp, Bacillus cereus Rock3-28
  CDS (1)..(1392): transl_table=11
atggaaaacacattagtaaaaagtctgtatagagatacagaaaagtatgcagatcaaacagtacaagtatcagggtggattcgtaacttacgtgattcaaaagcatttggtttcatcgaattaaacgacggtagcttcttcaaaagcgttcaaatcgtattcgatactgaattagagaacttcaaagaaattgcaaaacttccacttagctcttcagttaaagtagaaggtaaagtaattgcaacgcctggagcgaagcaaccatttgaaattaaagcagaaaaaattgatatcgagggcttatcagattctgattacccacttcaaaagaagcgtcatacgtttgaatacttacgtacaatcgctcacttacgcccaagaacaaatgcattctctgcaacgttccgcgtacgttctatcgcagcatttgcgattcaccaattcttccaagagcgtggattcgtacatgttcacacaccaatcatcactggtagtgatacagaaggtgctggcgaaatgttccgcgtaacaacgcaagatttaaacaacgtatcaaaaggtgaagacggacaagttgatgaatcaaaagacttcttcggtaaagaaacaaacttaacagtaagtggacagctgaacgctgaagcttatgcattagcattccgtgatgtatacacattcggacctacattccgtgcggagaactcaaacacaactcgccatgcagctgagttctggatggttgagcctgagattgcatttgctgaattaggcgatgtaatggatcttacagaagatatgctgaaatatgcaatgaaatatgtattagaacatgcaccagaagaaatggacttcttcaacagcttcgttgataaaacagttctagagcgcatgaacaatgtgattaactctgacttcggtcgtatcacttatacagaagcaattaaagtacttcaagaatcaggtgctgactttaaatacccagtagaatggggtattgacttacaaacagagcatgaaagatacttatcagaagaaatcttcaaacgccctgtattcgtaacagactatccaaaagacattaaagcgttctatatgcgtatgaatgaagacggtaaaacagtagctgctactgaccttctagttcctggcatcggcgaattaatcggcggaagtcaacgtgaagaaagaatggacgttttagtagacagaattaaagaattaggtatgaacgaagaggactactggtggtacttagaacttagaaaatacggcggtacaaaacacgctggattcggtctaggtttcgagcgcttcctaatgtacatcactggtatggctaacatccgtgacgtaattccattcccaagaactccaggttcttctgagttttaa

SEQ ID NO: 10556 - protein, 463 aa, Bacillus cereus Rock3-28
MENTLVKSLYRDTEKYADQTVQVSGWIRNLRDSKAFGFIELNDGSFFKSVQIVFDTELENFKEIAKLPLSSSVKVEGKVIATPGAKQPFEIKAEKIDIEGLSDSDYPLQKKRHTFEYLRTIAHLRPRTNAFSATFRVRSIAAFAIHQFFQERGFVHVHTPIITGSDTEGAGEMFRVTTQDLNNVSKGEDGQVDESKDFFGKETNLTVSGQLNAEAYALAFRDVYTFGPTFRAENSNTTRHAAEFWMVEPEIAFAELGDVMDLTEDMLKYAMKYVLEHAPEEMDFFNSFVDKTVLERMNNVINSDFGRITYTEAIKVLQESGADFKYPVEWGIDLQTEHERYLSEEIFKRPVFVTDYPKDIKAFYMRMNEDGKTVAATDLLVPGIGELIGGSQREERMDVLVDRIKELGMNEEDYWWYLELRKYGGTKHAGFGLGFERFLMYITGMANIRDVIPFPRTPGSSEF

SEQ ID NO: 10557 - DNA, 1392 bp, Bacillus cereus Rock1-15
  CDS (1)..(1392): transl_table=11
atggaaaacacattagtaaaaagtctgtatagagatacagataaatacgcaggtcaaacagtacaagtatcagggtggattcgtaacttacgtgattcaaaagcatttggtttcatcgaattaaatgacggtagcttctttaaaagcgttcaaatcgttttcgatacagaattagataactttaaagaaattgcaaaacttccacttagctcttcagttaaagtagaaggtaaagtaattgcaacgcctggagcgaagcaaccatttgaaattaaagcagaaaaaattgatatcgagggcttatcagattctgattacccacttcaaaagaaacgtcatacgtttgaatacttacgtacaattgctcacttacgcccaagaacaaatgcattctctgcaacgttccgcgtacgttctatcgcagcatttgcgattcaccaattcttccaagagcgtggattcgtacatgttcacacaccaatcatcactggtagtgatacagaaggtgctggcgaaatgttccgcgtaacaacgcaagatttaaataacctaccaaaaggtgaagacggaaaagttgatgagtcaaaagacttcttcggtaaagaaacaaacttaacagtaagtggacagctgaacgctgaagcttatgcattagcattccgtgatgtatacacattcggacctacattccgtgcagaaaactcaaacacaactcgtcacgctgctgagttctggatggttgagcctgagattgcattcgctgaactaggggacgtaatgaaccttacagaagatatgctgaaatatgcaatgaaatacgtattagagcatgcaccagaagaaatggaattcttcaacagcttcgttgataaaacagttcttgagcgcatgaacaacgtaattaactcagacttcggtcgcatcacttatacagaagcaattaaagtacttcaagaatcaggtgctgacttcaaatacccagtagaatggggaattgacttacaaacagagcacgaaagatacttatcagaagaaatcttcaaacgccctgtattcgtaactgactatccgaaagacattaaagcattctacatgcgtttgaatgaagacggtaaaacagtagctgctactgaccttctagttcctggcatcggcgaattaatcggcggaagtcaacgtgaagaaagaatggacgttttagtagacagaattaaagaattaggtatgaacgaagaggactactggtggtacttagaacttagaaaatacggcggtacaaaacacgctggattcggtctaggtttcgagcgcttcctaatgtacatcactggcatggctaacatccgtgacgtaattccattcccaagaactccaggttcttctgagttctaa

SEQ ID NO: 10558 - protein, 463 aa, Bacillus cereus Rock1-15
MENTLVKSLYRDTDKYAGQTVQVSGWIRNLRDSKAFGFIELNDGSFFKSVQIVFDTELDNFKEIAKLPLSSSVKVEGKVIATPGAKQPFEIKAEKIDIEGLSDSDYPLQKKRHTFEYLRTIAHLRPRTNAFSATFRVRSIAAFAIHQFFQERGFVHVHTPIITGSDTEGAGEMFRVTTQDLNNLPKGEDGKVDESKDFFGKETNLTVSGQLNAEAYALAFRDVYTFGPTFRAENSNTTRHAAEFWMVEPEIAFAELGDVMNLTEDMLKYAMKYVLEHAPEEMEFFNSFVDKTVLERMNNVINSDFGRITYTEAIKVLQESGADFKYPVEWGIDLQTEHERYLSEEIFKRPVFVTDYPKDIKAFYMRLNEDGKTVAATDLLVPGIGELIGGSQREERMDVLVDRIKELGMNEEDYWWYLELRKYGGTKHAGFGLGFERFLMYITGMANIRDVIPFPRTPGSSEF

SEQ ID NO: 10559 - DNA, 1392 bp, Bacillus cereus BDRD-ST196
  CDS (1)..(1392): transl_table=11
atggaaaacacattagtaaaaagtctgtatagagatacagataaatacgcagatcaaacagtacaagtatcgggttggattcgtaacttacgtgattcaaaagcatttggtttcatcgaattaaacgacggtagcttcttcaaaggtgttcaaatcgttttcgatacagaattagagaacttcaaagaaattgcaaagcttccactaagctcttcagttaaagtagaaggtaaagtaattgcaacgcctggagcgaagcaaccatttgaaattaaagcagaaaaaattgatatcgagggcttatcagactctgattacccacttcaaaagaagcgtcatacgtttgaatatttacgtacaatcgctcacttacgtccaagaacaaatgcattctctgcaacgttccgtgtgcgttctatcgcagcatttgcgattcaccagttcttccaagagcgtggattcgtacatgttcacacaccaatcatcactggtagtgatacagaaggtgcaggcgaaatgttccgcgtaacaacgcaagatttaaacaacgtacctaaaggtgaagacggacaagttgacgaatcaaaagacttcttcggtaaagaaacaaacttaacagtaagtggacagcttaatgctgaagcttatgcgttagcattccgtgatgtgtacacattcggtcctacattccgtgcagaaaactcaaacacaactcgccacgcagctgagttctggatggttgagcctgagattgcattcgctgagttaggcgatgtaatggatcttacagaagatatgctgaaatatgcaatgaaatacgtactagagcatgcaccagaagaaatggacttcttcaacagcttcgttgataaaacagttctagagcgcatgaacaacgtaatcaactctgacttcggtcgcatcacttatacagaagcaattaaagtacttcaagaatcaggtgctgaattcaaatacccagtagaatggggtattgacttacaaacagagcacgaaagatacttatcagaagaaatcttcaaacgccctgtattcgtaactgactatccgaaagacattaaagcattctacatgcgtatgaacgaagatggtaaaacagtagcagctactgaccttctagttcctggcatcggcgaattaatcggcggaagtcaacgtgaagaaagaatggacgttttagtagacagaattaaagaattaggtatgaacgaagaggactactggtggtacttagaacttagaaaatacggcggtacaaaacacgctggattcggtctaggtttcgagcgcttcctaatgtacattactggcatggctaacatccgtgacgtaattccattcccaagaactccaggttcttctgagttttaa

SEQ ID NO: 10560 - protein, 463 aa, Bacillus cereus BDRD-ST196
MENTLVKSLYRDTDKYADQTVQVSGWIRNLRDSKAFGFIELNDGSFFKGVQIVFDTELENFKEIAKLPLSSSVKVEGKVIATPGAKQPFEIKAEKIDIEGLSDSDYPLQKKRHTFEYLRTIAHLRPRTNAFSATFRVRSIAAFAIHQFFQERGFVHVHTPIITGSDTEGAGEMFRVTTQDLNNVPKGEDGQVDESKDFFGKETNLTVSGQLNAEAYALAFRDVYTFGPTFRAENSNTTRHAAEFWMVEPEIAFAELGDVMDLTEDMLKYAMKYVLEHAPEEMDFFNSFVDKTVLERMNNVINSDFGRITYTEAIKVLQESGAEFKYPVEWGIDLQTEHERYLSEEIFKRPVFVTDYPKDIKAFYMRMNEDGKTVAATDLLVPGIGELIGGSQREERMDVLVDRIKELGMNEEDYWWYLELRKYGGTKHAGFGLGFERFLMYITGMANIRDVIPFPRTPGSSEF

SEQ ID NO: 10561 - DNA, 1392 bp, Bacillus cereus BDRD-ST26
  CDS (1)..(1392): transl_table=11
atggaaaacacattagtaaaaagtctgtatagagatacagataaatacgcaggtcaaacagtacaagtatcagggtggattcgtaatttacgtgattcaaaagcatttggcttcatcgaattaaacgacggtagcttcttcaaaagcgttcaaatcgttttcgatacagaattagataacttcaaagaaattgcaaaacttccacttagctcttcagttaaagtagaaggtaaagtaattgtaacgcctggagcgaaacaaccatttgaaattaaagcagaaaaaattgatattgagggcttatcagattctgattacccacttcaaaagaaacgtcatacgtttgaatacttacgtacaattgctcacttacgtccaagaacaaatgcattctctgcaacgttccgcgtacgttctatcgcagcatttgcgattcaccaattcttccaagagcgtggattcgtacatgttcacacaccaatcattactggtagtgatacagaaggtgcgggcgaaatgttccgcgtaacaacgcaagatttaaacaacgtaccaaaaggcgaagacggacaagttgatgaatcaaaagacttcttcggcaaagaaacaaacttaacagtaagtggacagctgaacgctgaagcttatgcattagcattccgtgatgtatacacattcggacctacattccgtgcagaaaactcaaacacaactcgccacgcagctgagttctggatggttgagcctgagattgcatttgctgaactaggtgacgtaatgaaccttacagaagatatgctgaaatatgtaatgaaatacgtattagagcatgcaccagaagaaatggaattcttcaacagcttcgttgataaaacagttttagagcgtatgaacaacgtaattaactctgacttcggtcgtatcacttatacagaagcaattaaagtacttcaagaatcaggtgctgacttcaaatacccagtagaatggggtattgacttacaaacagagcacgaaagatacttatcagaagaaatcttcaaacgccctgtattcgtaactgactatccgaaggacattaaagcattctacatgcgcttaaatgacgacggtaaaacagtagctgctactgaccttctagttcctggcatcggcgaattaatcggcggaagtcaacgtgaagaaagaatggacgttttagtagatagaattaaagaattaggcatgaaagaagaggactactggtggtacttagaacttagaaaatacggcggtacaaaacacgctggattcggtctaggtttcgagcgcttcctaatgtacatcactggtatggctaacatccgtgacgtaattccattcccaagaactccaggttcttctgaattctaa

SEQ ID NO: 10562 - protein, 463 aa, Bacillus cereus BDRD-ST26
MENTLVKSLYRDTDKYAGQTVQVSGWIRNLRDSKAFGFIELNDGSFFKSVQIVFDTELDNFKEIAKLPLSSSVKVEGKVIVTPGAKQPFEIKAEKIDIEGLSDSDYPLQKKRHTFEYLRTIAHLRPRTNAFSATFRVRSIAAFAIHQFFQERGFVHVHTPIITGSDTEGAGEMFRVTTQDLNNVPKGEDGQVDESKDFFGKETNLTVSGQLNAEAYALAFRDVYTFGPTFRAENSNTTRHAAEFWMVEPEIAFAELGDVMNLTEDMLKYVMKYVLEHAPEEMEFFNSFVDKTVLERMNNVINSDFGRITYTEAIKVLQESGADFKYPVEWGIDLQTEHERYLSEEIFKRPVFVTDYPKDIKAFYMRLNDDGKTVAATDLLVPGIGELIGGSQREERMDVLVDRIKELGMKEEDYWWYLELRKYGGTKHAGFGLGFERFLMYITGMANIRDVIPFPRTPGSSEF

SEQ ID NO: 10563 - DNA, 1392 bp, Bacillus cereus ATCC 4342
  CDS (1)..(1392): transl_table=11
atggaaaacacattagtaaaaagtctgtatagagatacagataaatacgcaggtcaaacagtacaagtatcagggtggattcgtaacttacgtgattcaaaagcatttggtttcatcgaattaaacgacggtagcttcttcaaaagcgttcaaatcgttttcgatacagaattagagaacttcaaagaaattgcaaaacttccacttagctcttcagttaaagtagaaggtaaagtaattgcaacgcctggagcgaagcaaccatttgaaattaaagcagacaaaattgatatcgagggcttatcagattctgattacccacttcaaaagaaacgtcacacgtttgaatacttacgtacaattgctcacttacgtccaagaacaaacgcattctctgcaacgttccgcgtacgttctattgcagcatttgcaattcaccaattcttccaagagcgtggattcgtacatgttcatacacctattatcactggtagtgatacagaaggtgcgggcgaaatgttccgcgtaacaacgcaagatttaaacaacgtaccaaaaggcgaagatggacaagttgatgaatcaaaagacttcttcggcaaagaaacaaacttaacagtaagtggacagctgaacgctgaagcttatgcattagcattccgtgatgtatacacattcggacctacattccgtgcagaaaactcaaacacaactcgccacgctgctgagttctggatggttgagcctgagattgcattcgctgaactaggtgacgtaatgaaccttacagaagatatgctgaaatatgcaatgaaatacgtattagagcatgcaccagaagaaatggaatttttcaacagcttcgttgataaaacagttctagagcgcatgaacaacgtaatcaactctgacttcggtcgcatcacttatacagaagcaattaaagtacttcaagaatcaggtgctgacttcaaatacccagtagaatggggtattgacttacaaacagaacatgaaagatacttatcagaagaaatcttcaaacgccctgtattcgtaactgactatccgaaagacattaaagcattctacatgcgcttaaatgatgacggtaaaacagtagctgctactgaccttctagttcctggcatcggcgaattaatcggcggaagtcaacgtgaagaaagaatggacgttttagtagacagaattaaagaattaggcatgaaagaagaggactactggtggtacttagaacttagaaaatacggcggtacaaaacacgctggattcggtctaggtttcgagcgcttcctaatgtacatcactggcatggctaacatccgtgacgtaattccattcccaagaactccaggttcttctgaattctaa

SEQ ID NO: 10564 - protein, 463 aa, Bacillus cereus ATCC 4342
MENTLVKSLYRDTDKYAGQTVQVSGWIRNLRDSKAFGFIELNDGSFFKSVQIVFDTELENFKEIAKLPLSSSVKVEGKVIATPGAKQPFEIKADKIDIEGLSDSDYPLQKKRHTFEYLRTIAHLRPRTNAFSATFRVRSIAAFAIHQFFQERGFVHVHTPIITGSDTEGAGEMFRVTTQDLNNVPKGEDGQVDESKDFFGKETNLTVSGQLNAEAYALAFRDVYTFGPTFRAENSNTTRHAAEFWMVEPEIAFAELGDVMNLTEDMLKYAMKYVLEHAPEEMEFFNSFVDKTVLERMNNVINSDFGRITYTEAIKVLQESGADFKYPVEWGIDLQTEHERYLSEEIFKRPVFVTDYPKDIKAFYMRLNDDGKTVAATDLLVPGIGELIGGSQREERMDVLVDRIKELGMKEEDYWWYLELRKYGGTKHAGFGLGFERFLMYITGMANIRDVIPFPRTPGSSEF

SEQ ID NO: 10565 - DNA, 1392 bp, Bacillus cereus R309803
  CDS (1)..(1392): transl_table=11
atggaaaacacattagtaaaaagtctgtatagagatacagataaatacgcaggtcaaacagtacaagtatcagggtggattcgtaacttacgtgattcaaaagcatttggttttatcgaattaaacgacggtagcttcttcaaaagtgttcaaatcgttttcgatacagaattagagaacttcaaagaaattgcaaaacttccacttagctcttcagttaaagtagaaggaaaagtaattgcaacgcctggagcaaagcaaccatttgaaattaaagcagaaaaaattgatatcgagggcttatcagattctgattacccacttcaaaagaaacgtcacacgtttgaatatttacgtacaatcgctcacttacgtccaagaacaaatgcattctctgcaacgttccgcgtacgttctatcgcagcatttgcgattcatcagttcttccaagagcgtggattcgtacatgttcacacaccaatcatcactggtagtgatacagaaggtgctggcgaaatgttccgcgtaacaacgcaagatttaaacaacgtaccaaaaggcgaagacggacaagttgatgaatcaaaagacttcttcggcaaagaaacaaacttaacagtaagtggacagctgaacgctgaagcttatgcattagcattccgtgacgtatacacattcggacctacattccgtgcagaaaattcaaacacaactcgccacgctgctgagttctggatggttgagcctgagattgcattcgctgaattaggcgatgtaatggatcttacagaagatatgctgaaatatgcaatgaaatacgtactagagcatgcaccagaagaaatggaattcttcaatagcttcgttgataaaacagttctagagcgcatgaacaacgtaatcaactctgacttcggtcgtatcacatatacagaagcaattaaagtacttcaagagtcaggtgctgacttcaaatacccagtagaatggggtattgacttacaaacagagcacgaaagatacttatcagaagaaatcttcaaacgccctgtattcgtaactgactatccaaaagacattaaagcgttctacatgcgtatgaatgaagatggaaaaacagtagctgctactgaccttctagttcctggcatcggcgaattaatcggcggaagccaacgtgaagaaagaatggacgttttagtagacagaattaaagaactaggtatgaacgaagaggactactggtggtacttagaacttagaaaatacggcggtacaaaacacgctggattcggtctaggtttcgagcgcttcctaatgtacatcactggcatggctaacatccgtgacgtaattccattcccaagaactccaggttcttctgagttttaa

SEQ ID NO: 10566 - protein, 463 aa, Bacillus cereus R309803
MENTLVKSLYRDTDKYAGQTVQVSGWIRNLRDSKAFGFIELNDGSFFKSVQIVFDTELENFKEIAKLPLSSSVKVEGKVIATPGAKQPFEIKAEKIDIEGLSDSDYPLQKKRHTFEYLRTIAHLRPRTNAFSATFRVRSIAAFAIHQFFQERGFVHVHTPIITGSDTEGAGEMFRVTTQDLNNVPKGEDGQVDESKDFFGKETNLTVSGQLNAEAYALAFRDVYTFGPTFRAENSNTTRHAAEFWMVEPEIAFAELGDVMDLTEDMLKYAMKYVLEHAPEEMEFFNSFVDKTVLERMNNVINSDFGRITYTEAIKVLQESGADFKYPVEWGIDLQTEHERYLSEEIFKRPVFVTDYPKDIKAFYMRMNEDGKTVAATDLLVPGIGELIGGSQREERMDVLVDRIKELGMNEEDYWWYLELRKYGGTKHAGFGLGFERFLMYITGMANIRDVIPFPRTPGSSEF

SEQ ID NO: 10567 - DNA, 1392 bp, Bacillus cereus AH621
  CDS (1)..(1392): transl_table=11
atggaaaacacattagtaaaaagtctgtatagagatacagaaaagtatgcagatcaaacagtacaagtatcagggtggattcgtaacttacgtgattcaaaagcatttggtttcatcgaattaaacgacggtagcttcttcaaaggtgttcaaatcgttttcgatacagaattagagaacttcaaagaaattgcaaaacttccacttagctcttcagttaaagtagaaggtaaagtaattgcaacgcctggagcgaagcaaccatttgaaattaaagcagaaaaaattgatatcgagggcttatcagattctgattacccacttcaaaagaagcgtcatacgtttgaatatttacgtacaatcgctcacttacgtccaagaacaaatgcattctctgcaacgttccgtgtgcgttctatcgcagcatttgcgattcaccagttcttccaagagcgtggattcgtacatgttcacacaccaatcatcactggtagtgatacagaaggtgcaggcgaaatgttccgcgtaacaacgcaagatttaaacaacgtacctaaaggtgaagacggacaagttgacgaatcaaaagacttcttcggtaaagaaacaaacttaacagtaagtggacagctgaatgctgaagcttatgcgttagcattccgtgatgtgtacacattcggtcctacattccgtgcagaaaactcaaacacaactcgccacgcagctgagttctggatggttgagcctgagattgcattcgctgagttaggcgatgtaatggatcttacagaagatatgctgaaatatgcaatgaaatacgtactagagcatgcaccagaagaaatggacttcttcaacagcttcgttgataaaacagttctagagcgcatgaacaacgtaatcaactctgacttcggtcgcatcacttatacagaagcaattaaagtacttcaagaatcaggtgctgaattcaaatacccagtagaatggggtattgacttacaaacagagcacgaaagatacttatcagaagaaatcttcaaacgccctgtattcgtaactgactatccgaaagacattaaagcattctacatgcgtatgaacgaagatggtaaaacagtagcagctactgaccttctagttcctggcatcggcgaattaatcggcggaagtcaacgtgaagaaagaatggacgttttagtagacagaattaaagaattaggtatgaacgaagaggactactggtggtacttagaacttagaaaatacggcggtacaaaacacgctggattcggtctaggtttcgagcgcttcctaatgtacatcactggcatggctaacatccgtgacgtaattccattcccaagaactccaggttcttctgagttctaa

SEQ ID NO: 10568 - protein, 463 aa, Bacillus cereus AH621
MENTLVKSLYRDTEKYADQTVQVSGWIRNLRDSKAFGFIELNDGSFFKGVQIVFDTELENFKEIAKLPLSSSVKVEGKVIATPGAKQPFEIKAEKIDIEGLSDSDYPLQKKRHTFEYLRTIAHLRPRTNAFSATFRVRSIAAFAIHQFFQERGFVHVHTPIITGSDTEGAGEMFRVTTQDLNNVPKGEDGQVDESKDFFGKETNLTVSGQLNAEAYALAFRDVYTFGPTFRAENSNTTRHAAEFWMVEPEIAFAELGDVMDLTEDMLKYAMKYVLEHAPEEMDFFNSFVDKTVLERMNNVINSDFGRITYTEAIKVLQESGAEFKYPVEWGIDLQTEHERYLSEEIFKRPVFVTDYPKDIKAFYMRMNEDGKTVAATDLLVPGIGELIGGSQREERMDVLVDRIKELGMNEEDYWWYLELRKYGGTKHAGFGLGFERFLMYITGMANIRDVIPFPRTPGSSEF

SEQ ID NO: 10569 - DNA, 1392 bp, Bacillus cereus MM3
  CDS (1)..(1392): transl_table=11
atggaaaacacattagtaaaaagtctgtatagagatacagataaatacgcaggtcaaacagtacaagtatcagggtggattcgtaacttacgtgattcaaaagcatttggtttcatcgaattaaacgacggtagcttcttcaaaagcgttcaaatcgttttcgatacagagttagaaaacttcaaagaaattgcaaaacttccacttagctcttcagttaaagtagaaggtacagtaattgcaacgcctggagcgaagcaaccatttgaaattaaagcagaaaaaattgatatcgagggcttatcagattctgattacccacttcaaaagaaacgtcatacgtttgaatacttacgtacaatcgctcacttacgtccaagaacaaatgcattctctgcaacgttccgtgtacgttctgtcgcagcatttgcgattcaccagttcttccaagagcgtggattcgtacatgttcatacaccaatcatcactggtagtgatacagaaggtgcaggcgaaatgttccgcgtaacaacgcaaaatttaaacaacgtaccaaaaggtgaagacggacaagttgatgaatcaaaagacttcttcggcaaagaaacaaacttaacagtaagtggacagctgaacgctgaagcttatgcattagcattccgtgacgtatacacattcggacctacattccgtgcagaaaattcaaacacaactcgtcatgcagctgagttctggatggttgagccggagattgcattcgctgaattaggcgacgtaatggatcttacagaagatatgctgaaatatgcaatgaaatacgtactagagcatgcaccagaagaaatggacttcttcaacagcttcgttgataaaacagttctagagcgcatgaacaacgtaattaactctgacttcggtcgtatcacatatacagaagcaattaaagtacttcaagaatcgggtgctgacttcaaatacccagtagaatggggtattgatttacaaacagagcacgaaagatacttatcagaagaaatcttcaaacgccctgtattcgtaactgactatccgaaagacattaaagcgttctacatgcgtatgaatgaagatggaaaaacagtagctgctactgaccttctagttcctggcatcggcgaattaatcggcggaagtcaacgtgaagaaagaatggacgttttagtagacagaattaaagaattaggtatgaacgaagaggactactggtggtacttagaacttagaaaatacggcggtacaaaacatgctggatttggtctaggtttcgagcgcttcctaatgtacattactggcatggctaacatccgtgacgtaattccattcccaagaactccaggttcttctgagttttaa

SEQ ID NO: 10570 - protein, 463 aa, Bacillus cereus MM3
MENTLVKSLYRDTDKYAGQTVQVSGWIRNLRDSKAFGFIELNDGSFFKSVQIVFDTELENFKEIAKLPLSSSVKVEGTVIATPGAKQPFEIKAEKIDIEGLSDSDYPLQKKRHTFEYLRTIAHLRPRTNAFSATFRVRSVAAFAIHQFFQERGFVHVHTPIITGSDTEGAGEMFRVTTQNLNNVPKGEDGQVDESKDFFGKETNLTVSGQLNAEAYALAFRDVYTFGPTFRAENSNTTRHAAEFWMVEPEIAFAELGDVMDLTEDMLKYAMKYVLEHAPEEMDFFNSFVDKTVLERMNNVINSDFGRITYTEAIKVLQESGADFKYPVEWGIDLQTEHERYLSEEIFKRPVFVTDYPKDIKAFYMRMNEDGKTVAATDLLVPGIGELIGGSQREERMDVLVDRIKELGMNEEDYWWYLELRKYGGTKHAGFGLGFERFLMYITGMANIRDVIPFPRTPGSSEF

SEQ ID NO: 10571 - DNA, 1392 bp, Bacillus cereus BGSC 6E1
  CDS (1)..(1392): transl_table=11
atggaaaacacattagtaaaaagtctgtatagagatacagataaatacgcaggtcaaacagtacaagtatcagggtggattcgtaacttacgtgattcaaaagcatttggtttcatcgaattaaacgacggtagcttcttcaaaagcgttcaaatcgttttcgatacagaattagataacttcaaagaaattgcaaaacttccacttagctcttcagttaaagtagaaggtaaagtaattgcaacgcctggagcgaagcaaccatttgaaattaaagcagaaaaaattgatatcgagggcttatcagattctgattacccacttcaaaagaaacgtcatacgtttgaatacttacgtacaatcgctcacttacgtccaagaacaaatgcattctctgcaacgttccgcgtacgttctatcgcagcatttgcgattcaccaattcttccaagaacgtggattcgtacatgttcacacaccaatcatcactggtagtgatacagaaggtgcgggcgaaatgttccgcgtaacaacgcaagatttaaacaacgtaccaaaagacgaagacggacaagttgatgaatcaaaagacttcttcggcaaagaaacaaacttaacagtaagtggacagctgaacgctgaagcttatgcattagcattccgtgatgtatacacattcggacctacattccgtgcagaaaactcaaacacaactcgccatgctgctgagttctggatggttgagcctgagattgcatttgctgaactaggtgacgtaatgaaccttacagaagatatgctgaaatatgcaatgaaatacgtattagagcatgcaccagaagaaatggaattcttcaacagcttcgttgataaaacagttctagagcgcatgaacaacgtaatcaactctgacttcggtcgcatcacttatacagaagcaattaaagtacttcaagagtcaggtgctgacttcaaatacccagtagaatggggtattgacttacaaacagagcacgaaagatacttatcagaagaaatcttcaaacgccctgtattcgtaactgactatccgaaagacattaaagcattctacatgcgcttaaatgacgacggtaaaacagtagctgctactgaccttctagttcctggcatcggcgaattaatcggcggaagccaacgtgaagaaagaatggacgttttagtagacagaattaaagaactaggcatgaacgaagaggactactggtggtacttagaacttagaaaatacggcggtacaaaacacgctggattcggtctaggtttcgagcgcttcctaatgtatatcactggcatggctaacatccgtgacgtaattccattcccaagaactccaggttcttctgaattctaa

SEQ ID NO: 10572 - protein, 463 aa, Bacillus cereus BGSC 6E1
MENTLVKSLYRDTDKYAGQTVQVSGWIRNLRDSKAFGFIELNDGSFFKSVQIVFDTELDNFKEIAKLPLSSSVKVEGKVIATPGAKQPFEIKAEKIDIEGLSDSDYPLQKKRHTFEYLRTIAHLRPRTNAFSATFRVRSIAAFAIHQFFQERGFVHVHTPIITGSDTEGAGEMFRVTTQDLNNVPKDEDGQVDESKDFFGKETNLTVSGQLNAEAYALAFRDVYTFGPTFRAENSNTTRHAAEFWMVEPEIAFAELGDVMNLTEDMLKYAMKYVLEHAPEEMEFFNSFVDKTVLERMNNVINSDFGRITYTEAIKVLQESGADFKYPVEWGIDLQTEHERYLSEEIFKRPVFVTDYPKDIKAFYMRLNDDGKTVAATDLLVPGIGELIGGSQREERMDVLVDRIKELGMNEEDYWWYLELRKYGGTKHAGFGLGFERFLMYITGMANIRDVIPFPRTPGSSEF

SEQ ID NO: 10573 - DNA, 1392 bp, Bacillus cereus m1293
  CDS (1)..(1392): transl_table=11
atggaaaacacattagtaaaaagtctgtatagagatacagataaatacgcaggtcaaacagtacaagtatcagggtggattcgtaacttacgtgattcaaaagcatttggtttcatcgaattaaacgacggtagctttttcaaaagcgttcaaatcgttttcgatacagaattagataacttcaaagaaattgcaaagcttccacttagctcttcagttaaagtagaaggtaaagtaattgtaacgcctggagcgaaacaaccatttgaaattaaagcagaaaaaattgatattgagggcttatcagattctgattacccacttcaaaagaaacgtcatacgtttgaatacttacgtacaattgctcacttacgtccaagaacaaatgcattctctgcaacgttccgcgtacgttctatcgcagcatttgcgattcaccaattcttccaagagcgtggattcgtacatgttcacacaccaatcattactggtagtgatacagaaggtgcgggcgaaatgttccgcgtaacaacgcaagatttaaacaacgtaccaaaaggcgaagacggacaagttgatgaatcaaaagacttcttcggcaaagaaacaaacttaacagtaagtggacagctgaacgctgaagcttatgcattagcattccgtgatgtatacacattcggacctacattccgtgcagaaaactcaaacacaactcgccacgctgctgagttctggatggttgagcctgagattgcattcgctgaactaggtgacgtaatgaaccttacagaagatatgctgaaatatgcaatgaaatacgtattagagcatgcaccagaagaaatggaattcttcaacagcttcgttgataaaacagttctagagcgtatgaacaacgtaattaactctgacttcggtcgcatcacttatacagaagcaattaaagtacttcaagaatcaggtgctgacttcaaatacccagtagaatggggtattgacttacaaacagagcatgaaagatacttatcagaagaaatcttcaaacgccctgtattcgtaactgactatccgaaagacattaaagcattctacatgcgcttaaatgatgacggtaaaacagtagctgctactgaccttctagttcctggcatcggcgaattaatcggcggaagtcaacgtgaagaaagaatggacgttttagtagatagaattaaagaattaggcatgaaagaagaggactactggtggtacttagaacttagaaaatacggcggtacaaaacacgctggattcggtctaggtttcgagcgcttcctaatgtacatcactggcatggctaacatccgtgacgtaattccattcccaagaactccaggttcttctgaattctaa

SEQ ID NO: 10574 - protein, 463 aa, Bacillus cereus m1293
MENTLVKSLYRDTDKYAGQTVQVSGWIRNLRDSKAFGFIELNDGSFFKSVQIVFDTELDNFKEIAKLPLSSSVKVEGKVIVTPGAKQPFEIKAEKIDIEGLSDSDYPLQKKRHTFEYLRTIAHLRPRTNAFSATFRVRSIAAFAIHQFFQERGFVHVHTPIITGSDTEGAGEMFRVTTQDLNNVPKGEDGQVDESKDFFGKETNLTVSGQLNAEAYALAFRDVYTFGPTFRAENSNTTRHAAEFWMVEPEIAFAELGDVMNLTEDMLKYAMKYVLEHAPEEMEFFNSFVDKTVLERMNNVINSDFGRITYTEAIKVLQESGADFKYPVEWGIDLQTEHERYLSEEIFKRPVFVTDYPKDIKAFYMRLNDDGKTVAATDLLVPGIGELIGGSQREERMDVLVDRIKELGMKEEDYWWYLELRKYGGTKHAGFGLGFERFLMYITGMANIRDVIPFPRTPGSSEF

SEQ ID NO: 10575 - DNA, 1383 bp, Desulfomicrobium baculatum DSM 4028
  CDS (1)..(1383): transl_table=11
atgaagaacttgagagtggccgatatcctgttgtccgaggcggaagttgaatcactggtggtgcagggctgggtgcggaccaaacgcgaaagcaaggaattcgtgtttctggaaataaacgacgggtcgtgcctcaagaatctgcaagccatcgtcgacgccggtgccgtcggctttgaacacatggaccggatcggcaccggcgcggccgtaagtctgaccgggacgctggtggaatcccccgggcagggtcagaagtgggaactcaaggcccgcgagctgaaagtcctcggtgaggccgacgccacgtaccctttgcagaagaagcgccacacggatgagtacctgcgcaccatcgctcatctgcgtccccgaaccaacaagttcggcgccctgaaccgtatccgggccgagctgtcctacggcgtgcatcagtttttccgcgagcagggttttttcaacgtccatgcgcccatcattaccggatcggactgcgaaggtgcgggagagatgtttcaggtcaccacccttgatctgtccaatgttccgaaaaagaacggcaaggccgacttcgaccaggattttttcggcaaggaggcgtcgcttacggtctccgggcagcttgcggccgagaatctggcctgcgccctgggccgggtctatacgttcgggccgactttcagggccgagaattccaatacgcccaagcacgccgccgagttctggatgatcgagccggagatggccttcgcgggcctttccgacaacatggatctgggcgagagctgcatcaaatggctcatcacccatcttatggaccattgccgagacgacttggaacttttcggcaatttcgtggacaagggcctgttcgccaccctggacaacatcctggcgaagccgttcatccgtttgccctacgcggaggcggtgaccatcctcaagagcgcatcccgcactttcgagtttccggtggatttcggcacggatctgcagaccgagcacgagcggtatctgaccgaggatcatttcaagcagccggtcatcgttttcgactaccccaaggagatcaaggccttctatatgcgtctcaatgacgacgacaaaaccgtgggcgccatggatgtgcttgtgccgcgcatcggggagctcatcggcggcagcgccagggaagagcgtctggacgtgctcgagcgacgcatcgaagaactcggcctgccgaaggaggattactggtggtatctggacctgcgccgtttcggctcggtgccgcacgccgggttcggcatgggctttgagagactgctcatgctggtgaccggcatcgccaatatccgcgacgtcattccgttccccagaaccccccggcatctggagttttga

SEQ ID NO: 10576 - protein, 460 aa, Desulfomicrobium baculatum DSM 4028
MKNLRVADILLSEAEVESLVVQGWVRTKRESKEFVFLEINDGSCLKNLQAIVDAGAVGFEHMDRIGTGAAVSLTGTLVESPGQGQKWELKARELKVLGEADATYPLQKKRHTDEYLRTIAHLRPRTNKFGALNRIRAELSYGVHQFFREQGFFNVHAPIITGSDCEGAGEMFQVTTLDLSNVPKKNGKADFDQDFFGKEASLTVSGQLAAENLACALGRVYTFGPTFRAENSNTPKHAAEFWMIEPEMAFAGLSDNMDLGESCIKWLITHLMDHCRDDLELFGNFVDKGLFATLDNILAKPFIRLPYAEAVTILKSASRTFEFPVDFGTDLQTEHERYLTEDHFKQPVIVFDYPKEIKAFYMRLNDDDKTVGAMDVLVPRIGELIGGSAREERLDVLERRIEELGLPKEDYWWYLDLRRFGSVPHAGFGMGFERLLMLVTGIANIRDVIPFPRTPRHLEF

SEQ ID NO: 10577 - DNA, 1398 bp, Porphyromonas endodontalis ATCC 35406
  CDS (1)..(1398): transl_table=11
atgaaaagattgatgattaaagaggttattgcctcgcctacattagatcaagaaatcacagttatgggttgggtgcgtacgcgccgtggcaataaagcggtaagcttcattgcactcaatgatggtagctgtatccataatctacaaatcgtagcagatctggctcgcttctcacccgaggttatgcaacaaatcactactggggcatctctggctgtacgaggcaccctcgttgcctctcagggagcaggacaaagcgttgagttacaagctgaagagattaccatattcggcacatgcgaccccaatagctaccctctacaaaaaaaagggcattccctagagttccttcgcgatatagcctatctgcgccctcgtaccaatacctttggtgccatactgcgtatccgacacaatatggctattgccatccacgagtttttccataagaagggatactactatgtgcacacccccatcattacctctagtgatgcagaaggagcagggcaaatgttccgcgtaacgactctaaacctagataaattacctcttaacaaggccggcgaagtggattacaaaaaagacttcttcggtaaacctaccgctcttaccgtctcaggacaactagagggagagctggcagcccttgcccttggagggatttatacttttggtcccactttccgtgcagaaaactccaatacacctcgtcaccttgctgagttttggatgattgagcccgaaattgcgttcttcgacgtgcacgacaacatggaccttgcagaggagtttaccaagcattgtgtacagtgggctcttgataattgtgcggacgatttggctttcctctcggagcacttcgataagggactaatggatcgtcttcgcttcgtccttgccaatagctacgagcgcatcacctatacgcaagggattgagatactcgaaaaggccattgccgaagggcataaatttgaattccccgtgtactggggcgtagaccttgccagcgaacatgagcgctaccttgtggagcagcacttccaaaagcccgtaatcatgaccgactatccgaaggagattaaggccttctatatgaagcaaaacgaggatggcaaaacggtacgaggcatggacgttctcttccctctaatcggagaaattatcggcggtagtgagcgtgaagctgactttgacaaacttcgcacccacgctcaagagatgggagttcccgagaaagatatttggtggtacctagatactcgtcgctttggcacagtgcctcatgccggctttgggttaggcttcgagcgtctccttctcttcgtaacagggatgagcaacatccgcgatgttatccccttccctcgcaccccaaacaatgccgaattctag

SEQ ID NO: 10578 - protein, 465 aa, Porphyromonas endodontalis ATCC 35406
MKRLMIKEVIASPTLDQEITVMGWVRTRRGNKAVSFIALNDGSCIHNLQIVADLARFSPEVMQQITTGASLAVRGTLVASQGAGQSVELQAEEITIFGTCDPNSYPLQKKGHSLEFLRDIAYLRPRTNTFGAILRIRHNMAIAIHEFFHKKGYYYVHTPIITSSDAEGAGQMFRVTTLNLDKLPLNKAGEVDYKKDFFGKPTALTVSGQLEGELAALALGGIYTFGPTFRAENSNTPRHLAEFWMIEPEIAFFDVHDNMDLAEEFTKHCVQWALDNCADDLAFLSEHFDKGLMDRLRFVLANSYERITYTQGIEILEKAIAEGHKFEFPVYWGVDLASEHERYLVEQHFQKPVIMTDYPKEIKAFYMKQNEDGKTVRGMDVLFPLIGEIIGGSEREADFDKLRTHAQEMGVPEKDIWWYLDTRRFGTVPHAGFGLGFERLLLFVTGMSNIRDVIPFPRTPNNAEF

SEQ ID NO: 10579 - DNA, 1401 bp, Vibrio cholerae RC9
  CDS (1)..(1401): transl_table=11
atgacttacgcgcctgtaaatgacgtactcagcggcaagctcgcagtagacagtgaagtcactgttcgcggctggattcgcacacgtcgtgattccaaagctggaatttcgtttcttgccatctatgacggctcttgtttcaacccgattcaggccgtggttcctaataatctcaataattacgacaacgaagttctgaagctcactacaggctgttccgttgaagtaaccggtaagattgttgaatctccagcttcaggccaagcattcgaactggctgcgtctgacgtaaaagtcgtcggttgggttgaagatgccgatacttacccaatggcgaaaacgcgtcattcgattgaatatctgcgtgaagtggctcacctgcgtccacgtactaacgtgatcggtgcggttgcgcgtgttcgtaactgcttggcacaagcgattcaccgtttctaccatgaacaaggttacttctgggtttcagcgcctcttatcaccgcttctgatgcagaaggcgcaggtgaaatgttccgcgtttcaacgctggatatggaaaacctaccgcgtactgacgcaggtaaagtggattacaaccaagacttctttggtaaagaaaccttcctgaccgtatcaggccagctcaacgcggaagcttacgcttgtgcgatcagcaaagtgtacactttcggcccaacattccgtgcggaaaactcaaacaccagccgtcacttggcggaattctggatggttgaacctgaagttgcattcgctgacctgaacactgtagcaaagctggcggaagacatgctgaagtacgtgttcaaagccgtactggcagagcgtcgtgacgatcttgagttctttaacgatcgtattaataacgaagtgattgcgcgtcttgagcaatttgttgaatctgatttcgcacaagtggattacactgatgcgattgaaattctgaaaaactgcggcaaaacgtttgagttccctgttgaatggggcattgatttagcttctgagcacgagcgtttccttgcagaagagcacttcaaagcaccggttatcgtgaagaactatccaaaagacatcaaagcgttttacatgcgtatgaacgaagatggcaaaaccgttgcagcgatggacgtcttggcaccgggcattggtgaaatcatcggcggttcacagcgtgaagagcgtttggatattcttgatgcgcgtatgcgtgaatttggcatcgatcctgagcacatggactggtatcgcgacctgcgccgttacggcacagtgccgcacgcgggctttggtctgggcttcgagcgtctagtctcttacgtcactggtatgggcaacgtgcgtgacgtgatcccattcccacgtaccccacgcagcgcgagtttctaa

SEQ ID NO: 10580 - protein, 466 aa, Vibrio cholerae RC9
MTYAPVNDVLSGKLAVDSEVTVRGWIRTRRDSKAGISFLAIYDGSCFNPIQAVVPNNLNNYDNEVLKLTTGCSVEVTGKIVESPASGQAFELAASDVKVVGWVEDADTYPMAKTRHSIEYLREVAHLRPRTNVIGAVARVRNCLAQAIHRFYHEQGYFWVSAPLITASDAEGAGEMFRVSTLDMENLPRTDAGKVDYNQDFFGKETFLTVSGQLNAEAYACAISKVYTFGPTFRAENSNTSRHLAEFWMVEPEVAFADLNTVAKLAEDMLKYVFKAVLAERRDDLEFFNDRINNEVIARLEQFVESDFAQVDYTDAIEILKNCGKTFEFPVEWGIDLASEHERFLAEEHFKAPVIVKNYPKDIKAFYMRMNEDGKTVAAMDVLAPGIGEIIGGSQREERLDILDARMREFGIDPEHMDWYRDLRRYGTVPHAGFGLGFERLVSYVTGMGNVRDVIPFPRTPRSASF

SEQ ID NO: 10581 - DNA, 1401 bp, Vibrio cholerae bv. albensis VL426
  CDS (1)..(1401): transl_table=11
atgacttacgcgcctgtaaatgacgtactcagcggcaagctcgcagtagacagtgaagtcactgttcgcggctggattcgcacacgtcgtgattccaaagctggaatttcgtttcttgccatctatgacggctcttgtttcaacccgattcaggccgtggttcctaataatctcaataattacgacaacgaagttctgaagctcactacaggctgttccgttgaagtaaccggtaagattgttgaatctccagcttcaggccaagcatttgaactggctgcgtctgacgtaaaagtcgtcggttgggttgaagatgctgacacttacccaatggcgaaaacgcgtcattcgattgaatatctgcgtgaagtggctcacctgcgtccacgtactaacgtgatcggtgcggttgcgcgtgttcgtaactgcttggcacaagcgattcaccgtttctaccatgaacaaggttacttctgggtttcagcgcctcttatcaccgcttctgatgcagaaggcgcaggtgaaatgttccgcgtttcaacgctggatatggaaaacctaccgcgtactgacgcaggtaaagtggattacaaccaagacttctttggtaaagaaaccttcctgaccgtatcaggccaactcaacgcggaagcttacgcttgtgcgatcagcaaagtgtacactttcggcccaacattccgtgcggaaaactcaaacaccagccgtcacttggcggaattctggatggttgaacctgaggttgcgtttgctgacctgaacactgtagcaaaactggctgaagacatgctgaagtacgtgttcaaagccgtactggcagagcgtcgtgacgatcttgagttctttaacgatcgtattaataacgaagtgattgcgcgtcttgagcagtttgttgactctgatttcgcacacgtggattacaccgatgcgattgaaattctgaaaaactgcggcaaaacgtttgagttccctgttgaatggggtattgatttggcttctgagcacgagcgtttccttgcagaagagcacttcaaagcaccggttatcgtgaagaactatccaaaagacatcaaagcgttctacatgcgtatgaacgaagatggcaaaaccgttgcagcgatggacgtcttggcaccgggcattggtgaaatcatcggcggttcacagcgtgaagagcgtttggatattcttgatgcgcgtatgcgtgaatttggcatcgatcctgagcacatggactggtatcgcgacctgcgccgttacggcacagtgccgcacgcgggctttggtctgggcttcgagcgtctagtctcttacgtcactggtatgggcaacgtgcgtgacgtgatcccattcccacgtaccccacgcagcgcgagtttctaa

SEQ ID NO: 10582 - protein, 466 aa, Vibrio cholerae bv. albensis VL426
MTYAPVNDVLSGKLAVDSEVTVRGWIRTRRDSKAGISFLAIYDGSCFNPIQAVVPNNLNNYDNEVLKLTTGCSVEVTGKIVESPASGQAFELAASDVKVVGWVEDADTYPMAKTRHSIEYLREVAHLRPRTNVIGAVARVRNCLAQAIHRFYHEQGYFWVSAPLITASDAEGAGEMFRVSTLDMENLPRTDAGKVDYNQDFFGKETFLTVSGQLNAEAYACAISKVYTFGPTFRAENSNTSRHLAEFWMVEPEVAFADLNTVAKLAEDMLKYVFKAVLAERRDDLEFFNDRINNEVIARLEQFVDSDFAHVDYTDAIEILKNCGKTFEFPVEWGIDLASEHERFLAEEHFKAPVIVKNYPKDIKAFYMRMNEDGKTVAAMDVLAPGIGEIIGGSQREERLDILDARMREFGIDPEHMDWYRDLRRYGTVPHAGFGLGFERLVSYVTGMGNVRDVIPFPRTPRSASF

SEQ ID NO: 10583 - DNA, 1401 bp, Vibrio cholerae 12129(1)
  CDS (1)..(1401): transl_table=11
atgacttacgcgcctgtaaatgacgtactcagcggcaagctcgcagtagacagtgaagtcactgttcgcggctggattcgcacacgtcgtgattccaaagctggaatttcgtttcttgccatctatgacggctcttgtttcaacccgattcaggccgtggttcctaataatctcaataattacgacaacgaagttctgaagctcactacaggctgttccgttgaagtaaccggtaagattgttgaatctccagcttcaggccaagcattcgaactggctgcgtctgacgtaaaagtcgtcggttgggttgaagatgccgatacttacccaatggcgaaaacgcgtcattcgattgaatatctgcgtgaagtggctcacctgcgtccacgtactaacgtgatcggtgcggttgcgcgtgttcgtaactgcttggcacaagcgattcaccgtttctaccatgaacaaggttacttctgggtttcagctccactgatcaccgcttctgatgcagaaggcgcaggtgaaatgttccgcgtttcaacgctggatatggaaaacctaccgcgtactgacgcaggtaaagtggattacaaccaagacttctttggcaaagaaaccttcctgactgtatcaggccagctcaacgcggaagcttacgcttgtgcgatcagcaaagtgtacactttcggcccaacattccgtgcggaaaactcaaacaccagccgtcatttggcggaattctggatggttgaacctgaagttgcgtttgctgacctgaacactgtagcaaaactggcggaagacatgctgaagtacgtgttcaaagccgtactggcagagcgtcgtgacgatcttgagttctttaacgatcgcattaataacgaagtgattgcgcgtcttgagcagtttgttgactctgatttcgcacaagtggattacaccgatgcgattgaaattctgaaaaactgcggcaaaacgtttgagttccctgttgaatggggcattgatttggcttctgagcacgagcgtttccttgcagaagagcacttcaaagcaccggttatcgtgaagaactatccaaaagacatcaaagccttctacatgcgtatgaacgaagatggcaaaaccgttgcggcgatggacgtcttggcaccgggcattggtgaaatcatcggcggttcacagcgtgaagagcgtttggatattcttgatgcgcgtatgcgtgaatttggcatcgatcctgagcatatggattggtatcgcgacctgcgccgttacggcacagtgccgcacgcgggctttggtctgggcttcgagcgtctagtctcttacgtcacgggtatgggcaacgtgcgtgacgtgatcccattcccacgtaccccacgcagcgcgagtttctaa

SEQ ID NO: 10584 - protein, 466 aa, Vibrio cholerae 12129(1)
MTYAPVNDVLSGKLAVDSEVTVRGWIRTRRDSKAGISFLAIYDGSCFNPIQAVVPNNLNNYDNEVLKLTTGCSVEVTGKIVESPASGQAFELAASDVKVVGWVEDADTYPMAKTRHSIEYLREVAHLRPRTNVIGAVARVRNCLAQAIHRFYHEQGYFWVSAPLITASDAEGAGEMFRVSTLDMENLPRTDAGKVDYNQDFFGKETFLTVSGQLNAEAYACAISKVYTFGPTFRAENSNTSRHLAEFWMVEPEVAFADLNTVAKLAEDMLKYVFKAVLAERRDDLEFFNDRINNEVIARLEQFVDSDFAQVDYTDAIEILKNCGKTFEFPVEWGIDLASEHERFLAEEHFKAPVIVKNYPKDIKAFYMRMNEDGKTVAAMDVLAPGIGEIIGGSQREERLDILDARMREFGIDPEHMDWYRDLRRYGTVPHAGFGLGFERLVSYVTGMGNVRDVIPFPRTPRSASF

SEQ ID NO: 10585 - DNA, 1383 bp, Streptobacillus moniliformis DSM 12112
  CDS (1)..(1383): transl_table=11
atggagttaagagatttacaattaaatatagaaaaatatttaaataaaaaagtaaaattagatggttgggtaaagaaaataagatcacaaaaaaagtttggatttatagagtttaatgatggaacatattttcaaggaatacaaattgtatttgatgataatttagaaaattttgaagaaatttcaaaattatcaatatattcttcaatttcagttgaagggactttagttaaatcagaaggaaaaggtcaaagctttgaaattaaggttgataatatttctgtatataataaggcagatatttcaaatcctttacaaaacaaaagacatggtatggaatttttaagaactatagcacatttaagacctagaactaatacttttaatgcagtatttagagttagatcattacttgcacatgctatacataaattttttatggaaagaaatttcgtttatgtacaaacaccaatatttactagcacagatgctgaaggtgctggagaaatgtttcaagttacaacacttgatttaaataatttgcctagaaatgaagaaaatattatagattatagagaagatttttttgcaaaaccttcatatttaactgttacaggtcaattacatgttgaagcttttgcatcagcttttcataatacatatacttttggacctacttttagagcagaagaatcatatactgcaagacatgcagcagaattttggatgatagaacctgaaattgcttttgctaacttagaaactaatatggatattgcagaatctatgattaaatatattattaaatatgttatggacaatgcaccacttgaaatggaatttttcaatacatggatagaaaaaggaataatagataaattaaataatatattaaataatgactttgggcgtgttacatatactgaagcaattgatatacttaaaaattcagatgcagaatttactattcctgttgaatggggaatggatttgaaaacagagcatgaaagatatctagcagagaatgtatttaaaaaaccagtatttgttacagattatccaaaagatattaaagctttctatatgaaacttaatgaagatggtaaaactgtaagagctatggacttattagcaccaggtataggtgagatagttggtggaagtcaaagagaagaagattatgataaattagttaatataatgagggaaaaagaacttaatatagatgattattcatggtatttagacctaagaaaatttggttcattcccacattcaggttatggactaggatttgaaagaatgttaatgtatattacaggtatttcaaatataagggatgtattagcattcccaagaactgcaaaaagtttagagtattaa

SEQ ID NO: 10586 - protein, 460 aa, Streptobacillus moniliformis DSM 12112
MELRDLQLNIEKYLNKKVKLDGWVKKIRSQKKFGFIEFNDGTYFQGIQIVFDDNLENFEEISKLSIYSSISVEGTLVKSEGKGQSFEIKVDNISVYNKADISNPLQNKRHGMEFLRTIAHLRPRTNTFNAVFRVRSLLAHAIHKFFMERNFVYVQTPIFTSTDAEGAGEMFQVTTLDLNNLPRNEENIIDYREDFFAKPSYLTVTGQLHVEAFASAFHNTYTFGPTFRAEESYTARHAAEFWMIEPEIAFANLETNMDIAESMIKYIIKYVMDNAPLEMEFFNTWIEKGIIDKLNNILNNDFGRVTYTEAIDILKNSDAEFTIPVEWGMDLKTEHERYLAENVFKKPVFVTDYPKDIKAFYMKLNEDGKTVRAMDLLAPGIGEIVGGSQREEDYDKLVNIMREKELNIDDYSWYLDLRKFGSFPHSGYGLGFERMLMYITGISNIRDVLAFPRTAKSLEY

SEQ ID NO: 10587 - DNA, 1440 bp, Spirosoma linguale DSM 74
  CDS (1)..(1440): transl_table=11
atgagttatcaatccattcaacagttattaaaaaccgccccaactggcacagaagtgaccgttaaggggtgggtacgtaccaagcgggaaagtaaaaacgcagtctttattgcccttaatgatggctctaccatcaataccattcaggcggtggccgaagcgggtcaacttcccgaagaaaccctgaaactcatcacgaccggtgcttgcctggccgttacgggtcagttagtagaatcgcagggagccggacaggcggttgaggttaaaattgccaacgtaactatttacggcaccgccgaccccgataaatatccgctgcaaccgaaacggcactcgctggagttcctgcgcgaaattgcccacctgcggccccgtaccaatacattcagcgctatattacgcatccggcatgccctggccttcgccgtccataaatacttcaacgacaatgggttctattatttaaacacccccatcattacggcttccgatgccgaaggagccggtgaaatgttccgggtgacaaccctcgacgcgacgaagcctcctttaaccgaagacggtaaggtcgattatagccaggacttctttggccgcgaaaccaacctgacggtatccggtcagttggaaggtgaactgggcgcaatggcactgggtaaaatttatacgtttggccccacgttccgggccgaaaactccaacaccacccgccaccttgccgagttctggatgattgagcccgaaatggccttttatgaactggaagacaacatgaatctggccgaggattttgtcaaaaccgttatccggtacgcgctgcaacactgcgccgacgaccttgccttcctggattcgcggttgaaagatgaagagaagaccaaaaagaaagaagaacaaagtgaactaggcttactcgaaaaacttcagtttgtgatcagcaacgaatttgttcggctgacgtataccgaagccatcgacattctggtgaattccaaaccggcgaagaaaggtcagttccagtacgaagtaagctggggcgtcgatctgcagtcagagcatgagcggtatctggtagaaaagcatttcaagaaaccggtgatcctgaccaactacccccgcgaaatcaaagcgttttacatgaagcaagatccggatggtaaaactgtgcgggccatggacgttctgtttccgggaatcggcgaaatcattggtggttcccagcgtgaggacgacctcgacaagctcaccgcccgaatgcaggaagtaggcattgaacccgaagcgttatggtggtatctggatacgcgccgattcggttcggcaccccacgccggctttggcctcggcttcgagcggctggtgttgttcgtaacgggtatgggcaacatccgcgatgtgatccccttcccgcgtgctccgaaaacggctgaattttag

SEQ ID NO: 10588 - protein, 479 aa, Spirosoma linguale DSM 74
MSYQSIQQLLKTAPTGTEVTVKGWVRTKRESKNAVFIALNDGSTINTIQAVAEAGQLPEETLKLITTGACLAVTGQLVESQGAGQAVEVKIANVTIYGTADPDKYPLQPKRHSLEFLREIAHLRPRTNTFSAILRIRHALAFAVHKYFNDNGFYYLNTPIITASDAEGAGEMFRVTTLDATKPPLTEDGKVDYSQDFFGRETNLTVSGQLEGELGAMALGKIYTFGPTFRAENSNTTRHLAEFWMIEPEMAFYELEDNMNLAEDFVKTVIRYALQHCADDLAFLDSRLKDEEKTKKKEEQSELGLLEKLQFVISNEFVRLTYTEAIDILVNSKPAKKGQFQYEVSWGVDLQSEHERYLVEKHFKKPVILTNYPREIKAFYMKQDPDGKTVRAMDVLFPGIGEIIGGSQREDDLDKLTARMQEVGIEPEALWWYLDTRRFGSAPHAGFGLGFERLVLFVTGMGNIRDVIPFPRAPKTAEF

SEQ ID NO: 10589 - DNA, 1404 bp, Slackia heliotrinireducens DSM 20476
  CDS (1)..(1404): transl_table=11
atggatcgcattgtcattgccgagctgttccgcaacgccgaggcgtacgcagaccaagaggtcaccgtcgccggctgggtccgctcgattcgcgatatgaagaacttcggattcgtcacgctcaacgacggcagctgcttcaaggatctgcaggtcgtcatggaccgcgaaagcctgcccgagtacgacgtcatcgccgcccagggtgtttccgccgcgctcatcgtcaccggcacggtggtgctgacgcccgacgccaagcagcccttcgagctgaaggctgcaaacattcaggtagaaggtgaatcccgcgaggattatccgctgcagaagaagcgccacaccaacgagttcctgcgcaccatccagcacctgcgcccccgcacgaacctgttccgcgccgtgttccgcgtgcgctccgttgccgcctacgccctccacgagttcttccaggagcgcggcttcgtctacgtgaatacgcccatcatcaccgcgtcggacgccgagggtgccggcgagatgttccgcgtgaccaccatcgaccctgccaacccgccgctggacgacaagggcaacgtcgactacagccaggacttcttcggcaaggccaccaacctgacggtgtccggccagctccaggctgagagcttcgccatggccttcggcgatgtgtacaccttcggccccacgttccgtgccgaggactccaacaccgcccgccacgccgccgagttctggatggtcgagcccgagatcgccttcgccgacctggacgacgacatgaacctggccgaggacatgctcaaacacgtcatcaacacggtgctcgagaagtgcccggacgagatgaatatgttcaacagctttgtggacaaaggcctgatcgagcgcctgcagcacgtggccaactccgacttcatccgcgtcacctacaccgaggccgtcgacatcctgctggacgccgcggccaagggccacaagttcgactaccccgtatcctggggcatcgacctgcagaccgagcacgagcgctatctgaccgaagagcatttcaagaagcccacgttcgtgaccgactaccccgtggaaatcaaggccttctacatgcgcttgaacgatgacggcaagaccgtcgccgccatggactgcctggtccccggcatcggcgaaatcgtcggcggcagccagcgtgaagagcgcctcgatgtgctcgaaaaccgcatccgcgagctggacatggatcccgaacagtacaagttctactgcgacctgcgccgttacggctcttgccgccatgccggcttcggcctcggtttcgagcgcatggtcatgtacctgaccggcgtgagcaacatccgcgacgtccttccccacccccgcaccgtcggtaacgcggagttctaa

SEQ ID NO: 10590 - protein, 467 aa, Slackia heliotrinireducens DSM 20476
MDRIVIAELFRNAEAYADQEVTVAGWVRSIRDMKNFGFVTLNDGSCFKDLQVVMDRESLPEYDVIAAQGVSAALIVTGTVVLTPDAKQPFELKAANIQVEGESREDYPLQKKRHTNEFLRTIQHLRPRTNLFRAVFRVRSVAAYALHEFFQERGFVYVNTPIITASDAEGAGEMFRVTTIDPANPPLDDKGNVDYSQDFFGKATNLTVSGQLQAESFAMAFGDVYTFGPTFRAEDSNTARHAAEFWMVEPEIAFADLDDDMNLAEDMLKHVINTVLEKCPDEMNMFNSFVDKGLIERLQHVANSDFIRVTYTEAVDILLDAAAKGHKFDYPVSWGIDLQTEHERYLTEEHFKKPTFVTDYPVEIKAFYMRLNDDGKTVAAMDCLVPGIGEIVGGSQREERLDVLENRIRELDMDPEQYKFYCDLRRYGSCRHAGFGLGFERMVMYLTGVSNIRDVLPHPRTVGNAEF

SEQ ID NO: 10591 - DNA, 1401 bp, Yersinia pestis Nepal516
  CDS (1)..(1401): transl_table=11
atgagcgtagtgcctgtagtcgacgtactgcaaggccgcgccgcggttggcagtgaagtcaccgtgcgcggttgggtgcgtacccggagagattctaaagcgggtatctccttcgttgccgtttatgacggttcctgctttgacccgttacaggccgtcgtgaataatactttgccgaattatcaggatgaagtactgcatctgaccaccggttgttccgttgaagtcaccggtaccgtggtcgcatcaccgggtgaaggccaaagttttgaaattcaagcaaccgccatcaacgtagtaggctgggttgatgatccggatacctacccgatggccgcaaaacgtcacagcattgaatatttgcgtgaagtggctcacttacgcccgcgtactaacctgattggtgccgttgcccgtgttcgccacacgttggcacaagcaatccaccgcttcttcgacgaaaatgggtatttctgggtttctacaccactgatcaccgcctctgatactgaaggcgcaggtgagatgttccgtgtttcaactttagatctggaaaacttgccacgcacggataccggtgctgtcgatttcagcgaagacttcttcggtaaagaagcgttcctgaccgtatcgggtcagctaaacggtgaaacctacgcctgtgcattatcaaaggtttacacctttggcccaaccttccgggctgaaaactccaataccagccgccatttggctgaattctggatggttgagccggaagtggccttcgcttctctggatgatgtcgccggtttggctgagaaaatgttgaaatacgttttccaggcggtcttgaatgaacgtgctgatgacatgaagttctttgccgaacgtgtcgataaagacgcggttgaccgcctgcaacgtttcgtcacctctgattttgctcaggttgactacactgatgccattgagatcttgctggcatccggtcagaagtttgagaatgatgtttcatggggtattgatttgtcctctgaacatgagcgttatctggctgagaaacactttaaagcgccggtggtggttaaaaactatccgaaagatattaaagccttctatatgcgaatgaatgaagatggcaaaaccgttgcggcgatggatgttttagcgccgggtattggtgaaatcatcggtggttcacaacgtgaagagcgtttagatgtcttggatgcgcgtttagccgaaatgggcctgaataaagaagattattggtggtatcgtgatctgcgtcgctacggcactgtaccgcattcaggttttggcctcggatttgagcgtttaatctcatatgtcactggggttcaaaacgttcgggacgttattccgttcccacgcacaccgagaaatgccagtttctaa

SEQ ID NO: 10592 - protein, 466 aa, Yersinia pestis Nepal516
MSVVPVVDVLQGRAAVGSEVTVRGWVRTRRDSKAGISFVAVYDGSCFDPLQAVVNNTLPNYQDEVLHLTTGCSVEVTGTVVASPGEGQSFEIQATAINVVGWVDDPDTYPMAAKRHSIEYLREVAHLRPRTNLIGAVARVRHTLAQAIHRFFDENGYFWVSTPLITASDTEGAGEMFRVSTLDLENLPRTDTGAVDFSEDFFGKEAFLTVSGQLNGETYACALSKVYTFGPTFRAENSNTSRHLAEFWMVEPEVAFASLDDVAGLAEKMLKYVFQAVLNERADDMKFFAERVDKDAVDRLQRFVTSDFAQVDYTDAIEILLASGQKFENDVSWGIDLSSEHERYLAEKHFKAPVVVKNYPKDIKAFYMRMNEDGKTVAAMDVLAPGIGEIIGGSQREERLDVLDARLAEMGLNKEDYWWYRDLRRYGTVPHSGFGLGFERLISYVTGVQNVRDVIPFPRTPRNASF

SEQ ID NO: 10593 - DNA, 1437 bp, Citrobacter sp. 30_2
  CDS (1)..(1437): transl_table=11
atgtttatatatccgactattaacagagagaatattatgagcgttgtgcctgtagccgacgtactccagggccgcgtagccgttgacagcgaagtcaccgtgcgcggatgggtgcgtacccgccgagattcaaaagctggcatctccttcctcgccgtttatgacggttcctgctttgatcctgtacaggccgtcatcaataattctctgcccaattacaatcaggacgtactgcgcctgacgacgggttgttcagttatcgtaacgggtaaagtcgttgcatctcctggacaaggacagagctttgaaattcaggccactgaggttgaagtaacgggctgggttgaagatcctgacacttacccaatggcagctaagcgtcacagcattgagtatctgcgtgaagtggcgcatatgcgtccgcgtaccaacatgattggtgcggtagcgcgtgtacgtcatacgctggcacaagctctgcatcgtttcttccacgagcagggtttcttttgggtatctactccgttgatcaccgcttccgatacggaaggtgccggtgaaatgttccgtgtttctacgctggatctggaaaacctgccgcgtaacgatcagggtaaagtcgatttcgataaagacttctttggtaaagaagccttcctgaccgtttccggtcagctgaacggtgaaacctacgcctgcgccctgtctaaaatttatacttttggcccgacgttccgtgcagaaaactctaacaccagtcgtcacctggcagagttctggatgctggaaccagaagtggcttttgctgacctgaatgatgttgcaggcctggctgaagcgatgctgaagtacgcgtttaaagccgtactggcagagcgtgcggatgatatgaaattcttcgctgaacgtgtcgacaaggacgcgatttcacgcctggaacgtttcattgacgctgacttcgcgcaggtggattacactgacgcggtaagcattctggaaaaatgcggtaaacagttcgaaaacccggtttactggggtgtggatctgtcttctgagcatgaacgttaccttgctgaagagcactttaaagcgccggtggtagtgaaaaactacccgaaagatatcaaagcgttttatatgcgccttaacgaagacggtaaaaccgttgctgcaatggacgtactggccccgggaatcggtgaaatcatcggtggttctcagcgtgaagagcgcctggacgtgctggatgcccgtatgctggaaatgggtctgaacaaagaggattactggtggtatcgcgacctgcgtcgctacggtaccgttccgcattccggcttcggattgggcttcgagcgtctgatcgcttacgtcaccggcgtacagaacgtccgtgatgttattccgttcccgcgtactccacgtaacgccaccttctaa

SEQ ID NO: 10594 - protein, 478 aa, Citrobacter sp. 30_2
MFIYPTINRENIMSVVPVADVLQGRVAVDSEVTVRGWVRTRRDSKAGISFLAVYDGSCFDPVQAVINNSLPNYNQDVLRLTTGCSVIVTGKVVASPGQGQSFEIQATEVEVTGWVEDPDTYPMAAKRHSIEYLREVAHMRPRTNMIGAVARVRHTLAQALHRFFHEQGFFWVSTPLITASDTEGAGEMFRVSTLDLENLPRNDQGKVDFDKDFFGKEAFLTVSGQLNGETYACALSKIYTFGPTFRAENSNTSRHLAEFWMLEPEVAFADLNDVAGLAEAMLKYAFKAVLAERADDMKFFAERVDKDAISRLERFIDADFAQVDYTDAVSILEKCGKQFENPVYWGVDLSSEHERYLAEEHFKAPVVVKNYPKDIKAFYMRLNEDGKTVAAMDVLAPGIGEIIGGSQREERLDVLDARMLEMGLNKEDYWWYRDLRRYGTVPHSGFGLGFERLIAYVTGVQNVRDVIPFPRTPRNATF

SEQ ID NO: 10595 - DNA, 1431 bp, Mollicutes bacterium D7
  CDS (1)..(1431)
atggataaaataaagtatataataggaaaaactaggaggattaatatgtttgaatttataacggttagagaactatatgaaatgtttttaagtaaccaaatgatggatttagaaggttacgaatatgttgaacttgagggatgggttcgaactaatcgtaacaatgggaaattgggatttattgctctaaatgatggtacatacttcaaaaatttacaagttgtatatacagaagcagaaatttctaactatgaagaaatcgataaattatctactggtagttcaattcgagtagttggaaaattaaagttgacacctgaaggaaaacaaccatttgaagttgaagcaactgagattgaaatcgaaggtaaatgtgatgaagattttccattacaaaagaaacgtcattcattcgaatatatgcgtgaaataccgcatttaagacctcgtgcgaacactttctatgcaatttttagattgcgcagtgttttatcaatggctattcatgaatttttccaatcacaagggtttgtttatgttcatacaccaattatcactggaaacgatggtgaaggggccggagaaatgtttagagcaacaactattgatggaactaattttgaagatgatttctttgaaaaagaggctttcttaacagttactggtcaattacatgttgaagcttttgcaatggcttttagagatgtttatacatttggtcctgcatttagagcagaaaactctaatacttctcgccatgctagtgaattttggatgattgaacctgaaattgcttttgctgatttagaggatgatatggatttaattgaagatatggttaaatattgtatcgattacgttttagataatgctcctgcggaaatggaattctttgcttcaatgattgataaagattgcatcaatcgaattactaaagttaaaaacagtgatttcaaacggatgacatacactgaagcaattgaaattttagaaaaagcagatgttaaatttaaaaataaagtttcatggggaatggatttaaatagtgaacatgagcgctatatttgtgaacaggttgttaaaggaccagttttcttgacagactatccaaaagaaatcaaggctttctatatgcgtttaaatgatgataataaaacagtggctgcttgtgatttattggttccaggaattggagaattagttggaggaagtcaacgtgaagaaagatatgatgttcttgaaagaatcatggatgaaaaaggaatgtctaaagatggtttacaatggtatatggacttacgtcgctatggtggctgtaaacatgcgggattcggtttaggatttgatcgtttcttaatgtatttaactggaatgcaaaatattcgtgatgttgaacctttcccaagaacaccaagaaatttaaaattttaa

SEQ ID NO: 10596 - protein, 476 aa, Mollicutes bacterium D7
MDKIKYIIGKTRRINMFEFITVRELYEMFLSNQMMDLEGYEYVELEGWVRTNRNNGKLGFIALNDGTYFKNLQVVYTEAEISNYEEIDKLSTGSSIRVVGKLKLTPEGKQPFEVEATEIEIEGKCDEDFPLQKKRHSFEYMREIPHLRPRANTFYAIFRLRSVLSMAIHEFFQSQGFVYVHTPIITGNDGEGAGEMFRATTIDGTNFEDDFFEKEAFLTVTGQLHVEAFAMAFRDVYTFGPAFRAENSNTSRHASEFWMIEPEIAFADLEDDMDLIEDMVKYCIDYVLDNAPAEMEFFASMIDKDCINRITKVKNSDFKRMTYTEAIEILEKADVKFKNKVSWGMDLNSEHERYICEQVVKGPVFLTDYPKEIKAFYMRLNDDNKTVAACDLLVPGIGELVGGSQREERYDVLERIMDEKGMSKDGLQWYMDLRRYGGCKHAGFGLGFDRFLMYLTGMQNIRDVEPFPRTPRNLKF

SEQ ID NO: 10597 - DNA, 1392 bp, Fusobacterium mortiferum ATCC 9817
  CDS (1)..(1392): transl_table=11
atgaaaaaagttacagtaaaatctctatacagagagacagaaaaatacctagaccaagaagttataataaatggttgggtaaaaaagataagagaccaaaagaactttggatttattgaagtaaatgatggttcttttttcaaaggagtacaagttgtatttgatacaagacttagtaactttgaagagatctctcgtctatctataatatcttcaatagaggtaaaaggaaaattagtaaaatcacaaggagctggacaagcttttgaaataatggctgaagagataaatgtattccaaaaggctgacttagaatatcctttacaaaataaaagacatacttttgaatatttaagaacaaaagctcacttaagaccaagaacaaacactttctcagcagtatttagagtaaggtcagtagtagcttatgctatacacaaattcttccaagagaatggatttgtttatgtacatactccaatcataacaggttctgactgtgagggagcaggagagatgtttagagtaactactctagatttaaacaatctacctaaaaaagaagatggaacagtagataactctaaagacttctttggaaaagaaactaatttaactgtaagtgggcaattaagtggagaaactttctgttcagcatttagaaatatatatacatttggacctacatttagagcagagaactctaatacagctagacacgcttctgagttctggatgatagagcctgaaattgcttttgctgatttagaggcaaatatggaactagctgaatcaatggttaagtatataatcaaatttgtaatggacgagtgtccagaagagatggaattcttcaataacttcattgaaaaaggattatttgacaaattaaataatgtattaaatagtgactttggaagattaacatatacagaagcaatagatatactattaaaatctggtaagaaatttgactatccagttgaatggggaattgacttacaaagtgaacatgagagatatttagctgaagagtatttcaaaaagccggtattcttaactgattatcctaaagatatcaaagctttctatatgaaacttaatccagatggaaaaactgtaagagctatggatctattagcaccaggaattggagagataataggaggttctcaaagagaggatagcttagagatactagaaaatagaataactgaattaggaatgaaaccagaggattatgaattctatctagatttaagaagatttggaagtttcccacactctggatatggactaggatttgagagaattataatgtatataacaggaatgactaatatccgtgatgtaattcctttccctagaacaccaaataatgctgaattctaa

SEQ ID NO: 10598 - protein, 463 aa, Fusobacterium mortiferum ATCC 9817
MKKVTVKSLYRETEKYLDQEVIINGWVKKIRDQKNFGFIEVNDGSFFKGVQVVFDTRLSNFEEISRLSIISSIEVKGKLVKSQGAGQAFEIMAEEINVFQKADLEYPLQNKRHTFEYLRTKAHLRPRTNTFSAVFRVRSVVAYAIHKFFQENGFVYVHTPIITGSDCEGAGEMFRVTTLDLNNLPKKEDGTVDNSKDFFGKETNLTVSGQLSGETFCSAFRNIYTFGPTFRAENSNTARHASEFWMIEPEIAFADLEANMELAESMVKYIIKFVMDECPEEMEFFNNFIEKGLFDKLNNVLNSDFGRLTYTEAIDILLKSGKKFDYPVEWGIDLQSEHERYLAEEYFKKPVFLTDYPKDIKAFYMKLNPDGKTVRAMDLLAPGIGEIIGGSQREDSLEILENRITELGMKPEDYEFYLDLRRFGSFPHSGYGLGFERIIMYITGMTNIRDVIPFPRTPNNAEF

SEQ ID NO: 10599 - DNA, 1386 bp, Fusobacterium sp. 2_1_31
  CDS (1)..(1386): transl_table=11
atgattactgtaaaagatatttttagacacggtgaagagtatctaaacaaagagatagagctttttggttgggtaagaaaaattagagatcaaaagaaatttggttttattgaactaaatgatggttcattttttaaaggagttcaaatagtttttgaagaaggacttgaaaattttgatgaagtttcaagactttcaatagcttctactattaaagtaaaagggactcttgttaaatctgaaggtagtggacaagatttagaagttaaggctaaagaaattgaagtattccaaaaggctgacttagaatatccacttcaaaataaaagacatacttttgaatacttaagaactaaagcacatttaagacctagaacaaatactttctcagcagtatttagagttagatctgtacttgcttatgcaatacataaatttttccaagaaaataactttgtttatgttcacactccaatcataacaggttctgatgctgaaggtgcaggagaaatgtttagaattacaacttttgatttaaacaaagtacctaagaaagaaaatggagagattgatttttctaaagacttctttggtaaatctactaacctaacagttagtggtcaattaaatgttgaaacttactgtgctgcttttagaaatgtctatacttttggaccaacatttagagcagaatattcaaatacagcaagacatgcttctgaattttggatgatagaacctgaaatagcttttggagatttaggtgctaatatggagcttgcagaagctatggtaaaatatatcattaaatatgttatggataattgtcctgaagaaatggaattctttaactcattcattgaaaaaggactatttgataaattaaacaatgtacttaacaatgattttgctagagttacttatacagaggctatagaaattctagaaaaatctggtaagaaatttgaatttcctgttaaatggggaatagacttacaaagtgaacatgaaagatacttagctgaagaatacttcaaaaaacctgtattcgtaacagattatcctaaagatattaaggctttctatatgaagcttaacgatgacaataaaactgttagagctatggacttactagcaccaggaattggagaaataattggtggttctcaaagagaagacaactacgacttacttgttaagagaatggatgaattagggcttaataaagaagattatgaattttatttagatttaagaagatttggaagtttcccacattctggatatggtctaggatttgaaagaatgatgatgtatctaactggtatgcaaaatatcagagacgtaataccattcccaagaactccaaacaatgcagaattttaa

SEQ ID NO: 10600 - protein, 461 aa, Fusobacterium sp. 2_1_31
MITVKDIFRHGEEYLNKEIELFGWVRKIRDQKKFGFIELNDGSFFKGVQIVFEEGLENFDEVSRLSIASTIKVKGTLVKSEGSGQDLEVKAKEIEVFQKADLEYPLQNKRHTFEYLRTKAHLRPRTNTFSAVFRVRSVLAYAIHKFFQENNFVYVHTPIITGSDAEGAGEMFRITTFDLNKVPKKENGEIDFSKDFFGKSTNLTVSGQLNVETYCAAFRNVYTFGPTFRAEYSNTARHASEFWMIEPEIAFGDLGANMELAEAMVKYIIKYVMDNCPEEMEFFNSFIEKGLFDKLNNVLNNDFARVTYTEAIEILEKSGKKFEFPVKWGIDLQSEHERYLAEEYFKKPVFVTDYPKDIKAFYMKLNDDNKTVRAMDLLAPGIGEIIGGSQREDNYDLLVKRMDELGLNKEDYEFYLDLRRFGSFPHSGYGLGFERMMMYLTGMQNIRDVIPFPRTPNNAEF

SEQ ID NO: 10601 - DNA, 1386 bp, Fusobacterium sp. 4_1_13
  CDS (1)..(1386): transl_table=11
atgattactgtaaaagatatttttagacatggggaggattacctagacaaagagatagagctttttggttgggtaagaaagataagagatcaaaaaaaatttggttttattgaattaaatgatggctcattttttaaaggagtgcaaatagtttttgaagaaggacttgaaaattttgatgaagtttcaagactttcaatatcatctaccattaaagtaaaaggaactcttgtaaaatcacaaggtagtggacaagatttagaagttaaagctgataaaatagaaatattccaaaaggctgatttagaatatccattacaaaataaaagacatacttttgaatatttaagaactaaggcacatttaagagcaagaacaaatactttttcagcagtatttagggtaagatctgtacttgcttatgcaatacataaatttttccaagaaaataactttgtttatgttcacactccaattataactggttctgatgctgagggtgctggagaaatgtttagagttacaactcttgatatgaataaattacctaaaaaagaaaatggagaaattgattttacaaaagatttctttggtaaatcaactaatttaacagtaagtggtcaattaaatgttgaaactttctgtgctgcatttagaaatgtttatacttttggaccaacatttagagcagaatactcaaatacagcaagacatgcttctgaattttggatgatagaacctgaaatagcttttggagatttaggtgctaatatggagcttgcagaagctatggtaaaatctattatcaaatatgttatggataattgtcctgaagaaatggaattttttaattcatttattgaaaaaggactatttgataaattaaacaatgtacttaacaatgattttggtagagttacttatacagaagcaatagaaattttagaaaaatcaggaaaaaaatttgaatttcctgttaaatggggaatagatttacaaagtgaacatgaaagatatttagcagaagagtattttaaaaaacctgtctttgtaactgattatccaaaagaaattaaggctttctatatgaaacttaatgaagatggcaagacagttagagctatggacttacttgccccaggaattggagaaataattggtggttctcaaagagaagatagctatgaaattcttttaaatagaatggaagaattagggcttgataaagaaagttatgaattttacttagatttaagaagatttggaagtttccctcactctggatatggattaggttttgaaagaatgatgatgtatttaactggtatgcaaaatattagagatgtaatacctttcccaagaactccaaataatgcagaattttaa

SEQ ID NO: 10602 - protein, 461 aa, Fusobacterium sp. 4_1_13
MITVKDIFRHGEDYLDKEIELFGWVRKIRDQKKFGFIELNDGSFFKGVQIVFEEGLENFDEVSRLSISSTIKVKGTLVKSQGSGQDLEVKADKIEIFQKADLEYPLQNKRHTFEYLRTKAHLRARTNTFSAVFRVRSVLAYAIHKFFQENNFVYVHTPIITGSDAEGAGEMFRVTTLDMNKLPKKENGEIDFTKDFFGKSTNLTVSGQLNVETFCAAFRNVYTFGPTFRAEYSNTARHASEFWMIEPEIAFGDLGANMELAEAMVKSIIKYVMDNCPEEMEFFNSFIEKGLFDKLNNVLNNDFGRVTYTEAIEILEKSGKKFEFPVKWGIDLQSEHERYLAEEYFKKPVFVTDYPKEIKAFYMKLNEDGKTVRAMDLLAPGIGEIIGGSQREDSYEILLNRMEELGLDKESYEFYLDLRRFGSFPHSGYGLGFERMMMYLTGMQNIRDVIPFPRTPNNAEF

SEQ ID NO: 10603 - DNA, 1386 bp, Fusobacterium sp. 7_1
  CDS (1)..(1386): transl_table=11
atgattactgtaaaagatatttttagacatggagaggattacctaaacaaagaaatagagctttttggttgggtaagaaagataagagatcaaaagaaatttggttttattgaattaaatgatggttcattttttaaaggagttcaaatagtttttgaagaaggacttgaaaattttgatgaagtatcaagactttcaatatcatctactattaaagtaaaaggaactcttgttaaatctcaaggtagtggacaggatttagaagttaaagctgataaaatagaaattttccaaaaagctgatttggaatatccattacaaaataaaagacatacttttgaatatttaagaactaaggcacatttgagacctagaactaatactttttcagcagtatttagagtaagatccgtacttgcttatgcattacataaatttttccaagaaaataactttgtttatgttcatactccaattataactggttctgatgcagaaggtgcaggagaaatgtttagagttacaactcttgatatgaataaattacctaaaaaagaaaatggtgaagttgattttacaaaagatttctttggtaaatctactaacctaacagtaagtggtcaattaaatgttgaaactttttgtgctgcttttagaaatgtttatacttttggaccaacatttagagcagagtattcaaatactgcaagacatgcctcagaattttggatggtggaacctgaaatagcttttgcagatttatctgctaatatggaacttgcagaagctatggtaaaatttgttattaaatatgttatggatacttgtccagaagaaatggaattctttaattcatttattgaaaaaggactatttgataaattaaataatgtccttaacaatgaatttggtagaattacttatacagaagcaatagaaattttagaaaaatctagaaaaaaatttgaatttcctgttaaatggggaatagatttacaaagtgaacatgaaagatatctagcagaagaatattttaaaaagcctgtctttgttactgattatccaaaagaaataaaagccttctatatgaaacttaatgaagatggtaaaacagttagagctatggacttactagcaccaggaattggagaaataattggtggctctcaaagagaagatagttatgaaattcttttaaagagaatgaaagaacttggacttaatgaagaagactatgaattttatttagatttaagaagatttggaagtttccctcactctggatatggattaggttttgaaagaatgatgatgtatctaacaggtatgcaaaatatcagagatgtaatacctttcccaagaactccaaataatgcagaattttaa

SEQ ID NO: 10604 - protein, 461 aa, Fusobacterium sp. 7_1
MITVKDIFRHGEDYLNKEIELFGWVRKIRDQKKFGFIELNDGSFFKGVQIVFEEGLENFDEVSRLSISSTIKVKGTLVKSQGSGQDLEVKADKIEIFQKADLEYPLQNKRHTFEYLRTKAHLRPRTNTFSAVFRVRSVLAYALHKFFQENNFVYVHTPIITGSDAEGAGEMFRVTTLDMNKLPKKENGEVDFTKDFFGKSTNLTVSGQLNVETFCAAFRNVYTFGPTFRAEYSNTARHASEFWMVEPEIAFADLSANMELAEAMVKFVIKYVMDTCPEEMEFFNSFIEKGLFDKLNNVLNNEFGRITYTEAIEILEKSRKKFEFPVKWGIDLQSEHERYLAEEYFKKPVFVTDYPKEIKAFYMKLNEDGKTVRAMDLLAPGIGEIIGGSQREDSYEILLKRMKELGLNEEDYEFYLDLRRFGSFPHSGYGLGFERMMMYLTGMQNIRDVIPFPRTPNNAEF

SEQ ID NO: 10605 - DNA, 1401 bp, Yersinia intermedia ATCC 29909
  CDS (1)..(1401): transl_table=11
atgagcgtagtgcctgtagtcgacgtactgcaaggccgtgctgcggttgacagtgaagtcaccgtacgcggttgggtgcgtacccggagagattctaaagcgggtatctccttcgttgccgtttatgacggttcctgctttgacccgttacaggccgtcgtgaataatactttgcctaattatcaggatgaagtgctgcatctgactaccggttgctcagtcgaagttaccggtacggtggtagcatcaccaggtgaaggccagagctttgaaattcaggcaaccgcaatcaaagtggtcggctgggttgatgaccccgatacctatccgatggcggcaaaacgtcacagcatagaatacttgcgcgaagtggcccacttgcgcccacgcactaacctgattggtgcggttgcccgtgttcgccacaccttggcacaggccattcaccgtttcttcgatgaaaacggctacttctgggtttctaccccactgatcactgcttcagatactgaaggtgccggtgaaatgttccgtgtatcaacgctggatctggagaacttgccacgtacagataccggtgctgtcgatttcagcgaggatttcttcggtaaagaagcattcttgactgtgtccggtcagctaaacggggaaacctacgccagtgcattgtcaaaagtttacactttcggccccactttccgagcagagaactccaatactagccgccatttggcagagttctggatggttgaacctgaagtcgcgtttgcttctttagatgatgtcgccgcgttagctgagaaaatgctgaagtacgttttccaggcggtactcaatgaacgtgctgatgacatgaagttctttgctgagcgggttgataaagatgccgtagatcgcttgcagcgttttgtcacttctgattttgctcaggttgactacaccgatgctatcgagatcttactggcatcgggccagaaatttgaaaatgacgtgtcatgggggatagatttatcttctgaacatgagcgttatttggctgagaaacactttaaggcgcccgtggtagttaaaaactacccgaaagacattaaagctttctatatgcgaatgaacgaagacggcaaaaccgttgcagcgatggatgtactggcacccggtattggtgaaatcatcggtggttcccaacgtgaagaacgtttagatgtgttggacgcgcggttggcagagatgggcctcaataaagaagattattggtggtatcgtgatctgcgtcgctacggcactgtaccacattcaggttttggccttggatttgagcgtttgatctcctatgtaactggggttcaaaacgttcgggatgttatcccgttccctcgcacaccgagaaatgccagtttctaa

SEQ ID NO: 10606 - protein, 466 aa, Yersinia intermedia ATCC 29909
MSVVPVVDVLQGRAAVDSEVTVRGWVRTRRDSKAGISFVAVYDGSCFDPLQAVVNNTLPNYQDEVLHLTTGCSVEVTGTVVASPGEGQSFEIQATAIKVVGWVDDPDTYPMAAKRHSIEYLREVAHLRPRTNLIGAVARVRHTLAQAIHRFFDENGYFWVSTPLITASDTEGAGEMFRVSTLDLENLPRTDTGAVDFSEDFFGKEAFLTVSGQLNGETYASALSKVYTFGPTFRAENSNTSRHLAEFWMVEPEVAFASLDDVAALAEKMLKYVFQAVLNERADDMKFFAERVDKDAVDRLQRFVTSDFAQVDYTDAIEILLASGQKFENDVSWGIDLSSEHERYLAEKHFKAPVVVKNYPKDIKAFYMRMNEDGKTVAAMDVLAPGIGEIIGGSQREERLDVLDARLAEMGLNKEDYWWYRDLRRYGTVPHSGFGLGFERLISYVTGVQNVRDVIPFPRTPRNASF

SEQ ID NO: 10607 - DNA, 1401 bp, Salmonella enterica subsp. enterica serovar Tennessee str. CDC07-0191
  CDS (1)..(1401): transl_table=11
atgagcgttgtgcctgtagccgacgtactccagggccgtgtagccgttgaccaagaagtcaccgtgcgcggatgggtgcgtacccgccgagattcaaaagctggcatctccttcctcgccgtttatgacggctcctgctttgatcctgtacaggctgtcattaataattctctgcccaattataatgaagaagtattacacctgacgacaggctgctccgtggtagtaacaggtaaggttgtcgcgtcgccgggacaggggcaaagtttcgaaatccaggccacgaaagtagaggtcgcaggctgggtggaagatccggatacctacccgatggcggcaaaacgccatagcattgagtatctgcgtgaggtcgcgcatctgcgcccgcgcaccaacctgattggcgcggtagcgcgcgtccgccatactctggcgcaggcgctgcatcgcttcttcgatgagcagggtttcttttgggtctctaccccgctgattaccgcttccgataccgaaggcgctggcgaaatgttccgcgtctcaacgttggatctggaaaacctgccgcgtaacgaccagggcagagtagattttgacaaagacttttttggcaaagaatcattcctgaccgtctccggccagctcaacggtgaaacgtatgcctgtgcgctgtccaaaatctatacttttgggccgaccttccgcgcggaaaattccaacaccagccgccacctggcggagttctggatgctggagccggaagtggcgttcgccgatctggaagacaacgcccgtctggcggaagccatgctgaaatatgtcttcaaggcggttctggaagagcgtgcggatgatatgaagttctttgccgaacgcgtggataaagacgctatcgctcgtctggagcgttttgtctccaccgacttcgctcaggtggattacaccgatgcggtcgccattctggaacgctgtggtaagacatttgaaaacccggtgttctggggcgtcgacctctcttccgaacacgaacgttatctggcggaagagcatttcaaagcgccggtagtggtgaaaaactatccgaaagaaattaaagcgttttacatgcgccttaacgaagatggcaaaaccgtggcggccatggatgtgctggcgccgggaatcggcgaaatcatcggtggttcccagcgtgaagagcgtctggatgtgctggatgcccgtatggccgaaatggggctgaataaagaggattactggtggtatcgcgacttgcgtcgctacggtactgtaccgcattccggctttggcctgggctttgaacgccttatcgcttacgtcacgggtgtgcaaaacgtgcgcgatgttattccgttcccacggaccccacgcaacgccagcttctga

SEQ ID NO: 10608 - protein, 466 aa, Salmonella enterica subsp. enterica serovar Tennessee str. CDC07-0191
MSVVPVADVLQGRVAVDQEVTVRGWVRTRRDSKAGISFLAVYDGSCFDPVQAVINNSLPNYNEEVLHLTTGCSVVVTGKVVASPGQGQSFEIQATKVEVAGWVEDPDTYPMAAKRHSIEYLREVAHLRPRTNLIGAVARVRHTLAQALHRFFDEQGFFWVSTPLITASDTEGAGEMFRVSTLDLENLPRNDQGRVDFDKDFFGKESFLTVSGQLNGETYACALSKIYTFGPTFRAENSNTSRHLAEFWMLEPEVAFADLEDNARLAEAMLKYVFKAVLEERADDMKFFAERVDKDAIARLERFVSTDFAQVDYTDAVAILERCGKTFENPVFWGVDLSSEHERYLAEEHFKAPVVVKNYPKEIKAFYMRLNEDGKTVAAMDVLAPGIGEIIGGSQREERLDVLDARMAEMGLNKEDYWWYRDLRRYGTVPHSGFGLGFERLIAYVTGVQNVRDVIPFPRTPRNASF

SEQ ID NO: 10609 - DNA, 1392 bp, Clostridiales bacterium 1_7_47FAA
  CDS (1)..(1392)
atggatctgattaccgtaagagaactttataagcatccggagaattatctggacaaggaggtaagcattggagggtgggtccgcagtctgcgcgattccaaggcctttggctttattgtagtaagcgacggaagttattttgagacacttcaggttgtgtatcacgacagcctttctaattttgcagagatatccaagatgaacgtgggcaccgccatcatcgtgaagggaaccctggtggccacgccccaggccaagcagccatttgaaatccaggccactgaagtaaccgtggaaggagcatccgcctccgactacccccttcagaaaaagcgccactcctttgaatacctgcgcaccatctcacatctccgtcccaggaccaatacgttccaggccgttttccgtgtgcgctccctgattgcatatgccatccaccagtatttccaggaaagggatttcgtatatgtacacacgccgctgattacaggcagcgactgtgagggcgccggggaaatgttccaggtaaccaccctggacctgaacaacatcccaaagacagaggacggcaaggtggatttcagccaggacttctttaacaaggcaaccaacctgaccgtaagcggacagctcaacgccgagacctatgcaatggcattccgcaacgtatatacctttggccctaccttccgcgccgagaattccaacacggcacgccatgcagcagagttctggatgattgaacctgagatggcatttgcggacctggacgacgacatgcgcctggccgaaggcatgctcaaatatatcatccggtttgtcctggagcatgcgcctgaggaaatgaacttcttcaaccagtttgtggacaagggccttctggagcgccttaacaatgtcctcaattcggaatttggacacattacttacacggatgcagtggaactgcttgagaagcacaacgacgagttcgactacaaggtatcctggggctgcgaccttcagacagagcatgaacgctatctgactgagaaggtcttcaaaaagcctgtattcgtaaccgactatccaaaggaaatcaaggctttctatatgaagatgaacccggacaacaagacggttgcagcggttgactgtcttgtaccgggcatcggtgaaatcatcggaggcagccagagggaagacaacctggataagctggtggcaaggatggacgagcttggccttcgcaaggaagactacgatttctacctggatttaaggaaatacggctcaacccgccacgccggcttcggtcttggctttgaacgctgcgtcatgtatctgaccggcatgggcaacatccgcgacgttgtgccattcccaagaaccgttaataactgcgagctgtaa

SEQ ID NO: 10610 - protein, 463 aa, Clostridiales bacterium 1_7_47FAA
MDLITVRELYKHPENYLDKEVSIGGWVRSLRDSKAFGFIVVSDGSYFETLQVVYHDSLSNFAEISKMNVGTAIIVKGTLVATPQAKQPFEIQATEVTVEGASASDYPLQKKRHSFEYLRTISHLRPRTNTFQAVFRVRSLIAYAIHQYFQERDFVYVHTPLITGSDCEGAGEMFQVTTLDLNNIPKTEDGKVDFSQDFFNKATNLTVSGQLNAETYAMAFRNVYTFGPTFRAENSNTARHAAEFWMIEPEMAFADLDDDMRLAEGMLKYIIRFVLEHAPEEMNFFNQFVDKGLLERLNNVLNSEFGHITYTDAVELLEKHNDEFDYKVSWGCDLQTEHERYLTEKVFKKPVFVTDYPKEIKAFYMKMNPDNKTVAAVDCLVPGIGEIIGGSQREDNLDKLVARMDELGLRKEDYDFYLDLRKYGSTRHAGFGLGFERCVMYLTGMGNIRDVVPFPRTVNNCEL

SEQ ID NO: 10611 - DNA, 1392 bp, Roseburia intestinalis L1-82
  CDS (1)..(1392): transl_table=11
atggatatggtaaatgtaagggatttattccggaaacaggaagaatatgtggatcagaccgtgacgatcggcggatgggtgcgaagcatccgtaactccaaaaattttggatttatcgtggtgaacgacggaacatttttcgaaccggttcaggtcgtatattccaatgttttagagaactttgatgatgttgaaaagttaaatgtcggtgcagcgatcatcgtgacaggtaaacttgttgcgacaccgggaaccaagcagccgtttgagatccaggcagagcagatcgagatcgagggtgtttccacaccggattatccgcttcagaaaaagaaacacagctttgagtacttaagaacgatctcccacttaagaccgagaacaaatacatttgaggcagttttccgtgtacgttccctgattgcatatgcaattcacaaatttttccaggagagagattttgtatatgtacacacaccactgatcacaggaagcgactgtgagggtgccggagagatgttccaggtaacaacactggatatgaacaatcttccgaaaaatccggacggaaccgtggattattccaaagatttctttaataagccgaccaaccttaccgtaagcggacagttaaacggtgagacttatgcgatggcatttaagaacatctacacatttggaccgacgttccgtgcagaaaattccaacacgaccagacatgcagcagagttctggatgatcgagccggagatcgcatttgcagatctggaagatgacatgatcttagccgagagcatgttaaaatacatcatcaactatgtactggagaatgcaccggaagagatggcatttttcaacaacttcattgacaaaggactcttagagcgcttgcagcatgtggcaaattccgattttgcccgcgtgacatacacagaggcagttgagatcttagagaaacacaatgacaagtttgaatataaagtttcctggggaactgatcttcagacggagcatgagcgttatctgaccgaggagatcttcaaacgtccggtattcgtaaccgattacccgaaggagatcaaggcattctacatgaagatgaatgatgacggaaagaccgtagcagccgttgactgtctggtacctggtatcggtgagatcatcggaggaagccagagagaggatgattacgataaacttcttgcaagaatcaatgaactcggcttaaaagaagaagattatcagttttatctggatctccgcaaatatggttctgcaagacatgcgggattcggactcggtttcgagcgctgcgttatgtacttgacaggaatgtctaacatccgtgatgttattccgttcccaagaaccgtaaataactgcgaattataa

SEQ ID NO: 10612 - protein, 463 aa, Roseburia intestinalis L1-82
MDMVNVRDLFRKQEEYVDQTVTIGGWVRSIRNSKNFGFIVVNDGTFFEPVQVVYSNVLENFDDVEKLNVGAAIIVTGKLVATPGTKQPFEIQAEQIEIEGVSTPDYPLQKKKHSFEYLRTISHLRPRTNTFEAVFRVRSLIAYAIHKFFQERDFVYVHTPLITGSDCEGAGEMFQVTTLDMNNLPKNPDGTVDYSKDFFNKPTNLTVSGQLNGETYAMAFKNIYTFGPTFRAENSNTTRHAAEFWMIEPEIAFADLEDDMILAESMLKYIINYVLENAPEEMAFFNNFIDKGLLERLQHVANSDFARVTYTEAVEILEKHNDKFEYKVSWGTDLQTEHERYLTEEIFKRPVFVTDYPKEIKAFYMKMNDDGKTVAAVDCLVPGIGEIIGGSQREDDYDKLLARINELGLKEEDYQFYLDLRKYGSARHAGFGLGFERCVMYLTGMSNIRDVIPFPRTVNNCEL

SEQ ID NO: 10613 - DNA, 1404 bp, Actinobacillus minor NM305
  CDS (1)..(1404): transl_table=11
atgtctaaatttccaacaatttcagaagttctttcaggtaaagttgccgtaggggaagaaatttctgttcgcggttgggttcgtacccgccgtgattctaaagccggtttatcattcttagccgtatatgatggttcgtgttttgaccctattcaagcgatcatcaataatgacctcgctaattatcaagatgaagtattacgcttaactgcaggctgttctgtgattgtaacgggggttatcgttgaatctccagcagaaggacaagcggttgaattacaagcaaaatctgttgaagtcgtggggtgggttgaagatcctgatacttatccgatggcagcaaaacgccactctattgaatacttacgcgaagttgcacacttacgccctcgtacgaacttaatcggtgcggtagcgcgtgtgcgtcactgtttagcccaagcaattcaccgtttcttccacgagcaaggtttctattgggttgcaacgccgttaatcaccgcttcagatacagaaggtgcgggcgaaatgttccgtgtttcgaccttagatttagaaaatttaccacggggtgaaaatggcaaagtcgatttcagccaagatttctttggtaaagagtctttcttaaccgtatctggtcagttaaacggcgaaacctatgcttgtgcattaagcaaagtctatacctttggtccaacattccgtgcagaaaactcaaatacaactcgtcacttagcagaattctggatggttgagcctgaatttgcgtttgcaaccttagcggataatgcaaaactggctgaagatatgttgaaatatgtgttccatgcagtacttgaagaacgtaaagatgacttaaaattcttcgagaaacacgttgataacacggtaatcagccgtttagagaactttattaattcagacttcgctcaaattgactataccgatgcgattgaagttttacttaaatcaggtaaagagtttgaattcccggtttcttggggtatcgatctctcttctgaacatgaacgtttccttgcagaagaatactttaaatcgccggtagtcgtgaaaaactatccgaaagatattaaagcattctatatgcgtttaaatgatgatggtaaaaccgttgccgcaatggacgttctagccccgggaatcggtgaaatcatcggtggttcacaacgtgaagaacgtttagatgtgttagataaacgaatggtagaaatgggcttaaaccctgaagattactggtggtatcgtgatttacgccgttatgatacagtgcaacactcaggctttggtttaggctttgagcgtttaatcgtatatgtaaccggtttacaaaatattcgtgaggtgattccattcccacgaactccacgtaatgcgagtttctaa

SEQ ID NO: 10614 - protein, 467 aa, Actinobacillus minor NM305
MSKFPTISEVLSGKVAVGEEISVRGWVRTRRDSKAGLSFLAVYDGSCFDPIQAIINNDLANYQDEVLRLTAGCSVIVTGVIVESPAEGQAVELQAKSVEVVGWVEDPDTYPMAAKRHSIEYLREVAHLRPRTNLIGAVARVRHCLAQAIHRFFHEQGFYWVATPLITASDTEGAGEMFRVSTLDLENLPRGENGKVDFSQDFFGKESFLTVSGQLNGETYACALSKVYTFGPTFRAENSNTTRHLAEFWMVEPEFAFATLADNAKLAEDMLKYVFHAVLEERKDDLKFFEKHVDNTVISRLENFINSDFAQIDYTDAIEVLLKSGKEFEFPVSWGIDLSSEHERFLAEEYFKSPVVVKNYPKDIKAFYMRLNDDGKTVAAMDVLAPGIGEIIGGSQREERLDVLDKRMVEMGLNPEDYWWYRDLRRYDTVQHSGFGLGFERLIVYVTGLQNIREVIPFPRTPRNASF

SEQ ID NO: 10615 - DNA, 1446 bp, Sphingobacterium spiritivorum ATCC 33861
  CDS (1)..(1446): transl_table=11
atggaacacacacgtattaaagaattattgaatgccactgagtttgggcaagaggtcattgtaaaaggatgggtaagaactttccgtaacaatcaatttatagcgatcaatgatggttcttcaatcaataatatccaggcagtagtggatttcgaaaatacggatgatgcattattaaaaagaatcactacgggtgctgctgtacgtgtcaaaggaacgctgatcgaatcattgggtaagggtcagaaggtagaggtcaaagtaacggaactggacgtcatcggcgattcggatccggaaaaattccctttacaacccaaaaaacacagtttagaatttttgcgtgaaatcgctcatttacgcttccgtaccggaacattcaatgcaatcttcaaggtacgtaatgcactgtcatttgcagtacaccgcttcttcaatgaaagagactttgtgtacatgcatactcctattattaccggttcagatgctgaaggtgcaggcgaaatgtttcgtgtcactaccttagatctgaataatcctccacgtacagaaaacggcgatatagattttaaagaagacttcttcggaaagtctactaaccttacggtatccggacaactagagggtgaactggcagctttagcatttggtaatatttatactttcggacctacattccgtgccgaaaactccaatacaacgcgtcacctggctgaattctggatgatcgaaccggagatggctttctatgaactggaagacaatatggatctggctgaggccttattgaaatatgttatacagtatgcgctggaaacctgcccggaagagatagagtttctgaaaaaccgtttacttgaagaagagaaaaacaaaccggctgcagatcgttcggaaatggatcttattgaaaaactgaaattctgtcttgagaatgaatttgagcgggttaaatatacagatgcaatcgagattctgaagcgcagcaagccaaatcagaaaaaacagtttaaatatctgattgacgaatggggggcagatcttcagtcagaacacgaacgttatcttgtagaaaaacattttaagaaaccggtgatccttacagattatccgagagagatcaaatcattctatatgaaacagaacgaaccagatgcattaggcagaaacacagttcgtgccatggacattctgtttccgggtataggtgaaatggtcggcggatcacaaagggaagaaaatctggacaaattactggctcgtatggctgaggtaggaataccggccgaggaaatggaatggttcctggatacacgtcgcttcggatcggttcctcactcaggtttcggtgtcggatttgagcgtcttgtattattcgtgacaggaatgaccaatattcgtgacgttattccgttcccgagaactccaaaaaatgctgagttttaa

SEQ ID NO: 10616 - protein, 481 aa, Sphingobacterium spiritivorum ATCC 33861
MEHTRIKELLNATEFGQEVIVKGWVRTFRNNQFIAINDGSSINNIQAVVDFENTDDALLKRITTGAAVRVKGTLIESLGKGQKVEVKVTELDVIGDSDPEKFPLQPKKHSLEFLREIAHLRFRTGTFNAIFKVRNALSFAVHRFFNERDFVYMHTPIITGSDAEGAGEMFRVTTLDLNNPPRTENGDIDFKEDFFGKSTNLTVSGQLEGELAALAFGNIYTFGPTFRAENSNTTRHLAEFWMIEPEMAFYELEDNMDLAEALLKYVIQYALETCPEEIEFLKNRLLEEEKNKPAADRSEMDLIEKLKFCLENEFERVKYTDAIEILKRSKPNQKKQFKYLIDEWGADLQSEHERYLVEKHFKKPVILTDYPREIKSFYMKQNEPDALGRNTVRAMDILFPGIGEMVGGSQREENLDKLLARMAEVGIPAEEMEWFLDTRRFGSVPHSGFGVGFERLVLFVTGMTNIRDVIPFPRTPKNAEF

SEQ ID NO: 10617 - DNA, 1392 bp, Clostridium cellulovorans 743B
  CDS (1)..(1392): transl_table=11
atggaaaatacattaattaaaactctttatagagagacggatgctttttctgataaaaaaataagaatatctggttgggtaagaactatcagagctaataataattttggttttattgaactgaacgatggaagcttttttaagagtgttcaagtagtttttgaaaacaaccttgaaaattttaaggaagtttcaaagttagctattagtgcttcgcttgaaatagaagggactttagttttaactccagaagctaagcaaccttttgaagttaaagcagaaagtataatgattcatggaaattctcatagtgattacccactgcaaaagaaaagacatacaatggagtatttgagaactattgctcatttaagaccaagaagtaatactttttctgctgtgtttagagtaagaagtcttgctgcatatgctatacataagtttttccaagaaagaggcttcgtatatgttcatacaccaataataacaggtagtgattgtgaaggtgctggcgaaatgttcaaggttacgactcttgattttgataatgttaaaaagacagaagaaggaaagatagattatcaagatgatttctttggaagagaaacaaaccttacagtaagtggtcaattatcagcagaaacttttgctttagcttttagagatgtatatacctttggaccaacttttagggctgaaaattcaaatacaactagacacgcagcagagttttggatgattgagcctgaaatggcgtttgcggaacttaaagattatatggatactgctgaagatatgattaaatatataattagctatgttatggaaaatgccccagaagagatggagttctttagtaactttgtagataaagggcttaaagaaagactagataatgtcgttaacagtgagtttggtagagtaagttatacagaagctgtagatatacttcaaaagtctggtgtagaattccaatatccagtacaatggggtattgatcttcaaacagaacatgaaagatatctttcagaagttgtatttaagagaccagtgtttgtaacagattatccaaaagaaattaaagctttctatatgaggattaatgatgatggaaaaacagttgcagcagcagacttattggcacctggaatcggcgaaataataggtggaagccaaagagaagaaagacttgatatactagaagcaaggttagctgaattaggtcttaataaggaagattactggtggtatttggaactaagaaaatatggagaaactaagcatgctggttttggtcttggttttgaaaggattcttatgtacttgacaggtatgtcaaacataagagacgtaataccatttccaagaacaacaggttcagcagaattctaa

SEQ ID NO: 10618 - protein, 463 aa, Clostridium cellulovorans 743B
MENTLIKTLYRETDAFSDKKIRISGWVRTIRANNNFGFIELNDGSFFKSVQVVFENNLENFKEVSKLAISASLEIEGTLVLTPEAKQPFEVKAESIMIHGNSHSDYPLQKKRHTMEYLRTIAHLRPRSNTFSAVFRVRSLAAYAIHKFFQERGFVYVHTPIITGSDCEGAGEMFKVTTLDFDNVKKTEEGKIDYQDDFFGRETNLTVSGQLSAETFALAFRDVYTFGPTFRAENSNTTRHAAEFWMIEPEMAFAELKDYMDTAEDMIKYIISYVMENAPEEMEFFSNFVDKGLKERLDNVVNSEFGRVSYTEAVDILQKSGVEFQYPVQWGIDLQTEHERYLSEVVFKRPVFVTDYPKEIKAFYMRINDDGKTVAAADLLAPGIGEIIGGSQREERLDILEARLAELGLNKEDYWWYLELRKYGETKHAGFGLGFERILMYLTGMSNIRDVIPFPRTTGSAEF

SEQ ID NO: 10619 - DNA, 1404 bp, Bacteroides sp. 3_2_5
  CDS (1)..(1404): transl_table=11
atggaaaagattagtagaacaaaaattgtcgacctgatgaagcgcgaagattttggcgctatggtcaatgtgaaaggatgggttcgcacccgcagaggcagcaaacaagttaactttatcgcactgaatgacggttctacaataaataacgtgcaggtcgtagtcgatctggcgaactttgatgaagagatgctgaagcaaatcacgaccggtgcttgtctgagcgtgaacggtgtgttgacggagtcggtaggcaccggacagaaggctgaagtgcaggctcgtgaaatcgaagtgctgggaacttgtgacaatacgtatccgctacagaagaaagggcactctatggagtttttgcgtgagatagcccatttgcgtccgcgtaccaatacttttggagcagtattccgtattcgtcacaatatggctattgctatccataaattcttccatgaaaagggattcttctattttcatacacctatcattacagcgtctgactgtgaaggtgccggacagatgtttcaggtgactaccatgaacctgtatgatctgaaaaaagatgaaaacggttctatcgtgtatgatgatgacttctttggcaaacaagccagtttgactgtttcggggcagttggaaggtgagttagctgctaccgctttaggtgcaatctatacgtttggtcctactttccgtgccgaaaattctaacactccgcgccacttggccgagttctggatgattgaaccggaggtagctttcaacgaaattcaggagaatatggatttggctgaagagttcattaaatattgtgtgagatgggctttggataactgcgcagatgatgtgaaattcctgaacgacatgttcgataaaggattaattgaacgtttggaaggtgtacttaaagaagacttcgtccgtctgccatacacggaaggtattaaaatactggaagaagctgttgccaaaggacataaattcgaattcccggtttactggggagttgatttggcttctgaacacgagcgttatctggtggaagaccactttaaacgtccggtgatcctgactgactatccgaaggaaataaaggccttctatatgaaacagaatgaggatggtaagactgtgcgtgccatggatgtacttttccctaaaatcggagagatcattggcggttcggaacgtgagtcggattataacaaattgatgacgcgtattgaggaaatgcatattccgatgaaggatatgtggtggtatctggatactcgtaagttcggtacttgtcctcactctggattcggactgggatttgaacgcttgttgctcttcgtgacgggtatgtctaatatccgcgatgtaattccgttcccgcgtaccccacgtaatgccgatttttaa

SEQ ID NO: 10620 - protein, 467 aa, Bacteroides sp. 3_2_5
MEKISRTKIVDLMKREDFGAMVNVKGWVRTRRGSKQVNFIALNDGSTINNVQVVVDLANFDEEMLKQITTGACLSVNGVLTESVGTGQKAEVQAREIEVLGTCDNTYPLQKKGHSMEFLREIAHLRPRTNTFGAVFRIRHNMAIAIHKFFHEKGFFYFHTPIITASDCEGAGQMFQVTTMNLYDLKKDENGSIVYDDDFFGKQASLTVSGQLEGELAATALGAIYTFGPTFRAENSNTPRHLAEFWMIEPEVAFNEIQENMDLAEEFIKYCVRWALDNCADDVKFLNDMFDKGLIERLEGVLKEDFVRLPYTEGIKILEEAVAKGHKFEFPVYWGVDLASEHERYLVEDHFKRPVILTDYPKEIKAFYMKQNEDGKTVRAMDVLFPKIGEIIGGSERESDYNKLMTRIEEMHIPMKDMWWYLDTRKFGTCPHSGFGLGFERLLLFVTGMSNIRDVIPFPRTPRNADF

SEQ ID NO: 10621 - DNA, 1392 bp, Fusobacterium varium ATCC 27725
  CDS (1)..(1392): transl_table=11
atggaaaaagtaacagtaaaatctctatacagagataaagaaaaatttattgatcaagaagtagaaatatcaggttggataaaaaaaatcagggttcaaaagaattttggatttatagaaattaatgatggatcatttttcaaaggaatccaaatagtatttgatgcaaagctaaataactttgatgaaatctcacgtttatctataatatcttcaatcagagtaaatggaaaactagtaaaatctcaaggagctggacaagatattgaaatagtagcagatagtatagaaatatatcaaaaagctgatttagattatcctttacaaaataaaagacatacttttgaatatttgagaacaaaagctcatttaagacctagaacaaatacattttcagctgtattcagagtaagatcggttatagcttatgctattcataaattttttcaagaaaatggatttgtatatgtgcatactccaataataactggttctgatgctgaaggtgctggagaaatgttcagagtaactactttagatttaaatgatttacctaaaggtgaagatggaaaagtagattcttctaaagatttttttggaaaagaaactaacctaactgtaagtgggcagctaagtggagaaacttattgtgctgcttttagaaatatatatacatttggaccaacattcagagctgaatattctaatacagcaagacatgcttcagaattctggatgatagaaccagaaatagcttttgctgatcttgaagctaatatggaacttgctgaagctatggtaaaatatataattaaatacgttttggagcaatgtccagaagaaatggagttctttaatcaatttattgagaaaggattatttgataaacttaacaatgtattaaatagtgagtttggaagacttacatatacagaagctatagaaatacttgaaaaatcaggaaagaaatttgattatccagtaaaatggggaattgatcttcaaagtgaacatgaaagatatttagcagaggaatattttaaaaagccagttttccttactgattatccaaaagatataaaagcattttatatgaagctgaatgaagatggaaaaactgtaagagctatggatttattagctcctggaattggagaaattattggtggttctcaaagagaagacaatcttgaaattcttgaaggaagaataaatgaattaggaatgaatatagaggactatggattttatttagacttaagaaaatatggaagttttccacattcaggatatggattgggatttgaaagaataattatgtatataacaggaatgacaaatattcgtgacgtaattccattcccaagaacacctaataatgcagaattttaa

SEQ ID NO: 10622 - protein, 463 aa, Fusobacterium varium ATCC 27725
MEKVTVKSLYRDKEKFIDQEVEISGWIKKIRVQKNFGFIEINDGSFFKGIQIVFDAKLNNFDEISRLSIISSIRVNGKLVKSQGAGQDIEIVADSIEIYQKADLDYPLQNKRHTFEYLRTKAHLRPRTNTFSAVFRVRSVIAYAIHKFFQENGFVYVHTPIITGSDAEGAGEMFRVTTLDLNDLPKGEDGKVDSSKDFFGKETNLTVSGQLSGETYCAAFRNIYTFGPTFRAEYSNTARHASEFWMIEPEIAFADLEANMELAEAMVKYIIKYVLEQCPEEMEFFNQFIEKGLFDKLNNVLNSEFGRLTYTEAIEILEKSGKKFDYPVKWGIDLQSEHERYLAEEYFKKPVFLTDYPKDIKAFYMKLNEDGKTVRAMDLLAPGIGEIIGGSQREDNLEILEGRINELGMNIEDYGFYLDLRKYGSFPHSGYGLGFERIIMYITGMTNIRDVIPFPRTPNNAEF

SEQ ID NO: 10623 - DNA, 1419 bp, Vibrio sp. Ex25
  CDS (1)..(1419): transl_table=11
atggagaatattgaaaacatgacttacgcgcctgtatcagacgtattgagaggtcagctagcagtagacagcgaagtgactgttcgtggctggatccgttcacgtcgtgattccaaagctggaatctctttccttgccatatatgacggctcttgtttcgacccgattcaggccgtggtcccaaataatcttaataattacgaagacgaagtactaaagctaacgactggctgctctgttgaagtaactggtaagattgttgaatctcctgcaaagggccaagacttcgaacttgctgccactggcgttaaagtggttggttgggttgaagacgcagaaacttacccgatggcaaaaactcgtcactctattgagtacctacgtgaagtagcgcacctacgtccgcgcacaaacgtaatcggtgcggtagcacgtgtacgtaactgcctatctcaagcgatccaccgcttctaccacgagcaaggttacttctgggtatctgcgccgttgatcactgcctcagatgctgaaggcgctggtgaaatgttccgcgtttctacgctagacatggaaaacctacctcgtacagacgctggcaaagtagactacaacgaagacttcttcggtaaagaaactttccttacggtatctggtcagctaaacgcggaagcttacgcttgtgcactaagtaaggtttacactttcggccctactttccgtgctgaaaactcaaacacaagccgccacctagcagagttctggatggttgagcctgaagttgcgtttgcagaactggacgacgttgcgaaactggctgaagacatgcttaagtacgtattcaaagcagtacttgaagagcgtcgcgatgaccttgagttctttgctcagcgcatcgacaaagaagccgttagccgtctagagaactttgtttcttctgacttcgcacaagttgactacactgacgcgatccaaatcctgttggattctggccgtgagttcgaattcccagttgagtggggtatcgatatgtcatctgagcacgagcgtttcctagcggaagagcacttcaaagcgccggtaatcgttaagaactacccgaaagacatcaaagcattctacatgcgtatgaacgatgatggtaagacggtagcggcaatggacgttctagcacctggcatcggtgaaatcatcggtggttctcagcgtgaagagcgtctagacgtactggatacacgtatgcgcgaaatgggtatcgaccctgagcacatgagctggtaccgcgacttacgccgttacggcacagtgccacacgcaggctttggtctaggctttgagcgtctagtatcttacgtaacaggcatgggcaacgttcgtgacgtgatcccattcccacgtacgcctcgctctgcgaacttctaa

SEQ ID NO: 10624 - protein, 472 aa, Vibrio sp. Ex25
MENIENMTYAPVSDVLRGQLAVDSEVTVRGWIRSRRDSKAGISFLAIYDGSCFDPIQAVVPNNLNNYEDEVLKLTTGCSVEVTGKIVESPAKGQDFELAATGVKVVGWVEDAETYPMAKTRHSIEYLREVAHLRPRTNVIGAVARVRNCLSQAIHRFYHEQGYFWVSAPLITASDAEGAGEMFRVSTLDMENLPRTDAGKVDYNEDFFGKETFLTVSGQLNAEAYACALSKVYTFGPTFRAENSNTSRHLAEFWMVEPEVAFAELDDVAKLAEDMLKYVFKAVLEERRDDLEFFAQRIDKEAVSRLENFVSSDFAQVDYTDAIQILLDSGREFEFPVEWGIDMSSEHERFLAEEHFKAPVIVKNYPKDIKAFYMRMNDDGKTVAAMDVLAPGIGEIIGGSQREERLDVLDTRMREMGIDPEHMSWYRDLRRYGTVPHAGFGLGFERLVSYVTGMGNVRDVIPFPRTPRSANF

SEQ ID NO: 10625 - DNA, 1407 bp, Synechococcus sp. PCC 7335
  CDS (1)..(1407): transl_table=11
atgactatctcccagcgcatcaagcatattctaaaatcaggtcaaccaggcgagagcctaactattcaaggatgggtaagaacgaaacgcagcgcaaagaaattcacctttatagaagtcaatgacggctcttctatgaatggtcttcaggtaattgcacctgaagatattccagattatgagaaacagatagagcgcattagcacaggtgcctccgttcaaatcacgggtactctcgctgagtctcctggaaaagggcaaagggtagaactacaagcgagtgagatcgaagtttttggcgagtcggatggcgaaacctatccgctgcagaaaaaacgccactcctttgaatttttgcgcactatcggtcacttacgaagtcgtacaaatacactcggtgctgtctttcgagtccgcaacgcctgtgccaccgctattcatgagtttttctggaaacgtgattttctgtggatgcacacaccaatactgactgctagcgactgcgaaggtgctggtgaaatgttcaccgtcacccgcttcaaccttgatagcattccgaaaaccgaaagtggtaaagccgactacggccaagacttttttggcagacctgcctatctcaccgttagcggtcagctcgaagccgaaatcatgtcgatggcttttagtaacgtttacacctttggccccacctttcgcgctgagaactctaacaccgctcgccatctcgctgaattttggatggtcgaacccgaaatggccttttgtgacctagaaggcaacatggatttagccgaagccttcttgaaatatgtctttagctacgtgatggaacactgcgcagacgacatggcatttttcaatcagcgcattgacaaaaccgttctagagacagccgaaaatattattgacaacgacttcgagcgcatcacctataccgacgcgatcgcccaactagagcgcgccattgaaaacggcgacaaaaccttcgaattccccgttaagtgggggattgacctgcagtccgagcacgaacgctatcttgccgaagaactattcaaaaaacctgtcattgttaccgattatccagccgaaatcaaagccttttacatgcgcttgaatgacgacaacaaaacagttgctgccatggacgtactagcgcctcgcatcggcgaaatcattggtggtgcccaaagagaagaaagactagacgtgctagagcgccgcatcaaagcagccggcctaccccaagaagactactggtggtacctagatcttcgccgctacggcacagtcccccatgcagggtttggcctaggctttgagcgactcgttcaattcatgactggaatgagcaacatccgcgatgtcattccctttccccgcacaccagacaacctagatttctag

SEQ ID NO: 10626 - protein, 468 aa, Synechococcus sp. PCC 7335
MTISQRIKHILKSGQPGESLTIQGWVRTKRSAKKFTFIEVNDGSSMNGLQVIAPEDIPDYEKQIERISTGASVQITGTLAESPGKGQRVELQASEIEVFGESDGETYPLQKKRHSFEFLRTIGHLRSRTNTLGAVFRVRNACATAIHEFFWKRDFLWMHTPILTASDCEGAGEMFTVTRFNLDSIPKTESGKADYGQDFFGRPAYLTVSGQLEAEIMSMAFSNVYTFGPTFRAENSNTARHLAEFWMVEPEMAFCDLEGNMDLAEAFLKYVFSYVMEHCADDMAFFNQRIDKTVLETAENIIDNDFERITYTDAIAQLERAIENGDKTFEFPVKWGIDLQSEHERYLAEELFKKPVIVTDYPAEIKAFYMRLNDDNKTVAAMDVLAPRIGEIIGGAQREERLDVLERRIKAAGLPQEDYWWYLDLRRYGTVPHAGFGLGFERLVQFMTGMSNIRDVIPFPRTPDNLDF

SEQ ID NO: 10627 - DNA, 1386 bp, Verrucomicrobiae bacterium DG1235
  CDS (1)..(1386): transl_table=11
atgacgcgacagttgattgctgatttgatgaagagtgaaacggggctggattcggttgtgatccagggttgggtgcggacgcgccgcgattccaagactttcttctttctagagattaacgacggctcctgcctgaagtccatgcaggccgtggtgaatgaagacgcggcgggttacgctgattcgaaggggatcgctaccggggcttcggttacggtaaagggccggcttgtcgcttcgcaggggaaggggcagaaatgggagatccaggcggactcggtggagctggtcggtagcgcggacgagacctttccgctgcagaagaagcgtcactccaacgagtaccttcgagagattgcccatttgcggcctcgcacgaatttttacggagctgtattcagaatccggagcaagctggcatttgccattcatcgcttctttaacgacaggcagtttttctatgtgcatacgccgattgtgacggccagtgactgcgagggagcgggggagttgtttcgcgtttcgacattggatccgaagaacccgcctctaggcgagggtggagagatcgactcgagcaaggatttcttcggacgctcgacgtacttgacggtgagcgggcagcttgagggcgagacttatgcgagcgctctgggcaatatctatactttcgggccgacttttcgggcggagaattcgaatacgtctcgtcacgcgagcgagttttggatgatcgagccggagatggcgttttgtgacctggcagcggatatggacttggcggaggaattcgtgaagtcggtgatcaaagaagtcatggaaagctgcgcggacgatttggagctgtttttcaatttcatcgacaaggagttgcgtcagcgtctggagttcgtgctctcgcgacccttccagcgcgtgacctatacggaggcggttgagattttgcaggcgtgcggcaagaagtttgagaacaaggtggagtggggggtgaacctgcagtccgagcacgagcgttacctgaccgaggagcattttaagagtccggttacggtctatgactatccgaaagagttgaagcccttctatatgcgggcgaacgatgatggcaaaacggtggccgccatggacgtgctggtgcctggcatcggcgaaatcgtgggcgggagccagcgcgaggagcgtctggagcttttgctcgagaacatgaagaagcacggcatttccgagaaggactactggtggtatgtggatctccgccgctatggcagcatgccgcatgcgggctttggtctcgggtttgagcgtttgttgatgttcatcaccggcgtgggcaacatccgtgacgtgattccgtatccgcgcgtgccgggccacgcggagttttag

SEQ ID NO: 10628 - protein, 461 aa, Verrucomicrobiae bacterium DG1235
MTRQLIADLMKSETGLDSVVIQGWVRTRRDSKTFFFLEINDGSCLKSMQAVVNEDAAGYADSKGIATGASVTVKGRLVASQGKGQKWEIQADSVELVGSADETFPLQKKRHSNEYLREIAHLRPRTNFYGAVFRIRSKLAFAIHRFFNDRQFFYVHTPIVTASDCEGAGELFRVSTLDPKNPPLGEGGEIDSSKDFFGRSTYLTVSGQLEGETYASALGNIYTFGPTFRAENSNTSRHASEFWMIEPEMAFCDLAADMDLAEEFVKSVIKEVMESCADDLELFFNFIDKELRQRLEFVLSRPFQRVTYTEAVEILQACGKKFENKVEWGVNLQSEHERYLTEEHFKSPVTVYDYPKELKPFYMRANDDGKTVAAMDVLVPGIGEIVGGSQREERLELLLENMKKHGISEKDYWWYVDLRRYGSMPHAGFGLGFERLLMFITGVGNIRDVIPYPRVPGHAEF

SEQ ID NO: 10629 - DNA, 1395 bp, Clostridium sp. 7_2_43FAA
  CDS (1)..(1395): transl_table=11
atggataaagtaattttagtaaaatcactttacagaaatcaagatgaatatttatctgaagaaataaaaatttctggttggataagaactctaagagcatcaaatgcttttggatttattgaagtaaatgacggtacattttttaagaatgttcaagtagtttttgataataaacttgataactttaaagatgtatcaaaactacctattagttcatcaataacagtaataggtactttagttgctactccagaagctaagcaaccatttgaaattcaagctaaagaaatagttatagaaggtttatcacaatcagactatccacttcaaaagaaaagacatacttttgaataccttagaactattgctcatttaagaccaagaagtaatgcattttcagctgtatttagagtacgttcagtagcagcttatgctatccacaaattcttccaagaaagaggatttgtttacactcatactccattaataactggaagtgactgtgaaggtgctggagaaatgtttagagtaactactttagacctacacaatgttccaaaaactgaagaaggtgcaatagactttaagcaagatttctttggtaaagaaagtaaccttacagtatctggtcaattaaatgctgaatgttatgctttagcatttagaaatgtttatacttttggacctactttcagagctgaaaattctaatacagcaagacatgcagctgagttctggatgatagagcctgaaatagcatttgctgatttacaagatgatatggaattagctgaagatatgcttaaatatgttttagaatatgttttagctgaatgtccagaagaaatggctttcttcaatcaatttgttgataagggtatcctagacagattaaatcatgttatgacatctgactttggaaaagtaacttataccgaagcagttgaaatattaaagaaagctgataagaagtttgaataccctgttgaatggggaatagatttacaaacagaacatgaaagatatcttactgaagaacactttaagaaacctgtatttgtaactgattatccaaaggatattaaagctttctatatgagattaaatgatgatggaaagacagttgctgcaacagatcttttagttccaggtataggagaacttataggtggaagccaaagagaagaaagaattgatattctaactaagagaatggctgaacttggtcttaatgaagaagattactggtggtatctagagcttagaaaatatggagaaactaaacacgctggatttggattaggctttgaaagacttattatgtatattacaggtatgtcaaacatcagagacgtaatcccattcccaagaactacaggacaatctgacttctaa

SEQ ID NO: 10630 - protein, 464 aa, Clostridium sp. 7_2_43FAA
MDKVILVKSLYRNQDEYLSEEIKISGWIRTLRASNAFGFIEVNDGTFFKNVQVVFDNKLDNFKDVSKLPISSSITVIGTLVATPEAKQPFEIQAKEIVIEGLSQSDYPLQKKRHTFEYLRTIAHLRPRSNAFSAVFRVRSVAAYAIHKFFQERGFVYTHTPLITGSDCEGAGEMFRVTTLDLHNVPKTEEGAIDFKQDFFGKESNLTVSGQLNAECYALAFRNVYTFGPTFRAENSNTARHAAEFWMIEPEIAFADLQDDMELAEDMLKYVLEYVLAECPEEMAFFNQFVDKGILDRLNHVMTSDFGKVTYTEAVEILKKADKKFEYPVEWGIDLQTEHERYLTEEHFKKPVFVTDYPKDIKAFYMRLNDDGKTVAATDLLVPGIGELIGGSQREERIDILTKRMAELGLNEEDYWWYLELRKYGETKHAGFGLGFERLIMYITGMSNIRDVIPFPRTTGQSDF

SEQ ID NO: 10631 - DNA, 1395 bp, Stenotrophomonas sp. SKA14
  CDS (1)..(1395): transl_table=11
atgacggtggtcagcgttgaacatgcgcttgccgggaagatcccggaaggcggcgaagtcacggtacgcggatgggtgcgcacggtgcgcggttcagcgaatctggccttcgtgaatgtgagcgacggctcctgcttcgccccgatccaggtcgtggccaacgacagcctggccaacttcgacgagatcaagcgcctgaccagcggctgctcggtcatcgccaccggcaccctggtgaagtcgcagggcaagggccagtcgttcgagatccaggccagcgcgctggaagtggtcggctgggtcgaagacccgctcacctacccgatccagcccaagccgatgtcgccggagttcctgcgcgaagtcgcgcacctgcgcccgcgcaccaacctgttcggcgcggtcacccgtatccgcaactgcctggcccaggccgtgcaccgcttcttccacgagaacggcttcaactggatcagtaccccgatcatcaccacctccgacgccgaaggcgccggccagatgttccgcgtgtccaccctggacatggtgaacctgccgcgcgacgagaagggtgcgatcgatttcagccgcgacttcttcggcaaggaaaccttcctgaccgtgtccggccagctgaacgtcgaggcttactgcctggcgctgagcaaggtctacaccttcggcccgaccttccgcgccgagaacagccacaccacccgccacctagcggagttctggatgatcgagccggaaatcgccttcgccgacctggccgaagatgcgcgcctggccgaagagttcctgaagtacctgttccgcgcggtgctgaacgagcgcagcgacgacctggccttcatcgccgagcgcgtggacaagaacgcgatcaccaagctggaagacttcatcaacgcaccgtttgaacgcatcgactacaccgatgcggtcagcctgctgcagaagtccggcaagaagttcgacttcccggtcgaatggggcctggacctgcagaccgagcacgagcgctggctgaccgaggaacatgtcggccgcccggtggtggtgaccaactatccggagcacatcaaggccttctacatgcgcctgaacgacgacggcaagaccgtcgccgcgatggacgtgctggccccgggcatcggcgagatcatcggtggcagccagcgcgaagagcgcctggacgtgctggacgcgcgcatggcccagttcggcctggaccgcgaacactacagctggtaccgcgatttccgtcgctatggctcggtgccgcacgccggcttcggcctgggcttcgagcgcctggtggtgtacgtctgcggcctgtccaacatccgcgatgcgatcccctacccgcgcgccccgggcagcgcggacttctaa

SEQ ID NO: 10632 - protein, 464 aa, Stenotrophomonas sp. SKA14
MTVVSVEHALAGKIPEGGEVTVRGWVRTVRGSANLAFVNVSDGSCFAPIQVVANDSLANFDEIKRLTSGCSVIATGTLVKSQGKGQSFEIQASALEVVGWVEDPLTYPIQPKPMSPEFLREVAHLRPRTNLFGAVTRIRNCLAQAVHRFFHENGFNWISTPIITTSDAEGAGQMFRVSTLDMVNLPRDEKGAIDFSRDFFGKETFLTVSGQLNVEAYCLALSKVYTFGPTFRAENSHTTRHLAEFWMIEPEIAFADLAEDARLAEEFLKYLFRAVLNERSDDLAFIAERVDKNAITKLEDFINAPFERIDYTDAVSLLQKSGKKFDFPVEWGLDLQTEHERWLTEEHVGRPVVVTNYPEHIKAFYMRLNDDGKTVAAMDVLAPGIGEIIGGSQREERLDVLDARMAQFGLDREHYSWYRDFRRYGSVPHAGFGLGFERLVVYVCGLSNIRDAIPYPRAPGSADF

SEQ ID NO: 10633 - DNA, 1404 bp, Bacteroides sp. 4_3_47FAA
  CDS (1)..(1404): transl_table=11
atggaaaaaattagtagaacaaagattgttgacttgctgaagcgccgtgattttggtgcgatggtcaatgtaaaaggttgggttcgtacccgccgcggtagcaaacaggtaaattttatcgccctgaatgacggttctacaataaataatgtgcagattgttgttgatttggcaaactttgacgaagaaatgttgaagcagatcaccaccggtgcatgtatcagtgtgaacggtgagttgaccgaatccattggctctggtcaggctgccgaagttcaagcgcgtggaatcgaagtattaggtacttgtgataatacttatccgttacagaagaaaggtcatacgatggagtttcttcgtgagatcgctcatttgcgtccccgtaccaatacatttggagctgtattccgcatccgccacaacatggctatcgctatccataagttcttccatgaacgtggtttcttctattttcatacacctattatcacagcatccgattgtgaaggtgcgggacagatgttccaggttactaccaagaatctttatgatttgaagaaagatgaaaacggatcgattatttatgatgatgatttctttggcaaacaagccagtttgacggtttccggacagttggaaggtgaattggctgctactgctttgggggctatttatacatttggacctacattccgtgcggagaactccaatacgccgcgtcacttggccgagttttggatgattgaacctgaggttgcgttcaatgatattactgataatatggatttggccgaagactttattaaatattgtgtacagtgggcgcttgacaactgctatgatgatgtgaagttcttgaacgatatgttcgataaaggattgatagaacgtttgcagggcgtgctgaaggaagaatttgtccgtctgccttatacggaaggtatcaagatactggaggaagctgtagtaaaaggtcataaatttgaattcccggtatattggggagtagacttagcctctgaacatgaacgttatttggtggaagagcactttaaacgtcctgtaatcctgacagactatccgaaagaaatcaaggcattctatatgaagcagaatgaggatggcaagacggtgcgtgcaatggatgtattattcccgaagattggcgaaataataggtggttctgaacgtgaggctgattatgacaaattgatgacccgcattcaggaactgggaattccgatgaaggatatgtggtggtatctggatacccgcaagtttggttcatgtcctcattctggttttggacttggttttgaacggttgttgctgtttgttaccggtatgaccaatattcgtgatgtgatacctttcccacgtactccgcgcaatgctgaattctaa

SEQ ID NO: 10634 - protein, 467 aa, Bacteroides sp. 4_3_47FAA
MEKISRTKIVDLLKRRDFGAMVNVKGWVRTRRGSKQVNFIALNDGSTINNVQIVVDLANFDEEMLKQITTGACISVNGELTESIGSGQAAEVQARGIEVLGTCDNTYPLQKKGHTMEFLREIAHLRPRTNTFGAVFRIRHNMAIAIHKFFHERGFFYFHTPIITASDCEGAGQMFQVTTKNLYDLKKDENGSIIYDDDFFGKQASLTVSGQLEGELAATALGAIYTFGPTFRAENSNTPRHLAEFWMIEPEVAFNDITDNMDLAEDFIKYCVQWALDNCYDDVKFLNDMFDKGLIERLQGVLKEEFVRLPYTEGIKILEEAVVKGHKFEFPVYWGVDLASEHERYLVEEHFKRPVILTDYPKEIKAFYMKQNEDGKTVRAMDVLFPKIGEIIGGSEREADYDKLMTRIQELGIPMKDMWWYLDTRKFGSCPHSGFGLGFERLLLFVTGMTNIRDVIPFPRTPRNAEF

SEQ ID NO: 10635 - DNA, 1386 bp, Fusobacterium sp. 3_1_36A2
  CDS (1)..(1386): transl_table=11
atgattactgtaagagatatttttagacatggggaggattacctagataaagagatagagctttttggttgggtaagaaagataagagatcaaaagaaatttggttttattgaattaaatgatggttctttctttaaaggagtacaaatagtttttgaagaagggcttgaaaattttgatgaagtttcaaggctttcaatatcttctactattaaagtaaaaggtactcttgttaaatcacaaggtagtggacaagatttagaagttaaagctgataaaatagaaatattccaaaaggctgatttagaatatccattgcaaaataaaagacatacttttgaatatttaagaactaaggcacatttaagagcaagaacaaatactttttcagcagtatttagggtaagatctgtacttgcttatgcaatacataaatttttccaagaaaataactttgtttatgttcacactccaattataactggttctgatgctgagggtgctggagaaatgtttagagttacaactcttgatatgaataaattacctaaaaaagaaaatggagaaattgattttacaaaagatttctttggtaaatcaactaatttaacagtaagtggtcaattaaatgttgaaactttctgtgcagcttttagaaatgtctatacttttggaccaacatttagggcagaatactcaaatactgcaagacatgcctcagagttttggatggtagagcctgaaatagcttttggagatttatcagctaatatggaacttgcagaagctatggtaaaatttgttattaaatatgttatggatacttgtccagaagaaatggaattctttaattcatttattgaaaaaggactatttgataaattaaacaatgtacttaacaatgattttggtagagttacttacacagaagcaatagaaattttagaaaaatcaggtaagaaattcgaatttcctgttaaatggggaatagatttacaaagtgaacatgaaagatatttagcagaagaatattttaaaaagcctgtgtttgtaactgattatccaaaagaaattaaggctttctatatgaaacttaatgaagataacaaaacagttagagctatggacttacttgccccaggaattggagaaattattggtggttctcaaagagaagatagctttgaacttcttacaaagagaatgaaagaacttggacttaacgaagaagattatgaattttatttagatttaagaagatttggaagtttccctcactctggatatggattaggttttgaaagaatgatgatgtatttaactggtatgcaaaatattagagatgtaatacctttcccaagaactccaaataatgcagaattttaa

SEQ ID NO: 10636 - protein, 461 aa, Fusobacterium sp. 3_1_36A2
MITVRDIFRHGEDYLDKEIELFGWVRKIRDQKKFGFIELNDGSFFKGVQIVFEEGLENFDEVSRLSISSTIKVKGTLVKSQGSGQDLEVKADKIEIFQKADLEYPLQNKRHTFEYLRTKAHLRARTNTFSAVFRVRSVLAYAIHKFFQENNFVYVHTPIITGSDAEGAGEMFRVTTLDMNKLPKKENGEIDFTKDFFGKSTNLTVSGQLNVETFCAAFRNVYTFGPTFRAEYSNTARHASEFWMVEPEIAFGDLSANMELAEAMVKFVIKYVMDTCPEEMEFFNSFIEKGLFDKLNNVLNNDFGRVTYTEAIEILEKSGKKFEFPVKWGIDLQSEHERYLAEEYFKKPVFVTDYPKEIKAFYMKLNEDNKTVRAMDLLAPGIGEIIGGSQREDSFELLTKRMKELGLNEEDYEFYLDLRRFGSFPHSGYGLGFERMMMYLTGMQNIRDVIPFPRTPNNAEF

SEQ ID NO: 10637 - DNA, 1386 bp, Fusobacterium sp. 3_1_33
  CDS (1)..(1386): transl_table=11
atgattactgtaaaagatatttttagacatggagaggattacctaaacaaagaaatagagcttttcggttgggtaagaaaaataagagatcaaaagaaatttggttttattgaattaaacgatggttcattttttaaaggagttcaaatagtttttgaagaaggacttgaaaattttgatgaagtatcaagactttcaatatcatctactattaaagtaaaaggaactcttgttaaatctcaaggtagtggacaagatttagaagttaaagctgataaaatagaaattttccaaaaagctgatttggaatatccgttacaaaataaaagacatacttttgaatatttaagaactaaggcacatttaagacctagaactaatactttttcagcagtatttagagtaagatctgtacttgcttatgcattacataaatttttccaagaaaataacttcgtttatgttcatactccaattataactggttctgatgcagagggtgcaggagaaatgtttagagttaccactcttgatatgaataaattacctaaaaaagaaaatggagaagttgattttacaaaagatttctttggtaaatcaactaacctaacagtaagtggtcaattaaatgttgaaactttctgtgctgcttttagaaatgtttatacttttggaccaacatttagagcagagtattcaaatactgcaagacatgcctcagaattttggatggtggaacctgaaatagcttttgcagatttatctgctaatatggaacttgcagaagctatggtaaaatttgttattaaatatgttatggatacttgtccagaagaaatggaattctttaattcatttattgaaaaaggactatttgataaattaaataatgtacttaacaatgaatttggtagaattacttatacagaagcaatagaaattttagaaaaatctggaaagaaatttgaatttcctgttaaatggggaatagatttacaaagtgaacatgaaagatatttagcagaagaatattttaaaaagcctgtctttgttactgattatccaaaagaaataaaagccttctatatgaaacttaatgaagatggaaaaacagttagagccatggacttactagcaccggggattggagaaataataggtggttctcaaagagaagatagttatgaaattcttttaaagagaatgaaagaacttggacttaatgaagaagactatgaattttatttagatttaagaagatttggaagtttccctcactctggatatggattaggttttgaaagaatgatgatgtatctaacaggtatgcaaaatattagagatgtaatacctttcccaagaactccaaataatgcagaattttaa

SEQ ID NO: 10638 - protein, 461 aa, Fusobacterium sp. 3_1_33
MITVKDIFRHGEDYLNKEIELFGWVRKIRDQKKFGFIELNDGSFFKGVQIVFEEGLENFDEVSRLSISSTIKVKGTLVKSQGSGQDLEVKADKIEIFQKADLEYPLQNKRHTFEYLRTKAHLRPRTNTFSAVFRVRSVLAYALHKFFQENNFVYVHTPIITGSDAEGAGEMFRVTTLDMNKLPKKENGEVDFTKDFFGKSTNLTVSGQLNVETFCAAFRNVYTFGPTFRAEYSNTARHASEFWMVEPEIAFADLSANMELAEAMVKFVIKYVMDTCPEEMEFFNSFIEKGLFDKLNNVLNNEFGRITYTEAIEILEKSGKKFEFPVKWGIDLQSEHERYLAEEYFKKPVFVTDYPKEIKAFYMKLNEDGKTVRAMDLLAPGIGEIIGGSQREDSYEILLKRMKELGLNEEDYEFYLDLRRFGSFPHSGYGLGFERMMMYLTGMQNIRDVIPFPRTPNNAEF

SEQ ID NO: 10639 - DNA, 1407 bp, Bacteroides sp. 2_1_33B
  CDS (1)..(1407): transl_table=11
atggaaacaattaaacgaacaaaaattgtagacgtgctgaaaagcgacgctttcggtactaccgtgaacgtgaaaggatgggttcgcacccgccgtggtagcaaacaggtgaattttatcgccttgaatgacggttctacaatcaataatgttcagatcgttgtggatgtagataaattgggtgatgagttcttgaaaccgattaccacgggagctagtatcagcgtaaatggtatcttgacacaatcccaaggtaaggggcaaaatgtggagatacaggctaccgagattgagatcttcggtacggctgatccagctacttatccattgcagaaaaaaggacactccatggagtttttgcgtgagatcgctcatttgcgtcctcgtacgaatacatttggagcggtattccgtattcgtcataatatggcttacgctatccataagtttttccatgatagaggctttttctatttccatacgccgatcatcacggcttccgactgtgagggtgccggacagatgttccaagttactaccaagaatttgtacgacttgaaaaaggatgagaacggctctatcatttatgaggacgacttcttcggcaagcaggctagcttgacggtttccggacagttggagggtgagttggcagctacagccttgggacagatttatacgtttggccctacgttccgtgcggagaactcaaatacgcctcgtcatttggcggaattctggatgattgagccggaagtcgcttttaatgatatcacggacaatatggagttggccgaggagttcattaaatattgcgtacaatgggcgttggataactgtatggaggatatcaagttcttgaacgatatgttcgataaggaattgatcgctcgtctggaaggggtcttgaaagactcattcgttcgcttgccgtacactgaaggaatcaagatattggaagaggctgtcgctaaaggacataaatttgagttccctgtttattggggtgtagatttggcttccgagcacgaacgtttcttagtggaggatcacttcaaacgtcctgtaattttaacggattacccgaaagagatcaaggctttttatatgaagcaaaacgaggatggaaagacggtacgtgcgatggacgtattattcccgaagatcggagagatcatcggcggttccgagcgtgaggctgactatgataagctaatgagtcgtattgacgaattgggcatcccgatgaaggatatgtggtggtacttagatactcgccgttttggtacggtgcctcactctggtttcggtttgggctttgagcgtcttttgttgttcgttacgggtatgggaaatatccgtgacgtgatacctttcccgcgtacaccgaataacgctgagttctaa

SEQ ID NO: 10640 - protein, 468 aa, Bacteroides sp. 2_1_33B
METIKRTKIVDVLKSDAFGTTVNVKGWVRTRRGSKQVNFIALNDGSTINNVQIVVDVDKLGDEFLKPITTGASISVNGILTQSQGKGQNVEIQATEIEIFGTADPATYPLQKKGHSMEFLREIAHLRPRTNTFGAVFRIRHNMAYAIHKFFHDRGFFYFHTPIITASDCEGAGQMFQVTTKNLYDLKKDENGSIIYEDDFFGKQASLTVSGQLEGELAATALGQIYTFGPTFRAENSNTPRHLAEFWMIEPEVAFNDITDNMELAEEFIKYCVQWALDNCMEDIKFLNDMFDKELIARLEGVLKDSFVRLPYTEGIKILEEAVAKGHKFEFPVYWGVDLASEHERFLVEDHFKRPVILTDYPKEIKAFYMKQNEDGKTVRAMDVLFPKIGEIIGGSEREADYDKLMSRIDELGIPMKDMWWYLDTRRFGTVPHSGFGLGFERLLLFVTGMGNIRDVIPFPRTPNNAEF

SEQ ID NO: 10641 - DNA, 1428 bp, Bacillus thuringiensis (strain Al Hakam)
  CDS (1)..(1428): transl_table=11
ttgtatttaaatatatcagcaaaggagaatttcactatggaaaacacattagtaaaaagtctgtatagagatacagataaatacgcaggtcaaacagtacaagtatcagggtggattcgtaacttacgtgattcaaaagcatttggtttcatcgaattaaacgacggtagcttcttcaaaagcgttcaaatcgttttcgatacagaattagataacttcaaagaaattgcaaaacttccacttagctcttcagttaaagtagaaggtaaagtaattgcaacgcctggagcgaagcaaccatttgaaattaaagcagaaaaaattgatatcgagggcttatcagattctgattacccacttcaaaagaaacgtcatacgtttgaatacttacgtacaatcgctcacttacgtccaagaacaaatgcattctctgcaacgttccgcgtacgttctatcgcagcatttgcgattcaccaattcttccaagaacgtggattcgtacatgttcacacaccaatcatcactggtagtgatacagaaggtgcgggcgaaatgttccgcgtaacaacgcaagatttaaacaacgtaccaaaagacgaagacggacaagttgatgaatcaaaagacttcttcggcaaagaaacaaacttaacagtaagtggacagctgaacgctgaagcttatgcattagcattccgtgatgtatacacattcggacctacattccgtgcagaaaactcaaacacaactcgccatgctgctgagttctggatggttgagcctgagattgcatttgctgaactaggtgacgtaatgaaccttacagaagatatgctgaaatatgcaatgaaatacgtattagagcatgcaccagaagaaatggaattcttcaacagcttcgttgataaaacagttctagagcgcatgaacaacgtaatcaactctgacttcggtcgcatcacttatacagaagcaattaaagtacttcaagagtcaggtgctgacttcaaatacccagtagaatggggtattgacttacaaacagagcacgaaagatacttatcagaagaaatcttcaaacgccctgtattcgtaactgactatccgaaagacattaaagcattctacatgcgcttaaatgacgacggtaaaacagtagctgctactgaccttctagttcctggcatcggcgaattaatcggcggaagccaacgtgaagaaagaatggacgttttagtagacagaattaaagaactaggcatgaacgaagaggactactggtggtacttagaacttagaaaatacggcggtacaaaacacgctggattcggtctaggtttcgagcgcttcctaatgtatatcactggcatggctaacatccgtgacgtaattccattcccaagaactccaggttcttctgaattctaa

SEQ ID NO: 10642 - protein, 475 aa, Bacillus thuringiensis (strain Al Hakam)
MYLNISAKENFTMENTLVKSLYRDTDKYAGQTVQVSGWIRNLRDSKAFGFIELNDGSFFKSVQIVFDTELDNFKEIAKLPLSSSVKVEGKVIATPGAKQPFEIKAEKIDIEGLSDSDYPLQKKRHTFEYLRTIAHLRPRTNAFSATFRVRSIAAFAIHQFFQERGFVHVHTPIITGSDTEGAGEMFRVTTQDLNNVPKDEDGQVDESKDFFGKETNLTVSGQLNAEAYALAFRDVYTFGPTFRAENSNTTRHAAEFWMVEPEIAFAELGDVMNLTEDMLKYAMKYVLEHAPEEMEFFNSFVDKTVLERMNNVINSDFGRITYTEAIKVLQESGADFKYPVEWGIDLQTEHERYLSEEIFKRPVFVTDYPKDIKAFYMRLNDDGKTVAATDLLVPGIGELIGGSQREERMDVLVDRIKELGMNEEDYWWYLELRKYGGTKHAGFGLGFERFLMYITGMANIRDVIPFPRTPGSSEF

SEQ ID NO: 10643 - DNA, 1683 bp, Oryza sativa subsp. japonica
  CDS (1)..(1683)
atggccgaagacgccgcggcggccgccatggccgcggcctccctctccgacgacctggagcccgccaccgaccgcacccgcatccgatccatcctggccgacggcgccgcgcgcgccggcgagcgcgtcgtcgtgggcgggtgggtcaagaccgggcgggagcaggggaaaggcaccttcgccttcctcgagctcaacgatggctcctgcgcctccaacctgcaggtcctcgtcgacgccgccgtccacccgctcgcgccgctcaccgccacgggcacgtccgtgctcgtcgaaggccaagctcaagaagccgccggagcggcgccaagcagcgcgtcgagctccgcgtcgaccgcgtcatcgaggctcggcgaggtcgaccccgccgcctacccgctgcccaagaccaagctcacgctcgagaatctcagggacgtcgtccatctcggctcccgcaccaacacgattggtgctgttgcgcgtattagacaccagctagcctgtgcaacacacaggttttttgatgagaatggttttctttatgtgcacacaccaataataactacaagtgattgtgagggtgctggtgagatgtttcaagtgacgactttgttcagccatgctgaaaaggtggagaaggaattgaaagagaaccctgcaccatcagagtctgatattgaggcagctagagttgttgtcaaggaaaaaggtgatgcggttgcacagcttaaagctgcaaaagctagcaaacaagaaatcacagctgctgttgctgagcttaacaaggcaaaagaaaatgtctcaaggctggaggaaagatctaagttgaagcccggaattccgtacagagatgatgggacagtagcttatgagaatgacttcttcaaacgccaggcttttctgactgtgtctggacagcttcaagttgagacctatgcatgtgctcttagcagtgtttatacctttggaccaacattccgtgcagaaaactcccatacatcacgacatttggcagagttttggatggttgaaccagaaatcgcatttgctaacttgcaggatgatatgaactgtgcagaaagatatgtacagtacctttgcaagtggcttcttgagcattgccgggaagacatggaattcatggtgaaaaattacgataagactgcaattgagcgtctggagcttgtttcctcgacaccttttcagcgcatttcatatacaaaagctgttgagctattgaaaaatgtcactgataagaaattcgaaaacaaggttgaatggggaattgatttagcttcagagcatgaaaggtatttaaccgaggtgatatttaagaagccggtgattgtttataactatcccaaagaaataaaggcattttatatgagactcaatgatgatcagaagactgtagctgctatggatgttcttgtgcccaaggttggtgagttggttggtggaagccaaagggaggaacgtctggaccttctcaaaacaaggatacaagacgccgggttgcctttggagccatatgaatggtacttggacctccgccgctttggatctgtcaagcacagtggttttggtttgggttttgaaagaatgattctttttgccactggtttggagaacatcagagatgtcatccccttccctagatacccagggagggctgatctctaa

SEQ ID NO: 10644 - protein, 560 aa, Oryza sativa subsp. japonica
MAEDAAAAAMAAASLSDDLEPATDRTRIRSILADGAARAGERVVVGGWVKTGREQGKGTFAFLELNDGSCASNLQVLVDAAVHPLAPLTATGTSVLVEGQAQEAAGAAPSSASSSASTASSRLGEVDPAAYPLPKTKLTLENLRDVVHLGSRTNTIGAVARIRHQLACATHRFFDENGFLYVHTPIITTSDCEGAGEMFQVTTLFSHAEKVEKELKENPAPSESDIEAARVVVKEKGDAVAQLKAAKASKQEITAAVAELNKAKENVSRLEERSKLKPGIPYRDDGTVAYENDFFKRQAFLTVSGQLQVETYACALSSVYTFGPTFRAENSHTSRHLAEFWMVEPEIAFANLQDDMNCAERYVQYLCKWLLEHCREDMEFMVKNYDKTAIERLELVSSTPFQRISYTKAVELLKNVTDKKFENKVEWGIDLASEHERYLTEVIFKKPVIVYNYPKEIKAFYMRLNDDQKTVAAMDVLVPKVGELVGGSQREERLDLLKTRIQDAGLPLEPYEWYLDLRRFGSVKHSGFGLGFERMILFATGLENIRDVIPFPRYPGRADL

SEQ ID NO: 10645 - DNA, 1365 bp, Microcystis aeruginosa PCC 7806
  CDS (1)..(1365): transl_table=11
atgactagcagaatcaaggaaatttttcaaacaggacaaccggatcaatccgtcaccgtgcagggttgggtgagaacaaaacgagaattaaaagaatttaccttcctggaagttaatgatggctcatccctggctaacttacaagttatcctcgaatcgactttacccgattatgaaaatgtactaaagacaattagtacaggaacggcgatcgctgtttcgggaaatttggttccttccccgggtaaagggcaaaatatcgagttaaaagcggccgaaatcaccctttatggtgactgtcccccagaatatcccctacaaaagaaacgtcattcctttgaatttctgagaactattgcccatctgcgagcaagaaccaacaccctaggagcagtaatgcgggttagaaacgcttgcgctaccgctatccacagttttttccaagaaaagggctttatttgggtacatactcccattattaccgctaacgactgcgaaggtgcgggagaattatttactgtcaccagtttagatttaaaaaaaaccgccaattttgccgaggatttcttcggtaaacgggcctatttaaccgtcagtggacaattacaagcggaagtaatggccatggctttatctaatgtttacacttttggcccgacttttcgcgccgaaaattctaatacttcccgtcatttggccgagttttggatggtggaaccggaaatggctttttgtgatctggaaggagatcaggatttagcggaggcattcctcaaatatatctttaaattcgtcctagaaaattgtcccgaagatttgcagttttttaacgaacgtatcgataaaacggtgttaagtacggccgaaaatatcgttaatagtgagtttggccggattacctacagcgaagcgatcgagttattagaaaaagctgatcgtcagttcgagtttccggtagaatggggcgtagatctacagtcagaacacgaacgttatctagcggaggaactatttaaaaaacccgtgattgtcaccaattatcccaagacaatcaaagctttttatatgcgtctagatgacaataataaaactgtttctgctatggatattttagcacccaaaatcggcgaaattatcggcggttcccaacgggaagaacgattagatgtattaatccaaagaatgcaggaacagggtatgaatcccgatgatttgtggtggtatttagatctgcgtcgctacggttccgttccccacgctggttttggtttaggattcgagcgtctggtacaatttatgacgggaatgaccaatattcgcgatgtgattcctttcccccgtacccctttaagtgccgacttttag

SEQ ID NO: 10646 - protein, 454 aa, Microcystis aeruginosa PCC 7806
MTSRIKEIFQTGQPDQSVTVQGWVRTKRELKEFTFLEVNDGSSLANLQVILESTLPDYENVLKTISTGTAIAVSGNLVPSPGKGQNIELKAAEITLYGDCPPEYPLQKKRHSFEFLRTIAHLRARTNTLGAVMRVRNACATAIHSFFQEKGFIWVHTPIITANDCEGAGELFTVTSLDLKKTANFAEDFFGKRAYLTVSGQLQAEVMAMALSNVYTFGPTFRAENSNTSRHLAEFWMVEPEMAFCDLEGDQDLAEAFLKYIFKFVLENCPEDLQFFNERIDKTVLSTAENIVNSEFGRITYSEAIELLEKADRQFEFPVEWGVDLQSEHERYLAEELFKKPVIVTNYPKTIKAFYMRLDDNNKTVSAMDILAPKIGEIIGGSQREERLDVLIQRMQEQGMNPDDLWWYLDLRRYGSVPHAGFGLGFERLVQFMTGMTNIRDVIPFPRTPLSADF

SEQ ID NO: 10647 - DNA, 1479 bp, Saccharomyces cerevisiae (strain AWRI1631)
  CDS (1)..(1479)
atgtttcatgctttcgccttccttaaaggtggtagattttactcttcactaacagttaaatcattgtacgagcaggtacaccatactagccatgatcccatttcaattaatggatggatcaaatccataagactattaaaacgtatagcgtttttggatttacaagatgggacttctgtgaacccattaagaatagttattccactcacaaatactgatgaagtacagttcctaaaaattctgaaaactggtcaaactttatctatatctaatgctacctggcaaagcacccctaatagaaaacaaccttttgaattgcaaatcaaaaatcctgtcaagtcaattaaacttgtgggtcccgtttcagaaaactatccattacaaaagaaatatcaaaccttacgttatttaaggtccttacctacactaaaatacagaaccgcttacttaagtgcaattttacggttaagatcatttgtagaattccagttcatgctatatttccagaaaaaccacttcaccaaagtttcaccaccaatattaacttcaaacgattgtgaaggtgccggcgagttgtttcaagtctccaccaatacgtcgccaactgcatcctcgtactttgggaagccgacttatttgactgtgtccactcaattgcacttggaaattttagcgttatcactgtcaaggtgttggacgttatctccttgctttagagccgaaaagagtgatactccaagacacctttcggagttttggatgcttgaagtggaaatgtgctttgttaatagcgtcaacgagctaacatcgtttgttgagactacaataaaacacataattaaagcttgtatagataaccaacaagaactcttgccgaagcaatttatctcttcacaagaaaataatgcatcgtcagagctatcaataaatcaagagacacaacaaattaaaacacgatgggaagatttaataaatgaaaaatggcacaatataacgtataccaatgcaatagaaattctcaagaaacgccacaatgaagtttcacactttaagtatgaacctaaatggggacagcctttgcaaactgaacatgaaaaatttttagccggagagtattttaagtccccagttttcgttaccgactatccacgtctttgtaaaccattctacatgaaacaaaattccactcctgacgatactgttggatgctttgatctactggttcctggaatgggtgaaataattggtgggagtttaagggaagatgactatgacaagttatgtagagaaatgaaagcacgcgggatgaatagatctggagaattggactggtatgtttctctgagaaaagaaggaagtgcaccacacggaggctttggtctagggtttgagagatttatctcatacttatatggcaaccataatataaaggatgccatacccttttatagaacatctgcagaatccatcgatttttga

SEQ ID NO: 10648 - protein, 492 aa, Saccharomyces cerevisiae (strain AWRI1631)
MFHAFAFLKGGRFYSSLTVKSLYEQVHHTSHDPISINGWIKSIRLLKRIAFLDLQDGTSVNPLRIVIPLTNTDEVQFLKILKTGQTLSISNATWQSTPNRKQPFELQIKNPVKSIKLVGPVSENYPLQKKYQTLRYLRSLPTLKYRTAYLSAILRLRSFVEFQFMLYFQKNHFTKVSPPILTSNDCEGAGELFQVSTNTSPTASSYFGKPTYLTVSTQLHLEILALSLSRCWTLSPCFRAEKSDTPRHLSEFWMLEVEMCFVNSVNELTSFVETTIKHIIKACIDNQQELLPKQFISSQENNASSELSINQETQQIKTRWEDLINEKWHNITYTNAIEILKKRHNEVSHFKYEPKWGQPLQTEHEKFLAGEYFKSPVFVTDYPRLCKPFYMKQNSTPDDTVGCFDLLVPGMGEIIGGSLREDDYDKLCREMKARGMNRSGELDWYVSLRKEGSAPHGGFGLGFERFISYLYGNHNIKDAIPFYRTSAESIDF

SEQ ID NO: 10649 - DNA, 1686 bp, Zea mays
  CDS (1)..(1686)
atggctgcggacgccgccgctgcggcgatgtccgcgacttccctctgcgacgatctcgagcccgccaccgtgcgcacccgcatccgcgatgtcctggccgcaggtgccgcgcgtgccggggaccgcgtcgtggtcggtgggtgggtccggacgggccgggagcaggggaagggctctttcgccttcctggagctcagcgacgggtcctgcgctgccacgcttcaggccatcgttgacgccgccgtgcacccgctagcgcgcctcaccgccaccggcacctccgtcctcgtcgagggcgtgatcaaggagccgcccgaggggaccaagcagaacgtcgagctgaaggtcagccgcgtgcttgaggtcggcgaggtcgatgccgccgtctacccgctgcccaagggcaaggtcaaactcacgctcgagaagctcagggacgtcgttcatctccgttcgcgcaccaacacgattggagcggttgctaggattaggcaccagttagcctatgcatcacacaggttctttgatgagaatggatttctctatgtacatacaccaataataactacgagtgactgtgaaggtgctggtgagatgtttcaagtgacaactttatttagccaggctgagaaaactgagaaggaattgagagagaacccaaaaccttctgattctgaaattgaggcagctaaagttcttgtcaaggaaaaaggtgatgtggtcgcacagcttaaagctgcaaaagccagcaaacaagagatatcaactgctgtcgatgagcttaatagggcaaaggaaattgtttcaaaactggaggagaggttcaagttaaagcctgggattccacgcaaggatgatggttcaatagcttttgaaaatgacttcttcaaacgtcaagcttttttgacagtgtctggacagcttcaggttgagacatatgcatgtgctcttagtagcgtttatacctttggaccaacattccgggcagagaactcacatacgtcacgacatttggcagagttttggatggttgaaccggaaatcgcatttgcaaacttgcaggatgacatgaactgtgcagaaaaatatgtacagtacctttgcaagtggctgcttgaccattgccaggaagatatggagtttatggtgaaaaattatgataagagtgcaattgaacgcctggagcttgtttcgtcaactccttttgtgcggatttcatacacaaaggctgtggagctcttgaaaaatgttaccgacaagaagtttgacaacaaagttgaatggggaattgatttagcctctgagcatgaaaggtatttaacagaggatatatttaagaagccagttattgtctataactatccgaaaggaataaaggcattttatatgagactcaatgatgatgacaagacggtggctgcaatggatgttcttgtgcctaaggttggtgaattgattggtggaagccaaagggaggaacggttagatgttctggaacagaggatacttgatgctggcctgcctttggaaccctatgaatggtacttggacctccgtcgctttggatctgtaaagcacagtggttttgggttgggttttgaaaggatgattctatttgcaaccggaatggagaacatcagagatgttatacccttcccaaggtacccaggaagggctgatctgtga

SEQ ID NO: 10650 - protein, 561 aa, Zea mays
MAADAAAAAMSATSLCDDLEPATVRTRIRDVLAAGAARAGDRVVVGGWVRTGREQGKGSFAFLELSDGSCAATLQAIVDAAVHPLARLTATGTSVLVEGVIKEPPEGTKQNVELKVSRVLEVGEVDAAVYPLPKGKVKLTLEKLRDVVHLRSRTNTIGAVARIRHQLAYASHRFFDENGFLYVHTPIITTSDCEGAGEMFQVTTLFSQAEKTEKELRENPKPSDSEIEAAKVLVKEKGDVVAQLKAAKASKQEISTAVDELNRAKEIVSKLEERFKLKPGIPRKDDGSIAFENDFFKRQAFLTVSGQLQVETYACALSSVYTFGPTFRAENSHTSRHLAEFWMVEPEIAFANLQDDMNCAEKYVQYLCKWLLDHCQEDMEFMVKNYDKSAIERLELVSSTPFVRISYTKAVELLKNVTDKKFDNKVEWGIDLASEHERYLTEDIFKKPVIVYNYPKGIKAFYMRLNDDDKTVAAMDVLVPKVGELIGGSQREERLDVLEQRILDAGLPLEPYEWYLDLRRFGSVKHSGFGLGFERMILFATGMENIRDVIPFPRYPGRADL

SEQ ID NO: 10651 - DNA, 1416 bp, Palm lethal yellowing phytoplasma
  CDS (1)..(1416): transl_table=11
atgtgtttattttattctgtgaaaaaaattaattgtaaatatgattatttacaaaatacaaaaaaaacaatttgcgtaaatggttggattaaaaattgtcgttttcaaaaagaaatattttttattgatttgaatgatggttcctttatagaagatttacaagttgtttataaaaataattctaaaaataatattgatttaaaaaaaataaaagaaaatttacaaattggtgcagctgtttgcgtagaaggaattttggtacctaattttaaaattaaaagtaattttgaattattatcttctaaaataatttttttagaaaaaaatgttaatgactatcctattcaaccaaaaaatcattctaagatttttttgcgtcaaatagctcatttaagactaagaacaaaattatttggtgccgtttttagaataagaaactcagtttctttctttattcatgaattttttcaaaaagaaggttttttgtatgctcatacacctattattactactagcgatggagaaggagcgggagaattatttaaagtaacttctttggatttggctaaaataaatttaaatgaagaaaaaaaaattgattataaaaaggatttttttgctcaacctacttttttaactgtaactggacaattagaaggcgaggcttttgctatggcttttagtaaaatttatacttttggtcctacttttagagctgaaaattctaatactccgagacatatttctgaattttggatgatagaacctgagatggccttttgtgatttgcaacaaaatataattgttgctcaaaatttaatacaatatgttattaaatgttgtttaaaaaataataaaaaagatttggaatttttagaaaatacacaagaaaataatttaatcaaaaaattagaagaaacagcttatttaccaaaatttttacaaataaaatataaaaaagctattcaaattttattagatagtaaaattaattttgaaaaaaaacctgtttatggtgaagatttatcgttagaacatgaaaaatttttaacagaaattttctttaaacaaccaatttttgttattgattggcctaaaaaaataaaagctttttatatgaaaaataatttagacaatgaaacagtagctgctatggatttattatttcccaaggttggtgaattaattggcggatcacaaagagaagaaaagttagaagttttagaagaaaaaatgaaagaatttaatatttcttttaaagaattacaatggtatttagatcttcgtcgttttggtagttgtattcattctggttttggtatgggattagaaaggtttttagtttatttaacagggttagataatattagagatgttattgcttttcctaggactcctaaaaatgctcttttttaa

SEQ ID NO: 10652 - protein, 471 aa, Palm lethal yellowing phytoplasma
MCLFYSVKKINCKYDYLQNTKKTICVNGWIKNCRFQKEIFFIDLNDGSFIEDLQVVYKNNSKNNIDLKKIKENLQIGAAVCVEGILVPNFKIKSNFELLSSKIIFLEKNVNDYPIQPKNHSKIFLRQIAHLRLRTKLFGAVFRIRNSVSFFIHEFFQKEGFLYAHTPIITTSDGEGAGELFKVTSLDLAKINLNEEKKIDYKKDFFAQPTFLTVTGQLEGEAFAMAFSKIYTFGPTFRAENSNTPRHISEFWMIEPEMAFCDLQQNIIVAQNLIQYVIKCCLKNNKKDLEFLENTQENNLIKKLEETAYLPKFLQIKYKKAIQILLDSKINFEKKPVYGEDLSLEHEKFLTEIFFKQPIFVIDWPKKIKAFYMKNNLDNETVAAMDLLFPKVGELIGGSQREEKLEVLEEKMKEFNISFKELQWYLDLRRFGSCIHSGFGMGLERFLVYLTGLDNIRDVIAFPRTPKNALF

SEQ ID NO: 10653 - DNA, 1776 bp, Ajellomyces capsulata (strain ATCC 26029 / G186AR / H82 / RMSCC 2432)
  CDS (1)..(1776)
atgctcttatggcgtagatgtctgagcacctctgcctccgctccgacaattgcgggtcaaaaatccccgctgctactacgatgtgcgcagctgttggacacatcccgatcaacctccagaactgctgagacagctactgctgctcctgatgggagtgcaagttccttagacaaccgccaaatccgcgttcgaggtttcattcggtcggtgaggaagcagaaacggttcgcgtttgctgagatctcggatgggtcgacgattaagtcggtgcaggcgattttgacaccggaacaggctgctcggttgtcgactggttctgccgtcgatatttcgggcgtctggcagccttgtcctcctggcaaagaacaaagccatgagcttcatgcgacagaagtcaagataactggggaagcggaccctgaggttagtttcgttccaatcccttgcacagcatgtcgactatccttcactgatacctacacccttccaaaccggcagacatatccaattcaaaagaaataccacagcccagatttccttcgacaaatcccacatcttcgattacggacaccgttcaactccctcttatcccgatttcgatcagaaagcattttccaactgggacaggtattccgtttccagctcggtggctgtttcgtgcaggtccaacctccgctgatcacatcgtctgactgtgaaggcgctggggaagtgttcaccgtggtgccaggagataaagtggatggtgcagaagtgggggaattctttcgatcgccaaaatacctcacagtgtcaagccagctacatctcgaggcgtatgcggccgagctgggaaatgtgtgggccctttctcccaccttccgagcagaaaagagcgatacgcctcggcatctaagcgagttctatatgctagaggtagaaatgaactttgtgcaaagcgtagattcgttaacggatattgtcgagtcattaattcgtgaccttacgaaacgactatacgagactccagttgcggaagagatattcacagctaagaggacaggggagtctggcgcggaaaaagttgataagggactacgcctgcgatggttgggtattatggagggtgagaaatggcctcgaattacatataccagcgcgatcgagttgcttcagaaagctgttcaatcgaaggccaccatttttaactttcccccggtctgggaggaagggcttcaactcgagcacgagaaattcatagtcgatgaaatcgggaagggtcgtcctgtattcgtgacccactacccaaaaaaggtgaaaccattttacatggcaccttcagtcgtcgcggacgaatcttcatcttcatcaccagtagaagtactacatcatgatccactccaaacaagggaaaccgttgcctgctttgatcttctgatgcccgagatcagcgaagttgtcggtggctctattcgtgaacaacgacttccaaatcttatacagaacatgcgtgagcacggacttcttaagaaaaaactcgaagccggttcagacgcagataacgcatcttcttcgacacattcgatatcggagtcgagttcgccagtatatccctacctccaaccggatgaacatctcggctcaattcaatggtacgccgatcttaggagatggggcagtgcgcctcacggcgggtttggacttgggttcgaccgatacctgggatatctggctggtgtttccagtctgagggatgttgttccgtttccacggcattttggacgagctgaatgctga

SEQ ID NO: 10654 - protein, 591 aa, Ajellomyces capsulata (strain ATCC 26029 / G186AR / H82 / RMSCC 2432)
MLLWRRCLSTSASAPTIAGQKSPLLLRCAQLLDTSRSTSRTAETATAAPDGSASSLDNRQIRVRGFIRSVRKQKRFAFAEISDGSTIKSVQAILTPEQAARLSTGSAVDISGVWQPCPPGKEQSHELHATEVKITGEADPEVSFVPIPCTACRLSFTDTYTLPNRQTYPIQKKYHSPDFLRQIPHLRLRTPFNSLLSRFRSESIFQLGQVFRFQLGGCFVQVQPPLITSSDCEGAGEVFTVVPGDKVDGAEVGEFFRSPKYLTVSSQLHLEAYAAELGNVWALSPTFRAEKSDTPRHLSEFYMLEVEMNFVQSVDSLTDIVESLIRDLTKRLYETPVAEEIFTAKRTGESGAEKVDKGLRLRWLGIMEGEKWPRITYTSAIELLQKAVQSKATIFNFPPVWEEGLQLEHEKFIVDEIGKGRPVFVTHYPKKVKPFYMAPSVVADESSSSSPVEVLHHDPLQTRETVACFDLLMPEISEVVGGSIREQRLPNLIQNMREHGLLKKKLEAGSDADNASSSTHSISESSSPVYPYLQPDEHLGSIQWYADLRRWGSAPHGGFGLGFDRYLGYLAGVSSLRDVVPFPRHFGRAEC

SEQ ID NO: 10655 - DNA, 1686 bp, Zea mays
  CDS (1)..(1686)
atggctgcggacgccgccgctgcggcgatgtccgcgacttccctctgcgacgatctcgagcccgccaccgtgcgcacccgcatccgcgatgtcctggccgcaggtgccgcgcgtgccggggaccgcgtcgtggtcggtgggtgggtccggacgggccgggagcaggggaagggctctttcgccttcctggagctcagcgacgggtcctgcgctgccacgcttcaggccatcgttgacgccgccgtgcacccgctagcgcgcctcaccgccaccggcacctccgtcctcgtcgagggcgtgatcaaggagccgcccgaggggaccaagcagaacgtcgagctgaaggtcagccgcgtgcttgaggtcggcgaggtcgatgccgccgtctacccgctgcccaagggcaaggtcaaactcacgctcgagaagctcagggacgtcgttcatctccgttcgcgcaccaacacgattggagcggttgctaggattaggcaccagttagcctatgcatcacacaggttctttgatgagaatggatttctctatgtacatacaccaataataactacgagtgactgtgaaggtgctggtgagatgtttcaagtgacaactttatttagccaggctgagaaaactgagaaggaattgagagagaacccaaaaccttctgattctgaaattgaggcagctaaagttcttgtcaaggaaaaaggtgatgtggtcgcacagcttaaagctgcaaaagccagcaaacaagagatatcaactgctgtcgatgagcttaatagggcaaaggaaattgtttcaaaactggaggagaggttcaagttaaagcctgggattccacgcaaggatgatggttcaatagcttttgaaaatgacttcttcaaacgtcaagcttttttgacagtgtctggacagcttcaggttgagacatatgcatgtgctcttagtagcgtttatacctttggaccaacattccgggcagagaactcacatacgtcacgacatttggcagagttttggatggttgaaccggaaatcgcatttgcaaacttgcaggatgacatgaactgtgcagaaaaatatgtacagtacctttgcaagtggctgcttgaccattgccaggaagatatggagtttatggtgaaaaattatgataagagtgcaattgaacgcctggagcttgtttcgtcaactccttttgtgcggatttcatacacaaaggctgtggagctcttgaaaaatgttaccgacaagaagtttgacaacaaagttgaatggggaattgatttagcctctgagcatgaaaggtatttaacagaggatatatttaagaagccagttattgtctataactatccgaaaggaataaaggcattttatatgagactcaatgatgatgacaagacggtggctgcaatggatgttcttgtgcctaaggttggtgaattgattggtggaagccaaagggaggaacggttagatgttctgaaacagaggatacttgatgctggcctgcctttggaaccctatgaatggtacttggacctccgtcgctttggatctgtaaagcacagtggttttgggttgggttttgaaaggatgattctatttgcaaccggaatggagaacatcagagatgttatacccttcccaaggtacccaggaagggctgatctgtga

SEQ ID NO: 10656 - protein, 561 aa, Zea mays
MAADAAAAAMSATSLCDDLEPATVRTRIRDVLAAGAARAGDRVVVGGWVRTGREQGKGSFAFLELSDGSCAATLQAIVDAAVHPLARLTATGTSVLVEGVIKEPPEGTKQNVELKVSRVLEVGEVDAAVYPLPKGKVKLTLEKLRDVVHLRSRTNTIGAVARIRHQLAYASHRFFDENGFLYVHTPIITTSDCEGAGEMFQVTTLFSQAEKTEKELRENPKPSDSEIEAAKVLVKEKGDVVAQLKAAKASKQEISTAVDELNRAKEIVSKLEERFKLKPGIPRKDDGSIAFENDFFKRQAFLTVSGQLQVETYACALSSVYTFGPTFRAENSHTSRHLAEFWMVEPEIAFANLQDDMNCAEKYVQYLCKWLLDHCQEDMEFMVKNYDKSAIERLELVSSTPFVRISYTKAVELLKNVTDKKFDNKVEWGIDLASEHERYLTEDIFKKPVIVYNYPKGIKAFYMRLNDDDKTVAAMDVLVPKVGELIGGSQREERLDVLKQRILDAGLPLEPYEWYLDLRRFGSVKHSGFGLGFERMILFATGMENIRDVIPFPRYPGRADL

SEQ ID NO: 10657 - DNA, 1674 bp, Ajellomyces dermatitidis (strain ER-3)
  CDS (1)..(1674)
atgctcgtatggcgtagatgcctgagcacctccaccactgcttcggcgattgcaggtcaaaaagccccgttgctactccgatgcgcgcagctgttggaggcatcccaaacaacccccaccgctgctgctgctgatcatgatggaggctctagttccttggacaaccgccagattcgggttcagggatttattcggtctgtgaggaagcagaaacggttcgcgtttgctgagatatcggatgggtcaacgattaagtcggtacaggcgattttgacgccggcgcaggctgctcgactatcgaccggttctgctattgatatttctggcgtgtggcaaccatgtcctgccggcaaaaagcaaagccatgagcttcacgcgacagaagttaagattactggagaggcggatcctgagaaataccacagcccagatttccttcgacaaataccacatctcaggctacggacacctttcaactccctcctctctcgatttagatcagaatgcattttccaactcggacaggtattccactcccggctcggcagcaatttcgtgcaggtccagccgccgctgatcacatcgtctgattgcgaaggtgctggggaagtgttcacagtggcgccaggagataaagttggggacggagagaagggggagttctttcgatctccaaaataccttacggtgtcaagccaacttcatctggaggcgtatgcggccgagctgggaaatgtgtggaccctctctcccaccttccgagcggagaagagtgatactccacggcatctcagcgagttctatatgttagaggtagaaatgaattttgtgcatagcttggattcgctcacggatactgtggagtcattaattcgtgaccttacgaaacgactatacgagagcccagttgcggaggaaatatttacagctaagaggacaggggagtctggacaagaaaatgttgatcagggattgcgcccgcgatggttgggcataatagagagtggggaatggcctcggattacgtataccaacgctatcgagttgcttcagaaggctgttgcatcgaaagcagccacttttaccataaccccggcctgggaggagggcctccacctcgagcatgaaaaattcatagtcgatgaagttgggaaggggtgtcccgtatttgtgactcactatccgaagatggtgaaaccattttacatggcaccttcaatcgtgctagaggaaccttcccccgcatcgccagcagaattatccaaccatgatccagcccaaacaatggagaccgttgcatgtttcgatcttttgatgcccgagatctgtgaagtggtcggtggctccattcgtgaacaccgacttccaaatcttatacagaacatgcgtgagcacgggcttattaggaaaatgcctgaggcggggccagacgcagattgtgcatcttcttcgtcacatttggcggcggagcagggttcgtcaatatacccttacctccaaccggatgaatatatcggcccaatgcaatggtatgccgatcttaggagatggggcagtgcacctcacggcgggtttggacttgggtttgaccggtacctgggatatctggctggcgtttctagtcttagggacgttgttccgttcccacgacattttggacgagctgaatgttaa

SEQ ID NO: 10658 - protein, 557 aa, Ajellomyces dermatitidis (strain ER-3)
MLVWRRCLSTSTTASAIAGQKAPLLLRCAQLLEASQTTPTAAAADHDGGSSSLDNRQIRVQGFIRSVRKQKRFAFAEISDGSTIKSVQAILTPAQAARLSTGSAIDISGVWQPCPAGKKQSHELHATEVKITGEADPEKYHSPDFLRQIPHLRLRTPFNSLLSRFRSECIFQLGQVFHSRLGSNFVQVQPPLITSSDCEGAGEVFTVAPGDKVGDGEKGEFFRSPKYLTVSSQLHLEAYAAELGNVWTLSPTFRAEKSDTPRHLSEFYMLEVEMNFVHSLDSLTDTVESLIRDLTKRLYESPVAEEIFTAKRTGESGQENVDQGLRPRWLGIIESGEWPRITYTNAIELLQKAVASKAATFTITPAWEEGLHLEHEKFIVDEVGKGCPVFVTHYPKMVKPFYMAPSIVLEEPSPASPAELSNHDPAQTMETVACFDLLMPEICEVVGGSIREHRLPNLIQNMREHGLIRKMPEAGPDADCASSSSHLAAEQGSSIYPYLQPDEYIGPMQWYADLRRWGSAPHGGFGLGFDRYLGYLAGVSSLRDVVPFPRHFGRAEC

SEQ ID NO: 10659 - DNA, 1590 bp, Coccidioides posadasii (strain C735)
  CDS (1)..(1590)
atgcggtcatggcggcgctgcctgtcaacctccaccccgaaactcaactccacacccccaggtccccttgctctgcgatgcgcccagctgtttgaagcctcccagccttccctgagcgacaatacctccctggaccaccgcgaggtggttattcgagggctggtgcgatcggtgcgtaagcagaaacactgggcgtttgcagagatctcggacgggtcgacgattcagcctgtgcaggctattttgtcgccggagcaagctgcggatttaacgactggaggagctgttgagatatccggtgtttggactccgtctcccggtagaaatcagagccatgagttaaaagctactgatgtgaagcttgttggagaagcagatcctcagacatatccaatccaaaagaaataccacagtcaagacttcctccgaacaattccccatctacgattcagaactcctttcaactccctcctctcccgtttccgttcagaatgtatataccaagctacgaacgtctttcactcgcgcccaggtttaaacttcatccaggtccagccgcccctaatcacgtcatcggattgtgaaggcgctggtgaagttttcagagtgagcccgcgcgaagccgctgctgaaggcgaagatgaagaatacttccgcgcacccaaatatctcaccgtctcctcacaactccacctggaagcttatgccgcggacctgggcaatgtatggacgctgtcgcctacgtttcgcgctgagaaaagtgatacgccgagacatttaagcgagttctacatgcttgaggcggagttgaattttgtgaacgatttggatgaattgacaaaattcgtggagtcgtttattcgcgagttgacggaaaaactatacaatactcccgtggcacgagagctcttcactgcgaagcgatcaggagaatccggtcgaacggttgtcaattccgaggtgactgagcgctggaaaggcctgatgggtgctgctacgtggccgagaattacatacacggaagcgattgaattgttgcagaacgcgtctatgaaatcggacaaagtagaatttaagtcctgtccctcgtggcctgcaggaatccaggtcgaacacgaaaaacacctagtctctactgtgggcaacggcgcaccgatctttatcactgattatccgaaagccctgaagccgttttatatggctccttctgccacgcaatccacggatccggaaaaagaaacggtagcttgctttgatctcatcatgccgaaagtctgtgaagttgttggtggttctctgcgtgagcatagattagagaatctgatccagaatatgcgtgagcacgagatgctcagggctcgacgtaatgagggctcatctgctgcctccgatgacatgacgtatcccttcttacgaccagacgaaaacttgggctcgctccgatggtatgccgacctgagacgatggggcagtgcgccccatggcgggtttggacttggattcgataggtttttgagttatttaacgggcgtggggagtatccgggacgttgtccccttcccaagatactttggaaaagccgattgttga

SEQ ID NO: 10660 - protein, 529 aa, Coccidioides posadasii (strain C735)
MRSWRRCLSTSTPKLNSTPPGPLALRCAQLFEASQPSLSDNTSLDHREVVIRGLVRSVRKQKHWAFAEISDGSTIQPVQAILSPEQAADLTTGGAVEISGVWTPSPGRNQSHELKATDVKLVGEADPQTYPIQKKYHSQDFLRTIPHLRFRTPFNSLLSRFRSECIYQATNVFHSRPGLNFIQVQPPLITSSDCEGAGEVFRVSPREAAAEGEDEEYFRAPKYLTVSSQLHLEAYAADLGNVWTLSPTFRAEKSDTPRHLSEFYMLEAELNFVNDLDELTKFVESFIRELTEKLYNTPVARELFTAKRSGESGRTVVNSEVTERWKGLMGAATWPRITYTEAIELLQNASMKSDKVEFKSCPSWPAGIQVEHEKHLVSTVGNGAPIFITDYPKALKPFYMAPSATQSTDPEKETVACFDLIMPKVCEVVGGSLREHRLENLIQNMREHEMLRARRNEGSSAASDDMTYPFLRPDENLGSLRWYADLRRWGSAPHGGFGLGFDRFLSYLTGVGSIRDVVPFPRYFGKADC

SEQ ID NO: 10661 - DNA, 1395 bp, Clostridium botulinum E1 str. 'BoNT E Beluga'
  CDS (1)..(1395): transl_table=11
atgaaaaatacagttttaattaaaaaaatttatagagaaactgatcaatttctttcaaaggaagtaatgatatcaggttggataagaactttaagagcatctaatgcttttggtttcattgaaataaatgatggttctttctttaaaaatatccaagtagtttttgatgacaaattaggtaactttaaagaaatttcaaaattaccaataagctcttcaatctcagttgttggtacattagttgctacaccagatgctaaacaaccatttgaaattcaagctaaagaaatagttattgaaggaatgtcaaattctgattacccacttcaaaagaaaagacatacttttgaatacttaagatcaattgcacatttaagaccaagaagtaacgcattctcagcaacatttagagtacgttcagttgctgcctttgcaatacataaattcttccaagaacaaggttttgtatatactcatactccaataatcacaggtagtgattgtgaaggtgctggagaaatgtttagagtaactactcttgatcctaaagctccagaattaactaaagaaggagatattgattatactaaagacttctttggtaaagaaactaaccttactgtttctggtcaattaaatgccgaatgtttcgcattagcatttagaaatatatatacatttggacctacattcagagctgaaaactctaacactacaagacatgcagctgaattctggatgatagaacctgaaatagcctttgctgatttacaagatgatatggaacttgcagaagcaatgcttaaatacgttataaaatatgttatggatgaatgtccagaagaattacaattcttcaattcatttgttgataaaggattactagaaagattaaatcatgttgtttcatcagactttgctaaagttacatacacagaagctgttgaaatcttagaaaaatgtgataaagaatttgattatgacgtatcttggggtatcgatttacaaactgaacacgaaagatatcttacagaagaacactttaaaaagccactatttgtaacagattatcctaaagaaattaaagcattctatatgagaatgaatgaagataataaaactgttgctgcaactgatcttttagtaccaggtatcggagaaatcattggtggtagccaaagagaagaaagacttgatgttttagaagctagaatggctgaactaggtcttaagaaagaagattactggtggtacttagaattaagaaaatatggagaaactaaacatgctggatttggtttaggatttgaaagattaatcatgtacattactggtatgacaaatatcagagacgtaataccattccctagaactccagggtctagcgagttctaa

SEQ ID NO: 10662 - protein, 464 aa, Clostridium botulinum E1 str. 'BoNT E Beluga'
MKNTVLIKKIYRETDQFLSKEVMISGWIRTLRASNAFGFIEINDGSFFKNIQVVFDDKLGNFKEISKLPISSSISVVGTLVATPDAKQPFEIQAKEIVIEGMSNSDYPLQKKRHTFEYLRSIAHLRPRSNAFSATFRVRSVAAFAIHKFFQEQGFVYTHTPIITGSDCEGAGEMFRVTTLDPKAPELTKEGDIDYTKDFFGKETNLTVSGQLNAECFALAFRNIYTFGPTFRAENSNTTRHAAEFWMIEPEIAFADLQDDMELAEAMLKYVIKYVMDECPEELQFFNSFVDKGLLERLNHVVSSDFAKVTYTEAVEILEKCDKEFDYDVSWGIDLQTEHERYLTEEHFKKPLFVTDYPKEIKAFYMRMNEDNKTVAATDLLVPGIGEIIGGSQREERLDVLEARMAELGLKKEDYWWYLELRKYGETKHAGFGLGFERLIMYITGMTNIRDVIPFPRTPGSSEF

SEQ ID NO: 10663 - DNA, 1392 bp, Clostridium botulinum D str. 1873
  CDS (1)..(1392): transl_table=11
atggaaacagtattagttaaacaactttacagagaaacagaaaaatttcaaggaaaagaagtaaaaattagtggatgggtaagaacattgagagcttcaaataaatttggatttatagaagttaatgacggaagcttctttaaaaatattcaagtagtttttggagctgaacttgaaaactttaaagaaatatcaaagtatgcaataagttcaagtataagtgtagaaggagaagttgtaataacagaaggtgcaaaacaaccctttgaaattcatgctaagaaagtagtattagaagggaaatctgatgcagattatccacttcaaaagaaaagacatacttttgaatatttaagaagtatagctcatttaagaccaagaagtaatgctttttctgctgtatttagagttcgttcattagcagcgtatgcaatacataaatttttccaagatcaaggatttgtttatgttcatacaccaataataacaggaagtgactgtgaaggtgcaggagaaatgtttagagtaacaactttagatatggataatcttccaaaggatgaacaaggaaatatagattacaaagaagacttttttggaaaacaatcaaatcttacagtaagtggacagctggaagctgaaatatatgctttagcatttagaaatgtttatacatttggacctacatttagagcagaaaactctaatacagcaagacatgcatcagaattctggatgatagaaccagaaatggcttttgctgaattaaaagattatatggatgtagcagaagaaatggttaaatatataatcaattatgtaagagaaaatgctccagaagaaatggaattctttaataaatttattgataaaggattattagaaagattagacaatgtagttaattctgattttgcaagaataagctatacagaagctgtagaaatgcttcaaaagtcaggagctcaatttgaatatcctgttgaatggggaatagaccttcaaacagaacatgaaagatatttaacagaagaaatatacaaaaaacctgtatttgtaacagattatccaaaggatataaaagcgttttatatgagaatgaatgatgataataaaactgttgcagcagcagatcttttagttcctggtattggagaaataattggaggaagccaaagagaagaaagacttgatcttcttgaagctagaatggctgaacttggacttaacaaagaagattactggtggtatttagaacttagaaaatatggggaaactaagcatgctggatatggtcttggatttgaaagaatgataatgtacttaacaggtatgagcaatataagagatgtattaccattcccaagaactccaggtgttgctgaattttaa

SEQ ID NO: 10664 - protein, 463 aa, Clostridium botulinum D str. 1873
METVLVKQLYRETEKFQGKEVKISGWVRTLRASNKFGFIEVNDGSFFKNIQVVFGAELENFKEISKYAISSSISVEGEVVITEGAKQPFEIHAKKVVLEGKSDADYPLQKKRHTFEYLRSIAHLRPRSNAFSAVFRVRSLAAYAIHKFFQDQGFVYVHTPIITGSDCEGAGEMFRVTTLDMDNLPKDEQGNIDYKEDFFGKQSNLTVSGQLEAEIYALAFRNVYTFGPTFRAENSNTARHASEFWMIEPEMAFAELKDYMDVAEEMVKYIINYVRENAPEEMEFFNKFIDKGLLERLDNVVNSDFARISYTEAVEMLQKSGAQFEYPVEWGIDLQTEHERYLTEEIYKKPVFVTDYPKDIKAFYMRMNDDNKTVAAADLLVPGIGEIIGGSQREERLDLLEARMAELGLNKEDYWWYLELRKYGETKHAGYGLGFERMIMYLTGMSNIRDVLPFPRTPGVAEF

SEQ ID NO: 10665 - DNA, 1776 bp, Ajellomyces capsulata (strain H143)
  CDS (1)..(1776)
atgctcttatggcgtagatgtctgagcacctctgcctccgctccgacaattgcgggtcaaaaatccccgctgctactacgatgtgcgcagctgttggacacatcccgatcaacctccagaactgctgagacagctactgttgctcctgatgggagcgcaagttccttagacaaccgccaaatccgcgttcgaggtttcattcggtcggtgaggaagcagaaacggtttgcgtttgctgagatctcggatgggtcgacgattaagtcggtgcaggcgattttgacaccagaacaggctgctcggttgtcgactggttctgccgtcgatatttcgggcgtctggcagccttgtcctcctggcaaagaacaaagccatgagcttcatgcgacagaagtcaagataactggggaagcggaccctgaggttagtttcgttccaatcccttgcacagcatgtcgactatccttcactgatacctacacccttccaaaccagcagacatatccaattcaaaagaaataccacagcccagatttccttcgacaaatcccacatcttcggttacggacaccgttcaactccctcttatcccgatttcgatcagaaagcattttccaactgggacaggtattccgtttccagctcggtggctctttcgtgcaggtccaacctccgctgatcacatcgtctgactgtgaaggcgctggggaagtgttcaccgttgtgccaggagataaagtggatggtgcagaagtgggggaattctttcgatcgccaaaatacctcacagtgtcaagccagctacatctcgaggcgtatgcggccgagctgggaaatgtgtgggccctttctcccaccttccgagcagaaaagagcgatacgcctcggcatctaagcgagttctatatgctagaggtagaaatgaactttgtgcaaagcgtagattcgttaacggatattgtcgagtcattaatccgtgaccttacgaaacgactatacgagactccagttgcggaagagatattcacagctaagaggacaggggagtctggcgcggaaaaagttgataagggactacgcctgcgatggttgggtattatggagggtgagaaatggcctcgaattacatataccagcgcgatcgagttgcttcagaaagctgttcaatcgaaggccaccatttttaactttcccccggtctgggaggaaggacttcaacttgagcacgagaaattcatagtcgatgaaatcgggaagggtcgtcctgtattcgtgacccactacccaaaaaaagtgaaaccattttacatggcaccttcagtcgtcgcggacgaatcttcatcttcatcaccagtagaagtaccacatcatgatccactccaaacaagggaaaccgttgcctgctttgatcttctgatgcccgagatcagcgaagttgtcggtggctctattcgtgaacaacgacttccaaatcttatacagaacatgcgtgagcacggacttcttaagaaaaaactcgaagctggttcagacgcagataacgcatcttcttcgacacattcgatatcggagtcgagttcgccagtatatccctacctccaaccggatgaacatctcggctcaattcaatggtacgccgatcttaggagatggggcagtgcgcctcacggcgggtttggacttgggttcgaccgatacctgggatatctggctggtgtttccagtctgagggatgttgttccgtttccacggcattttggacgagctgaatgctga

SEQ ID NO: 10666 - protein, 591 aa, Ajellomyces capsulata (strain H143)
MLLWRRCLSTSASAPTIAGQKSPLLLRCAQLLDTSRSTSRTAETATVAPDGSASSLDNRQIRVRGFIRSVRKQKRFAFAEISDGSTIKSVQAILTPEQAARLSTGSAVDISGVWQPCPPGKEQSHELHATEVKITGEADPEVSFVPIPCTACRLSFTDTYTLPNQQTYPIQKKYHSPDFLRQIPHLRLRTPFNSLLSRFRSESIFQLGQVFRFQLGGSFVQVQPPLITSSDCEGAGEVFTVVPGDKVDGAEVGEFFRSPKYLTVSSQLHLEAYAAELGNVWALSPTFRAEKSDTPRHLSEFYMLEVEMNFVQSVDSLTDIVESLIRDLTKRLYETPVAEEIFTAKRTGESGAEKVDKGLRLRWLGIMEGEKWPRITYTSAIELLQKAVQSKATIFNFPPVWEEGLQLEHEKFIVDEIGKGRPVFVTHYPKKVKPFYMAPSVVADESSSSSPVEVPHHDPLQTRETVACFDLLMPEISEVVGGSIREQRLPNLIQNMREHGLLKKKLEAGSDADNASSSTHSISESSSPVYPYLQPDEHLGSIQWYADLRRWGSAPHGGFGLGFDRYLGYLAGVSSLRDVVPFPRHFGRAEC

SEQ ID NO: 10667 - DNA, 1392 bp, Bryantella formatexigens DSM 14469
  CDS (1)..(1392): transl_table=11
atggatttagtaacagtaagagaaatatacagaaacagagaggcatatctggataaggagattaccgtgggcggctgggtgagaagcgtgcgcgactccaaaaccttcggctttctggtgcttcacgacggtaccttttttgagaccctgcagatagtatttcatgataaaatggataacttccaggaaatctgtaagctgaatgtcggtgcggcagtgattgtaaagggaacgctggttgcaacgccgcaggcgaagcagccgtttgagattcaggcggatgaggtgacagtggagggcggctccgcgccggattatccgctgcagaaaaagcgccacagcgtggaattcctgcgcacgatctcgcacctgcgcccgcgcaccaatatgttccaggcgactttccgcgtgcgctcgctgacggcatacgctatccataaatttttccaggagcgtgactttgtgtatgtacacacgccgctcattaccggaagcgactgtgagggcgctggagagatgttccaggtgacgacgctggatctggaaaatccgccgaaaactgcggacggaaaagtggattacacgaaagactttttcggaaagcagacgaatctgacggtaagcggacagctcaatggagaaatgtatgcgcaggcattccgcaacatttacaccttcggaccgaccttccgcgcggaaaattccaacacgacacgccatgcggcggagttctggatgattgagccggaaattgcctttgcggatttaaaggatgatatgattcttgcggaggacatgctgaaatacgtcatccgctacgtcatggaaaatgcgccggaggagcttgctttcttcaattcctttgtggataagggactgatggagcgtctgaacagcgtggtaaattcgcagttcggtcatgtgacctacacagaagccattgaaattctggaaaagaataacgataaatttgaatataaggtaagctggggctgcgatctgcagaccgagcatgagcggtatcttacggagcaggtgtttaagcgtccggtatttgtgactgactacccgaaggaaatcaaggcgttttacatgaagctgaatgacgacggaaagaccgttgcggcgatggactgccttgttccgggtatcggggaaatcattggcggaagccagagagaggacagctatgaaaagcttttgcagcgtatgcatgagcttggcttaaaggaagaggattaccgtgcctatctcgacctgcgcaaatacggttccacccgtcatgcgggcttcggccttggctttgagcgctgcgtgatgtatcttacgggtgtaagcaacatccgtgacgtcatcccgttcccgcgcactgtcggaaactgcgagggctga

SEQ ID NO: 10668 - protein, 463 aa, Bryantella formatexigens DSM 14469
MDLVTVREIYRNREAYLDKEITVGGWVRSVRDSKTFGFLVLHDGTFFETLQIVFHDKMDNFQEICKLNVGAAVIVKGTLVATPQAKQPFEIQADEVTVEGGSAPDYPLQKKRHSVEFLRTISHLRPRTNMFQATFRVRSLTAYAIHKFFQERDFVYVHTPLITGSDCEGAGEMFQVTTLDLENPPKTADGKVDYTKDFFGKQTNLTVSGQLNGEMYAQAFRNIYTFGPTFRAENSNTTRHAAEFWMIEPEIAFADLKDDMILAEDMLKYVIRYVMENAPEELAFFNSFVDKGLMERLNSVVNSQFGHVTYTEAIEILEKNNDKFEYKVSWGCDLQTEHERYLTEQVFKRPVFVTDYPKEIKAFYMKLNDDGKTVAAMDCLVPGIGEIIGGSQREDSYEKLLQRMHELGLKEEDYRAYLDLRKYGSTRHAGFGLGFERCVMYLTGVSNIRDVIPFPRTVGNCEG

SEQ ID NO: 10669 - DNA, 1404 bp, Legionella drancourtii LLAP12
  CDS (1)..(1404): transl_table=11
atggccgaagtttttaccatcaaagaatgtttgaatggtgcaatcaatgttgatgaacacgttacagtaagaggttgggtaaaaacccgccgtgactccaaagcaggcttgtcttttattagcgtgcatgatggttcatgctttgcccctattcaaatcgttgctacagatggtttagcgaattaccacgatgaaattaccaaactaaatgcaggctgttcacttattgctagcggaaaattagttgcttcccaaggtaaaggtcaatcttttgaaattcaagccgagcagattcaggtcgtgggctgggtagaaaatccagacacttacccaatccaagccaaacgccactcactcgagtttttgcgtgacgttgctcatttacgcccacgtacaaataccttcagtgccgttacgcgtgtgcgtcattgcttatcgcaagccatacatcgtttcttccacgaacaaggttatttttggattcacacgccgattattaccgccagtgactgtgaaggggctggagaaatgttccgtgtttccactttagatttgttgaatattcccaagaatccgcaaggacaaattgactttagcaaagatttctttggcaaagaaacatttcttacggtatcaggccagttaaatctggaagcttattgtatggctatgtctaaggtttatacctttggcccaaccttccgtgccgagaattcgaataccagcaggcacttagcagaattttggatgattgagcctgaggtagcctttgctaccttgagcgatatttgtgatttaagccaaaacatgttgcgttacctgtgcaaggcagtacttaacgagtgcctggatgatatggaatttttcaatcaatttgtagctccaggatgtctcgaacgcctaaaacacattgctgattctgaatttgaagtcatgacctatacggatgccattagagttctggaaaaatcaggccataactttgaattcccagtaagctgggggctggatttacagtcagaacatgaacgctatctagctgaagttcactgcaaaaagccagtaattctcacaaactatcctcaagaaattaaaggcttttacatgcgccttaatgacgatgaaaaaaccgttgccgccatggatgttttagccccaggaattggtgaaattattgggggcagccaacgtgaagagcgtttagatattctggatagacgtattgaagaatgcaatcttaataaagaaagctatcaatggtaccgcgatctacgtcgttatggcaccgttcctcatgccggctttggtttaggctttgaacgtttagtaagctatgtgaccggtttagcgaatgtccgcgacgtgatccctttcccacgcacaccaggacatgctgactactag

SEQ ID NO: 10670 - protein, 467 aa, Legionella drancourtii LLAP12
MAEVFTIKECLNGAINVDEHVTVRGWVKTRRDSKAGLSFISVHDGSCFAPIQIVATDGLANYHDEITKLNAGCSLIASGKLVASQGKGQSFEIQAEQIQVVGWVENPDTYPIQAKRHSLEFLRDVAHLRPRTNTFSAVTRVRHCLSQAIHRFFHEQGYFWIHTPIITASDCEGAGEMFRVSTLDLLNIPKNPQGQIDFSKDFFGKETFLTVSGQLNLEAYCMAMSKVYTFGPTFRAENSNTSRHLAEFWMIEPEVAFATLSDICDLSQNMLRYLCKAVLNECLDDMEFFNQFVAPGCLERLKHIADSEFEVMTYTDAIRVLEKSGHNFEFPVSWGLDLQSEHERYLAEVHCKKPVILTNYPQEIKGFYMRLNDDEKTVAAMDVLAPGIGEIIGGSQREERLDILDRRIEECNLNKESYQWYRDLRRYGTVPHAGFGLGFERLVSYVTGLANVRDVIPFPRTPGHADY

SEQ ID NO: 10671 - DNA, 1392 bp, Clostridium carboxidivorans P7
  CDS (1)..(1392): transl_table=11
atgaaaataacattagtaaaatccttatatagggaaactgaaaatttttccaataaacctgtaaaaatatctggttgggtacgaaccgtaagagattctaaatcatttggttttatagagataaatgatggatcattttttaagaacatccaagtagtttttgacgacagtcttgaaaactttaaagatgtaacaaaacttgctattagttcttctttgtcagttgaaggcactatagtgcttacacctggatcaaaacaaccttttgaaatgaaagctactaaaataactgtagaaggaaaatcttcttcagattacccattacaaaagaaaagacattcacttgaatatttaagaactatagctcatttaagacctagaagtaatactttttcagcagtatttagagttcgttctgtagctgcatttgctgttcataagttctttcaagaaaaaggtttcgtatacgctaatacaccattaataactggaagcgactgcgaaggtgctggagaaatgttcagattaaccactttagatttagaaaacgtgccaaaagacgaaaatggcaaagtagattattcaaaggatttctttggaaaagagacaaatcttacagtaagcggccaattatctgcagaaacttttgctcttgcatttagaaatgtttacactttcggaccaacatttagagctgaaaattcaaatacggcaagacatgctgctgaattctggatgatagaacctgaaatggcctttgcagaattaaaggattatatggacatagctgaagacttagttaagtacataataaaatatgtgcttgcaaatgcacctgaggaaatggagttcttcaactcatttattgataagggattgtttgatagattagataatgttgcaaattcagactttggtagaatttcatatacagaagctgtagacatattgaaaaaatctggccatgaattccaatacccagtagaatggggaattgaccttcaaactgaacatgaaagatatttaactgaaaaagtatttaagaagcctatatttgtaacagattatccaaaggatataaaggcattttatatgagagcaaatgaggatggaaaaacagttgctgctgctgacttacttgtacctggtgttggtgaaatagtaggtggaagtcaaagggaagaaagattagatatattagaaaagagaattgatgaaatgggacttagcaaggaagactactggtggtaccttgaattaagaaaatatggtgaaacaaaacactcaggctttggtttaggatttgaaagaattttaatgtatataactggaatgtctaacataagagatgtaattccattcccaagaacaacaggttctgctgagttctaa

SEQ ID NO: 10672 - protein, 463 aa, Clostridium carboxidivorans P7
MKITLVKSLYRETENFSNKPVKISGWVRTVRDSKSFGFIEINDGSFFKNIQVVFDDSLENFKDVTKLAISSSLSVEGTIVLTPGSKQPFEMKATKITVEGKSSSDYPLQKKRHSLEYLRTIAHLRPRSNTFSAVFRVRSVAAFAVHKFFQEKGFVYANTPLITGSDCEGAGEMFRLTTLDLENVPKDENGKVDYSKDFFGKETNLTVSGQLSAETFALAFRNVYTFGPTFRAENSNTARHAAEFWMIEPEMAFAELKDYMDIAEDLVKYIIKYVLANAPEEMEFFNSFIDKGLFDRLDNVANSDFGRISYTEAVDILKKSGHEFQYPVEWGIDLQTEHERYLTEKVFKKPIFVTDYPKDIKAFYMRANEDGKTVAAADLLVPGVGEIVGGSQREERLDILEKRIDEMGLSKEDYWWYLELRKYGETKHSGFGLGFERILMYITGMSNIRDVIPFPRTTGSAEF

SEQ ID NO: 10673 - DNA, 1386 bp, Propionibacterium sp. oral taxon 191 str. F0233
  CDS (1)..(1386)
atgattaaagaggttattgcctcgcctacattagatcaagaaatcacagttatgggttgggtgcgtacgcgccgtggcaataaagcggtaagcttcattgcactcaatgatggtagctgtatccataatctacaaatcgtagcagatctggctcgcttctcacccgaggttatgcaacaaatcactactggggcatctctggctgtacgaggcaccctcgttgcctctcagggagcaggacaaagcgttgagttacaagctgaagagattaccatattcggcacatgcgaccccaatagctaccctctacaaaaaaaagggcattccctagagttccttcgcgatatagcctatctgcgccctcgtaccaatacctttggtgccatactgcgtatccgacacaatatggctattgccatccacgagtttttccataagaagggatactactatgtgcacacccccatcattacctctagtgatgcagaaggagcagggcaaatgttccgcgtaacgactctaaacctagataaattacctcttaacaaggccggcgaagtggattacaaaaaagacttcttcggtaaacctaccgctcttaccgtctcaggacaactagagggagagctggcagcccttgcccttggagggatttatacttttggtcccactttccgtgcagaaaactccaatacacctcgtcaccttgctgagttttggatgattgagcccgaaattgcgttcttcgacgtgcacgacaacatggaccttgcagaggagtttaccaagcattgtgtacagtgggctcttgataattgtgcggacgatttggctttcctctcggagcacttcgataagggactaatggatcgtcttcgcttcgtccttgccaatagctacgagcgcatcacctatacgcaagggattgagatactcgaaaaggccattgccgaagggcataaatttgaattccccgtgtactggggcgtagaccttgccagcgaacatgagcgctaccttgtggagcagcacttccaaaagcccgtaatcatgaccgactatccgaaggagattaaggccttctatatgaagcaaaacgaggatggcaaaacggtacgaggcatggacgttctcttccctctaatcggagaaattatcggcggtagtgagcgtgaagctgactttgacaaacttcgcacccacgctcaagagatgggagttcccgagaaagatatttggtggtacctagatactcgtcgctttggcacagtgcctcatgccggctttgggttaggcttcgagcgtctccttctcttcgtaacagggatgagcaacatccgcgatgttatccccttccctcgcaccccaaacaatgccgaattctag

SEQ ID NO: 10674 - protein, 461 aa, Propionibacterium sp. oral taxon 191 str. F0233
MIKEVIASPTLDQEITVMGWVRTRRGNKAVSFIALNDGSCIHNLQIVADLARFSPEVMQQITTGASLAVRGTLVASQGAGQSVELQAEEITIFGTCDPNSYPLQKKGHSLEFLRDIAYLRPRTNTFGAILRIRHNMAIAIHEFFHKKGYYYVHTPIITSSDAEGAGQMFRVTTLNLDKLPLNKAGEVDYKKDFFGKPTALTVSGQLEGELAALALGGIYTFGPTFRAENSNTPRHLAEFWMIEPEIAFFDVHDNMDLAEEFTKHCVQWALDNCADDLAFLSEHFDKGLMDRLRFVLANSYERITYTQGIEILEKAIAEGHKFEFPVYWGVDLASEHERYLVEQHFQKPVIMTDYPKEIKAFYMKQNEDGKTVRGMDVLFPLIGEIIGGSEREADFDKLRTHAQEMGVPEKDIWWYLDTRRFGTVPHAGFGLGFERLLLFVTGMSNIRDVIPFPRTPNNAEF

SEQ ID NO: 10675 - DNA, 1389 bp, Eubacterium saphenum ATCC 49989
  CDS (1)..(1389): transl_table=11
atggatggcgttggcagaaatacgataaatacggcaaaagaactttatgataaggtagatgcgctggtggacggcgaaaagattgtgatgcaaggttgggtaaggagcgtaagggattccagcaagcttgcttttatggagatcagcgacggaagtcattttaaaccggttcaggcggtgcttgaagccgatatgaagggcttcgatgaagcaaaaaaacttcccatagctacagccgtagaagtgacggggagcctcgtgctcacacctgattccaaacagccgtttgagcttaaggccgatcaggttaaagtgcttgcaggagcagacctcatgtatccgctacagaagaaaagacacagcatggaattcttaagagatattgcatacctaaggccgagagcaaatacatttcaggccgtatttaggcttagatccgtaatagctcatgcgcttcattgcttttttcaggatagaaattttgtttattcgcacacccctataattacggcaaacgattgcgagggagcaggcgaactcttcagggtcactactttggagtcgaatgaagaggatttcagcaaggacttttttgcagaaaagacaggccttacggtaagcgggcagcttgaggctgaggctatggcgcttgcattcaggaacgtatataccttcggccccacattcagggcggaaaattcaaataccccaaggcatgcatccgaattctggatgatagagcctgaaattgcattcgctgatctcagcgatgatatggacttggctgaagatatgataaagcacatcatcaatgcggcatttgaaaaggcgccgtttgagatgaaattcttcgacagcttcattgaaaagggtataattaaaagacttgaagctgtgatgaatgcagactttaagaggatgacgtatacagaagccatagatgttttaaagaaggctaagaagccgtttgaatatcctgtagagtggggacttgatcttcagacggaacacgagagatatctgtcggaagaagttatacgagggcctgtatttgtgacggactaccctagccaaataaaggcgttttacatgagagaaaatgacgatggcaaaaccgtagcagcctgcgatcttttggtgccgggtgtcggcgagataataggaggcagccagagagaagagagacttgatattctggataggcgaatgcaggatgcaggaataaatccggaagaactgtcttggtatagagagcttagaaaatatggcggtgtgaagcatgcgggattcggactcggatttgataggataattatgtatctcacaggaatgaaaaacatcagggatgtaataccgttcccacgtacgcctagaagcgcattattctaa

SEQ ID NO: 10676 - protein, 462 aa, Eubacterium saphenum ATCC 49989
MDGVGRNTINTAKELYDKVDALVDGEKIVMQGWVRSVRDSSKLAFMEISDGSHFKPVQAVLEADMKGFDEAKKLPIATAVEVTGSLVLTPDSKQPFELKADQVKVLAGADLMYPLQKKRHSMEFLRDIAYLRPRANTFQAVFRLRSVIAHALHCFFQDRNFVYSHTPIITANDCEGAGELFRVTTLESNEEDFSKDFFAEKTGLTVSGQLEAEAMALAFRNVYTFGPTFRAENSNTPRHASEFWMIEPEIAFADLSDDMDLAEDMIKHIINAAFEKAPFEMKFFDSFIEKGIIKRLEAVMNADFKRMTYTEAIDVLKKAKKPFEYPVEWGLDLQTEHERYLSEEVIRGPVFVTDYPSQIKAFYMRENDDGKTVAACDLLVPGVGEIIGGSQREERLDILDRRMQDAGINPEELSWYRELRKYGGVKHAGFGLGFDRIIMYLTGMKNIRDVIPFPRTPRSALF

SEQ ID NO: 10677 - DNA, 1389 bp, Faecalibacterium prausnitzii A2-165
  CDS (1)..(1389): transl_table=11
atggaacgtactgagatcgtctcgctgtacaagaacactcccgccgacggcacggtggtcaccgtgtgcggctgggccaagaacatccgtgattccaagaacatcggcttcatcgccctgtcggacggcggctgcttcaagaccctgcaggtcgtgctggaggcaggcaagctggcaaactacgaggaggtcatccacaccggcctgtacagcagcctgcgcatcgtgggccgcatcgtcctgaccccgcaggcaaagcagccctttgagctgaacgccgacagcgtggagatcctgggcgactgccccgcagacgagtaccccctgcagaaaaagaagatgagcatggagtatctgcgcaccatgcccaccctgcgcccccgcaccaacactttcaacgccgcattccgcgtgcgcagcgtggctgcctacgccatccacaagttcttccaggagaatggcttcatctactcccactctcccctgctgaccgcttccgactgcgaaggtgccggtgagatgttccaggtcaccacgctggacctgcagaacgtgcccaagaacgaggacggcaccgtggattacagccaggacttctttgagaagcccgtcaacctgaccgtttccggccagctggaggctgaggccatggccatggcctttggcaaggtgtacaccttcggccccaccttccgtgcggagaagagctttaccacccgccacgccgccgagttctggatgatcgagcccgagatggccttctgcgacctgaagggctacatggacaccgccgaggccatgaccaagttcgtcatctgctacgtgctggacaactgccccgatgagatggccttcttcaaccagttcatcgacaagggcctgatcgagcgcctggagctggtggcaaacagcgagttcggccgcatcacctacactgaggccattgagatcctgaagaagaacaacaagaagttccagttccctgtggagtggggcgtggatatccagaccgagcacgagcgctacctgaccgaggtcgtgttcaagaagcccgtctttgtcaccgattaccccaaggagatcaagagcttctacatgaagatgaacgcggacggcaagaccgtggccgcagctgatatgctggtgcccggcatcggcgagctgatcggcggcagccagcgcgaggagaactacgacaagctggtagcccgcatggacgagctgggcatggacaagaccaactacgagtggtacctgaacctgcgcaagttcggcggcgtggagcacgccggttacggcctgggcttcgagcggatgatcatgtacctcacgggcatccagaacatccgtgacgtgctgcccttcccccgcaccgcttacggtttctaa

SEQ ID NO: 10678 - protein, 462 aa, Faecalibacterium prausnitzii A2-165
MERTEIVSLYKNTPADGTVVTVCGWAKNIRDSKNIGFIALSDGGCFKTLQVVLEAGKLANYEEVIHTGLYSSLRIVGRIVLTPQAKQPFELNADSVEILGDCPADEYPLQKKKMSMEYLRTMPTLRPRTNTFNAAFRVRSVAAYAIHKFFQENGFIYSHSPLLTASDCEGAGEMFQVTTLDLQNVPKNEDGTVDYSQDFFEKPVNLTVSGQLEAEAMAMAFGKVYTFGPTFRAEKSFTTRHAAEFWMIEPEMAFCDLKGYMDTAEAMTKFVICYVLDNCPDEMAFFNQFIDKGLIERLELVANSEFGRITYTEAIEILKKNNKKFQFPVEWGVDIQTEHERYLTEVVFKKPVFVTDYPKEIKSFYMKMNADGKTVAAADMLVPGIGELIGGSQREENYDKLVARMDELGMDKTNYEWYLNLRKFGGVEHAGYGLGFERMIMYLTGIQNIRDVLPFPRTAYGF

SEQ ID NO: 10679 - DNA, 1389 bp, Anaerococcus vaginalis ATCC 51170
  CDS (1)..(1389): transl_table=11
atgaaattaagagagattaaaaaagatgttgaaaaatacatcgaccaagaaattatagttgaaggatggattagacaggcgcgatttacaaaaaatgtcggctttatagaattaaatgatggaacaatttttaaaaaccttcaaattgttgttggaaaagaattagaaaattttgaagatttacaaaaagaacatctttcagcttcattaaaaatcaaaggaattcttgtaaaaacaaataatgccaaacaagcctacgaacttcaagcaaaatctgtagaagttttaggtcacagtgatgagaaatttcctattcaaaaacaaaaacaatctcttgaatatatgagaactattcctcatttaagagctagaactaatacttatagggcggtttttagattaagatcaaaacttgcttatgctcttcataaatttttccaagaaagaggatttatttatttaaatgctccattaattactgcatctgatacagaaggtgctggagaaatgttccaagttaccactcaaaatttagataaattagatttaaataaggatggaaaagttgattattctaaagatttctttggaaaaaaatcttatttaacagtttcaggacaacttgaggcagaagattatgctcttgccttatctaatatttatacttttggtccaacttttagggctgaagaatcaaacacaccaagacacgctgcggaattttggatgattgaaccagaaattgcttttgcagattataatgtgtgcatggatgtggctgaagatatgatgaaatatatgataagttttgttttagaaaattgtaaggatgaaattgaatttttcaacgaaagagttgatgatactttgattgaaagacttacaaaagttaaagatgcaaaatttgcaagaattacttatactgaggctatagaaaaattacaagaagctgatgttgattttgaatatcctgtaaaatggggaatggatcttcaaactgagcatgaaagatatttatcagaaaaaatagttgatggtccagtttttgttacagattatccaaaagatataaaggcattttatatgagaagaaatgaagatggaaaaactgttgcagcttttgatatgttagttcctgctgtaggagaattaattggtggaagtcaaagggaagaaagatatgatgagcttgtaaaatctatggaagataatggactaaaacttgaagattatcaaaattatttagatttaagaaaatatggaacagtagttcactcaggttatggtcttggatttgaaagagcagtaatgtatcttacaggaatgaaaaatattcgtgacgtaatcccttacccaagaacagtaaaatcttttgcaacaaaaaactaa

SEQ ID NO: 10680 - protein, 462 aa, Anaerococcus vaginalis ATCC 51170
MKLREIKKDVEKYIDQEIIVEGWIRQARFTKNVGFIELNDGTIFKNLQIVVGKELENFEDLQKEHLSASLKIKGILVKTNNAKQAYELQAKSVEVLGHSDEKFPIQKQKQSLEYMRTIPHLRARTNTYRAVFRLRSKLAYALHKFFQERGFIYLNAPLITASDTEGAGEMFQVTTQNLDKLDLNKDGKVDYSKDFFGKKSYLTVSGQLEAEDYALALSNIYTFGPTFRAEESNTPRHAAEFWMIEPEIAFADYNVCMDVAEDMMKYMISFVLENCKDEIEFFNERVDDTLIERLTKVKDAKFARITYTEAIEKLQEADVDFEYPVKWGMDLQTEHERYLSEKIVDGPVFVTDYPKDIKAFYMRRNEDGKTVAAFDMLVPAVGELIGGSQREERYDELVKSMEDNGLKLEDYQNYLDLRKYGTVVHSGYGLGFERAVMYLTGMKNIRDVIPYPRTVKSFATKN

SEQ ID NO: 10681 - DNA, 1395 bp, Clostridium papyrosolvens DSM 2782
  CDS (1)..(1395): transl_table=11
atgagttattcagagataaaaaaactattcagaacgccggatgaatatattggaaaaactataacagttccgggatgggtaaaaacagtccgggattcaaaaacttttggttttattgagttgaacgacggaactttctttagaaaccttcaaattgtatttgaagaaggcaagcttgaaaactttaaagaggttgcaaaactttccgtaggatcctccatagaagttgagggtatacttgtggagactccaaacgcaaaacagccctttgaattaaaggcaaataggatatccattgagaacctgtgcccggcggactaccagcttcagaagaaaagacattcctttgaatttttaaggacaatctcacatttaagaccaagaacaaacaccttttctgctgttttcagagtcagatccctggctgctttcgccatacacaaattctttcaggagagaggctttgtttatgtccatactcccctaataacaggaagcgactgtgagggtgcaggacagatgttcagagttaccacactggatatgaaaaatcctccaagaactgaaaatggtgatatagactattcacaggatttctttgaaaaggaaacaagtcttacggtaagcggtcagttaactggtgaagcctatgctatggcctttaagaacatatacaccttcggacctacttttagggctgaaaactccaacactgcaaggcatgcagcagaattctggatgattgaaccggaaattgctttttctgatttgaaggatgacatgatgcttgcagaagatatgcttaagtatgttatcaattatgttgttgaaaatgcacctgaagagatgcaattctttaatagctttgtagataaaggtcttttagaaagattggataacgttgttaattccgatttcgcacacataacttatacagaagctattgagatattgaaaaagaacaaagacaagtttgaataccctgttgaatggggtgctgatcttcaaacagagcatgaaagatatattacggagcaggtatacaagaagcctgtatttgttaccgattatccaaaagagataaaagcattttacatgaggataaacgatgacaacaagactgttgcggctatggaccttctggttcccggtgtaggtgagataataggtggaagccagagggaagagcgtctggatattcttgaaaagaagatggatgacatgggacttagcaaggaagattaccagtggtatcttgaccttcgtaaatacggaggaacaaaacatgccggcttcggtcttggttttgagagagctataatgtatctcacaggaataacaaatatcagagatgtaataccttttgcaagaaccacaggcagttgcgaattttag

SEQ ID NO: 10682 - protein, 464 aa, Clostridium papyrosolvens DSM 2782
MSYSEIKKLFRTPDEYIGKTITVPGWVKTVRDSKTFGFIELNDGTFFRNLQIVFEEGKLENFKEVAKLSVGSSIEVEGILVETPNAKQPFELKANRISIENLCPADYQLQKKRHSFEFLRTISHLRPRTNTFSAVFRVRSLAAFAIHKFFQERGFVYVHTPLITGSDCEGAGQMFRVTTLDMKNPPRTENGDIDYSQDFFEKETSLTVSGQLTGEAYAMAFKNIYTFGPTFRAENSNTARHAAEFWMIEPEIAFSDLKDDMMLAEDMLKYVINYVVENAPEEMQFFNSFVDKGLLERLDNVVNSDFAHITYTEAIEILKKNKDKFEYPVEWGADLQTEHERYITEQVYKKPVFVTDYPKEIKAFYMRINDDNKTVAAMDLLVPGVGEIIGGSQREERLDILEKKMDDMGLSKEDYQWYLDLRKYGGTKHAGFGLGFERAIMYLTGITNIRDVIPFARTTGSCEF

SEQ ID NO: 10683 - DNA, 1383 bp, Erysipelothrix rhusiopathiae ATCC 19414
  CDS (1)..(1383): transl_table=11
atgatttcatatttaacaatacgagagtgctatgacctgttgtcatatggctcggaaattgaagttgatgcaattgaatttgtgcaattgcaaggttgggttagaactaaccgtaaaggaaaaaatgtagggttcatcgagttaaatgatggaacttattttagaagtgcacaatgtgtttatgcagcagatttagataactatgatgaaataggtaaatacaatacaggtacagcgattacggtaactggattgtttaaagttactccggatggaaaacaaccttttgaaatcgaagttaaagaagttaaattagaaggcgaatgcagttcggattatccgttacagaaaaaacgtcatagttatgaatatttaagagaaattgcgcatttacgcgtaagaacaaactcatttatggcagtgttccgtgtccgttctgttctttcaatggcaatccatgaatttttccaaaatcaagggtttgtttatgtgcatacaccagtaattacaggaaatgatgctgagggtgctggtgaagcatttgtcgttacaacacgtgatgatgctaaatatgaaaaagatttctttggaaaaaaagcaagtctaaccgtatctggtcaattacatgctgaagcttttgcactcgcatttagagatgtatatacttttggtcctacttttagagctgaaaattcaaatacagcacgccatgcaagtgaattttggatggttgagccagagattgcatttgcagatcttgaagataatatgaatttaatagaagatctcgttaaatattgcatcgagtatgtgcttgagaatgctccagaagaaatgaaatttttcaatgagcgaattgataccacgctattagaacgacttaacgaattactttcaagtgaattcaaacgaatgacgtatacagaagcggttgaattacttgaaaaacaaaatgaccgttttgaatataaggttgagtggggtacggatttacaatctgaacatgaacgttatattagtgaagaagttgttaagggtcctgtatttattacagattatccaaaagaaattaaatccttctatatgcgacttaatgaagatggaaaaaccgttgcagcttgtgatttattagttccacatgttggggaacttgtaggtggatcacaacgtgaagaacgtcttgatgttcttgaaagacgaatggaagagttggatattccaaaagaaagtcttgaatggtatttagatttaagacgttatggcggtgtcaaacattcaggttttggaataggattcgagcgcttcttgatgtatattacttcaatgacaaatattcgtgatgtagtaccatttgcgcgtacaccacgtcatttagattattag

SEQ ID NO: 10684 - protein, 460 aa, Erysipelothrix rhusiopathiae ATCC 19414
MISYLTIRECYDLLSYGSEIEVDAIEFVQLQGWVRTNRKGKNVGFIELNDGTYFRSAQCVYAADLDNYDEIGKYNTGTAITVTGLFKVTPDGKQPFEIEVKEVKLEGECSSDYPLQKKRHSYEYLREIAHLRVRTNSFMAVFRVRSVLSMAIHEFFQNQGFVYVHTPVITGNDAEGAGEAFVVTTRDDAKYEKDFFGKKASLTVSGQLHAEAFALAFRDVYTFGPTFRAENSNTARHASEFWMVEPEIAFADLEDNMNLIEDLVKYCIEYVLENAPEEMKFFNERIDTTLLERLNELLSSEFKRMTYTEAVELLEKQNDRFEYKVEWGTDLQSEHERYISEEVVKGPVFITDYPKEIKSFYMRLNEDGKTVAACDLLVPHVGELVGGSQREERLDVLERRMEELDIPKESLEWYLDLRRYGGVKHSGFGIGFERFLMYITSMTNIRDVVPFARTPRHLDY

SEQ ID NO: 10685 - DNA, 1422 bp, Treponema vincentii ATCC 35580
  CDS (1)..(1422): transl_table=11
atgattacattgattaaagatatactgatgcaaaaaccggacggacaagaggttgccgtctacgggtgggtgcgtaccaaacgtgaaacaaagaaccttatttttattcaggtaaacgacggttcatgctttgcatccattcagcttacctttgaccgcgataagggaattgattcccaaaccgaaaaagaactaagcaggattacgaccggcgcttcgattaaagcaaccggcgcattggttgaatctcccgcatcgggacaggctgtagaagttgccgcaaaaacgatttttgtgtacggcgaggcttccggcgaaacgtatccgctgcaaaaaaagcggcacacatttgagtttttgcgggacatagcccacttgcgcgcccgtaccaatacgttcggagcggttgcccgtgtgcggaatcaaatggcatttgccgtgcataacttctttcaagaacacggctttcagtacgtgcatacgccgctgattaccgcctccgacagcgaaggcgccggagagatgtttcaggtaacgacgctcgatatgcaggagattgtgcgcaaggcgctcaaggataaagccgatcctgctacctttatcctcgattataagcaggacttttttgagcgggctgcctatttgacggtttccggtcagcttgagatagaaacgtatgcaacggcgctttcccgggtgtataccttcgggccgacattccgtgcggaaaactcaaacacgacgcggcacctctccgaattttggatgatagaaccggagatgtcgtttttccggcttgaggacaacatggatttagcggagaaatttgttgtctatctccttaaatgggcgttaactcattgcagagccgaccttgaattctttaatgcacagattaaaccgggtcttatcgaaacgctggaacacgtggtggagtccaagtttacccgcatcacttacaccgatgcggtgaaagaacttgaaaaacacgcttccgagtttgaatttaaaccgttctggggctgcgatcttcaaagcgagcacgaaaaatatttgaccgaacaggtgtttaaaggccccgttatcgtaacggattatcccaaggaaattaaagccttttatatgaagcaaaacgatgacggcaaaacggtgagggcgatggacgttctggtgccgggacttggcgagattatcggcggttccgagcgggaggataatcttgctgcgcttgaaacccgtatgaacgagcttgggcttgatatgaaaaactattggtggtatttggatttacgccgttacggtagcgtacctcattcgggtttcggcctcggttttgaccggctgctcctctatgttaccggaatggcgaatatccgcgatgttatcccgtatccgcgcactcccaaatccgcggaattttaa

SEQ ID NO: 10686 - protein, 473 aa, Treponema vincentii ATCC 35580
MITLIKDILMQKPDGQEVAVYGWVRTKRETKNLIFIQVNDGSCFASIQLTFDRDKGIDSQTEKELSRITTGASIKATGALVESPASGQAVEVAAKTIFVYGEASGETYPLQKKRHTFEFLRDIAHLRARTNTFGAVARVRNQMAFAVHNFFQEHGFQYVHTPLITASDSEGAGEMFQVTTLDMQEIVRKALKDKADPATFILDYKQDFFERAAYLTVSGQLEIETYATALSRVYTFGPTFRAENSNTTRHLSEFWMIEPEMSFFRLEDNMDLAEKFVVYLLKWALTHCRADLEFFNAQIKPGLIETLEHVVESKFTRITYTDAVKELEKHASEFEFKPFWGCDLQSEHEKYLTEQVFKGPVIVTDYPKEIKAFYMKQNDDGKTVRAMDVLVPGLGEIIGGSEREDNLAALETRMNELGLDMKNYWWYLDLRRYGSVPHSGFGLGFDRLLLYVTGMANIRDVIPYPRTPKSAEF

SEQ ID NO: 10687 - DNA, 1401 bp, Pantoea sp. At-9b
  CDS (1)..(1401): transl_table=11
atgagcgtagtgcctgtagcggatgtactgcacggccgggtcgcggttgacagtgaagtcaccgtgcgtggttgggtgcgtacccgaagagattccaaagccggtctttcctttatcgccgtttatgacggttcctgctttaatcccgttcaggctgtcgtcaataattctctgaataattatcaggacgaagtgctgcgtctgaccacgggctgctcagtgattgtgaccggcaaagtggtggaatcaccgggcgaaggccaggcgtttgaactgcaagcgactcaggttgaggtggtgggctgggtggatgatccggacacctatccgatggcggccaaacgtcacagcattgaatacctgcgtgaagtggcgcacctgcgtccgcgcaccaacctgattggcgcggtggcacgtacccgtcacaccctggcgcaggcgctgcatcgcttcttccacgaaaacggttatttctgggtttccacgccgctgatcaccgcgtccgacaccgaaggtgccggtgaaatgttccgcgtctcgacgctggacatggaaaatctgccgcgtgacccgcagggcaaagtcgattacgacaaagacttctttggtaaagaagccttcctgacggtgtcaggccagctgaacggcgaaacctacgcctgtgcgctgtcaaaaatctacaccttcggtccgaccttccgtgctgagaactccaacaccagccgtcacctggctgaattctggatgctggagccggaagtggccttcgccacccttgatgatgcagcggccctggcggaagccatgctgaagtatgtattcaaggccgtgctggaagagcgtgctgacgacctggcgttctttgccgagcgcgtagacaaagatgcgatttctcgcctggaacgttttgttaatgcagatttcgcacaggtggactacaccgatgccatcgagattttgctgaaaagcgggcagaacttcgaaaatccggtctcctggggcgtcgatctgtcatcagaacacgagcgttacctcgccgagaagcacttcaaagcgccggtggtggtgaagaactatccgaaagatatcaaagcgttctacatgcgtatgaatgacgatggtaaaaccgtggcggcgatggatgtcctcgctccgggtatcggggaaatcatcggtggttcacaacgtgaagagcgtctggatgtcctggatgcacgtctggcggaaatgggtctgaacaaagaagattactggtggtaccgtgacttacgtcgctacggcaccgtgccacactccggcttcggtttaggtttcgaacgattaatcgcctatgtcaccggcgtacaaaatgtaagggatgttatcccgttcccacgtacaccgcgtaatgccaatttctaa

SEQ ID NO: 10688 - protein, 466 aa, Pantoea sp. At-9b
MSVVPVADVLHGRVAVDSEVTVRGWVRTRRDSKAGLSFIAVYDGSCFNPVQAVVNNSLNNYQDEVLRLTTGCSVIVTGKVVESPGEGQAFELQATQVEVVGWVDDPDTYPMAAKRHSIEYLREVAHLRPRTNLIGAVARTRHTLAQALHRFFHENGYFWVSTPLITASDTEGAGEMFRVSTLDMENLPRDPQGKVDYDKDFFGKEAFLTVSGQLNGETYACALSKIYTFGPTFRAENSNTSRHLAEFWMLEPEVAFATLDDAAALAEAMLKYVFKAVLEERADDLAFFAERVDKDAISRLERFVNADFAQVDYTDAIEILLKSGQNFENPVSWGVDLSSEHERYLAEKHFKAPVVVKNYPKDIKAFYMRMNDDGKTVAAMDVLAPGIGEIIGGSQREERLDVLDARLAEMGLNKEDYWWYRDLRRYGTVPHSGFGLGFERLIAYVTGVQNVRDVIPFPRTPRNANF

SEQ ID NO: 10689 - DNA, 1614 bp, Aspergillus nidulans FGSC A4
  CDS (1)..(1614)
atgcagacatggcggcggaccttcgtcacgtcgcttcccaagctaaatcataggcctccagccgcgacaagcccgacgcttctccgatgcaaccaggtcctccaaagcagccgtcaagagacctgcagtcttgaagaccaggaaatcaggctacacggcttcgttcgctcagttcgcaagcagaagcgcttcgcgtttgcggaaatttccgatgggaccgctgtcgaaggcatacaggcgatattgaaacctgcgcaggcagcagaactatcgaccggaacagcgattgagatatcaggtatatggaaggcgtgcccgcctggcaaggaacagagccatgagctgcaggcgacctcggtgaacattgtgggcgcagcagagccggagacctatcctatccagaaaaagtaccacagtccggaattccttcgtcacatcccccacctccgctttcgaacacccttgaacgccctcctcgcccgcttccgatccgaatgcctataccaacttggtaatgttttccgcggcgctccaaacggcggctttgtacaagtccacccgccggtcataacgtcttccgattgcgagggcgcgggcgagaccttcgcggtcattccgcgcgagacactgataaagggtctcccaaaggaggagcacgaccacttcttccgggcgcctaagtatcttaacgtatcgtcgcaactccatctagaagcctacgcagcggaactggggaacgtctggacgttgtcgcccatgttcagggctgagaagagcgataccccgcgccatcttagcgaattttacatgctcgaagccgaggtcaattttctgtctgaccttgacgcgctgaccgacacagttgagtatcttctgcgtgacctcacgcgccgactctatgatacgccagcggcacaggagattctctccatcaagcgtgacaagggcccggaaacccaggattcaggggaacagatcgaccttcatcagcgatgggccgacctgatgtccggttccaaatggcgctgcataacctactccgacgccattgcggccctccaggaggctgtatcccaaggaaaggcagcgtttgagttttcacctacctggaccggcggcctccagctcgaacacgagcagtacattgtcaacactcttaacaacggccagcctatcttcgtcacagactacccgaaagtcatcaagccgttctacatggcgccctcgcacactcagtccaaccccaaagcggaaggggaaacagtcgcctgcttcgatcttctcctccctgaagtgagcgaagtcgccggcggctcgctaagagaacaccgtctgcccgaactgatccagaacatgcgcgagcacaacctcatcaagacctcgccctccaactcagaggaggaagcgaatcagggggaagcgccatacccccatcttctcccgggggaagatctgagtcatttacagtggtacgcggatctgcggagatgggggtccgcaccgcacggcgggtttggactgggctttgatcggttcttgggctatttgactggtgtgcagagtatacgggacacggttgcgttcccgcggtactttggacgcgcagattgttag

SEQ ID NO: 10690 - protein, 537 aa, Aspergillus nidulans FGSC A4
MQTWRRTFVTSLPKLNHRPPAATSPTLLRCNQVLQSSRQETCSLEDQEIRLHGFVRSVRKQKRFAFAEISDGTAVEGIQAILKPAQAAELSTGTAIEISGIWKACPPGKEQSHELQATSVNIVGAAEPETYPIQKKYHSPEFLRHIPHLRFRTPLNALLARFRSECLYQLGNVFRGAPNGGFVQVHPPVITSSDCEGAGETFAVIPRETLIKGLPKEEHDHFFRAPKYLNVSSQLHLEAYAAELGNVWTLSPMFRAEKSDTPRHLSEFYMLEAEVNFLSDLDALTDTVEYLLRDLTRRLYDTPAAQEILSIKRDKGPETQDSGEQIDLHQRWADLMSGSKWRCITYSDAIAALQEAVSQGKAAFEFSPTWTGGLQLEHEQYIVNTLNNGQPIFVTDYPKVIKPFYMAPSHTQSNPKAEGETVACFDLLLPEVSEVAGGSLREHRLPELIQNMREHNLIKTSPSNSEEEANQGEAPYPHLLPGEDLSHLQWYADLRRWGSAPHGGFGLGFDRFLGYLTGVQSIRDTVAFPRYFGRADC

SEQ ID NO: 10691 - DNA, 1404 bp, Bacteroides finegoldii DSM 17565
  CDS (1)..(1404): transl_table=11
atggaaaagattggtagaacaaaaattgttgatctgttgaagcgcacggatattggcgctatggtcaatgtgaaaggatgggttcgcacccgcagaggtagcaaacaagtaaactttatcgcactgaatgacggttctacaataaataatttgcaggtcgtagtagacttggctaatttcgacgaagagatgttgaagcagatcaccaccggcgcttgtatcagcgtgaacggggaaatggtagaatcagtaggttccggccagaaggtggaagtgcaggctcgtgaaatcgaagtgctgggtacttgcgacaatacatatccattgcagaagaaaggtcattccatggaattcttgcgtgagatagctcatttgcgtccgcgtaccaatacatttggtgctgtgttccgcatccgccacaatatggcgatcgctatccataagttcttccatgaaaaaggattcttctatttccatacaccgatcattacggcttccgactgcgaaggtgccggacagatgttccaggtgaccaccatgaacttgtatgacttgaagaaaaacgaagaaggctctatcatttatgatgacgatttctttggcaaacaggcaagtctgacagtctccggtcagttggaaggtgagttggctgctacggctttgggatctatttacacattcggtcctacgttccgtgccgaaaactccaatactccccgtcacttggcagagttctggatgattgaaccggaagttgctttcaacgacattacagataatatggacttggctgaagagttcatcaaatactgtgtgagatgggcgttggataactgtgcggatgatgtgaagttcctgaacgatatgttcgacaagggcttgattgagcgtctgcaaggtgtattgaaagatgattttgttcgtctgccctatacagacggtatcaagattctggaagatgccgtagcgaaaggtcataagttcgagttccccgtttactggggggtggacttggcttccgagcacgaacgctacttggtggaagagcacttcaaacgtccggtcatcctgactgactatccgaaggaaatcaaagccttctatatgaagcagaacgaggatggcaagacggtacgtgcgatggatgttcttttcccgaagatcggtgaaattatcggtggttctgaacgtgaatcggactacaacaagttgatgacccgtatcgaagaacttcacattccgatgaaggatatgtggtggtatctggatacgcgtaagttcggtacctgtcctcattccggtttcggactgggttttgaacgcctgttgctctttgtaacgggtatgtccaacatccgtgacgtgataccgttcccgcgtacaccgcgaaatgctgaattctaa

SEQ ID NO: 10692 - protein, 467 aa, Bacteroides finegoldii DSM 17565
MEKIGRTKIVDLLKRTDIGAMVNVKGWVRTRRGSKQVNFIALNDGSTINNLQVVVDLANFDEEMLKQITTGACISVNGEMVESVGSGQKVEVQAREIEVLGTCDNTYPLQKKGHSMEFLREIAHLRPRTNTFGAVFRIRHNMAIAIHKFFHEKGFFYFHTPIITASDCEGAGQMFQVTTMNLYDLKKNEEGSIIYDDDFFGKQASLTVSGQLEGELAATALGSIYTFGPTFRAENSNTPRHLAEFWMIEPEVAFNDITDNMDLAEEFIKYCVRWALDNCADDVKFLNDMFDKGLIERLQGVLKDDFVRLPYTDGIKILEDAVAKGHKFEFPVYWGVDLASEHERYLVEEHFKRPVILTDYPKEIKAFYMKQNEDGKTVRAMDVLFPKIGEIIGGSERESDYNKLMTRIEELHIPMKDMWWYLDTRKFGTCPHSGFGLGFERLLLFVTGMSNIRDVIPFPRTPRNAEF

SEQ ID NO: 10693 - DNA, 1404 bp, Prevotella tannerae ATCC 51259
  CDS (1)..(1404): transl_table=11
atggaaacaatcaaaaggacaaaaataatcgatgtcttaaagcgtacagacttcgatacagtcgtaaacgttagaggttgggtaagaaccaaacgaggaagcaagaatgtaatcttcatcgccttaaatgatggctctactattaacaatgtccaaattgtagccgacacagaagcatttgatgctgagttagtcaaggatattacgactggtgcttgtttaagcgtcaatggcgctttagttcaaagccaaggctctggacaggtagtcgaaattcaagccaaggagattgaaatcttaggaacttgcggcagcgatttcccaatgcaaaagaaggggcaatcatttgagtatatgcgccaatacgctcatatgcgtttgcgaacgaacacctttggagctgtcttccgcattcgccataatatggcaatggccatccatcattatttccatgagcatggtttcttctactttcatacaccgattatcacagctagcgattgtgaaggtgcaggtcaaatgtttcaagtaacgaccaagaacttgtatgacctgaaaaaggatgagaatggaaagattgattattcggatgacttcttcggcaaaccaactagtttaactgtaagcggccagcttgaaggagagttgggtgcaacatctttaggtgcaatctacacttttggcccgacattccgagctgaaaactccaatacgccgcgccacttggctgagttttggatgattgagccagaagttgccttcaatgacattaccgacaatatggatcttgccgaagacttcttgaaatattgtattcaatgggccttcgacaactgccaggacgacttaaacttcctcaacaagatgatcgacaacacgctgatagatcgtctgcacttcgtcttaaagaatgagtttgtacgcctttcttattctgaaggaatcgagatacttgatcaagcagtcaaagcaggcaagaagtttgagttccccatctattggggcgttgatttagccagcgaacacgagcgctatcttgtagaagagcacttcaagcgccccgtcatcctaaccgactaccccaaagagatcaaggctttctatatgaagctcaacgaagatgggaagacggttcgcgcaatggacgtcttgttcccgcagattggagaaatcattggcggtagcgagcgtgaagccgactatgataagctccaaacgcgcatccaagagatggatcttcctatgaaagatatgtggtggtatcttgacacgagaaagtacggaacttgccctcacagcggctttgggttaggttttgagcgcttgatcttattcgtcacgggtatgcaaaatatccgagacgtcattcccttccccagaacgccaaagaatgccgacttctaa

SEQ ID NO: 10694 - protein, 467 aa, Prevotella tannerae ATCC 51259
METIKRTKIIDVLKRTDFDTVVNVRGWVRTKRGSKNVIFIALNDGSTINNVQIVADTEAFDAELVKDITTGACLSVNGALVQSQGSGQVVEIQAKEIEILGTCGSDFPMQKKGQSFEYMRQYAHMRLRTNTFGAVFRIRHNMAMAIHHYFHEHGFFYFHTPIITASDCEGAGQMFQVTTKNLYDLKKDENGKIDYSDDFFGKPTSLTVSGQLEGELGATSLGAIYTFGPTFRAENSNTPRHLAEFWMIEPEVAFNDITDNMDLAEDFLKYCIQWAFDNCQDDLNFLNKMIDNTLIDRLHFVLKNEFVRLSYSEGIEILDQAVKAGKKFEFPIYWGVDLASEHERYLVEEHFKRPVILTDYPKEIKAFYMKLNEDGKTVRAMDVLFPQIGEIIGGSEREADYDKLQTRIQEMDLPMKDMWWYLDTRKYGTCPHSGFGLGFERLILFVTGMQNIRDVIPFPRTPKNADF

SEQ ID NO: 10695 - DNA, 1434 bp, Haemophilus influenzae NT127
  CDS (1)..(1434): transl_table=11
atgaattacattcagttacagaggtttaatatgtctaaagtggcatcaattgttgatgtattacaagggaaagtggcgattggtgaaaccgtcactgtgcgtggttgggttcgtacccgtcgcgattctaaagcaggcttatctttcttagcggtttatgacggttcttgctttgatccaattcaagcaattattaataacgatattaaaaattacgaaagcgaaattttacgtttaacaacaggctgttctgtgattgtaactggtaaagtcgttgaatcaccttcagaaggacaagcggttgaattacaagcagaaaaagtggaagtgacagggtttgttgaagatccagatacttacccaatggcagcaaaacgccactctatcgaatatttacgtgaagtagctcacttacgccctcgtaccaatattattggtgcggtcgcgcgtgttcgtcattgcttgtctcaagcaattcaccgtttcttccatgagcaaggtttctactgggtggcaaccccattaattactgcatcagacactgaaggtgcgggtgaaatgttccgtgtttctacacttgatttagaaaatcttccacgtggtgaaaatggaaaagttgatttcagccaagatttcttcggtaaagaatcatttttaacggtttcaggtcagttaaacggcgaaacctacgcttgtgcattaagcaaaatttatacttttggcccaacattccgtgcagaaaactcgaataccacccgtcacttagcggaattctggatggttgaacctgaagttgcatttgcaaccttagcggataacgcaaaacttgcagaagatatgttgaaatacgtattccgtgcagtattagcagagcgtaaagatgacttacaattctttgaaaaacatgtagataaagatgttattacgcgtctagaaaactttgtaaactcagattttgcgcaaattgactatactgatgccattgatgtgttattaaaatctggtaagaaatttgaattccctgtttcttggggtattgatctttcttctgaacacgaacgtttcttagcggaagaatatttcaaatcaccagttgtggtaaaaaactatccaaaagacattaaagcattctatatgcgtttaaatgatgatggaaaaactgtggcagcaatggacgtattagcaccaggaattggtgaaatcatcggtggttcacaacgtgaagaacgtttagacgtgcttgataaacgcatggaagaaatgggattaaatccagatgattattggtggtatcgtgatcttcgcaaatacggtagcgttccacattctggttttggtcttggttttgaacgcttaatcgtctatgtaactggcgtgcaaaatattcgtgatgtaattccattcccacgcgcgccaagaaatgcgaatttctaa

SEQ ID NO: 10696 - protein, 477 aa, Haemophilus influenzae NT127
MNYIQLQRFNMSKVASIVDVLQGKVAIGETVTVRGWVRTRRDSKAGLSFLAVYDGSCFDPIQAIINNDIKNYESEILRLTTGCSVIVTGKVVESPSEGQAVELQAEKVEVTGFVEDPDTYPMAAKRHSIEYLREVAHLRPRTNIIGAVARVRHCLSQAIHRFFHEQGFYWVATPLITASDTEGAGEMFRVSTLDLENLPRGENGKVDFSQDFFGKESFLTVSGQLNGETYACALSKIYTFGPTFRAENSNTTRHLAEFWMVEPEVAFATLADNAKLAEDMLKYVFRAVLAERKDDLQFFEKHVDKDVITRLENFVNSDFAQIDYTDAIDVLLKSGKKFEFPVSWGIDLSSEHERFLAEEYFKSPVVVKNYPKDIKAFYMRLNDDGKTVAAMDVLAPGIGEIIGGSQREERLDVLDKRMEEMGLNPDDYWWYRDLRKYGSVPHSGFGLGFERLIVYVTGVQNIRDVIPFPRAPRNANF

SEQ ID NO: 10697 - DNA, 1434 bp, Haemophilus influenzae RdAW
  CDS (1)..(1434): transl_table=11
atgaattacattcagttacagaggtttaatatgtctaaagtggcatcaattgttgatgtattacaagggaaagtggcgattggtgaaaccgtcactgtgcgtggttgggttcgtacccgtcgcgattctaaagcaggcttatctttcttagcggtttatgacggttcttgttttgatccaattcaagcgattattaataacgatattgaaaattacgaaagcgaaattttacgtttaacaacaggctgttctgtgattgtaaccggtaaagtcgttgaatcacctgcagaaggacaagcggttgaattacaagcagaaaaagtggaagtgacagggtttgttgaagatcctgatacttacccaatggcagcaaaacgccactctatcgaatatttacgcgaagtagctcacttacgccctcgtaccaatattattggcgcggtcgcacgtgttcgccattgcttatctcaagcaattcaccgtttcttccatgagcaaggtttctactgggtggcaaccccattaattactgcatcagacactgaaggtgcgggtgaaatgttccgtgtttctacacttgatttagaaaatcttccacgtagtgaaaatggaaaagttgatttcagccaagatttcttcggtaaagaatcatttttaacggtttcaggtcagttaaacggcgaaacctatgcttgtgcattaagcaaaatttatacttttggcccaacattccgtgcagaaaactctaataccacccgtcacttagcggaattctggatggttgaacccgaagttgcatttgcaaccttagcggataacgcaaaacttgcagaagatatgttgaaatacgtattccgtgcagtattagcagagcgtaaagacgacttacaattctttgaaaaacatgtagataaagatgttattactcgtttagaaaactttgtaaactcagattttgcgcaaattgactataccgatgccattgatgtgttattaaaatctggtaagaaatttgaattccctgtttcttggggcattgatctttcttctgaacacgaacgtttcttagcggaagaatatttcaaatcaccagttgtggtaaaaaactatccaaaagacattaaagcattctatatgcgtttaaatgatgatgaaaaaactgtggcggcaatggacgtgttagccccaggaattggtgaaatcatcggtggttcacaacgtgaagaacgtttagaggtgcttgataaacgcatggaagaaatgggattaaatccagatgattattggtggtatcgcgatcttcgtaaatacggcagtgttccacattctggttttggtcttggttttgaacgcttaattgtctatgtaactggcgtgcaaaatattcgtgatgtaattccattcccacgcgcaccaagaaatgcgaatttctaa

SEQ ID NO: 10698 - protein, 477 aa, Haemophilus influenzae RdAW
MNYIQLQRFNMSKVASIVDVLQGKVAIGETVTVRGWVRTRRDSKAGLSFLAVYDGSCFDPIQAIINNDIENYESEILRLTTGCSVIVTGKVVESPAEGQAVELQAEKVEVTGFVEDPDTYPMAAKRHSIEYLREVAHLRPRTNIIGAVARVRHCLSQAIHRFFHEQGFYWVATPLITASDTEGAGEMFRVSTLDLENLPRSENGKVDFSQDFFGKESFLTVSGQLNGETYACALSKIYTFGPTFRAENSNTTRHLAEFWMVEPEVAFATLADNAKLAEDMLKYVFRAVLAERKDDLQFFEKHVDKDVITRLENFVNSDFAQIDYTDAIDVLLKSGKKFEFPVSWGIDLSSEHERFLAEEYFKSPVVVKNYPKDIKAFYMRLNDDEKTVAAMDVLAPGIGEIIGGSQREERLEVLDKRMEEMGLNPDDYWWYRDLRKYGSVPHSGFGLGFERLIVYVTGVQNIRDVIPFPRAPRNANF

SEQ ID NO: 10699 - DNA, 1389 bp, Leptotrichia hofstadii F0254
  CDS (1)..(1389): transl_table=11
atgttattagaattaagagaacttcagaagaatacaaaagagtatttgggaaaagaaattgaaattaatggatgggtaaaaaaaattagaagtcaaaagaactttggatttattgagctgaatgatggaactttctttactggaatacaagttgtatttgatgaagaattggaaaattttgaggaaatttctaaacttacaatttcgagctctattaaagttacaggaattgtagttgaatcattaggaaaggggcaagattacgaaattaaagcaacaaaaatttctgtttatcaaaaagctgattcagattatccgttgcaaaacaaaagacatagttttgaatttttgagaacaattgcacatttgcgtcctagaactaatgctttttttgcaactttcagagtacgttcaattttatcttatgcaattcataaattttttcaggaaaaaaactttgtatatgttcaaacccctataattactggaagtgatgctgaaggtgccggagaaatgtttaggcttacgacacttgatataaacaatgttccaaaaactgaaaatggaagcattgactttaagcaggatttctttggaaaagaggcaaatcttacagtaagtggacagttaaatgttgaaacatttgcaacagcgtttaaaaatacatacacttttggacctacatttagagctgagaaatctaatactccaaaacatgctgcagaattttggatgatggagcctgaaattgcatttgcagatctggatgtaaatatggatgttattgaggaaatgataaaatatattgtaaattatgtaagggaaaatgctaaggaagaaatggaattctttaaccaatttgtagacaaggacttgtttaacaggcttgatactttagtaaacaatgaatttgggagaattacttatacagaagcaattgaaattttgaaaaattcaaaacagaaatttgagtatgaagtagaatggggaattgacctgcaaactgagcatgaaagatacttggcagaaaaacactttaaaaaacctgtatttgtaactgattatccaaaagacataaaagcattttatatgaagttaaatgaagatggaaaaactgtaagagcagttgatttattggcaccaggaattggagaaattgtaggtggaagccaaagagaagatgattatgatgttcttttaggaaaaattcatgaaatgggattaaaagaggaagattactggtggtatttagacttgagaaaatatggaagtgtaccacattcaggatttggacttggatttgacagaatgcttatgtacattactggaatgacaaatataagagatgtgattccattcccaagaactactaaaaatttggaattctaa

SEQ ID NO: 10700 - protein, 462 aa, Leptotrichia hofstadii F0254
MLLELRELQKNTKEYLGKEIEINGWVKKIRSQKNFGFIELNDGTFFTGIQVVFDEELENFEEISKLTISSSIKVTGIVVESLGKGQDYEIKATKISVYQKADSDYPLQNKRHSFEFLRTIAHLRPRTNAFFATFRVRSILSYAIHKFFQEKNFVYVQTPIITGSDAEGAGEMFRLTTLDINNVPKTENGSIDFKQDFFGKEANLTVSGQLNVETFATAFKNTYTFGPTFRAEKSNTPKHAAEFWMMEPEIAFADLDVNMDVIEEMIKYIVNYVRENAKEEMEFFNQFVDKDLFNRLDTLVNNEFGRITYTEAIEILKNSKQKFEYEVEWGIDLQTEHERYLAEKHFKKPVFVTDYPKDIKAFYMKLNEDGKTVRAVDLLAPGIGEIVGGSQREDDYDVLLGKIHEMGLKEEDYWWYLDLRKYGSVPHSGFGLGFDRMLMYITGMTNIRDVIPFPRTTKNLEF

SEQ ID NO: 10701 - DNA, 1479 bp, Vibrio coralliilyticus ATCC BAA-450
  CDS (1)..(1479): transl_table=11
atgtttgatcactttttattcggtgagcccacaaaaaacattgggttgattttttactcaatggagaatatttacaacatgacttacgcgcctgtatcagacgtattaagcggtaagctagcagttgacagtgaagtaactgtccgcggctggatccgctcgcgtcgtgattccaaagctggaatctctttccttgccatctacgacggctcttgtttcgacccgattcaggccgtggtccctaataatctaaataattacaacgaagaagttctaaaactgacaacaggttgttctgttgaagtgacaggtactatcgttgaatctccagcgaaaggtcaggactttgagcttgcagcgacagatgtaaaagtcgttggctgggttgaagatgctgatacttacccgatggctaaaactcgccactcgattgaatacctacgtgaagtggcacaccttcgtccacgtacgaacgtgattggtgcagtcgcacgtgtacgtaactgtttgtctcaggcaattcaccgtttctaccacgagcaaggttacttctgggtatctgcgccacttattaccgcttctgatgcagaaggtgcaggtgaaatgttccgtgtctctacgctagacatggaaaacctaccgcgcacagaagaaggcaaagtggactacaacgaagacttcttcggtaaagagacgttcctaacggtatctggccagcttaacggcgaagcttacgcttgtgcactaagcaaagtttacacgttcggccctacgttccgtgcagaaaactcaaacaccagccgccacctagcggaattctggatggttgaacctgaagttgctttcgctgatcttgaagatatcgcgaaactgtctgaagacatgttgaagtacgtatttaaagcagtacttgaagagcgtcgtgatgaccttgagttctttgcacaacgcatcgacaaagaagccattactcgtctagagaaattcgttgagtctgatttcgctcaggttgattacactgatgcaatccagattcttctagactctggccgtgacttcgaattcccagttgaatggggtatcgatatgtcttctgagcacgagcgttacctagcggaagaacacttcaaagcaccggtaatcgttaagaactacccgaaagacatcaaagccttctacatgcgcctcaacgaagacggcaaaacagtagcagcaatggatgtacttgcaccgggcattggtgaaatcatcggtggttctcagcgtgaagagcgtctggacgttcttgatgcccgtatgcgtgatattggcatcgacccagagcacatggattggtaccgtgaccttcgtcgctacggtacagtacctcactcaggtttcggcctaggctttgagcgtctggtttcttacgtaacaggtatgggtaacgtacgtgatgttattccattcccacgtacaccgcgctcagctaacttctaa

SEQ ID NO: 10702 - protein, 492 aa, Vibrio coralliilyticus ATCC BAA-450
MFDHFLFGEPTKNIGLIFYSMENIYNMTYAPVSDVLSGKLAVDSEVTVRGWIRSRRDSKAGISFLAIYDGSCFDPIQAVVPNNLNNYNEEVLKLTTGCSVEVTGTIVESPAKGQDFELAATDVKVVGWVEDADTYPMAKTRHSIEYLREVAHLRPRTNVIGAVARVRNCLSQAIHRFYHEQGYFWVSAPLITASDAEGAGEMFRVSTLDMENLPRTEEGKVDYNEDFFGKETFLTVSGQLNGEAYACALSKVYTFGPTFRAENSNTSRHLAEFWMVEPEVAFADLEDIAKLSEDMLKYVFKAVLEERRDDLEFFAQRIDKEAITRLEKFVESDFAQVDYTDAIQILLDSGRDFEFPVEWGIDMSSEHERYLAEEHFKAPVIVKNYPKDIKAFYMRLNEDGKTVAAMDVLAPGIGEIIGGSQREERLDVLDARMRDIGIDPEHMDWYRDLRRYGTVPHSGFGLGFERLVSYVTGMGNVRDVIPFPRTPRSANF

SEQ ID NO: 10703 - DNA, 1401 bp, Vibrio metschnikovii CIP 69.14
  CDS (1)..(1401): transl_table=11
atgacttacgcgcctgtaaaagacgtattaagcggcaagcttgcagtaaacagtgaagttactgttcgcggctggatccgcacacgtcgtgattccaaagctggaatctctttccttgccttatatgacggctcttgtttcgacccgattcaggccgtggtcccgaattcactcaataattatcaagacgaagttctcaaactcaccaccggatgttctgtagaaattacaggtacggttgttgagtctcctgccagtggtcaagatttcgaattagcggcgactgaactgaaggttgtcggctgggtagaagatgcggaaacctatccgatggctaaaactcgtcactctattgagtatttacgtgaagtggctcaccttcgtccacgtactaacgtgattggtgcagttgctcgtgtacgtaactgtttgtctcaagcgatccatcgtttttatcatgaacaaggctatttttgggtatcagcaccactgatcaccgcctctgatgccgaaggcgcgggtgagatgttccgtgtttcgactctagatttcgctaacctgcctcgccaagaaaacggtgagattgactttaacgaagacttcttcggtaaagagacattcttaaccgtatcaggccagttaaacgctgaagcttacgcttgtgcactgagcaaagtgtatacttttggcccaaccttccgcgcagaaaactccaatactagccgtcacttagctgaattttggatggtagagcctgaagttgcctttgctgatttgcacgatgtggctcaattagctgaagatatgctcaagtacgtgtttaatgccgtactgactgaacgtcgtgatgaccttgaattctttgcttctcgcatcgataaagacgcgattactcgtttggagcaattcgttcaatcggactttgcacaagttgactataccgatgcgattacgattctgcttgattctggtcgcaagtttgaatttgatgtggaatggggtatcgacctgtcttcagaacatgagcgttatcttgctgaagagcacttcaaagcaccggtgatcgttaaaaactatccaaaagacatcaaagctttttatatgcgtcttaacgacgacggtaaaaccgttgccgctatggacgtattagcgccgggaattggtgaaatcatcggtggttcacagcgtgaagagcgtctagatgttctcgatgctcgcatgattgaaatgggcatcgaccctgaacacatgagctggtaccgtgacttacgccgctatggcaccgttcctcatgcaggatttggtcttggttttgagcgtttggtctcttatgtgaccggtatgggtaacgtacgtgatgtgattccattcccacgtacaccacgcagtgccaacttctaa

SEQ ID NO: 10704 - protein, 466 aa, Vibrio metschnikovii CIP 69.14
MTYAPVKDVLSGKLAVNSEVTVRGWIRTRRDSKAGISFLALYDGSCFDPIQAVVPNSLNNYQDEVLKLTTGCSVEITGTVVESPASGQDFELAATELKVVGWVEDAETYPMAKTRHSIEYLREVAHLRPRTNVIGAVARVRNCLSQAIHRFYHEQGYFWVSAPLITASDAEGAGEMFRVSTLDFANLPRQENGEIDFNEDFFGKETFLTVSGQLNAEAYACALSKVYTFGPTFRAENSNTSRHLAEFWMVEPEVAFADLHDVAQLAEDMLKYVFNAVLTERRDDLEFFASRIDKDAITRLEQFVQSDFAQVDYTDAITILLDSGRKFEFDVEWGIDLSSEHERYLAEEHFKAPVIVKNYPKDIKAFYMRLNDDGKTVAAMDVLAPGIGEIIGGSQREERLDVLDARMIEMGIDPEHMSWYRDLRRYGTVPHAGFGLGFERLVSYVTGMGNVRDVIPFPRTPRSANF

SEQ ID NO: 10705 - DNA, 1401 bp, Vibrio furnissii CIP 102972
  CDS (1)..(1401): transl_table=11
atgacttacgcgcctgtaaaagacgtacttagcggtaagctggcagtagacagtgaagtcactgttcgcggctggatccgttcgcgtcgcgattccaaagctggaatctctttccttgccatttatgacggctcttgtttcgacccgattcaggccgtggtcccaaataatctgaataattacgacaacgaagtactaaagctaacgactggctgctctgttgaagtaacaggtaagattgttgagtctccagcgagcggtcaagcattcgaattggcagccaccgacgtaaaagtggttggctgggtcgaagatgcagacacttacccaatggcgaaaacccgtcactcaatcgaataccttcgtgaagtggcgcacctgcgtccacgtaccaacgtgatcggcgctgtggcccgtgtgcgtaactgcctgtcacaagcgattcaccgtttctaccacgagcaaggctacttctgggtctctgcgccactgatcaccgcttctgacgctgaaggtgcaggcgaaatgttccgcgtatcaacgctagacatggaaaacctccctcgcacagacgcaggcaaagtggactacaacgaagacttctttggtaaagaaacgttcttgactgtatcgggtcagctcaacgctgaaacttacgcgtgcgcactgagcaaagtctacaccttcggtccgacgttccgtgctgaaaactcaaacaccagccgccaccttgcggaattctggatggttgagcctgaagtggcgtttgctgaactagacgacgtggcgaaactggcagaagacatgctgaagtacgtcttcaaagctgttctggaagagcgtcgtgatgaccttgagttcttcgctcaacgcatcgataaagaagcgatcactcgtctggagcaattcgttgcttctgattttgcacaagtggactacaccgacgcgatccaaatcctgcttgattctggtcgtgagttcgaattcccagttgaatggggcatcgatatgtcttctgagcacgagcgtttccttgctgaagagcacttcaaagcgccggttatcgtgaagaactacccgaaagacatcaaagcgttttacatgcgtctgaacgacgacggcaaaaccgttgcagcaatggacgtacttgcccctggcatcggtgaaatcatcggtggctctcaacgtgaagagcgtctagacgttctggatgcacgtatgattgaaatgggcatcgatcctgagcacatgagctggtaccgcgacctgcgtcgttacggcaccgtaccgcacgcaggctttggtctcggctttgagcgtttggtgtcttacgtgactggtatgggcaacgtccgtgacgtgattccattcccacgtacaccacgtagcgcaaacttctaa

SEQ ID NO: 10706 - protein, 466 aa, Vibrio furnissii CIP 102972
MTYAPVKDVLSGKLAVDSEVTVRGWIRSRRDSKAGISFLAIYDGSCFDPIQAVVPNNLNNYDNEVLKLTTGCSVEVTGKIVESPASGQAFELAATDVKVVGWVEDADTYPMAKTRHSIEYLREVAHLRPRTNVIGAVARVRNCLSQAIHRFYHEQGYFWVSAPLITASDAEGAGEMFRVSTLDMENLPRTDAGKVDYNEDFFGKETFLTVSGQLNAETYACALSKVYTFGPTFRAENSNTSRHLAEFWMVEPEVAFAELDDVAKLAEDMLKYVFKAVLEERRDDLEFFAQRIDKEAITRLEQFVASDFAQVDYTDAIQILLDSGREFEFPVEWGIDMSSEHERFLAEEHFKAPVIVKNYPKDIKAFYMRLNDDGKTVAAMDVLAPGIGEIIGGSQREERLDVLDARMIEMGIDPEHMSWYRDLRRYGTVPHAGFGLGFERLVSYVTGMGNVRDVIPFPRTPRSANF

SEQ ID NO: 10707 - DNA, 1404 bp, Pasteurella dagmatis ATCC 43325
  CDS (1)..(1404): transl_table=11
atgattaaagtggcatctattgttgatgtattacaagggaaaatagccatcggagaaaaagtcacgatccgaggttggattcgtactcgccgtgattcaaaggctggactttcttttttagcaatttatgacggttcttgttttgacccaatccaagcgattgttaataacgatattgaaaattatgcgtcagaagtactgcgtctaacaacaggctgttcagtaattgtgactggtactgtggttgaatctccagcagaaggtcaagctgttgaattacaagcagagaacgttgaagtaactggttgggttgaagatcctgaaacttacccaatggcagcaaaacgccactctattgaatatttacgtgaagttgctcacttacgtccacgcacaaacattattggtgcggtagcacgtgttcgtcactgtttagcgcaagcaatccaccgtttcttccacgaacaaggtttctattgggtagcaaccccgctaatcactgcatcagatactgaaggtgcgggtgaaatgttccgcgtttcaacacttgatttagaaaatcttcctcgtgatgacaaaggtgcggtcgatttttcacaagatttcttcggtaaagaatcattcttaacagtgtctggtcaattaaacggtgaaacttatgcctgtgcattaagtaaaatctatacatttggtccaacattccgtgctgaaaactcaaataccactcgtcaccttgctgaattctggatgattgaacctgaagttgcatttgcgactttagcagataacgctaaattagcagaagatatgttgaaatatgtattccgtgcagtattagcagagcgcaaggatgacttaaaattctttgaaaaacacgttgataaagatgtcattactcgtttagaaaacttcatcaactcagatttcgcacaaatcgattatactgatgcaattgaagtgctattacaatcaggtaaaaaattcgaattcccagtatcttggggtatcgacttgtcttctgagcacgaacgttaccttgcagaagaacatttcaaatcaccagtggttgtgaaaaactatccaaaagacatcaaagcattctatatgcgtttaaatgatgacggtaaaaccgttgcggcgatggacgttttagcaccaggaattggtgaaatcatcggtggttctcagcgtgaagaacgtttagatgtattagataaacgaatggaagaaatgggcttaaatccagaagattactggtggtatcgagatctacgtcgttatggtactgtgccacactctggtttcggtcttggttttgaacgtctaatcgtttatgtaactggtgtccaaaacattcgtgacgtgatcccattcccacgtgcaccacgtaacgcaaatttctaa

SEQ ID NO: 10708 - protein, 467 aa, Pasteurella dagmatis ATCC 43325
MIKVASIVDVLQGKIAIGEKVTIRGWIRTRRDSKAGLSFLAIYDGSCFDPIQAIVNNDIENYASEVLRLTTGCSVIVTGTVVESPAEGQAVELQAENVEVTGWVEDPETYPMAAKRHSIEYLREVAHLRPRTNIIGAVARVRHCLAQAIHRFFHEQGFYWVATPLITASDTEGAGEMFRVSTLDLENLPRDDKGAVDFSQDFFGKESFLTVSGQLNGETYACALSKIYTFGPTFRAENSNTTRHLAEFWMIEPEVAFATLADNAKLAEDMLKYVFRAVLAERKDDLKFFEKHVDKDVITRLENFINSDFAQIDYTDAIEVLLQSGKKFEFPVSWGIDLSSEHERYLAEEHFKSPVVVKNYPKDIKAFYMRLNDDGKTVAAMDVLAPGIGEIIGGSQREERLDVLDKRMEEMGLNPEDYWWYRDLRRYGTVPHSGFGLGFERLIVYVTGVQNIRDVIPFPRAPRNANF

SEQ ID NO: 10709 - DNA, 1404 bp, Prevotella sp. oral taxon 472 str. F0295
  CDS (1)..(1404): transl_table=11
atggaaaaaattcgtagaacaaagattgtagacgttcttcaacgtaccgacttcggttctgaagtcaacgtgaagggctgggtacgaactcaccgcagtagcaaggtggtagatttcatcgccttaaacgacggttctaccatcaataacgtgcaagtggttgtcgatccgacgaagttcgacaccgaattgcttaaacaaataaccactggagcgtgcgtaaacgcaacgggtaagcttgttgaaagccaaggacaaggtcaaaactcggagatacaatgcaccgaattggaactcttgggtggctgtggcagcgactatcctatgcaaaagaagggtcaaacctttgagtatatgcggcagcatgctcacctccgactgcgcactaacacgttcggagcagttatgcgcatccgccataacatggccatcgctattcatcagtacttccatgatcatggtttctactactttcacacacccatcatcaccgcaagtgatgccgaaggggcgggcgaaatgtttcaggttaccaccaagaacctaaacgatctgaagaaagatgagagtggaaaggtgaactataacgacgacttcttcggtaagatgacaagtcttaccgtgagcggacagcttgaaggcgagcttggagcaacggctttgggtcagatttacaccttcggtccgacgtttcgagccgaaaacagcaatacgccacgtcacctcgccgagttctggatgattgaacccgaagtggcttttatcgacctcgacgacctgatggacctcgaagaagacttcattaagtattgtgtgcgctgggcgttggataactgcaaagacgacctcgctttcctcaacaagatgatagacaacacgctgctggaacgtttgcagggtgtggtgagcgaaaacttcgttcgtctagactacaccgagggtataaacatcctcgaagacgccgttaaagcaggtaagaagttcgagttccccgttagctggggtatggatttggccagcgaacacgaacgtttccttgttgaagagcactttaagaagcccgtcatcatgactcattacccgaagggtatcaaggctttctacatgaagttagacgaagatggccgtaccgttcaaggcaccgacgtgctcttcccacaaattggcgaaatcattggaggtagtgttcgtgaagagaactacgacaagctggtggcgcaaatcgaagaacgccacatcccaatgaaagacatgtggtggtatttagacacccgtcgctttggcacatgcccccacggaggtttcggtttgggcttcgaaaggctcatcctcttcgttacaggcatgcaaaacattcgcgatgtcatccccttcccacgcacgccgaagtcggctgagttctga

SEQ ID NO: 10710 - protein, 467 aa, Prevotella sp. oral taxon 472 str. F0295
MEKIRRTKIVDVLQRTDFGSEVNVKGWVRTHRSSKVVDFIALNDGSTINNVQVVVDPTKFDTELLKQITTGACVNATGKLVESQGQGQNSEIQCTELELLGGCGSDYPMQKKGQTFEYMRQHAHLRLRTNTFGAVMRIRHNMAIAIHQYFHDHGFYYFHTPIITASDAEGAGEMFQVTTKNLNDLKKDESGKVNYNDDFFGKMTSLTVSGQLEGELGATALGQIYTFGPTFRAENSNTPRHLAEFWMIEPEVAFIDLDDLMDLEEDFIKYCVRWALDNCKDDLAFLNKMIDNTLLERLQGVVSENFVRLDYTEGINILEDAVKAGKKFEFPVSWGMDLASEHERFLVEEHFKKPVIMTHYPKGIKAFYMKLDEDGRTVQGTDVLFPQIGEIIGGSVREENYDKLVAQIEERHIPMKDMWWYLDTRRFGTCPHGGFGLGFERLILFVTGMQNIRDVIPFPRTPKSAEF

SEQ ID NO: 10711 - DNA, 1401 bp, Vibrio sp. RC341
  CDS (1)..(1401): transl_table=11
atgacttacgcgcctgtaaatgacgtactaagcggcaagctcgcagtagacagtgaagtcactgttcgcggctgggttcgcacacgtcgtgattccaaagctggaatttcgtttcttgccatctatgacggctcttgtttcaacccgattcaggccgtggttcctaataatctgaataattacgacaatgaagtcctgaagctaacgacaggttgctctgttgaagtaacgggtaccattgttgagtctccagcctctggtcaagcgtttgaactggctgcaactgcggtaaaagtggtgggttgggttgaagatgccgacacttacccaatggcgaaaactcgccattccatcgaatatctgcgtgaagtggctcacctgcgtccacgtactaacgtgatcggtgcagttgcacgtgttcgtaactgtttggcacaagcgattcaccgtttctaccatgaacaaggttacttctgggtttcagcacctcttatcaccgcttctgatgcagaaggcgcaggtgaaatgttccgcgtttcaacgctggatatggaaaacctgccacgcactgacgcaggcaaagtggattacaaccaagacttctttggtaaagaaacattccttacggtatcaggccagctcaacgcggaagcgtacgcttgcgcgatcagcaaagtatacactttcggcccaacgttccgtgctgagaactcaaacactagccgtcacttggcggaattctggatggttgaacctgaagtcgcgttcgcggatctaaacaccgtagcaaaactggctgaagacatgctgaagtacgtgttcaaagcggtactggctgagcgtcgtgacgatcttgagttctttaacgatcgtatcaacaacgaagtgattgcccgtcttgaacagtttgtagattcagatttcgcacaagtggattacaccgatgcgatcgaaattctgaaaaactgtggcaaaacgtttgagttcccagttgagtggggtatcgacttggcttctgagcacgagcgtttccttgctgaagaacacttcaaagcaccggttatcgtgaagaactatccaaaagacatcaaagcgttctacatgcgtatgaacgaagatggcaaaactgttgcggcgatggacgtattggctccgggcattggtgaaatcatcggtggttcacaacgtgaagagcgtttggatgttctcgatgcacgtatgcgtgaatttggtatcgaccctgagcacatggattggtatcgcgacctgcgccgttacggcaccgtgccacatgcgggctttggtctgggcttcgagcgccttgtatcctacgttacaggcatgggcaacgtgcgtgatgtgatcccattcccacgtacacctcgcagcgcaagcttctaa

SEQ ID NO: 10712 - protein, 466 aa, Vibrio sp. RC341
MTYAPVNDVLSGKLAVDSEVTVRGWVRTRRDSKAGISFLAIYDGSCFNPIQAVVPNNLNNYDNEVLKLTTGCSVEVTGTIVESPASGQAFELAATAVKVVGWVEDADTYPMAKTRHSIEYLREVAHLRPRTNVIGAVARVRNCLAQAIHRFYHEQGYFWVSAPLITASDAEGAGEMFRVSTLDMENLPRTDAGKVDYNQDFFGKETFLTVSGQLNAEAYACAISKVYTFGPTFRAENSNTSRHLAEFWMVEPEVAFADLNTVAKLAEDMLKYVFKAVLAERRDDLEFFNDRINNEVIARLEQFVDSDFAQVDYTDAIEILKNCGKTFEFPVEWGIDLASEHERFLAEEHFKAPVIVKNYPKDIKAFYMRMNEDGKTVAAMDVLAPGIGEIIGGSQREERLDVLDARMREFGIDPEHMDWYRDLRRYGTVPHAGFGLGFERLVSYVTGMGNVRDVIPFPRTPRSASF

SEQ ID NO: 10713 - DNA, 1401 bp, Vibrio orientalis CIP 102891
  CDS (1)..(1401): transl_table=11
atgacttacgcgcctgtaaaagacgtacttggcggcaagctagcggtagacagtgaagtaactgttcgcggctggatccgttcacgtcgtgattccaaagctggaatctctttccttgccatttatgacggctcttgtttcgacccgattcaggccgtggtcccaaataatctgaataattacgaagacgaagtactgaagctgactacaggctgctctgtcgaagtaactggtaagattgttgagtctccagcgaaaggtcaagattttgagcttgctgccactgacgtaaaagtcgttggctgggttgaagacgcagaaacatacccaatggctaaaactcgccactctatcgaataccttcgcgaagtcgctcacctacgcccacgtacaaacgtaattggtgcagtagcgcgtgttcgtaactgtctatctcaagcgatccaccgtttctaccacgagcaaggtttcttctgggtatctgctccattgatcacggcttctgatgcagaaggtgctggcgaaatgttccgcgtatctacgctagacatggaaaacctacctcgcacagacaaaggcgaagtagattacaatgaagatttcttcggtaaagagacattcctaacggtatctggccagcttaacgctgaagcttacgcttgtgccctaagcaaagtttacacgttcggtcctactttccgtgctgaaaactcaaacacaagccgccacctagctgagttctggatggttgagcctgaggttgcatttgcagacctagacgacgttgccaagctatcagaagatatgcttaagtttgtattcaaagcggtacttgaagagtgtcgtgatgaccttgagttcttcgctcaacgtatcgacaaagaagcaattactcgtctagagcagttcgtttcttctgattttgcacaagtagactacactgacgcaatccagatccttgtagattctggtcgtgagttcgaattccctgttgagtggggtatcgatatgtcttctgagcacgaacgtttcctagctgaagaacacttcaaagcgcctgtaatcgttaaaaactacccgaaagatatcaaagcattctacatgcgtgctaacgacgacggtaagacagtcgcagcaatggacgtactagcacctggtatcggtgaaatcattggtggttctcaacgtgaagagcgtctagacatcctagacgagcgtatgcgtgaagtgggtatcgacccagagcacatgaactggtaccgcgacctacgtaaatatggcactgtgccacacgcaggctttggtctaggttttgagcgtctagtatcttacgtaactggtatgggcaacgttcgtgacgttatcccgttcccacgtacaccacgctctgcgaacttctaa

SEQ ID NO: 10714 - protein, 466 aa, Vibrio orientalis CIP 102891
MTYAPVKDVLGGKLAVDSEVTVRGWIRSRRDSKAGISFLAIYDGSCFDPIQAVVPNNLNNYEDEVLKLTTGCSVEVTGKIVESPAKGQDFELAATDVKVVGWVEDAETYPMAKTRHSIEYLREVAHLRPRTNVIGAVARVRNCLSQAIHRFYHEQGFFWVSAPLITASDAEGAGEMFRVSTLDMENLPRTDKGEVDYNEDFFGKETFLTVSGQLNAEAYACALSKVYTFGPTFRAENSNTSRHLAEFWMVEPEVAFADLDDVAKLSEDMLKFVFKAVLEECRDDLEFFAQRIDKEAITRLEQFVSSDFAQVDYTDAIQILVDSGREFEFPVEWGIDMSSEHERFLAEEHFKAPVIVKNYPKDIKAFYMRANDDGKTVAAMDVLAPGIGEIIGGSQREERLDILDERMREVGIDPEHMNWYRDLRKYGTVPHAGFGLGFERLVSYVTGMGNVRDVIPFPRTPRSANF

SEQ ID NO: 10715 - DNA, 1389 bp, Leptotrichia goodfellowii F0264
  CDS (1)..(1389): transl_table=11
atgttgttagaattaagggaattacaattaaacactgaaaaatatctggataaagaaatagagttaaacggttggataaaaaaaataagaagtcagaaaaacttcggatttatagaattaaatgacggaactttttttaacggaatacaaattgttatagacgatactttgcctaattttgaggaaatatcaaaattaacaatttcttcatcaataaaagtatacgggaaacttgtaaaatctgaaggaaaaggacaggattatgaaataaaagccgataaagtcgaagtctatgataaatccgactccgattatcctttgcaaaataaaagacatacattcgagtttttaagaacaatagctcatttaagaccgagaacaaatacattttttgcagtattcagagtaagatcaatacttgcttatgctatacataaattttttcaggaaaaaaactttgtgtatgtccagacacctataattacaggaagtgatgctgaaggtgcaggagaaatgttcagattgacaacattggatctggaaaaactgccgagaactgaaaaaggagatatagactttaagcaggatttcttcgggaaagagtctaaccttacagtcagcggacaattaaatgtggaaactttctgtacggcatttaaaaatacttatacgttcggacctacattcagagcggaaaattccaatacaccgaaacacgctgcggaattttggatgatggagcctgaaattgcatttgccgatttggatgtgaatatggatgtaattgaagaaatgattaaatacattgtaaaatacgttatggaacatgcaaaagaggaaatggaatttttcaataaatttatagacaaagagttgtttgaaagacttgacgtacttatgaattcaggatttgaaagaattacttatacagaagcgatagaaatacttaaaaatgcaaaacaggactttgaatataaagtcgaatggggaattgatttgcagacagaacatgaaagatatctggctgaaaaacatttcaaaaaacctgtatttgtaacggattatcctaaagatataaaagccttttatatgaaactgaacaaagacagaaaaacagtaagagctgttgatttgttggctccgggaatcggagaaatagtaggtggaagccaaagagaagataactatgatgttcttttagataaaataaatcaaatgggactcaatgaacaggattactggtggtatctggatctgagaaaatacggaagtgtacctcattcaggtttcggtttgggatttgacagaatacttatgtacataacaggaatgaccaacataagagatgtaatacctttccctagaacaacaaaaaatcttgaattttaa

SEQ ID NO: 10716 - protein, 462 aa, Leptotrichia goodfellowii F0264
MLLELRELQLNTEKYLDKEIELNGWIKKIRSQKNFGFIELNDGTFFNGIQIVIDDTLPNFEEISKLTISSSIKVYGKLVKSEGKGQDYEIKADKVEVYDKSDSDYPLQNKRHTFEFLRTIAHLRPRTNTFFAVFRVRSILAYAIHKFFQEKNFVYVQTPIITGSDAEGAGEMFRLTTLDLEKLPRTEKGDIDFKQDFFGKESNLTVSGQLNVETFCTAFKNTYTFGPTFRAENSNTPKHAAEFWMMEPEIAFADLDVNMDVIEEMIKYIVKYVMEHAKEEMEFFNKFIDKELFERLDVLMNSGFERITYTEAIEILKNAKQDFEYKVEWGIDLQTEHERYLAEKHFKKPVFVTDYPKDIKAFYMKLNKDRKTVRAVDLLAPGIGEIVGGSQREDNYDVLLDKINQMGLNEQDYWWYLDLRKYGSVPHSGFGLGFDRILMYITGMTNIRDVIPFPRTTKNLEF

SEQ ID NO: 10717 - DNA, 1401 bp, Vibrio mimicus MB-451
  CDS (1)..(1401): transl_table=11
atgacttacgcgcctgtaaatgacgtactaagcggcaagctcgcagtagacagtgaagtcactgttcgcggctgggttcgcacacgtcgtgattccaaagctggaatttcgtttcttgccatctatgacggctcttgtttcaacccgattcaggccgtggttcctaataatctgaataattacgacaatgaagtcctgaagctaacgacaggctgttccgttgaagtaactggtactattgttgagtctccagcgtctggtcaagcttttgaactggctgcgactgcggtaaaagtggttggttgggttgaagatgccgacacttacccaatggcgaaaactcgtcattctattgaatatctgcgtgaagttgctcatctgcgtccacgtaccaacgtgatcggtgcagttgcacgtgtacgtaactgcttggcacaagctattcaccgcttctaccatgagcaaggttacttctgggtttctgctccactgatcaccgcttctgatgcagaaggtgcgggtgaaatgttccgcgtatcaacgctggatatggaaaacctgccacgcactgacgcaggcaaagtggattacaaccaagacttctttggtaaagaaactttcctaacggtatctggccagttgaacggtgaagcgtacgcttgtgcattgagcaaagtgtacactttcggcccaactttccgtgctgaaaactcgaacaccagccgtcacttggcggaattctggatggttgaacctgaagttgcgtttgctgatctgaacacagtggcaaaactggctgaagacatgctgaagtatgtgttcaaagccgtactggcagagcgtcgtgacgatcttgagttttttaacgaccgtatcaacaacgaagtgattggccgccttgagaagtttgtagattcagacttcgcacaagtggattacaccgatgcgatcgaaattctgaaaaactgtggcaaaacgtttgagttcccagttgagtggggtatcgacttagcttctgagcacgagcgcttcctagcagaagaacacttcaaagcaccagtgatcgtgaagaactatccaaaagacatcaaagccttctacatgcgtatgaacgaagatggcaaaaccgttgcggcgatggacgtattggctccgggcattggtgaaatcatcggtggttcacaacgtgaagagcgtttggatgttctggatgcacgtatgcgtgaattcggtatcgatcctgagcacatggattggtatcgcgatctgcgccgttacggcacagttccgcacgcaggcttcggtctaggcttcgagcgtctcgtgtcttacgtaactggtatgggtaacgtacgtgacgttatcccgttcccacgcactccacgtagcgcgaacttctaa

SEQ ID NO: 10718 - protein, 466 aa, Vibrio mimicus MB-451
MTYAPVNDVLSGKLAVDSEVTVRGWVRTRRDSKAGISFLAIYDGSCFNPIQAVVPNNLNNYDNEVLKLTTGCSVEVTGTIVESPASGQAFELAATAVKVVGWVEDADTYPMAKTRHSIEYLREVAHLRPRTNVIGAVARVRNCLAQAIHRFYHEQGYFWVSAPLITASDAEGAGEMFRVSTLDMENLPRTDAGKVDYNQDFFGKETFLTVSGQLNGEAYACALSKVYTFGPTFRAENSNTSRHLAEFWMVEPEVAFADLNTVAKLAEDMLKYVFKAVLAERRDDLEFFNDRINNEVIGRLEKFVDSDFAQVDYTDAIEILKNCGKTFEFPVEWGIDLASEHERFLAEEHFKAPVIVKNYPKDIKAFYMRMNEDGKTVAAMDVLAPGIGEIIGGSQREERLDVLDARMREFGIDPEHMDWYRDLRRYGTVPHAGFGLGFERLVSYVTGMGNVRDVIPFPRTPRSANF

SEQ ID NO: 10719 - DNA, 1410 bp, Grimontia hollisae CIP 101886
  CDS (1)..(1410): transl_table=11
atgcaaattatgaactatgtgcctgtagcagacgtcctgcacggcaaagcggcagtagacacagaagtcactgttcgcggttggatccgcacacgtcgtgattcaaaagccggtatttctttcctcgccatttatgacggctcttgttttgaccctattcaggcggttgttcctaatgagctgaataattaccaggaagaagtattgcgtcttaccacaggctgctctgtagaagtgaccggtaaagtggtagaaagtccgggacaaggccaggcatacgagctgcaagcgaccgacgttaaagtggttggttgggttgaagatgcagagacttacccaatggcgaaaacccgccattctatcgaatacctgcgcgaagtggctcaccttcgtccacgcaccaacgttatcggtgcagttgcccgcgtgcgtaactgcctggctcaagctatccatcgtttttatcatgaaaacggctattactgggtttcagcgccactgatcacagcatccgacgcagaaggtgccggagaaatgttccgcgtatctacgttggacatggaaaacctgccacgcaccgagaaaggcgacgttgattacagcgaagacttcttcggcaaagaaaccttcctgacagtgtcaggccagctgaatgctgaagcatatgcctgcgccctgagcaaggtttacactttcggcccgactttccgtgcagaaaactccaacaccagccgtcacctggcagaattctggatggttgagccagaagtcgcctttgctgaactggacgatgtcgcgaaactggctgaagacatgctgaaatatgtgtttaaagccgtgctcgaagaacgccgtgacgatatggagttcttcgctcagcgtatcgataaagacgttatcagccgtcttgagaagtttgtggagtctgacttcgcccaggtggactacaccgacgctatcgacattctgctcaaatctggcaaaaaattcgagttccctgttgaatggggtattgatctcgcctctgagcatgaacgctacctggccgaagagcactttaaagcgccagttatcgtgaaaaactatccaaaagacatcaaagcattctacatgcgcctgaacgatgacggtaagacagtggcagcaatggatgtactggcaccgggcattggtgagatcatcggtggttcacagcgtgaagagcgtttagacatattggatgcccgtatgcgcgaaatcggcattgatccagaacatatggactggtatcgcgacctgcgtcgctatggtactgtgcctcatgctggtttcggtctgggctttgagcgtctggtttcttacgtaaccggtatgggcaacgtacgtgacgttatcccattcccacgtacgcctcgcagtgcaaacttctaa

SEQ ID NO: 10720 - protein, 469 aa, Grimontia hollisae CIP 101886
MQIMNYVPVADVLHGKAAVDTEVTVRGWIRTRRDSKAGISFLAIYDGSCFDPIQAVVPNELNNYQEEVLRLTTGCSVEVTGKVVESPGQGQAYELQATDVKVVGWVEDAETYPMAKTRHSIEYLREVAHLRPRTNVIGAVARVRNCLAQAIHRFYHENGYYWVSAPLITASDAEGAGEMFRVSTLDMENLPRTEKGDVDYSEDFFGKETFLTVSGQLNAEAYACALSKVYTFGPTFRAENSNTSRHLAEFWMVEPEVAFAELDDVAKLAEDMLKYVFKAVLEERRDDMEFFAQRIDKDVISRLEKFVESDFAQVDYTDAIDILLKSGKKFEFPVEWGIDLASEHERYLAEEHFKAPVIVKNYPKDIKAFYMRLNDDGKTVAAMDVLAPGIGEIIGGSQREERLDILDARMREIGIDPEHMDWYRDLRRYGTVPHAGFGLGFERLVSYVTGMGNVRDVIPFPRTPRSANF

SEQ ID NO: 10721 - DNA, 1401 bp, Vibrio sp. RC586
  CDS (1)..(1401): transl_table=11
atgacttacgcgcctgtaaatgacgtactaagcggcaagctcgcagtagacagtgaagtcactgttcgcggctgggttcgcacacgtcgtgattccaaagctggaatttcgtttcttgccatctatgacggctcttgtttcaacccgattcaggccgtggttcctaataatctgaataattacgacaatgaagtcctgaagctaacgacaggttgctctgttgaagtaacggggacaattgttgattctccagcatctggtcaagcgtttgaactggctgcaactgcggtaaaagtagtgggttgggttgaagatgccgacacttacccaatggcgaaaactcgtcattctatcgaatatctgcgtgaagtggctcacctgcgtccacgtactaacgtgatcggtgccgtagcacgcgttcgtaactgcttggcacaagccattcaccgcttctaccacgaacaaggttacttctgggtttctgcaccactgatcaccgcttctgatgcagaaggtgcgggtgaaatgttccgcgtatcaacgctggatatggaaaacctaccgcgtactgatgcaggtaaagtggattacaaccaagacttctttggtaaagaaacgttccttactgtatcaggccagctcaacgcggaagcgtacgcttgtgcaatcagcaaagtgtacactttcggcccaacgttccgtgctgagaactcaaacactagccgtcatttggcggaattctggatggtcgaacctgaagtcgcgttcgcggatctaaacaccgtagcaaaactggctgaagacatgctgaagtatgtgttcaaagcggtactggctgagcgtcgtgacgatcttgagttctttaatgaccgcatcaacaacgaagtgattgcccgtcttgaacagtttgtagattcagattttgcacaagtggattacaccgatgcgatcgaaattctgaaaaactgtggcaaaacgtttgagttcccagttgagtggggtatcgacttagcttctgagcacgagcgcttcctcgcagaagaacacttcaaagcgccagtgatcgtaaagaactatccaaaagacatcaaagcgttctacatgcgtatgaacgaagatggcaaaaccgttgcagcgatggacgtattagctccgggcattggtgaaatcattggtggttcacaacgtgaagagcgtttggatgttctggatgcacgtatgcgtgaatttggtatcgatcctgagcacatggattggtatcgcgacttacgccgttacggcacagtaccgcacgcaggttttggtctaggcttcgagcgtctcgtgtcttacgtcactggtatgggcaacgtgcgtgatgtgattccattcccacgtacgccacgcagcgcaagcttctaa

SEQ ID NO: 10722 - protein, 466 aa, Vibrio sp. RC586
MTYAPVNDVLSGKLAVDSEVTVRGWVRTRRDSKAGISFLAIYDGSCFNPIQAVVPNNLNNYDNEVLKLTTGCSVEVTGTIVDSPASGQAFELAATAVKVVGWVEDADTYPMAKTRHSIEYLREVAHLRPRTNVIGAVARVRNCLAQAIHRFYHEQGYFWVSAPLITASDAEGAGEMFRVSTLDMENLPRTDAGKVDYNQDFFGKETFLTVSGQLNAEAYACAISKVYTFGPTFRAENSNTSRHLAEFWMVEPEVAFADLNTVAKLAEDMLKYVFKAVLAERRDDLEFFNDRINNEVIARLEQFVDSDFAQVDYTDAIEILKNCGKTFEFPVEWGIDLASEHERFLAEEHFKAPVIVKNYPKDIKAFYMRMNEDGKTVAAMDVLAPGIGEIIGGSQREERLDVLDARMREFGIDPEHMDWYRDLRRYGTVPHAGFGLGFERLVSYVTGMGNVRDVIPFPRTPRSASF

SEQ ID NO: 10723 - DNA, 1401 bp, Yersinia pestis D182038
  CDS (1)..(1401): transl_table=11
atgagcgtagtgcctgtagtcgacgtactgcaaggccgcgccgcggttggcagtgaagtcaccgtgcgcggttgggtgcgtacccggagagattctaaagcgggtatctccttcgttgccgtttatgacggttcctgctttgacccgttacaggccgtcgtgaataatactttgccgaattatcaggatgaagtactgcatctgaccaccggttgttccgttgaagtcaccggtaccgtggtcgcatcaccgggtgaaggccaaagttttgaaattcaagcaaccgccatcaacgtagtaggctgggttgatgatccggatacctacccgatggccgcaaaacgtcacagcattgaatatttgcgtgaagtggctcacttacgcccgcgtactaacctgattggtgccgttgcccgtgttcgccacacgttggcacaagcaatccaccgcttcttcgacgaaaatgggtatttctgggtttctacaccactgatcaccgcctctgatactgaaggcgcaggtgagatgttccgtgtttcaactttagatctggaaaacttgccacgcacggataccggtgctgtcgatttcagcgaagacttcttcggtaaagaagcgttcctgaccgtatcgggtcagctaaacggtgaaacctacgcctgtgcattatcaaaggtttacacctttggcccaaccttccgggctgaaaactccaataccagccgccatttggctgaattctggatggttgagccggaagtggccttcgcttctctggatgatgtcgccggtttggctgagaaaatgttgaaatacgttttccaggcggtcttgaatgcacgtgctgatgacatgaagttctttgccgaacgtgtcgataaagacgcggttgaccgcctgccacgtttcgtcacctctgattttgctcaggttgactacactgatgccattgagatcttgctggcatccggtcagaagtttgagaatgatgtttcatggggtattgatttgtcctctgaacatgagcgttatctggctgagaaacactttaaagcgccggtggtggttaaaaactatccgaaagatattaaagccttctatatgcgaatgaatgaagatggcaaaaccgttgcggcgatggatgttttagcgccgggtattggtgaaatcatcggtggttcacaacgtgaagagcgtttagatgtcttggatgcgcgtttagccgaaatgggcctgaataaagaagattattggtggtatcgtgatctgcgtcgctacggcactgtaccgcattcaggttttggcctcggatttgagcgtttaatctcatatgtcactggggttcaaaacgttcgggacgttattccgttcccacgcacaccgagaaatgccagtttctaa

SEQ ID NO: 10724 - protein, 466 aa, Yersinia pestis D182038
MSVVPVVDVLQGRAAVGSEVTVRGWVRTRRDSKAGISFVAVYDGSCFDPLQAVVNNTLPNYQDEVLHLTTGCSVEVTGTVVASPGEGQSFEIQATAINVVGWVDDPDTYPMAAKRHSIEYLREVAHLRPRTNLIGAVARVRHTLAQAIHRFFDENGYFWVSTPLITASDTEGAGEMFRVSTLDLENLPRTDTGAVDFSEDFFGKEAFLTVSGQLNGETYACALSKVYTFGPTFRAENSNTSRHLAEFWMVEPEVAFASLDDVAGLAEKMLKYVFQAVLNARADDMKFFAERVDKDAVDRLPRFVTSDFAQVDYTDAIEILLASGQKFENDVSWGIDLSSEHERYLAEKHFKAPVVVKNYPKDIKAFYMRMNEDGKTVAAMDVLAPGIGEIIGGSQREERLDVLDARLAEMGLNKEDYWWYRDLRRYGTVPHSGFGLGFERLISYVTGVQNVRDVIPFPRTPRNASF

SEQ ID NO: 10725 - DNA, 1674 bp, Ostreococcus tauri
  CDS (1)..(1674)
atgacgaccgcgcgcgcgcgaccgtgggggtgtcgacgacggtactcgggcgggggcgtccgcgcggggggggggggcgcgcgcgttgacgcccacggggcgccagcgcgggcgaacgcggcgtacgccaagccggagcgcatcgcgggggttaaaggacgggacggcggcgcgtcgaggatcggagagacgctggagctgcgaagattggcgcgaagcgttcgaacgccaaagggcattgcgttcatcgatctgaacgacgggagcgcgatgacgggaattcaagccgtcgtgagcgaagggagcggggcgtgggcgctcgcgaacagcggcgctcctggagggaaacaagcggctgaactcgccgttgacgagctcgagatcatcggtggggccgatccggagacgtacccgttgcagaagaagcgacacacgctggaatacctccgaagcattgcgcacttacgaccgcggacgaataccatcggagccgtggcgcgcgttcgaaacgagttggcgtacgccacgcacaattttttccaacaaaatggattcctgtacgtgcacacgcccatcatcaccgcctccgattgcgagggtgctggtgaacaattccaagtgacgacgctcctgagcggcctcgacgccggctcagcgacgactccgggagcggtgcaagccgcggaggtcgcggtgaaggcgcaaggcgatgcggtgaaggcgatgaaggcgggtggagacgttaacaaggagactttgctcgaggaggtggaaaaactcaaggctctcaaggctgaattggaggctctcagcgcctcgaccgggattcccacgaacaaggacggctccgtcgactacacccaggatttcttcggcaagcgttcgtacttgaccgtttcaggacaactcaacggcgaaatcatggcttgcgcggtgaacgacgtgtacactttcggtccgacgttccgggccgagaatagtaacacctctcgtcacttggctgagttctggatggtcgagcccgagctcgcgttcgccgacttgaaggacgatatggactgcgccgaggcgtacttgaagtactgcctcaatcacgttctcgaacactgcgatgaggatctagcgttcttcgaggcgaacatttccaaagacaaccttcgcgagcgccttcgcaacgttgcttcgcaagagtttgtccgcatcacgtacacggaagctgtcgagcacatccaaaaggcgacgaagaagttcgagttcccgtgcgagtgggggtcggatcttcagagtgaacatgagaggtacatttcggaagaggttttcaaggatcggcccgtcatcgtgcgcgactacccgaaggatatcaaggcgttctacatgcgcttgaacgacgacaacaaaaccgtcgcggcgatggatgtactcgttcctcgagtgggcgaactcatggggggaagccaaagagaagagcgactcgatgtgttggagcgcagaatcgaagaaaacggcctggagaaggaggcgtattggtggtacttggatttgaggcgatacgggtcgcagccgcacgcaggtttcggcctcggcttcgaacgcctcgtgcaatacgtcaccggtgttgaaaacattcgcgacgcgattcctttcccccgttacccgggtagcgccgaattctag

SEQ ID NO: 10726 - protein, 557 aa, Ostreococcus tauri
MTTARARPWGCRRRYSGGGVRAGGGGARVDAHGAPARANAAYAKPERIAGVKGRDGGASRIGETLELRRLARSVRTPKGIAFIDLNDGSAMTGIQAVVSEGSGAWALANSGAPGGKQAAELAVDELEIIGGADPETYPLQKKRHTLEYLRSIAHLRPRTNTIGAVARVRNELAYATHNFFQQNGFLYVHTPIITASDCEGAGEQFQVTTLLSGLDAGSATTPGAVQAAEVAVKAQGDAVKAMKAGGDVNKETLLEEVEKLKALKAELEALSASTGIPTNKDGSVDYTQDFFGKRSYLTVSGQLNGEIMACAVNDVYTFGPTFRAENSNTSRHLAEFWMVEPELAFADLKDDMDCAEAYLKYCLNHVLEHCDEDLAFFEANISKDNLRERLRNVASQEFVRITYTEAVEHIQKATKKFEFPCEWGSDLQSEHERYISEEVFKDRPVIVRDYPKDIKAFYMRLNDDNKTVAAMDVLVPRVGELMGGSQREERLDVLERRIEENGLEKEAYWWYLDLRRYGSQPHAGFGLGFERLVQYVTGVENIRDAIPFPRYPGSAEF

SEQ ID NO: 10727 - DNA, 1683 bp, Ostreococcus tauri
  CDS (1)..(1683)
atggcggacgcgtgcgcggacgcgctcgcggcggtgacgctgcgcgcgcacgcgtactcgcgcgtcacgggacggacgtccatcgaggacgtcctgcgaacgcccgcggcgacgctggtggggaagacgatcgtcgtcggggggtgggtgaaaacgggacgcgaggcggagcgaggaacgctgttgttcatcgcgctgaacgatggaagcgggccggggaacttgcagtgcgtggtgcggagtgagacgtacgcgctgagtgatctgaagacgacggggacgtcggtggtgctggagggggagctcagggaaccgccggagagcgcgacgggacaaaccatcgagctgcacgcgacgcgggtgctgatgtgcgggacgtgcgatggggcgacgtatccgatcgcgaaaaagaagcaaacgttggagtatctgcgggagaagattcacctgagaccgaggacgaacaccatcgcgagcgtggcgcgggtgcgaagcgcgctcgcgttcgcgacgcatagtttcttcaatcagaacggattcttgtacgtgcacacgccgtgcatcacgcagagcgattgcgagggcgctggggagatgttccaagtcaccaccatgctcagctctgcggagaaaccggaggctttggaggcggcggtaaagccggaggaattggaggccaagcgcggcgaagtctccgcctctggcgcaggcatcaaggcgatgaaggagagcggtgccgactcgaaggacgtgaagaaagccgtcaaggcaatggacacgctcaagcaagagttggcgcagatggaacacgcgtctcgtaagattggtggtcttcagcgcaccgaagacggctcgatcgactactctgaagatttcttcggcggcaaatctttcttgaccgtctcagggcagcttcaagtcgagacgtacgcgtgcgcgttatccaacgtgtacacgttcgggccgactttccgcgccgaaaactctaatacgacgcgtcacttggctgagttctggatgattgagccagaactcgcgttcgcggatttgcaggacgacatgcagtgcgcggaagactacgtcaagttctgctgcaactacctcctcgaacattgcttgggtgacctcgagttcttcgccaagatgtacgactcgacgtgcatcgatcgcgtgcgccaaatcgcgactacgccgttcggtcgcgtgtcgtatacggaagccatcgaactcttggagaaggctgtggcagatggtcacgagttcgtcttcccggtgtcgtggggcattgatctcgccaccgagcacgaacgttggctcgccgagtcgcacttcaaaaagccggtgatcgtgtacaactacccgaaggacatcaaggcattctatatgcgcctgaacgacgacaacaaaaccgtcgccgccatggacgttttggttccgcgcgtcggtgaactcatcggtggcagtcagcgcgaagagcgcctcgacgtcttggagcgtcgcatgaaggaatctggtctcgacccggaagattactcctggtatttggacttgcgccgtttcggcactgtcacgcactccggttttggtctcggcttcgagcgcttgattttgttgtgtaccgggatggacaacattcgcgacgttattccttacccgcgttggccgaacaactgcatcagctaa

SEQ ID NO: 10728 - protein, 560 aa, Ostreococcus tauri
MADACADALAAVTLRAHAYSRVTGRTSIEDVLRTPAATLVGKTIVVGGWVKTGREAERGTLLFIALNDGSGPGNLQCVVRSETYALSDLKTTGTSVVLEGELREPPESATGQTIELHATRVLMCGTCDGATYPIAKKKQTLEYLREKIHLRPRTNTIASVARVRSALAFATHSFFNQNGFLYVHTPCITQSDCEGAGEMFQVTTMLSSAEKPEALEAAVKPEELEAKRGEVSASGAGIKAMKESGADSKDVKKAVKAMDTLKQELAQMEHASRKIGGLQRTEDGSIDYSEDFFGGKSFLTVSGQLQVETYACALSNVYTFGPTFRAENSNTTRHLAEFWMIEPELAFADLQDDMQCAEDYVKFCCNYLLEHCLGDLEFFAKMYDSTCIDRVRQIATTPFGRVSYTEAIELLEKAVADGHEFVFPVSWGIDLATEHERWLAESHFKKPVIVYNYPKDIKAFYMRLNDDNKTVAAMDVLVPRVGELIGGSQREERLDVLERRMKESGLDPEDYSWYLDLRRFGTVTHSGFGLGFERLILLCTGMDNIRDVIPYPRWPNNCIS

SEQ ID NO: 10729 - DNA, 1593 bp, Emericella nidulans
  CDS (1)..(1593)
atgcagacatggcggcggaccttcgtcacgtcgcttcccaagctaaatcataggcctccagccgcgacaagcccgacgcttctccgatgcaaccaggtcctccaaagcagccgtcaagagacctgcagtcttgaagaccaggaaatcaggctacacggcttcgttcgctcagttcgcaagcagaagcgcttcgcgtttgcggaaatttccgatgggaccgctgtcgaaggcatacaggcgatattgaaacctgcgcaggcagcagaactatcgaccggaacagcgattgagatatcaggtatatggaaggcgtgcccgcctggcaaggaacagagccatgagctgcaggcgacctcggtgaacattacctatcctatccagaaaaagtaccacagtccggaattccttcgtcacatcccccacctccgctttcgaacacccttgaacgccctcctcgcccgcttccgatccgaatgcctataccaacttggtaatgttttccgcggcgctccaaacggcggctttgtacaagtccacccgccggtcataacgtcttccgattgcgagggcgcgggcgagaccttcgcggtcattccgcgcgagacactgataaagggtctcccaaaggaggagcacgaccacttcttccgggcgcctaagtatcttaacgtatcgtcgcaactccatctagaagcctacgcagcggaactggggaacgtctggacgttgtcgcccatgttcagggctgagaagagcgataccccgcgccatcttagcgaattttacatgctcgaagccgaggtcaattttctgtctgaccttgacgcgctgaccgacacagttgagtatcttctgcgtgacctcacgcgccgactctatgatacgccagcggcacaggagattctctccatcaagcgtgacaagggcccggaaacccaggattcaggggaacagatcgaccttcatcagcgatgggccgacctgatgtccggttccaaatggcgctgcataacctactccgacgccattgcggccctccaggaggctgtatcccaaggaaaggcagcgtttgagttttcacctacctggaccggcggcctccagctcgaacacgagcagtacattgtcaacactcttaacaacggccagcctatcttcgtcacagactacccgaaagtcatcaagccgttctacatggcgccctcgcacactcagtccaaccccaaagcggaaggggaaacagtcgcctgcttcgatcttctcctccctgaagtgagcgaagtcgccggcggctcgctaagagaacaccgtctgcccgaactgatccagaacatgcgcgagcacaacctcatcaagacctcgccctccaactcagaggaggaagcgaatcagggggaagcgccatacccccatcttctcccgggggaagatctgagtcatttacagtggtacgcggatctgcggagatgggggtccgcaccgcacggcgggtttggactgggctttgatcggttcttgggctatttgactggtgtgcagagtatacgggacacggttgcgttcccgcggtactttggacgcgcagattgttag

SEQ ID NO: 10730 - protein, 530 aa, Emericella nidulans
MQTWRRTFVTSLPKLNHRPPAATSPTLLRCNQVLQSSRQETCSLEDQEIRLHGFVRSVRKQKRFAFAEISDGTAVEGIQAILKPAQAAELSTGTAIEISGIWKACPPGKEQSHELQATSVNITYPIQKKYHSPEFLRHIPHLRFRTPLNALLARFRSECLYQLGNVFRGAPNGGFVQVHPPVITSSDCEGAGETFAVIPRETLIKGLPKEEHDHFFRAPKYLNVSSQLHLEAYAAELGNVWTLSPMFRAEKSDTPRHLSEFYMLEAEVNFLSDLDALTDTVEYLLRDLTRRLYDTPAAQEILSIKRDKGPETQDSGEQIDLHQRWADLMSGSKWRCITYSDAIAALQEAVSQGKAAFEFSPTWTGGLQLEHEQYIVNTLNNGQPIFVTDYPKVIKPFYMAPSHTQSNPKAEGETVACFDLLLPEVSEVAGGSLREHRLPELIQNMREHNLIKTSPSNSEEEANQGEAPYPHLLPGEDLSHLQWYADLRRWGSAPHGGFGLGFDRFLGYLTGVQSIRDTVAFPRYFGRADC

SEQ ID NO: 10731 - DNA, 1545 bp, Bdellovibrio bacteriovorus
  CDS (1)..(1545): transl_table=11
atgcgcaatttgaggccgtttccaagcatcccgagactgtgtcgcgaagtcgccccaattctggactgcaaaggcaccaagggattttgcgcgcgtctgttagacaagcatgcgaaagaacgatattttaatcggactgttgaaagggtccctatgaaaaccacactcgtaaaatcgctattcagagaaacagaaaagcatctggacaaagaagtctatctttccggatgggttcgcaaaatccgcgaccaaaagaatttcggcttcatcgaactgaatgacggcaccttctttaaaggtgtgcaggtggtgtttgataataatctggcaaactttgctgacgttgccgctctttccatctccagctccgtactggtcacgggcaaagttgtgaaatcccagggtgccggtcaaagttttgaagtgatggcttcgaaaatcgagatcgtgcaaaaagccgatttggaatacccgctgcaaaacaaacgtcacagcatggaattcctgcgcgagatcgcgcatcttcgcccgcgcaccaacacgttcagcgcggtcttccgcgtgcgctctgttttggcttatgcgattcacaagttcttcaacgaacagaactttgtctatgtgaacactccgatcatcaccggctctgacgccgagggtgcgggcgagatgttccgtgtgacaactctgaaactggacaaacctccgcgcaaagaagacggcagcattgatgccagccaggatttcttcggcaaagagaccaacctgactgtatcgggtcagttgaacggtgaaactttctgtgcggctttccgtaacatttatacgttcggtccgactttccgtgcggaaaactccaacacctcccgccatgcggcggagttctggatgatcgaacccgagatcgcttttgctgatctgacggcgaacatggaactggctgaagacatgatcaaatacatcatccgctacgtgatggagcaatgtccggaagaaatggagttcttcaaccagtttgtcgaaaaaggcctgttcgataaactgaacaacgttctgaacaacaatttcggacgtgtgacctacactgaagccatcgacattctgctaaaatgcggcaaaaaattcgagtacccggttcagtggggcatcgacatgcagtctgagcacgaacgttatctggcggaagagcatttcaaaaagccggtgtttgtgaccgactatccgaaagacatcaaggctttctatatgaagctgaacgaagacggcaaaaccgttcgtgcgatggatttgctggctccgggcattggcgaaatcatcggcggatcgcagcgtgaagacaatctggagaaactggagtcccgcatgaagcaagtgggtctgcatccggaagagtattccttctatacggatctgcgccgctatggcaccttcccgcacgcgggatacggcctgggctttgaacgcatgttgatgtatgtgaccggcatgggtaatatccgcgatgtgatcccgttcccgcgcacaccgaagaacgctttgttctag

SEQ ID NO: 10732 - protein, 514 aa, Bdellovibrio bacteriovorus
MRNLRPFPSIPRLCREVAPILDCKGTKGFCARLLDKHAKERYFNRTVERVPMKTTLVKSLFRETEKHLDKEVYLSGWVRKIRDQKNFGFIELNDGTFFKGVQVVFDNNLANFADVAALSISSSVLVTGKVVKSQGAGQSFEVMASKIEIVQKADLEYPLQNKRHSMEFLREIAHLRPRTNTFSAVFRVRSVLAYAIHKFFNEQNFVYVNTPIITGSDAEGAGEMFRVTTLKLDKPPRKEDGSIDASQDFFGKETNLTVSGQLNGETFCAAFRNIYTFGPTFRAENSNTSRHAAEFWMIEPEIAFADLTANMELAEDMIKYIIRYVMEQCPEEMEFFNQFVEKGLFDKLNNVLNNNFGRVTYTEAIDILLKCGKKFEYPVQWGIDMQSEHERYLAEEHFKKPVFVTDYPKDIKAFYMKLNEDGKTVRAMDLLAPGIGEIIGGSQREDNLEKLESRMKQVGLHPEEYSFYTDLRRYGTFPHAGYGLGFERMLMYVTGMGNIRDVIPFPRTPKNALF

SEQ ID NO: 10733 - DNA, 1755 bp, Oryza sativa subsp. japonica
  CDS (1)..(1755)
atggcggccgccgcggcgacccgcctcctccgccttgccccgcgccgcctccagggcccacccagggcgtgcccgttcgccgccctcccgctccacccgacgccggcccggctcgccgccaccacctcgaggtggcgccgcttctgcgccgccgcgcaggcctcggcgccgcccccgccaccggccgccacggcggcggcggcggcggcctcgggggaggccgtgggggagttcaggagacggacgcgggtggcggatgtcaagggaggggaggacgagggcgccgcgtgggttggaaagcagctcgccgtgcgcgggtgggtgcgcacctgccgcgcccagaggaccgtcaccttcgtcgaggttaatgatggttcttgcttgtccaacatgcaatgtgtattgactcctgatacagaaggctacgaccagtacattttactggtcaatattttcattggtggatgtcagatagactctatcactactggggcctctgtgttagtggaaggagttatagcaagcagccaaggtggtaaacaaaaagtggagttgaaggtttcaaagatcagtgtggctgtagacaatattatcccaggtaagcacgcttctagtgcattttttattggagaaagtgatccaacatcttttcctatacaaaagaagcgggcatcaagagaatttctgagaactgtagcccatctccgtcctcggacaaatacttttggcgcagtggcaagagtgagaaatgctttggcatacgcaacccacaaattttttcaagacaacggatttgtttgggtagcaagccctattatcacagcatcagactgtgaaggagcaggggagcagttttatgtgacaacattgatttcgaatagtgctgaaggtggttctctagtcaaggatattccttctactaaggatggaagggttgattggtcacaggatttcttctgcaaaccagcatttctgacagtgtctgggcaactgaatggtgaaacatacgctacagctctatcagatgtttacacttttggtccaacatttagagctgaaaattcaaacacctcaagacatttggctgaattttggatgattgagcctgaacttgcctttgcggatctaaatgatgacatggcatgtgcgagttcatatctccagtatgtagtgaagtatgttctagagaactgcaaagaagatatggatttctttaatacatggattgaaaaagggatcatcgatagattaaatgacgtagttgagaaaaactttgttcacttgtcatattctgatgctattgagctacttgttgggtccaagaagaaatttgagttcccggtcaaatggggattggatctgcaaagtgagcatgaaagatatatcacagaagttgcttttggtgggcgcccggtgataattagagattatccaaaggaaatcaaagctttctatatgcgagagaatgatgatggtaaaacagttgctgcaatggatctattggttcctcgggttggtgaactcattggtggaagccaaagggaagaacgtcttgattaccttgaagctcgcttggatgagttaaatcttaacaaagatagctactggtggtacttagatctacgtcgatatggatcagttcctcatgctggttttggtcttggatttgaaagactagtacagtttgcaactggaatggacaacattagagacaccattccatttccccgggttccaggctctgcagagttttag

SEQ ID NO: 10734 - protein, 584 aa, Oryza sativa subsp. japonica
MAAAAATRLLRLAPRRLQGPPRACPFAALPLHPTPARLAATTSRWRRFCAAAQASAPPPPPAATAAAAAASGEAVGEFRRRTRVADVKGGEDEGAAWVGKQLAVRGWVRTCRAQRTVTFVEVNDGSCLSNMQCVLTPDTEGYDQYILLVNIFIGGCQIDSITTGASVLVEGVIASSQGGKQKVELKVSKISVAVDNIIPGKHASSAFFIGESDPTSFPIQKKRASREFLRTVAHLRPRTNTFGAVARVRNALAYATHKFFQDNGFVWVASPIITASDCEGAGEQFYVTTLISNSAEGGSLVKDIPSTKDGRVDWSQDFFCKPAFLTVSGQLNGETYATALSDVYTFGPTFRAENSNTSRHLAEFWMIEPELAFADLNDDMACASSYLQYVVKYVLENCKEDMDFFNTWIEKGIIDRLNDVVEKNFVHLSYSDAIELLVGSKKKFEFPVKWGLDLQSEHERYITEVAFGGRPVIIRDYPKEIKAFYMRENDDGKTVAAMDLLVPRVGELIGGSQREERLDYLEARLDELNLNKDSYWWYLDLRRYGSVPHAGFGLGFERLVQFATGMDNIRDTIPFPRVPGSAEF

SEQ ID NO: 10735 - DNA, 1401 bp, Escherichia coli (strain K12)
  CDS (1)..(1401): transl_table=11
atgagcgttgtgcctgtagccgacgtactccagggccgtgtagccgttgacagcgaagtcaccgtgcgcggatgggtacgtacccgccgagattcaaaagctggcatctccttcctcgccgtttatgacggttcctgctttgatcctgtacaggctgtcatcaataattctctgcccaattacaatgaagacgtcctgcgtctgaccaccggctgctcggtcattgtgacgggtaaagtcgtggcgtcgccgggccaggggcaacaatttgaaattcaggccagcaaggttgaagttgctggttgggttgaagatccagacacttacccgatggcggcaaaacgccacagcattgagtatctgcgtgaagtcgctcacctgcgtccgcgcacaaacctgattggtgccgtcgcgcgcgttcgccatacgctggcgcaggcgctgcatcgcttctttaacgagcagggattcttctgggtttcaacgccactgattaccgcatctgataccgaaggtgcaggcgaaatgttccgcgtttctacgctggatctggaaaacctgccgcgtaacgatcagggcaaagtggatttcgacaaagacttctttggtaaagagtctttcctgaccgtatctggccagttgaacggcgaaacctacgcttgcgcattgtccaaaatttataccttcggcccgactttccgtgctgaaaactccaacaccagccgtcacctggcggaattctggatgctggagccggaagtggcgtttgctaacctgaacgatattgcgggtctggctgaagccatgctgaaatatgtcttcaaagcggttctcgaagaacgcgctgacgacatgaaattcttcgctgaacgcgtagataaagatgccgtttcacgtctggaacgcttcattgaagccgattttgcgcaggtggattataccgacgcagtgaccattctcgaaaactgcggcaggaagtttgaaaacccggtttactggggagtcgatctctcttctgagcatgagcgttatctggcggaagaacactttaaagcaccggtagtggttaaaaactatccgaaagatattaaagcgttctatatgcgccttaacgaagacggtaaaaccgttgcggctatggacgttctggctccgggcatcggtgagatcattggtggctcccagcgtgaagaacgtctggacgtgctggacgagcgtatgctggaaatgggcctgaataaagaagattactggtggtatcgcgatctgcgtcgctacggtactgttccgcattcaggtttcggtcttggttttgaacgtctgattgcttacgtaactggcgtgcaaaacgtacgtgatgtgattccgttcccacgtactccgcgtaacgccagcttctaa

SEQ ID NO: 10736 - protein, 466 aa, Escherichia coli (strain K12)
MSVVPVADVLQGRVAVDSEVTVRGWVRTRRDSKAGISFLAVYDGSCFDPVQAVINNSLPNYNEDVLRLTTGCSVIVTGKVVASPGQGQQFEIQASKVEVAGWVEDPDTYPMAAKRHSIEYLREVAHLRPRTNLIGAVARVRHTLAQALHRFFNEQGFFWVSTPLITASDTEGAGEMFRVSTLDLENLPRNDQGKVDFDKDFFGKESFLTVSGQLNGETYACALSKIYTFGPTFRAENSNTSRHLAEFWMLEPEVAFANLNDIAGLAEAMLKYVFKAVLEERADDMKFFAERVDKDAVSRLERFIEADFAQVDYTDAVTILENCGRKFENPVYWGVDLSSEHERYLAEEHFKAPVVVKNYPKDIKAFYMRLNEDGKTVAAMDVLAPGIGEIIGGSQREERLDVLDERMLEMGLNKEDYWWYRDLRRYGTVPHSGFGLGFERLIAYVTGVQNVRDVIPFPRTPRNASF

SEQ ID NO: 10737 - DNA, 1401 bp, Erwinia carotovora subsp. atroseptica
  CDS (1)..(1401): transl_table=11
atgagcgtagtgcctgtagtcgatgtactgcaaggccgtgttgccgttgacagcgaagtcaccgtgcgcggctgggtacgtacccggagagattctaaagccggtatctcctttatcgccgtttatgacggctcctgctttaatccattacaggctgtcgttaataataatctctcgaattaccaggatgacgtactgcgtctgactaccggttgctccgttgaaatcaccggtaacgtcgtcgcctctccaggtgaaggccaaagcttcgagctgcaagcgaccaacgtcaacgtcgtcggctgggttgacgatcccgatacctacccgatggcagcaaagcgtcacagtatcgaatacctgcgcgaagtcgcgcacttgcgtccacgaaccaatctgatcggtgccgttgcgcgcgttcgtcatacgctggcgcaggcgattcatcgcttcttccacgagaacggttatttctgggtgtctaccccgctgattactgcatctgataccgaaggtgcaggtgaaatgttccgtgtttccacgctcgatatggaaaacctgccgcgtaccgaacaaggcaaagtagatttcagcaaagatttcttcggtaaagaagcgttcctgaccgtatccggtcagttgaatggcgaaacctacgcttgtgcgctgtccaacgtgtatacctttggtccgactttccgcgcagaaaactccaacaccgcccgccatctggctgagttttggatgatcgaaccagaagtggcttttgcttctctggatgacgtcgctgctctggcagaaaatctactgaaatatgttttccaagccgtactgaacgagcgtgccgatgatatggcgttctttgccgagcgcgtcgataaagaagcggtgactcgactggaaaaattcgtcagctccgattttgcacaggtagattacaccgatgccgtcgagattttgctgaactgcggccagcagtttgaaaatccggtttactggggcgttgacctctcctccgaacatgagcgttatcttgcggagcaacacttcaaagcaccggttgtcgttaaaaactatccgaaagatatcaaagctttctatatgcgcatgaacgacgatggtaaaactgttgccgctatggatgttctggctccaggaatcggtgaaatcatcgggggctctcagcgtgaagaacgtctggcagcgctggatagccgtctggaagagatgggactgaataaagaagactactggtggtatcgtgatttacgtcgttacggcaccattccacattccggttttggtttaggttttgaacgattaattgcctatgttaccggtgtacaaaatgtgcgcgacgtgatccctttcccgcgtactccacggaatgccagtttctaa

SEQ ID NO: 10738 - protein, 466 aa, Erwinia carotovora subsp. atroseptica
MSVVPVVDVLQGRVAVDSEVTVRGWVRTRRDSKAGISFIAVYDGSCFNPLQAVVNNNLSNYQDDVLRLTTGCSVEITGNVVASPGEGQSFELQATNVNVVGWVDDPDTYPMAAKRHSIEYLREVAHLRPRTNLIGAVARVRHTLAQAIHRFFHENGYFWVSTPLITASDTEGAGEMFRVSTLDMENLPRTEQGKVDFSKDFFGKEAFLTVSGQLNGETYACALSNVYTFGPTFRAENSNTARHLAEFWMIEPEVAFASLDDVAALAENLLKYVFQAVLNERADDMAFFAERVDKEAVTRLEKFVSSDFAQVDYTDAVEILLNCGQQFENPVYWGVDLSSEHERYLAEQHFKAPVVVKNYPKDIKAFYMRMNDDGKTVAAMDVLAPGIGEIIGGSQREERLAALDSRLEEMGLNKEDYWWYRDLRRYGTIPHSGFGLGFERLIAYVTGVQNVRDVIPFPRTPRNASF

SEQ ID NO: 10739 - DNA, 1416 bp, Pasteurella multocida
  CDS (13)..(1416): transl_table=11
ttgaggttttatatgactaaagtcgcatctattgtagatgttttacaaggcaaaattgccattggtgaaaccgtcactgtccgtggctggattcgtactcgccgtgactcaaaagcaggtctttcttttttggccatttatgatggttcttgctttgatcctatccaagcaattgtcaataatgatattgaaaattacgaaacagaagtgttgcgtttaacaaccggctgttctgttattgtaacaggtactgttgtagaatcccctgctgaaggtcaagctgttgaattacaagcagaaaaagtcgaggtcgcaggttgggttgaggacccagaaacatatccaatggcggcaaaacgtcactcaattgaatatttacgtgaagtggctcatttacgccctcgtaccaatattattggcgcagtcgcacgtgttcgtcactgcttagcacaagccatccaccgttttttccatgaacaaggtttctattgggtagcgacgccattaattaccgcatcagatacagaaggggcaggcgaaatgttccgtgtgtccactctcgacttagaaaatctgccacgtgatgacaaaggtgcggtcgatttttcacaagatttctttggaaaagaatctttcttaacagtatccgggcaattaaatggtgaaacctatgcctgtgctttaagtaaaatttatacttttggtccaacattccgtgcagaaaattccaatacaacacgccacttagctgaattctggatggttgaaccagaaattgcctttgcgactctggccgataacgcgaaattagccgaggatatgttaaagtatgtattccgtgcagtacttgaagaacgcaaagatgacttaaaattctttgaaaaacatgtcgataacgacgttattagccgtttagaaaatttcatcaattcagatttcgcgcaaattgactatactgatgcaattgaggtgttattacaatcaggtaagaaatttgaattcccagtttcttgggggatcgacttatcctctgaacatgaacgttatttagcggaagaacactttaaatcgccagttgtggttaaaaactatccgaaagacatcaaggctttctatatgcgcttaaatgatgacggaaaaactgtcgcagcaatggatgtgttagcaccgggtattggtgaaattatcggcggttcacaacgtgaagaacgtttagacgtgctggataaacgaatgatcgaaatgggactcaacccagaagattactggtggtatcgcgatttacgccgttatggcaccgtaccacacgctggttttggtttaggttttgaacgtttaatcgtgtatgttactggcgtacaaaatattcgtgatgtgatcccattcccacgttcaccgcgtaatgcaaacttctaa

SEQ ID NO: 10740 - protein, 467 aa, Pasteurella multocida
MTKVASIVDVLQGKIAIGETVTVRGWIRTRRDSKAGLSFLAIYDGSCFDPIQAIVNNDIENYETEVLRLTTGCSVIVTGTVVESPAEGQAVELQAEKVEVAGWVEDPETYPMAAKRHSIEYLREVAHLRPRTNIIGAVARVRHCLAQAIHRFFHEQGFYWVATPLITASDTEGAGEMFRVSTLDLENLPRDDKGAVDFSQDFFGKESFLTVSGQLNGETYACALSKIYTFGPTFRAENSNTTRHLAEFWMVEPEIAFATLADNAKLAEDMLKYVFRAVLEERKDDLKFFEKHVDNDVISRLENFINSDFAQIDYTDAIEVLLQSGKKFEFPVSWGIDLSSEHERYLAEEHFKSPVVVKNYPKDIKAFYMRLNDDGKTVAAMDVLAPGIGEIIGGSQREERLDVLDKRMIEMGLNPEDYWWYRDLRRYGTVPHAGFGLGFERLIVYVTGVQNIRDVIPFPRSPRNANF

SEQ ID NO: 10741 - DNA, 1473 bp, Rhodopirellula baltica
  CDS (1)..(1473): transl_table=11
ttgtggtggaggcgatccagaaccaattcgctacgatacacagttcatccttttgcttcccttcaacgctcgatgattgctcccatggactggaccacgattgacgcctgccgcaccagcactgagttgcctcgcccagtcgaaattcgcgggtggattcgaacacgacgtgacagcaaaggcggtttcagcttcctagaagtcaacgacggcacgtcactgggcaacctgcaagtggtcgccccggcagagctggaaaactatgccgaagaaattcaaaaattgacggccggatgcagcgtcgttgttcaaggcgaactagttgagtcccccgccaaaggtcagtccaccgaacttcacgccagctccgttcgcgtcatcggctggtgcgatggagaaacttacccgctgcaaaagaaacgacactcgttcgaaaaacttcgcgaatggtcgcacctgcgtgcccgcaccaacacgctgggtgcggtgatgcgagttcgcaaccggatcagccaatccattcaccgcttcttcgacgacgaaggcttcaactacctgcacacaccgatcatcacggccagtgactgcgaaggtgccggtgaaatgttccgcgtcacgacgctgaacctcgaaaaattggcgggttcgaatcgccccttcgacaccaaacaggatttcttccagaaaccaacccatctgaccgtcagcggtcaattggaagccgaaacctatgcgacggcgctgtctcgtgtttacaccttcgggccgactttccgggccgaaaacagcaacacgtcgcggcacctggccgagttttggatggttgaacccgaagccgcgttctacgacctcaacgacaacatgcaattggcggaaagattcctcaaacgagtcttctcggactgcctctcgcattgcggtgaagacatggatttcttcaacgagcggatcgaaaaaggaaaaatcgatcaactgaaatccgtgatcgaaaaaccgttcgaacacatgacctacaccgacgcggtcgagcgattgctcgcttgcgatgaaaagttcgaatacccagtcaactggggcacggatctgcaagccgaacacgaacgctacttgaccagcgtcgttggcggcccagtcatcctgactgactacccatcctcgatcaaaccgttctatatgcgagtcagtgacgacggcaaaacggtcgccgcgatggacgtgttggtccccggcgtcggcgaaatcattggcgggtcgcaacgtgaagaacgcctcgatgtgctgcaacgccgcatggccgaaggcggcttggacgaatccgaatactggtggtacgtcgacctgcgtcgctacggcaccgtgccccacgcgggattcgggttgggactggaacgagccgtccagtacgtcaccggcatggccaacattcgcgacgtgatcccgttcccacgcacaccgggcaacgccgaattttga

SEQ ID NO: 10742 - protein, 490 aa, Rhodopirellula baltica
MWWRRSRTNSLRYTVHPFASLQRSMIAPMDWTTIDACRTSTELPRPVEIRGWIRTRRDSKGGFSFLEVNDGTSLGNLQVVAPAELENYAEEIQKLTAGCSVVVQGELVESPAKGQSTELHASSVRVIGWCDGETYPLQKKRHSFEKLREWSHLRARTNTLGAVMRVRNRISQSIHRFFDDEGFNYLHTPIITASDCEGAGEMFRVTTLNLEKLAGSNRPFDTKQDFFQKPTHLTVSGQLEAETYATALSRVYTFGPTFRAENSNTSRHLAEFWMVEPEAAFYDLNDNMQLAERFLKRVFSDCLSHCGEDMDFFNERIEKGKIDQLKSVIEKPFEHMTYTDAVERLLACDEKFEYPVNWGTDLQAEHERYLTSVVGGPVILTDYPSSIKPFYMRVSDDGKTVAAMDVLVPGVGEIIGGSQREERLDVLQRRMAEGGLDESEYWWYVDLRRYGTVPHAGFGLGLERAVQYVTGMANIRDVIPFPRTPGNAEF

SEQ ID NO: 10743 - DNA, 1668 bp, Oryza sativa
  CDS (1)..(1668)
atggcggccgccgcggcgacccgcctcctccgccttgccccgcgccgcctccagggcccacccagggcgtgcccgttcgccgccctcccgctccacccgacgccggcccggctcgccgccaccacctcgaggtggcgccgcttctgcgccgccgcgcaggcctcggcgccgcccccgccaccggccgccacggcggcggcggcggcggcctcgggggaggccgtgggggagttcacgagacggacgcgggtggcggatgtcaagggaggggaggacgagggcgccgcgtgggttggaaagcagctcgccgtgcgcgggtgggtgcgcacctgccgcgcccagaggaccgtcaccttcgtcgaggttaatgatggttcttgcttggccaacatgcaatgtgtattgactcctgatacagaaggctacgaccagatagactctatcactactggggcctctgtgttagtggaaggagttatagcaagcagccaaggtggtaaacaaaaagtggagttgaaggtttcaaagatcagtgtgattggagaaagtgatccaacatcttttcctatacaaaagaagcgggcatcaagagaatttctgagaactgtagcccatctccgtcctcggacaaatacttttggcgcagtggcaagagtgagaaatgctttggcatacgcaacccacaaattttttcaagacaacggatttgtttgggtagcaagccctattatcacagcatcagactgtgaaggagcaggggagcagttttatgtgacaacattgatttcgaatagtgctgaaggtggttctctagtcaaggatattccttctactaaggatggaagggttgattggtcacaggatttcttctgcaaaccagcatttctgacagtgtctgggcaactgaatggtgaaacatacgctacagctctatcagatgtttacacttttggtccaacatttagagctgaaaattcaaacacctcaagacatttggctgaattttggatgattgagcctgaactggcctttgcggatctaaatgatgacatggcatgtgcgagttcatatctccagtatgtagtgaagtatgttctagagaactgcaaagaagatatggatttctttaatacatggattgaaaaagggatcatcgatagattaaatgacgtagttgagaaaaactttgttcacttgtcatattctgatgctattgagctacttgttgggtccaagaagaaatttgagttcccggtcaaatggggattggatctgcaaagtgagcatgaaagatatatcacagaagttgcttttggtgggcgcccggtgataattagagattatccaaaggaaatcaaagctttctatatgcgagagaatgatgatggtaaaacagttgctgcaatggatctattggttcctcgggttggtgaactcattggtggaagccaaagggaagaacgtcttgattaccttgaagctcgcttggatgagttaaatcttaacaaagatagctactggtggtacttagatctacgtcgatatggatcagttcctcatgctggttttggtcttggatttgaaagactagtacagtttgcaactggaatggacaacattagagacaccattccatttccccgggttccaggctctgcagagttttag

SEQ ID NO: 10744 - protein, 555 aa, Oryza sativa
MAAAAATRLLRLAPRRLQGPPRACPFAALPLHPTPARLAATTSRWRRFCAAAQASAPPPPPAATAAAAAASGEAVGEFTRRTRVADVKGGEDEGAAWVGKQLAVRGWVRTCRAQRTVTFVEVNDGSCLANMQCVLTPDTEGYDQIDSITTGASVLVEGVIASSQGGKQKVELKVSKISVIGESDPTSFPIQKKRASREFLRTVAHLRPRTNTFGAVARVRNALAYATHKFFQDNGFVWVASPIITASDCEGAGEQFYVTTLISNSAEGGSLVKDIPSTKDGRVDWSQDFFCKPAFLTVSGQLNGETYATALSDVYTFGPTFRAENSNTSRHLAEFWMIEPELAFADLNDDMACASSYLQYVVKYVLENCKEDMDFFNTWIEKGIIDRLNDVVEKNFVHLSYSDAIELLVGSKKKFEFPVKWGLDLQSEHERYITEVAFGGRPVIIRDYPKEIKAFYMRENDDGKTVAAMDLLVPRVGELIGGSQREERLDYLEARLDELNLNKDSYWWYLDLRRYGSVPHAGFGLGFERLVQFATGMDNIRDTIPFPRVPGSAEF

SEQ ID NO: 10745 - DNA, 25 bp, Artificial sequence
  primer
atgtttcatgctttcaccttcctta

SEQ ID NO: 10746 - DNA, 25 bp, Artificial sequence
  primer
tcaaaaatcgatggattctgcagat

SEQ ID NO: 10747 - protein, 693 aa, Artificial sequence
  consensus sequence
  Variant (3)..(3): Xaa in position 3 is any amino acid
  Variant (5)..(6): Xaa in position 5 to 6 is any amino acid
  Variant (8)..(10): Xaa in position 8 to 10 is any amino acid
  Variant (11)..(15): Xaa in position 11 to 15 is any or no amino acid
  Variant (17)..(20): Xaa in position 17 to 20 is any amino acid
  Variant (24)..(28): Xaa in position 24 to 28 is any amino acid
  Variant (30)..(45): Xaa in position 30 to 45 is any amino acid
  Variant (46)..(83): Xaa in position 46 to 83 is any or no amino acid
  Variant (85)..(89): Xaa in position 85 to 89 is any amino acid
  Variant (90)..(115): Xaa in position 90 to 115 is any or no amino acid
  Variant (117)..(117): Xaa in position 117 is any amino acid
  Variant (118)..(118): Xaa in position 118 is any or no amino acid
  Variant (120)..(128): Xaa in position 120 to 128 is any amino acid
  Variant (129)..(160): Xaa in position 129 to 160 is any or no amino acid
  Variant (163)..(164): Xaa in position 163 to 164 is any amino acid
  Variant (165)..(172): Xaa in position 165 to 172 is any or no amino acid
  Variant (174)..(175): Xaa in position 174 to 175 is any amino acid
  Variant (177)..(177): Xaa in position 177 is any amino acid
  Variant (180)..(182): Xaa in position 180 to 182 is any amino acid
  Variant (186)..(186): Xaa in position 186 is any amino acid
  Variant (190)..(192): Xaa in position 190 to 192 is any amino acid
  Variant (194)..(195): Xaa in position 194 to 195 is any amino acid
  Variant (197)..(197): Xaa in position 197 is any amino acid
  Variant (199)..(203): Xaa in position 199 to 203 is any amino acid
  Variant (205)..(205): Xaa in position 205 is any amino acid
  Variant (207)..(208): Xaa in position 207 to 208 is any amino acid
  Variant (210)..(213): Xaa in position 210 to 213 is any amino acid
  Variant (214)..(216): Xaa in position 214 to 216 is any or no amino acid
  Variant (218)..(222): Xaa in position 218 to 222 is any amino acid
  Variant (224)..(224): Xaa in position 224 is any amino acid
  Variant (227)..(227): Xaa in position 227 is any amino acid
  Variant (230)..(230): Xaa in position 230 is any amino acid
  Variant (236)..(236): Xaa in position 236 is any amino acid
  Variant (238)..(239): Xaa in position 238 to 239 is any amino acid
  Variant (240)..(337): Xaa in position 240 to 337 is any or no amino acid
  Variant (341)..(345): Xaa in position 341 to 345 is any amino acid
  Variant (353)..(354): Xaa in position 353 to 354 is any amino acid
  Variant (356)..(357): Xaa in position 356 to 357 is any amino acid
  Variant (359)..(359): Xaa in position 359 is any amino acid
  Variant (361)..(364): Xaa in position 361 to 364 is any amino acid
  Variant (377)..(377): Xaa in position 377 is any amino acid
  Variant (379)..(379): Xaa in position 379 is any amino acid
  Variant (382)..(383): Xaa in position 382 to 383 is any amino acid
  Variant (388)..(388): Xaa in position 388 is any amino acid
  Variant (392)..(392): Xaa in position 392 is any amino acid
  Variant (394)..(394): Xaa in position 394 is any amino acid
  Variant (396)..(397): Xaa in position 396 to 397 is any amino acid
  Variant (399)..(405): Xaa in position 399 to 405 is any amino acid
  Variant (407)..(409): Xaa in position 407 to 409 is any amino acid
  Variant (411)..(420): Xaa in position 411 to 420 is any amino acid
  Variant (421)..(425): Xaa in position 421 to 425 is any or no amino acid
  Variant (427)..(438): Xaa in position 427 to 438 is any amino acid
  Variant (439)..(467): Xaa in position 439 to 467 is any or no amino acid
  Variant (469)..(472): Xaa in position 469 to 472 is any amino acid
  Variant (475)..(475): Xaa in position 475 is any amino acid
  Variant (477)..(479): Xaa in position 477 to 479 is any amino acid
  Variant (481)..(485): Xaa in position 481 to 485 is any amino acid
  Variant (486)..(494): Xaa in position 486 to 494 is any or no amino acid
  Variant (496)..(497): Xaa in position 496 to 497 is any amino acid
  Variant (498)..(501): Xaa in position 498 to 501 is any or no amino acid
  Variant (504)..(504): Xaa in position 504 is any amino acid
  Variant (507)..(508): Xaa in position 507 to 508 is any amino acid
  Variant (513)..(513): Xaa in position 513 is any amino acid
  Variant (515)..(515): Xaa in position 515 is any amino acid
  Variant (517)..(519): Xaa in position 517 to 519 is any amino acid
  Variant (520)..(528): Xaa in position 520 to 528 is any or no amino acid
  Variant (531)..(534): Xaa in position 531 to 534 is any amino acid
  Variant (537)..(538): Xaa in position 537 to 538 is any amino acid
  Variant (541)..(541): Xaa in position 541 is any amino acid
  Variant (545)..(545): Xaa in position 545 is any amino acid
  Variant (546)..(546): Xaa in position 546 is any or no amino acid
  Variant (548)..(548): Xaa in position 548 is any amino acid
  Variant (550)..(550): Xaa in position 550 is any amino acid
  Variant (551)..(570): Xaa in position 551 to 570 is any or no amino acid
  Variant (574)..(574): Xaa in position 574 is any amino acid
  Variant (576)..(576): Xaa in position 576 is any amino acid
  Variant (578)..(578): Xaa in position 578 is any amino acid
  Variant (580)..(580): Xaa in position 580 is any amino acid
  Variant (582)..(583): Xaa in position 582 to 583 is any amino acid
  Variant (586)..(587): Xaa in position 586 to 587 is any amino acid
  Variant (591)..(591): Xaa in position 591 is any amino acid
  Variant (594)..(598): Xaa in position 594 to 598 is any amino acid
  Variant (600)..(607): Xaa in position 600 to 607 is any amino acid
  Variant (608)..(651): Xaa in position 608 to 651 is any or no amino acid
  Variant (654)..(655): Xaa in position 654 to 655 is any amino acid
  Variant (658)..(659): Xaa in position 658 to 659 is any amino acid
  Variant (661)..(663): Xaa in position 661 to 663 is any amino acid
  Variant (665)..(665): Xaa in position 665 is any amino acid
  Variant (674)..(678): Xaa in position 674 to 678 is any amino acid
  Variant (681)..(682): Xaa in position 681 to 682 is any amino acid
  Variant (683)..(683): Xaa in position 683 is any or no amino acid
  Variant (685)..(685): Xaa in position 685 is any amino acid
GWXRXXRXXXXXXXXFXXXXDGSXXXXXQXXXXXXXXXXXXXXXXXXXXXXXXXXXXXXXXXXXXXXXXXXXXXXXXXXXXXXGXXXXXXXXXXXXXXXXXXXXXXXXXXXXXXXQXXEXXXXXXXXXXXXXXXXXXXXXXXXXXXXXXXXXXXXXXXXXYPXXXXXXXXXXHXXEXLRXXXHLRXRTNXXXAXXRXRXXXXXAXHXXFXXXXXXXFXXXXXPXITXSDXEGAGEXFXXXXXXXXXXXXXXXXXXXXXXXXXXXXXXXXXXXXXXXXXXXXXXXXXXXXXXXXXXXXXXXXXXXXXXXXXXXXXXXXXXXXXXXXXXXXXXXXXXXXDFFXXXXXLTVSGQLXXEXXAXAXXXXYTFGPTFRAENSXTXRHXXEFWMXEPEXAXFXXLXXXXXXXEXXXKXXXXXXXXXXXXXXXFXXXXXXXXXXXXXXXXXXXXXXXXXXXXXXXXXXXXXXXXXFXXXXYTXAXXXLXXXXXXXXXXXXXXFXXXXXXWGXDLXXEHERXLXEXXXXXXXXXXXXPVXXXXYPXXIKXFYMXXNXDXXXXXXXXXXXXXXXXXXXXXKTVXAXDXLXPXXGEXXGGSXREXXXXXLXXXXXXXXXXXXXXXXXXXXXXXXXXXXXXXXXXXXXXXXXXXXXXXXXXXXWYXXLRXXGXXXHXGFGLGFERXXXXXTGXXXNXRDVIPFPR

SEQ ID NO: 10748 - protein, 15 aa, Artificial sequence
  protein pattern
  Variant (2)..(2): Xaa in position 2 is Phe, Ile or Val
  Variant (3)..(3): Xaa in position 3 is Ile, Leu or Val
  Variant (4)..(4): Xaa in position 4 is any amino acid
  Variant (5)..(5): Xaa in position 5 is Asp or Asn
  Variant (6)..(6): Xaa in position 6 is Trp or Tyr
  Variant (8)..(10): Xaa in position 8 to 10 is any amino acid
  Variant (12)..(12): Xaa in position 12 is Ala, Pro or Ser
VXXXXXPXXXKXFYM

SEQ ID NO: 10749 - DNA, 465 bp, Zea mays
  CDS (1)..(465)
atggccagcagcgaggaaaacaatggtgaggtcacctacggcagcatggtaccgatcagcaaccctgcaggatacttctgttggcccgtggctgtgaccaatgaacacggggaagacactggtgagtctgccgatggggacgagacaccaataagcaaccctgcaggagacttctgcagttggcctgttgtcgcaaccaacgacgatgaggaaaatgtcggcgaggtcgcctacaacagcgtcctgaacctcgaatcacctgaccacaccgacctcctcaggatcatgatgggcaacaggtacagcactgatgaagcctcggagcagttccagaacgtggcccgcctccaggctcctggcttcaccgccctcctaaccgtcatgaacaacgcagggtacggtccggctgcggactgtggcccccacgatgggcacaaagtgatgacaaggttagaagggtggtag

SEQ ID NO: 10750 - protein, 154 aa, Zea mays
MASSEENNGEVTYGSMVPISNPAGYFCWPVAVTNEHGEDTGESADGDETPISNPAGDFCSWPVVATNDDEENVGEVAYNSVLNLESPDHTDLLRIMMGNRYSTDEASEQFQNVARLQAPGFTALLTVMNNAGYGPAADCGPHDGHKVMTRLEGW

SEQ ID NO: 10751 - DNA, 21 bp, Artificial sequence
  primer
atggccagcagcgaggaaaac

SEQ ID NO: 10752 - DNA, 20 bp, Artificial sequence
  primer
ctaccacccttctaaccttg

SEQ ID NO: 10753 - DNA, 459 bp, Zea mays
  CDS (1)..(459)
atgaaaagtgtcaagcaaactcctgcttacaaaaataggttaaaagctttggagtatgagcgaacaggaggaattgctagcaaaaagaagggcatcaagcaggtggataagaaagttgaagaagagctaagtaatgaagttgaattgcaaattcatggggttgaaaaaccgtctgtttggaggctgtttggtgtccaatttatactttggccttactctgttggcaaggcgcttacttggaagatttgttggttttggagataccgggtaaagaaattaccatatacatgggaggatgcttgctacttgacctggatttcactccaaatacctgcgaatgcatggaaaaatatggatgagtccaggaaggaggaccttgtgagaagacacctctgggaaaagagcaacatggagaggtatacttcagggacgaggaaggaaccaaagcgtaggaggtag

SEQ ID NO: 10754 - protein, 152 aa, Zea mays
MKSVKQTPAYKNRLKALEYERTGGIASKKKGIKQVDKKVEEELSNEVELQIHGVEKPSVWRLFGVQFILWPYSVGKALTWKICWFWRYRVKKLPYTWEDACYLTWISLQIPANAWKNMDESRKEDLVRRHLWEKSNMERYTSGTRKEPKRRR

SEQ ID NO: 10755 - DNA, 1232 bp, Glycine max
  CDS (57)..(956)
cccgaggacagatctgggctctcccttccgacggcgacgcagatccgccgccgtcgatggccgccgccgcccccctccccgtcctcctcctcctcctcgccgccgccctcctcctcccggccgccgacgccatctactgcgatgaggacgactgctacgacctcctcggggtgaagcaggatgccaacgcgtcggagatcaagaaggcctactacaagctctccctcaaacaccacccggacaagaaccccgacccggagtcgcgcgcgctcttcgtcaaggtcgccaatgcctacgagatactgaaagatgaagaaactagggagaagtatgactatgctgttgcacatccagaggagttcttctacaacactgctcaatactacagggcttactacggatataaaacggatactcgttctgtgttgattggccttcttttaatcgtgtcagcattccaatacataaaccagttgacatcatatagtcaggccatcgaaagtgtgaagcaaactcctgcctacagaaataggttgaaagcattggagtttgagcgaacaggaggaatttcaagcaaaaagaagggtaacaagcagatggataaaaaggtggaagatgagcttagaagtgaagtcgacttgcaaattcagggagttcagaaaccttctgtgtggaatctctgcggtgtccaattgatacttctgccttacttaattggcaagctgcttatttggcaaatttgttggttttggagataccgggtaaagaaatcaccatatgcatgggaggatgcttgctatttgactcggacatcccttaggatgcctgctaacacatggcaaaatattgatgagtttacgaaggaggatctcgtcatgaagcgcctctgggagaaggccaacatggagaggcacatagcggaggcgagaagaggatcgaagcagcgcagaagatagcttctcttgtagcagctcaattttgactgaagattacgagatgaggctgtttaacagcatgtcatgtaggaggacaactacatacctgagtggaaagggaaggcatacatgagtcaggcctgggttcgtcgacccataaacatgggacattgatactgaagaaacataagatacaggggattcttttaccatatcgtacaccgtggaggagttatgtggtgatgataacatttcttacgtctatttggattctatagatacatctacttggatgct

SEQ ID NO: 10756 - protein, 299 aa, Glycine max
MAAAAPLPVLLLLLAAALLLPAADAIYCDEDDCYDLLGVKQDANASEIKKAYYKLSLKHHPDKNPDPESRALFVKVANAYEILKDEETREKYDYAVAHPEEFFYNTAQYYRAYYGYKTDTRSVLIGLLLIVSAFQYINQLTSYSQAIESVKQTPAYRNRLKALEFERTGGISSKKKGNKQMDKKVEDELRSEVDLQIQGVQKPSVWNLCGVQLILLPYLIGKLLIWQICWFWRYRVKKSPYAWEDACYLTRTSLRMPANTWQNIDEFTKEDLVMKRLWEKANMERHIAEARRGSKQRRR

SEQ ID NO: 10757 - DNA, 930 bp, Oryza sativa
  CDS (1)..(930)
atgtcccaagttggatccgccggtgagggatccaattccatggcggctgctcctcctcctcgcctcctcctcctcgtcgtcctcctcctcgtgccagtctccaacgccatctactgcgaggaggatgattgctatgatcttctaggagtcaagcaggacgcgaacgtatcggagatcaagaaagcctactacaagctctctctcaaacaccatccggataagaatcctgatccggagtcacggaagctgtttgtcaagattgccaatgcttacgagattctaaaagacgaatcaactagggggcaatatgactatgctattgcacatccagaggaggttttctacaacactgctcagtactatagggcatactatggccataaaacggatcctcgtgctgtgttaattggccttcttctaattatttcagcatttcaatacttaaaccagttcggaaggtatagtaaggccatagaaactgtgaagcaaactcctgcttacaaaaataggttaaaagcattggagtttgagcgaacaggaggaatttcaagcaaaaagaagggtcacaagcagatggataagaaagttgaagaagtgctaagtaacgaagttgagttgcagatccagggggttgaaaaaccttccttatggagactctatggtgttcagtttatacttctgccatattccataggcaaggtgctcagttggaaattttgttggttttggagataccggataaagaaattaccatatgcatgggaggatgcatgctacttgactcggatgtctcttaagatacctgctaatacatgggaaaatattgatgattataggaaggagaatcttgtcatgaaacgcctctgggaaaagaacaatatggagaggtatattgcagagatgagaaaggaatcaaagcgtagaagatag

SEQ ID NO: 10758 - protein, 309 aa, Oryza sativa
MSQVGSAGEGSNSMAAAPPPRLLLLVVLLLVPVSNAIYCEEDDCYDLLGVKQDANVSEIKKAYYKLSLKHHPDKNPDPESRKLFVKIANAYEILKDESTRGQYDYAIAHPEEVFYNTAQYYRAYYGHKTDPRAVLIGLLLIISAFQYLNQFGRYSKAIETVKQTPAYKNRLKALEFERTGGISSKKKGHKQMDKKVEEVLSNEVELQIQGVEKPSLWRLYGVQFILLPYSIGKVLSWKFCWFWRYRIKKLPYAWEDACYLTRMSLKIPANTWENIDDYRKENLVMKRLWEKNNMERYIAEMRKESKRRR

SEQ ID NO: 10759 - DNA, 918 bp, Glycine max
  CDS (1)..(918)
atggatccgccgccggtaccgatccggtggcgcgcaaccgccatcccattctttgtgttggttctctttctatccaccatctcgccttcgcgcgcaatctactgcgacgaagatgattgctacgatctacttggggttactcaaagtgccaatgcttccgaaatcaaaaaagcttactacaaactctccttgaagtatcacccggacaaaaaccctgatccggaatcgcgaaagctgtttgtaaaagtcgccaatgcttatgagattttgaaggatgaggccacgcgagagcaatatgattatgcaattgcacatccggaggaggtgttttataatactgcacgctattatcgggcttactatggtcacaagacggatccccgtgctgtgttggtcggccttcttcttattctttcaggttttcaatatctaaatcaatcaacaaggtataatcaggctgtagccatggtcaagaagacacctgcatataaaaataaactaagggcattggaacttgaacgcagtggaggggttacaaacaagaagaagagtcagaagaatatggacaagaaaacggaagaagaccttagcaaagaactcgatctgcagataactggagctgaaatgccctctgtatggaaacttcttggcgtccgctttgttctattaccgtataccttaggcaagctgctgttgtggactgcctgttggttttggagatacaaagtgaaaaagtacccttattccttggaagatgcttcttatctgacacaaagatccctcagtattcctctcgatagatggagaaatatagatgaagcaacaaaggaagatcttgtgctcagacgcttatgggagaaatcaaatctggagaactatgtagcagagatgcggaaagaatcaaagcgcagaagatag

SEQ ID NO: 10760 - protein, 305 aa, Glycine max
MDPPPVPIRWRATAIPFFVLVLFLSTISPSRAIYCDEDDCYDLLGVTQSANASEIKKAYYKLSLKYHPDKNPDPESRKLFVKVANAYEILKDEATREQYDYAIAHPEEVFYNTARYYRAYYGHKTDPRAVLVGLLLILSGFQYLNQSTRYNQAVAMVKKTPAYKNKLRALELERSGGVTNKKKSQKNMDKKTEEDLSKELDLQITGAEMPSVWKLLGVRFVLLPYTLGKLLLWTACWFWRYKVKKYPYSLEDASYLTQRSLSIPLDRWRNIDEATKEDLVLRRLWEKSNLENYVAEMRKESKRRR

SEQ ID NO: 10761 - DNA, 918 bp, Glycine max
  CDS (1)..(918)
atggatctgccgccggcaccgatccggtggcgcgcaaccgcaatcccattctttgtggcggttctctttgtatccaccatctccccttcgcgcgcaatctactgcgacgaagatgattgctacgatctacttggggtttctcaaagtgccaatgcttccgaaattaaaaaagcttactacaagctctccttgaagtatcacccagataaaaaccctgatccggaatcgcgaaagctgtttgtaaaagtcgccaatgcttatgagattttgaaggatgaggccacgcgagaacaatatgattatgcaattgcacatccggaggaggtgttttataatactgcacgctactatcgggcttactatggtcacaagacggatccccgtgctgtgttggttggccttcttcttattctttcaggttttcaatatctaaatcaatcaacaaggtataatcaggctgtagctatggtcaagaagacacctgcatataaaaataaactaagggcattggaacttgaacgcagtggaggggttacaaacaagaagaagagtcagaagaatatggacaagaaaacagaggaagaccttagtaaagaactcgatctgcagataaccggagctgaaatggcctctgtatggaaacttcttggcgtccgctttgttctattaccatataccttaggcaagctgctgttgtggactgcctgttggttttggagatacaaagtgaaaaagtacccttattcttgggaagatgcttcttatctgacacaaagatccctcagtattcctctcgataggtggagaaatatagatgaagcaacaaaggaagatcttgtgctcagacgcttgtgggagaaatcgaatctggagagctatgtagcagagatgcggaaagaatcgaagcgcagaagatag

SEQ ID NO: 10762 - protein, 305 aa, Glycine max
MDLPPAPIRWRATAIPFFVAVLFVSTISPSRAIYCDEDDCYDLLGVSQSANASEIKKAYYKLSLKYHPDKNPDPESRKLFVKVANAYEILKDEATREQYDYAIAHPEEVFYNTARYYRAYYGHKTDPRAVLVGLLLILSGFQYLNQSTRYNQAVAMVKKTPAYKNKLRALELERSGGVTNKKKSQKNMDKKTEEDLSKELDLQITGAEMASVWKLLGVRFVLLPYTLGKLLLWTACWFWRYKVKKYPYSWEDASYLTQRSLSIPLDRWRNIDEATKEDLVLRRLWEKSNLESYVAEMRKESKRRR

SEQ ID NO: 10763 - DNA, 1394 bp, Triticum aestivum
  CDS (111)..(1010)
atgagcttccttcacccggccggcccttgtccctcccctaggacagctctgccgcatccgccgccgcccgtcactccccccgcgacggcgacgcagatccgccgccgtccatggccgccgccgcccccctccccgtcctcctcctcctcctccccgtctccctcctcctcccggccgccgacgccatctactgcgacgaggacgactgctacgacctcctcggggtgaagcaggatgccaacgcgtcggagatcaagaaggcctactacaagctctccctcaaacaccacccggacaagaaccccgacccggagtcgcgcgcgctcttcgtcaaggtcgccaatgcctacgagatactaaaagatgaagaaactagggagaagtatgactatgctgttgcacatccagaggagttcttctacaacactgctcaatactatagggcttactacggatataaaacggatactcgttctgtgttgattggccttcttttaattgtgtcagcattccaatacataaaccagttgacatcgtatagtcaggccatcgaaagtgtgaagcaaactcctgcctacagaaataggttgaaagcattggagtttgagcgaacaggaggaatttcaagcaagaagaagggcaacaagccgatggataaaaaggttgaagatgagcttagaaatgaagtcgacttgcaaattcagggagttcagaaaccttctgtgtggaatctctgcggtgtccaattgatacttctgccttacttaattggcaagctgcttatttggcaaatttgttggttttggagataccgggtaaagaaatcaccatatgcatgggaggatgcttgctatttgactcggacatcccttaggatgcctgctaacacatggcaaaatattgatgagtttacgaaggaggatctcgtcatgaagcgcctctgggagaaggccaacatggagaggcacatagcggaggcgagaagaggatcgaagcagcgcagaagatagcttctcttgtagcagctcaattttgactgaagattacgagatgaggctgtttaacagcatgtcatgtaggaggacaactacatacctgagtggaaagggaaggcatacatgagtcaggcctgggttcgtcgacccataaacatgggacattgatactgaagaaacataagatacaggggattcttttaccatatcgtacaccgtggaggagttatgtggtgatgataacatttcttacgtctatttggattctatagatacatctacttggatgctatttacatgtctcctttctcgtcttctcgttggtttggttatcatgttcactgttgctatgattttgctgagattgtcttgatttttgttttaaaaaaaaaaaaaaaa

SEQ ID NO: 10764 - protein, 299 aa, Triticum aestivum
MAAAAPLPVLLLLLPVSLLLPAADAIYCDEDDCYDLLGVKQDANASEIKKAYYKLSLKHHPDKNPDPESRALFVKVANAYEILKDEETREKYDYAVAHPEEFFYNTAQYYRAYYGYKTDTRSVLIGLLLIVSAFQYINQLTSYSQAIESVKQTPAYRNRLKALEFERTGGISSKKKGNKPMDKKVEDELRNEVDLQIQGVQKPSVWNLCGVQLILLPYLIGKLLIWQICWFWRYRVKKSPYAWEDACYLTRTSLRMPANTWQNIDEFTKEDLVMKRLWEKANMERHIAEARRGSKQRRR

SEQ ID NO: 10765 - DNA, 885 bp, Sorghum bicolor
  CDS (1)..(885)
atggctgcggcttcccacctcctctccttcttcctcctcctccttctccccgcttctaacgccatctactgcgacgaagacgactgctacgacctcctagggcttaagcaggacgcgaacgcgtcggacatcaagaaagcgtactacaagctctctctcaaataccatccggacaagaacccggatccggagtcgcggaagctcttcgtcaagatcgccaatgcttacgagattctgaaggatgaatccactagggagcagtatgactatgccattgaacatccggaggaggttttttataacacagctcagtactatagggcatactatggacataaaacggatcctcgtgctgtattgattggtcttcttctaattgtttcagcatttcaatacataaatcagctaacaaggtataaccaggccatggaaagtgtcaagcaaactcctgcttacaaaaataggttaaaagctttggagtttgagcgaacaggaggaatagctagcaaaaagaagggccacaagcaggtggataagaaagttgaagaagagctaagtaatgaggttgaattgcaaattcatggggttgaaaaaccgtctgtctggaggctgtatggtgtccaatttatacttttgccttactccattggcaaggtgctttcttggaagatttgttggttttggagataccgggtaaagaaattaccatacacatgggaggatgcttgctacttgacttgtatttcactccagatacctgtgaatacatggaaaaatattgatgagtctaggaaggaggaccttgtgagaagacacctttgggaaaagagcaacatggagaggtacactgcagagacgagaaaggaatcaaagcgtaggaggtag

SEQ ID NO: 10766 - protein, 294 aa, Sorghum bicolor
MAAASHLLSFFLLLLLPASNAIYCDEDDCYDLLGLKQDANASDIKKAYYKLSLKYHPDKNPDPESRKLFVKIANAYEILKDESTREQYDYAIEHPEEVFYNTAQYYRAYYGHKTDPRAVLIGLLLIVSAFQYINQLTRYNQAMESVKQTPAYKNRLKALEFERTGGIASKKKGHKQVDKKVEEELSNEVELQIHGVEKPSVWRLYGVQFILLPYSIGKVLSWKICWFWRYRVKKLPYTWEDACYLTCISLQIPVNTWKNIDESRKEDLVRRHLWEKSNMERYTAETRKESKRRR

SEQ ID NO: 10767 - DNA, 903 bp, Arabidopsis thaliana
  CDS (1)..(903)
atggcgccgccggtgacggagcggtggtgcttagctttgattcttctctttctctccttgttcgtccaatcttcaacggcaatttactgcggtgctgaagattgttatgctcttctcggagtcgctcaagatgcgaacgcatcggatatcaagagatcttattataagctctctcttcaacatcatccagataagaatccggatcctgaatcgaggaaactgtttgttaaaatcgccactgcttatgagattttgaaagataatactactcgggcacaatatgattatgcaattgaacatccagaagaggtattttacaacaccgctcaatattaccgcgcgaaatatggacataaatcggatccccgtgctgttcttgttggtctattggtggttttatctgcatttcaatatctgaacaacgtggcaaggtataatgaggctatagcgacggttaagcgaacacctgcttacaaaaataagctcaaggcattagaactcgaacgcacaggtggagtaagtaacaagaagaagggttcaaagcagattgaccagaaactacaggaagagctaagcaacgaacttgacttacaaatcaaaggagctgaaaaaccatcggtctgggaacttctcggtgttcgattcattctcctaccatacactatcattaagcttctagtatggtacagcagttgggtgtggagatataaggtcaagaaagctccttattcatgggaagacgcatcatacctaacccgaagatcacttagtgtgcctgccgacgcatgggctaatctagatgaatataggaaggaagatctggtgcagaaaaggctgtgggagaagcagaatcttgagaattactttgcagaaatgcgtaaagaatcgaagcggagaagatag

SEQ ID NO: 10768 - protein, 300 aa, Arabidopsis thaliana
MAPPVTERWCLALILLFLSLFVQSSTAIYCGAEDCYALLGVAQDANASDIKRSYYKLSLQHHPDKNPDPESRKLFVKIATAYEILKDNTTRAQYDYAIEHPEEVFYNTAQYYRAKYGHKSDPRAVLVGLLVVLSAFQYLNNVARYNEAIATVKRTPAYKNKLKALELERTGGVSNKKKGSKQIDQKLQEELSNELDLQIKGAEKPSVWELLGVRFILLPYTIIKLLVWYSSWVWRYKVKKAPYSWEDASYLTRRSLSVPADAWANLDEYRKEDLVQKRLWEKQNLENYFAEMRKESKRRR

SEQ ID NO: 10769 - DNA, 903 bp, Physcomitrella patens subsp. patens
  CDS (1)..(903)
atggcggctgcgcgatggcgaggcgcagcaatgctcctcctcttcgtcgcattggtgtcgcagtttctccccgggacagctatctattgtgaagaagatgactgctatgatctgctgggggttccggaaactgcatcgcaatcggacatcaagaagtcctactataaactgtcgcttaaatatcatcccgataaaaatcctgatccagagaccaaactcaagtttcaaaagatcgcaactgcctatgagattttgaaagatgaagtcaagcgggaacaatatgactatgccaaagctcatccagagcagttcttttacaatacggcccgctattatcaagcttactacgggccgcaagcggatttacgcgcagttcttgttggtgttttggttttattatcgttcttccagtttctgaacgagaagatccgccacgctcagatggtggacatggtgaaacaaacaccagcatacaagaacaaactaaaagctcttgaattggaacgtaacggtggagttaccaacaagaaaaaggctccaagaaaccggagggtggaaggtgcagatgatttgagcaaagagttggacttgcagattgcaggagctgaacgacccactgtttggagactgttgggtgtcagatttattctcctcccgtatacactcggaaagtgggcaacatggaaagcatcgtggatttggcgttactggattaagaagatgccttacacctgggctgatgcatcatatctgacccgttctagccttggaatctcttcgacaacttggaaaagcatgaatgacaaagtaagagatgacctggtcgtgaagagattgtggataaagtcgaatttggatgcgtacaagacagagaagtccaaagactctaggcggcggaaatga

SEQ ID NO: 10770 - protein, 300 aa, Physcomitrella patens subsp. patens
MAAARWRGAAMLLLFVALVSQFLPGTAIYCEEDDCYDLLGVPETASQSDIKKSYYKLSLKYHPDKNPDPETKLKFQKIATAYEILKDEVKREQYDYAKAHPEQFFYNTARYYQAYYGPQADLRAVLVGVLVLLSFFQFLNEKIRHAQMVDMVKQTPAYKNKLKALELERNGGVTNKKKAPRNRRVEGADDLSKELDLQIAGAERPTVWRLLGVRFILLPYTLGKWATWKASWIWRYWIKKMPYTWADASYLTRSSLGISSTTWKSMNDKVRDDLVVKRLWIKSNLDAYKTEKSKDSRRRK

SEQ ID NO: 10771 - DNA, 1236 bp, Vitis vinifera
  CDS (1)..(1236)
atggaccgggcagccaagtctgttgagaaaaggaaacccagcgagggtaatctagatgccactcaagctcctgcttggtctgggcctcagggcccaaatcgggccatactttttgggctgagactgggccaaaaaagtcaacatagtcttgttcctccactttcactaggcccagatctaaagtcaggtacatatgcaatctcaccgaacacatatgtaatttcactaggcccagatgggccagatctaaagtcagatacatatgtaatttcaccaaacacatggtgttctggctatgagaacacgttttccattggagccgggaagaagaacagaagaccctatagcatggcgccagcgggcaccctctggtggggtctcatcttccttctgatgatctctccctccatggccatttactgtgatgaagacgattgctacgatcttctgggtgtttctcaaagcgccaatgcttcagaaatcaagaaagcttactacaagctgtcattgaaatatcacccagataaaaacccagatccggaatccagaaagctgtttgtgaaaattgcaaatgcttatgagattctgaaagacgaggccacgcgtgagcagtatgattatgcaattgctcatccagaggaggtcttttacaatgctgctcgctactatcatgcatattatggtcataaaacggatccccgtgctgtccttgtgggtcttcttttagttctctctgcatttcaatatctaaatcagtggacaaggtatacacaggctgtagacatggtaaagaagacaccagcttacaaaaatagattgtgggcattagagcttgagcgcactggaggtgctacaaacaaaaagaagagtcacaaacagatggacaagaaaatggaggaagagctcagcaaagaacttgaactgcagataaagggggctgaaaaaccctccatatgggaacttattggtgtccgttttgtactcctaccttataccattggcaaggtactattatggcatggattttggttctggagatacaaggtaaaacaagctccatattcttgggaagatgcttcttacctgacacggaaatccctaagagtgccttttgatgcatggagaaatattgatgaatcgacaaaggaagatcttcttcagagacgtttatgggaaaaatccaacctagagaaatacctggcagagctgcgaaaagattcaaagcgcagaagatag

SEQ ID NO: 10772 - protein, 411 aa, Vitis vinifera
MDRAAKSVEKRKPSEGNLDATQAPAWSGPQGPNRAILFGLRLGQKSQHSLVPPLSLGPDLKSGTYAISPNTYVISLGPDGPDLKSDTYVISPNTWCSGYENTFSIGAGKKNRRPYSMAPAGTLWWGLIFLLMISPSMAIYCDEDDCYDLLGVSQSANASEIKKAYYKLSLKYHPDKNPDPESRKLFVKIANAYEILKDEATREQYDYAIAHPEEVFYNAARYYHAYYGHKTDPRAVLVGLLLVLSAFQYLNQWTRYTQAVDMVKKTPAYKNRLWALELERTGGATNKKKSHKQMDKKMEEELSKELELQIKGAEKPSIWELIGVRFVLLPYTIGKVLLWHGFWFWRYKVKQAPYSWEDASYLTRKSLRVPFDAWRNIDESTKEDLLQRRLWEKSNLEKYLAELRKDSKRRR

SEQ ID NO: 10773 - DNA, 909 bp, Populus trichocarpa
  CDS (1)..(909)
atggcgccaccggcaacgattcggtgttgcgcagcagcactaactctgatgttctctatcctcataatctctccatcatcatcagctatctattgtgacgaagatgattgctacgatctactaggcgttacgcaaaatgctaatgcttcagagataaaaaaagcttattataaactctcgttgaaacatcacccggataaaaacccagatccggagtccaaaaagctgtttgtgaaaattgctaatgcttatgagattttaaaagatgaagctacaagagagcaatatgattatgcaattgctcatccagaggaggtgttttacaatacggctcgttattatcatgcatattatggtcacaaaacggatccacgttttgttctggttggtcttcttctgattctctcagggtttcagtatatgaatgagatgacaaggtataatcaggctgtagcaatggtcaagaaaactcctgcttataaaaatagactaagggctttggaacttgaacgcagtggaggagttacaaataagaagaagagcaacaagcagatggacaagaaagtggaggaagatctcagcaaagaacttgaactggacataaagggcgctcataaaccttccatctgggaacttcttggtgtccgatttatagttctgccttacactattggcaagctattactgtggaatggttgttggttctggagatacaaggtgaaacaagcaccgtattcttgggaagatgccgtctacctaacacaaagatccctgagagtgcctcttgatgcatggggcagcattgacgaatcaacaaaggaagatcttgttcagagacgtttatgggagaagtctaacttggagacctattttgcagatcttcgtaaagaatccaagcgtagaagatag

SEQ ID NO: 10774 - protein, 302 aa, Populus trichocarpa
MAPPATIRCCAAALTLMFSILIISPSSSAIYCDEDDCYDLLGVTQNANASEIKKAYYKLSLKHHPDKNPDPESKKLFVKIANAYEILKDEATREQYDYAIAHPEEVFYNTARYYHAYYGHKTDPRFVLVGLLLILSGFQYMNEMTRYNQAVAMVKKTPAYKNRLRALELERSGGVTNKKKSNKQMDKKVEEDLSKELELDIKGAHKPSIWELLGVRFIVLPYTIGKLLLWNGCWFWRYKVKQAPYSWEDAVYLTQRSLRVPLDAWGSIDESTKEDLVQRRLWEKSNLETYFADLRKESKRRR

SEQ ID NO: 10775 - DNA, 903 bp, Ricinus communis
  CDS (1)..(903)
atggcgccaccggcaacgattcggtggtgcgcagtcgtatcgtttctcacggtttctttccttgtctcttcatcaactgccatttactgtgacgaagacgattgctatgacctgctaggggttactcaaaacgccaatgcttcagagattaaaaaatcctactacaaactctcattgaaatatcatcctgataaaaatccggatccagaatcgagaaagctgttcgtgaaaatcgcaaatgcttatgagattctgaaagatgaagctacccgagagcagtatgattatgcaattgcacatccagaggaggtgttttataatacagctcgctactatcgtgcatattatggtcacaaaacagatcctcgtattgtcttggttggtcttcttctgattctctctggatttcagtatctgaatcagttgacaaggtataatcaggctgtcgaaatggtcaagaagactcctgcttataaaaataggttaagggcactggaacttgaacgcagtggaggaactacaactaagaagaagggtaaccggcagatggataagaaaatggaggaagatctcagcaaagaacttgaactggacataaagggagcacaaaaacctgccatctgggaactcattggtgttcgttttctacttctgccttacactataggcaagctattattgtggcatggccgctggttctggagatacaaagtgaagaaagctccatattcttgtgaggatgccttatacctaacacagcggtcgctgagagtgccactggatgcatggaaaagccttgatgagccaatgaaggaggatcttgttcggagacagttgtgggagaagtctaacttagagaggtaccttacagaaatgcgcaaagaatctaaacgcagaagatag

SEQ ID NO: 10776 - protein, 300 aa, Ricinus communis
MAPPATIRWCAVVSFLTVSFLVSSSTAIYCDEDDCYDLLGVTQNANASEIKKSYYKLSLKYHPDKNPDPESRKLFVKIANAYEILKDEATREQYDYAIAHPEEVFYNTARYYRAYYGHKTDPRIVLVGLLLILSGFQYLNQLTRYNQAVEMVKKTPAYKNRLRALELERSGGTTTKKKGNRQMDKKMEEDLSKELELDIKGAQKPAIWELIGVRFLLLPYTIGKLLLWHGRWFWRYKVKKAPYSCEDALYLTQRSLRVPLDAWKSLDEPMKEDLVRRQLWEKSNLERYLTEMRKESKRRR

SEQ ID NO: 10777 - DNA, 903 bp, Arabidopsis lyrata subsp. lyrata
  CDS (1)..(903)
atggcgccgccggtgacggagcggtggtgcttggccttgattcttctctttctctccttattcgtccaatcttcgacggcaatttattgcggtgctgaagattgttatgctcttctcggagttgctcaagatgcgaacgcatcggatatcaagagatcttattataagctttctcttcaacatcatccagataagaatccggatcctgaatcgaggaaactgtttgtgaaaatcgccactgcttatgagattttgaaagataatactactcgggcacaatatgattatgcaattgaacatccagaagaggtattttacaacaccgctcaatattaccgggcgaaatatggacataagtcggatccccgtgctgttttggttggtctattggtggttttgtctgcgtttcagtatctgaacaacgtggcaaggtataatgaggctatagcgtcggttaaacgaactcctgcttataaaaataagctcaaggcattagaactcgaacgcactggtggagtaactaacaagaagaagggttcaaagcagattgaccagaaactacaggaagagctaagtaacgaactcgacttacaaatcaaaggagctgaaaaaccatcggtctgggatcttctcggtgttcgattcattctcctaccgtacactatcattaagcttctagtatggtacagcagttgggtgtggagatataagatcaagaaagctccttattcatgggaagacgcatcgtacctaacccgaagatcacttagtgtgcctgccgacgcatgggctaatctagatgaatataggaaggaagatctggtacagaaaaggctgtgggagaagcagaatcttgagaattactttgcagaaatgcgtaaagaatcgaagcggagaagataa

SEQ ID NO: 10778 - protein, 300 aa, Arabidopsis lyrata subsp. lyrata
MAPPVTERWCLALILLFLSLFVQSSTAIYCGAEDCYALLGVAQDANASDIKRSYYKLSLQHHPDKNPDPESRKLFVKIATAYEILKDNTTRAQYDYAIEHPEEVFYNTAQYYRAKYGHKSDPRAVLVGLLVVLSAFQYLNNVARYNEAIASVKRTPAYKNKLKALELERTGGVTNKKKGSKQIDQKLQEELSNELDLQIKGAEKPSVWDLLGVRFILLPYTIIKLLVWYSSWVWRYKIKKAPYSWEDASYLTRRSLSVPADAWANLDEYRKEDLVQKRLWEKQNLENYFAEMRKESKRRR

SEQ ID NO: 10779 - DNA, 933 bp, Oryza sativa subsp. indica
  CDS (1)..(933)
atgtcccaaattggatccgccagtgagggatccaattccatggcggctgctgcttctcctcgcctcctcctcctcgtcctcctcctcctcctcgtgccagtctccaacgccatctactgcgacgaggatgattgctatgatcttcttggagtcaagcaggacgcgaacgtatcggagatcaagaaagcctactacaagctctctctcaaacaccatcctgataagaatcctgatccggagtcacggaagctgtttgtcaagattgccaatgcttacgagattctaaaagacgaatcaactagggggcaatatgactatgctattgcacatccagaggaggttttctacaacactgctcagtactatagggcatactatggccataaaacggatcctcgtgctgtgttaattggccttcttctaattatttcagtatttcaatacttaaaccagttcggaaggtatagtaaggccatagaaactgtgaaacaaactcctgcttacaaaaataggttaaaagcattggagtttgagcgaacaggaggaatttcaagcaaaaagaagggtcacaagcagatggataagaaagttgaagaagtgctaagtaacgaagttgagttgcagatccagggggttgaaaaaccttccgtatggagactctatggtgttcagtttatacttctgccatattccataggcaaggtgctcagttggaaattttgttggttttggagataccggataaagaaattaccatatgcatgggaggatgcatgctacttgactcggacgtctcttaagatacctgctaatacatggcaaaatattgatgattataggaaggagaatcttgtcatgaaacgcctctgggaaaagaacaatatggagaggtatattgcagagatgagaaaggaatcaaagcgtagaagatag

SEQ ID NO: 10780 - protein, 310 aa, Oryza sativa subsp. indica
MSQIGSASEGSNSMAAAASPRLLLLVLLLLLVPVSNAIYCDEDDCYDLLGVKQDANVSEIKKAYYKLSLKHHPDKNPDPESRKLFVKIANAYEILKDESTRGQYDYAIAHPEEVFYNTAQYYRAYYGHKTDPRAVLIGLLLIISVFQYLNQFGRYSKAIETVKQTPAYKNRLKALEFERTGGISSKKKGHKQMDKKVEEVLSNEVELQIQGVEKPSVWRLYGVQFILLPYSIGKVLSWKFCWFWRYRIKKLPYAWEDACYLTRTSLKIPANTWQNIDDYRKENLVMKRLWEKNNMERYIAEMRKESKRRR

SEQ ID NO: 10781 - DNA, 918 bp, Glycine max
  CDS (1)..(918)
atggatctgccgccggcaccgatccggtggcgcgcaaccgcaatcccattctttgtggcggttctctttgtatccaccatctccccttcgcgcgcaatctactgcgacgaagatgattgctacgatctacttggggtttctcaaagtgccaatgcttccgaaattaaaaaagcttactacaagctctccttgaagtatcacccagataaaaaccctgatccggaatcgcgaaagctgtttgtaaaagtcgccaatgcttatgagattttgaaggatgaggccacgcgagaacaatatgattatgcaattgcacatccggaggaggtgttttataatactgcacgctactatcgggcttactatggtcacaagacggatccccgtgctgtgttggttggccttcttcttattctttcaggttttcaatatctaaatcaatcaacaaggtataatcaggctgtagctatggtcaagaagacacctgcatataaaaataaactaagggcattggaacttgaacgcagtggaggggttacaaacaagaagaagagtcagaagaatatggacaagaaaacagaggaagaccttagtaaagaactcgatctgcagataaccggagctgaaatggcctctgtatggaaacttcttggcgtccgctttgttctattaccatataccttaggcgagctgctgttgtggactgcctgttggtcttggagatacaaagtgaaaaagtacccttattcttgggaagatgcttcttatctgacacaaagatccctcagtattcctctcgataggtggagaaatatagatgaagcaacaaaggaaggtcttgtgctcagacgcttgtgggagaaatcgaatctggagagctatgtagcagagatgcggaaagaatcgaagcgcagaagatag

SEQ ID NO: 10782 - protein, 305 aa, Glycine max
MDLPPAPIRWRATAIPFFVAVLFVSTISPSRAIYCDEDDCYDLLGVSQSANASEIKKAYYKLSLKYHPDKNPDPESRKLFVKVANAYEILKDEATREQYDYAIAHPEEVFYNTARYYRAYYGHKTDPRAVLVGLLLILSGFQYLNQSTRYNQAVAMVKKTPAYKNKLRALELERSGGVTNKKKSQKNMDKKTEEDLSKELDLQITGAEMASVWKLLGVRFVLLPYTLGELLLWTACWSWRYKVKKYPYSWEDASYLTQRSLSIPLDRWRNIDEATKEGLVLRRLWEKSNLESYVAEMRKESKRRR

SEQ ID NO: 10783 - DNA, 903 bp, Brassica napus
  CDS (1)..(903)
atggcgccgccggctacggagcggtggtgctgggcattgattattgtgttgctttctctgttcgtccaatcctcgacggccatttattgcggcgaagaagattgctatgctctcctcggagtcgctcaagatgcgaacgcatcggatataaagagatcttactataagctttctctcgaacatcatccagataagaatcccgatcctgaatccaagaagctctttgtcaaaatcgccactgcttacgagattttgaaagataacgagactcgggcacaatatgattatgcaattgagcatcccagtgaggtattttacaacactgctcaatactaccgagccaaatatggacataagtcggatcctcgtgctgttcttgtgggtctactggtagtcctgtctgcgtttcagtatctgaacaacgttgcaaggtataatgaggctttggcaacagttaagcgaactcctgcttacaaaaacaggctcaaggccttagaactcgaacgcactggtggagtgtctagcaagaagaagggtccgaagcagatcgaccagaaactacaggaagagctaagcaatgaactcgacctacaaatcaaaggagctgaaaaaccgtcagtctgggatcttctcggtgttcgatttgttctcctaccttacactatcatcaagcttctagttgggtacagcagttgggtatggagatataaggttaagaaagctccttattcatttgaagacgcatcttacctaacccgaagatcacttggggtgcctctcgacgcatggactaatctcgatgaatataagaaggaagatctggtgcagagaaggctatgggagaagcagaaccttgagaactactatgcagagatgcgtaaagaatcaaagcggagaagatag

SEQ ID NO: 10784 - protein, 300 aa, Brassica napus
MAPPATERWCWALIIVLLSLFVQSSTAIYCGEEDCYALLGVAQDANASDIKRSYYKLSLEHHPDKNPDPESKKLFVKIATAYEILKDNETRAQYDYAIEHPSEVFYNTAQYYRAKYGHKSDPRAVLVGLLVVLSAFQYLNNVARYNEALATVKRTPAYKNRLKALELERTGGVSSKKKGPKQIDQKLQEELSNELDLQIKGAEKPSVWDLLGVRFVLLPYTIIKLLVGYSSWVWRYKVKKAPYSFEDASYLTRRSLGVPLDAWTNLDEYKKEDLVQRRLWEKQNLENYYAEMRKESKRRR

SEQ ID NO: 10785 - DNA, 900 bp, Triticum aestivum
  CDS (1)..(900)
atggccgccgccgcccccctccccgtcctcctcctcctcctcgccgtctccccccccctcccggccgccgacgccatctactgcgacgaggacgactgctacgacctcctcggggtgaagcaggatgccaacgcgtcggagatcaagaaggcctactacaagctctccctcaaacaccacccggacaagaaccccgacccggagtcgcgcgcgctcttcgtcaaggtcgccaatgcctacgagatactaaaagatgaagaaactagggagaagtatgactatgctgttgcacatccagaggagttcttctacaacactgctcaatactatagggcttactacggatataaaacggatactcgttctgtgttgattggccttcttttaattgtgtcagcattccaatacataaaccagttgacatcgtacagtcaggccatcgaaagtgtgaagcaaactcctgcctacagaaataggttgaaagcattggagtttgagcgaacaggaggaatttcaagcaaaaaaaagggcaacaagccgatggataaaaaggttgaagatgagcttagaaatgaagtcgacttgcaaattcagggagttcagaaaccttctgtgtggaatctctgtggtgtccaattgatacttctgccttacttaattggcaagctgcttatttggcaaatttgttggttttggagataccgggtaaagaaatcaccatatgcatgggaggatgcttgctatttgacccggacatcccttaggatgcctgctaacacatggcaaaatattgatgagtttacgaaggaggatctcgtcatgaagcgcctctgggagaaggccaacatggagaggcacatagcggaggcgagaagaggatcgaagcagcgtagaagatag

SEQ ID NO: 10786 - protein, 299 aa, Triticum aestivum
MAAAAPLPVLLLLLAVSPPLPAADAIYCDEDDCYDLLGVKQDANASEIKKAYYKLSLKHHPDKNPDPESRALFVKVANAYEILKDEETREKYDYAVAHPEEFFYNTAQYYRAYYGYKTDTRSVLIGLLLIVSAFQYINQLTSYSQAIESVKQTPAYRNRLKALEFERTGGISSKKKGNKPMDKKVEDELRNEVDLQIQGVQKPSVWNLCGVQLILLPYLIGKLLIWQICWFWRYRVKKSPYAWEDACYLTRTSLRMPANTWQNIDEFTKEDLVMKRLWEKANMERHIAEARRGSKQRRR

SEQ ID NO: 10787 - DNA, 885 bp, Zea mays
  CDS (1)..(885)
atggctgccgcttcgcagctcctctctctgttcttcctcctcctcctccctgcttgtgatgccatctactgcgacgaagacgactgctacgacctcctaggggttaagcaggacgcgaacgcgtcagacatcaagaaagcgtactacaagctctctctcaaacaccacccggacaagaatcccgatccggagtcgcggaagctcttcgtcaagatcgccaatgcttacgagattctgaaggatgaatccactagggcgcagtatgactttgccattgaacatccggaggaggttttctataacacagctcagtactatagggcatactatggacataaaacggatcctcgtgcagtgttgattggtcttcttctaattgtttcagcatttcaatacattaatcagctaacgaggtataaccaggccatgaaaagtgtcaagcaaactcctgcttacaaaaataggttaaaagctttggagtatgagcgaacaggaggaattgctagcaaaaagaagggcatcaagcaggtggataagaaagttgaagaagagctaagtaatgaagttgaattgcaaattcatggggttgaaaaaccgtctgtttggaggctgtttggtgtccaatttatactttggccttactctgttggcaaggcgcttacttggaagatttgttggttttggagataccgggtaaagaaattaccatatacatgggaggatgcttgctacttgacctggatttcactccaaatacctgcgaatgcatggaaaaatatggatgagtccaggaaggaggaccttgtgagaagacacctctgggaaaagagcaacatggagaggtatacttcagggacgaggaaggaaccaaagcgtaggaggtag

SEQ ID NO: 10788 - protein, 294 aa, Zea mays
MAAASQLLSLFFLLLLPACDAIYCDEDDCYDLLGVKQDANASDIKKAYYKLSLKHHPDKNPDPESRKLFVKIANAYEILKDESTRAQYDFAIEHPEEVFYNTAQYYRAYYGHKTDPRAVLIGLLLIVSAFQYINQLTRYNQAMKSVKQTPAYKNRLKALEYERTGGIASKKKGIKQVDKKVEEELSNEVELQIHGVEKPSVWRLFGVQFILWPYSVGKALTWKICWFWRYRVKKLPYTWEDACYLTWISLQIPANAWKNMDESRKEDLVRRHLWEKSNMERYTSGTRKEPKRRR

SEQ ID NO: 10789 - DNA, 20 bp, Artificial sequence
  primer
atgaaaagtgtcaagcaaac

SEQ ID NO: 10790 - DNA, 21 bp, Artificial sequence
  primer
ctacctcctacgctttggttc

SEQ ID NO: 10791 - protein, 274 aa, Artificial sequence
  consensus sequence
  Variant (5)..(5): Xaa in position 5 is any amino acid
  Variant (7)..(7): Xaa in position 7 is any amino acid
  Variant (11)..(11): Xaa in position 11 is any amino acid
  Variant (16)..(16): Xaa in position 16 is any amino acid
  Variant (18)..(18): Xaa in position 18 is any amino acid
  Variant (21)..(21): Xaa in position 21 is any amino acid
  Variant (23)..(23): Xaa in position 23 is any amino acid
  Variant (26)..(27): Xaa in position 26 to 27 is any amino acid
  Variant (34)..(35): Xaa in position 34 to 35 is any amino acid
  Variant (46)..(47): Xaa in position 46 to 47 is any amino acid
  Variant (52)..(52): Xaa in position 52 is any amino acid
  Variant (54)..(54): Xaa in position 54 is any amino acid
  Variant (62)..(63): Xaa in position 62 to 63 is any amino acid
  Variant (66)..(67): Xaa in position 66 to 67 is any amino acid
  Variant (72)..(73): Xaa in position 72 to 73 is any amino acid
  Variant (78)..(78): Xaa in position 78 is any amino acid
  Variant (84)..(84): Xaa in position 84 is any amino acid
  Variant (87)..(87): Xaa in position 87 is any amino acid
  Variant (89)..(89): Xaa in position 89 is any amino acid
  Variant (92)..(92): Xaa in position 92 is any amino acid
  Variant (94)..(94): Xaa in position 94 is any amino acid
  Variant (96)..(96): Xaa in position 96 is any amino acid
  Variant (98)..(98): Xaa in position 98 is any amino acid
  Variant (101)..(101): Xaa in position 101 is any amino acid
  Variant (105)..(107): Xaa in position 105 to 107 is any amino acid
  Variant (109)..(109): Xaa in position 109 is any amino acid
  Variant (113)..(113): Xaa in position 113 is any amino acid
  Variant (115)..(118): Xaa in position 115 to 118 is any amino acid
  Variant (120)..(121): Xaa in position 120 to 121 is any amino acid
  Variant (123)..(125): Xaa in position 123 to 125 is any amino acid
  Variant (128)..(128): Xaa in position 128 is any amino acid
  Variant (135)..(135): Xaa in position 135 is any amino acid
  Variant (137)..(137): Xaa in position 137 is any amino acid
  Variant (141)..(141): Xaa in position 141 is any amino acid
  Variant (144)..(144): Xaa in position 144 is any amino acid
  Variant (147)..(149): Xaa in position 147 to 149 is any amino acid
  Variant (153)..(154): Xaa in position 153 to 154 is any amino acid
  Variant (156)..(157): Xaa in position 156 to 157 is any amino acid
  Variant (159)..(159): Xaa in position 159 is any amino acid
  Variant (161)..(164): Xaa in position 161 to 164 is any amino acid
  Variant (167)..(167): Xaa in position 167 is any amino acid
  Variant (169)..(170): Xaa in position 169 to 170 is any amino acid
  Variant (174)..(174): Xaa in position 174 is any amino acid
  Variant (176)..(178): Xaa in position 176 to 178 is any amino acid
  Variant (181)..(181): Xaa in position 181 is any amino acid
  Variant (183)..(183): Xaa in position 183 is any amino acid
  Variant (185)..(185): Xaa in position 185 is any amino acid
  Variant (188)..(188): Xaa in position 188 is any amino acid
  Variant (190)..(190): Xaa in position 190 is any amino acid
  Variant (195)..(196): Xaa in position 195 to 196 is any amino acid
  Variant (199)..(199): Xaa in position 199 is any amino acid
  Variant (201)..(201): Xaa in position 201 is any amino acid
  Variant (203)..(205): Xaa in position 203 to 205 is any amino acid
  Variant (207)..(207): Xaa in position 207 is any amino acid
  Variant (211)..(212): Xaa in position 211 to 212 is any amino acid
  Variant (215)..(215): Xaa in position 215 is any amino acid
  Variant (218)..(218): Xaa in position 218 is any amino acid
  Variant (223)..(223): Xaa in position 223 is any amino acid
  Variant (227)..(228): Xaa in position 227 to 228 is any amino acid
  Variant (231)..(232): Xaa in position 231 to 232 is any amino acid
  Variant (234)..(236): Xaa in position 234 to 236 is any amino acid
  Variant (238)..(238): Xaa in position 238 is any amino acid
  Variant (240)..(240): Xaa in position 240 is any amino acid
  Variant (243)..(244): Xaa in position 243 to 244 is any amino acid
  Variant (250)..(252): Xaa in position 250 to 252 is any amino acid
  Variant (257)..(257): Xaa in position 257 is any amino acid
  Variant (259)..(259): Xaa in position 259 is any amino acid
  Variant (261)..(261): Xaa in position 261 is any amino acid
  Variant (263)..(264): Xaa in position 263 to 264 is any amino acid
  Variant (266)..(266): Xaa in position 266 is any amino acid
  Variant (269)..(269): Xaa in position 269 is any amino acid
AIYCXEXDCYXLLGVXQXANXSXIKXXYYKLSLXXHPDKNPDPESXXLFVKXAXAYEILKDXXTRXXYDYAXXHPEEXFYNTAXYYXAXYGXKXDXRXVLXGLLXXXSXFQYXNXXXXYXXAXXXVKXTPAYKNXLXALEXERXGGXXXKKKXXKXXDXKXXXXLSXEXXLQIXGXXXPSXWXLXGVXFXLLPYXXGKXLXWXXXWXWRYXXKKXPYXWEDAXYLTXXSLXXPXXXWXNXDEXXKEDLVXXXLWEKXNXEXYXXEXRKXSKRRR

SEQ ID NO: 10792 - protein, 21 aa, Artificial sequence
  protein pattern
  Variant (3)..(3): Xaa in position 3 is any amino acid
  Variant (10)..(10): Xaa in position 10 is Lys or Arg
  Variant (12)..(12): Xaa in position 12 is any amino acid
  Variant (16)..(16): Xaa in position 16 is any amino acid
  Variant (19)..(19): Xaa in position 19 is Asn, Ser or Thr
VKXTPAYKNXLXALEXERXGG

SEQ ID NO: 10793 - protein, 16 aa, Artificial sequence
  protein pattern
  Variant (2)..(2): Xaa in position 2 is any or no amino acid
  Variant (4)..(4): Xaa in position 4 is any amino acid
  Variant (5)..(5): Xaa in position 5 is any or no amino acid
  Variant (8)..(8): Xaa in position 8 is Ala, Ser or Thr
  Variant (9)..(9): Xaa in position 9 is any amino acid
  Variant (13)..(13): Xaa in position 13 is Cys, Ser or Val
KXKXXPYXXEDAXYLT

SEQ ID NO: 10794 - protein, 11 aa, Artificial sequence
  protein pattern
  Variant (3)..(3): Xaa in position 3 is any amino acid
  Variant (5)..(5): Xaa in position 5 is Ala or Val
  Variant (6)..(6): Xaa in position 6 is Glu or Gln
  Variant (7)..(7): Xaa in position 7 is any amino acid
  Variant (8)..(8): Xaa in position 8 is Ala or Pro
  Variant (9)..(9): Xaa in position 9 is Ser or Thr
  Variant (10)..(10): Xaa in position 10 is Ile, Leu or Val
QIXGXXXXXXW

SEQ ID NO: 10795 - protein, 19 aa, Artificial sequence
  protein pattern
  Variant (2)..(2): Xaa in position 2 is any or no amino acid
  Variant (5)..(5): Xaa in position 5 is any amino acid
  Variant (6)..(6): Xaa in position 6 is Ile, Leu or Val
  Variant (7)..(7): Xaa in position 7 is Gly or Ile
  Variant (9)..(9): Xaa in position 9 is Ala, Leu or Val
  Variant (11)..(11): Xaa in position 11 is any amino acid
  Variant (12)..(15): Xaa in position 12 to 15 is any or no amino acid
  Variant (17)..(17): Xaa in position 17 is Phe or Val
LXPYXXXKXLXXXXXWXWR

SEQ ID NO: 10796 - protein, 13 aa, Artificial sequence
  protein pattern
  Variant (2)..(2): Xaa in position 2 is any amino acid
  Variant (3)..(3): Xaa in position 3 is Asn or Ser
  Variant (4)..(4): Xaa in position 4 is Ile, Leu or Met
  Variant (6)..(6): Xaa in position 6 is Asp or Glu
  Variant (7)..(8): Xaa in position 7 to 8 is any amino acid
  Variant (11)..(11): Xaa in position 11 is Asp, Gly or Asn
WXXXDXXXKEXLV

SEQ ID NO: 10797 - protein, 21 aa, Artificial sequence
  protein pattern
  Variant (4)..(4): Xaa in position 4 is Gly or Ser
  Variant (5)..(5): Xaa in position 5 is any amino acid
  Variant (7)..(7): Xaa in position 7 is Asn, Pro or Gln
  Variant (8)..(8): Xaa in position 8 is Ile, Met or Val
  Variant (10)..(10): Xaa in position 10 is any or no amino acid
  Variant (12)..(13): Xaa in position 12 to 13 is any amino acid
  Variant (15)..(15): Xaa in position 15 is any or no amino acid
  Variant (17)..(17): Xaa in position 17 is any or no amino acid
  Variant (19)..(19): Xaa in position 19 is Arg or Ser
  Variant (20)..(20): Xaa in position 20 is any amino acid
KKKXXKXXDXKXXEXEXLXXE

SEQ ID NO: 10798 - DNA, 480 bp, Arabidopsis thaliana
  CDS (1)..(480)
atgaattggactagaggaaaaactttaggccgtggctcaacggccaccgtttccgccgccacttgtcacgaatccggcgaaacactcgccgtaaaatccgccgagtttcaccggtcggagttcttgcaaagagaagccaagattctctcctcattaaactctccgtacgtcatcggatacagaggatgcgaaattacgagagagcccttccacaacaacggagaagctacgacttacagtcttcttatggagtacgcgccgtacggaacgttgaccgacgtagcgaccaagaacggcggcttcattgacgaggctcgggtcgtgaagtacacgcgccagatacttcttgggttggagtacattcataactcaaagggaattgcgcattgcgacattaagggaagcaacgtgttggtcgggagaacggagaagccaagatcgctgatttcgggtgtgcgaaatgggttgaaccggaaataa

SEQ ID NO: 10799 - protein, 159 aa, Arabidopsis thaliana
MNWTRGKTLGRGSTATVSAATCHESGETLAVKSAEFHRSEFLQREAKILSSLNSPYVIGYRGCEITREPFHNNGEATTYSLLMEYAPYGTLTDVATKNGGFIDEARVVKYTRQILLGLEYIHNSKGIAHCDIKGSNVLVGRTEKPRSLISGVRNGLNRK

SEQ ID NO: 10800 - DNA, 1041 bp, glycine max
  CDS (1)..(1041)
atgaattgggttcgcggagagcctctcggcagtggcagtttcgccaccgtcaacatagccataccgacaaacacttccactcagtttctttcttccaccgccgtcaaatcctcctatgttcacacctcgtctatgctgaaaaacgagaaggaaatactcgattgccttggagcttccccttatgtcattaactgtttcggcgacgatcacacggttgaaaacggagaagagtattacaacattttcctcgaatacgccgcaggtggttctctcgctgatcaggtaaaaaaacacggagggaggctcccggagtcttacgttcggcgttgtacgaggtcgctcgtcgaaggtctaaaacatattcacgacaacggttatgttcactgcgatgtgaagcttcaaaacattctcgttttccagaatggggatgttaaaatcgcggattttgggcttgcaaaggagaaaggggaaaaacaggggaaattggagtgccggggaacaccgctgtttatgtctccggaatcggtgaacgacaatgagtatgaatcgccggcggatatatgggcccttggctgcgccgtcgtggagatgctgactggaaaacccgcatgggatgttcgcgggtcgaatatctggtcgttgttgattcgaattggagcgggagaagaattgcccaagattccagaagagttatcagaagagggaaaagattttcttttgaagtgtttcgttaaggatccaatgaagaggtggagcgctgagatgcttttgaatcaccctttcgtcaacggtgaaaccgtttcgtttcagaaagttaatgagccgttgccgttaccgtcgccgtcaccgaggacacactttgatttaactcactgggcttccaccgtaacggcgttgcttccgtcttccccggattctgatgagtggcatatgtgggaatccgggtcgtcgtgttcgccggagaatagactccggcggcttgtaaccgttcagacgccggcgaattggtcagaatcggatggctggacaagcgttaggtga

SEQ ID NO: 10801 - protein, 346 aa, glycine max
MNWVRGEPLGSGSFATVNIAIPTNTSTQFLSSTAVKSSYVHTSSMLKNEKEILDCLGASPYVINCFGDDHTVENGEEYYNIFLEYAAGGSLADQVKKHGGRLPESYVRRCTRSLVEGLKHIHDNGYVHCDVKLQNILVFQNGDVKIADFGLAKEKGEKQGKLECRGTPLFMSPESVNDNEYESPADIWALGCAVVEMLTGKPAWDVRGSNIWSLLIRIGAGEELPKIPEELSEEGKDFLLKCFVKDPMKRWSAEMLLNHPFVNGETVSFQKVNEPLPLPSPSPRTHFDLTHWASTVTALLPSSPDSDEWHMWESGSSCSPENRLRRLVTVQTPANWSESDGWTSVR

SEQ ID NO: 10802 - DNA, 1026 bp, Glycine max
  CDS (1)..(1026)
atggattgggttcgaggagacgctgtcggacgaggaagctttgctaccgttagtttagctattccaacgacgaattacaatcagtttccgtctctaaccgtggttaagtccgctgacgctcaaacctcgtgctggctcagaaacgagaaacacgtgctggatcgcctaggttcgtgtccgaggataattcgctgcttcggagatgactgcagtttcgagaacggcgtcgagtactacaatttgttcctcgaatacgccgccggcgggagtctcgccgacgaattgaggaaccacgatggcaggattcccgagcctcaggctcgggaatacacgagggacatcgtggagggtttgagccacgtgcacaaaaacgggtttgttcactgcgatataaagctgcagaacatcctcgtattcgaggacggaaggattaaaattgcggatttcggcctcgcgagggaggcaggggagagacaggggaagaagagtgaatgcagggggactccgatgtttatgtcgccggagcaagtgaccggcggcgagtgtgaatcgcccgcggatatatgggctttgggatgtgcagttgtggagatggtgaccgggaaaccggcgtggcaggtggagaatgggtcgagcatgtggtcgctgttgcttcgaattggggtgggacaagaggttcccgagatccctaataatttgtccgaagatggaaaagatttcattgaaaaatgtttcattaaggatcctaagaagaggtggagcgcagaaatgctattgaaacacccttttctactcaacgatgacactgtttcatttaagcgcgttcatgagtcgcccagaagccactttgatttccccgattgggtttctagcgtggcgaattcgcttcccagttcgccggaatttcaagaaaagtggggttttgatgatgagttctgttcgccggaggaccggctccggcagcttttgactgttaatcggccggcgagttggtcggaatcagatgggtggagtagtgttaggtga

SEQ ID NO: 10803 - protein, 341 aa, Glycine max
MDWVRGDAVGRGSFATVSLAIPTTNYNQFPSLTVVKSADAQTSCWLRNEKHVLDRLGSCPRIIRCFGDDCSFENGVEYYNLFLEYAAGGSLADELRNHDGRIPEPQAREYTRDIVEGLSHVHKNGFVHCDIKLQNILVFEDGRIKIADFGLAREAGERQGKKSECRGTPMFMSPEQVTGGECESPADIWALGCAVVEMVTGKPAWQVENGSSMWSLLLRIGVGQEVPEIPNNLSEDGKDFIEKCFIKDPKKRWSAEMLLKHPFLLNDDTVSFKRVHESPRSHFDFPDWVSSVANSLPSSPEFQEKWGFDDEFCSPEDRLRQLLTVNRPASWSESDGWSSVR

SEQ ID NO: 10804 - DNA, 1086 bp, Brassica napus
  CDS (1)..(1086)
atggagtggactagaggaagaatcctaggccgaggctccacagccaccgtctgctccgccatgtgtcacaattcaaacgaaatcctcgccgtcaaatcctccgagattcaccggtcagagttcttgcaaagagaagccaagatcctctcgtctttgaattctccttacgtgatcgggtacagaggatcagaaaccaagatagagtcaaacggcgtcgttacgtataatcttttgatggagtacgcaccgtacggaacgttgaccgacgcggcaaagaaaaacggaggccgactcgaggaagctatgatcgtgaagtacacgcgcgagatactacgaggcttggagtatattcactcgaaagggatcgcgcattgcgatgtaaaggggagcaacgtggttgttgcggagaagggtgaggccaagcttgcggatttcgggtgtgccaaacgggtgggctcggaagcggtgatgggaacgccggcgtttatggctccggaggtggcgcgtggggagaagcaggggagggagagtgatatatgggcggttggatgtacggtgattgagatggccactgggtctccgccgtggacggaggcgagttcgggtgagagtccggtttcagttctttatcgggtcgggtattccggtgaggctccggagcttccttgtttgcttaccgaagaagcgaaggacttcttggagaagtgtttcaagagagaagcgaaagagagatggacggcaacacaacttctaaaccatccttttttgataactaaaccaaacactgaaccggtttccggttttgtttcgagctcaccgacaagtgtgatagatcaaacgttttggtcatcggtggatgaggaagaagaaacagaggaattacaggaggatccgagaaatcttgaccgttcaaacatgtgggcttgtcattcggagaggatcggacggttgagatgtgttggtgggttggatgggtccagattggatatggaaggtgggggctggatcacggtgagggtgagttgtgaaggaacaatgattggtgggtcgcatgaggaaaatatattggaggtggggggactgtaa

SEQ ID NO: 10805 - protein, 361 aa, Brassica napus
MEWTRGRILGRGSTATVCSAMCHNSNEILAVKSSEIHRSEFLQREAKILSSLNSPYVIGYRGSETKIESNGVVTYNLLMEYAPYGTLTDAAKKNGGRLEEAMIVKYTREILRGLEYIHSKGIAHCDVKGSNVVVAEKGEAKLADFGCAKRVGSEAVMGTPAFMAPEVARGEKQGRESDIWAVGCTVIEMATGSPPWTEASSGESPVSVLYRVGYSGEAPELPCLLTEEAKDFLEKCFKREAKERWTATQLLNHPFLITKPNTEPVSGFVSSSPTSVIDQTFWSSVDEEEETEELQEDPRNLDRSNMWACHSERIGRLRCVGGLDGSRLDMEGGGWITVRVSCEGTMIGGSHEENILEVGGL

SEQ ID NO: 10806 - DNA, 1023 bp, Glycine max
  CDS (1)..(1023)
atggattgggttcgaggagacgctgtcggacgaggaagctttgctaccgttagtttagctattccaacgacgaattacaatcagtttccgtctctaaccgtggttaagtccgctgacgctcaaacctcgtgctggctcagaaacgagaaacacgtgctggatcgcctaggttcgtgtccgaggataattcgctgcttcggagatgactgcagtttcgagaacggcgtcgagtactacaatttgttcctcgaatacgccgccggcgggagtctcgccgacgaattgaggaaccacgatggcaggattcccgagcctgaggctcgggaatacacgagggacatcgtggagggtttgagccacgtgcacaaaaacgggtttgttcactgcgatataaagctgcagaacatcctcgtattcgaggacggaaggattaaaattgcggatttcgggcttgcgagggaggcagggcagaaacaggagaagagtgaatgcagggggactccgatgtttatgtcgccggagcaagcgaccggcggcgagtgcgaatcgcccgccgatatatgggctttgggatgtgcagttgtggagatggtgaccgggaaaccggcgtggcaggtggagaatgggtcgagcatgtggtcgctgttgcttcgaattggggtgggacaagaggttcccgagatccctaataatttgtccgaagatggaaaagatttcattgaaaaatgtttcattaaggatcctaagaagaggtggagcgcagaaatgctattgaaacacccttttctactcaacgatgacactgtttcatttaagcgcgttcatgagtcgcccagaagccactttgatttccccgattgggtttctagcgtggcgaattcgcttcccagttcgccggaatttcaagaaaagtggggttttgatgatgagttctgttcgccggaggaccggctccggcagcttttgactgttaatcggccggcgagttggtcggaatcagatgggtggagtagtgttaggtga

SEQ ID NO: 10807 - protein, 340 aa, Glycine max
MDWVRGDAVGRGSFATVSLAIPTTNYNQFPSLTVVKSADAQTSCWLRNEKHVLDRLGSCPRIIRCFGDDCSFENGVEYYNLFLEYAAGGSLADELRNHDGRIPEPEAREYTRDIVEGLSHVHKNGFVHCDIKLQNILVFEDGRIKIADFGLAREAGQKQEKSECRGTPMFMSPEQATGGECESPADIWALGCAVVEMVTGKPAWQVENGSSMWSLLLRIGVGQEVPEIPNNLSEDGKDFIEKCFIKDPKKRWSAEMLLKHPFLLNDDTVSFKRVHESPRSHFDFPDWVSSVANSLPSSPEFQEKWGFDDEFCSPEDRLRQLLTVNRPASWSESDGWSSVR

SEQ ID NO: 10808 - DNA, 1020 bp, Arabidopsis thaliana
  CDS (1)..(1020)
atgaattggactagaggaaaaactttaggccgtggctcaacggccaccgtttccgccgccacttgtcacgaatccggcgaaacactcgccgtaaaatccgccgagtttcaccggtcggagttcttgcaaagagaagccaagattctctcctcattaaactctccgtacgtcatcggatacagaggatgcgaaattacgagagagcccttccacaacaacggagaagctacgacttacagtcttcttatggagtacgcgccgtacggaacgttgaccgacgtagcgaccaagaacggcggcttcattgacgaggctcgggtcgtgaagtacacgcgccagatacttcttgggttggagtacattcataactcaaagggaattgcgcattgcgacattaagggaagcaacgtgttggtcggagagaacggagaagccaagatcgctgatttcgggtgtgcgaaatgggttgaaccggaaataaccgaaccggttagaggaacgccggcgttcatggctccagaagcggcgcgtggagagagacaagggaaagagagtgatatatgggcggtgggttgtacggtgatagagatggttaccgggtctcagccgtggattggggcggattttaccgacccggtttcggttctttaccgggtcggatatttaggtgagttaccagagctgccttgctcgcttacggaacaagcaaaggattttttaggaaagtgtttgaaaaaagaagcgacggagagatggacagcgagtcaactactaaaccatccgttcttggttaataaagaaccggaattggtaaccggtttggttacgaactcaccgacaagtgtgacggatcaaatgttctggagatcagtggaagaggaggtgtcagaggaccgttcaagctggtgggaatgtcacgaggatgagagaattggagtgctaagctggattggtcatgttgtggtggagtccacatgggacttggacggtgaggattggatcacggttcgacggaattag

SEQ ID NO: 10809 - protein, 339 aa, Arabidopsis thaliana
MNWTRGKTLGRGSTATVSAATCHESGETLAVKSAEFHRSEFLQREAKILSSLNSPYVIGYRGCEITREPFHNNGEATTYSLLMEYAPYGTLTDVATKNGGFIDEARVVKYTRQILLGLEYIHNSKGIAHCDIKGSNVLVGENGEAKIADFGCAKWVEPEITEPVRGTPAFMAPEAARGERQGKESDIWAVGCTVIEMVTGSQPWIGADFTDPVSVLYRVGYLGELPELPCSLTEQAKDFLGKCLKKEATERWTASQLLNHPFLVNKEPELVTGLVTNSPTSVTDQMFWRSVEEEVSEDRSSWWECHEDERIGVLSWIGHVVVESTWDLDGEDWITVRRN

SEQ ID NO: 10810 - DNA, 1119 bp, Arabidopsis thaliana
  CDS (1)..(1119)
atggaatggactagaggaagaatcctaggccgaggctctacagccaccgtatacgccgccgcaggtcacaattcagatgaaatcctcgccgttaaatcatctgaggttcaccgctcagagttcttgcaaagagaagccaagattctctcgtcgttaagttctccttacgtgatcggatacagaggatcagaaaccaagagagagtcaaacggtgtcgttatgtataatcttttgatggagtacgcaccgtatggaacgttgaccgatgcggcggcgaaagacgggggaagagtcgacgagactcgggtagtgaagtacacgcgcgatatactaaaaggattggagtatatacactcgaaaggaatcgtgcattgtgatgtaaagggtagtaacgtggttatttcggagaaaggcgaggccaagattgcggattttggttgtgcgaaacgggttgacccggtgttcgagtcgccggttatgggaacgccggcttttatggctccagaggtggcgcgtggagagaaacaggggaaggagagtgatatatgggcggttggttgtacgatgatagagatggttacgggttctccaccgtggacgaaggcagattcgagggaggatccggtttcggttctttatcgggtcgggtattcgagtgaaactccggagcttccttgtttgcttgcggaagaagcaaaagattttttggaaaagtgtttgaagagggaagcaaatgaaagatggacagcgacacaactcctaaaccatccttttttgacaactaaaccagacattgaaccagttctggttcccggtttgatttcaaactcaccgacaagtgtgacagatcaaacgttttggagatcagtagaggaagaggaagaagaagaaacagaggaaatacagaaggattcgagagatcttgatcgtttaagcttgtggggttgttactcggagaggatcggacggctgaagtgtgttggtggtttggatgggaccagatgtgatatggagggtggggattggattatggtgagagcgaggtgtgaaggaacaatgattagtgggtcacaaaaggaattgattattagtgaaaatgtattggtgggggaattgtaa

SEQ ID NO: 10811 - protein, 372 aa, Arabidopsis thaliana
MEWTRGRILGRGSTATVYAAAGHNSDEILAVKSSEVHRSEFLQREAKILSSLSSPYVIGYRGSETKRESNGVVMYNLLMEYAPYGTLTDAAAKDGGRVDETRVVKYTRDILKGLEYIHSKGIVHCDVKGSNVVISEKGEAKIADFGCAKRVDPVFESPVMGTPAFMAPEVARGEKQGKESDIWAVGCTMIEMVTGSPPWTKADSREDPVSVLYRVGYSSETPELPCLLAEEAKDFLEKCLKREANERWTATQLLNHPFLTTKPDIEPVLVPGLISNSPTSVTDQTFWRSVEEEEEEETEEIQKDSRDLDRLSLWGCYSERIGRLKCVGGLDGTRCDMEGGDWIMVRARCEGTMISGSQKELIISENVLVGEL

SEQ ID NO: 10812 - DNA, 1287 bp, Vitis vinifera
  CDS (1)..(1287)
atggactggactaggggatgtacccttggtcgtgggtcctccgccaccgtctccatcgccacctcccacctctccggtgacatcttcgccgtgaaatcaactgagctctcccagtccaaattgctcaagagggaacagaggattctctccacagtgaggtctgctcacgtgattgaatacagagggtggaatgtcacgtgcgagaatgggaagcagatgtacaatctgtgcatggagtacgccgccggcggcacgctcaagcagcgcggcagcctgggagaggccgccatcagagccaacacgcgcgccattctgcagggccttcagtacctacattccaattgcattgtccactgcgacatcaaaagcgagaatattctgatcaccggcgaggggttgaagatcggcgacctgggttgcgctagactcgccgacgatttctcggattcggtttgtgggacgccggcgttcatggcgcccgaggtggcgcgcggggaggagcaggggttcgccgctgatgtgtgggctcttgggtgcacgatcattgagatggccaccgggcgggcgccgtggacggatgtttccgacccggtttcggctgtttaccgaattgggttttccggggacgtgccggagattccagggtgggtgtcggaggaggctaaggattttttggggaagtgtttggtgagggaccctgtgaagaggtggtcagttggcgagcttcttgggcacccttttgtcaacgaagcttgtgttttttccaaagaagtttatgggtcaagttcaagcagtccgacaagtgtgttggatcaaaggttctggagctcctccattgaagaactgtacccatttcacaagaaatcttggaattctccaagggagaggatccagttcttggcaaattcaaattcaaattcaggattgcccaattggggatgggatgaaaattgggtgacagtgaggagtggcagcatggaagaactagaggtggtttctgaggctcccacagccaccatggcttgggccggtgaggaccctggcatggtaggtttcagggaacccacacccactgctgcaatggacagttgtaatagttgtaatttgtcacgtttaaaatgtaaatgcatgaattatgttttttgtggaaatcttaattttgattttgtggcaaattttaatgatagttccagtcgtctagtccccctctaccataacttaactaaatttgggagcaaggttgatttagcaatttcaaatggattaagttgtctaagtgtcacatga

SEQ ID NO: 10813 - protein, 428 aa, Vitis vinifera
MDWTRGCTLGRGSSATVSIATSHLSGDIFAVKSTELSQSKLLKREQRILSTVRSAHVIEYRGWNVTCENGKQMYNLCMEYAAGGTLKQRGSLGEAAIRANTRAILQGLQYLHSNCIVHCDIKSENILITGEGLKIGDLGCARLADDFSDSVCGTPAFMAPEVARGEEQGFAADVWALGCTIIEMATGRAPWTDVSDPVSAVYRIGFSGDVPEIPGWVSEEAKDFLGKCLVRDPVKRWSVGELLGHPFVNEACVFSKEVYGSSSSSPTSVLDQRFWSSSIEELYPFHKKSWNSPRERIQFLANSNSNSGLPNWGWDENWVTVRSGSMEELEVVSEAPTATMAWAGEDPGMVGFREPTPTAAMDSCNSCNLSRLKCKCMNYVFCGNLNFDFVANFNDSSSRLVPLYHNLTKFGSKVDLAISNGLSCLSVT

SEQ ID NO: 10814 - DNA, 1263 bp, Vitis vinifera
  CDS (1)..(1263)
atggactggaccagaggccacaccttaggctctggctcctctgccacagtctccctcgccaattctctccggtctggcgacgtgtttgctgtcaagtcggtggagctatctcggtcggagtcactgcagagggaggagagaatcctatcttctttgaggtctccttatatagttggctacaaggggtgtgacattaccagggagaacaagaagcttatgtacaatcttttcattgagtacatgcccggtggcactcttggtgatgcaattcggaggggtggaggtcagcttcatgaatcgatgattgggatttatgcgcgacaaattgtacagggattggattacattcactcacgaggcttagtgcattgtgatattaaaggccagaacgtgctaattggagaagatggtgcaaaaattgctgattttgggtgtgccaagtggactaacggcaaggatgacaggaaggtgccgattgccggaacaccgttcttcatggcaccggaggtagcgcgcggcgaagatcagggatacccttctgatgtatgggctcttggatgtacaataattgaaatggccactgggggcgctccatggcctaatgtggcaaacgcagttgcagctctttatcgaatcggattctctgaagagctgccatggattccaagttttctctccgaccaagcaaaggattttctaagcaagtgcttacggagagatccaaaagagaggtggacagcaagtcagcttctcaagcatccatttgtgggagaattgaatcctcaggcaaagcaagttcaagaatcctattcagattctccaacaagtattctagaccaaaacttttggagctcattggaggaatcagaagcacaaggctacttgaagcaggcaagtttttcaaattctccagcagaaaggatccggaaactatggacgttttcaagggtagaaaactggacaagggatgataattgggtcacaatcagaggcagtaccaatgaggaaagcaacgtacccgctgattacatggaagatgaagcgagtccagtttccaggtcggaggcagtttcgagtagtcatgatgtggaaaaggtagaaagccatggtgatggagaggagatggaggatttcttagatagcaaatttagttgtaggacatgtatgaaagatagtgttgtagtgagcaacttcaattttgagatagacaaagaacacttgttaattacttcaacttcaatctcaaacttcttagcatcctaa

SEQ ID NO: 10815 - protein, 420 aa, Vitis vinifera
MDWTRGHTLGSGSSATVSLANSLRSGDVFAVKSVELSRSESLQREERILSSLRSPYIVGYKGCDITRENKKLMYNLFIEYMPGGTLGDAIRRGGGQLHESMIGIYARQIVQGLDYIHSRGLVHCDIKGQNVLIGEDGAKIADFGCAKWTNGKDDRKVPIAGTPFFMAPEVARGEDQGYPSDVWALGCTIIEMATGGAPWPNVANAVAALYRIGFSEELPWIPSFLSDQAKDFLSKCLRRDPKERWTASQLLKHPFVGELNPQAKQVQESYSDSPTSILDQNFWSSLEESEAQGYLKQASFSNSPAERIRKLWTFSRVENWTRDDNWVTIRGSTNEESNVPADYMEDEASPVSRSEAVSSSHDVEKVESHGDGEEMEDFLDSKFSCRTCMKDSVVVSNFNFEIDKEHLLITSTSISNFLAS

SEQ ID NO: 10816 - DNA, 1203 bp, Medicago truncatula
  CDS (1)..(1203)
atggagatggagtggactagaggcaacatcatcggacatggctcatccgccaccgtctacctcgccacctctcgtcgctccaccgatgtctccgcggttaaatcagcggagacatcactaccaaactcaaaccaactccagagtgaacaaagaattctttcttctctgtcctctccttacatagttacctacaaaggttgcaacttttcaaaggagaataacaagcacttgttcaacctcttcatggagtacatgccctttggaaatctctctcaggtgacttgccggaacggtggccggctcaacgaggcgatgatagcatactacacaagacaaattgtggaaggacttgagtacttacattcaaaagatgtagtgcattgtgatatcaaaggtagtaacatattggtatgtgaaaaaggagttaaaataggagactttggttgtgcaaagatgatcgatgaaattgcgccagctgccggaacaccgatgtatatggcgccggaggtggcgcgcggcgaagaacaagggttcccttgtgatgtttggtcacttggttgcactattgttgaaatggcaactggtttttcaccttggtccaatgtggaagactctgttcatgttctgtatcgtgttgcatattctgacgaagttcctatgattccttgttttttatctgaacaagcaaaggatttcttggagaagtgcttaaggagggattctaaggagaggtggagttgtagtcaattgttgaagcatcaatttcttgattgtggtgttgagaaaattgaagaatttgattcatgttcaccaactagtattcttgaacagggcttttggaattgtgatgaagggtcagaaagtttcttttttgatgatttgggtaagattaattttgtgaattgtcctgttggtaggataaaaaagctagctttgtgttcaagggatccatgttggaaatggggtgatgagaattggattacaactagagagaatgatgcagatgcagggtcttcaattagtgatgaattggattttgatgagttagagaaaagtgattttagtggtagaattagtggtgattattttggttatgattattctaattgtaagattagggatgttagttatgtagctaatagccttaattttgggagaggcattggaaggttgatgccccaatcaacattagattttttataa

SEQ ID NO: 10817 - protein, 400 aa, Medicago truncatula
MEMEWTRGNIIGHGSSATVYLATSRRSTDVSAVKSAETSLPNSNQLQSEQRILSSLSSPYIVTYKGCNFSKENNKHLFNLFMEYMPFGNLSQVTCRNGGRLNEAMIAYYTRQIVEGLEYLHSKDVVHCDIKGSNILVCEKGVKIGDFGCAKMIDEIAPAAGTPMYMAPEVARGEEQGFPCDVWSLGCTIVEMATGFSPWSNVEDSVHVLYRVAYSDEVPMIPCFLSEQAKDFLEKCLRRDSKERWSCSQLLKHQFLDCGVEKIEEFDSCSPTSILEQGFWNCDEGSESFFFDDLGKINFVNCPVGRIKKLALCSRDPCWKWGDENWITTRENDADAGSSISDELDFDELEKSDFSGRISGDYFGYDYSNCKIRDVSYVANSLNFGRGIGRLMPQSTLDFL

SEQ ID NO: 10818 - DNA, 1263 bp, Vitis vinifera
  CDS (1)..(1263)
atggactggaccagaggtcacaccttaggctctggctcctctgccacagtctccctcgccaattctctccggtctggcgacgtgtttgctgtcaagtcggtggagctatctcggtcggagtcactgcagagggaggagagaatcctatcttctttgaggtctccttatatagttggctacaaggggtgtgacattaccagggagaacaagaagcttatgtacaatcttttcattgagtacatgcccggtggcactcttggtgatgcaattcggaggggtggaggtcagcttcatgaatcgatgatcgggatttatgcgcgacaaattgtacagggattggattacattcactcacgaggcttagtgcattgtgatattaaaggccagaacgtgctaattggagaagatggtgcaaaaattgctgattttgggtgtgccaagtggactaacggcaaggatgacaggaaggtgcagattgccggaacaccgttcttcatggcaccagaggtggcgcgcggcgaagatcagggatacccttctgatgtatgggctcttggatgtacaataatcgaaatggccactgggggcgctccatggcctaatgtggcaaacgcagttgcagctctttatcgaatcggattctctgaagagctgccatggattccaagttttctctccgaccaagcaaaggattttctaagcaagtgcttacggagagatccaaaagagaggtggacagcaagtcagcttctcaagcatccatttgtgggagaattgaatcctcaggcaaagcaagttcaagaatcctattcagattctccaacaagtattctagaccaaaacttttggagctcattggaggaatcagaagcacaaggctacttgaagcaggcaagtttttcaaattctccagcagaaaggatccggaaactatggacgttttcaagggtagaaaactggacaagggatgataattgggtcacaatcagaggcagtaccaatgaggaaagcaacgtacccgctgattacatggaagatgaagcgagtccagtttccaggtcggaggcagtttcgagtagtcatgatgtggaaaaggtagaaagccatggtgatggagaggagatggaggatttcttagatagcaaatttagttgtaggacatgtatgaaagatagtgttgtagtgagcaacttcaattttgagatagacaaagaacacttgttaattacttcaacttcaatctcaaacttcttagcatcctaa

SEQ ID NO: 10819 - protein, 420 aa, Vitis vinifera
MDWTRGHTLGSGSSATVSLANSLRSGDVFAVKSVELSRSESLQREERILSSLRSPYIVGYKGCDITRENKKLMYNLFIEYMPGGTLGDAIRRGGGQLHESMIGIYARQIVQGLDYIHSRGLVHCDIKGQNVLIGEDGAKIADFGCAKWTNGKDDRKVQIAGTPFFMAPEVARGEDQGYPSDVWALGCTIIEMATGGAPWPNVANAVAALYRIGFSEELPWIPSFLSDQAKDFLSKCLRRDPKERWTASQLLKHPFVGELNPQAKQVQESYSDSPTSILDQNFWSSLEESEAQGYLKQASFSNSPAERIRKLWTFSRVENWTRDDNWVTIRGSTNEESNVPADYMEDEASPVSRSEAVSSSHDVEKVESHGDGEEMEDFLDSKFSCRTCMKDSVVVSNFNFEIDKEHLLITSTSISNFLAS

SEQ ID NO: 10820 - DNA, 1104 bp, Vitis vinifera
  CDS (1)..(1104)
atggactggactaggggatgtacccttggtcgtgggtcctccgccaccgtctccatcgccacctcccacctctccggtgacatcttcgccgtgaaatcaactgagctctcccagtccaaattgctcaagagggaacagaggattctctccacagtgaggtctgctcacgtgattgaatacagagggtggaatgtcacgtgcgagaatgggaagcagatgtacaatctgtgcatggagtacgccgccggcggcacgctcaagcagcgcggcagcctgggagaggccgccatcagagccaacacgcgcgccattctgcagggccttcagtacctacattccaattgcattgtccactgcgacatcaaaagcgagaatattctgatcaccggcgaggggttgaagatcggcgacctgggttgcgctagactcgccgacgatttctcggattcggtttgtgggacgccggcgttcatggcgcccgaggtggcgcgcggggaggagcaggggttcgccgctgatgtgtgggctcttgggtgcacgatcattgagatggccaccgggcgggcgccgtggacggatgtttccgacccggtttcggctgtttaccgaattgggttttccggggacgtgccggagattccagggtgggtgtcggaggaggctaaggattttttggggaagtgtttggtgagggaccctgtgaagaggtggtcagttggcgagcttcttgggcacccttttgtcaacgaagcttgtgttttttccaaagaagtttatgggtcaagttcaagcagtccgacaagtgtgttggatcaaaggttctggagctcctccattgaagaactgtacccatttcacaagaaatcttggaattctccaagggagaggatccagttcttggcaaattcaaattcaaattcaggattgcccaattggggatgggatgaaaattgggtgacagtgaggagtggcagcatggaagaactagaggtggtttctgaggctcccacagccaccatggcttgggccggtgaggaccctggcatggtaggtttcagggaacccacacccactgctgcaatggacagttttccagtcgtctag

SEQ ID NO: 10821 - protein, 367 aa, Vitis vinifera
MDWTRGCTLGRGSSATVSIATSHLSGDIFAVKSTELSQSKLLKREQRILSTVRSAHVIEYRGWNVTCENGKQMYNLCMEYAAGGTLKQRGSLGEAAIRANTRAILQGLQYLHSNCIVHCDIKSENILITGEGLKIGDLGCARLADDFSDSVCGTPAFMAPEVARGEEQGFAADVWALGCTIIEMATGRAPWTDVSDPVSAVYRIGFSGDVPEIPGWVSEEAKDFLGKCLVRDPVKRWSVGELLGHPFVNEACVFSKEVYGSSSSSPTSVLDQRFWSSSIEELYPFHKKSWNSPRERIQFLANSNSNSGLPNWGWDENWVTVRSGSMEELEVVSEAPTATMAWAGEDPGMVGFREPTPTAAMDSFPVV

SEQ ID NO: 10822 - DNA, 1035 bp, Ricinus communis
  CDS (1)..(1035)
atggagcactggaccagaggccaaattcttggtcagggttcccaagccaccgtctcaatcgcaacagtccagcagtccggtctagcttttgctgttaagtcagctgagctctcacaatcagagttattacagaaggagcaaaggattctttctacattaagttgtcctcaaattatagcatacgagggatatgatgttacacgagaagatggtaagctcttgtttaatattttcttggaatacgcaccaggcggcactcttattgatacaattcggaagcatggaggtttcctcgacgagggcatgatcagatcatatgctagggatattttgttgggccttcaccaccttcattctaatgggatagtacattgtgatattaagggtcataacattttggtcactagcgatggggcaaaaattgctgacttgggttgtgctaggaaggtcaatcaagtgtcaaagactccaattgccggcactcctgtctacatggcacccgaggtggcgcgtggtgagcaccagggtttccctgctgatgtgtgggctcttgggtgtaccattatagagatggctactgggaggcccccatggacgactatttcggatcctgtatctgccctttaccaaattgggtattcaggtatggtgccagaaattccaagctttatgtcaaagcaagcgatagattttgtaagcaagtgcttgaagagagacccagtggagaggtggtcagccagtgaattactaagacacgctttcgttacagaggaggcatgctctgttttgaagggtaatactagttccaacgtggaaactccaacaagtgtattggaccaaggtttatgggagtcaagagaggagttagaggcaacatggaaatcaacccataaaaattgttcccgttctccaacagaaagaatccggcaattagcccaaggcaccgccagagtgcctaattgggcatgggatgattcttgggttactgtaagaagcaaagattcttcaagcttcgaggattttgccttgttgtaa

SEQ ID NO: 10823 - protein, 344 aa, Ricinus communis
MEHWTRGQILGQGSQATVSIATVQQSGLAFAVKSAELSQSELLQKEQRILSTLSCPQIIAYEGYDVTREDGKLLFNIFLEYAPGGTLIDTIRKHGGFLDEGMIRSYARDILLGLHHLHSNGIVHCDIKGHNILVTSDGAKIADLGCARKVNQVSKTPIAGTPVYMAPEVARGEHQGFPADVWALGCTIIEMATGRPPWTTISDPVSALYQIGYSGMVPEIPSFMSKQAIDFVSKCLKRDPVERWSASELLRHAFVTEEACSVLKGNTSSNVETPTSVLDQGLWESREELEATWKSTHKNCSRSPTERIRQLAQGTARVPNWAWDDSWVTVRSKDSSSFEDFALL

SEQ ID NO: 10824 - DNA, 1074 bp, Brassica napus
  CDS (1)..(1074)
atggagtggactagaggaagaatcctaggccgaggctccacagccaccgtctgctccgccatgtgtcacaattcaaacgaaatcctcgccgtcaaatcctccgagattcaccggtcagagttcttgcaaagagaagccaagatcctctcgtctttgaattctccttacgtgatcgggtacagaggatcagaaaccaagatagagtcaaacggcgtcgttacgtataatcttttgatggagtacgcaccgtacggaacgttgaccgacgcggcaaagaaaaacggaggccgactcgaggaagctatgatcgtgaagtacacgcgcgagatactacgaggcttggagtatattcactcgaaagggatcgcgcattgcgatgtaaaggggagcaacgtggttgttgcggagaagggtgaggccaagcttgcggatttcgggtgtgccaaacgggtgggctcggaggcggtgacgggtacgccggcgtttatggctccggaggtagcgcgtggggagaaacaggggagtgagagtgatatatgggctgttgggtgtacggtgattgagatggctacgggttctccgccgtggacggaggcgagttcaagagaggatccggtttcggttctttaccgggtcgggtattcgggtgagactccggagcttccttgtttgcttacggaagaagcaaaggatttcttgaaaatgtgctttaagagagaagcgaaagagagatggacggctacacaactcctaaaccatccgtttctgataggtaaaccggacattgaaccggttttaggttccggtttggtttcgagctcaccgacaagtgtgacagatcaaacgttttggcgatcagtggaggatgaaatagtagaagaagaagcagtggacttgcaagatgagtcaagaaatctagaccgtttaaacttgtgggcttttcatttggagaggatcggacggctgagatgtgttggtgggttggatgggcccagatgggatatggaaggtggggactggatcacggtgagggtgagctgtgaaggaacaatgattagtgggtcactcacatga

SEQ ID NO: 10825 - protein, 357 aa, Brassica napus
MEWTRGRILGRGSTATVCSAMCHNSNEILAVKSSEIHRSEFLQREAKILSSLNSPYVIGYRGSETKIESNGVVTYNLLMEYAPYGTLTDAAKKNGGRLEEAMIVKYTREILRGLEYIHSKGIAHCDVKGSNVVVAEKGEAKLADFGCAKRVGSEAVTGTPAFMAPEVARGEKQGSESDIWAVGCTVIEMATGSPPWTEASSREDPVSVLYRVGYSGETPELPCLLTEEAKDFLKMCFKREAKERWTATQLLNHPFLIGKPDIEPVLGSGLVSSSPTSVTDQTFWRSVEDEIVEEEAVDLQDESRNLDRLNLWAFHLERIGRLRCVGGLDGPRWDMEGGDWITVRVSCEGTMISGSLT

SEQ ID NO: 10826 - DNA, 1023 bp, Glycine max
  CDS (1)..(1023)
atggattgggttcgaggagacgctgtcggacgaggaagctttgctaccgttagtttagctattccaacgacgaattacaatcagtttccgtctctaaccgtggttaagtccgctgacgctcaaacctcgtgctggctcagaaacgagaaacacgtgctggatcgcctaggttcgtgtccgaggataattcgctgcttcggagatgactgcagtttcgagaacggcgtcgagtactacaatttgttcctcgaatacgccgccggcgggagtctcgccgacgaattgaggaaccacgatggcaggattcccgagcctgaggctcgggaatacacgagggacatcgtggagggtttgagccacgtgcacaaaaacgggtttgttcactgcgatataaagctgcagaacatcctcgtattcgaggacggaaggattaaaattgcggatttcgggcttgcgagggaggcagggcagaaacaggagaagagtgaatgcagggggactccgatgtttatgtcgccggagcaagcgaccggcggcgagtgcgaatcgcccgccgatatatgggctttgggatgtgcagttgtggagatggtgaccgggaaaccggcgtggcaggtggagaatgggtcgagcatgtggtcgctgttgcttcgaattggggtgggacaagaggttcccgagatccctaataatttgtccgaagatggaaaagatttcattgaaaaatgtttcattaaggatcctaagaagaggtggagcgcagaaatgctattgaaacacccttttctaatcaacgatgacactgttccatttaagcgcgttcatgagtcgcccagaagccactttgatttccccgattgggtttctagcgtggcgaattcgcttcccagttcgccggaatttcaagaaaagtggggttttgatgatgagttctgttcgccggaggaccggctccggcagcttttgactgttaatcggccggcgagttggtcggaatcagatgggtggagtagtgttaggtga

SEQ ID NO: 10827 - protein, 340 aa, Glycine max
MDWVRGDAVGRGSFATVSLAIPTTNYNQFPSLTVVKSADAQTSCWLRNEKHVLDRLGSCPRIIRCFGDDCSFENGVEYYNLFLEYAAGGSLADELRNHDGRIPEPEAREYTRDIVEGLSHVHKNGFVHCDIKLQNILVFEDGRIKIADFGLAREAGQKQEKSECRGTPMFMSPEQATGGECESPADIWALGCAVVEMVTGKPAWQVENGSSMWSLLLRIGVGQEVPEIPNNLSEDGKDFIEKCFIKDPKKRWSAEMLLKHPFLINDDTVPFKRVHESPRSHFDFPDWVSSVANSLPSSPEFQEKWGFDDEFCSPEDRLRQLLTVNRPASWSESDGWSSVR

SEQ ID NO: 10828 - DNA, 1023 bp, Glycine max
  CDS (1)..(1023)
atggattgggttcgaggagacgctgtcggacgaggaagctttgccaccgttagtttagctattccaacgacgaattacaatcagtttccgtctctaaccgtggttaagtccgctgacgctcaaacctcgtgctggctcagaaacgagaaacacgtgctggatcgcctaggttcgtgtccgaggataattcgctgcttcggagatgactgcagtttcgagaacggcgtcgagtactacaatttgttcctcgaatacgccgccggcgggagtctcgccgacgaattgaggaaccacgatggcaggattcccgagcctgaggctcgggaatacacgagggacatcgtggagggtctgagccacgtgcacaaaagcgggtttgttcactgcgacataaagctgcagaacatcctcgtattcggggacggaggtatcaaaattgcggatttcgggcttgcgagggaggcagggcagaaacaggagaagagtgaatgcagggggactccgatgtttatgtcgccggagcaagcgaccggcggcgagtgcgaatcgccggccgatatatgggctttgggatgtacaattgtggagatggtgaccgggaaaccggcgtggcaggtggagaagggggcgagcatgtggtcgctgttgcttcgaattggggtgggagaagaggttcccgagatccctaataatttgtccgaagatggaaaagattttattgaaaaatgttttattaaggatcctaagaagaggtggagcgcagaaatgctattgaaacacccttttcttattaatgatggcactgttccatttaagcgcgttcatgagtcgccgagaagccactttgatttccccgattgggtttctagcgtgacgaattcgcttcccagttcgccggaatttcaagacaagtgggattttgatgacgggttctgttcgccggaggaccggctccggcagcttttgacggttaatcggccggcgagttggtcagaatcggatgggtggagtagtgttaggtga

SEQ ID NO: 10829 - protein, 340 aa, Glycine max
MDWVRGDAVGRGSFATVSLAIPTTNYNQFPSLTVVKSADAQTSCWLRNEKHVLDRLGSCPRIIRCFGDDCSFENGVEYYNLFLEYAAGGSLADELRNHDGRIPEPEAREYTRDIVEGLSHVHKSGFVHCDIKLQNILVFGDGGIKIADFGLAREAGQKQEKSECRGTPMFMSPEQATGGECESPADIWALGCTIVEMVTGKPAWQVEKGASMWSLLLRIGVGEEVPEIPNNLSEDGKDFIEKCFIKDPKKRWSAEMLLKHPFLINDGTVPFKRVHESPRSHFDFPDWVSSVTNSLPSSPEFQDKWDFDDGFCSPEDRLRQLLTVNRPASWSESDGWSSVR

SEQ ID NO: 10830 - DNA, 23 bp, Artificial sequence
  primer
atgaattggactagaggaaaaac

SEQ ID NO: 10831 - DNA, 23 bp, Artificial sequence
  primer
ttatttccggttcaacccatttc

SEQ ID NO: 10832 - protein, 342 aa, Artificial sequence
  consensus sequence
  Variant (2)..(2): Xaa in position 2 is any amino acid
  Variant (4)..(4): Xaa in position 4 is any amino acid
  Variant (7)..(9): Xaa in position 7 to 9 is any amino acid
  Variant (11)..(11): Xaa in position 11 is any amino acid
  Variant (14)..(14): Xaa in position 14 is any amino acid
  Variant (18)..(19): Xaa in position 18 to 19 is any amino acid
  Variant (21)..(30): Xaa in position 21 to 30 is any amino acid
  Variant (31)..(34): Xaa in position 31 to 34 is any or no amino acid
  Variant (38)..(42): Xaa in position 38 to 42 is any amino acid
  Variant (44)..(45): Xaa in position 44 to 45 is any amino acid
  Variant (46)..(47): Xaa in position 46 to 47 is any or no amino acid
  Variant (49)..(50): Xaa in position 49 to 50 is any amino acid
  Variant (52)..(54): Xaa in position 52 to 54 is any amino acid
  Variant (56)..(57): Xaa in position 56 to 57 is any amino acid
  Variant (59)..(60): Xaa in position 59 to 60 is any amino acid
  Variant (61)..(61): Xaa in position 61 is any or no amino acid
  Variant (63)..(64): Xaa in position 63 to 64 is any amino acid
  Variant (66)..(68): Xaa in position 66 to 68 is any amino acid
  Variant (70)..(74): Xaa in position 70 to 74 is any amino acid
  Variant (76)..(80): Xaa in position 76 to 80 is any amino acid
  Variant (81)..(85): Xaa in position 81 to 85 is any or no amino acid
  Variant (89)..(90): Xaa in position 89 to 90 is any amino acid
  Variant (94)..(95): Xaa in position 94 to 95 is any amino acid
  Variant (97)..(97): Xaa in position 97 is any amino acid
  Variant (99)..(99): Xaa in position 99 is any amino acid
  Variant (101)..(102): Xaa in position 101 to 102 is any amino acid
  Variant (103)..(106): Xaa in position 103 to 106 is any or no amino acid
  Variant (108)..(110): Xaa in position 108 to 110 is any amino acid
  Variant (112)..(116): Xaa in position 112 to 116 is any amino acid
  Variant (120)..(120): Xaa in position 120 is any amino acid
  Variant (122)..(123): Xaa in position 122 to 123 is any amino acid
  Variant (126)..(128): Xaa in position 126 to 128 is any amino acid
  Variant (130)..(131): Xaa in position 130 to 131 is any amino acid
  Variant (132)..(132): Xaa in position 132 is any or no amino acid
  Variant (134)..(135): Xaa in position 134 to 135 is any amino acid
  Variant (139)..(139): Xaa in position 139 is any amino acid
  Variant (141)..(142): Xaa in position 141 to 142 is any amino acid
  Variant (144)..(144): Xaa in position 144 is any amino acid
  Variant (146)..(148): Xaa in position 146 to 148 is any amino acid
  Variant (149)..(149): Xaa in position 149 is any or no amino acid
  Variant (151)..(151): Xaa in position 151 is any amino acid
  Variant (152)..(152): Xaa in position 152 is any or no amino acid
  Variant (155)..(155): Xaa in position 155 is any amino acid
  Variant (157)..(157): Xaa in position 157 is any amino acid
  Variant (159)..(159): Xaa in position 159 is any amino acid
  Variant (161)..(165): Xaa in position 161 to 165 is any amino acid
  Variant (166)..(174): Xaa in position 166 to 174 is any or no amino acid
  Variant (178)..(178): Xaa in position 178 is any amino acid
  Variant (181)..(181): Xaa in position 181 is any amino acid
  Variant (184)..(184): Xaa in position 184 is any amino acid
  Variant (186)..(186): Xaa in position 186 is any amino acid
  Variant (188)..(194): Xaa in position 188 to 194 is any amino acid
  Variant (196)..(196): Xaa in position 196 is any amino acid
  Variant (199)..(199): Xaa in position 199 is any amino acid
  Variant (202)..(204): Xaa in position 202 to 204 is any amino acid
  Variant (207)..(207): Xaa in position 207 is any amino acid
  Variant (210)..(212): Xaa in position 210 to 212 is any amino acid
  Variant (214)..(222): Xaa in position 214 to 222 is any amino acid
  Variant (223)..(225): Xaa in position 223 to 225 is any or no amino acid
  Variant (227)..(227): Xaa in position 227 is any amino acid
  Variant (229)..(229): Xaa in position 229 is any amino acid
  Variant (231)..(235): Xaa in position 231 to 235 is any amino acid
  Variant (237)..(238): Xaa in position 237 to 238 is any amino acid
  Variant (240)..(246): Xaa in position 240 to 246 is any amino acid
  Variant (250)..(251): Xaa in position 250 to 251 is any amino acid
  Variant (254)..(260): Xaa in position 254 to 260 is any amino acid
  Variant (263)..(266): Xaa in position 263 to 266 is any amino acid
  Variant (269)..(269): Xaa in position 269 is any amino acid
  Variant (273)..(286): Xaa in position 273 to 286 is any amino acid
  Variant (287)..(292): Xaa in position 287 to 292 is any or no amino acid
  Variant (295)..(295): Xaa in position 295 is any amino acid
  Variant (297)..(298): Xaa in position 297 to 298 is any amino acid
  Variant (300)..(302): Xaa in position 300 to 302 is any amino acid
  Variant (304)..(304): Xaa in position 304 is any amino acid
  Variant (306)..(317): Xaa in position 306 to 317 is any amino acid
  Variant (318)..(341): Xaa in position 318 to 341 is any or no amino acid
MXWXRGXXXGXGSXATVXXAXXXXXXXXXXXXXXVKSXXXXXSXXXXLXXEXXXLXXLXXXPXXIXXXGXXXXXEXXXXXXXXXXYNLXXEYAXXGXLXDXXXXXXGXXXEXXXXXYTRXIXXGLXXXHXXXGXXHCDXKXXNXLXXXXGXXKIXDXGXAXXXXXXXXXXXXXXGTPXFMXPEXAXGXXXXXXXDXWAXGCXXXEMXTGXXXWXXXXXXXXXXXXLXRXGXXXXXPXXPXXXXXXXKDFXXKCXXXXXXXRWXXXXLLXHPFXXXXXXXXXXXXXXXXXXXXSPXSXXDXXXWXSXXXXXXXXXXXXXXXXXXXXXXXXXXXXXXXXXXXXW

SEQ ID NO: 10833 - protein, 23 aa, Artificial sequence
  protein pattern
  Variant (2)..(2): Xaa in position 2 is any amino acid
  Variant (3)..(3): Xaa in position 3 is Ile, Leu or Val
  Variant (4)..(4): Xaa in position 4 is any amino acid
  Variant (6)..(6): Xaa in position 6 is Ala, Gly, Pro, Ser or Thr
  Variant (7)..(7): Xaa in position 7 is any amino acid
  Variant (8)..(8): Xaa in position 8 is Ala, Ile or Val
  Variant (9)..(10): Xaa in position 9 to 10 is any amino acid
  Variant (12)..(12): Xaa in position 12 is Ala or Thr
  Variant (14)..(14): Xaa in position 14 is Asp, Glu or Gln
  Variant (16)..(16): Xaa in position 16 is Leu or Val
  Variant (17)..(17): Xaa in position 17 is any amino acid
  Variant (20)..(20): Xaa in position 20 is any amino acid
  Variant (21)..(21): Xaa in position 21 is His or Tyr
  Variant (22)..(22): Xaa in position 22 is Ile, Leu or Val
GXXXEXXXXXYXRXIXXGLXXXH

SEQ ID NO: 10834 - protein, 22 aa, Artificial sequence
  protein pattern
  Variant (2)..(2): Xaa in position 2 is Asp, Glu or Asn
  Variant (4)..(4): Xaa in position 4 is Thr or Val
  Variant (7)..(8): Xaa in position 7 to 8 is any amino acid
  Variant (9)..(9): Xaa in position 9 is Leu or Val
  Variant (11)..(11): Xaa in position 11 is Arg or Ser
  Variant (14)..(15): Xaa in position 14 to 15 is any or no amino acid
  Variant (17)..(18): Xaa in position 17 to 18 is any or no amino acid
  Variant (20)..(20): Xaa in position 20 is Cys, Asn or Ser
  Variant (21)..(21): Xaa in position 21 is any amino acid
MXWXRGXXXGXGSXXTXXVXXA

SEQ ID NO: 10835 - protein, 19 aa, Artificial sequence
  protein pattern
  Variant (2)..(2): Xaa in position 2 is any amino acid
  Variant (3)..(3): Xaa in position 3 is Ala or Val
  Variant (7)..(7): Xaa in position 7 is Ile or Val
  Variant (9)..(9): Xaa in position 9 is Gly or Leu
  Variant (10)..(10): Xaa in position 10 is any amino acid
  Variant (12)..(13): Xaa in position 12 to 13 is any or no amino acid
  Variant (15)..(16): Xaa in position 15 to 16 is any amino acid
  Variant (17)..(18): Xaa in position 17 to 18 is any or no amino acid
GXXHCDXKXXNXXVXXXXG

SEQ ID NO: 10836 - protein, 14 aa, Artificial sequence
  protein pattern
  Variant (2)..(2): Xaa in position 2 is any amino acid
  Variant (3)..(3): Xaa in position 3 is any or no amino acid
  Variant (5)..(5): Xaa in position 5 is any amino acid
  Variant (6)..(6): Xaa in position 6 is any or no amino acid
  Variant (9)..(9): Xaa in position 9 is any amino acid
  Variant (10)..(10): Xaa in position 10 is Ala or Pro
  Variant (11)..(11): Xaa in position 11 is any amino acid
  Variant (13)..(13): Xaa in position 13 is Ser or Thr
YXXLXXEYXXXGXL

SEQ ID NO: 10837 - protein, 15 aa, Artificial sequence
  protein pattern
  Variant (4)..(4): Xaa in position 4 is Ala, Ser, Thr or Val
  Variant (5)..(5): Xaa in position 5 is Asp or Glu
  Variant (6)..(8): Xaa in position 6 to 8 is any amino acid
  Variant (10)..(11): Xaa in position 10 to 11 is any amino acid
  Variant (13)..(14): Xaa in position 13 to 14 is any amino acid
VKSXXXXXSXXLXXE

SEQ ID NO: 10838 - DNA, 1800 bp, Arabidopsis thaliana
  CDS (1)..(1800)
atggggcagagagttgatctatggtctgaggtcattaaatctgaggaagaagacggagatatacctaagattgaagccgtttttcagagaagaaagaagcctgataaatcctcagaagctgtcaattttggctggttggtgaaaggggctcgtactagttcggtcaatggacccaagagagatagctgggctcgttccctttccaccagagggagagagagtattgcagtgcgcgcttatgtcaacaatcagcctcagaagaaggcagccgggagaaaaaagccccctattccaaagggaaaagttgttaaagctccagacttccagaaagagaaggagtactttcgtgatattgatgcttttgagcttctagaagagagtccttctcccaataaatctagtacatggaccatgggtgaacaagttgttcctgagatgccacatctgtccacaagattagaaaaatggctaatttcgaagaagttaaatcatacttgtggtccttcgagcacactctctaagatacttgaaaactcagccatacaccaggagtcagtatgtgataatgatgcctttgattcattgtctctaaaaaccccagacaagtcttctgctggcaacacttcagttttccggctcatcccgagctgcgatgagaacttggctgccgaagatgtgcctgttagaaaaatcaagatggaatcaatcgaccttgaagatgagctgaagcgactgtctttgacatctgatctaatccccactcatcaagattttgatcagccaattcttgatctattgtccgcctgtggacagatgcgaccatcaaacttcattgaagcattctctaaattctgtgaacctgaaagcattgtcaagattggtgaaggtacatatggggaggcttttcgggctggttctagtgtctgtaaaatagttccaattgatggagacttcagggttaatggggaagtacagaagagagctgacgaactacttgaggaagtgatactctcatggactcttaatcaactaagagaatgtgagactacagctcagaatttgtgcccgacgtacataaaaactcaagatataaaattatgtcaaggtccctatgaccctatactgataaaagcatgggaagaatgggatgcaaaacatgggtctgagaatgatcacccagattttccggagaaacaatgttatgtcatgtttgttctggaacatggtggcaaagaccttgaaagctttgttcttttgaactttgatgaagcaaggagcttactggttcaggccaccgctggcctggctgttgctgaagctgcttttgagttcgagcacagggacctgcactggggaaacattcttctcagtcgtaataactcggatactctgccttttattcttgagggaaaacaagtttgcatcaaaactttcggagtacagatatccataatcgactttactctttcaagaatcaatacaggtgaaaagatactctttctggaccttacttctgatccataccttttcaaaggaccaaaaggagataaacaatcggaaacttaccgaaaaatgaaggcggttactgaagattactgggaaggaagctttgctcgaacaaatgttctctggctaatttatctcgtggatatcttacttaccaagaagtcatttgaacggtcttcaaaacacgaaagagaactacgatcactaaagaagcgaatggagaagtatgaatcagctaaagaggctgtgtcagatcctttcttctcagatatgttgatggaccaaatatcatga

SEQ ID NO: 10839 - protein, 599 aa, Arabidopsis thaliana
MGQRVDLWSEVIKSEEEDGDIPKIEAVFQRRKKPDKSSEAVNFGWLVKGARTSSVNGPKRDSWARSLSTRGRESIAVRAYVNNQPQKKAAGRKKPPIPKGKVVKAPDFQKEKEYFRDIDAFELLEESPSPNKSSTWTMGEQVVPEMPHLSTRLEKWLISKKLNHTCGPSSTLSKILENSAIHQESVCDNDAFDSLSLKTPDKSSAGNTSVFRLIPSCDENLAAEDVPVRKIKMESIDLEDELKRLSLTSDLIPTHQDFDQPILDLLSACGQMRPSNFIEAFSKFCEPESIVKIGEGTYGEAFRAGSSVCKIVPIDGDFRVNGEVQKRADELLEEVILSWTLNQLRECETTAQNLCPTYIKTQDIKLCQGPYDPILIKAWEEWDAKHGSENDHPDFPEKQCYVMFVLEHGGKDLESFVLLNFDEARSLLVQATAGLAVAEAAFEFEHRDLHWGNILLSRNNSDTLPFILEGKQVCIKTFGVQISIIDFTLSRINTGEKILFLDLTSDPYLFKGPKGDKQSETYRKMKAVTEDYWEGSFARTNVLWLIYLVDILLTKKSFERSSKHERELRSLKKRMEKYESAKEAVSDPFFSDMLMDQIS

SEQ ID NO: 10840 - DNA, 1809 bp, Zea mays
  CDS (1)..(1809)
atggcgtctctagaaggcgaccggtggtcggagatcgtggccagcggccgtgcccggccgccccgcgttggcgtcgtgtacggtcgtcgcctggtcgaggaatcgtccggcagggccaacatggaaacgagagccagcttcagtggcctgcggcgcccgagcttcgtgccgcgcaagcgaaccagctggaaccggtcgctttccatcagagggagagagagtatcttcgtcgcacctggtgcaaatcttcaacagaaaccatgtgaagcaatgaaacgaccaccgaaaccgtgcaaccgaaagaaacgtctgggtggccctcctgatttgagcaaggagaaggcatattttgaagagatcgatgcttttgatcttatggaagaaagtccttctcctaagaactttgcctcgtggaccaaaggaatggggcagaatctcataattcatgatctgcctgcaatattggagagatggaaaatttctacccttgcaagacgtgtgtcatctgagcccttgtttgacattgtggagacgccaatcttaccatcagtcctcagtaacagcagtacatctaacaacgggtcagagacatacaccgctggaagggcaatctctgtaagctacactgatatcagtttaaagagcattgcagaagacagtctgattacatcattcggtaaagtgaagattaaggaagagcctgttgaagccagcattccatggaatggtgaagctctgactgcttttgatcagctcctcatggtttgcaggcagtctgcaccagttacactggcagaagtattctctgcttattgtgagctaggcagcatcaagaagcttggtgaagggacctatggggaggcctatagggctggaagaactgtgtgcaaagtggtaccttttgacggagacttgttagtcaatggagaaagccaaaagagatcggaagaaatacttgaggaagtcttactttctctaacgcttaataatctgagagcagaccggggtggtgatgttaaaacaaattcatgcaatggcttcattgagacaaaagactttcgagtttgtcaggggccatatgacccttttctgattagtgcttgggaagactatgatgcgaaacgtggatctgaaaatgaccatccaaaggagtttacaagggaacagtgctacattgtctttgttctagctgatggtggcactgatcttgaaagttttgctctagttgagtataatgaggttcacagtttactggttcaggttactgcttccttagcagtagctgaaagtgcttgtgaatttgaacatcgagatctgcactggggtaacattcttttggctcaagaggaaactccagatacaaatcatacaatgagcttcactcttcaagggaagaggatgcatgcaagaacttttggtctgaatgtctctataatcgacttcactctttctcggatcaacacaggaactgccattctttttcttgacctgtctgcggaccctgcactatttcaagggaaaaagggagataaacaggcagaaacatatcgaagaatgaaacaaatcacccaggaacactgggagggcagcttcccgaagacaaacgtggtgtggttaatctaccttgtagatatggtgctacagaagctgaaatcacctgctcatggcaacaaaatcgagcgggagcttcgctcgctcaagaaacgcctggcgtcttacgagtccgctggagattgtctacgcgaccccttcttcgctgatgtgttgctgatcgaggatgaccaggtcccttcaatgcctcctctgtag

SEQ ID NO: 10841 - protein, 602 aa, Zea mays
MASLEGDRWSEIVASGRARPPRVGVVYGRRLVEESSGRANMETRASFSGLRRPSFVPRKRTSWNRSLSIRGRESIFVAPGANLQQKPCEAMKRPPKPCNRKKRLGGPPDLSKEKAYFEEIDAFDLMEESPSPKNFASWTKGMGQNLIIHDLPAILERWKISTLARRVSSEPLFDIVETPILPSVLSNSSTSNNGSETYTAGRAISVSYTDISLKSIAEDSLITSFGKVKIKEEPVEASIPWNGEALTAFDQLLMVCRQSAPVTLAEVFSAYCELGSIKKLGEGTYGEAYRAGRTVCKVVPFDGDLLVNGESQKRSEEILEEVLLSLTLNNLRADRGGDVKTNSCNGFIETKDFRVCQGPYDPFLISAWEDYDAKRGSENDHPKEFTREQCYIVFVLADGGTDLESFALVEYNEVHSLLVQVTASLAVAESACEFEHRDLHWGNILLAQEETPDTNHTMSFTLQGKRMHARTFGLNVSIIDFTLSRINTGTAILFLDLSADPALFQGKKGDKQAETYRRMKQITQEHWEGSFPKTNVVWLIYLVDMVLQKLKSPAHGNKIERELRSLKKRLASYESAGDCLRDPFFADVLLIEDDQVPSMPPL

SEQ ID NO: 10842 - DNA, 1899 bp, Oryza sativa
  CDS (1)..(1899)
atggcgagagaagccgcggcaccagggcgcaccgcggggaaggcctccgcgccgtcgggacaccaccacgcgggcgctcgcggcggcggcggcgacctgtggtcggagatcatggccagcggcggaggcggaggcgcggcccgcatcggcgtggtgtacgggcggcggcgggcggcgcaggaggcgtcgaggccgaggggcgccgtcgatgtgagaggcgttgcggccggcgagaagagggcgagctttgagccgagcaagaggaccagctggaaccggtcgctctccatcagaggacgggaaagtatcctttttgctcctggaacaaaaattcaacctcagcagaatccttgcagagcacagaaaaggccaccaaagccgggtaaccgagtgaaaagaacttttggggggcctcctgacttgaagaaagaaaaggcttattttgaagaagttgatgcttttgaactgatggaggagagcccttcacctaagaactttggcacttgggcgagaggaatggagcagaattacattgtgcatgatctatctgcaatactggagagatggaaaatctccaagcttgcgaaatttgcagcatccaggcccttgtttgatatcatggagaccccagttgtaccatcagtccgtagtgattgcagtcttcacgacagttgtagaacccctgaaaaggatagggggtctagaacaaatcctatgagaagaacaatcccttcagggctcagtgacaaaaccagcatttttacatcctttagtgagcttaagattaaggaagaacctgatgatagcagcattccatcattgagtgctgaagctatgactgcctttgctcaactccttttggtttgcaatcaatctgcacctataaccctagctgaagcgttttccacttactgtacaccaggcagcattgtgaagcttggtgaaggaacattcggtgaggccttcagggctggtagtactgtctgtaaagtggttccctttgatggaacatcactagttaatggagagacccaaaagaaagcagaagaagttcttgaggaagttttgctttgtctaacactaaataatctaagagcagaccggggtgataatgtgaaagaaaattcatgccatggtttcattgagacaaaagatttttgggtttgtcaaggtccatatgacccttcacttatttgtgcttgggaagattgggatgccaaatgttgttctgagaatgatcatccaaatgatttttcgaatgaacaatgctatattgtctttgtgcaagctgatggtgggagagaccttgaaaaatttgctttgcttgactacaatgaggcttgcagtttattggttcaagtcactgctgctttagctgttgctgaaagcgcgtgcgaatttgaacatcgagatttgcattggggtaacattctattggatcgagatgaaacacaagacaagaatcatacaatgggtttcactcttcaagggaaaaacatgtgtactagaacttttggtttgaacgtctcaataattgattttacgctttctcggatcaatacaggtgatgctatcctctttttagacctgtcaacggaccctgccttatttgaaggaccaaaacgagataagcaggcagaaacataccgaaaaatgaaacagattaccaatgattactgggagggcagctttccaaagacaaacgtcgtatggctaatttatcttgtcgatatcgtactgcagaagagatactccacatttacttccaaagacgacagggagctccgagcgttcaagaaacgcctagccaagtatgattccgctaaagattgtctcactgattctttcttcagtgacctattattgtccgacgaggatgcacagccctctacagcctga

SEQ ID NO: 10843 - protein, 632 aa, Oryza sativa
MAREAAAPGRTAGKASAPSGHHHAGARGGGGDLWSEIMASGGGGGAARIGVVYGRRRAAQEASRPRGAVDVRGVAAGEKRASFEPSKRTSWNRSLSIRGRESILFAPGTKIQPQQNPCRAQKRPPKPGNRVKRTFGGPPDLKKEKAYFEEVDAFELMEESPSPKNFGTWARGMEQNYIVHDLSAILERWKISKLAKFAASRPLFDIMETPVVPSVRSDCSLHDSCRTPEKDRGSRTNPMRRTIPSGLSDKTSIFTSFSELKIKEEPDDSSIPSLSAEAMTAFAQLLLVCNQSAPITLAEAFSTYCTPGSIVKLGEGTFGEAFRAGSTVCKVVPFDGTSLVNGETQKKAEEVLEEVLLCLTLNNLRADRGDNVKENSCHGFIETKDFWVCQGPYDPSLICAWEDWDAKCCSENDHPNDFSNEQCYIVFVQADGGRDLEKFALLDYNEACSLLVQVTAALAVAESACEFEHRDLHWGNILLDRDETQDKNHTMGFTLQGKNMCTRTFGLNVSIIDFTLSRINTGDAILFLDLSTDPALFEGPKRDKQAETYRKMKQITNDYWEGSFPKTNVVWLIYLVDIVLQKRYSTFTSKDDRELRAFKKRLAKYDSAKDCLTDSFFSDLLLSDEDAQPSTA

SEQ ID NO: 10844 - DNA, 2097 bp, Arabidopsis thaliana
  CDS (44)..(1843)
gggtgactgttgcagtactgatttgtgttccctctaacctaaaatggggcagagagttgatctatggtctgaggtcattaaatccgaggaagaagacggagatatacctaagattgaagccgtttttcagagaagaaagaagcctgataaatcctcagaagctgtcaattttggctggttggtgaaaggggatcgtactagttcggtcaatggacccaagagagatagctgggctcgttccctttccaccagagggagagagagtattgcagtgcgcgcttatgtcaacaatcagcctcagaagaaggcagccgggagaaaaaagccccctattccaaagggaaaagttgttaaagctccagacttccagaaagagaaggagtactttcgtgatattgatgcttttgagcttctagaagagagtccttctcccaataaatctagtacatggaccatgggtgaacaagttgttcctgagatgccacatctgtccacaagattagaaaaatggctaatttcgaagaagttaaatcatacttgtggtccttcgagcacactctctaagatacttgaaaactcagccatacaccaggagtcagtatgtgataatgatgcctttgattcattgtctctaaaaaccccagacaagtcttctgctggcaacacttcagttttccggctcatcccgagctgcgatgagaacttggctgccgaagatgtgcctgttagaaaaatcaagatggaatcaatcgaccttgaagatgagctgaagcgactgtctttgacatctgatctaatccccactcatcaagattttgatcagccaattcttgatctattgtccgcctgtggacagatgcgaccatcaaacttcattgaagcattctctaaattctgtgaacctgaaagcattgtcaagattggtgaaggtacatatggggaggcttttcgggctggttctagtgtctgtaaaatagttccaattgatggagacttcagggttaatggggaagtacagaagagagctgacgaactacttgaggaagtgatactctcatggactcttaatcaactaagagaatgtgagactacagctcagaatttgtgcccgacgtacataaaaactcaagatataaaattatgtcaaggtccctatgaccctatactgataaaagcatgggaagaatgggatgcaaaacatgggtctgagaatgatcacccagattttccggagaaacaatgttatgtcatgtttgttctggaacatggtggcaaagaccttgaaagctttgttcttttgaactttgatgaagcaaggagcttactggttcaggccaccgctggcctggctgttgctgaagctgcttttgagttcgagcacagggacctgcactggggaaacattcctctcagtcgtaataactcggatactctgccttttattcttgagggaaaacaagtttgcatcaaaactttcggagtacagatatccataatcgactttactctttcaagaatcaatacaggtgaaaagatactctttctggaccttacttctgatccataccttttcaaaggaccaaaaggagataaacaatcggaaacttaccgaaaaatgaaggcggttactgaagattactgggaaggaagctttgctcgaacaaatgttctctggctaatttatctcgtggatatcttacttaccaagaagtcatttgaacggtcttcaaaacacgaaagagaactacgatcactaaagaagcgaatggagaagtatgaatcagctaaagaggctgtgtcagatcctttcttctcagatatgttgatggaccaaatatcatgaagaatataataaaccccgtaagtgattaaccagaagctctctctcttgtatatttgtttgcctagccacttaaatcaacagtactagctcttgcttcgtaatattatctaaggctccgttatctatataccaatcttgattttcatctcttcaaatgaatccaagaactgatatgttagtcttttattgtatgtgacaatagtttaatggtagcttttatctatagaaatacttttgaaaccatgaattctttt

SEQ ID NO: 10845 - protein, 599 aa, Arabidopsis thaliana
MGQRVDLWSEVIKSEEEDGDIPKIEAVFQRRKKPDKSSEAVNFGWLVKGDRTSSVNGPKRDSWARSLSTRGRESIAVRAYVNNQPQKKAAGRKKPPIPKGKVVKAPDFQKEKEYFRDIDAFELLEESPSPNKSSTWTMGEQVVPEMPHLSTRLEKWLISKKLNHTCGPSSTLSKILENSAIHQESVCDNDAFDSLSLKTPDKSSAGNTSVFRLIPSCDENLAAEDVPVRKIKMESIDLEDELKRLSLTSDLIPTHQDFDQPILDLLSACGQMRPSNFIEAFSKFCEPESIVKIGEGTYGEAFRAGSSVCKIVPIDGDFRVNGEVQKRADELLEEVILSWTLNQLRECETTAQNLCPTYIKTQDIKLCQGPYDPILIKAWEEWDAKHGSENDHPDFPEKQCYVMFVLEHGGKDLESFVLLNFDEARSLLVQATAGLAVAEAAFEFEHRDLHWGNIPLSRNNSDTLPFILEGKQVCIKTFGVQISIIDFTLSRINTGEKILFLDLTSDPYLFKGPKGDKQSETYRKMKAVTEDYWEGSFARTNVLWLIYLVDILLTKKSFERSSKHERELRSLKKRMEKYESAKEAVSDPFFSDMLMDQIS

SEQ ID NO: 10846 - DNA, 2078 bp, Oryza sativa
  CDS (1)..(1938)
atggcgagagaagccgcggcaccagggcgcaccgcggggaaggcctccgcgccgtcgggacaccaccacgcgggcgctcgcggcggcggcggcgacctgtggtcggagatcatggccagcggcggaggcggaggcgcggcccgcatcggcgtggtgtacgggcggcggcgggcggcgcaggaggcgtcgaggccgaggggcgccgtcgatgtgagaggcgttgcggccggcgagaagagggcgagctttgagccgagcaagaggaccagctggaaccggtcgctctccatcagaggacgggaaagtatcctttttgctcctggaacaaaaattcaacctcagcagaatccttgcagagcacagaaaaggccaccaaagccgggtaaccgagtgaaaagaacttttggggggcctcctgacttgaagaaagaaaaggcttattttgaagaagttgatgcttttgaactgatggaggagagcccttcacctaagaactttggcacttgggcgagaggaatggagcagaattacattgtgcatgatctatctgcaatactggagagatggaaaatctccaagcttgcgaaatttgcagcatccaggcccttgtttgatatcatggagaccccagttgtaccatcagtccgtagtgattgcagtcttcacgacagttgtagaacccctgaaaaggatagggggtctagaacaaatcctatgagaagaacaatcccttcagggctcagtgacaaaaccagcatttttacatcctttagtgagcttaagattaaggaagaacctgatgatagcagcattccatcattgagtgctgaagctatgactgcctttgctcaactccttttggtttgcaatcaatctgcacctataaccctagctgaagcgttttccacttactggctgtattcgtcatttaacgaagatgttcatggaaatagtacaccaggcagcattgtgaagcttggtgaaggaacattcggtgaggccttcagggctggtagtactgtctgtaaagtggttccctttgatggaacatcactagttaatggagagacccaaaagaaagcagaagaagttcttgaggaagttttgctttgtctaacactaaataatctaagagcagaccggggtgataatgtgaaagaaaattcatgccatggtttcattgagacaaaagatttttgggtttgtcaaggtccatatgacccttcacttatttgtgcttgggaagattgggatgccaaatgttgttctgagaatgatcatccaaatgatttttcgaatgaacaatgctatattgtctttgtgcaagctgatggtgggagagaccttgaaaaatttgctttgcttgactacaatgaggcttgcagtttattggttcaagtcactgctgctttagctgttgctgaaagcgcgtgcgaatttgaacatcgagatttgcattggggtaacattctattggatcgagatgaaacacaagacaagaatcatacaatgggtttcactcttcaagggaaaaacatgtgtactagaacttttggtttgaacgtctcaataattgattttacgctttctcggatcaatacaggtgatgctatcctctttttagacctgtcaacggaccctgccttatttgaaggaccaaaacgagataagcaggcagaaacataccgaaaaatgaaacagattaccaatgattactgggagggcagctttccaaagacaaacgtcgtatggctaatttatcttgtcgatatcgtactgcagaagagatactccacatttacttccaaagacgacagggagctccgagcgttcaagaaacgcctagccaagtatgattccgctaaagattgtctcactgattctttcttcagtgacctattattgtccgacgaggatgcacagccctctacagcctgaactgcctcttctttagttcgatccgagagatgacatagccttcctctccatgggagggttaatgttacttgttaattaatcagttaacacaagctcctcttcctgggacgtacaagagctaagataacttgttgcccggt

SEQ ID NO: 10847 - protein, 645 aa, Oryza sativa
MAREAAAPGRTAGKASAPSGHHHAGARGGGGDLWSEIMASGGGGGAARIGVVYGRRRAAQEASRPRGAVDVRGVAAGEKRASFEPSKRTSWNRSLSIRGRESILFAPGTKIQPQQNPCRAQKRPPKPGNRVKRTFGGPPDLKKEKAYFEEVDAFELMEESPSPKNFGTWARGMEQNYIVHDLSAILERWKISKLAKFAASRPLFDIMETPVVPSVRSDCSLHDSCRTPEKDRGSRTNPMRRTIPSGLSDKTSIFTSFSELKIKEEPDDSSIPSLSAEAMTAFAQLLLVCNQSAPITLAEAFSTYWLYSSFNEDVHGNSTPGSIVKLGEGTFGEAFRAGSTVCKVVPFDGTSLVNGETQKKAEEVLEEVLLCLTLNNLRADRGDNVKENSCHGFIETKDFWVCQGPYDPSLICAWEDWDAKCCSENDHPNDFSNEQCYIVFVQADGGRDLEKFALLDYNEACSLLVQVTAALAVAESACEFEHRDLHWGNILLDRDETQDKNHTMGFTLQGKNMCTRTFGLNVSIIDFTLSRINTGDAILFLDLSTDPALFEGPKRDKQAETYRKMKQITNDYWEGSFPKTNVVWLIYLVDIVLQKRYSTFTSKDDRELRAFKKRLAKYDSAKDCLTDSFFSDLLLSDEDAQPSTA

SEQ ID NO: 10848 - DNA, 1920 bp, Vitis vinifera
  CDS (1)..(1920)
atgccgttttatggctcgctccgtcgtctctctccgatgacttatccgtacggttcgcttcaacgtcaagatagtgttgatctctggtctgaaatcgcagccacagaggaaggggagggaaacaggaaacaacagattgctgttatttacagaagaagaagaaggaccgagaacactctcaaagatgtagacacaaaccagtccagtttgaataatgggaatcggctgagtttggctgctccagttaagagagttagttggaatcgttctctttctatcagagggaggacgagcattgcggtatttgcatgtgtggagtaccaacctcaacagaggaagcccagaaggaaagcaaaaccacctcttcccagaggaaaatttgtgcagcctcaaagctttgaacaggagcgggcatactttcaagaagttgatgcatatgaattgttggaggaaagcccctctcccaagaggtttggtacatgggccatgggtgtccaaagtgatgacattgttttaccacatttatcctcagtattaaacaaatggttaattgccaagaagctaaattacagttatggaccatctggctccctatctaagatactagaaactccagcaatgcctatggaacctatttgtggtgatggttttgatgctttaactgtgaaaacccctgagaaagcttctccgcaagtctgtttgggtttgcattctgttcaggacagatttaattcaaatttcatgaataaagatgttgttggaaggcaaacaggatcacaaaagagcaatgaagtgtccttgaccacaggtgacgaggggtgtgaagatatagatgtggcgattaagaaactctcattgacatcaaggtctgcatcattgggtggggaccactgggattcattttcagcactgctaacagtttgtgaacagtctgctccatcgactttgttagatgtattctcgaagtattgtgatccagaaagcattgtcaaaatcggtgaaggtacatatggtgaagctttcagggctggtaaaactgtctgcaaaatagttccaattgatggagacttactagtgaacggggaagtacaaaagagatcaggtgaattgcttgaggaggccatactttcccgaactcttaatcatttacgaggggatgggggtcgtgttaacaattcctgtaccagcttcatagaaacgctagatttaagggtatgccaaggcccttatgatgcagccctgatacgagcatgggaagattgggatgaaaagcatggttcagaaaatgatcatcctagagaatttccagaaaaacagtgctatgttgtgtttgttctagaacatggtggtaaggatcttgaaagctttgtgcttttgaactttgatgaagtacggagtttattggttcaggttacagttgccttggctgtggcagaagctgcatatgaatttgaacatcgtgatctacactggggtaacatacttctaagtcggaaagattctgaaatgttgcagttcactcttgagggaaagaatatgtttgtcaaaacatttggattgtcaatatccataattgattttactctttccagaatcaatactggcgaagctatactttttctagacctatcttcagacccagaactctttaagggtccaaaaggagacaaacagtcaaatacatacaggaagatgaaggagataactgaagatttctgggagggaagtttccccaaaacaaacgtgctgtggttgcagtacttggtggacattttgctattgaagaaatcttttaaacgaacttcaaaggatgagagagagttacgttcactgaagaagcgtatggacaactatggctcagcaaaagaagcaacctctgatcctttcttcactgatatgtttgttgatcatgccatttga

SEQ ID NO: 10849 - protein, 639 aa, Vitis vinifera
MPFYGSLRRLSPMTYPYGSLQRQDSVDLWSEIAATEEGEGNRKQQIAVIYRRRRRTENTLKDVDTNQSSLNNGNRLSLAAPVKRVSWNRSLSIRGRTSIAVFACVEYQPQQRKPRRKAKPPLPRGKFVQPQSFEQERAYFQEVDAYELLEESPSPKRFGTWAMGVQSDDIVLPHLSSVLNKWLIAKKLNYSYGPSGSLSKILETPAMPMEPICGDGFDALTVKTPEKASPQVCLGLHSVQDRFNSNFMNKDVVGRQTGSQKSNEVSLTTGDEGCEDIDVAIKKLSLTSRSASLGGDHWDSFSALLTVCEQSAPSTLLDVFSKYCDPESIVKIGEGTYGEAFRAGKTVCKIVPIDGDLLVNGEVQKRSGELLEEAILSRTLNHLRGDGGRVNNSCTSFIETLDLRVCQGPYDAALIRAWEDWDEKHGSENDHPREFPEKQCYVVFVLEHGGKDLESFVLLNFDEVRSLLVQVTVALAVAEAAYEFEHRDLHWGNILLSRKDSEMLQFTLEGKNMFVKTFGLSISIIDFTLSRINTGEAILFLDLSSDPELFKGPKGDKQSNTYRKMKEITEDFWEGSFPKTNVLWLQYLVDILLLKKSFKRTSKDERELRSLKKRMDNYGSAKEATSDPFFTDMFVDHAI

SEQ ID NO: 10850 - DNA, 1950 bp, Ricinus communis
  CDS (1)..(1950)
atgggttctagagcaggtagaaatagaagtgaagttgatttatgggcagagataatagctgaagagacaaattacaaggatcagaagaatattaaagtgttttacagaaggagacgctcccaagagacccttcaagattccatttctcagaatcaagcagactcagataaggagaatcgcgtgagtttgggtgctgctgctgctgccgctcccaagagagtcagttggaatcgttcactttctatcagagggagagtcagtattgctgttactgcttgtgttgacaatcgaccccaacaaaagcaaccaaaaagaaagggaaagccacctgttccaaaaagaaaggctgatcaacctccaaattttgagaaagagagagcatactttcaagaggttgatgcttttgagttgccggaagagagcccctctcccaaaaactttggtacatggatcaccggcaaccaatctgataatgttgcgatcccacatttgtcatccaggttagagagttggttgattaccaagcagttaaagttgaacgagagttctgcaccatctactgcgctgtcaaagttattagaatctccaaggatgccgttagaacctatttgtgctgatgatttcaacactataaatttgataaccccagtaaaatcttccttgaaaaccaattcaaatctgcattctatgcaaaacattataaatttgataaccccagaagaatcttccttgaaaaccaattcaaatctgcattctatgcaaaaaagaatcaatgcttatttactcaaaaagtcaaattcacgaaacagcaactctgtgttatcacgtctgcgtgatgagggctgtaaggatattgaattggcagtgaagaaactatcactagcgtcaacgtctacttcggcggataatgacaatgtggatccattttcttcacttttggcatactgtggacagtcggttccatcaactctgcttgatgtcatctccaaatattgcaacccaaatgatattattaaagtgggggaaggaacatatggagaagcctacagagttggcactaccgtctgcaaaattgttccaattgatggagagttgagagtaaatggggaagtacaaaagagatcagaagaacttcttgaggaagttgtactttctcgaactctcaatcatctacgagggaatgatggtgatgcctgcaatgcatgcacaacatttattgagaccttagatttaagggtgtgccagggtccttatgacaatgcattgattagagcatgggacaggtgggatgatgcacatggatcagaaaatgatcaccctaggggatttccagagaagcagcgttatgttgtatttgtactacaacatgggggcaaggaccttgaaaactttgttctatcgaactttgacgaggctcggagtttattggttcaggttacgtctgccttggctgttgcagaagctgcatttgaattcgaacaccgcgacctgcactggggaaacattctgctaagtcgaaatgactctgctacagtgaagtttatccttgaggggaaggaaatgtttgtcagaacatatggattagcgatatcaataattgactttactctctcaagaattaatacaggtgaaaatatactctttctggacctatcatcagatccttatctctttaaaggtccaaagggtgacagacaagcagaaacatacagaaagatgaaggaggtaacggaagattgctgggaaggaagttttcctagaacaaatgtgttgtggctactgtacttggtggatatattaattcagaagaaatcatttgaacgttcttcgaaaaatgagagagaattgcggtcgctcaagaaacgtctggacaagtataattcagccaaagaagctatttttgatactttctttagtgacttgcttgtagataattctgtaaaaatttga

SEQ ID NO: 10851 - protein, 649 aa, Ricinus communis
MGSRAGRNRSEVDLWAEIIAEETNYKDQKNIKVFYRRRRSQETLQDSISQNQADSDKENRVSLGAAAAAAPKRVSWNRSLSIRGRVSIAVTACVDNRPQQKQPKRKGKPPVPKRKADQPPNFEKERAYFQEVDAFELPEESPSPKNFGTWITGNQSDNVAIPHLSSRLESWLITKQLKLNESSAPSTALSKLLESPRMPLEPICADDFNTINLITPVKSSLKTNSNLHSMQNIINLITPEESSLKTNSNLHSMQKRINAYLLKKSNSRNSNSVLSRLRDEGCKDIELAVKKLSLASTSTSADNDNVDPFSSLLAYCGQSVPSTLLDVISKYCNPNDIIKVGEGTYGEAYRVGTTVCKIVPIDGELRVNGEVQKRSEELLEEVVLSRTLNHLRGNDGDACNACTTFIETLDLRVCQGPYDNALIRAWDRWDDAHGSENDHPRGFPEKQRYVVFVLQHGGKDLENFVLSNFDEARSLLVQVTSALAVAEAAFEFEHRDLHWGNILLSRNDSATVKFILEGKEMFVRTYGLAISIIDFTLSRINTGENILFLDLSSDPYLFKGPKGDRQAETYRKMKEVTEDCWEGSFPRTNVLWLLYLVDILIQKKSFERSSKNERELRSLKKRLDKYNSAKEAIFDTFFSDLLVDNSVKI

SEQ ID NO: 10852 - DNA, 1980 bp, Oryza sativa subsp. indica
  CDS (1)..(1980)
atggcgagagaagccgcggcaccagggcgcaccgcggggaaggcctccgcgccgtcgggacaccaccacgcgggcgctcgcggcggcggcggcgacctgtggtcggagatcatggccagcggcggaggcggaggcgcggcccgcatcggcgtggtgtacgggcggcggcgggcggcgcaggaggcgtcgaggccgaggggcgccgtcgatgtgagaggcgttgcggccggcgagaagagggcgagctttgagccgagcaagaggaccagctggaaccggtcgctctccatcaggagaggcgttgcggccggcgagaagagggcgagctttgagccgagcaagaggaccagctggaaccggtcgctctccatcagaggacgggaaagtatcctttttgctcctggaacaaaaattcaacctcagcagaatccttgcagagcacagaaaaggccaccaaagccgggtaaccgagtgaaaagaacttttggggggcctcctgacttgaagaaagaaaaggcttattttgaagaagttgatgcttttgaactgatggaggagagcccttcacctaagaactttggcacttgggcgagaggaatggagcagaattacattgtgcatgatctatctgcaatactggagagatggaaaatctccaagcttgcgaaatttgcagcatccaggcccttgtttgatatcatggagaccccagctgtaccatcagtccgtagtgattgcagtcttcacgacagttgtagaacccctgaaaaggatagggggtctagaacaaatcctatgagaagaacaatcccttcagggctcagtgacaaaaccagcatttttacatcctttagtgagcttaagattaaggaagaacctgatgatagcagcattccatcattgagtgctgaagctatgactgcctttgctcaactccttttggtttgcaatcaatctgcacctataaccctagctgaagcgttttccacttactgtataccaggcagcattgtgaagcttggtgaaggaacattcggtgaggccttcagggctggcagtactgtctgtaaagtggttccctttgatggaacatcactagttaatggagagacccaaaagaaagcagaagaagttcttgaggaagttttgctttgtctaacacttaataatctaagagcagaccggggtgataatgtgaaagaaaattcatgccatggtttcattgagacaaaagatttttgggtttgtcaaggtccatatgacccttcacttatttgtgcttgggaagattgggatgccaaatgttgttctgagaatgatcatccaaatgatttttcgaatgaacaatgctatattgtctttgtgcaagctgatggtgggagagaccttgaaaaatttgctttgcttgactacaatgaggcttgcagtttattggttcaagtcactgctgctttagctgttgctgaaagcgcgtgcgaatttgaacatcgagatttgcattggggtaacattctattggatcgagatgaaacacaagacaagaatcatacaatgggtttcactcttcaagggaaaaacatgtgtactagaacttttggtttgaacgtctcaataattgattttacgctttctcggatcaatacaggtgatgctatcctctttttagacctgtcaacggaccctgccttatttgaaggaccaaaacgagataagcaggcagaaacataccgaaaaatgaaacagattaccaatgattactgggagggcagctttccaaagacaaacgtcgtatggctaatttatcttgtcgatatcgtactgcagaagagatactccacatttacttccaaagacgacagggagctccgagcgttcaagaaacgcctagccaagtatgattccgctaaagattgtctcactgattctttcttcagtgacctattattgtccgacgaggatgcacagccctctacagcctga

SEQ ID NO: 10853 - protein, 659 aa, Oryza sativa subsp. indica
MAREAAAPGRTAGKASAPSGHHHAGARGGGGDLWSEIMASGGGGGAARIGVVYGRRRAAQEASRPRGAVDVRGVAAGEKRASFEPSKRTSWNRSLSIRRGVAAGEKRASFEPSKRTSWNRSLSIRGRESILFAPGTKIQPQQNPCRAQKRPPKPGNRVKRTFGGPPDLKKEKAYFEEVDAFELMEESPSPKNFGTWARGMEQNYIVHDLSAILERWKISKLAKFAASRPLFDIMETPAVPSVRSDCSLHDSCRTPEKDRGSRTNPMRRTIPSGLSDKTSIFTSFSELKIKEEPDDSSIPSLSAEAMTAFAQLLLVCNQSAPITLAEAFSTYCIPGSIVKLGEGTFGEAFRAGSTVCKVVPFDGTSLVNGETQKKAEEVLEEVLLCLTLNNLRADRGDNVKENSCHGFIETKDFWVCQGPYDPSLICAWEDWDAKCCSENDHPNDFSNEQCYIVFVQADGGRDLEKFALLDYNEACSLLVQVTAALAVAESACEFEHRDLHWGNILLDRDETQDKNHTMGFTLQGKNMCTRTFGLNVSIIDFTLSRINTGDAILFLDLSTDPALFEGPKRDKQAETYRKMKQITNDYWEGSFPKTNVVWLIYLVDIVLQKRYSTFTSKDDRELRAFKKRLAKYDSAKDCLTDSFFSDLLLSDEDAQPSTA

SEQ ID NO: 10854 - DNA, 1860 bp, Oryza sativa subsp. japonica
  CDS (1)..(1860)
atggagagggagggcaaccggaggtgggaagcggattcctgggcattgctgcagcggatcaatgctgatgggaattcgtcaaccgaatgggaacgagagagagagaagaggaaaccgatggtctttctcaccaggagaggcgttgcggccggcgagaagagggcgagctttgagccgagcaagaggaccagctggaaccggtcgctctccatcagaggacgggaaagtatcctttttgctcctggaacaaaaattcaacctcagcagaatccttgcagagcacagaaaaggccaccaaagccgggtaaccgagtgaaaagaacttttggggggcctcctgacttgaagaaagaaaaggcttattttgaagaagttgatgcttttgaactgatggaggagagcccttcacctaagaactttggcacttgggcgagaggaatggagcagaattacattgtgcatgatctatctgcaatactggagagatggaaaatctccaagcttgcgaaatttgcagcatccaggcccttgtttgatatcatggagaccccagttgtaccatcagtccgtagtgattgcagtcttcacgacagttgtagaacccctgaaaaggatagggggtctagaacaaatcctatgagaagaacaatcccttcagggctcagtgacaaaaccagcatttttacatcctttagtgagcttaagattaaggaagaacctgatgatagcagcattccatcattgagtgctgaagctatgactgcctttgctcaactccttttggtttgcaatcaatctgcacctataaccctagctgaagcgttttccacttactgtctttattcgtcatttaacgaagatgttcatggaaatagtacaccaggcagcattgtgaagcttggtgaaggaacattcggtgaggccttcagggctggtagtactgtctgtaaagtggttccctttgatggaacatcactagttaatggagagacccaaaagaaagcagaagaagttcttgaggaagttttgctttgtctaacactaaataatctaagagcagaccggggtgataatgtgaaagaaaattcatgccatggtttcattgagacaaaagatttttgggtttgtcaaggtccatatgacccttcacttatttgtgcttgggaagattgggatgccaaatgttgttctgagaatgatcatccaaatgatttttcgaatgaacaatgctatattgtctttgtgcaagctgatggtgggagagaccttgaaaaatttgctttgcttgactacaatgaggcttgcagtttattggttcaagtcactgctgctttagctgttgctgaaagcgcgtgcgaatttgaacatcgagatttgcattggggtaacattctattggatcgagatgaaacacaagacaagaatcatacaatgggtttcactcttcaagggaaaaacatgtgtactagaacttttggtttgaacgtctcaataattgattttacgctttctcggatcaatacaggtgatgctatcctctttttagacctgtcaacggaccctgccttatttgaaggaccaaaacgagataagcaggcagaaacataccgaaaaatgaaacagattaccaatgattactgggagggcagctttccaaagacaaacgtcgtatggctaatttatcttgtcgatatcgtactgcagaagagatactccacatttacttccaaagacgacagggagctccgagcgttcaagaaacgcctagccaagtatgattccgctaaagattgtctcactgattctttcttcagtgacctattattgtccgacgaggatgcacagccctctacagcctga

SEQ ID NO: 10855 - protein, 619 aa, Oryza sativa subsp. japonica
MEREGNRRWEADSWALLQRINADGNSSTEWEREREKRKPMVFLTRRGVAAGEKRASFEPSKRTSWNRSLSIRGRESILFAPGTKIQPQQNPCRAQKRPPKPGNRVKRTFGGPPDLKKEKAYFEEVDAFELMEESPSPKNFGTWARGMEQNYIVHDLSAILERWKISKLAKFAASRPLFDIMETPVVPSVRSDCSLHDSCRTPEKDRGSRTNPMRRTIPSGLSDKTSIFTSFSELKIKEEPDDSSIPSLSAEAMTAFAQLLLVCNQSAPITLAEAFSTYCLYSSFNEDVHGNSTPGSIVKLGEGTFGEAFRAGSTVCKVVPFDGTSLVNGETQKKAEEVLEEVLLCLTLNNLRADRGDNVKENSCHGFIETKDFWVCQGPYDPSLICAWEDWDAKCCSENDHPNDFSNEQCYIVFVQADGGRDLEKFALLDYNEACSLLVQVTAALAVAESACEFEHRDLHWGNILLDRDETQDKNHTMGFTLQGKNMCTRTFGLNVSIIDFTLSRINTGDAILFLDLSTDPALFEGPKRDKQAETYRKMKQITNDYWEGSFPKTNVVWLIYLVDIVLQKRYSTFTSKDDRELRAFKKRLAKYDSAKDCLTDSFFSDLLLSDEDAQPSTA

SEQ ID NO: 10856 - DNA, 1944 bp, Vitis vinifera
  CDS (1)..(1944)
atgggctgcggacatttgcattggcaatgggccaggtccatcggaccgggatacacttgggccaatacattgaaccgtttggcccattctgattcgatgccgttttatggctcgctccgtcgtctctctccgatgacttatccgtacggtcaagatagtgttgatctctggtctgaaatcgcagccacagaggaaggggagggaaacaggaaacaacagattgctgttatttacagaagaagaagaaggaccgagaacactctcaaagatgtagacacaaaccagtccagtttgaataatgggaatcggctgagtttggctgctccagttaagagagttagttggaatcgttctctttctatcagagggaggacgagcattgcggtatttgcatgtgtggagtaccaacctcaacagaggaagcccagaaggaaagcaaaaccacctcttcccagaggaaaatttgtgcagcctcaaagctttgaacaggagcgggcatactttcaagaagttgatgcatatgaattgttggaggaaagcccctctcccaagagtattaaacaaatggttaattgccaagaagctaaattacagttatggaccatctggctccctaattctaagatactagaaactccagcaatgcctatggaacctatttgtggtgatggttttgatgcttcaactgtgaaaacccctgagaaagcttctccgcaagtctgtttgggtttgcattctgttcaggacagatttaattcagatttcatgaataaagatgttgttggaaggcaaacaggatcacaaaagagcaatgaagtgtccttgaccacaggtgacgaggggtgtgaagatatagatgtggcgattaagaaactctcattgacatcaaggtctgcatcattgggtggggaccactgggattcattttcagcactgctaacagtttgtgaacagtctgctccatcgactttgttagatgtattctcgaagtattgtgatccagaaagcattgtcaaaatcggtgaaggtacatatggtgaagctttcagggctggtaaaactgtctgcaaaatagttccaattgatggagacttactagtgaacggggaagtacaaaagagatcaggtgaattgcttgaggaggccatactttcccgaactcttaatcatttacgagaggatgggggtcgtgttaacaattcctgtaccagcttcatagaaacgctagatttaagggtatgccaaggcccttatgatgcagccctgatacgagcatgggaagattgggatgaacagcatggttcagaaaatgatcatcctagagaatttccagaaaaacagtgctatgttgtgtttgttctagaacatggtggtaaggatcttgaaagctttgtgcttttgaactttgatgaagtacggagtttattggttcaggttacagttgccttggctgtggcagaagctgcatatgaatttgaacatcgtgatctacactggggtaacatacttctaagtcggaaagattctgaaatgttgcagttcactcttgagggaaagaatatgtttgtcaaaacatttggattgtcaatatccataattgattttactctttccagaatcaatactggcgaagctatactttttctagacctatcttcagacccagaactctttaagggtccaaaaggagacaaacagtcaaatacatacaggaagatgaaggagataactgaagatttctgggagggaagtttccccaaaacaaacgtgctgtggttgcagtacttggtggacattttgctattgaagaaatcttttaaacgaacttcaaaggatgagagagagttacgttcactgaagaagcgtatggacaactatggctcagcaaaagaagcaacctctgatcctttcttcactgatatgtttgttgatcatgccatttga

SEQ ID NO: 10857 - protein, 647 aa, Vitis vinifera
MGCGHLHWQWARSIGPGYTWANTLNRLAHSDSMPFYGSLRRLSPMTYPYGQDSVDLWSEIAATEEGEGNRKQQIAVIYRRRRRTENTLKDVDTNQSSLNNGNRLSLAAPVKRVSWNRSLSIRGRTSIAVFACVEYQPQQRKPRRKAKPPLPRGKFVQPQSFEQERAYFQEVDAYELLEESPSPKSIKQMVNCQEAKLQLWTIWLPNSKILETPAMPMEPICGDGFDASTVKTPEKASPQVCLGLHSVQDRFNSDFMNKDVVGRQTGSQKSNEVSLTTGDEGCEDIDVAIKKLSLTSRSASLGGDHWDSFSALLTVCEQSAPSTLLDVFSKYCDPESIVKIGEGTYGEAFRAGKTVCKIVPIDGDLLVNGEVQKRSGELLEEAILSRTLNHLREDGGRVNNSCTSFIETLDLRVCQGPYDAALIRAWEDWDEQHGSENDHPREFPEKQCYVVFVLEHGGKDLESFVLLNFDEVRSLLVQVTVALAVAEAAYEFEHRDLHWGNILLSRKDSEMLQFTLEGKNMFVKTFGLSISIIDFTLSRINTGEAILFLDLSSDPELFKGPKGDKQSNTYRKMKEITEDFWEGSFPKTNVLWLQYLVDILLLKKSFKRTSKDERELRSLKKRMDNYGSAKEATSDPFFTDMFVDHAI

SEQ ID NO: 10858 - DNA, 1887 bp, Ostreococcus tauri
  CDS (1)..(1887)
atgacctcaaccgtcatcgatcgacgcgcgctcgtcgacgcgacgccatggccccggaggcgctgcgcgacgacaccaacgggctcgtcaccgtggagcgatatcgacgtcgagggaagacgcgggcgtcgacgacggtcggcgcggtgggcgcagacggaagaggaatcgacggtgagggggacgaagacgacgacgacgacgacgacgacgacgacgacgatagaggcgaccgcgcgggacggaggaccggtgaagacgaacgcggagggacgcgacggtgggtccgcggcggcggcgacgcgggcggcgacggagcgggcgaggacgttcgtgttcaagtcgaggaataagttgacgcggtgcgcgcgggcggagcgggagcatcgagcgcggttggcgaagctcgcggagtcgagggcgttctttgatgacgtcgatgaggtgtcgttggcggaggagagcgagggatcgacgccgaacggaaggggtggggcgctcggcaatcgcctggagctgagcccgagcgggttgatcgaagccttgcagggattgggattggtgaacgacgcgtccgggctcagggcgaagatggcggcgacgacgcgacgagactcgatgattcagtcgcctcgagcgcagatgctcccgataggacgcgcggacgcgttcgatcgaacgtctgattgggtgtcgtcgctcccggcgttttcgccgatgaaggagcgcgtcgagtcgacgacgttgtcctcgcccgaagagaatgagtccatcatcgccaccgacgatgaggttgatagcttacagggcgacttcgaaagactcgttatcgacgacgagtgctcgccgttggctgcgctcttgcgcgcatgcggccagtcagagggagacgttagctcgatggcgtccttagtgcggacccacgtcaagcgcggggtgaaaaaaatcggcgaaggaacgtacggtgaggcttacaggggtgaggacggcgtggtgatgaaaatcgtgcccatgggcggcgaggcattggtgaacggagaggtgcagatggggccgaacgagatccgttctgaaacctccatcttaaaggcgctcacgaaactccgcgagcacgtcaaggacgagatcgagaagaactttaccgacggatttattcgactcatcgacgcgtcggtgtgccgaggaccgtactcgaaaaagttacttgaggcgtgggacaagtacgcggtgactggcgagacggagaacgaaacgcccggcaacctcccatcaaatcagctctacatttcgttcgcctgcgaagacggcggaatcgatcttgagcacttcaatcttcgatcggccaaggagatggttgcgctgctcttccaaatcgtcgtcgctctgtccgtcgctgaggaggagtgccaatttgagcaccgcgacttgcactggggtaacgttctcattaaacgcgttcgcactaaagaaaaggtcgcgcggatcaacggcgtcgatatcaacattcagacctcaggtttagacgtcgccattatcgatttcacgctctctcgactcaccacgggtgagggagacgtcttctgtgacttgaacgcggatcctgagctcttcacggggccgaagggacactgccaatcggagacgtatcgtcgcatgaagcgggtgaccaagggcaagtggagcacgtacaacccaaaaacgaacgcgctctggatacactacctcaccgacgtgattttggagcaaaaggacttccccatcagcgttgaggaaaagcacgaactcgtcgcgttccgaaagcgagcgctcgagtacgaatcagcaggcaaggcgttgttcgacgaccttttcaagggaatctggacttctggaaagaagaaacaatga

SEQ ID NO: 10859 - protein, 628 aa, Ostreococcus tauri
MTSTVIDRRALVDATPWPRRRCATTPTGSSPWSDIDVEGRRGRRRRSARWAQTEEESTVRGTKTTTTTTTTTTTIEATARDGGPVKTNAEGRDGGSAAAATRAATERARTFVFKSRNKLTRCARAEREHRARLAKLAESRAFFDDVDEVSLAEESEGSTPNGRGGALGNRLELSPSGLIEALQGLGLVNDASGLRAKMAATTRRDSMIQSPRAQMLPIGRADAFDRTSDWVSSLPAFSPMKERVESTTLSSPEENESIIATDDEVDSLQGDFERLVIDDECSPLAALLRACGQSEGDVSSMASLVRTHVKRGVKKIGEGTYGEAYRGEDGVVMKIVPMGGEALVNGEVQMGPNEIRSETSILKALTKLREHVKDEIEKNFTDGFIRLIDASVCRGPYSKKLLEAWDKYAVTGETENETPGNLPSNQLYISFACEDGGIDLEHFNLRSAKEMVALLFQIVVALSVAEEECQFEHRDLHWGNVLIKRVRTKEKVARINGVDINIQTSGLDVAIIDFTLSRLTTGEGDVFCDLNADPELFTGPKGHCQSETYRRMKRVTKGKWSTYNPKTNALWIHYLTDVILEQKDFPISVEEKHELVAFRKRALEYESAGKALFDDLFKGIWTSGKKKQ

SEQ ID NO: 10860 - DNA, 1938 bp, Oryza sativa subsp. japonica
  CDS (1)..(1938)
atggcgagagaagccgcggcaccagggcgcaccgcggggaaggcctccgcgccgtcgggacaccaccacgcgggcgctcgcggcggcggcggcgacctgtggtcggagatcatggccagcggcggaggcggaggcgcggcccgcatcggcgtggtgtacgggcggcggcgggcggcgcaggaggcgtcgaggccgaggggcgccgtcgatgtgagaggcgttgcggccggcgagaagagggcgagctttgagccgagcaagaggaccagctggaaccggtcgctctccatcagaggacgggaaagtatcctttttgctcctggaacaaaaattcaacctcagcagaatccttgcagagcacagaaaaggccaccaaagccgggtaaccgagtgaaaagaacttttggggggcctcctgacttgaagaaagaaaaggcttattttgaagaagttgatgcttttgaactgatggaggagagcccttcacctaagaactttggcacttgggcgagaggaatggagcagaattacattgtgcatgatctatctgcaatactggagagatggaaaatctccaagcttgcgaaatttgcagcatccaggcccttgtttgatatcatggagaccccagttgtaccatcagtccgtagtgattgcagtcttcacgacagttgtagaacccctgaaaaggatagggggtctagaacaaatcctatgagaagaacaatcccttcagggctcagtgacaaaaccagcatttttacatcctttagtgagcttaagattaaggaagaacctgatgatagcagcattccatcattgagtgctgaagctatgactgcctttgctcaactccttttggtttgcaatcaatctgcacctataaccctagctgaagcgttttccacttactgtctttattcgtcatttaacgaagatgttcatggaaatagtacaccaggcagcattgtgaagcttggtgaaggaacattcggtgaggccttcagggctggtagtactgtctgtaaagtggttccctttgatggaacatcactagttaatggagagacccaaaagaaagcagaagaagttcttgaggaagttttgctttgtctaacactaaataatctaagagcagaccggggtgataatgtgaaagaaaattcatgccatggtttcattgagacaaaagatttttgggtttgtcaaggtccatatgacccttcacttatttgtgcttgggaagattgggatgccaaatgttgttctgagaatgatcatccaaatgatttttcgaatgaacaatgctatattgtctttgtgcaagctgatggtgggagagaccttgaaaaatttgctttgcttgactacaatgaggcttgcagtttattggttcaagtcactgctgctttagctgttgctgaaagcgcgtgcgaatttgaacatcgagatttgcattggggtaacattctattggatcgagatgaaacacaagacaagaatcatacaatgggtttcactcttcaagggaaaaacatgtgtactagaacttttggtttgaacgtctcaataattgattttacgctttctcggatcaatacaggtgatgctatcctctttttagacctgtcaacggaccctgccttatttgaaggaccaaaacgagataagcaggcagaaacataccgaaaaatgaaacagattaccaatgattactgggagggcagctttccaaagacaaacgtcgtatggctaatttatcttgtcgatatcgtactgcagaagagatactccacatttacttccaaagacgacagggagctccgagcgttcaagaaacgcctagccaagtatgattccgctaaagattgtctcactgattctttcttcagtgacctattattgtccgacgaggatgcacagccctctacagcctga

SEQ ID NO: 10861 - protein, 645 aa, Oryza sativa subsp. japonica
MAREAAAPGRTAGKASAPSGHHHAGARGGGGDLWSEIMASGGGGGAARIGVVYGRRRAAQEASRPRGAVDVRGVAAGEKRASFEPSKRTSWNRSLSIRGRESILFAPGTKIQPQQNPCRAQKRPPKPGNRVKRTFGGPPDLKKEKAYFEEVDAFELMEESPSPKNFGTWARGMEQNYIVHDLSAILERWKISKLAKFAASRPLFDIMETPVVPSVRSDCSLHDSCRTPEKDRGSRTNPMRRTIPSGLSDKTSIFTSFSELKIKEEPDDSSIPSLSAEAMTAFAQLLLVCNQSAPITLAEAFSTYCLYSSFNEDVHGNSTPGSIVKLGEGTFGEAFRAGSTVCKVVPFDGTSLVNGETQKKAEEVLEEVLLCLTLNNLRADRGDNVKENSCHGFIETKDFWVCQGPYDPSLICAWEDWDAKCCSENDHPNDFSNEQCYIVFVQADGGRDLEKFALLDYNEACSLLVQVTAALAVAESACEFEHRDLHWGNILLDRDETQDKNHTMGFTLQGKNMCTRTFGLNVSIIDFTLSRINTGDAILFLDLSTDPALFEGPKRDKQAETYRKMKQITNDYWEGSFPKTNVVWLIYLVDIVLQKRYSTFTSKDDRELRAFKKRLAKYDSAKDCLTDSFFSDLLLSDEDAQPSTA

SEQ ID NO: 10862 - DNA, 1800 bp, Arabidopsis thaliana
  CDS (1)..(1800)
atggggcagagagttgatctatggtctgaggtcattaaatctgaggaagaagacggagatatacctaagattgaagccgtttttcagagaagaaagaagcctgataaatcctcagaagctgtcaattttggctggttggtgaaaggggctcgtactagttcggtcaatggacccaagagagatagctgggctcgttccctttccaccagagggagagagagtattgcagtgcgcgcttatgtcaacaatcagcctcagaagaaggcagccgggagaaaaaagccccctattccaaagggaaaagttgttaaagctccagacttccagaaagagaaggagtactttcgtgatattgatgcttttgagcttctagaagagagtccttctcccaataaatctagtacatggaccatgggtgaacaagttgttcctgagatgccacatctgtccacaagattagaaaaatggctaatttcgaagaagttaaatcatacttgtggtccttcgagcacactctctaagatacttgaaaactcagccatacaccaggagtcagtatgtgataatgatgcctttgattcattgtctctaaaaaccccagacaagtcttctgctggcaacacttcagttttccggctcatcccgagctgcgatgagaacttggctgccgaagatgtgcctgttagaaaaatcaagatggaatcaatcgaccttgaagatgagctgaagcgactgtctttgacatctgatctaatccccactcatcaagattttgatcagccaattcttgatctattgtccgcctgtggacagatgcgaccatcaaacttcattgaagcattctctaaattctgtgaacctgaaagcattgtcaagattggtgaaggtacatatggggaggcttttcgggctggttctagtgtctgtaaaatagttccaattgatggagacttcagggttaatggggaagtacagaagagagctgacgaactacttgaggaagtgatactctcatggactcttaatcaactaagagaatgtgagactacagctcagaatttgtgcccgacgtacataaaaactcaagatataaaattatgtcaaggtccctatgaccctatactgataaaagcatgggaagaatgggatgcaaaacatgggtctgagaatgatcacccagattttccggagaaacaatgttatgtcatgtttgttctggaacatggtggcaaagaccttgaaagctttgttcttttgaactttgatgaagcaaggagcttactggttcaggccaccgctggcctggctgttgctgaagctgcttttgagttcgagcacagggacctgcactggggaaacattcctctcagtcgtaataactcggatactctgccttttattcttgagggaaaacaagtttgcatcaaaactttcggagtacagatatccataatcgactttactctttcaagaatcaatacaggtgaaaagatactctttctggaccttacttctgatccataccttttcaaaggaccaaaaggagataaacaatcggaaacttaccgaaaaatgaaggcggttactgaagattactgggaaggaagctttgctcgaacaaatgttctctggctaatttatctcgtggatatcttacttaccaagaagtcatttgaacggtcttcaaaacacgaaagagaactacgatcactaaagaagcgaatggagaagtatgaatcagctaaagaggctgtgtcagatcctttcttctcagatatgttgatggaccaaatatcatga

SEQ ID NO: 10863 - protein, 599 aa, Arabidopsis thaliana
MGQRVDLWSEVIKSEEEDGDIPKIEAVFQRRKKPDKSSEAVNFGWLVKGARTSSVNGPKRDSWARSLSTRGRESIAVRAYVNNQPQKKAAGRKKPPIPKGKVVKAPDFQKEKEYFRDIDAFELLEESPSPNKSSTWTMGEQVVPEMPHLSTRLEKWLISKKLNHTCGPSSTLSKILENSAIHQESVCDNDAFDSLSLKTPDKSSAGNTSVFRLIPSCDENLAAEDVPVRKIKMESIDLEDELKRLSLTSDLIPTHQDFDQPILDLLSACGQMRPSNFIEAFSKFCEPESIVKIGEGTYGEAFRAGSSVCKIVPIDGDFRVNGEVQKRADELLEEVILSWTLNQLRECETTAQNLCPTYIKTQDIKLCQGPYDPILIKAWEEWDAKHGSENDHPDFPEKQCYVMFVLEHGGKDLESFVLLNFDEARSLLVQATAGLAVAEAAFEFEHRDLHWGNIPLSRNNSDTLPFILEGKQVCIKTFGVQISIIDFTLSRINTGEKILFLDLTSDPYLFKGPKGDKQSETYRKMKAVTEDYWEGSFARTNVLWLIYLVDILLTKKSFERSSKHERELRSLKKRMEKYESAKEAVSDPFFSDMLMDQIS

SEQ ID NO: 10864 - DNA, 23 bp, Artificial sequence
  primer
atggggcagagagttgatctatg

SEQ ID NO: 10865 - DNA, 22 bp, Artificial sequence
  primer
tcatgatatttggtccatcaac

SEQ ID NO: 10866 - protein, 713 aa, Artificial sequence
  consensus sequence
  Variant (2)..(4): Xaa in position 2 to 4 is any amino acid
  Variant (5)..(22): Xaa in position 5 to 22 is any or no amino acid
  Variant (24)..(24): Xaa in position 24 is any amino acid
  Variant (26)..(26): Xaa in position 26 is any amino acid
  Variant (28)..(39): Xaa in position 28 to 39 is any amino acid
  Variant (40)..(43): Xaa in position 40 to 43 is any or no amino acid
  Variant (45)..(46): Xaa in position 45 to 46 is any amino acid
  Variant (49)..(65): Xaa in position 49 to 65 is any amino acid
  Variant (66)..(95): Xaa in position 66 to 95 is any or no amino acid
  Variant (97)..(105): Xaa in position 97 to 105 is any amino acid
  Variant (106)..(109): Xaa in position 106 to 109 is any or no amino acid
  Variant (112)..(112): Xaa in position 112 is any amino acid
  Variant (115)..(115): Xaa in position 115 is any amino acid
  Variant (120)..(120): Xaa in position 120 is any amino acid
  Variant (124)..(124): Xaa in position 124 is any amino acid
  Variant (125)..(127): Xaa in position 125 to 127 is any or no amino acid
  Variant (130)..(137): Xaa in position 130 to 137 is any amino acid
  Variant (141)..(148): Xaa in position 141 to 148 is any amino acid
  Variant (149)..(149): Xaa in position 149 is any or no amino acid
  Variant (152)..(152): Xaa in position 152 is any amino acid
  Variant (154)..(165): Xaa in position 154 to 165 is any amino acid
  Variant (166)..(169): Xaa in position 166 to 169 is any or no amino acid
  Variant (171)..(172): Xaa in position 171 to 172 is any amino acid
  Variant (175)..(177): Xaa in position 175 to 177 is any amino acid
  Variant (180)..(180): Xaa in position 180 is any amino acid
  Variant (183)..(183): Xaa in position 183 is any amino acid
  Variant (190)..(190): Xaa in position 190 is any amino acid
  Variant (191)..(194): Xaa in position 191 to 194 is any or no amino acid
  Variant (196)..(197): Xaa in position 196 to 197 is any amino acid
  Variant (199)..(206): Xaa in position 199 to 206 is any amino acid
  Variant (207)..(208): Xaa in position 207 to 208 is any or no amino acid
  Variant (210)..(212): Xaa in position 210 to 212 is any amino acid
  Variant (214)..(215): Xaa in position 214 to 215 is any amino acid
  Variant (217)..(217): Xaa in position 217 is any amino acid
  Variant (219)..(222): Xaa in position 219 to 222 is any amino acid
  Variant (223)..(231): Xaa in position 223 to 231 is any or no amino acid
  Variant (233)..(234): Xaa in position 233 to 234 is any amino acid
  Variant (236)..(237): Xaa in position 236 to 237 is any amino acid
  Variant (239)..(239): Xaa in position 239 is any amino acid
  Variant (241)..(249): Xaa in position 241 to 249 is any amino acid
  Variant (250)..(252): Xaa in position 250 to 252 is any or no amino acid
  Variant (254)..(260): Xaa in position 254 to 260 is any amino acid
  Variant (261)..(261): Xaa in position 261 is any or no amino acid
  Variant (264)..(264): Xaa in position 264 is any amino acid
  Variant (266)..(295): Xaa in position 266 to 295 is any amino acid
  Variant (296)..(336): Xaa in position 296 to 336 is any or no amino acid
  Variant (338)..(342): Xaa in position 338 to 342 is any amino acid
  Variant (344)..(357): Xaa in position 344 to 357 is any amino acid
  Variant (358)..(358): Xaa in position 358 is any or no amino acid
  Variant (361)..(362): Xaa in position 361 to 362 is any amino acid
  Variant (364)..(364): Xaa in position 364 is any amino acid
  Variant (366)..(367): Xaa in position 366 to 367 is any amino acid
  Variant (369)..(374): Xaa in position 369 to 374 is any amino acid
  Variant (375)..(379): Xaa in position 375 to 379 is any or no amino acid
  Variant (382)..(382): Xaa in position 382 is any amino acid
  Variant (383)..(383): Xaa in position 383 is any or no amino acid
  Variant (385)..(385): Xaa in position 385 is any amino acid
  Variant (386)..(398): Xaa in position 386 to 398 is any or no amino acid
  Variant (400)..(400): Xaa in position 400 is any amino acid
  Variant (403)..(403): Xaa in position 403 is any amino acid
  Variant (405)..(405): Xaa in position 405 is any amino acid
  Variant (410)..(410): Xaa in position 410 is any amino acid
  Variant (414)..(414): Xaa in position 414 is any amino acid
  Variant (418)..(419): Xaa in position 418 to 419 is any amino acid
  Variant (420)..(420): Xaa in position 420 is any or no amino acid
  Variant (424)..(424): Xaa in position 424 is any amino acid
  Variant (427)..(427): Xaa in position 427 is any amino acid
  Variant (430)..(432): Xaa in position 430 to 432 is any amino acid
  Variant (437)..(437): Xaa in position 437 is any amino acid
  Variant (440)..(442): Xaa in position 440 to 442 is any amino acid
  Variant (444)..(444): Xaa in position 444 is any amino acid
  Variant (448)..(449): Xaa in position 448 to 449 is any amino acid
  Variant (451)..(452): Xaa in position 451 to 452 is any amino acid
  Variant (456)..(456): Xaa in position 456 is any amino acid
  Variant (459)..(465): Xaa in position 459 to 465 is any amino acid
  Variant (466)..(467): Xaa in position 466 to 467 is any or no amino acid
  Variant (469)..(469): Xaa in position 469 is any amino acid
  Variant (471)..(473): Xaa in position 471 to 473 is any amino acid
  Variant (475)..(475): Xaa in position 475 is any amino acid
  Variant (477)..(477): Xaa in position 477 is any amino acid
  Variant (479)..(481): Xaa in position 479 to 481 is any amino acid
  Variant (488)..(489): Xaa in position 488 to 489 is any amino acid
  Variant (492)..(492): Xaa in position 492 is any amino acid
  Variant (496)..(496): Xaa in position 496 is any amino acid
  Variant (499)..(502): Xaa in position 499 to 502 is any amino acid
  Variant (509)..(509): Xaa in position 509 is any amino acid
  Variant (510)..(510): Xaa in position 510 is any or no amino acid
  Variant (512)..(514): Xaa in position 512 to 514 is any amino acid
  Variant (518)..(519): Xaa in position 518 to 519 is any amino acid
  Variant (522)..(524): Xaa in position 522 to 524 is any amino acid
  Variant (527)..(527): Xaa in position 527 is any amino acid
  Variant (531)..(531): Xaa in position 531 is any amino acid
  Variant (533)..(533): Xaa in position 533 is any amino acid
  Variant (535)..(538): Xaa in position 535 to 538 is any amino acid
  Variant (540)..(541): Xaa in position 540 to 541 is any amino acid
  Variant (547)..(547): Xaa in position 547 is any amino acid
  Variant (549)..(550): Xaa in position 549 to 550 is any amino acid
  Variant (556)..(556): Xaa in position 556 is any amino acid
  Variant (558)..(558): Xaa in position 558 is any amino acid
  Variant (573)..(573): Xaa in position 573 is any amino acid
  Variant (575)..(581): Xaa in position 575 to 581 is any amino acid
  Variant (582)..(585): Xaa in position 582 to 585 is any or no amino acid
  Variant (587)..(587): Xaa in position 587 is any amino acid
  Variant (589)..(589): Xaa in position 589 is any amino acid
  Variant (592)..(596): Xaa in position 592 to 596 is any amino acid
  Variant (600)..(602): Xaa in position 600 to 602 is any amino acid
  Variant (616)..(617): Xaa in position 616 to 617 is any amino acid
  Variant (624)..(625): Xaa in position 624 to 625 is any amino acid
  Variant (628)..(628): Xaa in position 628 is any amino acid
  Variant (631)..(631): Xaa in position 631 is any amino acid
  Variant (635)..(635): Xaa in position 635 is any amino acid
  Variant (639)..(639): Xaa in position 639 is any amino acid
  Variant (647)..(648): Xaa in position 647 to 648 is any amino acid
  Variant (650)..(650): Xaa in position 650 is any amino acid
  Variant (652)..(652): Xaa in position 652 is any amino acid
  Variant (658)..(659): Xaa in position 658 to 659 is any amino acid
  Variant (663)..(663): Xaa in position 663 is any amino acid
  Variant (666)..(666): Xaa in position 666 is any amino acid
  Variant (672)..(672): Xaa in position 672 is any amino acid
  Variant (674)..(674): Xaa in position 674 is any amino acid
  Variant (676)..(681): Xaa in position 676 to 681 is any amino acid
  Variant (682)..(682): Xaa in position 682 is any or no amino acid
  Variant (685)..(686): Xaa in position 685 to 686 is any amino acid
  Variant (691)..(692): Xaa in position 691 to 692 is any amino acid
  Variant (696)..(698): Xaa in position 696 to 698 is any amino acid
  Variant (700)..(700): Xaa in position 700 is any amino acid
  Variant (704)..(707): Xaa in position 704 to 707 is any amino acid
  Variant (709)..(709): Xaa in position 709 is any amino acid
  Variant (712)..(712): Xaa in position 712 is any amino acid
GXXXXXXXXXXXXXXXXXXXXXDXWXEXXXXXXXXXXXXXXXXVXXRRXXXXXXXXXXXXXXXXXXXXXXXXXXXXXXXXXXXXXXXXXXXXXXXGXXXXXXXXXXXXXKRXSWXRSLSXRGRXXXXSIXXXXXXXXQPQXXXXXXXXXPPXPXXXXXXXXXXXXXXXXEXXYFXXXDAXELXEESPSPXXXXXWXXGXXXXXXXXXXLXXXLXXWXIXXXXXXXXXXXXXSXXLXXIXEXXXXXXXXXXXXDXXXXXXXXTPXKXXXXXXXXXXXXXXXXXXXXXXXXXXXXXXXXXXXXXXXXXXXXXXXXXXXXXXXXXXXXXXXXXXXXXXXKXXXXXSXXXXXXXXXXXXXXXLLXXCXQXXPXXXXXXXXXXXFSXXCXXXXXXXXXXXXXXPXSIXKXGEGTXGEAXRAGXXXVCKXVPXDGXXXVNGEXQKXXXEXLEEXXLXXTLNXLRXXXXXXXXXNXCXXXIXTXDXXXCQGPYDXXLIXAWEXWDXXXXSENDHPXXFXXXQCYXXFVXXXGGXDLEXFXLXXXXEXXSLLVQXTXXLAVAEXAXEFEHRDLHWGNILLXRXXXXXXXXXXXFXLXGKXXXXXTFGXXXSIIDFTLSRINTGXXILFLDLXXDPXLFXGPKXDKQXETYRKMKXXTXDXWEGSFXXTNVXWLXYLVDIXLXKXXXXXXXSKXXRELRXXKKRXXXYXSAKXXXXDXFFXD

SEQ ID NO: 10867 - protein, 61 aa, Artificial sequence
  protein pattern
  Variant (12)..(12): Xaa in position 12 is Asp or Glu
  Variant (13)..(13): Xaa in position 13 is any amino acid
  Variant (20)..(20): Xaa in position 20 is any or no amino acid
  Variant (22)..(22): Xaa in position 22 is any or no amino acid
  Variant (25)..(25): Xaa in position 25 is any amino acid
  Variant (28)..(28): Xaa in position 28 is Glu or Lys
  Variant (32)..(32): Xaa in position 32 is any amino acid
  Variant (34)..(34): Xaa in position 34 is Lys or Arg
  Variant (36)..(36): Xaa in position 36 is Ala or Ser
  Variant (37)..(37): Xaa in position 37 is Glu or Asn
  Variant (44)..(44): Xaa in position 44 is Ala, Glu or Gln
  Variant (45)..(45): Xaa in position 45 is Ile or Val
  Variant (47)..(47): Xaa in position 47 is Glu or Asn
  Variant (49)..(49): Xaa in position 49 is any amino acid
  Variant (55)..(55): Xaa in position 55 is Ala or Pro
  Variant (56)..(56): Xaa in position 56 is Lys or Arg
  Variant (60)..(60): Xaa in position 60 is Leu or Val
IDFTLSRINTGXXILFLDLXSXDPXLFXGPKXDXQXXTYRKMKXXTXDXWEGSFXXTNVXW

SEQ ID NO: 10868 - protein, 60 aa, Artificial sequence
  protein pattern
  Variant (2)..(3): Xaa in position 2 to 3 is any amino acid
  Variant (4)..(10): Xaa in position 4 to 10 is any or no amino acid
  Variant (13)..(13): Xaa in position 13 is Lys or Arg
  Variant (17)..(17): Xaa in position 17 is any amino acid
  Variant (19)..(19): Xaa in position 19 is Ala or Val
  Variant (21)..(21): Xaa in position 21 is any amino acid
  Variant (22)..(22): Xaa in position 22 is Asp or Asn
  Variant (23)..(23): Xaa in position 23 is Phe or Tyr
  Variant (24)..(24): Xaa in position 24 is Asp or Asn
  Variant (26)..(26): Xaa in position 26 is Ala or Val
  Variant (27)..(27): Xaa in position 27 is any amino acid
  Variant (33)..(33): Xaa in position 33 is Ala or Val
  Variant (35)..(35): Xaa in position 35 is Ala, Ser or Val
  Variant (36)..(36): Xaa in position 36 is Ala or Gly
  Variant (42)..(42): Xaa in position 42 is Ala or Ser
  Variant (44)..(44): Xaa in position 44 is any amino acid
  Variant (57)..(57): Xaa in position 57 is Leu or Pro
  Variant (59)..(59): Xaa in position 59 is Asp or Ser
QXXXXXXXXXGGXDLEXFXLXXXXEXXSLLVQXTXXLAVAEXAXEFEHRDLHWGNIXLXR

SEQ ID NO: 10869 - protein, 39 aa, Artificial sequence
  protein pattern
  Variant (2)..(4): Xaa in position 2 to 4 is any amino acid
  Variant (6)..(6): Xaa in position 6 is Glu or Lys
  Variant (8)..(8): Xaa in position 8 is any amino acid
  Variant (10)..(10): Xaa in position 10 is Phe, Ile or Leu
  Variant (11)..(11): Xaa in position 11 is any amino acid
  Variant (12)..(12): Xaa in position 12 is Leu or Val
  Variant (19)..(19): Xaa in position 19 is Ala or Pro
  Variant (20)..(20): Xaa in position 20 is any amino acid
  Variant (23)..(23): Xaa in position 23 is any amino acid
  Variant (27)..(27): Xaa in position 27 is Asp or Glu
  Variant (28)..(28): Xaa in position 28 is Trp or Tyr
  Variant (30)..(30): Xaa in position 30 is Ala or Glu
  Variant (31)..(32): Xaa in position 31 to 32 is any amino acid
  Variant (33)..(33): Xaa in position 33 is Cys or Gly
CXXXIXTXDXXXCQGPYDXXLIXAWEXXDXXXXSENDHP

SEQ ID NO: 10870 - protein, 23 aa, Artificial sequence
  protein pattern
  Variant (2)..(2): Xaa in position 2 is Glu, Gly or Asn
  Variant (3)..(3): Xaa in position 3 is Asp or Ser
  Variant (5)..(5): Xaa in position 5 is Ile or Val
  Variant (7)..(7): Xaa in position 7 is Ile, Leu or Val
  Variant (12)..(12): Xaa in position 12 is Phe or Tyr
  Variant (16)..(16): Xaa in position 16 is Phe or Tyr
  Variant (18)..(18): Xaa in position 18 is Ala or Val
  Variant (20)..(20): Xaa in position 20 is any amino acid
  Variant (21)..(21): Xaa in position 21 is Ser or Thr
PXXIXKXGEGTXGEAXRXGXXVC

SEQ ID NO: 10871 - protein, 41 aa, Artificial sequence
  protein pattern
  Variant (2)..(2): Xaa in position 2 is any or no amino acid
  Variant (4)..(4): Xaa in position 4 is any or no amino acid
  Variant (6)..(6): Xaa in position 6 is Phe or Ile
  Variant (9)..(9): Xaa in position 9 is Asp or Thr
  Variant (10)..(11): Xaa in position 10 to 11 is any amino acid
  Variant (16)..(16): Xaa in position 16 is Ser, Thr or Val
  Variant (19)..(20): Xaa in position 19 to 20 is any amino acid
  Variant (21)..(21): Xaa in position 21 is any or no amino acid
  Variant (23)..(23): Xaa in position 23 is any amino acid
  Variant (27)..(27): Xaa in position 27 is Ala or Val
  Variant (28)..(28): Xaa in position 28 is Ile or Leu
  Variant (30)..(30): Xaa in position 30 is Cys or Ser
  Variant (31)..(31): Xaa in position 31 is any amino acid
  Variant (35)..(35): Xaa in position 35 is any amino acid
  Variant (38)..(38): Xaa in position 38 is Ala, Glu or Gly
  Variant (39)..(39): Xaa in position 39 is Cys or Asp
  Variant (40)..(40): Xaa in position 40 is any amino acid
  Variant (41)..(41): Xaa in position 41 is Gly or Thr
KXVXPXDGXXXVNGEXQKXXXEXLEEXXLXXTLNXLRXXXX

SEQ ID NO: 10872 - protein, 23 aa, Artificial sequence
  protein pattern
  Variant (2)..(3): Xaa in position 2 to 3 is any amino acid
  Variant (6)..(6): Xaa in position 6 is Glu, Gln or Arg
  Variant (7)..(7): Xaa in position 7 is Asp or Glu
  Variant (8)..(8): Xaa in position 8 is Ile or Val
  Variant (11)..(11): Xaa in position 11 is Phe or Tyr
  Variant (14)..(14): Xaa in position 14 is any amino acid
  Variant (21)..(21): Xaa in position 21 is any or no amino acid
  Variant (23)..(23): Xaa in position 23 is Asn, Arg or Ser
EXXYFXXXDAXELXEESPSPXKX

SEQ ID NO: 10873 - protein, 25 aa, Artificial sequence
  protein pattern
  Variant (3)..(3): Xaa in position 3 is Ala or Asn
  Variant (8)..(8): Xaa in position 8 is any amino acid
  Variant (12)..(12): Xaa in position 12 is Glu or Thr
  Variant (15)..(16): Xaa in position 15 to 16 is any amino acid
  Variant (17)..(17): Xaa in position 17 is any or no amino acid
  Variant (19)..(23): Xaa in position 19 to 23 is any amino acid
  Variant (24)..(24): Xaa in position 24 is any or no amino acid
SWXRSLSXRGRXSIXXXAXXXXXXQ

SEQ ID NO: 10874 - protein, 27 aa, Artificial sequence
  protein pattern
  Variant (3)..(3): Xaa in position 3 is Ala or Ser
  Variant (4)..(4): Xaa in position 4 is Phe or Leu
  Variant (8)..(8): Xaa in position 8 is Leu or Met
  Variant (9)..(9): Xaa in position 9 is Ala, Asp or Glu
  Variant (10)..(10): Xaa in position 10 is any amino acid
  Variant (12)..(12): Xaa in position 12 is Asp, Glu, Gly or Asn
  Variant (16)..(16): Xaa in position 16 is Asp or Glu
  Variant (17)..(17): Xaa in position 17 is Ala or Cys
  Variant (18)..(19): Xaa in position 18 to 19 is any amino acid
  Variant (21)..(21): Xaa in position 21 is Pro, Ser or Thr
  Variant (24)..(24): Xaa in position 24 is Ser or Thr
  Variant (26)..(26): Xaa in position 26 is Leu or Met
  Variant (27)..(27): Xaa in position 27 is Phe or Leu
LRXXKKRXXXYXSAKXXXXDXFFXDXX

SEQ ID NO: 10875 - protein, 21 aa, Artificial sequence
  protein pattern
  Variant (2)..(2): Xaa in position 2 is any amino acid
  Variant (4)..(4): Xaa in position 4 is Glu or Gln
  Variant (7)..(9): Xaa in position 7 to 9 is any amino acid
  Variant (10)..(11): Xaa in position 10 to 11 is any or no amino acid
  Variant (13)..(14): Xaa in position 13 to 14 is any or no amino acid
  Variant (17)..(17): Xaa in position 17 is Leu or Val
  Variant (18)..(18): Xaa in position 18 is Asn, Gln or Ser
  Variant (19)..(19): Xaa in position 19 is Ile or Val
FXLXGKXXXXXTXXFGXXXSI

SEQ ID NO: 10876 - protein, 21 aa, Artificial sequence
  protein pattern
  Variant (2)..(2): Xaa in position 2 is any or no amino acid
  Variant (4)..(4): Xaa in position 4 is any amino acid
  Variant (5)..(5): Xaa in position 5 is any or no amino acid
  Variant (7)..(7): Xaa in position 7 is any amino acid
  Variant (9)..(10): Xaa in position 9 to 10 is any amino acid
  Variant (12)..(12): Xaa in position 12 is any amino acid
  Variant (13)..(13): Xaa in position 13 is Asn or Thr
  Variant (14)..(14): Xaa in position 14 is Phe or Leu
  Variant (15)..(15): Xaa in position 15 is Ala, Ile or Leu
  Variant (16)..(16): Xaa in position 16 is Asp or Glu
  Variant (17)..(17): Xaa in position 17 is Ala or Val
  Variant (20)..(20): Xaa in position 20 is any amino acid
  Variant (21)..(21): Xaa in position 21 is Phe or Tyr
LXLXXCXQXXPXXXXXXFSXX

SEQ ID NO: 10877 - protein, 15 aa, Artificial sequence
  protein pattern
  Variant (2)..(2): Xaa in position 2 is any amino acid
  Variant (8)..(8): Xaa in position 8 is any or no amino acid
  Variant (10)..(10): Xaa in position 10 is any amino acid
  Variant (11)..(11): Xaa in position 11 is any or no amino acid
  Variant (13)..(13): Xaa in position 13 is any amino acid
  Variant (14)..(14): Xaa in position 14 is any or no amino acid
LXYLVDIXLXXKXXS

SEQ ID NO: 10878 - protein, 19 aa, Artificial sequence
  protein pattern
  Variant (2)..(2): Xaa in position 2 is any or no amino acid
  Variant (4)..(4): Xaa in position 4 is Pro or Ser
  Variant (5)..(5): Xaa in position 5 is Ala, Ser or Thr
  Variant (6)..(6): Xaa in position 6 is any amino acid
  Variant (8)..(8): Xaa in position 8 is Glu or Asn
  Variant (9)..(9): Xaa in position 9 is any amino acid
  Variant (11)..(13): Xaa in position 11 to 13 is any or no amino acid
  Variant (15)..(18): Xaa in position 15 to 18 is any amino acid
  Variant (19)..(19): Xaa in position 19 is Ala, Asn, Ser or Thr
HXLXXXLXXWXXXKXXXXX

SEQ ID NO: 10879 - protein, 13 aa, Artificial sequence
  protein pattern
  Variant (2)..(2): Xaa in position 2 is any amino acid
  Variant (4)..(4): Xaa in position 4 is Ala or Ser
  Variant (6)..(6): Xaa in position 6 is any or no amino acid
  Variant (8)..(8): Xaa in position 8 is any amino acid
  Variant (9)..(9): Xaa in position 9 is Ala or Ser
  Variant (10)..(10): Xaa in position 10 is Glu, Ser or Thr
  Variant (11)..(11): Xaa in position 11 is Glu or Gly
  Variant (12)..(12): Xaa in position 12 is any amino acid
  Variant (13)..(13): Xaa in position 13 is Ala, Asp, Gly or Asn
DXWXEXIXXXXXX

SEQ ID NO: 10880 - DNA, 642 bp, Arabidopsis thaliana
  CDS (1)..(642)
atgcaattttcaagaaactcaatccttaggcaactaagccgaaaagaaggttggagatcggcttctaaaaggtggacttccggagatagctcaacagccttcaacgacgacacaagtggtggtggttactcatcaatggagggtctttatggagtttactccggtggagacacggcggcgagaagtaagagagtgatggttgtagttgatgaaagttcgaggtctaagcatgctatgatgtgggctttgactcatttgactaacaaaggagatttagtgactcttcttcatgttgtgtctcctgatgatgaagctactccttctttggctcaatctcttggttctctttgcaaagcttgtaaacccgaggtggatgtggaggcattggtgattcaaggaccaaagctagcaacagtgttaagccaagtaaagaaacttgaagtctctgttcttgtgttgggtcagaagaaatctgcaccactcatctcttgcttatgtggacctagcagatcagaggagctcgtgaatcgttgcatcaacggtgcagattgtttaacgattggtgtgagaaaacaatgcaaaggtgttggtgggtacttgatcaatacacgatggcagaagaatttctggctcttggcctaa

SEQ ID NO: 10881 - protein, 213 aa, Arabidopsis thaliana
MQFSRNSILRQLSRKEGWRSASKRWTSGDSSTAFNDDTSGGGYSSMEGLYGVYSGGDTAARSKRVMVVVDESSRSKHAMMWALTHLTNKGDLVTLLHVVSPDDEATPSLAQSLGSLCKACKPEVDVEALVIQGPKLATVLSQVKKLEVSVLVLGQKKSAPLISCLCGPSRSEELVNRCINGADCLTIGVRKQCKGVGGYLINTRWQKNFWLLA

SEQ ID NO: 10882 - DNA, 980 bp, Glycine max
  CDS (129)..(782)
tacactccctctcttgttccatcacttctccgagagagtaaaacagttaactttatagtttttggatatatcagccaaaaggggtgtgaaagaacacaatgcaacaaagttcagcttcagggtcattgatgaagcaactgagtgtgaaggaggcttggaaatcaacatcaagtaggtggagtgggaaggacaagtatagcagtgttgggggagggagcattgaggggtgtgaggcaagtttgagccaaatggaaggtttttctatgtatgggaatgaggacaataatggggtggtgatggggaagaagagagtgatggtggtggtggatcacacttctcattccaagcatgcaatgatgtgggcactcactcatgtagctaataagggtgatttgctcactttgcttcatgttgtacctactcataggggttctgaatcttcttgctctacctatcttgtcaatcatcttggttcactttgcaaagattgcaagccagaggtggaagtggaagcacttgttatccaaggaccaaaactggccacagtgatgagccaagtgaagaagctggaggtttctctcttggtattgggccaaaagaagccctctcctctacttagctgcctgtgtggaagcaacagtatcagcagctcagaggagtttgctgagcactgcatcaacaatgcagaatgcttgacagtaggagtaaggaagagaagccaaggtaacaatggctacctcatcagcacaaggtggcagaagaacttctggctactggcttaaaaatttcgagttcttaactttagttaccagctatagttaggatctcacaaacaaaaaaaggggtcaaatgggaaaattaacacaataataatatgtacctcctgttctagttctaactacattgtcattgtactcatgatgtgactcggtggcatcaatttagttctatactatgattaatgaaacatgattgtgacc

SEQ ID NO: 10883 - protein, 217 aa, Glycine max
MKQLSVKEAWKSTSSRWSGKDKYSSVGGGSIEGCEASLSQMEGFSMYGNEDNNGVVMGKKRVMVVVDHTSHSKHAMMWALTHVANKGDLLTLLHVVPTHRGSESSCSTYLVNHLGSLCKDCKPEVEVEALVIQGPKLATVMSQVKKLEVSLLVLGQKKPSPLLSCLCGSNSISSSEEFAEHCINNAECLTVGVRKRSQGNNGYLISTRWQKNFWLLA

SEQ ID NO: 10884 - DNA, 813 bp, Zea mays
  CDS (1)..(813)
atggggagcagcgggggcagctgcgagcacttcctggggcagctgagctcgagcgacggcggcagcgcgccgcaccagctgctgcagcgggagtgggactgcggcaccggcaccggcagcaggcgtgggtcgcggcgctggtccaggaagaagggcagggcgcggggacaccgccgcggcggcgggttctgcaggactgaggaggccgcggcggcgtcgcggaagcgggtggtggtggtggtggaccagagctccggcgccaagcacgccatgatgtgggcgctcacccacgtcgccaacaggggcgacttcctcaccctgctccacgtcctgccgccgcacagcgggagcggcggcggcggccgcggtgctggggaggaggacgcctccgcgctcgccaactccctcggcgcgctttgcaaggcctgcaagcctgaggtggaggtggaggcgctcgtgatccaggggcccaagctgtcgaccatcctcagccaggtgaagaagctggaggcgtccgtgctggtgctcagccaacgcaaaccctcgcctttctgctgcaaagagctgtttggcaagctgtcaactttaagaagaacaggggctttaccagaggacagtgtaggtgcagcccagccatgcagggggatcaaaagcttcctgcggagcaggagcagcagcgaggaggaggagctggtggaggagtgcataaaccgggcggagtgcctgacgctggcggtgcggcggcggagcaagggcgtgggcggctacctcgtgagcacccggtggcagaagaacttctggctgctcgcctga

SEQ ID NO: 10885 - protein, 270 aa, Zea mays
MGSSGGSCEHFLGQLSSSDGGSAPHQLLQREWDCGTGTGSRRGSRRWSRKKGRARGHRRGGGFCRTEEAAAASRKRVVVVVDQSSGAKHAMMWALTHVANRGDFLTLLHVLPPHSGSGGGGRGAGEEDASALANSLGALCKACKPEVEVEALVIQGPKLSTILSQVKKLEASVLVLSQRKPSPFCCKELFGKLSTLRRTGALPEDSVGAAQPCRGIKSFLRSRSSSEEEELVEECINRAECLTLAVRRRSKGVGGYLVSTRWQKNFWLLA

SEQ ID NO: 10886 - DNA, 690 bp, Zea mays
  CDS (1)..(690)
atggggagcagcgggggcagcagcgagcacttcctgcggcagctgagttcgagcgacggcggcagcgcgccgcaccatctgctgcagcgagagtgggagtgcggcggcgtcaccggcagcggcagcaggcgcgggtcgcggaagaagaccagggcgcggggacaccgccgccgcggcggcgggttctgcagggcggaggaggctgcgccggggcggaagcgggtaatggtggtggtggaccagagctccggcgccaagcacgccatgttgtgggcgctcacccacgtggccaacaagggcgacttcctcaccctgctccacgtcctgccgccggagagcggccacagcagccgcggtgctgcggaggacgcctccgcgctcgccaactccctcggcgcgctttgcaaggcctgcaagcctgaggtcgaggtggaggcgcttgtgatccaggggcccaagctgccgaccatcctcagccaggtgaagaagctggaggcgtccgtgctggtgctgagccaacgcagcccctcgcctttctgctgcttcccgcggagcagcagcgaggagcttgtggaggagtgcatcgaccgggcggagtgcctgacgctggcggtgcggcggcagagcaagggcgtcggcggctacctcgtcagcacccggtggcagaagaacttctggctcctcgcgtga

SEQ ID NO: 10887 - protein, 229 aa, Zea mays
MGSSGGSSEHFLRQLSSSDGGSAPHHLLQREWECGGVTGSGSRRGSRKKTRARGHRRRGGGFCRAEEAAPGRKRVMVVVDQSSGAKHAMLWALTHVANKGDFLTLLHVLPPESGHSSRGAAEDASALANSLGALCKACKPEVEVEALVIQGPKLPTILSQVKKLEASVLVLSQRSPSPFCCFPRSSSEELVEECIDRAECLTLAVRRQSKGVGGYLVSTRWQKNFWLLA

SEQ ID NO: 10888 - DNA, 717 bp, Zea mays
  CDS (1)..(717)
atggcgagcagcgcggaggagcgcttcctgaggcagctgagcgcgagcaacggcggcgacgaaggggtctgcggcggccagcagctgggccacaaggagtactgcgcggagaggaggggctcccggcggtggtccaggaagcgggccgccgccgcgaggggctactgcggcgggtacgacgactacgacgtgaagcagcaggcggaggccgcctctgccgccgcgaggaagcgggtgatagtggtggtggacgacacctcgggctccaagcacgccatgatgtgggcgctcacccacgtcgccagcaagggggacttcctgacgctgctccacgtcctgctgccgcactccgcctccggcggcggctgtagcaggggcgaggaggcctcctccctcgccaactcgctcggcacgctctgcaaggcgtccaggccagaggtggaggttgaagccctggtgatccaaggccccaagctgggcaccgtgctcagccaggtgaagaagctggaggcctccgtgctggtgctcggccagggcaggccgtctccctgctaccgctggctaagctgtttcttgcggagcagcagcgaggagttcgtggagcagtgcatcgaccaggcggagtgcctgacgctggcggtgaggaagcagagcaaggccgtcggcgggtacctcgtcagcacccggtggcagaagaacttctggctcctggcctga

SEQ ID NO: 10889 - protein, 238 aa, Zea mays
MASSAEERFLRQLSASNGGDEGVCGGQQLGHKEYCAERRGSRRWSRKRAAAARGYCGGYDDYDVKQQAEAASAAARKRVIVVVDDTSGSKHAMMWALTHVASKGDFLTLLHVLLPHSASGGGCSRGEEASSLANSLGTLCKASRPEVEVEALVIQGPKLGTVLSQVKKLEASVLVLGQGRPSPCYRWLSCFLRSSSEEFVEQCIDQAECLTLAVRKQSKAVGGYLVSTRWQKNFWLLA

SEQ ID NO: 10890 - DNA, 711 bp, Zea mays
  CDS (1)..(711)
atgtccaggccgctctcttccttctgcctccaccggatcaggtccggcggcaccgcgtccaccgccgcgcctccatcgatatgcgccaacaaggacgacggcggcggcggcggcggcggagagagcaggtccctaaaggatggcaagcaaaaggacgagtgggaggaggctaacgagaagggcagcgcagaggccgtcgtcgtggggaggaaggtgatggtggcggcggcggacggcggcggcgaggaggcccgcacggcgctgcagtgggcgctgtcgcacgccgtccggccctgcgacacggtggtcctgctcgacgtcgccagcggcaagaaccgacgcgatccgagagggagtccgcacctggaggccttgaggagcatctgccaggccaagagaccagaggtgtgcgtggaactttcgctggcggagggcggcaaggaccgggggccggcgatagtggaggcggcgaggaagcagggcgtttcgctcctcgtcgtggggcagaagaagcggtccgtcacgtggcggctgctgtccatgtggatcgccggcgtcaagggcgggggcgggggcggctacaccagcgccgccgactactgcgtgcagcacgcggcgtgcatggcgctggccgtccggcgcaagagccggcgagggggcggctacctcatcaccaccaggcggcagagggatttctggctcctggcttga

SEQ ID NO: 10891 - protein, 236 aa, Zea mays
MSRPLSSFCLHRIRSGGTASTAAPPSICANKDDGGGGGGGESRSLKDGKQKDEWEEANEKGSAEAVVVGRKVMVAAADGGGEEARTALQWALSHAVRPCDTVVLLDVASGKNRRDPRGSPHLEALRSICQAKRPEVCVELSLAEGGKDRGPAIVEAARKQGVSLLVVGQKKRSVTWRLLSMWIAGVKGGGGGGYTSAADYCVQHAACMALAVRRKSRRGGGYLITTRRQRDFWLLA

SEQ ID NO: 10892 - DNA, 726 bp, Oryza sativa
  CDS (1)..(726)
atggcgagcggtggcggggagcacttcttgcggcagctgagcgcgagcaacgggggatacggtggtgcggcgcagtatcagatggggcgaggggtggtggcggaggaggaggtggagctcggcggaggaggcaggaggaggggctcgaagcggtggtcgaagaagagggcggggaggggcgggtacggcggcggcggcggggggaagggggacgcggccgcggccgcggcggcggcggcggcggtggccgggaggaagcgggtgatggtggtggtggacgacacctccggggccaagcacgccatgatgtgggcgctcacccacgtcgccaacaagggggacttcctcacgctgctccacgtcctcccgtacgccggcgccggcagaggcgaggagaccccctccctcgccaactccctcggcacgctctgcaaggcctgcaggccagaggtggaggttgaagcacttgtgatccaaggaccaaagctggccactgtcctcagccaagtgaagaaattggaggcgtctgtgcttgtgctcagccaatccaagccatcccatttctgttggttgagttgcatcctgcggagcagcagcgaggagttcgtcgagcaatgcatcaaccaggctgagtgcctgacgttggcagtgaggaagcagagcaagggcgtcggcgggtacctcatcagcacacggtggcagaagaacttctggctcctggcttga

SEQ ID NO: 10893 - protein, 241 aa, Oryza sativa
MASGGGEHFLRQLSASNGGYGGAAQYQMGRGVVAEEEVELGGGGRRRGSKRWSKKRAGRGGYGGGGGGKGDAAAAAAAAAAVAGRKRVMVVVDDTSGAKHAMMWALTHVANKGDFLTLLHVLPYAGAGRGEETPSLANSLGTLCKACRPEVEVEALVIQGPKLATVLSQVKKLEASVLVLSQSKPSHFCWLSCILRSSSEEFVEQCINQAECLTLAVRKQSKGVGGYLISTRWQKNFWLLA

SEQ ID NO: 10894 - DNA, 678 bp, Oryza sativa
  CDS (1)..(678)
atggggagcagcggtggcagcagcgagcacttcctgcgccagttcagcgcgagcgacggcgcaccgctgccgcgtgagctgggcgaggagtgggcggcggccgagtgcggcaggagggggtcgaggcggtggtccaggaagaaggcgagggggcaccaccgccgcggcgggggcggaggcggcggcggcgggctctgcaggagcagggaggaggcccccgcggggaggaagcgggtgatggtggtggtggaccagagctccggtgccaagcacgccatgatgtgggcgctcacccacgtcgccagcaagggggacttcctcaccctgctccacgtcctcccccacggcggcggcgacgcctccgcgctcgccaactccctcggctcactctgcaaggcctgcaagcccgaggtggaggttgaggcgcttgtgatccaagggcccaagctgggcaccgtcctcagccaggtgaagaagctggatgcatctgtgctggtgctgagccaatgcaagccatctcctttctgctgcttcatgaggagcagcggcgaggagttcgtggaggagtgcatcaacagggcggactgcctgacgctggcggtgaggcggcagagcaagggcgtcggcggctacctcatcagcacccggtggcagaagaacttctggctgctggcttga

SEQ ID NO: 10895 - protein, 225 aa, Oryza sativa
MGSSGGSSEHFLRQFSASDGAPLPRELGEEWAAAECGRRGSRRWSRKKARGHHRRGGGGGGGGGLCRSREEAPAGRKRVMVVVDQSSGAKHAMMWALTHVASKGDFLTLLHVLPHGGGDASALANSLGSLCKACKPEVEVEALVIQGPKLGTVLSQVKKLDASVLVLSQCKPSPFCCFMRSSGEEFVEECINRADCLTLAVRRQSKGVGGYLISTRWQKNFWLLA

SEQ ID NO: 10896 - DNA, 678 bp, Oryza sativa
  CDS (1)..(678)
atggcagcaagatcgtcgctgccatccttctgcctccaccagatcaggtcagacagccgccgcggcgcgccgccgtcgatacgcgcctcctccaccggcgctgccaatgatggtggccgcaacgacgacgtcgacggcaaggaggaggaggagaagagcgaggtggggaggaaggtgatggtggtggccgacggcggcagcgacgaggcgcggacggcgctgcagtgggcgctctcgcactccgtccgcccctgcgacaccgtcgtcctcctcgacgtcgtcaagagcggcggcgacggcggcggcaagaacggggatgatccaagcagagggtgccaacatctggagacaatgaggagtatttgccaggctaaaagaccagaggtacgcgtcgagctttccttggtggaagggaaggagagggggccggcgattgtggaggcggcgaggaagcaaggcgtgtcgctcctcgtcatgggccagaagaagaggtcgatcacatggcggctgctggtgatgtggatgaccggcggtaaaggcggcggcggaaggggcaccgccgagtactgcgtgcagaacgcggcgtgcatggcgctcgccgtccggcggaagagccggcgagggggagggtatctcatcaccacgaggcgccagagagatttctggctcctggcttga

SEQ ID NO: 10897 - protein, 225 aa, Oryza sativa
MAARSSLPSFCLHQIRSDSRRGAPPSIRASSTGAANDGGRNDDVDGKEEEEKSEVGRKVMVVADGGSDEARTALQWALSHSVRPCDTVVLLDVVKSGGDGGGKNGDDPSRGCQHLETMRSICQAKRPEVRVELSLVEGKERGPAIVEAARKQGVSLLVMGQKKRSITWRLLVMWMTGGKGGGGRGTAEYCVQNAACMALAVRRKSRRGGGYLITTRRQRDFWLLA

SEQ ID NO: 10898 - DNA, 687 bp, Glycine max
  CDS (1)..(687)
atgggaaggccacgcattcggttgtgttttggtcgcgccacgcctcgtgttcgagccttttctgcatcttcttttcgatccaagtccccttcctcctcctctgcctcaatcaaatgtgaaaacaggactgagttttcaagcaacggaggccacgaagctggcagagacaacaggggtgaaacgggaaataagatactggtggttgttgattctagctttgaagctaaaggggctcttgaatgggcactctctcacactgttcagacccaggacactgttgttcttgttcatgtagccagacccacaagggaaggaactgaatctggttcgaagtttaatgtgaagacttatcaacttctccttgacatgaaaagcatgtgcgagatgaagaaacccggggtggtagtgaatgtggtgatgcttgaaggagaggaaaagggtgttgcaatagtgcaagaggcaaagaaacagagggtgtcattattggtagtgggacaaagaaaacaatccatcttggggtgcatcatgcggaggtgggtacgaagaaggggaacaagacctgggattgttgagtattgtatacagaactctccttgcatgaccattgcggtgaggaggaagaataagaaacatggaggctacttgattaccaccaaacgccataaaaacttttggcttttggcttaa

SEQ ID NO: 10899 - protein, 228 aa, Glycine max
MGRPRIRLCFGRATPRVRAFSASSFRSKSPSSSSASIKCENRTEFSSNGGHEAGRDNRGETGNKILVVVDSSFEAKGALEWALSHTVQTQDTVVLVHVARPTREGTESGSKFNVKTYQLLLDMKSMCEMKKPGVVVNVVMLEGEEKGVAIVQEAKKQRVSLLVVGQRKQSILGCIMRRWVRRRGTRPGIVEYCIQNSPCMTIAVRRKNKKHGGYLITTKRHKNFWLLA

SEQ ID NO: 10900 - DNA, 684 bp, Glycine max
  CDS (1)..(684)
atgcaacaaagttcagcttcagggtcattgatgaagcaactgagtgtgaaggaggcttggaaatcaacatcaagtaggtggagtgggaaggacaagtatagcagtgttgggggagggagcattgaggggtgtgaggcaagtttgagccaaatggaaggtttttctatgtatgggaatgaggacaataatggggtggtgatggggaagaagagagtgatggtggtggtggatcacacttctcattccaagcatgcaatgatgtgggcactcactcatgtagctaataagggtgatttgctcactttgcttcatgttgtacctactcataggggttctgaatcttcttgctctacctatcttgtcaatcatcttggttcactttgcaaagattgcaagccagaggtggaagtggaagcacttgttatccaaggaccaaaactggccacagtgatgagccaagtgaagaagctggaggtttctctcttggtattgggccaaaagaagccctctcctctacttagctgcctgtgtggaagcaacagtatcagcagctcagaggagtttgctgagcactgcatcaacaatgcagaatgcttgacagtaggagtaaggaagagaagccaaggtaacaatggctacctcatcagcacaaggtggcagaagaacttctggctactggcttaa

SEQ ID NO: 10901 - protein, 227 aa, Glycine max
MQQSSASGSLMKQLSVKEAWKSTSSRWSGKDKYSSVGGGSIEGCEASLSQMEGFSMYGNEDNNGVVMGKKRVMVVVDHTSHSKHAMMWALTHVANKGDLLTLLHVVPTHRGSESSCSTYLVNHLGSLCKDCKPEVEVEALVIQGPKLATVMSQVKKLEVSLLVLGQKKPSPLLSCLCGSNSISSSEEFAEHCINNAECLTVGVRKRSQGNNGYLISTRWQKNFWLLA

SEQ ID NO: 10902 - DNA, 648 bp, Glycine max
  CDS (1)..(648)
atgctcagttcttcttcggcttcgtttttgaggcagttaagtgcaaaaaaggagggttggaaagagagatactataatagtggtagtggtggctggggaatgagctttggagggtgtgaggcaagtgtgaaactaatggaagggtttaacatgcaggggaatgtggggaggaagagggtgatggtggtggttgatgacacctcacattccaagcatgcaatgttgtgggcactcactcatgttgccaacaagggtgattccttgactcttcttcacgttgtgcctcctcacaggggtcctgaatcttcttgctccacttatcttgtcaattatcttgggtcactttgcaaagattgcaagcctggggtggaagtggaagcgctcttaatccaaggaccaaaactggccactgtaatgagccaagtaaagaagctggaggtctctgtcctggtactgggccaaaagaagccatcttctcttttaagctgtctttgtggaagcagcggaagcagtagtacagaggagtttgtggagcattgcatcaataaagcagagtgcttgacaattggagtgaggaagagaagccagggcacgaatggataccttgtcagcactagatggcagaagaacttctggcttttggcttag

SEQ ID NO: 10903 - protein, 215 aa, Glycine max
MLSSSSASFLRQLSAKKEGWKERYYNSGSGGWGMSFGGCEASVKLMEGFNMQGNVGRKRVMVVVDDTSHSKHAMLWALTHVANKGDSLTLLHVVPPHRGPESSCSTYLVNYLGSLCKDCKPGVEVEALLIQGPKLATVMSQVKKLEVSVLVLGQKKPSSLLSCLCGSSGSSSTEEFVEHCINKAECLTIGVRKRSQGTNGYLVSTRWQKNFWLLA

SEQ ID NO: 10904 - DNA, 684 bp, Glycine max
  CDS (1)..(684)
atgcaacaaagttcagcttcagggtcattgatgaagcaattgagtgtgaaggaggcttggaaatcaacatcaagtaggtggagtgggaaggacaagtatagtagtgttggaggagggagcattgaagggtatgaagcaagtttgagccaactggaaggttttgctatgtatgggaatgaggacaataatggagtgatgatggggaagaagagagtgatggtggtggtggatcacacttctcattctgagcatgcaatgatgtgggcactcactcatgtagctaataagggtgatttgctcactttgcttcatgttgttccgactcataggggttctgaatcttctagctctacctatcttgtcaatcatcttggttcactttgcaaagattgcaagccagaggtggaagtggaagcacttgtaatccaaggaccaaaactggccacagtgatgaaccaagtgaagaagctggaggtttctgtcttggtattgggccaaaagaagccctcttctcttcttagctgtctgtgtggaagaaacagtatcagcagctcggaggagtttgctgagcactgcatcaacaatgcagaatgcttgacagtaggagtaaggaagagaagccaaggcaacaatggctacctcatcagcacaaggtggcagaagaacttctggttactggcttaa

SEQ ID NO: 10905 - protein, 227 aa, Glycine max
MQQSSASGSLMKQLSVKEAWKSTSSRWSGKDKYSSVGGGSIEGYEASLSQLEGFAMYGNEDNNGVMMGKKRVMVVVDHTSHSEHAMMWALTHVANKGDLLTLLHVVPTHRGSESSSSTYLVNHLGSLCKDCKPEVEVEALVIQGPKLATVMNQVKKLEVSVLVLGQKKPSSLLSCLCGRNSISSSEEFAEHCINNAECLTVGVRKRSQGNNGYLISTRWQKNFWLLA

SEQ ID NO: 10906 - DNA, 1189 bp, Oryza sativa
  CDS (1)..(726)
atggcgagcggtggcggggagcacttcttgcggcagctgagcgcgagcaacgggggatacggtggtgcggcgcagtatcagatggggcgaggggtggtggcggaggaggaggtggagctcggcggaggaggcaggaggaggggctcgaagcggtggtcgaagaagagggcggggaggggcgggtacggcggcggcggcggggggaagggggacgcggccgcggccgcggcggcggcggcggcggtggccgggaggaagcgggtgatggtggtggtggacgacacctccgggggcaggcacgccatgatgtgggcgctcacccacgtcgccaacaagggggacttcctcacgctgctccacgtcctcccgtacgccggcgccggcagaggcgaggagaccccctccctcgccaactccctcggcacgctctgcaaggcctgcaggccagaggtggaggttgaagcacttgtgatccaaggaccaaagctggccactgtcctcagccaagtgaagaaattggaggcgtctgtgcttgtgctcagccaatccaagccatcccatttctgttggttgagttgcatcctgcggagcagcatcgaggagttcgtcgagcaatgcatcaaccaggctgagtgcctgacgttggcagtgaggaagcagagcaagggcgtcggcgggtacctcatcagcacacggtggcagaagaacttctggctcctggcttgacaaagcctaggactattcaattttctgccaaggctttcaagtctctacataatcatatttttacccccgtatatctgccattctgttttaactgagtgcgccataaaagcctccccgctgccatgttgcgtcaccgtgcaagtgttaccatccgttgtaaagcccaaaggagccctagatctgaccaaaccctacttcccatctacttttcaagttcatgtttgtgtaatcttgtgctgtactattgtgtaatgttgcataaatggccgttttctgttaacctcccactttgctgttgtaaagaagcccgaggggcggcccccgccccccctcgccccctgggctgtcctctgcctgtccgctggccggcgtgtgccggcgccgtgtcgggcataaccctggcggcaccctactgtttcgccttgcaccacatccccctctcgccacccgccggcataacgaa

SEQ ID NO: 10907 - protein, 241 aa, Oryza sativa
MASGGGEHFLRQLSASNGGYGGAAQYQMGRGVVAEEEVELGGGGRRRGSKRWSKKRAGRGGYGGGGGGKGDAAAAAAAAAAVAGRKRVMVVVDDTSGGRHAMMWALTHVANKGDFLTLLHVLPYAGAGRGEETPSLANSLGTLCKACRPEVEVEALVIQGPKLATVLSQVKKLEASVLVLSQSKPSHFCWLSCILRSSIEEFVEQCINQAECLTLAVRKQSKGVGGYLISTRWQKNFWLLA

SEQ ID NO: 10908 - DNA, 1076 bp, Zea mays subsp. mays
  CDS (96)..(791)
accttgctttgctcgcactcgcacacagttgcgagcgcattgcttgcattggcgcagccgcaggccgcagcacgaagctagccagtaggcggtagatggcgagcagcgcggggaaccgcttcctgaggcagctgagcgcgagcaacggcgacgaagcggtctgcggcggcctgcagatggaccagcaggagtacggcggcgccggcgtggggaggaggggatcccggcggtggtcgaagaagcgggccgccgccgccgccgccgcgaggggctacggcgccggcagcgggaatggcgtgaagcagccggcctctgccgcggggaagcgggtgatggtggtggtggacgagagctcgggagccaaccacgccatgatgtgggcgctcacccacgtcgccgacaagggggacttcctcacgctgctccacgtcctgccgcgctccggcagcggcaggggcgaggaggcctcctccctcgccaactcgctcggcacgctctgcaaggcctccaggccagaggtggaggtcgaagcgcttgtgatccaagggcccaagctgggcaccgtgctcagccaggtgaagaagctggaggcctccgtgctggtgctcagccagtgcaggccatctccctgctggttaagctgcttcctgcggagcagcggcgaggagtttgtggagcagtgcatcaaccaggcggagtgcctgacgctggcggtgaggaagcagagcaagggcgtctgtgggtacctcatcagcacccggtggcagaagaacttctggctcctggcctgacaaccatgcattttacctagctagttactactgctacatgatcacatttgttttaagtcactcccgtatatgtgctgtcatttcgtgtcatcaagtgcgtcacaagaaagaccatctctctctctccttcatcctgttgtaaagcgaaaagagcctccgaatctgaccacctttctacgaacctgtatcttccctgcaagtctttagcgtgcgtgtagtactgtgatctgcactgaacaatcatgtaatgctgcataaatgaccaattctgttgtaaaaaaaatt

SEQ ID NO: 10909 - protein, 231 aa, Zea mays subsp. mays
MASSAGNRFLRQLSASNGDEAVCGGLQMDQQEYGGAGVGRRGSRRWSKKRAAAAAAARGYGAGSGNGVKQPASAAGKRVMVVVDESSGANHAMMWALTHVADKGDFLTLLHVLPRSGSGRGEEASSLANSLGTLCKASRPEVEVEALVIQGPKLGTVLSQVKKLEASVLVLSQCRPSPCWLSCFLRSSGEEFVEQCINQAECLTLAVRKQSKGVCGYLISTRWQKNFWLLA

SEQ ID NO: 10910 - DNA, 690 bp, Zea mays
  CDS (1)..(690)
atggggagcagcgggggcagcagcgagcacttcctgcggcagctgagttcgagcgacggcggcagcgcgccgcaccatctgctgcagcgagagtgggagtgcggcggcgtcaccggcagcggcagcaggcgcgggtcgcggaagaagaccggggcgcggggacaccgccgccgcggcggcgggttctgcagggcggaggaggctgcgccggggcggaagcgggtaatggtggtggtggaccagagctccggcgccaagcacgccatgttgtgggcgctcacccacgtggccaacaagggcgacttcctcaccctgctccacgtcctgccgccggagagcggccacagcagccgcggtgctgcggaggacgcctccgcgctcgccaactccctcggcgcgctttgcaaggcctgcaagcctgaggtcgaggtggaggcgcctgtgatccaggggcccaagctgccgaccatcctcagccaggtgaagaagctggaggcgtccgtgctggtgctgagccaacgcagcccctcgcctttctgctgcttcccgcggagcagcagcgaggagctcgtggaggagtgcatcgaccgggcggagtgcctgacgctggcagtgcggcggcaaagcaagggcgtcggcggctacctcgtcagcacccggtggcagaagaacttctggctcctcgcgtga

SEQ ID NO: 10911 - protein, 229 aa, Zea mays
MGSSGGSSEHFLRQLSSSDGGSAPHHLLQREWECGGVTGSGSRRGSRKKTGARGHRRRGGGFCRAEEAAPGRKRVMVVVDQSSGAKHAMLWALTHVANKGDFLTLLHVLPPESGHSSRGAAEDASALANSLGALCKACKPEVEVEAPVIQGPKLPTILSQVKKLEASVLVLSQRSPSPFCCFPRSSSEELVEECIDRAECLTLAVRRQSKGVGGYLVSTRWQKNFWLLA

SEQ ID NO: 10912 - DNA, 717 bp, Zea mays
  CDS (1)..(717)
  misc_feature (201)..(201): r is g or a
  misc_feature (581)..(581): k is g or t
atggggagcagcgggggcagctgcgagcacttcctggggcagctgagctcgagcgacggcggcagcgcgccgcaccagctgctgcagcgggagtgggactgcggcaccggcaccggcagcaggcgtgggtcgcggcgctggtccaggaagaagggcagggcgcggggacaccgccgcggcggcgggttctgcaggactgargaggccgcggcggcgtcgcggaagcgggtggtggtggtggtggaccagagctccggcgccaagcacgccatgatgtgggcgctcacccacgtcgccaacaggggcgacttcctcaccctgctccacgtcctgccgccgcacagcgggagcggcggcggcggccgcggtgctggggaggaggacgcctccgcgctcgccaactccctcggcgcgctttgcaaggcctgcaagcctgaggtggaggtggaggcgctcgtgatccaggggcccaagctgtcgaccatcctcagccaggtgaagaagctggaggcgtccgtgctggtgctcagccaacgcaaaccctcgcctttctgctgcttcctgcggagcaggagcagcakcgaggaggaggagctggtggaggagtgcataaaccgggcggagtgcctgacgctggcggtgcggcggcggagcaagggcgtgggcggctacctcgtgagcacccggtggcagaacaacttctggctgctcgcctga

SEQ ID NO: 10913 - protein, 238 aa, Zea mays
  misc_feature (194)..(194): The Xaa at location 194 stands for Ile, or Ser.
MGSSGGSCEHFLGQLSSSDGGSAPHQLLQREWDCGTGTGSRRGSRRWSRKKGRARGHRRGGGFCRTEEAAAASRKRVVVVVDQSSGAKHAMMWALTHVANRGDFLTLLHVLPPHSGSGGGGRGAGEEDASALANSLGALCKACKPEVEVEALVIQGPKLSTILSQVKKLEASVLVLSQRKPSPFCCFLRSRSSXEEEELVEECINRAECLTLAVRRRSKGVGGYLVSTRWQNNFWLLA

SEQ ID NO: 10914 - DNA, 696 bp, Zea mays
  CDS (1)..(696)
atggcgagcagcgcggggaaccgcttcctgaggcagctgagcgcgagcaacggcgacgaagcggtctgcggcggcctgcagatggaccagcaggagtacggcggcgccggcgtggggaggaggggatcccggcggtggtcgaagaagcgggccgccgccgccgccgccgcgaggggctacggcgccggcagcgggaatggcgtgaagcagccggcctctgccgcggggaagcgggtgatggtggtggtggacgagagctcgggagccaaccacgccatgatgtgggcgctcacccacgtcgccgacaagggggacttcctcacgctgctccacgtcctgccgcgctccggcagcggcaggggcgaggaggcctcctccctcgccaactcgctcggcacgctctgcaaggcctccaggccagaggtggaggtcgaagcgcttgtgatccaagggcccaagctgggcaccgtgctcagccaggtgaagaagctggaggcctccgtgctggtgctcagccagtgcaggccatctccctgctggttaagctgcttcctgcggagcagcggcgaggagtttgtggagcagtgcatcaaccaggcggagtgcctgacgctggcggtgaggaagcagagcaagggcgtcggtgggtacctcatcagcacccggtggcagaagaacttctggctcctggcctga

SEQ ID NO: 10915 - protein, 231 aa, Zea mays
MASSAGNRFLRQLSASNGDEAVCGGLQMDQQEYGGAGVGRRGSRRWSKKRAAAAAAARGYGAGSGNGVKQPASAAGKRVMVVVDESSGANHAMMWALTHVADKGDFLTLLHVLPRSGSGRGEEASSLANSLGTLCKASRPEVEVEALVIQGPKLGTVLSQVKKLEASVLVLSQCRPSPCWLSCFLRSSGEEFVEQCINQAECLTLAVRKQSKGVGGYLISTRWQKNFWLLA

SEQ ID NO: 10916 - DNA, 702 bp, Zea mays
  CDS (1)..(702)
  misc_feature (78)..(78): s is g or c
atggggagcagcgggggcagctgcgagcacttcctggggcagctgagctcgagcgacggcggcagcgcgccgcaccasctgctgcagcgggagtgggactgcggcaccggcagcaggcgcgggtcgcggcgctggtccaggaagaagggcagggcgcggggacaccgccgcggcggcgggttctgcaggacggaggaggccgcgcggaagcgggtggtggtggtggtggaccagagctccggcgccaagcacgccatgatgtgggcgctcacccacgtcgccaacaggggcgacttcctcaccctgctccacgtcctgccgccgcacagcgggagcggcggcggcggccgcggtgctggggaggaggacgcctccgcgctcgccaactccctcggcgcgctttgcaaggcctgcaagcctgaggtggaggtggaggcgctcgtgatccaggggcccaagctgtcgaccatcctcagccaggtgaagaagctggaggcgtccgtgctggtgctcagccaacgcaaaccctcgcctttctgctgcttcctgcggagcaggagcagcagcgaggaggaggagctggtggaggagtgcataaaccgggcggagtgcctgacgctggcggtgcggcgtcggagcaagggcgtgggcggctacctcgtcagcacccggtggcagaagaacttctggctgctcgcctga

SEQ ID NO: 10917 - protein, 233 aa, Zea mays
  misc_feature (26)..(26): The Xaa at location 26 stands for Gln, or His.
MGSSGGSCEHFLGQLSSSDGGSAPHXLLQREWDCGTGSRRGSRRWSRKKGRARGHRRGGGFCRTEEAARKRVVVVVDQSSGAKHAMMWALTHVANRGDFLTLLHVLPPHSGSGGGGRGAGEEDASALANSLGALCKACKPEVEVEALVIQGPKLSTILSQVKKLEASVLVLSQRKPSPFCCFLRSRSSSEEEELVEECINRAECLTLAVRRRSKGVGGYLVSTRWQKNFWLLA

SEQ ID NO: 10918 - DNA, 858 bp, Arabidopsis thaliana
  CDS (1)..(858)
atggcgagatcgctcaagaaatcagccaagttgagtctaagaagagtccggatcaattcaccttcgattaggttcaaaccggactcgagttccatagagagagaccaaagaatcgagtttctaggcgaaaatggtgatgatgccggatccggagaagaagacaccaaagaagcaaacaatgaaagtgaagaggttgaagataaggaagaagaaagagtcaaagtaattgtagaggaggaagaagaaaaagaacaagatgatgccaagagctttaacattggaggcggagaaggaaaaaaagaggcggtggcagcggttgaggcggttgaggaggaggcggaaggcgggaatagagtaatggtggtggttgataaagcgcttgcttctaccggagctttagaatgggctattacgcatactttacaaccacaagacactctttttctgttatactttgcaaaaccgtttagaaaaagtaaaaggaagaaccgaaaacgcgaggtgaaaaccgatgaattggtccatactttaaagaaactgtgccaaacgaaacgacccgggatagaagtggagataaggaggttagaggggaaagacaaagacaaagggcagaagatagttgaagaatcaaagaaacaacaagtgagccttttagtggttggacaagagaagaaacctccggtctggaggctattgaagagatgggcgtggaagagacgccgtggacacgaaggtgttctcaaatactgcctcgaaaacgcctcttgcatgacaatcgcggttaaacccaagaaccgcaagctcggcggttacttaatcaccaccaaacgccacaaaaacttctggcttctcgcttga

SEQ ID NO: 10919 - protein, 285 aa, Arabidopsis thaliana
MARSLKKSAKLSLRRVRINSPSIRFKPDSSSIERDQRIEFLGENGDDAGSGEEDTKEANNESEEVEDKEEERVKVIVEEEEEKEQDDAKSFNIGGGEGKKEAVAAVEAVEEEAEGGNRVMVVVDKALASTGALEWAITHTLQPQDTLFLLYFAKPFRKSKRKNRKREVKTDELVHTLKKLCQTKRPGIEVEIRRLEGKDKDKGQKIVEESKKQQVSLLVVGQEKKPPVWRLLKRWAWKRRRGHEGVLKYCLENASCMTIAVKPKNRKLGGYLITTKRHKNFWLLA

SEQ ID NO: 10920 - DNA, 660 bp, Vitis vinifera
  CDS (1)..(660)
atgccaagttcaggttcatttttgaggcaactgagtgggaaagaggcttggaaatcatcatcaaagagatggggtggaaataatagcaggcatggtgatggagggtgtgagagaagtttgaaacaaatggaagggcttcacatgtatggtggtgagaatggcgggttggtgatgaggaagagagtgatggtggtggtggatcatacttcaaattccaagcatgcaatgatgtgggcactaacacatgtcaccaacaagggggatatcctgactctccttcacatcattcctccctcccataagggctctgagaggccaactgagtcttcttcttctccttaccttgctaactcactcgggtccctttgcaaggcttgtaaacccgaggtggaagtggaggcattggtaatccaagggccaaggctggccacagtggtaagccaagtgaagaagctagaggtgtctgtgctagtgctgggtcagaagaagccctctccactcatcaattgtttatgtggagccagcagcacccaggggtttgtggagcagtgcatcaacaacgcagagtgcttgaccattggagtcaggaaacagagcaaagacatgggtggctacctcatcagcaccaggtggcagaagaacttctggctcttggcatag

SEQ ID NO: 10921 - protein, 219 aa, Vitis vinifera
MPSSGSFLRQLSGKEAWKSSSKRWGGNNSRHGDGGCERSLKQMEGLHMYGGENGGLVMRKRVMVVVDHTSNSKHAMMWALTHVTNKGDILTLLHIIPPSHKGSERPTESSSSPYLANSLGSLCKACKPEVEVEALVIQGPRLATVVSQVKKLEVSVLVLGQKKPSPLINCLCGASSTQGFVEQCINNAECLTIGVRKQSKDMGGYLISTRWQKNFWLLA

SEQ ID NO: 10922 - DNA, 729 bp, Sorghum bicolor
  CDS (1)..(729)
atggggagcagcgggggcagcagcgagcacttcctgcggcagctgagctcgagcgacggcggcggcagcgcgccgcaccagctggtgcagcgggagtgggagtgcggcggcggcggcaccggcagcaggcgcgggtcgcggcgctggtccaggacgaagaaggccagcagggcgcggggacaccgccggttctgcaggacggaggaggctgcggcggcggctgcggcggggcggaagcgggtgatggtggtggtggaccagagctccggcgccaagcacgccatgatgtgggcgctcacccacgtcgccaacaagggcgacttcctcaccctgctccacgtcctgccgccgcagagcgggagcgggatcgggaccagcgtcggcggcggccgcggcgttgcggaggacgcctccgcgctcgccaactccctcggcgcgctttgcaaggcctgcaagcctgaggtggaagtggaggcgcttgtgatccaggggcccaagctgtcgaccatcctcagccaggtgaagaagctggaggcgtccgtgctggtgctcagccaacgcaagccctcgcctttctgctgcttcctgcggagcagcagcgaggaggtggtggaggagtgcatcaaccgggcggagtgcctgacgctggcggtgcggcggcagagcaagggcgtcggcggctacctcgtcagcacccggtggcagaagaacttctggctcctcgcttga

SEQ ID NO: 10923 - protein, 242 aa, Sorghum bicolor
MGSSGGSSEHFLRQLSSSDGGGSAPHQLVQREWECGGGGTGSRRGSRRWSRTKKASRARGHRRFCRTEEAAAAAAAGRKRVMVVVDQSSGAKHAMMWALTHVANKGDFLTLLHVLPPQSGSGIGTSVGGGRGVAEDASALANSLGALCKACKPEVEVEALVIQGPKLSTILSQVKKLEASVLVLSQRKPSPFCCFLRSSSEEVVEECINRAECLTLAVRRQSKGVGGYLVSTRWQKNFWLLA

SEQ ID NO: 10924 - DNA, 756 bp, Sorghum bicolor
  CDS (1)..(756)
atggccaggccgctctcttccttctgcctccaccggatcaggtccggcggtactgcgtccactgccgcaccgctgtcgatatgcgccaacaagaagacctccttcgacgacgacggcggcggtggcatatgcaagtcgctgaaggatggcaagcaggaagacgaggaggctaacaagaagggtggcgtggaggccgtcgtcgtggggaggaaggtgatggtggcggcggacggcggcagcgaggaggcccggacggcgctgcagtgggcgctgtcgcacgccgtccggccctgcgacacggtggtcctgctcgacgtcgtcaggggcggcgccggcggcggcaacggcaagaaccgacgcgatccaagagggagtagtcagcacctggaggcaatgaggagcatctgccaggccaagagaccagaggtgcgcgtggaggtttccctggcggagggcggcggcggcggcggcaaggaccgcgggccggcgatagtggaggcggcgaggaagcagggcgtgtcgctcctcgtcgtggggcagaagaggcggtcctctgtcacatggcggctgctgtccatgtggatcgccggcgtcaagggcggcggtggcggtgccggaggcggctgcgccagcgccgccgactactgcgtgcagcacgcggcgtgcacggcgctggccgtccggcgcaagagccggcgaggcggcggatacctcatcaccaccaggcggcagagggatttctggctcctggcttga

SEQ ID NO: 10925 - protein, 251 aa, Sorghum bicolor
MARPLSSFCLHRIRSGGTASTAAPLSICANKKTSFDDDGGGGICKSLKDGKQEDEEANKKGGVEAVVVGRKVMVAADGGSEEARTALQWALSHAVRPCDTVVLLDVVRGGAGGGNGKNRRDPRGSSQHLEAMRSICQAKRPEVRVEVSLAEGGGGGGKDRGPAIVEAARKQGVSLLVVGQKRRSSVTWRLLSMWIAGVKGGGGGAGGGCASAADYCVQHAACTALAVRRKSRRGGGYLITTRRQRDFWLLA

SEQ ID NO: 10926 - DNA, 720 bp, Sorghum bicolor
  CDS (1)..(720)
atggcgagcagcgcgggggaccggttcctgaggcagctgagcgcgagcaacggcggcgacgacgaaggggtctgcggcggcctgcagctggaccagcaggagtacggcggcgccggcgcggggaggaggggctcccggcggtggtccaagaagcgggccgccgccgccgccgccgcgaggggctacggcgccggcgccggcgggtacggcgtgaagcagcaggcggaggccgccgcaactgccgcgaggaagcgggtgatggtggtggtggatgagacctcgggctccaagcacgccatgatgtgggcgctcacccacgtcgccaacaagggggacttcctcacgctgctccacgtcctgccgcactccggcagcggccggggcgaggaggcctcctccctcgccaactcactcggcacgctctgcaaggcctccaggccagaggtggaggttgaagcccttgtgatccaagggcccaagctgggcaccgtgctcagccaggtgaagaagctggaggcctccgtgctggtgctcagccaatgcaagccatctccttactgctggctaagctgtttgctacggagcagcagcgaggagtttgtggagcaatgcatcaaccaggcggagtgcctgacgctggcggtgaggaagcagagcaagggcgtcggtgggtacctcgtcagcacccggtggcagaagaacttctggctgctggcttga

SEQ ID NO: 10927 - protein, 239 aa, Sorghum bicolor
MASSAGDRFLRQLSASNGGDDEGVCGGLQLDQQEYGGAGAGRRGSRRWSKKRAAAAAAARGYGAGAGGYGVKQQAEAAATAARKRVMVVVDETSGSKHAMMWALTHVANKGDFLTLLHVLPHSGSGRGEEASSLANSLGTLCKASRPEVEVEALVIQGPKLGTVLSQVKKLEASVLVLSQCKPSPYCWLSCLLRSSSEEFVEQCINQAECLTLAVRKQSKGVGGYLVSTRWQKNFWLLA

SEQ ID NO: 10928 - DNA, 687 bp, Sorghum bicolor
  CDS (1)..(687)
atgcatgcggcgacgtcggccggcggctgcagcatggccctgatcgacctcgggcgaggaggcggcggcggcggctcaggcaccgcgccggccaagccccggctggtgatgatcgtcgccgatcccggccgcgagtcgacagcggcgatggagtgggcgctctcccacgccattgtcgagggcgatgacatcatgctcctccacgtcaacatgccctacccccacaacggggccgccggtccctcacgctcctcgtctggcgggagcaccggttccccgatcgccgcgctcctaggtggaggtggtggctcgggcgccggcggcgcggatcctcatccggtggatttcgtggaggcgatgcgcgccgcgtgcagggcgcggtacccccgcgcgcgggtgcacggggagcgcgtcgagcccgctaccgagggccgggaagccaaggcgcagaccatcctcgccgagtcccagcgacgcggcgtcgaggtcctcgtcattggccagcgccgcgtgtcgtccttcctcgggttaaggagcccgagcgggtcgagccgcgggcacgacaccacggcggagttcttgatcgagcatagcaagtgcctgtgcgtaagcgtgcagaagaagggccagaatgccggatacctgctcaacacaaagacccacaaaaacttctggctcctagcatga

SEQ ID NO: 10929 - protein, 228 aa, Sorghum bicolor
MHAATSAGGCSMALIDLGRGGGGGGSGTAPAKPRLVMIVADPGRESTAAMEWALSHAIVEGDDIMLLHVNMPYPHNGAAGPSRSSSGGSTGSPIAALLGGGGGSGAGGADPHPVDFVEAMRAACRARYPRARVHGERVEPATEGREAKAQTILAESQRRGVEVLVIGQRRVSSFLGLRSPSGSSRGHDTTAEFLIEHSKCLCVSVQKKGQNAGYLLNTKTHKNFWLLA

SEQ ID NO: 10930 - DNA, 732 bp, Ricinus communis
  CDS (1)..(732)
atgggaaaggcaggtacaagattgccaaatttctgcctgaacaggattaggcctcatgttagagttcgttcaccgcctatacagtccaagcttcatagtgcaaattctgctactaaaaatgatcagaaaactaccggtcagagtctagcaggaagcataactactgctgttggagttggagaagggaagtcaggcgatgatggagtaaaacccttggttattaacggtaggaaaattatgatagtggttgattcaagttttgaagctaaaggtgctctactttgggcactttctcacactgttcaaagccaggatcttgtcattcttctttatgttaccaagccatctaaacaagctacaagtgaagagtccagcaaggaaaaacctccaagggcttatgatcttgtaaattccttgaagaatatgagccagttgaggagacctgagatacaaattgagacagcagtggtggagggaaaggagaaaggaccattgatagtggaagaggcaaagaaacaaggggtggcacttctagtgcttgggcagaagaagagatcaatgacatggagactgattatgatgtgggcaagcaacaaagttacaggtggtgttgttgaatattgcatccagaatgctgattgcatggcaattgcagtcagaagaaaaagcaaaaaacatggaggatatttaatcactactaaacgtcataaagatttctggctcttagcttaa

SEQ ID NO: 10931 - protein, 243 aa, Ricinus communis
MGKAGTRLPNFCLNRIRPHVRVRSPPIQSKLHSANSATKNDQKTTGQSLAGSITTAVGVGEGKSGDDGVKPLVINGRKIMIVVDSSFEAKGALLWALSHTVQSQDLVILLYVTKPSKQATSEESSKEKPPRAYDLVNSLKNMSQLRRPEIQIETAVVEGKEKGPLIVEEAKKQGVALLVLGQKKRSMTWRLIMMWASNKVTGGVVEYCIQNADCMAIAVRRKSKKHGGYLITTKRHKDFWLLA

SEQ ID NO: 10932 - DNA, 663 bp, Ricinus communis
  CDS (1)..(663)
atgccaagttcaagttcaagctcattcttgagacagataagtaagacagaagcttggagatcaacgtccaagaggtggggttgtaataataacagcagcagcagcaacttgatttttgacagaagcttgaagcaaatggaagggtttaacatgtatggtaatggtaataacagtagtggtttggttatgaggaagagagtgatggtagtagtagatcatacttctcactcaaagcatgcaatgatgtgggcattaacacatgttgctaataagggagatttgcttactttgcttcacattgtacctcctattcacagtgaaaaggctgatgcttcttctccttatcttgctaattctcttggctctctttgcaaggcttgtaaacctgaggtggaagtggaagcactggtaatccaagggccaaagctagccacagtgatgaaccaagtgaagaagctagatgtgtctgtcctagttctaggccagaaaaaaccctctccccttatcacctgcctctgtggaatcagcagcagtgaggggtttgtggagaaatgcatcaagaatgtagagtgcctgactattggagtgagcaagcagagcaaaagtgtaggtggttaccttatcagcaccagatggagaaagaacttctggctcttggcttag

SEQ ID NO: 10933 - protein, 220 aa, Ricinus communis
MPSSSSSSFLRQISKTEAWRSTSKRWGCNNNSSSSNLIFDRSLKQMEGFNMYGNGNNSSGLVMRKRVMVVVDHTSHSKHAMMWALTHVANKGDLLTLLHIVPPIHSEKADASSPYLANSLGSLCKACKPEVEVEALVIQGPKLATVMNQVKKLDVSVLVLGQKKPSPLITCLCGISSSEGFVEKCIKNVECLTIGVSKQSKSVGGYLISTRWRKNFWLLA

SEQ ID NO: 10934 - DNA, 669 bp, Oryza sativa subsp. indica
  CDS (1)..(669)
atggggagcagcggtggcagcagcgagcacttcctgcgccagttcagcgcgagcgacggcgcgccgctgccgcgtgagctgggcgaggagtgggcggcggccgagtgcggcaggagggggtcgaggcggtggtccaggaagaaggcgagggggcaccaccgccgcggcgggggcggaggcgggctctgcaggagcagggaggaggcccccgcggggaggaagcgggtgatggtggtggtggaccagagctccggcgccaagcacgccatgatgtgggcgctcacccacgtcgccagcaagggggacttcctcaccctgctccacgtcctcccccgcggcggcggcgacgcctccgcgctcgccaactccctcggctcactctgcaaggcctgcaagcccgaggtggaggttgaggcgcttgtgatccaagggcccaagctgggcaccgtcctcagccaggtgaagaagctggatgcatctgtgctggtgctgagccaatgcaagccatctcctttctgctgcttcatgaggagcagcggcgaggagttcgtggaggagtgcatcaacagggcggactgcctgacgctggcggtgaggcggcagagcaagggcgtcggcggctacctcatcagcacccggtggcagaagaacttctggctgctggcttga

SEQ ID NO: 10935 - protein, 222 aa, Oryza sativa subsp. indica
MGSSGGSSEHFLRQFSASDGAPLPRELGEEWAAAECGRRGSRRWSRKKARGHHRRGGGGGGLCRSREEAPAGRKRVMVVVDQSSGAKHAMMWALTHVASKGDFLTLLHVLPRGGGDASALANSLGSLCKACKPEVEVEALVIQGPKLGTVLSQVKKLDASVLVLSQCKPSPFCCFMRSSGEEFVEECINRADCLTLAVRRQSKGVGGYLISTRWQKNFWLLA

SEQ ID NO: 10936 - DNA, 729 bp, Oryza sativa subsp. japonica
  CDS (1)..(729)
atggcgaacggtggcggggagcacttcttgcggcagctgagcgcgagcaacgggggatacggtggtgcggcgcagtatcagatggggcgaggggtggtggcggaggaggaggtggagctcggcggaggaggcaggaggaggggctcgaagcggtggtcgaagaagagggccggcgaggggcgggtacggcggcggcggcggggggaaaaaggggacgcggccgcggccgcggcggcggcggcggcggtggccgggaggaagcgggtgatggtggtggtggacgacacctccggggccaagcacgccatgatgtgggcgctcacccacgtcgccaacaagggggacttcctcacgctgctccacgtcctcccgtacgccggcgccggcagaggcgaggagaccccctccctcgccaactccctcggcacgctctgcaaggcctgcaggccagaggtggaggttgaagcacttgtgatccaaggaccaaagctggccactgtcctcagccaagtgaagaaattggaggcgtctgtgcttgtgctcagccaatccaagccatcccatttctgttggttgagttgcatcctgcggagcagcagcgaggagttcgtcgagcaatgcatcaaccaggctgagtgcctgacgttggcagtgaggaagcagagcaagggcgtcggcgggtacctcatcagcacacggtggcagaagaacttctggctcctggcttga

SEQ ID NO: 10937 - protein, 242 aa, Oryza sativa subsp. japonica
MANGGGEHFLRQLSASNGGYGGAAQYQMGRGVVAEEEVELGGGGRRRGSKRWSKKRAGEGRVRRRRRGEKGDAAAAAAAAAAVAGRKRVMVVVDDTSGAKHAMMWALTHVANKGDFLTLLHVLPYAGAGRGEETPSLANSLGTLCKACRPEVEVEALVIQGPKLATVLSQVKKLEASVLVLSQSKPSHFCWLSCILRSSSEEFVEQCINQAECLTLAVRKQSKGVGGYLISTRWQKNFWLLA

SEQ ID NO: 10938 - DNA, 660 bp, Vitis vinifera
  CDS (1)..(660)
  misc_feature (354)..(354): r is g or a
  misc_feature (426)..(426): r is g or a
  misc_feature (435)..(435): r is g or a
  misc_feature (438)..(438): r is g or a
atgccaagttcaggttcatttttgaggcaactgagtgggaaagaggcttggaaatcatcatcaaagagatggggtggaaataatagcaggcatggtgatggagggtgtgagagaagtttgaaacaaatggaagggcttaacatgtatggtggtgagaatggcgggttggtgatgaggaagagagtgatggtggtggtggatcatacttcaaattccaagcatgcaatgatgtgggcactaacacatgtcaccaacaagggggatatcctgactctccttcacatcattcctccctcccataagggctctgagaggccaactgagtcttcttcttctccttaccttgctaactcrctcgggtccctttgcaaggcttgtaaacccgaggtggaagtggaggcattggtaatccaagggccaaggctrgccacagtrgtragccaagtgaagaagctagaggtgtctgtgctagtgctgggtcagaagaagccctctccactcatcaattgtttatgtggagccagcagcacccaggggtttgtggagcagtgcatcaacaacgcagagtgcttgaccattggagtcaggaaacagagcaaagacatgggtggctacctcatcagcaccaggtggcagaagaacttctggctcttggcatag

SEQ ID NO: 10939 - protein, 219 aa, Vitis vinifera
MPSSGSFLRQLSGKEAWKSSSKRWGGNNSRHGDGGCERSLKQMEGLNMYGGENGGLVMRKRVMVVVDHTSNSKHAMMWALTHVTNKGDILTLLHIIPPSHKGSERPTESSSSPYLANSLGSLCKACKPEVEVEALVIQGPRLATVVSQVKKLEVSVLVLGQKKPSPLINCLCGASSTQGFVEQCINNAECLTIGVRKQSKDMGGYLISTRWQKNFWLLA

SEQ ID NO: 10940 - DNA, 696 bp, Vitis vinifera
  CDS (1)..(696)
  misc_feature (186)..(186): y is t or c
  misc_feature (306)..(306): y is t or c
  misc_feature (482)..(482): r is g or a
  misc_feature (513)..(513): r is g or a
  misc_feature (631)..(631): r is g or a
atgggtcgggcacgtaccagactgcctagtctgtgcgcgagtcgcgccatggctcgcgttcgagttcgttcctggactccatggtccaaacccacttccaattccattcaacgtggttggaaaaatgagttttccggcaatggcatggggaagagctttagcagtaacgtggagatgggatggtgyggaggtgggaataggatcatggtggtggttgattcaagtattgaagctaagggagctctggaatgggcactgtctcatgctgttcaaccccaggacactctacttctttttcatgtgacyaagtccaccagatcaggtgtagattccagtagggaccttaatcaaaaggcttatcaacttctccaatctatgaaaaacatgtcccagatgagaaagcctggggtgcaagtggagatagcactgcagcaagggaaggaaaagggtccaataatagtggaagaagcaaagcaacagarggtgtcactgttgatcctaggaaaaagaaarcaatcatcaatggtatggtgtgggttggtgaagtgggcaacagacaggatctgcagaggtgttgtggactactgcatacaaaatgctgactgcatgacagttgcagtgaggaggaagrgcaagaaacttggagggtatttgattaccactaaaaatcataaggatttttggcttttggcttaa

SEQ ID NO: 10941 - protein, 231 aa, Vitis vinifera
  misc_feature (161)..(161): The Xaa at location 161 stands for Arg, or Lys.
  misc_feature (211)..(211): The Xaa at location 211 stands for Gly, or Ser.
MGRARTRLPSLCASRAMARVRVRSWTPWSKPTSNSIQRGWKNEFSGNGMGKSFSSNVEMGWCGGGNRIMVVVDSSIEAKGALEWALSHAVQPQDTLLLFHVTKSTRSGVDSSRDLNQKAYQLLQSMKNMSQMRKPGVQVEIALQQGKEKGPIIVEEAKQQXVSLLILGKRKQSSMVWCGLVKWATDRICRGVVDYCIQNADCMTVAVRRKXKKLGGYLITTKNHKDFWLLA

SEQ ID NO: 10942 - DNA, 648 bp, Brassica campestris
  CDS (1)..(648)
atgcaattttcaagaaactcaatccttagacaactaagcagaaaagaaggttggaggtcggcttctagaaggtggacatccggagatagctcaacggccttcgccgacgacacaagcggtggtgctggcggttactcttcaatggagggcctgtatggggttaattccggtgaagatccggcggcgagaaggaaaagagtgatggttgtggtggatgaggcttcaaggtccaaacatgctatgatgtgggctttgacgcacttgactaacaaaggagacttgatgactcttcttcatgttgtgtctcctcatgatgaagcttcttcttctttggttcagtcacttggttctctttgcaaagcttgtaaacccgaggtggatgtggaggcgttggtgattcaaggaccaaagttagcaactgtactcagccaagtgaagaaacttgaagtcactgttcttgttttgggtcagaagaaatctgcaccattcatctcctgtttatgtggacccagtagatcagaggagctcgtgaatcgatgtatcaatggtgcagattgtttgacgattggtgtgaggaaacaaagcaacggtgttagtggctacttgattaacacacgatggcagaagaacttctggcttctggcctaa

SEQ ID NO: 10943 - protein, 215 aa, Brassica campestris
MQFSRNSILRQLSRKEGWRSASRRWTSGDSSTAFADDTSGGAGGYSSMEGLYGVNSGEDPAARRKRVMVVVDEASRSKHAMMWALTHLTNKGDLMTLLHVVSPHDEASSSLVQSLGSLCKACKPEVDVEALVIQGPKLATVLSQVKKLEVTVLVLGQKKSAPFISCLCGPSRSEELVNRCINGADCLTIGVRKQSNGVSGYLINTRWQKNFWLLA

SEQ ID NO: 10944 - DNA, 696 bp, Zea mays
  CDS (1)..(696)
  misc_feature (101)..(101): k is g or t
atggcgagcagcgcggggaaccgcttcctgaggcagctgagcgcgagcaacggcgacgaagcggtctgcggcggcctgcagatggaccagcaggagtacgkcggcgccggcgtggggaggaggggatcccggcggtggtcgaagaagcgggccgccgccgccgccgccgcgaggggctacggcgccggcagcgggaatggcgtgaagcagccggcctctgccgcggggaagcgggtgatggtggtggtggacgagagctcgggagccaaccacgccatgatgtgggcgctcacccacgtcgccgacaagggggacttcctcacgctgctccacgtcctgccgcgctccggcagcggcaggggcgaggaggcctcctccctcgccaactcgctcggcacgctctgcaaggcctccaggccagaggtggaggtcgaagcgcttgtgatccaagggcccaagctgggcaccgtgctcagccaggtgaagaagctggaggcctccgtgctggtgctcagccagtgcaggccatctccctgctggttaagctgcttcctgcggagcagcggcgaggagtttgtggagcagtgcatcaaccaggcggagtgcctgacgctggcggtgaggaagcagagcaagggcgtctgtgggtacctcatcagcacccggtggcagaagaacttctggctcctggcctga

SEQ ID NO: 10945 - protein, 231 aa, Zea mays
  misc_feature (34)..(34): The Xaa at location 34 stands for Gly, or Val.
MASSAGNRFLRQLSASNGDEAVCGGLQMDQQEYXGAGVGRRGSRRWSKKRAAAAAAARGYGAGSGNGVKQPASAAGKRVMVVVDESSGANHAMMWALTHVADKGDFLTLLHVLPRSGSGRGEEASSLANSLGTLCKASRPEVEVEALVIQGPKLGTVLSQVKKLEASVLVLSQCRPSPCWLSCFLRSSGEEFVEQCINQAECLTLAVRKQSKGVCGYLISTRWQKNFWLLA

SEQ ID NO: 10946 - DNA, 654 bp, Glycine max
  CDS (1)..(654)
atgctcagttctttttcttcggcttcgtttttgaggcagttaagtgcaaaaaaggaggcttggaaagagagaagatataatagtagtggtggtgattggggagtgagctttggagggtgtgagacaagtgtgaatctaatggaagggtttaacatgatgcaggggaatgtggggaggaagagggtgatggtggtggttgatgacacttcgcattccaagcatgcaatgttatgggcactcactcatgttgctaacaagggtgattccttgactctgcttcacgttgtgcctcctcacaaggctcctgaatcttcttgctccacttatcttgttaattatcttgggtctctttgcaaagattgcaagccaggggtggaagtggaagcgctcgtaatccaagggccaaaactggcaactgtaatgagccaagtaaagaagctggaggtctctgtcctggtactgggccaaaagaagccatcttctctttttagctgtctttgtggaagcaacggaagcagtagtacagaggagtttgtggagttctgcatcaataaagcagagtgcttgacaattggagtgaggaagagaagccagggcacgaatggataccttatcagcactaggtggcagaagaacttctggcttttggcttag

SEQ ID NO: 10947 - protein, 217 aa, Glycine max
MLSSFSSASFLRQLSAKKEAWKERRYNSSGGDWGVSFGGCETSVNLMEGFNMMQGNVGRKRVMVVVDDTSHSKHAMLWALTHVANKGDSLTLLHVVPPHKAPESSCSTYLVNYLGSLCKDCKPGVEVEALVIQGPKLATVMSQVKKLEVSVLVLGQKKPSSLFSCLCGSNGSSSTEEFVEFCINKAECLTIGVRKRSQGTNGYLISTRWQKNFWLLA

SEQ ID NO: 10948 - DNA, 696 bp, Vitis vinifera
  CDS (1)..(696)
atgggtcgggcacgtaccagactgcctagtctgtgcgcgagtcgcgccatggctcgcgttcgagttcgttcctggactccatggtccaaacccacttccaattccattcaacgtggttggaaaaatgagttttccggcaatggcatggggaagagctttagcagtaacgtggagatgggatggtgcggaggtgggaataggatcatggtggtggttgattcaagtattgaagctaagggagctctggaatgggcactgtctcatgctgttcaaccccaggacactctacttctttttcatgtgactaagtccaccagatcaggtgtagattccagtagggaccttaatcaaaaggcttatcaacttctccaatctatgaaaaacatgtcccagatgagaaagcctggggtgcaagtggagatagcactgcagcaagggaaggaaaagggtccaacaatagtggaagaagcaaagcaacagagggtgtcactgttgatcctaggaaaaagaaaacaatcatcaatggtgtggtgtgggttggtgaagtgggcaacagacaggatctgcagaggtgttgtggactactgcatacaaaatgctgactgcatgacagttgcagtgaggaggaagggcaagaaacttggagggtatttgattaccactaaaaatcataaggatttttggcttttggcttaa

SEQ ID NO: 10949 - protein, 231 aa, Vitis vinifera
MGRARTRLPSLCASRAMARVRVRSWTPWSKPTSNSIQRGWKNEFSGNGMGKSFSSNVEMGWCGGGNRIMVVVDSSIEAKGALEWALSHAVQPQDTLLLFHVTKSTRSGVDSSRDLNQKAYQLLQSMKNMSQMRKPGVQVEIALQQGKEKGPTIVEEAKQQRVSLLILGKRKQSSMVWCGLVKWATDRICRGVVDYCIQNADCMTVAVRRKGKKLGGYLITTKNHKDFWLLA

SEQ ID NO: 10950 - DNA, 717 bp, Zea mays
  CDS (1)..(717)
atggcgagcagcgcggaggagcgcttcctgaggcagctgagcgcgagcaacggcggcgacgaaggggtctgcggcggccagcagctgggccacaaggagtactgcgcggagaggaggggctcccggcggtggtccaggaagcgggccgccgccgcgaggggctactgcggcgggtacgacgactacgacgtgaagcagcaggcggaggccgcctctgccgccgcgaggaagcgggtgatagtggtggtggacgacacctcgggctccaagcacgccatgatgtgggcgctcacccacgtcgccagcaagggggacttcctgacgctgctccacgtcctgctgccgcactccgcctccggcggcggctgtagcaggggcgaggaggcctcctccctcgccaactcgctcggcacgctctgcaaggcgtccaggccagaggtggaggttgaagccctggtgatccaaggcccgaagctgggcaccgtgctcagccaggtgaagaagctggaggcctccgtgctggtgctcggccagggcaggccgtctccctgctaccgctggctaagctgtttcttgcggagcagcagcgaggagttcgtagagcagtgcatcgagcaggcggagtgcctgacgctggcggtgaggaagcagagcaaggccgtcggcgggtacctcatcagcacccggtggcagaagaacttctggctcctggcctga

SEQ ID NO: 10951 - protein, 238 aa, Zea mays
MASSAEERFLRQLSASNGGDEGVCGGQQLGHKEYCAERRGSRRWSRKRAAAARGYCGGYDDYDVKQQAEAASAAARKRVIVVVDDTSGSKHAMMWALTHVASKGDFLTLLHVLLPHSASGGGCSRGEEASSLANSLGTLCKASRPEVEVEALVIQGPKLGTVLSQVKKLEASVLVLGQGRPSPCYRWLSCFLRSSSEEFVEQCIEQAECLTLAVRKQSKAVGGYLISTRWQKNFWLLA

SEQ ID NO: 10952 - DNA, 684 bp, Glycine max
  CDS (1)..(684)
atgcaacaaagttcagcttcagggtcattgatgaagcaattgagtgtgaaggaggcttggaaatcaacatcaagtaggtggagtgggaaggacaagtatagtagtgttggaggagggagcattgaagggtatgaagcaagtttgagccaactggaaggttttgctatgtatgggaatgaggacaataatggagtgatgatggggaagaagagagtgatggtggttgaggatcacacttctcattccaagcatgcaatgatgtgggcactcactcatggagctaataagggtgatttgctcactttgcttcatgttgtaccgactcataggggttctgaatcttctaactctacctatcttgtcaatcatcttggttcactttgcaaagattgcaagccagaggtggaagtggaagcacttgttatccaaggaccaaaactggccacagtgatgagccaagtgaagaagctggaggtttctctcttggtattgggccaaaagaagccctctcctctacttagctgcctgtgtggaagcaacagtatcagcagctcagaggagtttgctgagcactgcatcaacaatgcagaatgcttgacagtaggagtaaggaagagaagccaaggcaacaatggctacctcatcagcacaaggtggcagaagaacttctggctactggcttaa

SEQ ID NO: 10953 - protein, 227 aa, Glycine max
MQQSSASGSLMKQLSVKEAWKSTSSRWSGKDKYSSVGGGSIEGYEASLSQLEGFAMYGNEDNNGVMMGKKRVMVVEDHTSHSKHAMMWALTHGANKGDLLTLLHVVPTHRGSESSNSTYLVNHLGSLCKDCKPEVEVEALVIQGPKLATVMSQVKKLEVSLLVLGQKKPSPLLSCLCGSNSISSSEEFAEHCINNAECLTVGVRKRSQGNNGYLISTRWQKNFWLLA

SEQ ID NO: 10954 - DNA, 690 bp, Brassica napus
  CDS (1)..(690)
atgcaattttcaagaaactcaatacttagacaacgaagcagaaaagaaggttggaggtcggcttctaaaaggtggacatccggagatagttcaacggccttcaccgacgcaacaagctgtggtggtggttactcttcaatggagggtctttatggggtctactcaaatggagatacagcaaccagaagcaagagggtgatggttgtggtggatgagacttcgaggtcgaaacatgccatgatgtgggctttgacgcatttgactaataagggagatttgatgactcttctccacgttgtgtctcctcatgatgaagcttctccttctttggttcaatcacttggttctctttgcaaagcttgtaaacccgaggatttcggaaggaaagtttttcgaaaacatccaacatgtaatcaggtggatgtggaggcgttggtgattcaaggaccaaagttagcaactatactcagccaagtgaagaaacttgacgtcactgttcttgttttgggtcagaagaaatctgcaccattcatctcctgcttatgtggacccagtagatcagaggagctcgtgaatcgatgtatcaatggtgcagattgtttgacgattggtgtgaggaaacaaagcaacggtgttagtggctacctgattaacacacgatggcagaagaacttctggcttctggcctaa

SEQ ID NO: 10955 - protein, 229 aa, Brassica napus
MQFSRNSILRQRSRKEGWRSASKRWTSGDSSTAFTDATSCGGGYSSMEGLYGVYSNGDTATRSKRVMVVVDETSRSKHAMMWALTHLTNKGDLMTLLHVVSPHDEASPSLVQSLGSLCKACKPEDFGRKVFRKHPTCNQVDVEALVIQGPKLATILSQVKKLDVTVLVLGQKKSAPFISCLCGPSRSEELVNRCINGADCLTIGVRKQSNGVSGYLINTRWQKNFWLLA

SEQ ID NO: 10956 - DNA, 693 bp, Zea mays
  CDS (1)..(693)
atggggagcagcgggggcagctgcgagcacttcctggggcagctgagctcgagcgacggcggcagcgcgccgcaccagctgctgcagcgggagtgggactgcggcaccggcaccggcagcaggcgtgggtcgcggcgctggtccaggaagaagggcagggcgcggggacaccgccgcggcggcgggttctgcaggactgaggaggccgcggcggcgtcgcggaagcgggtggtggtggtggtggaccagagctccggcgccaagcacgccatgatgtgggcgctcacccacgtcgccaacaggggcgacttcctcaccctgctccacgtcctgccgccgcacagcgggagcggcggcggcgaggaggcctcctccctcgccaactcgctcggcacgctttgcaaggcctccaggccagaggtggaggtcgaagcgcttgtgatccaagggctcaagctgggcaccgtgctcagccaggtgaagaagctggaggcctccgtgctggtgctcagccagtgcaggccatctccctgctggttaagctgcttcctgcggagcagcggcgaggagtttgtggagcagtgcatcaaccaggcggagtgcctgacgctggcggtgaggaagcagagcaagggcgtcggtgggtacctcatcagcacccggtggcagaagaacttctggctcctggcctga

SEQ ID NO: 10957 - protein, 230 aa, Zea mays
MGSSGGSCEHFLGQLSSSDGGSAPHQLLQREWDCGTGTGSRRGSRRWSRKKGRARGHRRGGGFCRTEEAAAASRKRVVVVVDQSSGAKHAMMWALTHVANRGDFLTLLHVLPPHSGSGGGEEASSLANSLGTLCKASRPEVEVEALVIQGLKLGTVLSQVKKLEASVLVLSQCRPSPCWLSCFLRSSGEEFVEQCINQAECLTLAVRKQSKGVGGYLISTRWQKNFWLLA

SEQ ID NO: 10958 - DNA, 20 bp, Artificial sequence
  primer
atgcaattttcaagaaactc

SEQ ID NO: 10959 - DNA, 22 bp, Artificial sequence
  primer
ttaggccaagagccagaaattc

SEQ ID NO: 10960 - protein, 353 aa, Artificial sequence
  consensus sequence
  Variant (2)..(23): Xaa in position 2 to 23 is any amino acid
  Variant (24)..(110): Xaa in position 24 to 110 is any or no amino acid
  Variant (118)..(124): Xaa in position 118 to 124 is any amino acid
  Variant (125)..(126): Xaa in position 125 to 126 is any or no amino acid
  Variant (128)..(129): Xaa in position 128 to 129 is any amino acid
  Variant (133)..(133): Xaa in position 133 is any amino acid
  Variant (135)..(139): Xaa in position 135 to 139 is any amino acid
  Variant (141)..(143): Xaa in position 141 to 143 is any amino acid
  Variant (148)..(148): Xaa in position 148 is any amino acid
  Variant (149)..(149): Xaa in position 149 is any or no amino acid
  Variant (151)..(157): Xaa in position 151 to 157 is any amino acid
  Variant (158)..(193): Xaa in position 158 to 193 is any or no amino acid
  Variant (195)..(197): Xaa in position 195 to 197 is any amino acid
  Variant (199)..(201): Xaa in position 199 to 201 is any amino acid
  Variant (203)..(206): Xaa in position 203 to 206 is any amino acid
  Variant (208)..(208): Xaa in position 208 is any amino acid
  Variant (209)..(223): Xaa in position 209 to 223 is any or no amino acid
  Variant (225)..(225): Xaa in position 225 is any amino acid
  Variant (228)..(231): Xaa in position 228 to 231 is any amino acid
  Variant (234)..(237): Xaa in position 234 to 237 is any amino acid
  Variant (238)..(243): Xaa in position 238 to 243 is any or no amino acid
  Variant (245)..(249): Xaa in position 245 to 249 is any amino acid
  Variant (252)..(254): Xaa in position 252 to 254 is any amino acid
  Variant (256)..(256): Xaa in position 256 is any amino acid
  Variant (260)..(260): Xaa in position 260 is any amino acid
  Variant (262)..(264): Xaa in position 262 to 264 is any amino acid
  Variant (266)..(281): Xaa in position 266 to 281 is any amino acid
  Variant (282)..(317): Xaa in position 282 to 317 is any or no amino acid
  Variant (320)..(321): Xaa in position 320 to 321 is any amino acid
  Variant (323)..(323): Xaa in position 323 is any amino acid
  Variant (325)..(325): Xaa in position 325 is any amino acid
  Variant (327)..(328): Xaa in position 327 to 328 is any amino acid
  Variant (331)..(332): Xaa in position 331 to 332 is any amino acid
  Variant (334)..(336): Xaa in position 334 to 336 is any amino acid
  Variant (337)..(337): Xaa in position 337 is any or no amino acid
  Variant (341)..(342): Xaa in position 341 to 342 is any amino acid
  Variant (345)..(345): Xaa in position 345 is any amino acid
LXXXXXXXXXXXXXXXXXXXXXXXXXXXXXXXXXXXXXXXXXXXXXXXXXXXXXXXXXXXXXXXXXXXXXXXXXXXXXXXXXXXXXXXXXXXXXXXXXXXXXXXXXXXXXRVMVVVDXXXXXXXXXAXXWALXHXXXXXDXXXLLHVXXPXXXXXXXXXXXXXXXXXXXXXXXXXXXXXXXXXXXXXXXXXXXLXXXLXXXCXXXXPXXXXXXXXXXXXXXXXVXVEXXXXQGXXXXXXXXXXTXXXXXKKXXXSXLVLXQXXXSXXXXXXXXXXXXXXXXXXXXXXXXXXXXXXXXXXXXXXXXXXXXXXXXXXXXCIXXAXCXTXXVRXXSXXXXGYLXXTRXQKNFWLLA

SEQ ID NO: 10961 - protein, 37 aa, Artificial sequence
  protein pattern
  Variant (2)..(2): Xaa in position 2 is any amino acid
  Variant (3)..(3): Xaa in position 3 is Leu, Met or Val
  Variant (4)..(4): Xaa in position 4 is Ile, Met or Val
  Variant (7)..(7): Xaa in position 7 is any or no amino acid
  Variant (9)..(9): Xaa in position 9 is any amino acid
  Variant (10)..(10): Xaa in position 10 is any or no amino acid
  Variant (12)..(15): Xaa in position 12 to 15 is any amino acid
  Variant (16)..(16): Xaa in position 16 is any or no amino acid
  Variant (18)..(18): Xaa in position 18 is Leu or Met
  Variant (19)..(19): Xaa in position 19 is any amino acid
  Variant (23)..(23): Xaa in position 23 is Ser or Thr
  Variant (25)..(25): Xaa in position 25 is any amino acid
  Variant (26)..(26): Xaa in position 26 is Ala, Thr or Val
  Variant (27)..(27): Xaa in position 27 is Asp, Asn, Gln or Ser
  Variant (28)..(28): Xaa in position 28 is any amino acid
  Variant (29)..(29): Xaa in position 29 is Gly or Gln
  Variant (31)..(31): Xaa in position 31 is any amino acid
  Variant (32)..(32): Xaa in position 32 is Leu, Met or Val
  Variant (33)..(33): Xaa in position 33 is any amino acid
  Variant (35)..(35): Xaa in position 35 is Leu or Val
  Variant (36)..(36): Xaa in position 36 is His or Tyr
  Variant (37)..(37): Xaa in position 37 is Ile or Val
KXXXVVXDXXSXXXXXAXXWALXHXXXXXDXXXLXXX

SEQ ID NO: 10962 - protein, 14 aa, Artificial sequence
  protein pattern
  Variant (3)..(3): Xaa in position 3 is Asp, Glu, Asn or Gln
  Variant (4)..(4): Xaa in position 4 is any amino acid
  Variant (6)..(6): Xaa in position 6 is Asp or Glu
  Variant (8)..(8): Xaa in position 8 is Leu or Met
  Variant (9)..(9): Xaa in position 9 is Ala or Thr
  Variant (10)..(10): Xaa in position 10 is Ile, Leu or Val
  Variant (11)..(11): Xaa in position 11 is Ala or Gly
  Variant (14)..(14): Xaa in position 14 is Lys or Arg
CIXXAXCXXXXVRX

SEQ ID NO: 10963 - protein, 19 aa, Artificial sequence
  protein pattern
  Variant (2)..(3): Xaa in position 2 to 3 is any or no amino acid
  Variant (5)..(5): Xaa in position 5 is any amino acid
  Variant (6)..(7): Xaa in position 6 to 7 is any or no amino acid
  Variant (9)..(9): Xaa in position 9 is Glu or Gly
  Variant (11)..(11): Xaa in position 11 is any amino acid
  Variant (14)..(14): Xaa in position 14 is Ala, Leu or Val
  Variant (15)..(15): Xaa in position 15 is any amino acid
  Variant (16)..(16): Xaa in position 16 is Leu or Val
  Variant (17)..(17): Xaa in position 17 is Ala, Ile or Val
  Variant (18)..(18): Xaa in position 18 is Glu or Gln
CXXKXXXPXVXVEXXXXXG

SEQ ID NO: 10964 - protein, 20 aa, Artificial sequence
  protein pattern
  Variant (2)..(4): Xaa in position 2 to 4 is any or no amino acid
  Variant (7)..(8): Xaa in position 7 to 8 is any amino acid
  Variant (9)..(9): Xaa in position 9 is Ala or Val
  Variant (10)..(10): Xaa in position 10 is Ala, Ser or Thr
  Variant (11)..(11): Xaa in position 11 is Leu or Val
  Variant (14)..(14): Xaa in position 14 is Leu or Val
  Variant (15)..(15): Xaa in position 15 is Gly or Ser
  Variant (17)..(18): Xaa in position 17 to 18 is any amino acid
  Variant (19)..(19): Xaa in position 19 is any or no amino acid
VXXXKKXXXXXLVXXQXXXS

SEQ ID NO: 10965 - DNA, 468 bp, Arabidopsis thaliana
  CDS (1)..(468)
atgagtgctgttgcgattaaccacttttttggcttaccggaggcgatcgagaagctaattctcccgatttctcgttccggcgaaagtaataacgagagtcgtggaagaggaagtagcaataatatcccaatagacattttggaatctcccaaagaatacatattttatctcgatatccccggaatttcaaaatcagatatccaggttacagtggaggaagagaggactttagtgataaagagtaatgggaagaggaagagagatgatgatgagagtgaagaagggtctaagtatattagactcgagaggagacttgctcagaatttggttaagaagttccggttaccagaagatgctgatatggcttctgtaacggctaaatatcaagaaggtgttttgacagttgttatcaagaagctaccgccacagccgccgaaacctaagactgttcaaatcgctgtttcttga

SEQ ID NO: 10966 - protein, 155 aa, Arabidopsis thaliana
MSAVAINHFFGLPEAIEKLILPISRSGESNNESRGRGSSNNIPIDILESPKEYIFYLDIPGISKSDIQVTVEEERTLVIKSNGKRKRDDDESEEGSKYIRLERRLAQNLVKKFRLPEDADMASVTAKYQEGVLTVVIKKLPPQPPKPKTVQIAVS

SEQ ID NO: 10967 - DNA, 788 bp, Zea mays
  CDS (95)..(595)
cctcgagcgcacgggcaccatcacaaaaccattcacacagcgaaccgagaaaccaacacagcaacaagcaaagcagcgatccgacatccgagatatggatgcggtgatgttcgggctggagactcccctgatggcggcgctgcagcacctgctggacgtgcccgacggcgacgccggcgcgggcggcgacagcgacaacaagacgggcagcggcggcagcgccacgcgcacctacgtccgcgacgcgcgcgccatggcggccaccccggccgacgtgaaggagctgcccggcgcgtacgcgttcgtggtggacatgccggggctgggcacgggcgacatccgggtgcaggtggaggacgagcgggtgctggtggtcagcggcgagcggcgccgggaggagcgcgaggacgacgccaagtacctgcgcatggagcggcggatgggcaagttcatgcgcaagttcgtgctgccggacaacgccgacgtcgacaaggtcgccgccgtgtgcagggacggcgtgctcacggtgaccgtcgagaagctgcccccgccggagcccaagaagcccaagaccatcgaggtcaaggtggcctgagggagcaagcagtagcccgtgcttctgaaactttgtgtgttttgtgtttgcttcctttgtgacgcaaagcagaatgccctgatgctttctccatagaataaatctctgttcacctacatgtctcttgtaacattttctggtgaagatcgtgtcgcgatgaatctagaataatatcgatccgacttacaagttt

SEQ ID NO: 10968 - protein, 166 aa, Zea mays
MDAVMFGLETPLMAALQHLLDVPDGDAGAGGDSDNKTGSGGSATRTYVRDARAMAATPADVKELPGAYAFVVDMPGLGTGDIRVQVEDERVLVVSGERRREEREDDAKYLRMERRMGKFMRKFVLPDNADVDKVAAVCRDGVLTVTVEKLPPPEPKKPKTIEVKVA

SEQ ID NO: 10969 - DNA, 789 bp, Glycine max
  CDS (86)..(565)
accaaagcattccacaaaattcagcaagcaatccaacgcagtccaacccgaggagatcgaccgagctcgagatcagcgagcgagaatggcgggcatggtgttcggcttggatgccccgatgatggccgccctgcagcacctgctggacatcccggacggcgaggccggagcagccgccggcgagaagcagggcccgacgcgcgcctacgtccgcgacgcgcgcgccatggcggccacccccgccgacgtgaaggagctgccgggcgcgtacgcgttcgtggtggacatgccggggctcgggtccggcgacatcaaggtgcaggtggaggacgagcgggtgctggtgatcagcggcgagcggcggagggaggagaaggaggacgccaagtacctgcggatggagcgccgcatgggcaagctgatgcgcaagttcgtgctgccggagaacgccgacatggagaagatctccgccgcgtgccgcgacggcgtgctcaccgtgaccgtcgacaagctgccgccgcccgagcccaagaagcccaagaccatccaggtccaggtcgcctgagatgcatcgtgtgcgcgtcgaatcgaatcagagtgtgagtgggtagcgagtttcctgtgatgagtgatgggagtgtctgtcctttgatttcatctactagtagtatggttatctgagggagagggtgtgtactgtctgttcgtgcgtactggtggttgtttgatgtttcgttaatggaaatggggatgatctccggcctcgcctgaataaaacatgcgaacctc

SEQ ID NO: 10970 - protein, 159 aa, Glycine max
MAGMVFGLDAPMMAALQHLLDIPDGEAGAAAGEKQGPTRAYVRDARAMAATPADVKELPGAYAFVVDMPGLGSGDIKVQVEDERVLVISGERRREEKEDAKYLRMERRMGKLMRKFVLPENADMEKISAACRDGVLTVTVDKLPPPEPKKPKTIQVQVA

SEQ ID NO: 10971 - DNA, 701 bp, Zea mays
  CDS (55)..(546)
cgaaccgataaaccaacacagcaacaagcaaagcagcgatccgacatccgagagatggacgcggtgatgttcgggctggagactcccctgatggcggcgctgcagcacctgctggacgtgcccgacggcgacgccggcgcgggcggcgacaacaagacgggcggcggcggcgccacgcgcacctacgtccgcgacgcgcgcgccatggcggccaccccggccgacgtgaaggagctgcccggcgcgtacgcgttcgtggtggacatgccggggctgggcacgggcgacatccgggtgcaggtggaggacgagcgggtgctggtggtcagcggcgagcggcgccgggaggagcgcgaggacgacgccaagtacctgcgcatggagcggcggatgggcaagttcatgcgcaagttcgtgctgccggacaacgccgacgtggacaaggtcgccgccgtttgcagggacggcgtgctcacggtgaccgtcgagaagctgcccccgccggagcccaagaagcccaagaccatcgaggtcaaggtcgcctgagggagcaagcagtagcccgtgcttctgaaactttgtgtgttttgtgtttgcttcctttgtgacgcaaagcagaatgccctgatgctttctccatagaataaatctctacatgtctcttgtaaccttttctggtgaacgtcgtgccgcgatgaatc

SEQ ID NO: 10972 - protein, 163 aa, Zea mays
MDAVMFGLETPLMAALQHLLDVPDGDAGAGGDNKTGGGGATRTYVRDARAMAATPADVKELPGAYAFVVDMPGLGTGDIRVQVEDERVLVVSGERRREEREDDAKYLRMERRMGKFMRKFVLPDNADVDKVAAVCRDGVLTVTVEKLPPPEPKKPKTIEVKVA

SEQ ID NO: 10973 - DNA, 483 bp, Zea mays
  CDS (1)..(483)
atggacgcgaggatgttcgggctggagaaccccctggtggcggcgctgcatcacctgctggacgtgcccgatggcgacgccggagcgggcggcgacaaggcgggcggcggcgccacgcgcacctacgtccgcgacgcgcgcgccatggcggccaccccggccgacgtcaaggagctcgcgggagcgtacgcgttcgtggtggacatgccggggctgagcacgggcgacatcagggtgcaggtggaggacgagcgggttcttgtgatcagcggcgagcggcgccgggaggagcgcgaggacgccaagtacctgcgcatggagcggcggatgggcaagttcatgcgcaagttcgtgctgccggacaacgccgacgtggacaaggtcgccgccgtgtgcagggacggcgtgctcacggtgaccgtcgagaagctgcccccgccggagcccaagaagcccaagaccatcgagattaaggtcgcctga

SEQ ID NO: 10974 - protein, 160 aa, Zea mays
MDARMFGLENPLVAALHHLLDVPDGDAGAGGDKAGGGATRTYVRDARAMAATPADVKELAGAYAFVVDMPGLSTGDIRVQVEDERVLVISGERRREEREDAKYLRMERRMGKFMRKFVLPDNADVDKVAAVCRDGVLTVTVEKLPPPEPKKPKTIEIKVA

SEQ ID NO: 10975 - DNA, 495 bp, Zea mays
  CDS (1)..(495)
atggacgcggtgatgttcgggctggagactcccctgatggccgcgctgcagcacctgctggacgtgcccgacggcgacgccggcgcgggcggcgacaacaagacgggcagcggcggcagcgccacgcgcacctacgtccgcgacgcgcgcgccatggcggccaccccggccgacgtgaaggagctgcccggcgcgtacgcgttcgtggtggacatgccggggctgggcacgggcgacatccgggtgcaggtggaggacgagcgggtgctggtggtcagcggcgagcggcgccgggaggagcgcgaggacgacgccaagtacctgcgcatggagcggcggatgggcaagttcatgcgcaagttcgtgctgccggacaacgccgacgtcgacaaggtcgccgccgtgtgcagggacggcgtgctcacggtgaccgtcgagaagctgcccccgccggagcccaagaagcccaagaccatcgaggtcaaggtcgcctga

SEQ ID NO: 10976 - protein, 164 aa, Zea mays
MDAVMFGLETPLMAALQHLLDVPDGDAGAGGDNKTGSGGSATRTYVRDARAMAATPADVKELPGAYAFVVDMPGLGTGDIRVQVEDERVLVVSGERRREEREDDAKYLRMERRMGKFMRKFVLPDNADVDKVAAVCRDGVLTVTVEKLPPPEPKKPKTIEVKVA

SEQ ID NO: 10977 - DNA, 498 bp, Zea mays
  CDS (1)..(498)
atggacgggaggatgttcggtctcgagacccccctgatggtggcgctgcagcaccttctggacgtgcccgacggcgacgccggcgcgggcggcgacaaggcgagtggtgccgcggcgggcggcgggcccacgcgcacctacgtccgcgacgcgcgcgccatggcggccaccccggccgacgtcaaggagctcccgggcgcgtacgcgttcgtggtggacatgccggggctgggcacgggcgacatcaaggtgcaggtggaggacgagcgggtgctggtgatcagcggcgagcggcgccgggaggagcgcgaggacgccaagtacctgcgcatggagcggcggatgggcaagttcatgcgcaagttcgtgctgccggacaacgccgacatggacaagatctcggcggtgtgcagggacggcgtgctcaccgtgaccgtcgagaagctgcccccgcccgagcccaagaaacccaagaccatcgaggtcaaggtcgcctga

SEQ ID NO: 10978 - protein, 165 aa, Zea mays
MDGRMFGLETPLMVALQHLLDVPDGDAGAGGDKASGAAAGGGPTRTYVRDARAMAATPADVKELPGAYAFVVDMPGLGTGDIKVQVEDERVLVISGERRREEREDAKYLRMERRMGKFMRKFVLPDNADMDKISAVCRDGVLTVTVEKLPPPEPKKPKTIEVKVA

SEQ ID NO: 10979 - DNA, 516 bp, Zea mays
  CDS (1)..(516)
atgacggagctgttcgacacggccgtgaccagcctcctccacctgccggaggtgctggaccgcctctccgccgcagacggcgaccggcggtcggccggcaaccacgcggcgcacgggcacggccacggacgcgtccacgggctcggcggcggcggcggagcgccggtggacatcgtggagagcccccgcgagtacgccttcgtgctcgacgtgcccggcctctccaagtcagacatccaggtgacgctggaggaggaccgggtgctggtgatgaagggcggcagcgggaagcggaagcgcgatgaggaggaggacatgaacggcgaagggtgccgatacatccggttggagcgcggcgcggcgccgcggtcgttcgtgcgcaagttccggctgccggaggatgcggacacgggcggcgttgcggcgcgctgcgagaacggtgtgctcaccgtcaccgtcaagaagctgccgccgccggagaagaaggccaagaccgtgcaggtcaccatcgcctag

SEQ ID NO: 10980 - protein, 171 aa, Zea mays
MTELFDTAVTSLLHLPEVLDRLSAADGDRRSAGNHAAHGHGHGRVHGLGGGGGAPVDIVESPREYAFVLDVPGLSKSDIQVTLEEDRVLVMKGGSGKRKRDEEEDMNGEGCRYIRLERGAAPRSFVRKFRLPEDADTGGVAARCENGVLTVTVKKLPPPEKKAKTVQVTIA

SEQ ID NO: 10981 - DNA, 465 bp, Zea mays
  CDS (1)..(465)
atggacgcgaggatgttcgggctggagaccccccgggtggcggcgctgcatcacctgctggacgtgcccgacggcgacaaggcgggcggcggcgccacgcgcacctacgtccgcgacgcgcgcgccatggcggccaccccggccgacgtcaaggagctcgcgggagcgtacgcgttcgtggtggacatgccggggctgagcacgggcgacatcagggtgcaggtggaggacgagcgggtgctggtgatcagcggcgagcggcgccgggaggagcgcgaggacgccaagtacctgcgcatggagcggcggatgggcaagttcatgcgcaagttcgtgctgccggacaacgccgacgtggacaaggtcgccgccgtgtgcagggacggcgtgctcacggtgaccgtcgagaagctgcccccgccggagcccaagaagcccaagaccatcgagattaaggtcgcctga

SEQ ID NO: 10982 - protein, 154 aa, Zea mays
MDARMFGLETPRVAALHHLLDVPDGDKAGGGATRTYVRDARAMAATPADVKELAGAYAFVVDMPGLSTGDIRVQVEDERVLVISGERRREEREDAKYLRMERRMGKFMRKFVLPDNADVDKVAAVCRDGVLTVTVEKLPPPEPKKPKTIEIKVA

SEQ ID NO: 10983 - DNA, 465 bp, Zea mays; identical to SEQ ID NO: 8836
  CDS (1)..(465)

SEQ ID NO: 10984 - protein, 154 aa, Zea mays; identical to SEQ ID NO: 8837

SEQ ID NO: 10985 - DNA, 501 bp, Oryza sativa; identical to SEQ ID NO: 8808
  CDS (1)..(501)

SEQ ID NO: 10986 - protein, 166 aa, Oryza sativa; identical to SEQ ID NO: 8809

SEQ ID NO: 10987 - DNA, 528 bp, Oryza sativa
  CDS (1)..(528)
atggagttgtcggtggtcggcggcgagccgttgctggcggtggcgatgcagcagctgctggacctggacctccccgatgagctggagcggcagctcaacccgccgacgcgcgcctacgtgcgcgaccgccgcgccatggccaacacccccatggacgtcaaggagctccgggcctccggcgcgctcgtgctcgccgtcgacatgcccggcgtcgcccccgccgacgtccgggtcgaggtcgaggacggcaacgtgctcgccatcagcggcgagcgcaggcgccccgccggcgacggcgacgacggcggcgagggggtgaagtacctgaggatggagcggcggatgggcaagttcatgaggaggttcccgctgccggagagcgccgacctcgacggcgtccgcgccgagtacaaggacggggtgctcaccgtcaccgtcgacaagaagccgccaccggagcccaagaagccgcgcgtcgtcgaggtcaaggtcgccggcgccggcgagcccaagggcaagggcaagtag

SEQ ID NO: 10988 - protein, 175 aa, Oryza sativa
MELSVVGGEPLLAVAMQQLLDLDLPDELERQLNPPTRAYVRDRRAMANTPMDVKELRASGALVLAVDMPGVAPADVRVEVEDGNVLAISGERRRPAGDGDDGGEGVKYLRMERRMGKFMRRFPLPESADLDGVRAEYKDGVLTVTVDKKPPPEPKKPRVVEVKVAGAGEPKGKGK

SEQ ID NO: 10989 - DNA, 519 bp, Oryza sativa
  CDS (1)..(519)
atgacggagctgttcgacaccgccgtgaccagcctcctccacctgccggaggtgctcgaccgcctcggcgccgccgccggggaccgccgctcggcgggcgaccacgcgcaccacgccgcgcatggacacggccagcaccgcatcagtggaatcggtggtggcgcgccagtggacatcatggagacccccggcgagtacgcgttcgtgctcgacgtccctggcctctccaagtccgacatccaggtgacgctggaggaggacagggtgctggtgatgaagagcagcaatggcgccgggaacgggaagcggaagcgggaggaggaggaaggggagtgcaagtacatccgcctcgagcgccgcgcgtcgccgagggcgttcgcgcgcaagttccgcctcccggaggacgcggacaccggcggcatctcggcgcgatgcgagaacggggtgctcacggtcaccgtcaagaagcggccgccgccggagaagaagaccaagtccgtccaggtcaccatcgcctga

SEQ ID NO: 10990 - protein, 172 aa, Oryza sativa
MTELFDTAVTSLLHLPEVLDRLGAAAGDRRSAGDHAHHAAHGHGQHRISGIGGGAPVDIMETPGEYAFVLDVPGLSKSDIQVTLEEDRVLVMKSSNGAGNGKRKREEEEGECKYIRLERRASPRAFARKFRLPEDADTGGISARCENGVLTVTVKKRPPPEKKTKSVQVTIA

SEQ ID NO: 10991 - DNA, 477 bp, Glycine max
  CDS (1)..(477)
atggctatcaggttgatggatttggactctccattcttcaacactctgcacagaatcatggatctgacggaggacgccgagaagaacttgaacgctccgactcggacatacgtgcgcgacgccaaggcgatggctgcgactcctgctgacgtgaaggagtaccctaactcgtacgttttcgtgatcgacatgcctggcctgaaatctggggacattaaagtgcaggtggaggacgacaacgtgcttctgataagcggcgagaggaagagggaggaggaaaaagagaaagaagggggaaagtatttgaggatggagagaaggcttggcaagttgatgaggaagtttactctccctgagaatgccaacaccgatgctatctctgctgtctgcctagacggtgtgctcactgtcactgtcaataagctgcctcctcctcagcccaagaagcccaagactatagaggtcaacatagcctga

SEQ ID NO: 10992 - protein, 158 aa, Glycine max
MAIRLMDLDSPFFNTLHRIMDLTEDAEKNLNAPTRTYVRDAKAMAATPADVKEYPNSYVFVIDMPGLKSGDIKVQVEDDNVLLISGERKREEEKEKEGGKYLRMERRLGKLMRKFTLPENANTDAISAVCLDGVLTVTVNKLPPPQPKKPKTIEVNIA

SEQ ID NO: 10993 - DNA, 477 bp, Glycine max
  CDS (1)..(477)
atggatatgaggttgatggatttggactctccattcttcaacactctgcacagaatcatggatctgacggaggacgccgagaagaacttgaacgctccgactcggacatacgtgcgcgacgccaaggcaatggctgcgactcctgctgacgtgaaggagtaccctaactcgtacgttttcgtgatcgacatgcctggcctcaaatctggggacattaaagtgcaggtggaggacgacaacgtgcttctgataagcggcgagaggaagagggaggaggaaaaagagaaagaagggggaaagtatttgaggatggagagaaggcttggcaagttgatgaggaagtttactctccctgagaatgccaacaccgatgctatctctgctgtctgccaagacggtgtgctcactgttactgtcaataaactgcctcctcctcagcccaagaagcccaggactatagaggtcaagatagcctga

SEQ ID NO: 10994 - protein, 158 aa, Glycine max
MDMRLMDLDSPFFNTLHRIMDLTEDAEKNLNAPTRTYVRDAKAMAATPADVKEYPNSYVFVIDMPGLKSGDIKVQVEDDNVLLISGERKREEEKEKEGGKYLRMERRLGKLMRKFTLPENANTDAISAVCQDGVLTVTVNKLPPPQPKKPRTIEVKIA

SEQ ID NO: 10995 - DNA, 480 bp, Glycine max; identical to SEQ ID NO: 8778
  CDS (1)..(480)

SEQ ID NO: 10996 - protein, 159 aa, Glycine max; identical to SEQ ID NO: 8779

SEQ ID NO: 10997 - DNA, 480 bp, Glycine max
  CDS (1)..(480)
atggatttcagagtgatgggtttggagcctccgttgttccacacgctgcaacacatgatggacatgtcagaggacgctgcaggggaaaacaagacgtacagtgctccgacacggtcatacgttcgagacgccaaagcaatggctgcaacacctgcggatgtgaaggaatatcccaactcctacgtgttcgagatcgacatgccgggtttgaaatctggggacataaaggttcaggttgaagacgacaacgtgcttctgattagtggggagagaaagagggatgaagaaaaagaaggggtgaagtatctgagaatggagagaagggttgggaagttcatgcgcaagtttgtgttacctgagaatgccaacactgatgcaatctctgcagtgtgtcaagatggggtgcttagtgtcactgtgcagaaattgcctcctcctgagcccaagaaacccagaaccattgaggttaaggttttctga

SEQ ID NO: 10998 - protein, 159 aa, Glycine max
MDFRVMGLEPPLFHTLQHMMDMSEDAAGENKTYSAPTRSYVRDAKAMAATPADVKEYPNSYVFEIDMPGLKSGDIKVQVEDDNVLLISGERKRDEEKEGVKYLRMERRVGKFMRKFVLPENANTDAISAVCQDGVLSVTVQKLPPPEPKKPRTIEVKVF

SEQ ID NO: 10999 - DNA, 477 bp, Glycine max
  CDS (1)..(477)
atggatatcaggttgatggatttggactctccattgttcaacactctgcaccgaatcatggatctgacagaggacgcagagaagaacttgaacgctccgacgcggacatacgtgcgcgacgcgaaggcaatggctgcgactcctgcggacgtgaaggagtaccctaactactacgtgttcgtgatcgacatgccaggcctgaaatccggggacattaaggtgcaggtggaggatgataacgtgcttctgataagcggcgagaggaagagggaggaggataaagagaaagaaggggctaagtatttgaggatggagagaagggttggcaagttcatgaggaagttcacgcttcccgagaatgccaacaccgatgctatctctgccgtctgccaagacggtgtgctcactgtcactgtcaacaagctgcctcctcctcagcccaaaaagcccaagaccatagaggttaagatcgcctga

SEQ ID NO: 11000 - protein, 158 aa, Glycine max
MDIRLMDLDSPLFNTLHRIMDLTEDAEKNLNAPTRTYVRDAKAMAATPADVKEYPNYYVFVIDMPGLKSGDIKVQVEDDNVLLISGERKREEDKEKEGAKYLRMERRVGKFMRKFTLPENANTDAISAVCQDGVLTVTVNKLPPPQPKKPKTIEVKIA

SEQ ID NO: 11001 - DNA, 489 bp, Glycine max
  CDS (1)..(489)
atgagaagagttggtggtgatgttttgaacgtggatttggctgctgcagtgaacaacctcttcaatcttcctgaaactatggagaagttcatgtttccttcttctcgtgctcatgatcaccaccatgaaaccagaggggtctctagcatcattccagtggacattttggacactcccaaggagtatacattctttatggatgttcctggtctctccaagtctgaaattcaggtgacggttgaagatgagaacacacttgttataagaagcaatgggaagaggaagcgtcaagatggagaggatgaagggtgcaagtatcttaggttggagaggagagggcctcagaatttgcagaggaagtttcgtttgcctgagaatgctaatgtgtcagccattacagctaaatgcgaaaatggggttctcactgtggttgttgagaagcatcctcctccccaaaaatcaaaaactgttgaagttgccattgcttga

SEQ ID NO: 11002 - protein, 162 aa, Glycine max
MRRVGGDVLNVDLAAAVNNLFNLPETMEKFMFPSSRAHDHHHETRGVSSIIPVDILDTPKEYTFFMDVPGLSKSEIQVTVEDENTLVIRSNGKRKRQDGEDEGCKYLRLERRGPQNLQRKFRLPENANVSAITAKCENGVLTVVVEKHPPPQKSKTVEVAIA

SEQ ID NO: 11003 - DNA, 842 bp, Zea mays
  CDS (112)..(597)
gaggcttgtgacggacaccagaatacacaacagcagctcaaaaaacccaacacacctcaacaagcagagcaaagatcccgggattcgccggcgcggtagcgagagcgagagatggacgggaggatgttcggtctcgagacccccctgatggtggcgctgcagcactttctggacgtgcccgacggcgacgccggcgcgggcggcgacaaggcgggcggcggcgggccgacgcgcacctacgtccgcgacgcgcgcgccatggcggccaccccggccgacgtcaaggagctcccgggcgcgtacgcgttcgtggtggacatgccggggctgggcacgggcgacatcaaggtgcaggtggaggacgagcgggtgctggtgatcagcggcgagcggcgccgggaggagcgcgaggacgccaagtacctgcgcatggagcggcggatgggcaagttcatgcgcaagttcgtgctgccggacaacgccgacatggacaagatctcggcggtgtgcagggacggcgtgctcaccgtgaccgtcgagaagctgcccccgcccgagcccaagaagcccaagaccatcgaggtcaaggtcgcctgaggtgggactaggtcgaccgatcgtggctctgaagatgtgggagcagtgccagcgagttgtgaggacctctacctgtgtgggatgtggcgaggaataatcgtagtctgtagtgggggtgcttctggtgtgcgtgtttgcttccttcggtcgcggtgtctgtctaccaattcctatctgatgtatgggcttcggtttcgtatgaaccatgccggatgctttcagtatgttcatctaaaaaaaaaaaa

SEQ ID NO: 11004 - protein, 161 aa, Zea mays
MDGRMFGLETPLMVALQHFLDVPDGDAGAGGDKAGGGGPTRTYVRDARAMAATPADVKELPGAYAFVVDMPGLGTGDIKVQVEDERVLVISGERRREEREDAKYLRMERRMGKFMRKFVLPDNADMDKISAVCRDGVLTVTVEKLPPPEPKKPKTIEVKVA

SEQ ID NO: 11005 - DNA, 869 bp, Triticum aestivum
  CDS (105)..(644)
aatccatcgagctcccgaagtcgagtcccatcccagttcccacttctcacccacccacacgcagcgaggaaccagtcgaggaggaggaaggagaaggaggagccatggccgagctgctgtttgcccccgccgtggccggcctcgtccacctgccggaggtgctcgagcgcctcgccgccgcggacgccgaccaccgcgaccacgcccaccaccacgccgcgcacgggcacgggcacgggcacggccacccacgcgcgcagattgggggcgtgggcggcggcgcgcccgtggacatcgtggagacccccggcgagtacgctttcctgctcgacgtccccggcctctccaagtccgacatccaggtgactctggaggaggacaacgtgctggtgatgaagagcgccagcaacggcggcggggccaacgggaagcggaagcgggaggaggaggaggcggactgccgctacatccggctggagcgccgcgcgtcgccgcggtcgttcgcgcgcaagttccggctgcccgaggacgcggacgccggcgccgtggccgcgcgctgcgagaacggcgtgctcaccgtcaccgtcaagaagcggccgccgcccgagaagaagaccaagtccgtccaggtcgccatcgcctgaccgttcgagccttccttcagtcacgcgaaccttcggtacctcgtcggcgtttgtcgtcagtgatcgttctagcagtagattagtgtggcgagtctggtagatttgggtcttctcaagtcatgtggtctcatgctctgttcgtggtctggctggagattagttgtggtcatcttttgtgaatcttgctgttaatggaactatggagcacgaattgttggctgtcgg

SEQ ID NO: 11006 - protein, 179 aa, Triticum aestivum
MAELLFAPAVAGLVHLPEVLERLAAADADHRDHAHHHAAHGHGHGHGHPRAQIGGVGGGAPVDIVETPGEYAFLLDVPGLSKSDIQVTLEEDNVLVMKSASNGGGANGKRKREEEEADCRYIRLERRASPRSFARKFRLPEDADAGAVAARCENGVLTVTVKKRPPPEKKTKSVQVAIA

SEQ ID NO: 11007 - DNA, 468 bp, Arabidopsis thaliana
  CDS (1)..(468)
atgagtgctgttgcgattaaccacttttttggcttaccggagacgatcgagaagctaattctcccgatttctcgttccggcgaaagtaataacgagagtcgtggaagaggaagtagcaataatatcccaatagacattttggaatctcccaaaaaatacatattttatctcgatatccccggaatttcaaaatcagatatccaggttacagtggaggaagagaggactttagtgataaagagtaatgggaagaggaagagagatgatgatgagagtgaagaagggtctaagtatattagactcgagaggagacttgctcagaatttggttaagaagttccggttaccagaagatgctgatatggcttctgtaacggctaaatatcaagaaggtattttgacagttgttatcaagaagctaccgccacagccgccgaaacctaagactgttcaaatcgctgtttcttga

SEQ ID NO: 11008 - protein, 155 aa, Arabidopsis thaliana
MSAVAINHFFGLPETIEKLILPISRSGESNNESRGRGSSNNIPIDILESPKKYIFYLDIPGISKSDIQVTVEEERTLVIKSNGKRKRDDDESEEGSKYIRLERRLAQNLVKKFRLPEDADMASVTAKYQEGILTVVIKKLPPQPPKPKTVQIAVS

SEQ ID NO: 11009 - DNA, 837 bp, Zea mays
  CDS (111)..(602)
gcacgagaccattacctagaacatcctaatcgaaaaacaccaagaatcacatcacacagcgaaccgagaaaccaacacaacaagcaaagcagcgatccgacatccgagagatggacgcggtgatgttcgggctggagactcccctgatggcggcgctgcagcacctgctggacgtgcccgacggcgacgccggcgcgggcgacaacaagacgggcggcggcggcggcgccacgcgcacctatgtccgcgacgcgcgcgccatggcggccaccccggccgacgtgaaggagctgcccggctcgtacgcgttcgtggtggacatgccggggctgggcacgggcgacatccgggtgcaggtggaggacgagcgggtgctggtggtcagcggcgagcggcgccgggaggagcgcgaggacgacgccaagtacccacgcgtccggcggcggatgggcaagttcatgcgcaagttcgtgctgccggacaacgccgacgtcgacaaggtcgccgccgtgtgcagggacggcgtgctcacggtgaccgtcgagaagctgcccccgccggagcccaagaagcccaagaccatcgaggtcaaggtcgcctgagggagcaagcagtagctgtgcttctgaaactttgtgtgtttgtgtttgcttccttctttggtatcaccaatcatcctatctgatatatcgactggggtttttgctgtctccatagaataaatctctacatgtctcttgtaaccttttctggtgaagatcgtgtcgcgatgaatctataagttaccgtttgttttctttcgaaaaacaaaatagatgataggggaggggggggggg

SEQ ID NO: 11010 - protein, 163 aa, Zea mays
MDAVMFGLETPLMAALQHLLDVPDGDAGAGDNKTGGGGGATRTYVRDARAMAATPADVKELPGSYAFVVDMPGLGTGDIRVQVEDERVLVVSGERRREEREDDAKYPRVRRRMGKFMRKFVLPDNADVDKVAAVCRDGVLTVTVEKLPPPEPKKPKTIEVKVA

SEQ ID NO: 11011 - DNA, 483 bp, Helianthus annuus
  CDS (1)..(483)
atggacatcgatagtttgatggggttcgatccgttactccgcaacctccactacatcctcgaagccactgacgacaacaccactggaaacaagtccaacaacagcggtccgtctcgcgcttacgtccgcgacgcaagagcaatggcggcaacccctgctgacgtcaaggagtgtcctaactcctacgtgtttattgttgatatgccggggctgaagtcaggggatataaaggtgcaggtggaacgcgacaacgttttggtgataagcggaaagaggaaccgagaggaagagaaggaaggagtcaagtatgtgaggatggagaggcggatggggaagttcatgaagaagtttgcattgccagaggatgcgaatacggataagatatcggcgatttgtcaagacggagtgcttacggtgactgtggagaagctgcctccgcctgagcccaagaagccgaagacgattcaggtgcaggtggcttga

SEQ ID NO: 11012 - protein, 160 aa, Helianthus annuus
MDIDSLMGFDPLLRNLHYILEATDDNTTGNKSNNSGPSRAYVRDARAMAATPADVKECPNSYVFIVDMPGLKSGDIKVQVERDNVLVISGKRNREEEKEGVKYVRMERRMGKFMKKFALPEDANTDKISAICQDGVLTVTVEKLPPPEPKKPKTIQVQVA

SEQ ID NO: 11013 - DNA, 486 bp, Zea mays
  CDS (1)..(486)
atggacgggaggatgttcggtctcgagacccccctgatggtggcgctgcagcaccttctggacgtgcccgacggcgacgccggcgcgggcggcgacaaggcgggcggcggcgggcccacgcgcacctacgtcgccgacgcgcgcgccatggcggtcaccccggccgacgtcaaggagctcccgggcgcgtacgcgttcgtggtggacatgccggggctgggcacgggcgacatcaaggtgcaggtggaggacgagcgggtgctggtgatcagcggcgagcggcgccgggaggagcgcgaggacgccaagtacctgcgcatggagcggcggatgggcaagttcatgcgcaagttcgtgctgccggacaacgccgacatggacaagatctcggcggtgtgcagggacggcgtgctcaccgtgaccgtcgagaagctgcccccgcccgagcccaagaagcccaagaccatcgaggtcaaggtcgcctga

SEQ ID NO: 11014 - protein, 161 aa, Zea mays
MDGRMFGLETPLMVALQHLLDVPDGDAGAGGDKAGGGGPTRTYVADARAMAVTPADVKELPGAYAFVVDMPGLGTGDIKVQVEDERVLVISGERRREEREDAKYLRMERRMGKFMRKFVLPDNADMDKISAVCRDGVLTVTVEKLPPPEPKKPKTIEVKVA

SEQ ID NO: 11015 - DNA, 465 bp, Zea mays
  CDS (1)..(465)
atgtcgctggtgaggcgcagcagcgtgttcgacccattctctgtggacctcttcgaccccttcgacagcatgttccgctccatcgtgccgccgtcgttgtcgtcgtcggcggcctccgagaccgccgccttcgccagcgcccgcatcgactggaaggagacgcccgaggcgcacgtgttcaaggccgacctccccggcgtgaagaaggaggaggtcaaggtggaggtggaggacggcaacgtgctgctcatcagcgggcagcgcagcagggagaaggaggacaagggcgacaagtggcaccgcgtggagcgcagcagcggccagttcgtgcggcgcttccgcctgccggagaacgccaagacggaggaggtgagggccgcgctggagaacggcgtgctcacggtcaccgtgcccaaggccgaggtcaagaagcccgaggttaagagcatccagatctccgtctga

SEQ ID NO: 11016 - protein, 154 aa, Zea mays
MSLVRRSSVFDPFSVDLFDPFDSMFRSIVPPSLSSSAASETAAFASARIDWKETPEAHVFKADLPGVKKEEVKVEVEDGNVLLISGQRSREKEDKGDKWHRVERSSGQFVRRFRLPENAKTEEVRAALENGVLTVTVPKAEVKKPEVKSIQISV

SEQ ID NO: 11017 - DNA, 495 bp, Zea mays
  CDS (1)..(495)
atggacgcggtgatgttcgggctggagactccccttatggcggcgctgcagcacctgctggacgtgcccgacggcgacgccggcgcgggcggcgacagcgacaacaagacgggcggcggcgccacgcgcacctacgtccgcgacgcgcgcgccatggcggccaccccggccgacgtgaaggagctgcccggcgcgtacgcgttcgtggtggacatgccggggctgggcacgggcgacatccgggtgcaggtggaggacgagcgggtgctggtggtcagcggcgagcggcgccgggaggagcgcgaggacgacgccaagtacctgcgcatggagcggcggatgggcaagttcatgcgcaagttcgtgctgccggacaacgccgacgtcgacaaggtcgccgccgtgtgcagggacggcgtgctcacggtgaccgtcgagaagctgcccccgccggagcccaagaagcccaagaccatcgaggtcaaggtcgcctga

SEQ ID NO: 11018 - protein, 164 aa, Zea mays
MDAVMFGLETPLMAALQHLLDVPDGDAGAGGDSDNKTGGGATRTYVRDARAMAATPADVKELPGAYAFVVDMPGLGTGDIRVQVEDERVLVVSGERRREEREDDAKYLRMERRMGKFMRKFVLPDNADVDKVAAVCRDGVLTVTVEKLPPPEPKKPKTIEVKVA

SEQ ID NO: 11019 - DNA, 468 bp, Zea mays; identical to SEQ ID NO: 8444
  CDS (1)..(468)

SEQ ID NO: 11020 - protein, 155 aa, Zea mays; identical to SEQ ID NO: 8445

SEQ ID NO: 11021 - DNA, 465 bp, Zea mays
  CDS (1)..(465)
  misc_feature (406)..(406): m is a or c
atgtcgctggtgaggcgcagcagcgtgttcgacccattctccgtggacctcttcgaccccttcgacagcatgttccgctccatcgtgccgtcgtcgccgtcgtcggcggcggcctccgagactgccgccttcgccagcgcccgcatcgactggaaggagacgcccgaggcgcacgtgttcaaggccgacctccccggcgtgaagaaggaggaggtgaaggtggaggtggaggacggcaacgtgctgctcatcagcgggcagcgcagcagggagaaggaggacaagggcgacaagtggcaccgcgtggagcgcagcagcggccagttcgtgcggcgcttccgcctccccgagaacgccaagaccgaggaggtgagggccgcgctggagaacggcgtgctcacggtcmccgtgcccaaggccgaggtcaagaagcctgaggttaagagcatccagatctccggctga

SEQ ID NO: 11022 - protein, 154 aa, Zea mays
  misc_feature (136)..(136): The Xaa at location 136 stands for Pro, or Thr.
MSLVRRSSVFDPFSVDLFDPFDSMFRSIVPSSPSSAAASETAAFASARIDWKETPEAHVFKADLPGVKKEEVKVEVEDGNVLLISGQRSREKEDKGDKWHRVERSSGQFVRRFRLPENAKTEEVRAALENGVLTVXVPKAEVKKPEVKSIQISG

SEQ ID NO: 11023 - DNA, 468 bp, Arabidopsis thaliana
  CDS (1)..(468)
atggatttaggaaggtttccaataatctcaatcctcgaagacatgcttgaagtccccgaagaccacaacaacgagaagacccgcaacaacccttcacgagtttacatgcgagacgctaaggcaatggctgctacacctgctgacgtcatcgagcaccctaacgcatatgcattcgtcgtggacatgcctggaatcaaaggagatgagatcaaggttcaggtcgagaacgacaatgtgcttgtggtgagtggagagaggcagagagagaacaaagaaaacgaaggtgtgaagtatgtgaggatggagagaagaatgggtaagttcatgaggaagtttcagttgcctgaaaatgcagatttggacaagatctctgctgtttgtcatgacggtgtgttgaaggttactgttcagaaacttcctcctccggaaccaaagaaaccaaagacaattcaagttcaagttgcttga

SEQ ID NO: 11024 - protein, 155 aa, Arabidopsis thaliana
MDLGRFPIISILEDMLEVPEDHNNEKTRNNPSRVYMRDAKAMAATPADVIEHPNAYAFVVDMPGIKGDEIKVQVENDNVLVVSGERQRENKENEGVKYVRMERRMGKFMRKFQLPENADLDKISAVCHDGVLKVTVQKLPPPEPKKPKTIQVQVA

SEQ ID NO: 11025 - DNA, 471 bp, Arabidopsis thaliana
  CDS (1)..(471)
atggatttggagtttggaaggtttccaatattttcaatcctcgaagacatgcttgaagcccctgaagaacaaaccgagaagactcgtaacaacccttcaagagcttacatgcgagacgcaaaggcaatggctgctacaccagctgacgttatcgagcacccggatgcgtacgttttcgccgtggacatgcctggaatcaaaggagatgagattcaggtccagatagagaacgagaacgtgcttgtggtgagtggcaaaagacagagggacaacaaggagaatgaaggtgtgaagtttgtgaggatggagaggaggatggggaagtttatgaggaagtttcagttacctgataatgcagatttggagaagatctctgcggcttgtaatgacggtgtgttgaaagtgactattccgaaacttcctcctcctgagccaaagaaaccaaagactatacaagttcaagtcgcttga

SEQ ID NO: 11026 - protein, 156 aa, Arabidopsis thaliana
MDLEFGRFPIFSILEDMLEAPEEQTEKTRNNPSRAYMRDAKAMAATPADVIEHPDAYVFAVDMPGIKGDEIQVQIENENVLVVSGKRQRDNKENEGVKFVRMERRMGKFMRKFQLPDNADLEKISAACNDGVLKVTIPKLPPPEPKKPKTIQVQVA

SEQ ID NO: 11027 - DNA, 432 bp, Schizosaccharomyces pombe
  CDS (1)..(432)
atgtctttgcaaccttttttcggctttccccctactgtcaacgacttgttctctgactttgttagttactcccctcgtttgaacaaccaaattcctggggagttgtctccttcgattgatgtgcatgagggtaaagacactgttagcgttgatgtagaactccctggtgttaagaaagaggacgttcaagtccattatgatagcggaaaacttactatttctggcgaagtcgtcaatgagagaaagaatgaaagcaccgagggtaaccaacgctggtcagagcgtcgctttggctcattctctcgtaccattactattccagccaagattgatgcagatcgcattgaggccaacttcagtaatggcctattgactgtcaccttgcccaaggtcgagaagtcccaaactaagaaacaaattgctattaagtaa

SEQ ID NO: 11028 - protein, 143 aa, Schizosaccharomyces pombe
MSLQPFFGFPPTVNDLFSDFVSYSPRLNNQIPGELSPSIDVHEGKDTVSVDVELPGVKKEDVQVHYDSGKLTISGEVVNERKNESTEGNQRWSERRFGSFSRTITIPAKIDADRIEANFSNGLLTVTLPKVEKSQTKKQIAIK

SEQ ID NO: 11029 - DNA, 432 bp, Wolinella succinogenes DSM 1740; identical to SEQ ID NO: 8458
  CDS (1)..(432): transl_table=11

SEQ ID NO: 11030 - protein, 143 aa, Wolinella succinogenes DSM 1740; identical to SEQ ID NO: 8459

SEQ ID NO: 11031 - DNA, 603 bp, Ashbya gossypii ATCC 10895
  CDS (1)..(603)
atgcgcgaagagcggaaagagctttctgttcgatgtaataaccacccgaacagtactgtgatcaaaccgaacactgatattagagaaaaatgtctccactcacctttttttggcttctttgacgccatcagcaatgaggtggccaactacaatagatcgctcagccgtgtgcctggttcttccgctgttgaaaccaagcacggcaagaaggacaccacggactggttcacgaatgccaggatcattccgcccgtggatgtcttggaacgggaaaaagattatgaggtgcacttgagcgttccaggcatcgtggatcaggacaaaatcaacatcgagttccacagcgaccgcggagagctagttatttctggcgaggtaccgacgagcgaggcagaggagaacaaaaacaggtggcgcgtgcgggaacgtgccactggcagcttcagacgcgtgatcggcttgccggacaagcctggcgtggattcagagcgcatcacagcagactacagacatggtattctcactctgcgcgtacccaaattagagcctcgcgagagcctgacagtgtgcagaatccagattgggcgcggcagctctaagtga

SEQ ID NO: 11032 - protein, 200 aa, Ashbya gossypii ATCC 10895
MREERKELSVRCNNHPNSTVIKPNTDIREKCLHSPFFGFFDAISNEVANYNRSLSRVPGSSAVETKHGKKDTTDWFTNARIIPPVDVLEREKDYEVHLSVPGIVDQDKINIEFHSDRGELVISGEVPTSEAEENKNRWRVRERATGSFRRVIGLPDKPGVDSERITADYRHGILTLRVPKLEPRESLTVCRIQIGRGSSK

SEQ ID NO: 11033 - DNA, 468 bp, Physcomitrella patens subsp. patens
  CDS (1)..(468)
atggctctctcgctgtttggcagccgtggcaacggtgtgttcgatcccttcgagttcggcagtgtgtgggatcctttctcggcgccggagagcgggctgtcccggaaattggctggcgacgcgcacgctggggcgaatacgcggatcgattggcgtgaaacgcctgaggcgcacatctttaaagcagacctgcctgggctgaggaaggaagaggtgaaaatacaagtggtggaggggaagtcgctggagattagcggcgagaggaaaagagaggagttgcagaaaggcgatacatggcatcgggtggaacgcgcgcaaggcagttttctgcgacggttccggcttccggagggtgcaaacgtggacgaagtgaaggcgcaggtacaggacggggttttgacagtgacagtgacagttcccaagcttcagaaaccgaagccacaggtgcgccagatagagatcgcatga

SEQ ID NO: 11034 - protein, 155 aa, Physcomitrella patens subsp. patens
MALSLFGSRGNGVFDPFEFGSVWDPFSAPESGLSRKLAGDAHAGANTRIDWRETPEAHIFKADLPGLRKEEVKIQVVEGKSLEISGERKREELQKGDTWHRVERAQGSFLRRFRLPEGANVDEVKAQVQDGVLTVTVTVPKLQKPKPQVRQIEIA

SEQ ID NO: 11035 - DNA, 462 bp, Physcomitrella patens subsp. patens; identical to SEQ ID NO: 8462
  CDS (1)..(462)

SEQ ID NO: 11036 - protein, 153 aa, Physcomitrella patens subsp. patens; identical to SEQ ID NO: 8463

SEQ ID NO: 11037 - DNA, 462 bp, Physcomitrella patens subsp. patens; identical to SEQ ID NO: 8464
  CDS (1)..(462)

SEQ ID NO: 11038 - protein, 153 aa, Physcomitrella patens subsp. patens; identical to SEQ ID NO: 8465

SEQ ID NO: 11039 - DNA, 486 bp, Physcomitrella patens subsp. patens
  CDS (1)..(486)
atggagtttgttgtgttcgacacggatccgtttcttacgtcgttgcaccagctggtgcatgagcctgagagcgacttggaaagaaagattaagcgcaagcgacgaagtcagcacgatgagccgaggcatgtgactatagctacacccgtcgatgtgaaggagaaaaaagacgcgtatctcttcattgcggatgttcctggccttcaaaagactgacattgaggtgcaaatcgagaatgaaaatatcctaaccatgcggggtaagagaaaactcgacgagatagtcaacgacaaagaggaggatacgaagttcgtacgcatggagcggagtcctgtgaaactgtttcggaaattcactctaccgtcagacgcaaatgctgatgccattactgccaactgtgtagatggtgtgttgatggtcactgtgcccaaaattccgcctcctgaaccagcgaaaccaaagacagttaaaattgcagttgattga

SEQ ID NO: 11040 - protein, 161 aa, Physcomitrella patens subsp. patens
MEFVVFDTDPFLTSLHQLVHEPESDLERKIKRKRRSQHDEPRHVTIATPVDVKEKKDAYLFIADVPGLQKTDIEVQIENENILTMRGKRKLDEIVNDKEEDTKFVRMERSPVKLFRKFTLPSDANADAITANCVDGVLMVTVPKIPPPEPAKPKTVKIAVD

SEQ ID NO: 11041 - DNA, 444 bp, Physcomitrella patens subsp. patens
  CDS (1)..(444)
atggatttccctctgttccagatcctgagcttccctgatgagcttgagaagtcgctgaatccacagtcccagaagtatgtgcgcgacacgaaggccatggtcagcacagccgtggacgtgaaggagcttcccgatgcctacgtctttgtagctgacatgccaggactaaaatcagccgacgtgaaggtacaactggagaatgacaatgtgctcgtgattggcggcacacgaaaacgtgaggagccagatcccaaagttaaatatattcgcatggagcgcaattctggcacattcatgcgcaagtttacgcttcctcagaactccaatttggataagattgcagcctcttgtgtcgatggtatactcacagttactgttcccaagattcctcctccagaacctgcgaagccaagaacaatcgaggtgactatggggggaaagtag

SEQ ID NO: 11042 - protein, 147 aa, Physcomitrella patens subsp. patens
MDFPLFQILSFPDELEKSLNPQSQKYVRDTKAMVSTAVDVKELPDAYVFVADMPGLKSADVKVQLENDNVLVIGGTRKREEPDPKVKYIRMERNSGTFMRKFTLPQNSNLDKIAASCVDGILTVTVPKIPPPEPAKPRTIEVTMGGK

SEQ ID NO: 11043 - DNA, 510 bp, Physcomitrella patens subsp. patens
  CDS (1)..(510)
atggcggtggttccgaacaaacatgatcatcacgatcatcacaagcatcacaccaagggccaagcactgaatgtgttcgacccgttttcgtgggacccatttgaggatttcggcaacttcggtgctctgtggaaccacgaggcggggaaggcgttccaaaatgacatgcgtgcggtgggaaatacccgagtcgattggaaggagactgctgatgctcacgtctttaaagccgatcttccaggtttaacgaaggaggaagtgcaggtgacggtggaagataacaatacgttgaaaatcagtggcaagagggtgaaagagggagtggacaagaacgataaatggcacatggtggagagattgcacagctcattcctgcgccagttccgcatccccgagaacacaaacattgatgctgtcacggcaaaagtcgctcatggcgtgcttactgtcaccctcccaaagaaaactagttccaaaaactccacccctcgccacatagatgtcgcttaa

SEQ ID NO: 11044 - protein, 169 aa, Physcomitrella patens subsp. patens
MAVVPNKHDHHDHHKHHTKGQALNVFDPFSWDPFEDFGNFGALWNHEAGKAFQNDMRAVGNTRVDWKETADAHVFKADLPGLTKEEVQVTVEDNNTLKISGKRVKEGVDKNDKWHMVERLHSSFLRQFRIPENTNIDAVTAKVAHGVLTVTLPKKTSSKNSTPRHIDVA

SEQ ID NO: 11045 - DNA, 465 bp, Physcomitrella patens subsp. patens
  CDS (1)..(465)
atggcgctttcgttgttcggtggtcgtggcaacagcgtgtttgatcccttcgatttcggcagcgcatgggatccttttcagtctctgctaggatctgcgccgtctttgcaatttgcacgagatgcacacagcatggccagcactcagattgattggcgtgagacaccagaggcgcatatcttcaaggccgatctgcccgggctgaggaaagaggaggtgcacgtgcaggttctggatgggaaggtattggagatcagtggggagaggaagaaggaggaggtgcagaggggtgatacctggcatcgtgtagaacgcagcagcggcagtttcttgcggcgtttccggctcccggataacgcgaatgtggacgtggtgaacgcgcaggtgcaggatggagtgctgacggtgacagtaccaaaggttgagaagccgaagccacaagtgcgacagattcaaatcgcttga

SEQ ID NO: 11046 - protein, 154 aa, Physcomitrella patens subsp. patens
MALSLFGGRGNSVFDPFDFGSAWDPFQSLLGSAPSLQFARDAHSMASTQIDWRETPEAHIFKADLPGLRKEEVHVQVLDGKVLEISGERKKEEVQRGDTWHRVERSSGSFLRRFRLPDNANVDVVNAQVQDGVLTVTVPKVEKPKPQVRQIQIA

SEQ ID NO: 11047 - DNA, 471 bp, Physcomitrella patens subsp. patens; identical to SEQ ID NO: 8466
  CDS (1)..(471)

SEQ ID NO: 11048 - protein, 156 aa, Physcomitrella patens subsp. patens; identical to SEQ ID NO: 8467

SEQ ID NO: 11049 - DNA, 588 bp, Physcomitrella patens subsp. patens
  CDS (1)..(588)
atggcactctcatcattcttcaaccgccggaatgacttgtggagcatgcccgacccaatggatatcattgtgactatcttcgacgattctcccgccaggtcgattgcaagggatgcccatgccatggcgagaaccaatgtggattggaaggagaccccgacggagcacgtgttcaaggctgatttgcctgggttgaagaaggaggaggtcgtggtgcaggtcgaggaccatagaaccttgagcattagcgggcagcgcaagaaggaggaagttcacaagacagatacttggcatcgcgtggagcgtagcagcgggaacttcatgaggaagttccggttgcctgagaatacaaatttggatcacatcacggctgaagtggagaatggagtgctgacgattgttgttcccaaagtggagaagaagaaacctcaaacgcgcagcattgagattggtggtcacgatgagcaatcggagcaacaggcagtaactcatcatgatgaaaaggccccctctggagttgctgtaccgatggagaccaccgatgctaccccagattctaaaagcacctcatcaactgaagagaaatga

SEQ ID NO: 11050 - protein, 195 aa, Physcomitrella patens subsp. patens
MALSSFFNRRNDLWSMPDPMDIIVTIFDDSPARSIARDAHAMARTNVDWKETPTEHVFKADLPGLKKEEVVVQVEDHRTLSISGQRKKEEVHKTDTWHRVERSSGNFMRKFRLPENTNLDHITAEVENGVLTIVVPKVEKKKPQTRSIEIGGHDEQSEQQAVTHHDEKAPSGVAVPMETTDATPDSKSTSSTEEK

SEQ ID NO: 11051 - DNA, 522 bp, Physcomitrella patens subsp. patens
  CDS (1)..(522)
atggcgctctcatcggtcttcggacgtggccgtggcggcttttgggacatgcccgacccacaggacatgatgatgaccatgttcgagaacgcccctgcgcattcgtttgctcgagacgcgcatgcgatcgccagcaccaatgtggactggaaggagacgcccactgaacacgtctttaaggccgatctaccagggctgaggaaggaggaagtcaaggtagagatcgaggatgggagaacgctgagtatcagcggaaagcgccagaaggaagaggtgcagacaacagatacctggcaccgagtggagcgcagcagtggccagttcatgcgcaagtttaggctcccggagaattcgaacgtggatcatgtcaaggcgaatgtggagaacggggtgctgacagtggtggtgccgaaagcggagacggagcagcagaaggttcgcagtattgaaatcggtgggcatagtgacaaatcggagcaggctgaggacatccatgtcggtggttccgttgctaagcagtaa

SEQ ID NO: 11052 - protein, 173 aa, Physcomitrella patens subsp. patens
MALSSVFGRGRGGFWDMPDPQDMMMTMFENAPAHSFARDAHAIASTNVDWKETPTEHVFKADLPGLRKEEVKVEIEDGRTLSISGKRQKEEVQTTDTWHRVERSSGQFMRKFRLPENSNVDHVKANVENGVLTVVVPKAETEQQKVRSIEIGGHSDKSEQAEDIHVGGSVAKQ

SEQ ID NO: 11053 - DNA, 465 bp, Physcomitrella patens subsp. patens
  CDS (1)..(465)
atggcgctttcgttgctcggtggtcgtggcaacagcatttttgatcctttcgatttcggcagcgcgtgggatccttttcagtctctgctgggatctgcaccgtctttgcagtttgcgcgagatgcacacagtatggccagcactcagattgattggtgtgagaccccagaggcgcatatcttcaaggccgatttgcctgggctgaggaaagaggaggtgcacgtgcaggttttggatgggaaggtattggagatcagtggagagaagaagaaggaggaggtgcagaagggcgatacctggcatcgtgtagaacgcagtagcggcagtttcttgcggcgtttccggctcccggagcatgcaaatacggagatggtgaatgcgcaggtgcaggatggagtgctgacggtgacagtaccaaagcttgagaagccaaagccacgagtgcgacagatcgaaatcgcttga

SEQ ID NO: 11054 - protein, 154 aa, Physcomitrella patens subsp. patens
MALSLLGGRGNSIFDPFDFGSAWDPFQSLLGSAPSLQFARDAHSMASTQIDWCETPEAHIFKADLPGLRKEEVHVQVLDGKVLEISGEKKKEEVQKGDTWHRVERSSGSFLRRFRLPEHANTEMVNAQVQDGVLTVTVPKLEKPKPRVRQIEIA

SEQ ID NO: 11055 - DNA, 483 bp, Vitis vinifera
  CDS (1)..(483)
atgagcccagtggcagatctggatgtgttgaatggggacttggccgctactgtgagccagctcctcaatttcccagaagccattgataaattcgcatttccttcaagatcacaccacacccatgaacacaagggcctctccaccattcctacagacatcatggacactcccaaagagtaccttttctacatggacgtccctggactctgcaaatctgatatccaggtgactgttgaagatgacaatactctggtaatcagaagccatgggaagaggaagagagaggatggggaggaggaagggtgcaaatacgtaaggcttgaaaggaaggctccccagaagctgatgaggaagttccggctgccggaaaatgccaacacctccgcaatcagtgccaaatgtgagaatggggttttgactgtggtcatagagaagcatcctcctcctccaaagtccaagacagttgaggttaacatagcatag

SEQ ID NO: 11056 - protein, 160 aa, Vitis vinifera
MSPVADLDVLNGDLAATVSQLLNFPEAIDKFAFPSRSHHTHEHKGLSTIPTDIMDTPKEYLFYMDVPGLCKSDIQVTVEDDNTLVIRSHGKRKREDGEEEGCKYVRLERKAPQKLMRKFRLPENANTSAISAKCENGVLTVVIEKHPPPPKSKTVEVNIA

SEQ ID NO: 11057 - DNA, 435 bp, Vitis vinifera
  CDS (1)..(435)
atgcgcgaccagaacaaagaggtaagtgatataatgggacagcggtgtgtcagtgcaccaaccacttgcacctacgtccgggatgccaaggccatggcggcgacgctggctgacgtcaaggagtacccgaattcctacaccttcatcgtcgacatgccggggctgaggtccggcgacatcaaggttcaggtggaggacggcaatgtgctggtgatcagcggagagaggaagcgagaggaggagaaggaaggtgccaagtacgtaagaatggagaggagagtggggaagtttatgaggaagttcgtgttgccggagaatgcgaatactgataagatctctgctgtatgtcaagatggggtgttgaccgtcaccgtcgagaagctgccaccgccggaacccaagaagcccaagaccattgaggtcaaaattgcttga

SEQ ID NO: 11058 - protein, 144 aa, Vitis vinifera
MRDQNKEVSDIMGQRCVSAPTTCTYVRDAKAMAATLADVKEYPNSYTFIVDMPGLRSGDIKVQVEDGNVLVISGERKREEEKEGAKYVRMERRVGKFMRKFVLPENANTDKISAVCQDGVLTVTVEKLPPPEPKKPKTIEVKIA

SEQ ID NO: 11059 - DNA, 471 bp, Vitis vinifera
  CDS (1)..(471)
atggatttgagaatgattggcctcgactctccactcttctcagccctccaacacatgctcgacgccgccgacgactccgacaagtccgtcagcgcccccactcgcacctacgtccgcgatgctaaggccatggctgcgacgccggcggacgtcaaggagtaccccaattcctacgccttcatcatcgacatgccggggctgaagtccggcgacatcaaggtgcaggtggaggacgacaatgtgctggtgatcagcggagagaggaagcgcgaggaggagaaggaaggcgccaagtatgtaaaaatggagagaagggtggggaagtttatgaggaagtttgtgttgcctgagaatgccaatactgacaagatctccgcgatttgtcaggatggggtgttgaccgtcacagtggagaagttgcctccgccggagcccaagaaacccaagaccattgaggtgaagatcgcctaa

SEQ ID NO: 11060 - protein, 156 aa, Vitis vinifera
MDLRMIGLDSPLFSALQHMLDAADDSDKSVSAPTRTYVRDAKAMAATPADVKEYPNSYAFIIDMPGLKSGDIKVQVEDDNVLVISGERKREEEKEGAKYVKMERRVGKFMRKFVLPENANTDKISAICQDGVLTVTVEKLPPPEPKKPKTIEVKIA

SEQ ID NO: 11061 - DNA, 471 bp, Vitis vinifera
  CDS (1)..(471)
atggatttgagggtcatggattttgattctccactattctcaaccctgcaacacatgctcgacgccgttgaagattctgataaatctctcaacgctcccactcgcacctacgtccgcgacgccaaggccatggctgcgacaccggcggacgtcaaggagtacccgaatgcctactccttcatcatcgacatgccggggctgaaatccggcgacatcaaggttcaggtggaggacgacaatgtgctgatgatcagcggcgagaggaagcgtgaggaggagaaagaaggcgccaagtacgtgagaatggagaggagggtggggaagtttatgaggaagtttgtactgccggagaatgcgaatactgataagatctccgcggtttgtcaagatggggtgctgaccgtcactgttgagaagctgccaccgccggagcccaagaagcccaagacaattgaggtcaaaattgcttga

SEQ ID NO: 11062 - protein, 156 aa, Vitis vinifera
MDLRVMDFDSPLFSTLQHMLDAVEDSDKSLNAPTRTYVRDAKAMAATPADVKEYPNAYSFIIDMPGLKSGDIKVQVEDDNVLMISGERKREEEKEGAKYVRMERRVGKFMRKFVLPENANTDKISAVCQDGVLTVTVEKLPPPEPKKPKTIEVKIA

SEQ ID NO: 11063 - DNA, 471 bp, Vitis vinifera
  CDS (1)..(471)
atggattcgaggatgatgggcttcgattctccactcttctctgccctccaacacatgctagacgccaccgatgactccgacaagtccgtcagcgcccccactcgcacctacgtccgcgacgccaaggccatggcggcgacgcctgctgacgtcaaggagtacccgaattcctacaccttcatcgtcgacatgccggggctgaagtccggcgacatcaaggttcaggtggaggacgacaatgtgctggtgatcagcggagagaggaagcgcgaggaagagaaggaaggcgtcaagtacgtgagaatggagaggagggtaggcaaatttatgaggaagtttgcgttgccggagaatgcgaatactgataagatctccgcggtttgtcaagatggagtactgaccgtcaccgttgagaaggtaccaccgccggagcccaagaagcccaagacgattgaggtcaagatcgcttaa

SEQ ID NO: 11064 - protein, 156 aa, Vitis vinifera
MDSRMMGFDSPLFSALQHMLDATDDSDKSVSAPTRTYVRDAKAMAATPADVKEYPNSYTFIVDMPGLKSGDIKVQVEDDNVLVISGERKREEEKEGVKYVRMERRVGKFMRKFALPENANTDKISAVCQDGVLTVTVEKVPPPEPKKPKTIEVKIA

SEQ ID NO: 11065 - DNA, 471 bp, Vitis vinifera
  CDS (1)..(471)
atggatttgagaatgatgggcctcgattctccactcttctcagccctccaacacatgcttgacgccgccgacggctccgacaaatcagtcagctcacctactcgcacctacgtccacgacgccaaggctatggctgctacgctggcggatgtcaaagagtacccgaattcctacgccttcatcatcgacatgccggggctgaagtccggtgacatcaaggttcatgtggggggcgacaatgtgctggtgatcagcggagagaggaagcgggaggaggagagggaaggcgcaaagtacgtgagaatggagaggagggtggggaagtttatgaggaagtttgcgttgccggagaatgcgaatactgataagatctctgcggtttgtcaagatggcgtgttgaccgtcaccgttgagaagctgcccccgccggagcccaagcagcccaagaccattgaggtcaaaattgcttga

SEQ ID NO: 11066 - protein, 156 aa, Vitis vinifera
MDLRMMGLDSPLFSALQHMLDAADGSDKSVSSPTRTYVHDAKAMAATLADVKEYPNSYAFIIDMPGLKSGDIKVHVGGDNVLVISGERKREEEREGAKYVRMERRVGKFMRKFALPENANTDKISAVCQDGVLTVTVEKLPPPEPKQPKTIEVKIA

SEQ ID NO: 11067 - DNA, 471 bp, Vitis vinifera
  CDS (1)..(471)
atggatttgaggatgatgggcttcgattctccactcttctctgccctccaacacaagctcgacgccgccgacgactccgagaagtccgtcagcgcacccactcgcacctacgtccgcgacgccaaggccatggcggctacgccggtggacgtcaaggagtacccgaattccttcaccttcatcgtcgacatgccggggctgaaatccggcgacatcaaggttcaggtggaggacgacaatgtgctggtgatcagcggagagaggaagcgcgaggaagagaaggaagacgccaagcacgtgataatggagaggagggtggggaagtttatgaggaagtttgctttgccggagaatgcggatactgataagatctccgcggtttgtcaagatggagtgttgaccgtcacagttgagaagctcccaccgccggcgcccaagaagcccaggaccattgaggttaagatggcttaa

SEQ ID NO: 11068 - protein, 156 aa, Vitis vinifera
MDLRMMGFDSPLFSALQHKLDAADDSEKSVSAPTRTYVRDAKAMAATPVDVKEYPNSFTFIVDMPGLKSGDIKVQVEDDNVLVISGERKREEEKEDAKHVIMERRVGKFMRKFALPENADTDKISAVCQDGVLTVTVEKLPPPAPKKPRTIEVKMA

SEQ ID NO: 11069 - DNA, 471 bp, Vitis vinifera
  CDS (1)..(471)
atggatttgagggtcatgggttttgattctccactcttctcaaccctccaacacatgcttgacgccggcgacgattccgacaagtctctcaacgctcccacccgcacctacgtccgggacgccaaggccatggcggcgacgccggctgacgtcaaggagtacccgaattcctacaccttcatcgtcgacatgccggggctgaggtccggcgacatcaaggttcaggtggaggacggcaatgtgctggtgatcagcggagagaggaagcgggaggaggagaaggaaggcgccaagtacgtgagaatggagaggagggtggggaagtttatgaggaagtttgtgttgccagagaatgcgaatactgataagatatctgccgtttgtcaagatggggtgttgaccgtcaccgttgagaagctgccaccgccggagcccaagaagcccaagaccgttgaggtcaaaattgcttga

SEQ ID NO: 11070 - protein, 156 aa, Vitis vinifera
MDLRVMGFDSPLFSTLQHMLDAGDDSDKSLNAPTRTYVRDAKAMAATPADVKEYPNSYTFIVDMPGLRSGDIKVQVEDGNVLVISGERKREEEKEGAKYVRMERRVGKFMRKFVLPENANTDKISAVCQDGVLTVTVEKLPPPEPKKPKTVEVKIA

SEQ ID NO: 11071 - DNA, 471 bp, Vitis vinifera
  CDS (1)..(471)
atggattcgaggatgatgggcttcgattctccactcttctctgccctccaacacatgctagacgccaccgatgactccgacaagtccgtcagcgcccccactcgcacctacgtccgcgacgccaaggccatggcggcgacgcctgctgacgtcaaggagtacccgaattcctacaccttcatcgtcgacatgccggggctgaagtccggcgacatcaaggttcaggtggaggacgacaatgtgctggtgatcagcggagagaggaagcgcgaggaagagaaggaaggcgtcaagtacgtgagaatggagaggagggtaggcaagtttatgaggaagtttgcgttgccggagaatgcgaatactgataagatctccgcggtttgtcaagatggagtactgaccgtcaccgttgagaagctaccaccgccggagcccaagaagcccaagaccattgaggtcaagatcgcttaa

SEQ ID NO: 11072 - protein, 156 aa, Vitis vinifera
MDSRMMGFDSPLFSALQHMLDATDDSDKSVSAPTRTYVRDAKAMAATPADVKEYPNSYTFIVDMPGLKSGDIKVQVEDDNVLVISGERKREEEKEGVKYVRMERRVGKFMRKFALPENANTDKISAVCQDGVLTVTVEKLPPPEPKKPKTIEVKIA

SEQ ID NO: 11073 - DNA, 471 bp, Vitis vinifera
  CDS (1)..(471)
atggatttgagggtcatgggttttgattctccactcttctcaaccctccaacacatgctcgacgccggcgacgattccgacaagtctctcaacgctcccacccgcacctacgtccgggacgccaaggccatggcggcgacgccggctgacgtcaaggagtacccgaattcctacaccttcatcgtcgacatgccggggctgaggtccggcgacatcaaggttcaggtggaggacggcaatgtgctggtgatcagcggagagaggaagcgggaggaggagaaggaaggtgccaagtacgtaagaatggagaggagagtggggaagtttatgaggaagttcgtgttgccggagaatgcgaatactgataagatctctgctgtatgtcaagatggggtgttgaccgtcaccgttgagaagctgccaccgccggagcccaagaagcccaagaccattgaggtcaaaattgcttga

SEQ ID NO: 11074 - protein, 156 aa, Vitis vinifera
MDLRVMGFDSPLFSTLQHMLDAGDDSDKSLNAPTRTYVRDAKAMAATPADVKEYPNSYTFIVDMPGLRSGDIKVQVEDGNVLVISGERKREEEKEGAKYVRMERRVGKFMRKFVLPENANTDKISAVCQDGVLTVTVEKLPPPEPKKPKTIEVKIA

SEQ ID NO: 11075 - DNA, 468 bp, Vitis vinifera
  CDS (1)..(468)
atggacttgagaatcatgggcttcgattctccactctcaaccctccaacacatgctcgacggcgtcgatgacgctgataagcccgtcagcgctccaacccgcacctacgttcgcgacgccaaggccatggctgcgacgccggccgacgtcaaggagtaccccaattcctatgtcttcatcatcgacatgccggggctgaagtccggcgacatcaaggtgcaggtggaggacgacaatgtgctggtgatcagcggagaaaggaagcgggaggaggagaaggaaggcgccaagtacgtgagaatggagaggagggtggggaagtttatgaggaagtttgtgttgccggaaaatgcgaatactgataagatctctgcggtttgtcaagatggtgtgttgaccgtcaccgttgagaagctgccaccgccggagccgaagaagcccaagaccattgaggtgaaggttgcttga

SEQ ID NO: 11076 - protein, 155 aa, Vitis vinifera
MDLRIMGFDSPLSTLQHMLDGVDDADKPVSAPTRTYVRDAKAMAATPADVKEYPNSYVFIIDMPGLKSGDIKVQVEDDNVLVISGERKREEEKEGAKYVRMERRVGKFMRKFVLPENANTDKISAVCQDGVLTVTVEKLPPPEPKKPKTIEVKVA

SEQ ID NO: 11077 - DNA, 477 bp, Vitis vinifera
  CDS (1)..(477)
atggattggaggataatgggtttggattcatcaatgctgtctgccctccatgacatgatagacatgtacgaggagccgaagacgcagcaaccatcgagagcctacgtgcgcgaccacaaagccatgaacgcgacgcaagcagacgtgaaagagtacccaaactcgtacgtcttcctggtggacatgccgggtctgaagccggaccagatcaaggtccagatcgaggaacccaacatgctggtggtgtttggagagaggaagcatgagaaggaaaaggacgagaaagagggcgtgaagttcctgagaatggagaggcgacttgggaagttcctcaagacctttatgctgccggagaatgcaaatcccgaagccatatcggctgtttatcaggacggcgtgctcactgtgactgttgagaagaagccactgccagagccgaagaaagccaagagcattgaggtcaaagttggtggataa

SEQ ID NO: 11078 - protein, 158 aa, Vitis vinifera
MDWRIMGLDSSMLSALHDMIDMYEEPKTQQPSRAYVRDHKAMNATQADVKEYPNSYVFLVDMPGLKPDQIKVQIEEPNMLVVFGERKHEKEKDEKEGVKFLRMERRLGKFLKTFMLPENANPEAISAVYQDGVLTVTVEKKPLPEPKKAKSIEVKVGG

SEQ ID NO: 11079 - DNA, 435 bp, Vitis vinifera; identical to SEQ ID NO: 8474
  CDS (1)..(435)

SEQ ID NO: 11080 - protein, 144 aa, Vitis vinifera; identical to SEQ ID NO: 8475

SEQ ID NO: 11081 - DNA, 471 bp, Populus trichocarpa
  CDS (1)..(471)
atgaaccgagtagtagattcagatgtgtttgatgcagtgaaccatttgtttagcttccctgaaaactttgagaagttgatgtttcatccgcggtcgagtgatcatacaaccaatgaaatcaggagcaatagtattcccgtcgacattttggatgctcccaaagattatgttttctacatggatgtccctggcttgtccaagtctgatatccaggttactgttgaagatgagaatactctggtgatcaaaagcggagggaagaggaaacgcgaagatggtgatgaggaaggctgcaagtacatcaggcttgaaaggaaggcacctcagaagctgattaggaagttccggttgcctgaaaatgccaatgtgtctgccatcactgctaaatgcgaaaatggggttttaaccgtggttgttgggaagcatcctccaccacccaaacctaagacagttgaagttaccatctcctga

SEQ ID NO: 11082 - protein, 156 aa, Populus trichocarpa
MNRVVDSDVFDAVNHLFSFPENFEKLMFHPRSSDHTTNEIRSNSIPVDILDAPKDYVFYMDVPGLSKSDIQVTVEDENTLVIKSGGKRKREDGDEEGCKYIRLERKAPQKLIRKFRLPENANVSAITAKCENGVLTVVVGKHPPPPKPKTVEVTIS

SEQ ID NO: 11083 - DNA, 474 bp, Populus trichocarpa
  CDS (1)..(474)
atggatttcagaatcatgggtcttgacgcgccactcttcaacaccctccagcacatgatggatgcaagtgatcatgaggcagacaagtccttcaatgcgccaacacgcacttacgtacgtgatgccaaggcaatggcatcaacaccagctgatgtgaaagagtatccaagctcttatgcgttcgtcattgacatgccgggactgaaatcaggggacatcaaggttcaagtggaggatgacaatgtgctggttatcagtggagagaggaagcgcggagaggagaaagaaggggccaagtatgtgagaatggaaaggagggttggtaagtttatgaggaagtttgtgttgcctgagaatgctaacactgacgctatttctgctgtttgtcaagatggggttctgactgttactgttgagaaattaccacctccagagcctaagaagcctaagactatcgaggtcaagattgcttga

SEQ ID NO: 11084 - protein, 157 aa, Populus trichocarpa
MDFRIMGLDAPLFNTLQHMMDASDHEADKSFNAPTRTYVRDAKAMASTPADVKEYPSSYAFVIDMPGLKSGDIKVQVEDDNVLVISGERKRGEEKEGAKYVRMERRVGKFMRKFVLPENANTDAISAVCQDGVLTVTVEKLPPPEPKKPKTIEVKIA

SEQ ID NO: 11085 - DNA, 525 bp, Sorghum bicolor
  CDS (1)..(525)
atgacggagctgttcgacacggccgtgaccagcctcctccacctgccggaggtgctcgaccgcctcgccgccgcggacggcgaccggcgctcgggtggccaccacgctgcgcaccaccacgggcacgcacgcgtccacgggctcggtggcggcggcggcggcggcgcgccggtggacatcgtagagacccctggcgagtacacgttcgtgctcgacgtgcctggcctctccaagtccgacatccaggtgacgctggaggaggaccgtgtgctggtgatgaagggcggcagcgggaagcggaagcgcgaggaggaggaggaggaaggggagggggaagggtgccggtacatccggctggagcgcggcgcgacgccgcggtcgttcgtgcgcaagttccggctgcctgaggacgcggacacgggcggcgtcgcggcgcgctgcgagaacggcgtgctcaccgtcaccgtcaagaagctgcccccgccggagaagaagaccaagtccgtgcaggtcaccatcgcctag

SEQ ID NO: 11086 - protein, 174 aa, Sorghum bicolor
MTELFDTAVTSLLHLPEVLDRLAAADGDRRSGGHHAAHHHGHARVHGLGGGGGGGAPVDIVETPGEYTFVLDVPGLSKSDIQVTLEEDRVLVMKGGSGKRKREEEEEEGEGEGCRYIRLERGATPRSFVRKFRLPEDADTGGVAARCENGVLTVTVKKLPPPEKKTKSVQVTIA

SEQ ID NO: 11087 - DNA, 552 bp, Sorghum bicolor
  CDS (1)..(552)
atggagttcacgttcggtggcttcggcgacccggcgttctcggcggcggtgcagcagctgatggacctgcccgacgagctggagcggcagctgaacgcgccgacgcgggcctatgtgcgcgaccgccgggccatggccaacacgcccatggacgtcaaggagctcccgtccggggcgatcgtcctggccgtcgacatgcccggggtcagccccgccgacgtcaaggtccaggtggaggagggcaacgtgctcaccatcagcggcgagcgcaagcgccccgccgaggacggcggcgccgagggcaagcagcaggcccaggccgtcgccgacggcggcgagaagcaaggggtggtgaagtacctgaggatggagaggcggatgggcaagttcatgaggcggttcccgctgccggagagcgccgacctggacagcatccgcgccgagtacagggacggcgtcctcaccgtcaccgtcgacaagaagccgccgcctgagcccaagaagccgcgcgtcgtccaggtcacggtcggcggcgagcagcagggcaagtaa

SEQ ID NO: 11088 - protein, 183 aa, Sorghum bicolor
MEFTFGGFGDPAFSAAVQQLMDLPDELERQLNAPTRAYVRDRRAMANTPMDVKELPSGAIVLAVDMPGVSPADVKVQVEEGNVLTISGERKRPAEDGGAEGKQQAQAVADGGEKQGVVKYLRMERRMGKFMRRFPLPESADLDSIRAEYRDGVLTVTVDKKPPPEPKKPRVVQVTVGGEQQGK

SEQ ID NO: 11089 - DNA, 498 bp, Sorghum bicolor
  CDS (1)..(498)
atggacgcgaggatgttcggtctcgagaccccgctgatggtggcgctgcagcacctgctggacgtgcccgacggcgacgccggcgcggcgggcggcgacaaggcgggcgccggcgcgggcggcggggccacgcgcacctacgtccgcgacgcgcgcgccatggcggccaccccggccgacgtcaaggagcttccgggcgcgtacgcgttcgtggtggacatgccggggctgggcacgggcgacatcaaggtgcaggtggaggacgaccgggtgctggtgatcagcggcgagcggcgccgggaggagcgcgaggacgccaagtacctgcgcatggagcggcggatgggcaagttcatgcgcaagttcgtgctcccggacaacgccgacatggacaagatctcggccgtgtgcagggacggcgtgctcacggtcaccgtcgacaagctgcccccgcctgagcccaagaagcccaagaccatcgaggtcaaggtcgcctga

SEQ ID NO: 11090 - protein, 165 aa, Sorghum bicolor
MDARMFGLETPLMVALQHLLDVPDGDAGAAGGDKAGAGAGGGATRTYVRDARAMAATPADVKELPGAYAFVVDMPGLGTGDIKVQVEDDRVLVISGERRREEREDAKYLRMERRMGKFMRKFVLPDNADMDKISAVCRDGVLTVTVDKLPPPEPKKPKTIEVKVA

SEQ ID NO: 11091 - DNA, 459 bp, Sorghum bicolor
  CDS (1)..(459)
atgtcgctggtgaggcgcagcaacgtgttcgaccccttctccatggacctctgggacccgttcgacaacatgttccgctccatcgtcccgtcggccgcctccggcgactccgagaccgcggccttcgccaacgcccgcatcgactggaaggagacgcccgaggcgcacgtgttcaaggccgacctccccggcgtgaagaaggaggaggtcaaggtggaggtggaggacggcaacgtgctcgtcatcagcggccagcgcagcagggagaaggaggacaagaacgacaagtggcaccgcgtggagcgcagcagcggccagttcacgaggcgcttccgcctgccggagaacgccaagacggaggaggtgaaggccggcctcgagaacggcgtgctcacggtcaccgtgcccaaggctgaggtcaagaagcccgaggtgaagagcatccagatctccggttga

SEQ ID NO: 11092 - protein, 152 aa, Sorghum bicolor
MSLVRRSNVFDPFSMDLWDPFDNMFRSIVPSAASGDSETAAFANARIDWKETPEAHVFKADLPGVKKEEVKVEVEDGNVLVISGQRSREKEDKNDKWHRVERSSGQFTRRFRLPENAKTEEVKAGLENGVLTVTVPKAEVKKPEVKSIQISG

SEQ ID NO: 11093 - DNA, 477 bp, Ricinus communis
  CDS (1)..(477)
atggatttgaggttaatgggcatcgattcaccgctcttccaaaccctccaacaaatgatggacatcacccacggcgatgaatccgacaagtctttcagcgctccaacacgcacttacgtgagagatgcaaaggcaatggcatcaactccagccgacgtgaaggagtatccaaattcgtacgtgtttatcatagacatgccagggctaaagtcaggagatatcaaggtgcaagtggaagacgacaatgtgctgttgattagtggtgaaaggaagcgtcaagaagagaaagaaggagccaagtatgtgagaatggagaggagggttggcaagtttatgaggaagtttgtgctacctgagaatgctaataccgatgctatttctgctgtttgtcaagatggggttttgactgttactgttgagaagctgcctcctcctgagcctaagaagcccaagaccattgaggttaagattgcttga

SEQ ID NO: 11094 - protein, 158 aa, Ricinus communis
MDLRLMGIDSPLFQTLQQMMDITHGDESDKSFSAPTRTYVRDAKAMASTPADVKEYPNSYVFIIDMPGLKSGDIKVQVEDDNVLLISGERKRQEEKEGAKYVRMERRVGKFMRKFVLPENANTDAISAVCQDGVLTVTVEKLPPPEPKKPKTIEVKIA

SEQ ID NO: 11095 - DNA, 480 bp, Ricinus communis
  CDS (1)..(480)
atggatgtgagcctaaggagcgcgcttttagatcccggaatcctagatgtactgcatgaaattcttgaagtctcagacgagactgaaaaatctcaccacgcgccttcgcgcacctacgttcgtgacaccaaggcgatggctgcaaccccagcagacgccaaagaattgccgaacgcttacatgtttgtgatagacatgccgggactgaaggcagaccagataaaggtgcatgttgaggatgggaatatgctggtggtgagtggagagaggaaaagagagaaagagaaagatcaaggagttaggtacataaggatggagagaaggcttggtaagtacttgaaaaagtttgtgctgcctgagaatgctgattctgagaagatatccgctacgtatcaagatggagtgttgactgtgactgtggagaagaaaccaccacctgagcccaagaaacctaagactgtggaggttcaagttgtttga

SEQ ID NO: 11096 - protein, 159 aa, Ricinus communis
MDVSLRSALLDPGILDVLHEILEVSDETEKSHHAPSRTYVRDTKAMAATPADAKELPNAYMFVIDMPGLKADQIKVHVEDGNMLVVSGERKREKEKDQGVRYIRMERRLGKYLKKFVLPENADSEKISATYQDGVLTVTVEKKPPPEPKKPKTVEVQVV

SEQ ID NO: 11097 - DNA, 480 bp, Ricinus communis
  CDS (1)..(480)
atggacctaagacacttcggctttgactctcctctcttttccatgctcgaagacatgctagaaattcctgaagagcacgacaaataccgaaacaacccgtctcgtgcatatgttcgcgacgctaaggccatggcagcaacaccagcagatgttgtggagtacccaaactcctatgtattcgctgtcgatatgccgggaatcaagggaaacgaaatcaaagtgcaggtagagaatgataatgtgcttgttgttagtggggagaggaacagggataaagagaaagatagcaaagatggagtcaagtatttgagaatggagaggagaattggtaaattcatgaggaaatttgcattgcctgataatgctaatatggacgctatatcagctgttagtcaagatggggtgttgactgtcaccgttgagaagctgccaccgccggagcccaagaagcctaagacagttgaggttaaagtggcgtaa

SEQ ID NO: 11098 - protein, 159 aa, Ricinus communis
MDLRHFGFDSPLFSMLEDMLEIPEEHDKYRNNPSRAYVRDAKAMAATPADVVEYPNSYVFAVDMPGIKGNEIKVQVENDNVLVVSGERNRDKEKDSKDGVKYLRMERRIGKFMRKFALPDNANMDAISAVSQDGVLTVTVEKLPPPEPKKPKTVEVKVA

SEQ ID NO: 11099 - DNA, 468 bp, Ricinus communis
  CDS (1)..(468)
atgagcaaagttggagattcaaatgtgtttgatgcagtgagccatttgtttagcatcccagaaagcatagagaaattcatgatccattcaagggttaatgacacaaatgagaacaagggtgttggtagcattcctgtggatatcttagacacctccaaagagtatatctttcacatggatgttcctggcttgtccaagtctgatattcaggtgactgttgaggatgagagtacactggtgattaaaagtggagggaagaggaaacgcgaagatggcgaggaagaaggctgcaggtatataaggcttgagaggagggcaccacagaagctgatgaggaagttccggttgcctgaaaatgctaatgcatcggcagttactgctaaatgcgagaatggggttttgactgttgtagttgagaagcatcctccacctcctaagcctaagaagattgaagtcactgtttcttaa

SEQ ID NO: 11100 - protein, 155 aa, Ricinus communis
MSKVGDSNVFDAVSHLFSIPESIEKFMIHSRVNDTNENKGVGSIPVDILDTSKEYIFHMDVPGLSKSDIQVTVEDESTLVIKSGGKRKREDGEEEGCRYIRLERRAPQKLMRKFRLPENANASAVTAKCENGVLTVVVEKHPPPPKPKKIEVTVS

SEQ ID NO: 11101 - DNA, 420 bp, Ricinus communis; identical to SEQ ID NO: 8634
  CDS (1)..(420)

SEQ ID NO: 11102 - protein, 139 aa, Ricinus communis; identical to SEQ ID NO: 8635

SEQ ID NO: 11103 - DNA, 471 bp, Halorhodospira halophila SL1
  CDS (1)..(471): transl_table=11
atgacactcatgcgttacgacccctggagcacactgcgcgacctgcagagcgacctggaccggatcttcgccccgggctcggctcgccctggcgcgctggcgcgggccggcgaggacaacggcgagaccgccagcaattggctgccggccgtggacatccgcgaggatgagcagaactacgtggtccacgtcgacctgcccggcgtctcccccgaggagatcgatgtggccatggacaacggcatgctgaccatcaagggtcagcgcgagtcggaggagaccgagagcggcgccaactggaagcgcctggaacgggtccgtggcaccttcttccgccgcttcacgctgccggacaacgtggactcggaggggatccaggcccgcgcccgcaatggcgtcctggaggtcacggtacccaagcgccaggaagaaccggccaagcgcatccaggtgcaggcggccgacgagtaa

SEQ ID NO: 11104 - protein, 156 aa, Halorhodospira halophila SL1
MTLMRYDPWSTLRDLQSDLDRIFAPGSARPGALARAGEDNGETASNWLPAVDIREDEQNYVVHVDLPGVSPEEIDVAMDNGMLTIKGQRESEETESGANWKRLERVRGTFFRRFTLPDNVDSEGIQARARNGVLEVTVPKRQEEPAKRIQVQAADE

SEQ ID NO: 11105 - DNA, 432 bp, Anaeromyxobacter sp. K
  CDS (1)..(432): transl_table=11
atgctgaccctgctcaggaaccccgatcccggcttcgccgcgctctctgccgaggtgagccggctcatgaacgacatcacccagcccggcgcccggggctacggcctggcgcccagcgcggacatcgtcgagaccgaggccggcttccaggtggtgctcgacctgccgggcctcgacccggcggccatcaagctcgacatcgagaacgacacgctcaccgtgcaggccgaccgcaagcagcccgcgctcgccgacggcgcgaccctgcaccggagcgagcggcgcttcggcaccttcttccgggcgttcacgctcccgaagaccgtggacggcgcgcgcgtcgaggcgcgctacgacgccggcgtcctgaccgtcacgctgccgaagcgcgacgaggcgaagccgcggaccatcgcggtgcaggtgaagtag

SEQ ID NO: 11106 - protein, 143 aa, Anaeromyxobacter sp. K
MLTLLRNPDPGFAALSAEVSRLMNDITQPGARGYGLAPSADIVETEAGFQVVLDLPGLDPAAIKLDIENDTLTVQADRKQPALADGATLHRSERRFGTFFRAFTLPKTVDGARVEARYDAGVLTVTLPKRDEAKPRTIAVQVK

SEQ ID NO: 11107 - DNA, 435 bp, Methylococcus capsulatus str. Bath
  CDS (1)..(435): transl_table=11
atgacaatcggccgcaatgagccgtggagtttattgaatcaactgcagcgtgaactggagcgttccttcgagggacgtcagggttcggactccgcagcgacggccgaatggacgccggccgtcgacatcaaggaggaagccgaccggtacgtcctcctcgccgatctcccgggcgtcagtacggacaacatcgacgtctcgatggagcagggcgttttgacgctgcgtggcgagcggaacaccgaagcccgtacggagcgttccggctacaagcgcatcgagcgcgtctacggcagcttctaccgtcggttttcgctgccggataccgccgacgccgacggcatatccgcgcgctataacaacggcgtgttggaaatcgtgattcccaagaaagccgcgattcagccgcggcgaatcgtcgtcagcgccgactga

SEQ ID NO: 11108 - protein, 144 aa, Methylococcus capsulatus str. Bath
MTIGRNEPWSLLNQLQRELERSFEGRQGSDSAATAEWTPAVDIKEEADRYVLLADLPGVSTDNIDVSMEQGVLTLRGERNTEARTERSGYKRIERVYGSFYRRFSLPDTADADGISARYNNGVLEIVIPKKAAIQPRRIVVSAD

SEQ ID NO: 11109 - DNA, 432 bp, Anaeromyxobacter dehalogenans 2CP-C
  CDS (1)..(432): transl_table=11
atgccgaccctgctcaggaaccccgatcccgcgttcgccacgctctccgccgaggtgaaccgcctcatgaacgacctcacccagccgggcgcccggggctacggcctcgcgcccgccgccgacatcctcgagaccgaggccggcttccaggtggtgctcgacgtgccggggctcgacccggccgccatcaagctggacatcgagaacgacacgctcagcgtgcaggccgaccgcaagcagcccgcgctcgccgacggcgcgaccctgcaccgcagcgagcgccgcttcggcacgttcttccgggcgttcacgctgccgaagacggtggacggcgcgaaggtcgaggcgcgctacgacgccggcgtcctgaccgtcacgctgccgaagcgcgaggacgcgaagccgcggaccatcgcggtccaggtgaagtag

SEQ ID NO: 11110 - protein, 143 aa, Anaeromyxobacter dehalogenans 2CP-C
MPTLLRNPDPAFATLSAEVNRLMNDLTQPGARGYGLAPAADILETEAGFQVVLDVPGLDPAAIKLDIENDTLSVQADRKQPALADGATLHRSERRFGTFFRAFTLPKTVDGAKVEARYDAGVLTVTLPKREDAKPRTIAVQVK

SEQ ID NO: 11111 - DNA, 456 bp, Marinobacter algicola DG893
  CDS (1)..(456): transl_table=11
atgaccaacattactcgctggaatccggtcaacgagttcgaagacctgattaaccgctacaaccgctacttcggccttgcccgtggcaatggcgagcgtgaggggaaagacctgttcagccgcagcgactgggcaccggctgtagatatccgggaaacaccggaagcgttccgcattgaggcggaactgccgggcatgtcaaaggatgatgtaaaagtcaccgtgcaggatggcgtgttgagcatccggggtgagcgcaagcaagaggaagaaaccaacgacagcaaacaccaccgcgtggagcgaatctatggcagcttcctgcgccggttcaccctgccggagaatgtggatgaaaacagtatccgggccaacttcaaggatggcatcctttcgctgacgttaaccaaggccgagcctgccgaacccaaggctattgaggtggacgtccagtaa

SEQ ID NO: 11112 - protein, 151 aa, Marinobacter algicola DG893
MTNITRWNPVNEFEDLINRYNRYFGLARGNGEREGKDLFSRSDWAPAVDIRETPEAFRIEAELPGMSKDDVKVTVQDGVLSIRGERKQEEETNDSKHHRVERIYGSFLRRFTLPENVDENSIRANFKDGILSLTLTKAEPAEPKAIEVDVQ

SEQ ID NO: 11113 - DNA, 474 bp, Verrucomicrobium spinosum DSM 4136
  CDS (1)..(474): transl_table=11
atgaatacactcactcgttggaccccgttccgaaccggcacctgggacccgctcaaagagatcagtgaaatggagaaccgcctgtcccggcttttccccacagccgccagcaatggcggtgccaaagaggcccttacggtcgcagaatgggcccctcccgtggacatcaccgaggacgacaaggagtacgtcatcaaagccgagctgccggaaatcaaaaaggaggatgtcaaggtgaccgtgaccaacggcgaactcaccctcgccggccagcgcaagttcgagaaggaagaagagggcaagaagtaccaccgtgtagaacgatcctacgggagcttcctgcgaagcttcaccctgccggatgccgtcgatgccacgaaggtcgaggctcagttcaaagacggcattctgaccgtccacctgcccaaggatgaacgggccaaacccaaaagcgtggaggtcaagctgaactaa

SEQ ID NO: 11114 - protein, 157 aa, Verrucomicrobium spinosum DSM 4136
MNTLTRWTPFRTGTWDPLKEISEMENRLSRLFPTAASNGGAKEALTVAEWAPPVDITEDDKEYVIKAELPEIKKEDVKVTVTNGELTLAGQRKFEKEEEGKKYHRVERSYGSFLRSFTLPDAVDATKVEAQFKDGILTVHLPKDERAKPKSVEVKLN

SEQ ID NO: 11115 - DNA, 447 bp, Nitrosococcus oceani AFC27
  CDS (1)..(447): transl_table=11
atggccattagacattatgagtcctttgacctactcaaccaattgcaaagagaagtcaatcgtctctttgaggggaactctccccagcatactcaaaccgaagcggagcttgccacgagcgattgggtccccgctgtagatattaaggaagaagcggaccggttcgttatttatgccgacgtgcctggtgttgagtccaaggatattgaggtgactttggacaatggcaccctcacccttaagggccaccgtcaatccagtaaaatcccggagcagcggggctataagcgagtggagcgggtcagcggcagctttttacggcgctttgccctgcccaatacggtggatgccgctaaagtcagtgcccgctctcaaaacggtgtccttgaactggtgatcccaaaaagccagcaggcccagagccgcaagattacggtggaaggataa

SEQ ID NO: 11116 - protein, 148 aa, Nitrosococcus oceani AFC27
MAIRHYESFDLLNQLQREVNRLFEGNSPQHTQTEAELATSDWVPAVDIKEEADRFVIYADVPGVESKDIEVTLDNGTLTLKGHRQSSKIPEQRGYKRVERVSGSFLRRFALPNTVDAAKVSARSQNGVLELVIPKSQQAQSRKITVEG

SEQ ID NO: 11117 - DNA, 471 bp, Nelumbo nucifera
  CDS (1)..(471)
atggatttgaggattatggatttcgacagccctctgttttcgactctccagcacatgctcgacgtgtctgaggaggctgacaagtcgttcaacgctccgacgaggacctatgttcgcgacgccaaggccatggcttcgactccggcagacgttaaggaataccccaactcctatgcgttcatcgtcgacatgcctgggcttaaatccggagacatcaaggttcaggtggaggatggcaatgtgctcctcatcagcggagaacgcaagagggaggaggagaaagaaggggtcaagtatgtcaggatggagaggagggtcggcaaattcatgaggaagttcgtattaccagaaaatgccaacaccgatgccatttctgctgtctgtcaggacggcgtgctcactgtcactgttaacaagctgcctccgccggagccgaagaagcccaagaccatcgaagttaaaattgcctag

SEQ ID NO: 11118 - protein, 156 aa, Nelumbo nucifera
MDLRIMDFDSPLFSTLQHMLDVSEEADKSFNAPTRTYVRDAKAMASTPADVKEYPNSYAFIVDMPGLKSGDIKVQVEDGNVLLISGERKREEEKEGVKYVRMERRVGKFMRKFVLPENANTDAISAVCQDGVLTVTVNKLPPPEPKKPKTIEVKIA

SEQ ID NO: 11119 - DNA, 474 bp, Ageratina adenophora
  CDS (1)..(474)
atgtcgatcattccaagcttctttaccggccgcaggagcaacgtattcgacccattctccatcgagatctgggacccgtttcagggcttctctagtgcaatcagcaacctccctgaatcgtcacgtgaaaccgcagcaatcgccaacgccagaatcgactggaaggagacgccggaggctcacgtgttcaaggcggatttaccaggtctgaagaaggaggaagtgaaggtggaggtggaagaaggtagggtgttgcagatcagcggagagagaagcaaagaaaacgaggagaagaatgagaaatggcatagggtggagaggagctccgggaagtttgtgaggaggttcaggctgccggagaatgcaaaattggagggggtgaaagcagccatggagaacggagtgcttacggtgacggtgcccaaggcggaagagaagaagccggaggtgaaatccatcgacatttcgggctaa

SEQ ID NO: 11120 - protein, 157 aa, Ageratina adenophora
MSIIPSFFTGRRSNVFDPFSIEIWDPFQGFSSAISNLPESSRETAAIANARIDWKETPEAHVFKADLPGLKKEEVKVEVEEGRVLQISGERSKENEEKNEKWHRVERSSGKFVRRFRLPENAKLEGVKAAMENGVLTVTVPKAEEKKPEVKSIDISG

SEQ ID NO: 11121 - DNA, 489 bp, Agave tequilana
  CDS (1)..(489)
atggctttgattcctcaagtggttgggcggatgagcagcatattcgaccctttctcccccgacatctgggatcctttccaaggctggcctttcgaccgctcgcccactgctgatcaatctcgatccggcggtgctctgaacgagacctcggccttcaccgacacccgcattgattggaaggagactcccgaggcccacgtcttcaaggcggacctcccggggctcaagaaggaagaagtgaaggtggaggttgaggatggcagggtgcttcagatcagcggagagcggagcaaagagaaagaagataagaatgacaagtggcacagggtagagaggagcatcggcaaattcctcagaaggttcaggctgccggagaacgcgaagacggagcaggtgaaggcgagcatggagaacggcgtgctcaccgtgactgtgcccaaagaggaaatcaagaagcccggggtgaaggccattgaaatctctggctga

SEQ ID NO: 11122 - protein, 162 aa, Agave tequilana
MALIPQVVGRMSSIFDPFSPDIWDPFQGWPFDRSPTADQSRSGGALNETSAFTDTRIDWKETPEAHVFKADLPGLKKEEVKVEVEDGRVLQISGERSKEKEDKNDKWHRVERSIGKFLRRFRLPENAKTEQVKASMENGVLTVTVPKEEIKKPGVKAIEISG

SEQ ID NO: 11123 - DNA, 480 bp, Agave tequilana
  CDS (1)..(480)
atggctctgattcctcagatctttgggcagaggaccaacatcttcgatcccttctccctagacgtctgggatcctttccagggctggcctttcgaccggtctctcacatcaaaaagcggcggcgctgtgagcgagacgtctgcgtttgccaacacccgcatcgattggaaggagacccccgaggcccacgtcttcaaggccgacctgccggggataaagaaggaagaggtgaaggtggaggttgaagaagggagagtgcttcagatcagcggagagcgcagcagagaggaggaggagaagaatgacaagtggcacagggtcgagaggagcagcggcaaattccttcgaaggttcaggctgccggagaacgtgaagatggatcaggtgaaggccagcatggagaatggtgtgctgacagtaactgtgcctaaagaggaagtcaagaagcctgaagtgaaggccattgaagtctctggctga

SEQ ID NO: 11124 - protein, 159 aa, Agave tequilana
MALIPQIFGQRTNIFDPFSLDVWDPFQGWPFDRSLTSKSGGAVSETSAFANTRIDWKETPEAHVFKADLPGIKKEEVKVEVEEGRVLQISGERSREEEEKNDKWHRVERSSGKFLRRFRLPENVKMDQVKASMENGVLTVTVPKEEVKKPEVKAIEVSG

SEQ ID NO: 11125 - DNA, 477 bp, Agave tequilana
  CDS (1)..(477)
atggacgcccgaatgttcagcgtggagagccccatcttctccaccctgcagcacctcatggacatcccggacgagatggagaaggccttcaacgccccgacccgcacctacgtgcgcgacgcccgtgccatggcgtccaccccggccgacgtcaaggagctgccgacggcctattccttcgtgatcgacatgccgggggtcaagtccggggagatcaaggtgcaggtggaggacgacaacgtgctcgtcatcagcggcgagcggaagagggaggaggttgacgagaaggagggaagcaagtacttgaggatggagcgcaggatggggaagttcatgaggaagtttgcgctgccggagaatgcgaataccgacgggatatcggcggtgtgccaggacggggtgctgacggtgaccgtgcaaaagaagccgccgccggagcccaagaagcctaagactattgaggtcaaggttgcttga

SEQ ID NO: 11126 - protein, 158 aa, Agave tequilana
MDARMFSVESPIFSTLQHLMDIPDEMEKAFNAPTRTYVRDARAMASTPADVKELPTAYSFVIDMPGVKSGEIKVQVEDDNVLVISGERKREEVDEKEGSKYLRMERRMGKFMRKFALPENANTDGISAVCQDGVLTVTVQKKPPPEPKKPKTIEVKVA

SEQ ID NO: 11127 - DNA, 489 bp, Aegilops longissima
  CDS (1)..(489)
atggcgggcatggtgttcggcttggagaacccaatgatgaccgccctgcagcacctgctggacatcccggacggggaggctggtggagccggtgccgccggcggcgagaagcagggcccgatgcgggcctacgtccgtgatgtgcgcgccatggcggccaccccggccgacgtgaaggagctgccgggcgcgtacgcgttcgtggtggacatgtcggggctcgggtccggcgacatcaaggtgcaggcggaggacgagagggtgctggtgatcagcggcgagcggcggagcgaggagaaggaggacgccaagtacatgcggatggagcgccgcatgggcaagctgatgcgcaagttcgtgctgcccgagaacgccgacatggagaagatctccgcggcgtgccgcgacggcgtgctcaccgtgaccgtcgagaagctgccgccgcccgagcccaagaagcccaagaccatccaggtccaggtcgcctga

SEQ ID NO: 11128 - protein, 162 aa, Aegilops longissima
MAGMVFGLENPMMTALQHLLDIPDGEAGGAGAAGGEKQGPMRAYVRDVRAMAATPADVKELPGAYAFVVDMSGLGSGDIKVQAEDERVLVISGERRSEEKEDAKYMRMERRMGKLMRKFVLPENADMEKISAACRDGVLTVTVEKLPPPEPKKPKTIQVQVA

SEQ ID NO: 11129 - DNA, 480 bp, Aegilops peregrina
  CDS (1)..(480)
atggcgggcatggtgttcggcttggagaacccgatgatgaccgccctgcagcacctgctggacatcccggacagggaggctggtggagccggtgccgccggcggcgagaagcagggcccgatgcgggcctacgtccgtgatgcgcgcgccatggcggccaccccggccgacgtgaaggagctgccgggcgcgtacgcgttcgtggtggacatgtcggggctcgggtccggcgacatcaaggtgcaggcggaggacgagagggtgctggtgatcagcggcgagcggcggagcgaggagaaggaggacgccaagtacatgcggatggagcgccgcatgggcaagctgatgcgcaagttcgtgctcccccagaacgccgacatggagaagatctccgccgtgtgccgcgacggcgtgctcaccgtcaccgtcgagaagctgccgccgcccgagcccaagaccatccaggtccaggtcgcctga

SEQ ID NO: 11130 - protein, 159 aa, Aegilops peregrina
MAGMVFGLENPMMTALQHLLDIPDREAGGAGAAGGEKQGPMRAYVRDARAMAATPADVKELPGAYAFVVDMSGLGSGDIKVQAEDERVLVISGERRSEEKEDAKYMRMERRMGKLMRKFVLPQNADMEKISAVCRDGVLTVTVEKLPPPEPKTIQVQVA

SEQ ID NO: 11131 - DNA, 480 bp, Triticum turgidum subsp. dicoccoides
  CDS (1)..(480)
atggcgggcatggtgttcggcttggagaacccaatgatgacggcgctgcagcacctgctggacatcccagatggcgaaaccggtgcccccggcggcgagaagcagggcccgacgcgcgcctacgtccgcgacgcgcgcgccatggcggccacccccgccgacgtgaaggagctgccgggcgcgtacgctttcgtggtggacatgccggggctgggttccggcgacatccaggtgcaggtggaggacgagcgggtgctggtcatcagcggcgagcgcaggagggaggagaaggaggacaccaagtacctgcggatggagcgccgcatgggcaagctgatgcgcaagttcgtgctccccgagaacgccgacatggagaagatctccgccgtgtgccgcgacggcgtgctcaccgtgaccgtcgacaagctgcccccgcccgagcccaagaagcccaagaccatccaggtccaggtcgcctga

SEQ ID NO: 11132 - protein, 159 aa, Triticum turgidum subsp. dicoccoides
MAGMVFGLENPMMTALQHLLDIPDGETGAPGGEKQGPTRAYVRDARAMAATPADVKELPGAYAFVVDMPGLGSGDIQVQVEDERVLVISGERRREEKEDTKYLRMERRMGKLMRKFVLPENADMEKISAVCRDGVLTVTVDKLPPPEPKKPKTIQVQVA

SEQ ID NO: 11133 - DNA, 483 bp, Triticum turgidum subsp. dicoccon
  CDS (1)..(483)
atggcgggcatggtgttcggcttggagaacccgatgatgacggcgctgcagcacctgctggacatcccagacggcgaggccggcaacaccgccggcggcgagaagcagggcccgacgcgcgcttacgtccgtgacgcgcgagccatggcggcaacccccgccgacgtgaaggagctgccgggcgcgtacgcgtttgtggtggacatgccaggtctcgggtccggcgacatcaaggtgcaggtggaggacgagcgggtgctggtgatcagcggcgagcgcaggagggaggagaaggaagacgccaagtacctgcggatggagcgccgcatgggcaagctgatgcgcaagttcgtgctccccgagaacgccgacatggagaagatctccgccgtgtgccgcgacggcgtgctcaccgtgaccgtcgacaagctgcccccgcccgagcccaagaagcccaagaccatccaggtccaggtcgcctga

SEQ ID NO: 11134 - protein, 160 aa, Triticum turgidum subsp. dicoccon
MAGMVFGLENPMMTALQHLLDIPDGEAGNTAGGEKQGPTRAYVRDARAMAATPADVKELPGAYAFVVDMPGLGSGDIKVQVEDERVLVISGERRREEKEDAKYLRMERRMGKLMRKFVLPENADMEKISAVCRDGVLTVTVDKLPPPEPKKPKTIQVQVA

SEQ ID NO: 11135 - DNA, 483 bp, Triticum turgidum subsp. durum (durum wheat)
  CDS (1)..(483)
atggcgggcatggtgttcggcttggagaacccgatgatgacggcgctgcagcacctgctggacatcccagacggcgaggccggcaacaccgccggcggcgagaagcagggcccgacgcgcgcttacgtccgtgacgcgcgagccatggcggcaacccccgccgacgtgaaggagctgccgggcgcgtacgcgtttgtggtggacatgccaggtctcgggtccggcgacatcaaggtgcaggtggaggacgagcgggtgctggtgatcagcggcgagcgcaggagggaggagaaggaagacgccaagtacctgcggatggagcgccgcatgggcaagctgatgcgcaagttcgtgctccccgagaacgccgacatggaggagatctccgccgtgtgccgcgacggcgtgctcaccgtgaccgtcgacaagctgcccccgcccgagcccaagaagcccaagaccatccaggtccaggtcgcctga

SEQ ID NO: 11136 - protein, 160 aa, Triticum turgidum subsp. durum (durum wheat)
MAGMVFGLENPMMTALQHLLDIPDGEAGNTAGGEKQGPTRAYVRDARAMAATPADVKELPGAYAFVVDMPGLGSGDIKVQVEDERVLVISGERRREEKEDAKYLRMERRMGKLMRKFVLPENADMEEISAVCRDGVLTVTVDKLPPPEPKKPKTIQVQVA

SEQ ID NO: 11137 - DNA, 471 bp, Vitis vinifera
  CDS (1)..(471)
atggatttgagggtcatgggttttgattctccactcttctcaaccctccaacacatgctcgacgccggcgacgattccgacaagtctctcaacgctcccacccgcacctacgtccgggacgccaaggccatggcggcgacgccggctgacgtcaaggagtacccgaattcctacaccttcatcgtcgacatgccggggctgaggtccggcgacatcaaggttcaggtggaggacggcaatgtgctggtgatcagcggagagaggaagcgggaggaggagaaggaaggttccaagtacgtaagaatggagaggagagtggggaagtttatgaggaagttcgtgttgccggagaatgctaatactgataaaatctctgctgtatgtcaagatggggtgttgaccgtcaccgttgagaagctgccaccgccggaacccaagaagcccaagaccattgaggtcaaaattgcttga

SEQ ID NO: 11138 - protein, 156 aa, Vitis vinifera
MDLRVMGFDSPLFSTLQHMLDAGDDSDKSLNAPTRTYVRDAKAMAATPADVKEYPNSYTFIVDMPGLRSGDIKVQVEDGNVLVISGERKREEEKEGSKYVRMERRVGKFMRKFVLPENANTDKISAVCQDGVLTVTVEKLPPPEPKKPKTIEVKIA

SEQ ID NO: 11139 - DNA, 471 bp, Vitis vinifera
  CDS (1)..(471)
  misc_feature (411)..(411): y is t or c
  misc_feature (441)..(441): r is g or a
atggatttgaggatcatgggtcttgattctccactcttctcaaccctccaacagatgctcgacgccggcgacgattccgacaagtctctcaacgctcccacccgcacctacgtccgggacgccaaggccatggcggcgacgccggctgacgtcaaggagtacccgaattcctacaccttcatcgtcgacatgccggggctgaggtccggggacatcaaggttcaggtggaggacggcaatgtgctggtgatcagcggagagaggaagcgggaggaggagaaggaaggtgccaagtacgtaagaatggagaggagagtggggaagtttatgaggaagttcgtgttgccggagaatgcgaatactgataagatctctgctgtatgtcaagatggggtgttgaccgtcaccgtygagaagctgccaccgccggaacccaagaarcccaagaccattgaggtcaaaattgcttga

SEQ ID NO: 11140 - protein, 156 aa, Vitis vinifera
MDLRIMGLDSPLFSTLQQMLDAGDDSDKSLNAPTRTYVRDAKAMAATPADVKEYPNSYTFIVDMPGLRSGDIKVQVEDGNVLVISGERKREEEKEGAKYVRMERRVGKFMRKFVLPENANTDKISAVCQDGVLTVTVEKLPPPEPKKPKTIEVKIA

SEQ ID NO: 11141 - DNA, 471 bp, Vitis vinifera
  CDS (1)..(471)
  misc_feature (54)..(54): s is g or c
  misc_feature (324)..(324): r is g or a
atggatttgaggatcatgggtcttgattctccactcttctcaaccctccaacasatgctcgacgccggcgacgattccgacaagtctctcaacgctcccacccgcacctacgtccgggacgccaaggccatggcggcgacgccggctgacgtcaaggagtacccgaattcctacaccttcatcgtcgacatgccggggctgaggtccggggacatcaaggttcaggtggaggacggcaatgtgctggtgatcagcggagagaggaagcgggaggaggagaaggaaggtgccaagtacgtaagaatggagaggagagtggggaartttatgaggaagttcgtgttgccggagaatgcgaatactgataagatctctgctgtatgtcaagatggggtgttgaccgtcaccgttgagaagctgccaccgccggagcccaagaagcccaagaccattgaggtcaaaattgcttga

SEQ ID NO: 11142 - protein, 156 aa, Vitis vinifera
  misc_feature (18)..(18): The Xaa at location 18 stands for Gln, or His.
MDLRIMGLDSPLFSTLQXMLDAGDDSDKSLNAPTRTYVRDAKAMAATPADVKEYPNSYTFIVDMPGLRSGDIKVQVEDGNVLVISGERKREEEKEGAKYVRMERRVGKFMRKFVLPENANTDKISAVCQDGVLTVTVEKLPPPEPKKPKTIEVKIA

SEQ ID NO: 11143 - DNA, 459 bp, Vitis vinifera
  CDS (1)..(459)
  misc_feature (7)..(7): w is a or t
  misc_feature (19)..(19): y is t or c
  misc_feature (66)..(66): w is a or t
  misc_feature (70)..(70): m is a or c
  misc_feature (75)..(75): r is g or a
  misc_feature (82)..(82): k is g or t
  misc_feature (104)..(104): r is g or a
  misc_feature (131)..(131): y is t or c
  misc_feature (183)..(183): k is g or t
  misc_feature (198)..(198): y is t or c
  misc_feature (213)..(213): k is g or t
  misc_feature (221)..(221): r is g or a
  misc_feature (285)..(285): y is t or c
  misc_feature (287)..(287): y is t or c
  misc_feature (376)..(376): r is g or a
  misc_feature (411)..(411): m is a or c
  misc_feature (427)..(427): m is a or c
atgatgwgcctcgattctycactcttctcagccctccaacacatgcttgacgccgccgacggctcwgacmaatcrgtcagckcacctactcgcacctacgtccrcgacgccaaggctatggctgctacgcyggcggatgtcaaagagtacccgaattcctacgccttcatcatcgacatgcckgggctgaagtccggygacatcaaggttcakgtgggggrcgacaatgtgctggtgatcagcggagagaggaagcgggaggaggagagggaaggcgcaaagtaygygagaatggagaggagggtggggaagtttatgaggaagtttgcgttgccggagaatgcgaatactgataagatctctgcggtttgtcaaratggcgtgttgaccgtcaccgttgagaagctgccmccgccggagcccaagmagcccaagaccattgaggtcaaaattgcttga

SEQ ID NO: 11144 - protein, 152 aa, Vitis vinifera
  misc_feature (3)..(3): The Xaa at location 3 stands for Cys, or Ser.
  misc_feature (7)..(7): The Xaa at location 7 stands for Pro, or Ser.
  misc_feature (24)..(24): The Xaa at location 24 stands for Gln, or Lys.
  misc_feature (28)..(28): The Xaa at location 28 stands for Ala, or Ser.
  misc_feature (35)..(35): The Xaa at location 35 stands for Arg, or His.
  misc_feature (44)..(44): The Xaa at location 44 stands for Leu, or Pro.
  misc_feature (71)..(71): The Xaa at location 71 stands for Gln, or His.
  misc_feature (74)..(74): The Xaa at location 74 stands for Asp, or Gly.
  misc_feature (96)..(96): The Xaa at location 96 stands for Ala, or Val.
  misc_feature (143)..(143): The Xaa at location 143 stands for Gln, or Lys.
MMXLDSXLFSALQHMLDAADGSDXSVSXPTRTYVXDAKAMAATXADVKEYPNSYAFIIDMPGLKSGDIKVXVGXDNVLVISGERKREEEREGAKYXRMERRVGKFMRKFALPENANTDKISAVCQBGVLTVTVEKLPPPEPKXPKTIEVKIA

SEQ ID NO: 11145 - DNA, 471 bp, Vitis vinifera
  CDS (1)..(471)
  misc_feature (342)..(342): r is g or a
atggatttgagggtcatggatttcgattctccactattctcaaccctgcaacacatgctcgatgccgttgaagattccgataaatctctcaacgctcccacccgcacctacgtccgcgacgccaaggccatggctgcgacaccggctgacgtcaaggagtacccgaatgcctacgccttcatcatcgacatgccgggcctgaagtccggcgacatcaaggttcaggtggaggacgacaatgtgctgatgatcagcggcgagaggaagcgtgaggaggagaaagaaggcgccaagtacgtgagaatggagaggagggtggggaagtttatgaggaagtttgtrctgccggagaatgcgaatactgataagatctccgcggtttgtcaagatggggtgctgaccgtcactgttgagaagctgccaccgccggagcccaagaagcccaagacaattgaggtcaaaattgcttga

SEQ ID NO: 11146 - protein, 156 aa, Vitis vinifera
MDLRVMDFDSPLFSTLQHMLDAVEDSDKSLNAPTRTYVRDAKAMAATPADVKEYPNAYAFIIDMPGLKSGDIKVQVEDDNVLMISGERKREEEKEGAKYVRMERRVGKFMRKFVLPENANTDKISAVCQDGVLTVTVEKLPPPEPKKPKTIEVKIA

SEQ ID NO: 11147 - DNA, 474 bp, Vitis vinifera
  CDS (1)..(474)
  misc_feature (232)..(232): r is g or a
  misc_feature (380)..(380): y is t or c
atggatttgaggatcgtgggttttgattgtccattcttctcaactctccaaaacatgatcgacaccggcgacgattccgacaagtctctcaacactccaacccgcacctatgtccgcgacgccaaggccatggctgcgactccggctgacgtcaaggaatacccgaattcctacgccttcatcatcgacatgccggggctgaagtccggcgacatcaaggttcaggtggagracgacaatgtgctggtgatcagcggagagaggaagcgggaggaggagaaggaaggcgccaagtacgtgagaatggagaggagggtggtggggaagtttatgaggaagtttgtgttgccagagaatgcgaatactgataagatatctgycgtttgtcaagatggggtgttgaccgtcaccgttgagaagctgccaccgccggagcccaagaagcccaagaccgttgaggtcaaaattgcttga

SEQ ID NO: 11148 - protein, 157 aa, Vitis vinifera
  misc_feature (127)..(127): The Xaa at location 127 stands for Ala, or Val.
MDLRIVGFDCPFFSTLQNMIDTGDDSDKSLNTPTRTYVRDAKAMAATPADVKEYPNSYAFIIDMPGLKSGDIKVQVEBDNVLVISGERKREEEKEGAKYVRMERRVVGKFMRKFVLPENANTDKISXVCQDGVLTVTVEKLPPPEPKKPKTVEVKIA

SEQ ID NO: 11149 - DNA, 471 bp, Vitis vinifera
  CDS (1)..(471)
  misc_feature (44)..(44): y is t or c
  misc_feature (235)..(235): r is g or a
  misc_feature (294)..(294): r is g or a
  misc_feature (356)..(356): y is t or c
  misc_feature (403)..(403): r is g or a
atggatttgaggatgataggctttgattctccactcttctctgycctccaacacatgctcgacggcgccgatgactccgaaaagtccgtcagcgcccccactagcacctacgtccgcgacgccaaggccatggcggcgacgccggctgacgtcaaggagtgcccgaattcctacactttcatcgtcgacatgccggggctgaagtcctgcgacgtcaaggttcaggtggaggacracaatgtgctggtgatcagcggagagaggaagcgtgaggaagagaaggaaggcgtcaartacgtgagaatggagaggagggtaggcaaatttatgaggaagtttgcgttgccggagaatgygaatactgataagatctccgcggtttgtcaagatggagtactgaccrtcaccgttgagaagctaccaccgccagagcccaagaagcccaagatcatagaggtcaagatcgcttaa

SEQ ID NO: 11150 - protein, 156 aa, Vitis vinifera
  misc_feature (15)..(15): The Xaa at location 15 stands for Ala, or Val.
  misc_feature (119)..(119): The Xaa at location 119 stands for Ala, or Val.
  misc_feature (135)..(135): The Xaa at location 135 stands for Ile, or Val.
MDLRMIGFDSPLFSXLQHMLDGADDSEKSVSAPTSTYVRDAKAMAATPADVKECPNSYTFIVDMPGLKSCDVKVQVEDBNVLVISGERKREEEKEGVKYVRMERRVGKFMRKFALPENXNTDKISAVCQDGVLTXTVEKLPPPEPKKPKIIEVKIA

SEQ ID NO: 11151 - DNA, 471 bp, Vitis vinifera
  CDS (1)..(471)
  misc_feature (289)..(289): k is g or t
  misc_feature (357)..(357): k is g or t
  misc_feature (441)..(441): r is g or a
atggatttgagggtcatgggttttgattctccactcttctcaaccctccaacacatgctcgacgccggcgacgattccgacaagtctctcaacgctcccacccgcacctacgtccgggacgccaaggccatggcggcgacgccggctgacgtcaaggagtacccgaattcctacaccttcatcgtcgacatgccggggctgaggtccggcgacatcaaggttcaggtggaggacggcaatgtgctggtgatcagcggagagaggaagcgggaggaggagaaggaaggtkccaagtacgtaagaatggagaggagagtggggaagtttatgaggaagttcgtgttgccggagaatgckaatactgataaaatctctgctgtatgtcaagatggggtgttgaccgtcaccgttgagaagctgccaccgccggaacccaagaarcccaagaccattgaggtcaaaattgcttga

SEQ ID NO: 11152 - protein, 156 aa, Vitis vinifera
  misc_feature (97)..(97): The Xaa at location 97 stands for Ala, or Ser.
MDLRVMGFDSPLFSTLQHMLDAGDDSDKSLNAPTRTYVRDAKAMAATPADVKEYPNSYTFIVDMPGLRSGDIKVQVEDGNVLVISGERKREEEKEGXKYVRMERRVGKFMRKFVLPENANTDKISAVCQDGVLTVTVEKLPPPEPKKPKTIEVKIA

SEQ ID NO: 11153 - DNA, 474 bp, Ageratina adenophora
  CDS (1)..(474)
atgtcaatcattccgagcttctttaccggtagcaggagcagcgttttcgatccgttttccagcgaaatctgggaccccttccagggcttctctagtgccatcagcaaccttccagaatcgtcacgtgaaacagcagcaatcgccaacgccagaatcgactggaaagagacgccggaggctcacgtgttcaaggcggacttaccaggtctgaagaaggaggaagtgaaggtggaggtggaagaaggtagggtgttgcagatcagcggagagaggagcagagaaaacgaggagaagaatgagaaatggcatagggtggagaggagctccgggaagtttgtgaggaggttcaggctgccggagaatgcaaaattggaggaggttaaagctgccatggagaacggtgtgctgacggtgacggtgcccaaggcggaggagaagaagccggacgtgaagtctattgacatttccggctaa

SEQ ID NO: 11154 - protein, 157 aa, Ageratina adenophora
MSIIPSFFTGSRSSVFDPFSSEIWDPFQGFSSAISNLPESSRETAAIANARIDWKETPEAHVFKADLPGLKKEEVKVEVEEGRVLQISGERSRENEEKNEKWHRVERSSGKFVRRFRLPENAKLEEVKAAMENGVLTVTVPKAEEKKPDVKSIDISG

SEQ ID NO: 11155 - DNA, 465 bp, Brassica campestris; identical to SEQ ID NO: 8710
  CDS (1)..(465)

SEQ ID NO: 11156 - protein, 154 aa, Brassica campestris; identical to SEQ ID NO: 8711

SEQ ID NO: 11157 - DNA, 477 bp, Gossypium hirsutum
  CDS (1)..(477)
atgtctctcattccaagcttctttggcaaccgtcgcagcagtgcctttgatccattctctcttgatgtttgggatcctttcaaggacttccctttctcttctccttcatcactctccacgggctcttcggaaacttcggcttttgtcaacacccgaatcgattggaaggaaaccccagaatctcacgtgttcaaggctgatgttccggggcttaagaaagaagaagtgaaagttgaggttgaagatgacagggtgcttcagataagcggggagaggaatgtagagaaggaagacaagaaggacacatggcatcgggtggaacgcagtagtggcaagttcatgaggaggttcagactgccggagaatgccaagatggatcagataaaggcttccatggaaaatggagtgcttactgttactattcccaaacttgaagtcaaaaagcccgatgtgaagtccattgaaatttccggataa

SEQ ID NO: 11158 - protein, 158 aa, Gossypium hirsutum
MSLIPSFFGNRRSSAFDPFSLDVWDPFKDFPFSSPSSLSTGSSETSAFVNTRIDWKETPESHVFKADVPGLKKEEVKVEVEDDRVLQISGERNVEKEDKKDTWHRVERSSGKFMRRFRLPENAKMDQIKASMENGVLTVTIPKLEVKKPDVKSIEISG

SEQ ID NO: 11159 - DNA, 471 bp, Gossypium hirsutum
  CDS (1)..(471)
atggatctcagaatcatgggtttcgattctccgctcttgaatactctccaacacatgatggatctttctgacgatacggagaagatcccgaacgcaccatcaaaggtttacatgcgggatgccaaagccatggctgcaacaccagcggacattaaggagtaccccaagtcttacgtgttcatcgtcgacatgccggggctgaagtcaggggacatcaaggtccaagtggaggacgacaatatgctcttgatcagcggagaaaggaaacgagaggaagagaaagaaggagccaagtacgtgagaatggagaggcgggtcggcaagtttatgaggaaatttgcgttgcctgagaatgctaacgctgatgccatctctgcaatctgtcaagacggggtcttaactgttactgtggagaaactgccaccccctgggcctaagaaacccaagaccatcgaggttaaaatagcttga

SEQ ID NO: 11160 - protein, 156 aa, Gossypium hirsutum
MDLRIMGFDSPLLNTLQHMMDLSDDTEKIPNAPSKVYMRDAKAMAATPADIKEYPKSYVFIVDMPGLKSGDIKVQVEDDNMLLISGERKREEEKEGAKYVRMERRVGKFMRKFALPENANADAISAICQDGVLTVTVEKLPPPGPKKPKTIEVKIA

SEQ ID NO: 11161 - DNA, 456 bp, Picea sitchensis
  CDS (1)..(456)
atggcaatggatcctctgttgagcaccgtgcagcagctgctgggtgtgccggacgacctggagaggatcctccacgccccgactcgctcttatatgcgcgacaccgaggccacggcttcgactcccgtagatgttaaagaataccccaactcttatgtctttatagtcgacatgcccggccttaaatccaacgacatcaaggttcaagtggaagacgagaacgttctgaacatcagtggcgagcggaagaggaacgagaaggaagaaggggaagtgaaatacatccgcatggagcgcagagtagcaaagttcatgaggaaattcagcttgcctgctgactgcaacctggaggccatctctgctgcgtgccaggatggagtgctgaccgtcaccgttcccaagcttcccccaccggagccgaagaaacctaagacgattgcagtcaaaattggataa

SEQ ID NO: 11162 - protein, 151 aa, Picea sitchensis
MAMDPLLSTVQQLLGVPDDLERILHAPTRSYMRDTEATASTPVDVKEYPNSYVFIVDMPGLKSNDIKVQVEDENVLNISGERKRNEKEEGEVKYIRMERRVAKFMRKFSLPADCNLEAISAACQDGVLTVTVPKLPPPEPKKPKTIAVKIG

SEQ ID NO: 11163 - DNA, 474 bp, Picea sitchensis
  CDS (1)..(474)
atgaagagttacctggatcacgctctcgccatgagcccgctattgcacttcccggaagaactggagaggatcataatcccgtccgcccggtcatatgaccagcatgaggagaacaagggcgtggagcctgcggctgtggacatcaaagaaacgcccaaggagtacgtgttctatgccgacgttcccggcctgacgaagtccgacattcaggtatatgtggaggaggataagctgctggtgataaaataccaaggaggcaagcggaagcgcgaaggggtcgaggatgaggagtgctgtaagtatctgcgaatggaaagaaagagaaaccctaaattcgcgaggaaatttacgcttcctggcgatgccaatgttgagggcatctctgcttcgtgtgttgatggggttttgactgttactgtgcccaggattccgcctgctatgaagtctaagacaattcagatttctgttaactaa

SEQ ID NO: 11164 - protein, 157 aa, Picea sitchensis
MKSYLDHALAMSPLLHFPEELERIIIPSARSYDQHEENKGVEPAAVDIKETPKEYVFYADVPGLTKSDIQVYVEEDKLLVIKYQGGKRKREGVEDEECCKYLRMERKRNPKFARKFTLPGDANVEGISASCVDGVLTVTVPRIPPAMKSKTIQISVN

SEQ ID NO: 11165 - DNA, 459 bp, Picea sitchensis
  CDS (1)..(459)
atggcaatggatcctctgttgaacaccgtgcagcagctgctgggtgtgccggacgacctggagaggatcctccacgccccgactcgctcttatatgcgcgacaccgaggccacggcttcgactcccgtagatgttaaagaataccccaactcttatgtctttatagtcgacatgcccggccttaaatccaacgacatcaaggttcaagtggaagacgagaacgttctgaacatcagtggcgagcggaagaggaccgagaaggatgaagaaggggaagtgaaatacatccgcatggagcgcagagtagcaaagttcatgaggaaattcagcttgcctgctgactgcaacctggaggccatctctgctgcgtgccaggatggagtgctgaccgtcaccgttcccaagcttcccccacccgagccgaagaaacctaaaacgattgcagtcaaaattggataa

SEQ ID NO: 11166 - protein, 152 aa, Picea sitchensis
MAMDPLLNTVQQLLGVPDDLERILHAPTRSYMRDTEATASTPVDVKEYPNSYVFIVDMPGLKSNDIKVQVEDENVLNISGERKRTEKDEEGEVKYIRMERRVAKFMRKFSLPADCNLEAISAACQDGVLTVTVPKLPPPEPKKPKTIAVKIG

SEQ ID NO: 11167 - DNA, 453 bp, Picea sitchensis
  CDS (1)..(453)
atggatcctctgttgagcaccgtgcagcatctgctggtcgtgccggacgacctcgataggctcctccacgccccgactcgctcttatgtgcgtgacaccgaagccgcggcttcgactcctgtagatgttaaagaataccccaactcatacgtctttatagtcgacatgcccggccttaaatccaatgacatcaaggttcaagtggaggacgagaacgttctgaacatcagtggcgagcggaaaaggaacgagaaggaagaagaaggggaagtgaaatacatccgcatggagcgcagagtggcgaagttcatgaggaaattcaccttgcctgctgactgcaacctggaggccatctctgccgcgtgtcaggatggagtgctgaacgtcaccgttcccaagcttcccccacctgagccgaagaaacctaagacgattgaggtcaaaattggataa

SEQ ID NO: 11168 - protein, 150 aa, Picea sitchensis
MDPLLSTVQHLLVVPDDLDRLLHAPTRSYVRDTEAAASTPVDVKEYPNSYVFIVDMPGLKSNDIKVQVEDENVLNISGERKRNEKEEEGEVKYIRMERRVAKFMRKFTLPADCNLEAISAACQDGVLNVTVPKLPPPEPKKPKTIEVKIG

SEQ ID NO: 11169 - DNA, 459 bp, Picea sitchensis
  CDS (1)..(459)
atggcaatggatccttcgttgatcacagtgcagcagctgctcggcgtgccggacgacctggagaagcttctcaacgctccgactcgctcttacatgcgtgacaccaaggccatggcttccactcctgtggatgttaaagaatacccaaattcctacgtctttataatcgacatgcctggccttaaatccaacgacatcaaggttcaagttgaagacgagaatgttctgaacatcagcggcgagcggaagaggaacgaaaaggaagaagaaggggaagtgaaatacattcgcatggagcgtagggtggggaaattcatgagaaagttcgccctgcccgctgactgcaacctagaggccatatctgccgcgtgtcaggatggagtgctcaccgtcaccgttcctaagcttccaccgccggagccgaagaaacctaggactattgatgttaaaattggataa

SEQ ID NO: 11170 - protein, 152 aa, Picea sitchensis
MAMDPSLITVQQLLGVPDDLEKLLNAPTRSYMRDTKAMASTPVDVKEYPNSYVFIIDMPGLKSNDIKVQVEDENVLNISGERKRNEKEEEGEVKYIRMERRVGKFMRKFALPADCNLEAISAACQDGVLTVTVPKLPPPEPKKPRTIDVKIG

SEQ ID NO: 11171 - DNA, 447 bp, Picea sitchensis
  CDS (1)..(447)
atggcaatggatcctctgttgagcaccgtgcagcagctgcttggtgtgccggacgacctggagaggatcctccacgccccgactcgctcttatatgcgcgacaccgaggccacggcttcgactcccgtagatgttaaggaataccccaactcttatgtctttatagtcgatatgcccggccttaaatccaacgacatcaaggttcaagtggaagacgagaacgttctgaacatcagtggcgagcggaagaggaacgagaaggaagaaggggaagtgaaatacatccgcatggagcgcagagtggcaaagttcatgaggaaattcaccttgcctgctgactgcaacctggaggccatctctgctgcgtgccaggatggagtgctgaccgtcaccgttcccaagcttcccccaccggaaccgaagacgattgcagtcaaaattggataa

SEQ ID NO: 11172 - protein, 148 aa, Picea sitchensis
MAMDPLLSTVQQLLGVPDDLERILHAPTRSYMRDTEATASTPVDVKEYPNSYVFIVDMPGLKSNDIKVQVEDENVLNISGERKRNEKEEGEVKYIRMERRVAKFMRKFTLPADCNLEAISAACQDGVLTVTVPKLPPPEPKTIAVKIG

SEQ ID NO: 11173 - DNA, 474 bp, Picea sitchensis
  CDS (1)..(474)
atgaagagttacctggatcacgctctcgccatgagcccgctattgcacttcccggaagaactggagaggatcataatcccgtccgcccggtcatatgaccagcatgaggagaacaagggcctggagcctgcggctgtggacatcaaagaaacgcccaaggagtacgtgttctacgccgacgttcccggcctgacgaagtccgacattcaggtatatgtggaggaggataagctgctggtgataaaataccagggaggcaagcggaagcgcgaaggggtcgaggatgaggagtgctgtaagtatctgcgaatggaaagaaagagaaaccctaaattcgcgaggaaatttacgcttcctggcgatgccaatgttgagggcatctctgcttcgtgtgttgatggggttttgactgttactgtgcccaggattccgcctgctatgaagtctaagacaattcagatttctgttaactga

SEQ ID NO: 11174 - protein, 157 aa, Picea sitchensis
MKSYLDHALAMSPLLHFPEELERIIIPSARSYDQHEENKGLEPAAVDIKETPKEYVFYADVPGLTKSDIQVYVEEDKLLVIKYQGGKRKREGVEDEECCKYLRMERKRNPKFARKFTLPGDANVEGISASCVDGVLTVTVPRIPPAMKSKTIQISVN

SEQ ID NO: 11175 - DNA, 456 bp, Picea sitchensis
  CDS (1)..(456)
atggctatggatcctctgttgaacaccgtgcagcagctgctggttgtgccggacgacctggagaggatcctccacgccccgactcgctcttatatgcgcgacaccgaggccacggcttcgactcccgtagatgttaaagaataccccaactcttatgtctttatagtcgacatgcccggccttaaatccaacgacatcaaggttcaagtggaagacgagaacattctgaacatcagtggcgagcggaagaggaacgagaaggaagaaggggaagtgaaatacatccgcatggagcgcagagtggcgaagttcatgaggaaattcagcttgccggctgactgcaacctggaggccatctctgctgcgtgccaggatggagtgctgaccgtcaacgttcccaagctccccccaccggaaccgaagaaacctaagacgattgcagtcaaaattggataa

SEQ ID NO: 11176 - protein, 151 aa, Picea sitchensis
MAMDPLLNTVQQLLVVPDDLERILHAPTRSYMRDTEATASTPVDVKEYPNSYVFIVDMPGLKSNDIKVQVEDENILNISGERKRNEKEEGEVKYIRMERRVAKFMRKFSLPADCNLEAISAACQDGVLTVNVPKLPPPEPKKPKTIAVKIG

SEQ ID NO: 11177 - DNA, 459 bp, Picea sitchensis
  CDS (1)..(459)
atggcaatggatccttcgttgatcacagtgcagcagctgctcggcgtgccggacgacctggagaagcttctcaacgctccgactcgctcttacatgcgtgacaccaaggccatggcttccactcctgtggatgttaaagaatacccaaattcctacgtctttataatcgacatgcctggccttaaatccaacgacatcaaggttcaagttgaagacgagaatgttctgaacatcagcggcgagcggaagaggaacgaaaaggaagaagaaggggaagtgaaatacattcgcatggagcgtagggtagggaaattcatgagaaagttcaccctgcccgctgactgcaacctagaggccatatctgccgcgtgtcaggatggagtgctcaccgtcaccgttcctaagcttccaccgccggagccgaagaaacctaagactattgaagttaaaattggataa

SEQ ID NO: 11178 - protein, 152 aa, Picea sitchensis
MAMDPSLITVQQLLGVPDDLEKLLNAPTRSYMRDTKAMASTPVDVKEYPNSYVFIIDMPGLKSNDIKVQVEDENVLNISGERKRNEKEEEGEVKYIRMERRVGKFMRKFTLPADCNLEAISAACQDGVLTVTVPKLPPPEPKKPKTIEVKIG

SEQ ID NO: 11179 - DNA, 471 bp, Rosa hybrid cultivar
  CDS (1)..(471)
atggctctcagtctctttggcaccggccgacgcagcaacgtcttcgacccattttccctcgacatctgggacccctttcagggcataggctctctcgtcaactcctcctccactgccggcgacacctccgccttcgctcagacccgaatcgactggaaggagaccccggaggcccacatcttcaaggcggacctccccggactgaagaaggaagaagtgaaggttgagctggaggaagggaatgtccttcagatcagcggagagaggagcagggagcaggaggagaagaatgacaagtggcacagggtggagaggagcagcggcaagttcctgaggaggttcaggctgccggataatgcaaaggtggaacatgtcagggcttctatggagaatggggttctcactgtgactgtgcccaaagcagaggagcagaagccccaggtcaagagcatcgacatttctggagcctaa

SEQ ID NO: 11180 - protein, 156 aa, Rosa hybrid cultivar
MALSLFGTGRRSNVFDPFSLDIWDPFQGIGSLVNSSSTAGDTSAFAQTRIDWKETPEAHIFKADLPGLKKEEVKVELEEGNVLQISGERSREQEEKNDKWHRVERSSGKFLRRFRLPDNAKVEHVRASMENGVLTVTVPKAEEQKPQVKSIDISGA

SEQ ID NO: 11181 - DNA, 474 bp, Rosa hybrid cultivar
  CDS (1)..(474)
atggatttcagaatcatgggtctggatgctccaatcttaacagcactgcagcacctggcggacctcccggaggagaccgagaagaccttcaacaacgcccccacccggacctacgtccgcgacgccaaggccatggctgccactccggccgacgtgaaggagttgcccaattcctatgtcttcgtcatcgacatgcctggcctcaagtcaggggacatcaaggtgcaggtggaggatgacaatgtgcttctgatcagcggcgagaggaagagggaggaggagaaagagggggctaagtatgtgaggatggagaggagggtcggtaagtttatgaggaagtttgtgctgcctgagaatgctaatgctgataccatttctgctgtttgccaagatggggttctgactgtgactgtggagaagctgccacctcctcagccgaagaagcccaagactattgaggtcaagattggttaa

SEQ ID NO: 11182 - protein, 157 aa, Rosa hybrid cultivar
MDFRIMGLDAPILTALQHLADLPEETEKTFNNAPTRTYVRDAKAMAATPADVKELPNSYVFVIDMPGLKSGDIKVQVEDDNVLLISGERKREEEKEGAKYVRMERRVGKFMRKFVLPENANADTISAVCQDGVLTVTVEKLPPPQPKKPKTIEVKIG

SEQ ID NO: 11183 - DNA, 444 bp, Aegilops longissima
  CDS (1)..(444)
atgtcgatcgtgaggcggacgaacgtgttcgaccccttcgcggaccccttcgacaccttccgctccatcgtcccggcgatcacaggcggcagcagcgagacggccgcgttcaccaacgcccggatggactggaaggagacgcctgaggcgcacgtcttcaaggccgatcttccaggggtgaagaaggaggaggtcaaggtggaggtggaggacggcaacatgctcgtcgtcagcggcgagcggagcagggagaaggaggacaagaatgacaagtggcaccgcgtggagcgcagcagcggcaagttcgtgcggcgcttccgcctgccggaggacgccaaggtggaggaggtgaaggccgggctggagaatggggtgctcaccgtcaccgtgcccaaggcccaggtcaagaagcccgaggtgaagtccatccagatctccggctga

SEQ ID NO: 11184 - protein, 147 aa, Aegilops longissima
MSIVRRTNVFDPFADPFDTFRSIVPAITGGSSETAAFTNARMDWKETPEAHVFKADLPGVKKEEVKVEVEDGNMLVVSGERSREKEDKNDKWHRVERSSGKFVRRFRLPEDAKVEEVKAGLENGVLTVTVPKAQVKKPEVKSIQISG

SEQ ID NO: 11185 - DNA, 480 bp, Aegilops longissima
  CDS (1)..(480)
atggcgggcatggtgttcggcttggagaacccgatgatgaccgccctgcagcacctgctggacatcccggacggggaggctggtggagccggtgccgccggcggcgagaagcagggcccgatgcgggcctacgtccgtgatgtgcgcgccatggcggccaccccggccgacgtgaaggagctgccgggcgcgtacgcgttcgtggtggacatgtcggggctcgggtccggcgacatcaaggtgcaggtggaggacgagagggtgctggtgatcagcggcgagcggcggagcgaggagaaggaggacgccaagtacatgcggatggagcgccgcatgggcaagctgatgcgcaagttcgtgctccccaagaacgccgacatggagaagatctccgccgtgtgccgcgacggcgtgctcaccgtcaccgtcgagaagctgccgccgcccgagcccaagaccatccaggtccaggtcgcctga

SEQ ID NO: 11186 - protein, 159 aa, Aegilops longissima
MAGMVFGLENPMMTALQHLLDIPDGEAGGAGAAGGEKQGPMRAYVRDVRAMAATPADVKELPGAYAFVVDMSGLGSGDIKVQVEDERVLVISGERRSEEKEDAKYMRMERRMGKLMRKFVLPKNADMEKISAVCRDGVLTVTVEKLPPPEPKTIQVQVA

SEQ ID NO: 11187 - DNA, 483 bp, Triticum turgidum subsp. dicoccon
  CDS (1)..(483)
atggcgggcatggtgttcggcttggagaacccgatgatgacggcgctgcagcacctgctggacatcccagacggcgaggccggcaacaccgccggcggcgagaagcagggcccgacgcgcgcttacgtccgtgacgcgcgagccatggcggcaacccccgccgacgtgaaggagctgccgggcgcgtacgcgttcgtggtggacatgccggggctgggttccggcgacatccaggtgcaggtggaggacgagcgggtactggtcatcagcggcgagcggaggagggaggagaaggaggacgccaagtacctgcgggtggagcgccgcatgggcaagctgatgcgcaagttcatgctccccggcaacgccgacatggagaagatctccgccgtgtgccgcgacggcgtgctcaccgtgaccgtcgacaagctgcccccgcccgagcccaagaagcccaagaccatccaggtccaggtcgcctga

SEQ ID NO: 11188 - protein, 160 aa, Triticum turgidum subsp. dicoccon
MAGMVFGLENPMMTALQHLLDIPDGEAGNTAGGEKQGPTRAYVRDARAMAATPADVKELPGAYAFVVDMPGLGSGDIQVQVEDERVLVISGERRREEKEDAKYLRVERRMGKLMRKFMLPGNADMEKISAVCRDGVLTVTVDKLPPPEPKKPKTIQVQVA

SEQ ID NO: 11189 - DNA, 483 bp, Triticum turgidum subsp. durum (durum wheat)
  CDS (1)..(483)
atggcgggcatggtgttcggcttggagaacccgatgatgacggcgctgcagcacctgctggacatcccagacggcgaggccggcaacaccgccggcggcgagaagcagggcccgacgcgcgcttacgtccgtgacgcgcgcgccatggcagccaccccggcggacgtgaaggagctgccgggcgcgtacgcgttcgtggtggacatgccggggctgggttccggcgacatccaggtgcaggtggaggacgagcgggtactggtcatcagcggcgagcggaggagggaggagaaggaggacgccaagtacctgccgatggagcgccgcatgggcaagctgatgcgcaagttcatgctccccggcaacgccgacatggagaagatctccgccgcgtgccgcgacggcgtgctgaccgtcaccgtcgagaagctgccgccgcccgagcccaagaagcccaagaccatccaggtccaggtcgcctga

SEQ ID NO: 11190 - protein, 160 aa, Triticum turgidum subsp. durum (durum wheat)
MAGMVFGLENPMMTALQHLLDIPDGEAGNTAGGEKQGPTRAYVRDARAMAATPADVKELPGAYAFVVDMPGLGSGDIQVQVEDERVLVISGERRREEKEDAKYLPMERRMGKLMRKFMLPGNADMEKISAACRDGVLTVTVEKLPPPEPKKPKTIQVQVA

SEQ ID NO: 11191 - DNA, 390 bp, Triticum monococcum
  CDS (1)..(390)
atggcgggcatggtgttcggcttggagaactcgatgatgacggcgctgcagcacctgctggacatccccgacgtgaaggagctgccgggcgcgtacgcgttcgtggtggacatgccggggctcgggtccggcgacatcaaggtgcaggtggaggacgagcgggtcctggtcatcagcggcgagcggcggagggaggagaaggaggacgccaagtacctgcggatggagcgccgcatgggcaagctgatgcgcaagttcgtgctgccggagaacgccgacatggagaagatctccgccgcgtgccgcgacggcgtgctcaccgtgacagtggagaagctgccgccgcccgagcccaagaagcccaagaccatccaggtccaggtcgcctga

SEQ ID NO: 11192 - protein, 129 aa, Triticum monococcum
MAGMVFGLENSMMTALQHLLDIPDVKELPGAYAFVVDMPGLGSGDIKVQVEDERVLVISGERRREEKEDAKYLRMERRMGKLMRKFVLPENADMEKISAACRDGVLTVTVEKLPPPEPKKPKTIQVQVA

SEQ ID NO: 11193 - DNA, 429 bp, Triticum monococcum
  CDS (1)..(429)
atggcgggcatggtgttcggcttggagaacccgatgatgacggcgctgcagcacctgctggacatccccgacggcgaggccggcaacaccgccggcggcgagaagcagggcccgacgcgcgcctacgtccgcgacgcgttcgtggtggacatgccggggctcgggtccggcgacatcaaggtgcaggtggaggacgagcgggtcctggtcatcagcggcgagcggcggagggaggagaaggaggacgccaagtacctgcggatggagcgccgcatgggcaagctgatgcgcaagttcgtgctgccggagaacgccgacatggagaagatctccgccgcgtgccgcgacggcgtgctcaccgtgacagtggagaagctgccgccgcccgagcccaagaagcccaagaccatccaggtccaggtcgcctga

SEQ ID NO: 11194 - protein, 142 aa, Triticum monococcum
MAGMVFGLENPMMTALQHLLDIPDGEAGNTAGGEKQGPTRAYVRDAFVVDMPGLGSGDIKVQVEDERVLVISGERRREEKEDAKYLRMERRMGKLMRKFVLPENADMEKISAACRDGVLTVTVEKLPPPEPKKPKTIQVQVA

SEQ ID NO: 11195 - DNA, 465 bp, Zea mays
  CDS (1)..(465)
  misc_feature (258)..(258): r is g or a
  misc_feature (394)..(394): m is a or c
atggacgcgaggatgttcgggctggagaccccccgggtggcggcgctgcatcacctgctggacgtgcccgacggcgacaaggcgggcggcggcgccacgcgcacctacgtccgcgacgcgcgcgccatggcggccaccccggccgacgtcaaggagctcgcgggagcgtacgcgttcgtggtggacatgccggggctgagcacgggcaacatcagggtgcaggtggaggacgagcgggtgctggtgatcagcggcgarcggcgccgggaggagcgcgaggacgccaagtacctgcgcatggagcggcggatgggcaagttcatgcgcaagttcgtgctgccggacaacgccgacgtggacaaggtcgccgccgtgtgcagggacggcgtgctcmcggtgaccgtcgagaagctgcccccgccggagcccaagaagcccaagaccatcgagattaaggtcgcctga

SEQ ID NO: 11196 - protein, 154 aa, Zea mays
  misc_feature (132)..(132): The Xaa at location 132 stands for Pro, or Thr.
MDARMFGLETPRVAALHHLLDVPDGDKAGGGATRTYVRDARAMAATPADVKELAGAYAFVVDMPGLSTGNIRVQVEDERVLVISGERRREEREDAKYLRMERRMGKFMRKFVLPDNADVDKVAAVCRDGVLXVTVEKLPPPEPKKPKTIEIKVA

SEQ ID NO: 11197 - DNA, 492 bp, Zea mays
  CDS (1)..(492)
atggacgcggtgatgttcgggctggagactcccctgatggcggcgctgcagcacctgctggacgtgcccgacggcgacgccggcgcgggcgacaacaagacgggcggcggcggcggcgccacgcgcacctatgtccgcgacgcgcgcgccatggcggccaccccggccgacgtgaaggagctgcccggctcgtacgcgttcgtggtggacatgccggggctgggcacgggcgacatccgggtgcaggtggaggacgagcgggtgctggtggtcagcggcgagcggcgccgggaggagcgcgaggacgacgccaagtacctgcgcatggagcggcggatggacaagttcatgcgcaagttcgtgctgccggacaacgccgacgtcgacaaggtcgccgccgtgtgcagggacggcgtgctcacggtgaccgtcgagaagctgcccccgccggagcccaagaagcccaagaccatcgaggtcaaggtcgcctga

SEQ ID NO: 11198 - protein, 163 aa, Zea mays
MDAVMFGLETPLMAALQHLLDVPDGDAGAGDNKTGGGGGATRTYVRDARAMAATPADVKELPGSYAFVVDMPGLGTGDIRVQVEDERVLVVSGERRREEREDDAKYLRMERRMDKFMRKFVLPDNADVDKVAAVCRDGVLTVTVEKLPPPEPKKPKTIEVKVA

SEQ ID NO: 11199 - DNA, 525 bp, Zea mays
  CDS (1)..(525)
atgacggagctgttcgacacggccttgaccagcctcctccacctgccggaggtgctggaccgcctcgccgccgcagacggcgaccggcggtcggccggccaccacgcggcgcacggccacggccacggccacggccacggacgcgtccacgggctcggcggcggcggagcgccggtggacatcgtggagagcccccgcgagtacgccttcgtgctcgacgtgcccggcctctccaagtcagacatccaggtgacgctggaggaggaccgggtgctggtgatgaagggcggcagcgggaagcggaagcgcgatgaggaggaggacatgaacggcgaagggtgccgatacatccggttggagcgcggcgcggcgccgcggtcgttcgtgcgcaagttccggctgccggaggatgcggacacgggcggcgttgcggcgcgctgcgagaacggtgtgctcaccgtcaccgtcaagaagctgccgccgccggagaagaaggccaagaccgtgcaggtcaccatcgcctag

SEQ ID NO: 11200 - protein, 174 aa, Zea mays
MTELFDTALTSLLHLPEVLDRLAAADGDRRSAGHHAAHGHGHGHGHGRVHGLGGGGAPVDIVESPREYAFVLDVPGLSKSDIQVTLEEDRVLVMKGGSGKRKRDEEEDMNGEGCRYIRLERGAAPRSFVRKFRLPEDADTGGVAARCENGVLTVTVKKLPPPEKKAKTVQVTIA

SEQ ID NO: 11201 - DNA, 519 bp, Oryza sativa subsp. indica
  CDS (1)..(519)
atgacggagctgttcgacaccgccgtgaccagcctcctccacctaccggaggtgctcgaccgcctcggcgccgccgccggggaccgccgctcggcgggcgaccacgcgcaccacgccgcgcatggacacggccagcaccgcatcagtggaatcggtagtggcgcgccagtggacatcatggagacccccggcgagtacgcgttcgtgctcgacgtccctggcctctccaagtccgacatccaggtgacgctggaggaggacagggtgctggtgatgaagagcagcaatggcgccgggaacgggaagcggaagcgggaggaggaggaaggggagtgcaagtacatccgcctcgagcgccgcgcgtcgccgagggcgttcgcgcgcaagttccgcctcccggaggacgcggacaccggcggcatctcggcgcgatgcgagaacggggtgctcacggtcaccgtcaagaagcggccgccgccggagaagaagaccaagtccgtccaggtcaccatcgcctga

SEQ ID NO: 11202 - protein, 172 aa, Oryza sativa subsp. indica
MTELFDTAVTSLLHLPEVLDRLGAAAGDRRSAGDHAHHAAHGHGQHRISGIGSGAPVDIMETPGEYAFVLDVPGLSKSDIQVTLEEDRVLVMKSSNGAGNGKRKREEEEGECKYIRLERRASPRAFARKFRLPEDADTGGISARCENGVLTVTVKKRPPPEKKTKSVQVTIA

SEQ ID NO: 11203 - DNA, 456 bp, Picea sitchensis
  CDS (1)..(456)
atggcaatggatcctctgttgagcaccgtgcagcagctgctgggtgtgccggacgacctggagaggatcctccacgccccgactcgctcttatatgcgcgacaccgaggccacggcttcgactcccgtagatgttaaagaataccccaactcttatgtctttatagtcgacatgcccggccttaaatccaacgacatcaaggttcaagtggaagacgagaacgttctgaacatcagtggcgagcggaagaggaacgagaaggaagaaggggaagtgaaatacatccgcatggagcgcagagtggcaaagttcatgaggaaattcaccttgcctgttgactgcaacctggaggccatctctgctgcgtgccaggatggagtgctgaccgtcaccgttcccaagctccccccaccggaaccgaagaaacctaagacgattgcagtcaaaattggataa

SEQ ID NO: 11204 - protein, 151 aa, Picea sitchensis
MAMDPLLSTVQQLLGVPDDLERILHAPTRSYMRDTEATASTPVDVKEYPNSYVFIVDMPGLKSNDIKVQVEDENVLNISGERKRNEKEEGEVKYIRMERRVAKFMRKFTLPVDCNLEAISAACQDGVLTVTVPKLPPPEPKKPKTIAVKIG

SEQ ID NO: 11205 - DNA, 468 bp, Agaricus bisporus
  CDS (1)..(468)
atgtctactttcttctacgaacctttctacgacatcgaccgccttatcactgacgtcttggcccctcgttcccagtgggctggggatactggaagccgtgagctccaacgggcgtctggcgagggtgcccctcgacctttcaagccaaggatggatcttcacgaagacgcagagaaaaacattgttactgcattcttcgagttgccgggcgttaagaaggatgatgtaactcttgacgcccataatggcagactcaccgtcaccgctgaaaccaagtcttccgatgagcatgaagagcatggctacgccatccgcgaacgtcgctctgggaagtactccaggactcttcagctccctcagggaatcaaggacgatgatatcaaagctcacatggaaaacggtgtattgactgtgaccttcccgaagagtactccggatcaggctccgaggcgtatcaccgttgggtga

SEQ ID NO: 11206 - protein, 155 aa, Agaricus bisporus
MSTFFYEPFYDIDRLITDVLAPRSQWAGDTGSRELQRASGEGAPRPFKPRMDLHEDAEKNIVTAFFELPGVKKDDVTLDAHNGRLTVTAETKSSDEHEEHGYAIRERRSGKYSRTLQLPQGIKDDDIKAHMENGVLTVTFPKSTPDQAPRRITVG

SEQ ID NO: 11207 - DNA, 465 bp, Zea mays
  CDS (1)..(465)
atggacgcgaggatgttcgggctggagaccccccgggtggcggcgctgcatcacctgctggacgtgcccgacggcgacaaggcgggcggcggcgccacgcgcacctacgtccgcgacgcgcgcgccatggcggccaccccggccgacgtcaaggagctcgcgggagcgtacgcgttcgtggtggacatgccggggctgagcacgggcgacatcagggtgcaggtggaggacgagcgggtgctggtgatcagcggcgagcggcgccgggaggagcgcgaggacgccaagtacctgcgcatggagcggcggatgggcaagttcatgcgcaagttcgtgctgccggacaacgccgacgtggacaaggtcgccgccgtgtgcagggacggcgtgctcacggtgaccgtcgagaagctgcccccgccggagcccaagaagcccaagaccatcgagattaacgtcgcctga

SEQ ID NO: 11208 - protein, 154 aa, Zea mays
MDARMFGLETPRVAALHHLLDVPDGDKAGGGATRTYVRDARAMAATPADVKELAGAYAFVVDMPGLSTGDIRVQVEDERVLVISGERRREEREDAKYLRMERRMGKFMRKFVLPDNADVDKVAAVCRDGVLTVTVEKLPPPEPKKPKTIEINVA

SEQ ID NO: 11209 - DNA, 348 bp, Picea sitchensis
  CDS (1)..(348)
atggcttccactcctgtggatgttaaagaatacccaaattcctacgtctttataatcgacatgcctggccttaaatccaacgacatcaaggttcaagttgaagacgagaatgttctgaacatcagcggcgagcggaagaggaacgaaaaggaagaagaaggggaagtgaaatacattcgcatggagcgtagggtagggaaattcatgagaaagttcaccctgcccgctgactgcaacctagaggccatatctgccgcgtgtcaggatggagtgctcaccgtcaccgttcctaagcttccaccgccggagccgaagaaacctaagactattgaagttaaaattggataa

SEQ ID NO: 11210 - protein, 115 aa, Picea sitchensis
MASTPVDVKEYPNSYVFIIDMPGLKSNDIKVQVEDENVLNISGERKRNEKEEEGEVKYIRMERRVGKFMRKFTLPADCNLEAISAACQDGVLTVTVPKLPPPEPKKPKTIEVKIG

SEQ ID NO: 11211 - DNA, 477 bp, Glycine max
  CDS (1)..(477)
atggctatcaggttgatggatttggactctccattcttcaacactctgcacagaatcatggatctgacggaggacgccgagaagaacttgaacgctccgactcggacatacgtgcgcgacgccaaggcgttggctgcgactcctgctgacgtgaaggagtaccctaactcgtacgttttcgtgatcgacatgcctggcctgaaatctggggacattaaagtgcaggtggaggacgacaacgtgcttctgataagcggcgagaggaagagggaggaggaaaaagagaaagaagggggaaagtatttgaggatggagagaaggcttggcaagttgatgaggaagtttactctccctgagaatgccaacaccgatgctatctctgctgtctgcctagacggtgtgctcactgtcactgtcaataagctgcctcctcctcagcccaagaagcccaagactatagaggtcaacatagcctga

SEQ ID NO: 11212 - protein, 158 aa, Glycine max
MAIRLMDLDSPFFNTLHRIMDLTEDAEKNLNAPTRTYVRDAKALAATPADVKEYPNSYVFVIDMPGLKSGDIKVQVEDDNVLLISGERKREEEKEKEGGKYLRMERRLGKLMRKFTLPENANTDAISAVCLDGVLTVTVNKLPPPQPKKPKTIEVNIA

SEQ ID NO: 11213 - DNA, 477 bp, Glycine max
  CDS (1)..(477)
atggatatgaggttgatggatttggactctccattcttcaacactctgcacagaatcatggatctgacggaggacgccgagaagaacttgaacgctccgactcggacatacgtgcgcgacgccaaggcaatggctgcgactcctgctgacgtgaaggagtaccctaactcgtatgttttcgtgatcgacatgcctggcctcaaatctggggacattaaagtgcaggtgggggacgacaacgtgcttctgataagcggcgagaggaagagggaggaggaaaaagagaaagaagggggaaagtatttgaggatggagagaaggcttggcaagttgatgaggaagtttactctccctgagaatgccaacaccgatgctatctctgctgtctgccaagacggtgtgctcactgttactgtcaataaactgcctcctcctcagcccaagaagcccaggactatagaggtcaagatagcctga

SEQ ID NO: 11214 - protein, 158 aa, Glycine max
MDMRLMDLDSPFFNTLHRIMDLTEDAEKNLNAPTRTYVRDAKAMAATPADVKEYPNSYVFVIDMPGLKSGDIKVQVGDDNVLLISGERKREEEKEKEGGKYLRMERRLGKLMRKFTLPENANTDAISAVCQDGVLTVTVNKLPPPQPKKPRTIEVKIA

SEQ ID NO: 11215 - DNA, 480 bp, Glycine max
  CDS (1)..(480)
atggatttcagggtgatgggtttggattctccattattccacacgctgcaacacatgatggacatgtcagaggacgctgcaggggacaacaagacatacagtgctccgacacggtcatacgttcgagacgccaaagcaatggctgcaacacctgcggatgtgaaggaatatcccaactcctacgtattcgagattgacacgccagggttgaaatctggggacataaaggttcaggttgaagacgacaacgtgcttctgattagtggggagagaaagagggatgaagaaatagaaggggtgaagtatctgagaatggagagaaggattgggaagttcatgcgcaagtttgtgttacctgagaatgccaacactgatgcaatctctgctgtgtgccaagatggggtgcttagtgtcatagtgcagaaatcgcctccaccggaacctaagaaacctaagactattgaggttaaggttgcttga

SEQ ID NO: 11216 - protein, 159 aa, Glycine max
MDFRVMGLDSPLFHTLQHMMDMSEDAAGDNKTYSAPTRSYVRDAKAMAATPADVKEYPNSYVFEIDTPGLKSGDIKVQVEDDNVLLISGERKRDEEIEGVKYLRMERRIGKFMRKFVLPENANTDAISAVCQDGVLSVIVQKSPPPEPKKPKTIEVKVA

SEQ ID NO: 11217 - DNA, 489 bp, Glycine max
  CDS (1)..(489)
atgagaagagttggtggtgatgttttgaacgtggatttggctgctgcagtgaacaacctcttcaatcttcctgaaactatggagaagttcatgtttccttcttctcgtgctcatgatcaccaccatgaaaccagaggggtctctagcatcattccagtggacattttggacactcccaaggagtatacattctttatggatgttcctggtctctccaagtctgaaattcaggtgacggttgaagatgagaacacacttgttataagaagcaatgggaagaggaagcgtcaagatggagaggatgaagggtgcaagtatcttaggttggagtggagagggcctcagaatttgcagaggaagtttcgtttgcctgagaatgctaatgtgtcagccattacagctaaatgcgaaaatggggttctcactgtggttgttgagaagcatcctcctccccaaaaatcaaaaactgttgaagttgccattgcttga

SEQ ID NO: 11218 - protein, 162 aa, Glycine max
MRRVGGDVLNVDLAAAVNNLFNLPETMEKFMFPSSRAHDHHHETRGVSSIIPVDILDTPKEYTFFMDVPGLSKSEIQVTVEDENTLVIRSNGKRKRQDGEDEGCKYLRLEWRGPQNLQRKFRLPENANVSAITAKCENGVLTVVVEKHPPPQKSKTVEVAIA

SEQ ID NO: 11219 - DNA, 495 bp, Mesorhizobium opportunistum WSM2075
  CDS (1)..(495): transl_table=11
atgaacatgcgtgaccttatcccgtggggccgcaacaacaaccaggcccccaacatctatggcggtggcgatccctttgtttcgcttcaccgtgaggtaaacaggctctttgacgatgtgttgaggagcttcgagacgcgtctgccttctatggggcagctctcgtctttcgacaatggctggccgaaggtggagatttcggagtcggacaatgagcttcgcgtcaccgccgaggttcccggtatggaagagaaggacatcgaagtcctgctcgatgaggacgtgctgaccctgcgtggcgaaaagcggtcggagaccgaagagaagggctactccgagcgcttctacggtcgcttcgagcggcgcatacctctcggctacgaggtcgaggacgacaaggtcaaggcgtcctttgccaatggcgtcctgaccttgacgctgccgaagaacccagacgcgcaatcgaaggtgaagcgcatcccgatcacccactga

SEQ ID NO: 11220 - protein, 164 aa, Mesorhizobium opportunistum WSM2075
MNMRDLIPWGRNNNQAPNIYGGGDPFVSLHREVNRLFDDVLRSFETRLPSMGQLSSFDNGWPKVEISESDNELRVTAEVPGMEEKDIEVLLDEDVLTLRGEKRSETEEKGYSERFYGRFERRIPLGYEVEDDKVKASFANGVLTLTLPKNPDAQSKVKRIPITH

SEQ ID NO: 11221 - DNA, 471 bp, Prunus salicina
  CDS (1)..(471)
atggatgtgagaatcgcgggtttggattccccactcttctccacactgcagcacatcatggacttcaacgaggagcctgacaaatcgttcaacgcccccacccgcacctacgtccgcgacgccaaggccatggcctccacgccggcggacgtcaaggagtatcccaactcctatgtcttcgtcgtggacatgccaggcctcaagtccggagacatcaaggtccaggtggaggacgacaatgtgcttctgatctccggcgagaggaagagggaggaggagaaggagggggctaagtatgtcaggatggagaggagggtcggcaagtttatgaggaagtttgtgctgcctgagaatgctaatgtggaagccatttctgctgtttgccaagatggggtcctgactgtgactgtgcagaagctgcctccgcctgagccaaagaagcccaagaccattgaggtcaagattgcttga

SEQ ID NO: 11222 - protein, 156 aa, Prunus salicina
MDVRIAGLDSPLFSTLQHIMDFNEEPDKSFNAPTRTYVRDAKAMASTPADVKEYPNSYVFVVDMPGLKSGDIKVQVEDDNVLLISGERKREEEKEGAKYVRMERRVGKFMRKFVLPENANVEAISAVCQDGVLTVTVQKLPPPEPKKPKTIEVKIA

SEQ ID NO: 11223 - DNA, 471 bp, Vitis vinifera
  CDS (1)..(471)
atggatttgagaatgattggcctcgactctccactcttctcagccctccaacacatgctcgacgccgccgacgactccgacaagtccgtcagcgcccccactcgcacctacgtccgcgatgctaaggccatggctgcgacgccggcggacgtcaaggagtaccccaattcctacgccttcatcatcgacatgccggggctgaagtccggcgacatcaaggtgcaggtggaggacgacaatgtgctggtgatcagcggagggaggaagcgcgaggaggagaaggaaggcgccaagtatgtaaaaatggagagaagggtggggaagtttatgaggaagtttgtgttgcctgagaatgccaatactgacaagatctccgcgatttgtcaggatggggtgttgaccgtcacagtggagaagttgcctccgccggagcccaagaaacccaagaccattgaggtgaagatcgcctaa

SEQ ID NO: 11224 - protein, 156 aa, Vitis vinifera
MDLRMIGLDSPLFSALQHMLDAADDSDKSVSAPTRTYVRDAKAMAATPADVKEYPNSYAFIIDMPGLKSGDIKVQVEDDNVLVISGGRKREEEKEGAKYVKMERRVGKFMRKFVLPENANTDKISAICQDGVLTVTVEKLPPPEPKKPKTIEVKIA

SEQ ID NO: 11225 - DNA, 471 bp, Vitis vinifera
  CDS (1)..(471)
atggattcgaggatgatgggcttcgattctccactcttctctgccctccaacacatgctagacgccaccgatgactccgacaagtctgtcagcgcccccactcgcacctacgtccgcgacgccaaggccatggcggcgacgcctgctgacgtcaaggagtacccgaattcctacaccttcatcgtcgacatgccggggctgaagtccggcgacatcaaggttcaggtggaggacgacaatgtgctggtgatcagcggagagaggaagcgtgaggaagagaaggaaggcgtcaagtacgtgagaatggagaggagggtaggcaaatttatgaggaagtttgcgttgccggagaatgcgaatactgataagatctccgcggtttgtcaagatggagtactgaccgtcaccgttgagaagctaccaccgccagagcccaagaagcccaagatcatagaggtcaagatcgcttaa

SEQ ID NO: 11226 - protein, 156 aa, Vitis vinifera
MDSRMMGFDSPLFSALQHMLDATDDSDKSVSAPTRTYVRDAKAMAATPADVKEYPNSYTFIVDMPGLKSGDIKVQVEDDNVLVISGERKREEEKEGVKYVRMERRVGKFMRKFALPENANTDKISAVCQDGVLTVTVEKLPPPEPKKPKIIEVKIA

SEQ ID NO: 11227 - DNA, 474 bp, Jatropha curcas
  CDS (1)..(474)
atggatgtcaggttcgtaggtctcgattcaccacttctccacactctccagcaaatgatggacattggcgacgatgctgaccacaaatccttcaacgcgccaacacgcacttatgtgagggacgcgaaggctatggcttctactccggccgatgtcaaagagtatccgaattcttatgtgttcattatcgacatgcctggattgaagtctggagatatcaaagtgcaggtggaagatgataatgtgctgttgattagtggagagagaaagcgtgaggaggagaaggaaggagctaagtatgtgaggatggaaaggagagttggaaaattgatgaggaagtttgctctgcctgagaatgccaatactgatgccatttctgctgtgtgtcaagatggggttttgactgtcactgtccagaaattgccaccgcctgagcctaaaaagccaaagactattgaggttaaaattgcttga

SEQ ID NO: 11228 - protein, 157 aa, Jatropha curcas
MDVRFVGLDSPLLHTLQQMMDIGDDADHKSFNAPTRTYVRDAKAMASTPADVKEYPNSYVFIIDMPGLKSGDIKVQVEDDNVLLISGERKREEEKEGAKYVRMERRVGKLMRKFALPENANTDAISAVCQDGVLTVTVQKLPPPEPKKPKTIEVKIA

SEQ ID NO: 11229 - DNA, 483 bp, Medicago sativa
  CDS (1)..(483)
atggatttcagattgatgggtttgatgctccagtgctacacagctcttcaccaaatgatggacctttcagatgagaatgtggagaaatcatcatcccacaatgctccaacaagatcctatgtgagagacgccaaagcaatggctgctactcctgcagatgtgaaggagaatccaaattcatacgtgttcgtgatcgacatgccaggattgaaatccggtgatatcaaggttcaggttgaagatgataacgtgcttgttataagcggagagaggaagagggaagaagagaaagaaggtggtgcaaagtatttgagaatggaacgaagggttggtaagtttatgaggaagtttgtgcttcctgagaatcccaacactgatgctgtttctcccgtttgtcaagatggtgtgttgactgttactgttcagaaattgcctcctcctcggcctaagaagcccagaaccattgaagttcagattgcttaa

SEQ ID NO: 11230 - protein, 160 aa, Medicago sativa
MDFRLMGLMLQCYTALHQMMDLSDENVEKSSSHNAPTRSYVRDAKAMAATPADVKENPNSYVFVIDMPGLKSGDIKVQVEDDNVLVISGERKREEEKEGGAKYLRMERRVGKFMRKFVLPENPNTDAVSPVCQDGVLTVTVQKLPPPRPKKPRTIEVQIA

SEQ ID NO: 11231 - DNA, 471 bp, Fragaria ananassa; identical to SEQ ID NO: 8640
  CDS (1)..(471)

SEQ ID NO: 11232 - protein, 156 aa, Fragaria ananassa; identical to SEQ ID NO: 8641

SEQ ID NO: 11233 - DNA, 468 bp, Solanum lycopersicum
  CDS (1)..(468)
atggatttgaggttgatgggtattgataacacaccactcttccacactcttcagcatatgatggaagctgctggtgaagattccgtgaatgcaccaccaaagaagtatgttcgtgatgctaaggcaatggctgcgacaccagtggacgtgaaagagtatcctgattcatatgttttcgttgtggatatgccagggttgaaatctggagatatcaaagtgcaggtagaagaagacaatgtgctgttgattagtggtgaaaggaagagggaagaagagaaagaaggtgtaaagtttattagaatggagagaagggttgggaaattcatgaggaagtttagtctgccggagaatgcgaatactgatgcaatttctgcagtttgtcaagatggaagtctgactgttactgttcagaagctgcctcctcctgagccaaagaagtccaaaaccattcaggtcaaagttgcttga

SEQ ID NO: 11234 - protein, 155 aa, Solanum lycopersicum
MDLRLMGIDNTPLFHTLQHMMEAAGEDSVNAPPKKYVRDAKAMAATPVDVKEYPDSYVFVVDMPGLKSGDIKVQVEEDNVLLISGERKREEEKEGVKFIRMERRVGKFMRKFSLPENANTDAISAVCQDGSLTVTVQKLPPPEPKKSKTIQVKVA

SEQ ID NO: 11235 - DNA, 480 bp, Dactylis glomerata
  CDS (1)..(480)
atggagggcagggtgttcgggctggagaccccgctgatgacggcgctgcagcacctgctggacatcccggacggcgaggccggcaacgccggcggcgagaagcagggcccgacgcgagcctacgtccgcgacgcgcgcgccatggcggccaccccggccgacgtgaaggagctgcctggcgcgtacgcgttcgtggtggacatgccggggctcgggtccggcgacatcaaggtgcaggtggaggacgagcgggtgctggtgatcagcggcgagcgccgcagggaggagaaggaggacgccaagtacctgcggatgggagcgccggatggcaagctcatgcgcaagttcgtgctgcctgagaacgccgacatggagaagatctccgccgtgtcccgcgacggcgtgctcacggtgtctgtggagaagctgccgccccccgagcccaagaagcccaagaccatccaggttcaggttgcctaa

SEQ ID NO: 11236 - protein, 159 aa, Dactylis glomerata
MEGRVFGLETPLMTALQHLLDIPDGEAGNAGGEKQGPTRAYVRDARAMAATPADVKELPGAYAFVVDMPGLGSGDIKVQVEDERVLVISGERRREEKEDAKYLRMGAPDGKLMRKFVLPENADMEKISAVSRDGVLTVSVEKLPPPEPKKPKTIQVQVA

SEQ ID NO: 11237 - DNA, 477 bp, Petroselinum crispum
  CDS (1)..(477)
atggatttcaggctaatgggcttcaatcatccactcctcaacactctttcaccacattgtgacgaagacaatcaggacagcagcaacaagaacaagtccgaacaggctcgtagctatgttcgtgatgcgaaagcaatggcaacaactccagctgatgtgaaggagtatccgaactcgtacgtgtttgtggtggatatgccgggactgaaatcaggcgatattaaggtccaggtggaggaagataatgtgctggtggtgagcggagagcgaaagagagaggaggaaaaggaaggcgtcaagtatgtgagaatggagaggaaggttggcaagtttatgaggaagtttgtgttgcctgagaatgcggatttggagaatatcaatgcggtctgtcaggatggtgtgttgagtgttacggttcagaagttgccgcctcctgagcctaagaagcctaagacgattgaggttaagatcgcttga

SEQ ID NO: 11238 - protein, 158 aa, Petroselinum crispum
MDFRLMGFNHPLLNTLSPHCDEDNQDSSNKNKSEQARSYVRDAKAMATTPADVKEYPNSYVFVVDMPGLKSGDIKVQVEEDNVLVVSGERKREEEKEGVKYVRMERKVGKFMRKFVLPENADLENINAVCQDGVLSVTVQKLPPPEPKKPKTIEVKIA

SEQ ID NO: 11239 - DNA, 459 bp, Picea glauca
  CDS (1)..(459)
atggcaatggatccttcgttgataacagtgcagcacttgctcggcgtgccggacgacctggagaagcttctcaacgctccgactcactcttacatgcgtgacaccaaggccatggcttccactcctgtggatgttaaagaatacccaaattcctacgtttttataatcgacatgcctggccttaaatccaacgacatcaaggttcaagttgaagacgagaatgttctgaacatcagcggcgagcggaagaggaacgaaaaggacgaagaaggggaagtgaaatacattcgcatggagcgtagggtggggaaattcatgagaaagttcaccctgcccgctgactgcaacctagaggccatatctgccgcgtgtcaggatggagtgctcaccgtcaccgttcctaagcttccaccgccggagccgaagaaacctaagactattgaagttaaaattggataa

SEQ ID NO: 11240 - protein, 152 aa, Picea glauca
MAMDPSLITVQHLLGVPDDLEKLLNAPTHSYMRDTKAMASTPVDVKEYPNSYVFIIDMPGLKSNDIKVQVEDENVLNISGERKRNEKDEEGEVKYIRMERRVGKFMRKFTLPADCNLEAISAACQDGVLTVTVPKLPPPEPKKPKTIEVKIG

SEQ ID NO: 11241 - DNA, 456 bp, Picea glauca
  CDS (1)..(456)
atggcaatggatcctctgttgaacaccgtgcagcagctgctggttgtgccggacgacctggagaggatcctccacgccccgactcgctcttatatgcgcgacaccgaggccacggcttcgactcccgtagatgttaaagaataccccaactcttatgtctttatagtcgacatgcccggccttaaatccaacgacatcaaggttcaagtggaagacgagaacattctgaacatcagtggcgagcggaagaggaacgagaaggaagaaggggaagtgaaatacatccgcatggagcgcagagtgggaaagttcatgaggaaattcagcttgccggctgactgcaacctggaggccatctctgctgcgtgccaggatggagtgctgaccgtcaccgttcccaagctccccccaccggaaccgaagaaacctaagacgattgcagtccaaattggataa

SEQ ID NO: 11242 - protein, 151 aa, Picea glauca
MAMDPLLNTVQQLLVVPDDLERILHAPTRSYMRDTEATASTPVDVKEYPNSYVFIVDMPGLKSNDIKVQVEDENILNISGERKRNEKEEGEVKYIRMERRVGKFMRKFSLPADCNLEAISAACQDGVLTVTVPKLPPPEPKKPKTIAVQIG

SEQ ID NO: 11243 - DNA, 486 bp, Pseudotsuga menziesii
  CDS (1)..(486)
atgtcgatcattcccagctttttcggcaggcgatcatccagcgcgttcgacccgttttcattggatgtatgggatcctttccgagcattcacagatttggccgccgggggtccatctggccaatttgtaaatgaagcttcggccatagccaatactcagatcgactggaaagaaacgccagaggcgcacattttcaaggctgatctcccgggtctgaagaaagaggaggtgaaaatagaattggaggaaggccaaagaattctccagataagcggggagcgcagcaaagaagaagagcaaaagaacaacaagtggcaccgcattgagcgatcccgcggaaagttccttcggcgcttccggctgccggacaatgcgaaggttgaagagatcaaggcggccatggaaaacggggtgctgactgtgacagtgccgaagcagcctgaaccccaacctcctcaacccaaatccatcgagatctctggttaa

SEQ ID NO: 11244 - protein, 161 aa, Pseudotsuga menziesii
MSIIPSFFGRRSSSAFDPFSLDVWDPFRAFTDLAAGGPSGQFVNEASAIANTQIDWKETPEAHIFKADLPGLKKEEVKIELEEGQRILQISGERSKEEEQKNNKWHRIERSRGKFLRRFRLPDNAKVEEIKAAMENGVLTVTVPKQPEPQPPQPKSIEISG

SEQ ID NO: 11245 - DNA, 474 bp, Triticum aestivum
  CDS (1)..(474)
atggcgggcatggtgttcggcttggatgccccgatgatggccgccctgcagcacctgctggacatcccggacggcgaggcggagccgccgccggagaagcagggcccgacgcgcgcctacgtccgcgacgcgcgcgccatggcggccacccccgccgacgtgaaggagctgccgggcgcgtacgcgttcgtggtggacatgccggggctcgggtccggcgacatcaaggtgcaggtggaggacgagcgggtgctggtgatcagcggcgagcggcggagggaggagaaggaggacgccaagtacctgcggatggagcgccgcatgggcaagctgatgcgcaagttcgtgctgccggagaacgccgacatggagaagatctcgccgtgccgcgacggcgtgctcaccgtgaccgtcgacaagctgccgccgcccgagcccaagaagcccaagaccatccaggtccaggtcgcctga

SEQ ID NO: 11246 - protein, 157 aa, Triticum aestivum
MAGMVFGLDAPMMAALQHLLDIPDGEAEPPPEKQGPTRAYVRDARAMAATPADVKELPGAYAFVVDMPGLGSGDIKVQVEDERVLVISGERRREEKEDAKYLRMERRMGKLMRKFVLPENADMEKISPCRDGVLTVTVDKLPPPEPKKPKTIQVQVA

SEQ ID NO: 11247 - DNA, 468 bp, Solanum peruvianum
  CDS (1)..(468)
atggatttgaggttgatgggtattgataacacaccacttttccacactctccaccatatgatggaagctgtcggtgaagattccgtgaatgcaccatcaaagaagtatgttcgtgatgctaaggcaatggctgcgacaccagtggacgtgaaagagtatcctgattcatatgttttcgttgtggatatgccagggttgaaatctggagatatcaaagtgcaggtagaagaagacaatgtgttgttgattagtggtgaaaggaagagggaagaagagaaagaaggtgtaaagtttattagaatggagagaagggttgggaatttcatgaggaagtttagtctgccggagaatgcgaatactgatgcaatttctgcagtttgtcaagatggagttctgactgttactgttcagaagctgcctcctcctgagccaaagaagccaaaaaccattcaggtcaaagttgcttga

SEQ ID NO: 11248 - protein, 155 aa, Solanum peruvianum
MDLRLMGIDNTPLFHTLHHMMEAVGEDSVNAPSKKYVRDAKAMAATPVDVKEYPDSYVFVVDMPGLKSGDIKVQVEEDNVLLISGERKREEEKEGVKFIRMERRVGNFMRKFSLPENANTDAISAVCQDGVLTVTVQKLPPPEPKKPKTIQVKVA

SEQ ID NO: 11249 - DNA, 447 bp, uncultured soil bacterium
  CDS (1)..(447): transl_table=11
atggcactcgttccatggacgccgatgcacaatttcgcggcgcttcagggtcagatgaaccagctcttgaatcagttcttccggggcggcaacggcgaggaggccccctggggcgtcagcgcgtggatgccgccggtggacctctatgagacgcccgacgagtttattctgtcggccgacttgcccggactgaccaaagacgacattcacctggaggtccatgaccgcacgctgacgctacgcggggagcgcaagccagcggccggcatgaccgaggcgcactaccagcggcgggaacgggcttacggcagcttccagcgcgcgttcacgctacccacgcctgtggataccgacaaggtccaggccagcatgaaagatggtatcctggatctgcacttgcccaaacatgaggcggcgaaaccgcggcggatcgcggtccagagctaa

SEQ ID NO: 11250 - protein, 148 aa, uncultured soil bacterium
MALVPWTPMHNFAALQGQMNQLLNQFFRGGNGEEAPWGVSAWMPPVDLYETPDEFILSADLPGLTKDDIHLEVHDRTLTLRGERKPAAGMTEAHYQRRERAYGSFQRAFTLPTPVDTDKVQASMKDGILDLHLPKHEAAKPRRIAVQS

SEQ ID NO: 11251 - DNA, 480 bp, Capsicum frutescens; identical to SEQ ID NO: 8660
  CDS (1)..(480)

SEQ ID NO: 11252 - protein, 159 aa, Capsicum frutescens; identical to SEQ ID NO: 8661

SEQ ID NO: 11253 - DNA, 474 bp, Carica papaya
  CDS (1)..(474)
atggatgtaaggatgtttgtattagagtcacctatactgtcgtcgctgcgacagttgatggagctacaagatactgaaacagagaaatcattcaacgctccgacaagaacctacgtgcgagacgccaaggccatggcggcaactcctgctgacgcgaaggagtatccaaactcttacgtctttgttatagacatgccgggcttgaaatctggggatatcaaggttcaggtggaggatgacaacgtgctgcagatcagcggggagaggaagcgggaggaagagaaggatggagttaagtatttgaggatggagaggaggatcggcaagttcatgagaaagttttctctgccggataatgcaaacactgatgcgatatccgcggtttgtcaggacggtgttttgaccgtcactgtccagaagttgccgccaccggagcccaagaagcctaagacgattgaggttaagattgcctaa

SEQ ID NO: 11254 - protein, 157 aa, Carica papaya
MDVRMFVLESPILSSLRQLMELQDTETEKSFNAPTRTYVRDAKAMAATPADAKEYPNSYVFVIDMPGLKSGDIKVQVEDDNVLQISGERKREEEKDGVKYLRMERRIGKFMRKFSLPDNANTDAISAVCQDGVLTVTVQKLPPPEPKKPKTIEVKIA

SEQ ID NO: 11255 - DNA, 456 bp, Picea abies
  CDS (1)..(456)
atggcaatggatcctctgttgagcaccgtgcagcagctgctgggtgtgccggacgacctggagaggatcctccacgccccgactcgctcttatatgcgcgacactgaggccacggcttcgactcccgtagatgttaaagaataccccaactcttatgtctttatagtcgacatgcccggccttaaatccaacgacatcaaggttcaagtggaagacgagaacgttctgaacatcagtggcgagcggaagaggaacgagaaggaagaaggggcagtgaaatacatccgcatggagcgcagagtggcaaagttcatgaggaaattcaccttgcctgctgactgcaacctggaggccatctctgctgcgtgccaggatggagtgctgaccgtcaccgttcccaagcttcccccaccggaaccgaagaaacctaagacgattgcagtcaaaattggataa

SEQ ID NO: 11256 - protein, 151 aa, Picea abies
MAMDPLLSTVQQLLGVPDDLERILHAPTRSYMRDTEATASTPVDVKEYPNSYVFIVDMPGLKSNDIKVQVEDENVLNISGERKRNEKEEGAVKYIRMERRVAKFMRKFTLPADCNLEAISAACQDGVLTVTVPKLPPPEPKKPKTIAVKIG

SEQ ID NO: 11257 - DNA, 456 bp, Picea glauca
  CDS (1)..(456)
atggcaatggatcctctgttgagcaccgtgcagcagctgctgggtgtgccggacgacctggagaggatcctccacgccccgactcgctcatatacgcgcgacaccgaggccacggcttcgactcccgtagatgttaaagaataccccaactcttatgtctttatagtcgacatgcccggccttaaatccaacgacatcaaggttcaagtggaagacgagaacgttctgaacatcagtggcgagcggaagaggaacgagaaggaagaaggggaagtgaaatacatccgcatggagcgcagagtagcaaagttcatgaggaaattcagcttgcctgctgactgcaacctggaggccatctctgctgcgtgccaggatggagtgctgaccgtcaccgttcccaagcttcccccaccggagccgaagaaacctaagacgattgcagtcaaaattggataa

SEQ ID NO: 11258 - protein, 151 aa, Picea glauca
MAMDPLLSTVQQLLGVPDDLERILHAPTRSYTRDTEATASTPVDVKEYPNSYVFIVDMPGLKSNDIKVQVEDENVLNISGERKRNEKEEGEVKYIRMERRVAKFMRKFSLPADCNLEAISAACQDGVLTVTVPKLPPPEPKKPKTIAVKIG

SEQ ID NO: 11259 - DNA, 444 bp, Funaria hygrometrica
  CDS (1)..(444)
atggattttcctttgttccagatcctgagctttcccgatgagcttgagaagtcgttgaatccacagtcccagaagtatgtgcgtgacaccaaggccatggttagcacagctgtggacgtcaaggagcttcccgatgcttacatcttcgtggctgacatgccaggtctgaaatcagcagacatgaaggtgcagttggagaatgataatgtgctcgtgattggcggcacacgaaaacgtgaggagccagatcctaaggtaaaatatattcgcatggagcgcaactccggatcattcatgcgcaagtttacgcttcctcagaattccaatttggataaaattgcagcctcttgtgtcgatggcatcctgacagttactgttcccaagattcctcctccagaacctgcgaagccgagaaccatcgaggtaactatgggaaatcagtag

SEQ ID NO: 11260 - protein, 147 aa, Funaria hygrometrica
MDFPLFQILSFPDELEKSLNPQSQKYVRDTKAMVSTAVDVKELPDAYIFVADMPGLKSADMKVQLENDNVLVIGGTRKREEPDPKVKYIRMERNSGSFMRKFTLPQNSNLDKIAASCVDGILTVTVPKIPPPEPAKPRTIEVTMGNQ

SEQ ID NO: 11261 - DNA, 441 bp, Funaria hygrometrica
  CDS (1)..(441)
atggcactgtctctgttcgggcgtggcagcggcagcttcttcgatccgttcgacctgtcgctgctggagagcgggccttcgcggcagtttgcgcgcgacgcgcatgcggtggccaacacgcagattgattggcgtgagacgccggaggcgcacatcttcaaggcggacctgcccgggttgaagaaggaggaggtgaaggtgcagctggtggacggcaagacgttggagatcagcggggagaggaggaaggaagaggtgcacaaggacgatacatggcaccgcgtggagcgcgcgcacggcagcttcctgcggcggttccggctgcccgataacagcaacgtggaagcagtggaagcgcaggtgcaggacggagtgctcacggtgaccatcccgaagatccagaagccaaagccccaggtgcgacagatcgagatcgcgtag

SEQ ID NO: 11262 - protein, 146 aa, Funaria hygrometrica
MALSLFGRGSGSFFDPFDLSLLESGPSRQFARDAHAVANTQIDWRETPEAHIFKADLPGLKKEEVKVQLVDGKTLEISGERRKEEVHKDDTWHRVERAHGSFLRRFRLPDNSNVEAVEAQVQDGVLTVTIPKIQKPKPQVRQIEIA

SEQ ID NO: 11263 - DNA, 435 bp, Solanum peruvianum
  CDS (1)..(435)
atgagcactgttgtggatgtagtgagccaacttctctttccagaatccattgagaggctggtgagtccttctaggtcaaatgagagtaagggtaccattcccgtggacattctggataccccaaaagagtacattttttatatggatgttcctggtttatccaaatctgacctacaggtgagtgtggaagatgagaagacactggtgatacgaagcaacgggaagaggaagcgcgaggagagtgaagaagagggatgcaagtacgtgaggttggagaggaatccacccctcaaactgatgaggaagttcaagctgcccgattactgcaatgtttctgctattactgccaaatgcgagaatggggtgttaactgttgtagttgaaaagatgcctccaccatctaaggcgaagactgttaaagttgcagtttcatga

SEQ ID NO: 11264 - protein, 144 aa, Solanum peruvianum
MSTVVDVVSQLLFPESIERLVSPSRSNESKGTIPVDILDTPKEYIFYMDVPGLSKSDLQVSVEDEKTLVIRSNGKRKREESEEEGCKYVRLERNPPLKLMRKFKLPDYCNVSAITAKCENGVLTVVVEKMPPPSKAKTVKVAVS

SEQ ID NO: 11265 - DNA, 489 bp, Triticum aestivum
  CDS (1)..(489)
atggagggcaggatgttcggactggagaccccgctgatgacggcgctgcagcacctgctggacgtaccggacggcgaggccggcggacccggcaatgccgccggcgagaagcagggcccgacgcgcgcctacgtccgcgacgcgcgcgccatggcggccaccccggccgacgtgaaggagctgccgggcgcgtacgcgttcgtggtggacatgccggggctggggtccggcgacatcaaggtgcaggtggaggacgagcgcgtgttggtgatcagcggcgagcggcggagggaggagaaggaggacgccaagtacctgcggatggagcgccgcatgggcaagatgatgcgcaagttcgtgctccccgagaacgccgacatggagaagatctccgccgtgtgccgcgacggcgtgctcaccgtctccttggagaagctgccgccgcccgaaaccaagaagcccaagaccatccaggtccaggtcgcctga

SEQ ID NO: 11266 - protein, 162 aa, Triticum aestivum
MEGRMFGLETPLMTALQHLLDVPDGEAGGPGNAAGEKQGPTRAYVRDARAMAATPADVKELPGAYAFVVDMPGLGSGDIKVQVEDERVLVISGERRREEKEDAKYLRMERRMGKMMRKFVLPENADMEKISAVCRDGVLTVSLEKLPPPETKKPKTIQVQVA

SEQ ID NO: 11267 - DNA, 477 bp, Solanum lycopersicum
  CDS (1)..(477)
atggatttgaggttgttgggtatcgataacacaccactcttccacactctccaccatatgatggaagctgccggtgaagattccgacaagtctgtcaatgcaccatcaaggaactatgttcgtgatgctaaggccatggctgctacaccagcggatgtgaaggagtatcctaattcgtatgtttttgttgtggatatgccagggttgaaatctggagatatcaaagtgcaggtggaagaagacaatgtgctgttgattagtggtgaaaggaagagggaagaagagaaagaaggtgcaaagtttattaggatggagagaagggttgggaaattcatgaggaagtttagtctgccagagaatgcgaatactgatgcaatttctgcagtttgtcaagatggagttctgactgttactgttcagaaattgcctcctcctgagccaaagaaacccaaaacaattgaggtgaaagttgcttga

SEQ ID NO: 11268 - protein, 158 aa, Solanum lycopersicum
MDLRLLGIDNTPLFHTLHHMMEAAGEDSDKSVNAPSRNYVRDAKAMAATPADVKEYPNSYVFVVDMPGLKSGDIKVQVEEDNVLLISGERKREEEKEGAKFIRMERRVGKFMRKFSLPENANTDAISAVCQDGVLTVTVQKLPPPEPKKPKTIEVKVA

SEQ ID NO: 11269 - DNA, 489 bp, Daucus carota
  CDS (1)..(489)
atggatttgaggttcatgggaatcgatcacccactcttcgacactctctaccatatcctcgacgacgacgaacacgacaccaccgacaccggaaacaccaagagaaacaagtctaggcacgaacgccgatacgtccgcgatgcgaaagccatggcgacgactgcagctgatgtgaaggagtacccgaacgcctacttgtttgtggtggatatgcctggattgaaatcaggggatattaaggtccaggtggaggacggtaatgtgctggtggtgaacggagagcggaagagagaagaggaggagggcgtcaagtatctgagcatggggaggaaggtggggaggtttttgaagaagtttgtggtgcctgagaatgcgaatttggagaatataaaggcggtttgtcaggacggtgtgttgagtgttacggtggagaagttgccgcctcctgagccgaagaagcctaagaccatcgaggttcagatcgcttga

SEQ ID NO: 11270 - protein, 162 aa, Daucus carota
MDLRFMGIDHPLFDTLYHILDDDEHDTTDTGNTKRNKSRHERRYVRDAKAMATTAADVKEYPNAYLFVVDMPGLKSGDIKVQVEDGNVLVVNGERKREEEEGVKYLSMGRKVGRFLKKFVVPENANLENIKAVCQDGVLSVTVEKLPPPEPKKPKTIEVQIA

SEQ ID NO: 11271 - DNA, 471 bp, Prunus dulcis
  CDS (1)..(471)
atggacgtgagaatcgcgggtttggattccccactcttctccacactgcagcacatcatggacttcaccgacgagcctgacaaatcgttcaacgcccccacccgcacctacgtccgcgacgccaaggccatggcgtccacgccggcggacgtcaaggagtatcccaactcctatgtcttcgtcgtggacatgccaggcctcaagtccggagacatcaaggtccaggtggaggacgacaatgtgcttctgatcaccggcgagaggaagagggaggaggagaaggagggggctaagtatgtcaggatggagaggagggtcggcaagtttatgaggaagtttgtgctgcctgagaatgctaatgtggaagccatttctgctgtttgccaagatggggtcctgactgtgactgtggagaagctgcctccgcctgagccaaagaagtccaagaccattgaggtcaagattgcttga

SEQ ID NO: 11272 - protein, 156 aa, Prunus dulcis
MDVRIAGLDSPLFSTLQHIMDFTDEPDKSFNAPTRTYVRDAKAMASTPADVKEYPNSYVFVVDMPGLKSGDIKVQVEDDNVLLITGERKREEEKEGAKYVRMERRVGKFMRKFVLPENANVEAISAVCQDGVLTVTVEKLPPPEPKKSKTIEVKIA

SEQ ID NO: 11273 - DNA, 486 bp, Funaria hygrometrica
  CDS (1)..(486)
atggattttgtggtgtttgacacggatccgtttcttacgacgttgcatcagctggtccatgagccagggagcgatttagaaaggaaaatcaagcgccagcgtcgaaatcaccacgatgagccgaggcatgtgacgatagcgactcccgtagatgtgaaggagataaaagacgcgtatctcttcgttgcggacgttcctggccttcagaagactgacattgaggtgcaagtcgagaatgaaaatgttttaacgatgcggggcaagaggaaactcgacgagaaagtcaatgagaaagaggaggacacgaagttcatacgcatggagcggagtccagtgaaactattgcgaaaattcactcttccgtcggatgcaaatgctgatgccattactgccaactgtgtggatggcgtgttgacggtcactgtgcccaaaattccacctcctgaaccagcgaagtcaaagaccgtccaaattgcagtggattga

SEQ ID NO: 11274 - protein, 161 aa, Funaria hygrometrica
MDFVVFDTDPFLTTLHQLVHEPGSDLERKIKRQRRNHHDEPRHVTIATPVDVKEIKDAYLFVADVPGLQKTDIEVQVENENVLTMRGKRKLDEKVNEKEEDTKFIRMERSPVKLLRKFTLPSDANADAITANCVDGVLTVTVPKIPPPEPAKSKTVQIAVD

SEQ ID NO: 11275 - DNA, 444 bp, Funaria hygrometrica
  CDS (1)..(444)
atggattttcctttgttccagatcctgagctttcccgatgagcttgagaagtcgttgaatccacagtcccagaagtatgtgcgtgacaccaaggccatggttagcacagctgtggacgtcaaggagcttcccgatgcttacatcttcgtggctgacatgccagggctgaaatcagcagacgtgaaggtgcagttggagaatgataatgtgctcgtgattggcggcacacgaaaacgtgaggagccagatcctaaggtaaaatatattcgcatggagcgcaactccggatcattcatgcgcaagtttacgcttcctcagaattccaatttggataaaattgcagcctcctgtgtcaatggcatcctaacagttactgttcccaagattcctcctccagaacctgcgaagccgagaaccatcgaggtaactatgggaaatcagtag

SEQ ID NO: 11276 - protein, 147 aa, Funaria hygrometrica
MDFPLFQILSFPDELEKSLNPQSQKYVRDTKAMVSTAVDVKELPDAYIFVADMPGLKSADVKVQLENDNVLVIGGTRKREEPDPKVKYIRMERNSGSFMRKFTLPQNSNLDKIAASCVNGILTVTVPKIPPPEPAKPRTIEVTMGNQ

SEQ ID NO: 11277 - DNA, 441 bp, Funaria hygrometrica
  CDS (1)..(441)
atggcactgtctctgttcgggcgtggcagcggcagcttcttcgatccgttcgacctgtcgctgctggagagcgggccttcgcggcagtttgcgcgcgacgcgcatgcggtgcccaacacgcagattgattggcgtgagacgccggaggcgcaatcttcaaaggcggacctgcccgggttgaagaaggaggaggtgaaggtgcagctggtggacggcaagacgttggagatcagcggggagaggaggaaggaagaggtgcacaaggacgatacatggcaccgcgtggagcgcgcgcacggcagcttcctgcggcggttccggctgcccgataacagcaacgtggaagcagtggaagcgcaggtgcaggacggagtgctcacggtgaccatcccgaagatccagaagccaaagccccaggtgcgacagatcgagatcgcgtag

SEQ ID NO: 11278 - protein, 146 aa, Funaria hygrometrica
MALSLFGRGSGSFFDPFDLSLLESGPSRQFARDAHAVPNTQIDWRETPEAQSSKADLPGLKKEEVKVQLVDGKTLEISGERRKEEVHKDDTWHRVERAHGSFLRRFRLPDNSNVEAVEAQVQDGVLTVTIPKIQKPKPQVRQIEIA

SEQ ID NO: 11279 - DNA, 450 bp, Funaria hygrometrica
  CDS (1)..(450)
atggcgatctacgtcaaccgccggaataacatctggaacatgcctgaccctatggatattatgatgaatttcttcgaagatactcccgccaggtcgatcgcccgggatgctcatgccttggcgagtacgaatgtggattggaaggagactccgactgagcatgtgattaaggcagatttaccgggattgaagaaagaggaggtccatgttcaggttgagggcgacagaaccttgagcattagcgggcagcgcaagcatgaggaggtccagaagacagatacttggcatcgcgtggagcgtagcagcggccaattcatgaggaaatttcggttgcctgagaatgccaatcttgaacagatctcggcccaagtgcaggacggagtcttgacagttaaaattcccaagttggagaagcagaagcctcactcgcgcaccattgagattggatag

SEQ ID NO: 11280 - protein, 149 aa, Funaria hygrometrica
MAIYVNRRNNIWNMPDPMDIMMNFFEDTPARSIARDAHALASTNVDWKETPTEHVIKADLPGLKKEEVHVQVEGDRTLSISGQRKHEEVQKTDTWHRVERSSGQFMRKFRLPENANLEQISAQVQDGVLTVKIPKLEKQKPHSRTIEIG

SEQ ID NO: 11281 - DNA, 462 bp, Funaria hygrometrica
  CDS (1)..(462)
atggctctctcgctgtttggcggtcgtggcaacagtgtgttcgatccctttgagtttggcagtgtgtgggatccttttacggtgctggagagcgggccatcacgacaacttgcaagcgacgtgcaggctgtggcgagcacgcggatcgactggcgtgaaacacccgaggcgcatattttcaaagcggacctgcctggattgacgaaggaagaggtgaaagtgcaagtgttggaggggaggacgctggagatctgtggcgaaaggaagaaagaggaagtgcagaagagcgatacctggcatcgaatggagcgcgcgcaggggagttttatgcggcggttccggctgccagagggcaccaacacggacgatgtgaaggcgcaagtgcaggacggggttttgactgtgacagttcccaaagttcagaagccgaagccacaggttcggcagatagagattgcgtga

SEQ ID NO: 11282 - protein, 153 aa, Funaria hygrometrica
MALSLFGGRGNSVFDPFEFGSVWDPFTVLESGPSRQLASDVQAVASTRIDWRETPEAHIFKADLPGLTKEEVKVQVLEGRTLEICGERKKEEVQKSDTWHRMERAQGSFMRRFRLPEGTNTDDVKAQVQDGVLTVTVPKVQKPKPQVRQIEIA

SEQ ID NO: 11283 - DNA, 462 bp, Funaria hygrometrica; identical to SEQ ID NO: 8690
  CDS (1)..(462)

SEQ ID NO: 11284 - protein, 153 aa, Funaria hygrometrica; identical to SEQ ID NO: 8691

SEQ ID NO: 11285 - DNA, 486 bp, Chenopodium rubrum
  CDS (1)..(486)
atgtcgctaatcccaaacaactggttcaacaccggccgccgcagcaacatcttcgacccattctccctcgatgagatatgggacccattcttcggcctcccctccaccctctccaccgtccctcgctccgaaaccgccgccgagaccgccgccttcgcaaacgcccgcattgactggaaagagacaccggaggcccacgtcttcaaagccgaccttcccggtgttaagaaagaggaggttaaagtcgaggttgaagatggaaacgtgctcaggatcagcgggcagcgggcaagagagaaggaagagaagaatgatacttggcaccgtgttgagaggagctccggtcagtttatgaggaagtttaggctgcccgagaatgcgaaagttgatcaggtgaaagctggtatggagaatggggttcttacagttactgtgcctaagaatgaagctcctaagcctcaggttaaagctatcaacgtctattaa

SEQ ID NO: 11286 - protein, 161 aa, Chenopodium rubrum
MSLIPNNWFNTGRRSNIFDPFSLDEIWDPFFGLPSTLSTVPRSETAAETAAFANARIDWKETPEAHVFKADLPGVKKEEVKVEVEDGNVLRISGQRAREKEEKNDTWHRVERSSGQFMRKFRLPENAKVDQVKAGMENGVLTVTVPKNEAPKPQVKAINVY

SEQ ID NO: 11287 - DNA, 462 bp, Helianthus annuus; identical to SEQ ID NO: 8746
  CDS (1)..(462)

SEQ ID NO: 11288 - protein, 153 aa, Helianthus annuus; identical to SEQ ID NO: 8747

SEQ ID NO: 11289 - DNA, 465 bp, Solanum lycopersicum; identical to SEQ ID NO: 8696
  CDS (1)..(465)

SEQ ID NO: 11290 - protein, 154 aa, Solanum lycopersicum; identical to SEQ ID NO: 8697

SEQ ID NO: 11291 - DNA, 465 bp, Solanum peruvianum
  CDS (1)..(465)
atgtcactgatcccaagaatcttcggcgatcgacgaagcaccagcgtgttcgatccattttcaattgacgtatttgatccattcaaggaattaggctttacagtttccaattcaggggagacctctgcatttgctaacacccgaatcgactggaaggaaactccagaagctcatgtgttcaaggctgatcttccaggacttaagaaggaggaagtaaaagtggaagtcgaggaggatcgtgttcttcagatcagcggagagaggaacgtggagaaagaagacaagaacgatacttggcaccgtgtggaacgcagcagcgggaaattcatgagaagatttagacttccggagaatgcaaagatggatcaagttaaggcgtctatggagaatggagtgcttactgttactgttccgaaggaggaggtgaataaccctgatgtcaagtccattgagatctctggttaa

SEQ ID NO: 11292 - protein, 154 aa, Solanum peruvianum
MSLIPRIFGDRRSTSVFDPFSIDVFDPFKELGFTVSNSGETSAFANTRIDWKETPEAHVFKADLPGLKKEEVKVEVEEDRVLQISGERNVEKEDKNDTWHRVERSSGKFMRRFRLPENAKMDQVKASMENGVLTVTVPKEEVNNPDVKSIEISG

SEQ ID NO: 11293 - DNA, 468 bp, Ipomoea nil
  CDS (1)..(468)
atggatttgaggttgatgggttttgatcacccgctcttccaccacatcatggactacgccggcgacgacaagtcatccaacagcagcgcgccttctcggacgtttatgctggacgccaaggcaatggcagccaccccggcggacgtgaaggagtacccaaactcctacgtcttcatcatagacatgccggggctgaagtccggcgacatcaaggtgcaggtcgacggcgacaacgtgttgagtattagcggggagcggaagcgtgaggcggaggagaaggagggggcgaagtatgtgaggatggagaggagggtggggaagttaatgaggaagtttgtgctgccggaaaatgcgaataaggagaagatcacggcggtttgccaggatggggtgttgacggtgacggtggagaacgtgccgccgccggaaccgaagaagccaaggaccattgaggtcaaaattggttga

SEQ ID NO: 11294 - protein, 155 aa, Ipomoea nil
MDLRLMGFDHPLFHHIMDYAGDDKSSNSSAPSRTFMLDAKAMAATPADVKEYPNSYVFIIDMPGLKSGDIKVQVDGDNVLSISGERKREAEEKEGAKYVRMERRVGKLMRKFVLPENANKEKITAVCQDGVLTVTVENVPPPEPKKPRTIEVKIG

SEQ ID NO: 11295 - DNA, 459 bp, Pisum sativum
  CDS (1)..(459)
atggatttggattctccactcttcaacactctccatcatataatggacctcaccgacgacacaaccgagaagaacttaaacgctccaactcgaacatatgtccgtgacgcaaaggcaatggctgcaactccagcggacgtgaaagagcatccaaattcatacgtgtttatggtggacatgcctggggtgaaatctggtgacataaaggttcaggtggaagatgagaatgtgctattgataagtggcgagaggaagagagaagaagagaaagaaggtgttaaatatttgaagatggaaagaaggattggtaagttgatgaggaaatttgtgttacctgagaatgcgaatattgaagctatctctgctatttctcaagatggtgttcttacggttacagttaataaattgcctccacctgaacctaagaaaccaaaaactattcaagttaaggttgcttga

SEQ ID NO: 11296 - protein, 152 aa, Pisum sativum
MDLDSPLFNTLHHIMDLTDDTTEKNLNAPTRTYVRDAKAMAATPADVKEHPNSYVFMVDMPGVKSGDIKVQVEDENVLLISGERKREEEKEGVKYLKMERRIGKLMRKFVLPENANIEAISAISQDGVLTVTVNKLPPPEPKKPKTIQVKVA

SEQ ID NO: 11297 - DNA, 468 bp, Solanum peruvianum
  CDS (1)..(468)
atggatttgaggttgttgggtatcgataacacaccactcttccacactctccaccatatgatggaagctgccggtgaagattccgtgaatgcaccatcaaagatttatgttcgtgatgctaaggccatggctgctacaccagcggatgtgaaggagtatcctaattcgtatgtttttgttgtggatatgccagggttgaaatctggagatatcaaagtgcaggtggaagaagacaatgtgctgttgataagtggtgaaaggaagagggaagaagagaaagaaggtgcaaagtttattaggatggagagaagggttgggaaattcatgaggaagtttagtctgccagagaatgcgaatactgatgcaatttctgcagtttgtcaagatggagttctgactgttactgttcagaaattgcctcctcctgagccaaagaaaccgaaaacaattgaggtgaaagttgcttga

SEQ ID NO: 11298 - protein, 155 aa, Solanum peruvianum
MDLRLLGIDNTPLFHTLHHMMEAAGEDSVNAPSKIYVRDAKAMAATPADVKEYPNSYVFVVDMPGLKSGDIKVQVEEDNVLLISGERKREEEKEGAKFIRMERRVGKFMRKFSLPENANTDAISAVCQDGVLTVTVQKLPPPEPKKPKTIEVKVA

SEQ ID NO: 11299 - DNA, 480 bp, Glycine max; identical to SEQ ID NO: 8780
  CDS (1)..(480)

SEQ ID NO: 11300 - protein, 159 aa, Glycine max; identical to SEQ ID NO: 8781

SEQ ID NO: 11301 - DNA, 504 bp, Ipomoea nil
  CDS (1)..(504)
atggatctcaggaactttggcttatccaacttcgggttagaaccgcagctcctctcaaccatccaagacatgctcgacttcgccgacgaccacgacagagccggccgggccccaccagaacaacccatccgggcctacgtccgggacgcgaaggcgatggcagcgaccccggcggacgtgaaggagtatccgaattcctacgtgttcatcgcggacatgccgggggtaaaggccgcggaaatcaaggtccaggtggaggacgacaacgttttggtggtgagcggggagcgaacggagagggagaaagacgagaaggatggggtgaagtatttgaggatggaacggagggtggggaagtttatgaggaaatttgtgctgccggagaatgccaacgtggaggcgataaatgcggtttatcaggacggggtgttgcaggtgacggtggagaaattgccgccgccggagccgaagaagccaaagacagttgaagtcaaggttgcgtag

SEQ ID NO: 11302 - protein, 167 aa, Ipomoea nil
MDLRNFGLSNFGLEPQLLSTIQDMLDFADDHDRAGRAPPEQPIRAYVRDAKAMAATPADVKEYPNSYVFIADMPGVKAAEIKVQVEDDNVLVVSGERTEREKDEKDGVKYLRMERRVGKFMRKFVLPENANVEAINAVYQDGVLQVTVEKLPPPEPKKPKTVEVKVA

SEQ ID NO: 11303 - DNA, 462 bp, Brassica napus; identical to SEQ ID NO: 8702
  CDS (1)..(462)

SEQ ID NO: 11304 - protein, 153 aa, Brassica napus; identical to SEQ ID NO: 8703

SEQ ID NO: 11305 - DNA, 471 bp, Brassica napus; identical to SEQ ID NO: 8706
  CDS (1)..(471)

SEQ ID NO: 11306 - protein, 156 aa, Brassica napus; identical to SEQ ID NO: 8707

SEQ ID NO: 11307 - DNA, 483 bp, Brassica napus; identical to SEQ ID NO: 8708
  CDS (1)..(483)

SEQ ID NO: 11308 - protein, 160 aa, Brassica napus; identical to SEQ ID NO: 8709

SEQ ID NO: 11309 - DNA, 471 bp, Brassica napus; identical to SEQ ID NO: 8712
  CDS (1)..(471)

SEQ ID NO: 11310 - protein, 156 aa, Brassica napus; identical to SEQ ID NO: 8713

SEQ ID NO: 11311 - DNA, 465 bp, Brassica napus; identical to SEQ ID NO: 8714
  CDS (1)..(465)

SEQ ID NO: 11312 - protein, 154 aa, Brassica napus; identical to SEQ ID NO: 8715

SEQ ID NO: 11313 - DNA, 474 bp, Brassica napus; identical to SEQ ID NO: 8718
  CDS (1)..(474)

SEQ ID NO: 11314 - protein, 157 aa, Brassica napus; identical to SEQ ID NO: 8719

SEQ ID NO: 11315 - DNA, 453 bp, Glycine max; identical to SEQ ID NO: 8782
  CDS (1)..(453)

SEQ ID NO: 11316 - protein, 150 aa, Glycine max; identical to SEQ ID NO: 8783

SEQ ID NO: 11317 - DNA, 459 bp, Glycine max; identical to SEQ ID NO: 8724
  CDS (1)..(459)

SEQ ID NO: 11318 - protein, 152 aa, Glycine max; identical to SEQ ID NO: 8725

SEQ ID NO: 11319 - DNA, 483 bp, Triticum aestivum
  CDS (1)..(483)
atggcgggcatggtgttcggcttggagaacccgatgatgacggcgctgcagcacctgctggacatcccggacggcgaggccggcaacaccgccggcggcgagaagcagggcccgacgcgcgcctacgtccgggacgcgcgcgccatggcggccaccccggccgacgttaaggagctgccgggcgcgtacgcgttcgtggtggacatgccggggctggggtccggcgacatcaaggtgcaggtggaggacgagcgggtgctggtgatcagcggcgagcgcaggagggaggagaaggaggaagccaagtacatgcggatggagcgccgcatggggaagctgatgcgcaagttcgtgctgccagagaacgccgacatggagaagatctccgccgcgtgccgcgacggcgtgctcaccgtcaccgtcgagaagctgccgccgcccgagccgaagaagcccaagaccatccaggtccaggtcgcctga

SEQ ID NO: 11320 - protein, 160 aa, Triticum aestivum
MAGMVFGLENPMMTALQHLLDIPDGEAGNTAGGEKQGPTRAYVRDARAMAATPADVKELPGAYAFVVDMPGLGSGDIKVQVEDERVLVISGERRREEKEEAKYMRMERRMGKLMRKFVLPENADMEKISAACRDGVLTVTVEKLPPPEPKKPKTIQVQVA

SEQ ID NO: 11321 - DNA, 474 bp, Triticum aestivum; identical to SEQ ID NO: 8732
  CDS (1)..(474)

SEQ ID NO: 11322 - protein, 157 aa, Triticum aestivum; identical to SEQ ID NO: 8733

SEQ ID NO: 11323 - DNA, 477 bp, Zea mays; identical to SEQ ID NO: 8734
  CDS (1)..(477)

SEQ ID NO: 11324 - protein, 158 aa, Zea mays; identical to SEQ ID NO: 8735

SEQ ID NO: 11325 - DNA, 483 bp, Zea mays; identical to SEQ ID NO: 8738
  CDS (1)..(483)

SEQ ID NO: 11326 - protein, 160 aa, Zea mays; identical to SEQ ID NO: 8739

SEQ ID NO: 11327 - DNA, 456 bp, Hordeum vulgare; identical to SEQ ID NO: 8742
  CDS (1)..(456)

SEQ ID NO: 11328 - protein, 151 aa, Hordeum vulgare; identical to SEQ ID NO: 8743

SEQ ID NO: 11329 - DNA, 456 bp, Hordeum vulgare; identical to SEQ ID NO: 8744
  CDS (1)..(456)

SEQ ID NO: 11330 - protein, 151 aa, Hordeum vulgare; identical to SEQ ID NO: 8745

SEQ ID NO: 11331 - DNA, 492 bp, Helianthus annuus; identical to SEQ ID NO: 8748
  CDS (1)..(492)

SEQ ID NO: 11332 - protein, 163 aa, Helianthus annuus; identical to SEQ ID NO: 8749

SEQ ID NO: 11333 - DNA, 465 bp, Brassica napus
  CDS (1)..(465)
atgagtgctgtcgcgatcaaccacttgttcggtttgccggagaccatcgagaagctgatcttcccgacttcccgctccggtgaaggtaacgagactcgaggaggaggcaacaacaacatcccaatcgacattcttgaatctcccaaagagtacatcttctacgtcgacatccccggaatctccaaatccgacatccaggtgactgtagaggaagagaggacgctggtgatgaagagtaacgggaagaggaagagagaggatcatgacgagagcgaagaaggatgcaagtacataaggctcgagaggagacttcctcagaatctcgtgaagaagtttcggttgcctgaagacgctgacgtggaggctgtggcggctaagtatcaagatggagttttgacagtcaccgttgggaaagtgccgccgcagccaccgaagtctaagacggttcaaatcgcggtttcttga

SEQ ID NO: 11334 - protein, 154 aa, Brassica napus
MSAVAINHLFGLPETIEKLIFPTSRSGEGNETRGGGNNNIPIDILESPKEYIFYVDIPGISKSDIQVTVEEERTLVMKSNGKRKREDHDESEEGCKYIRLERRLPQNLVKKFRLPEDADVEAVAAKYQDGVLTVTVGKVPPQPPKSKTVQIAVS

SEQ ID NO: 11335 - DNA, 465 bp, Brassica napus; identical to SEQ ID NO: 8752
  CDS (1)..(465)

SEQ ID NO: 11336 - protein, 154 aa, Brassica napus; identical to SEQ ID NO: 8753

SEQ ID NO: 11337 - DNA, 462 bp, Brassica napus; identical to SEQ ID NO: 8760
  CDS (1)..(462)

SEQ ID NO: 11338 - protein, 153 aa, Brassica napus; identical to SEQ ID NO: 8761

SEQ ID NO: 11339 - DNA, 483 bp, Brassica napus; identical to SEQ ID NO: 8762
  CDS (1)..(483)

SEQ ID NO: 11340 - protein, 160 aa, Brassica napus; identical to SEQ ID NO: 8763

SEQ ID NO: 11341 - DNA, 483 bp, Brassica napus; identical to SEQ ID NO: 8764
  CDS (1)..(483)

SEQ ID NO: 11342 - protein, 160 aa, Brassica napus; identical to SEQ ID NO: 8765

SEQ ID NO: 11343 - DNA, 501 bp, Oryza sativa
  CDS (1)..(501)
atggagagcgccatgttctgtctgtcgccagccttgttgtcggcgatgcagcacctgctcgacatcaccgtcgacacgggcggcgccgccgggaaacagggcgcgaccggtggcccgacgcgtgcgtacgtgcgcgacgcccgcgccatggcggcgacccccgccgacgtgaaggatctgcccggggcgtacgcgttcgtggtggacatgcctgggctcaagtcctccgacatcaaggtgcaggtggaggaggagaggctgctggtgatcagcggggagcggcggcgcggcggcggggaggaggagaaggaggagtcgtgcaagtacctgcggatggagcggcggatgggcaagttcatgcgcaagttcgtgctccccgacaacgccgacgtcgacaagatctccgccgtgtgccaggacggcgtgctcaccgtcaccgtcgagaagctcccgccgccggagcccaagaagcccaagaccatcgaggtcaaggtcgcgtga

SEQ ID NO: 11344 - protein, 166 aa, Oryza sativa
MESAMFCLSPALLSAMQHLLDITVDTGGAAGKQGATGGPTRAYVRDARAMAATPADVKDLPGAYAFVVDMPGLKSSDIKVQVEEERLLVISGERRRGGGEEEKEESCKYLRMERRMGKFMRKFVLPDNADVDKISAVCQDGVLTVTVEKLPPPEPKKPKTIEVKVA

SEQ ID NO: 11345 - DNA, 474 bp, Glycine max; identical to SEQ ID NO: 8772
  CDS (1)..(474)

SEQ ID NO: 11346 - protein, 157 aa, Glycine max; identical to SEQ ID NO: 8773

SEQ ID NO: 11347 - DNA, 477 bp, Glycine max; identical to SEQ ID NO: 8774
  CDS (1)..(477)

SEQ ID NO: 11348 - protein, 158 aa, Glycine max; identical to SEQ ID NO: 8775

SEQ ID NO: 11349 - DNA, 462 bp, Glycine max; identical to SEQ ID NO: 8792
  CDS (1)..(462)

SEQ ID NO: 11350 - protein, 153 aa, Glycine max; identical to SEQ ID NO: 8793

SEQ ID NO: 11351 - DNA, 459 bp, Glycine max; identical to SEQ ID NO: 8432
  CDS (1)..(459)

SEQ ID NO: 11352 - protein, 152 aa, Glycine max; identical to SEQ ID NO: 8433

SEQ ID NO: 11353 - DNA, 462 bp, Glycine max; identical to SEQ ID NO: 8786
  CDS (1)..(462)

SEQ ID NO: 11354 - protein, 153 aa, Glycine max; identical to SEQ ID NO: 8787

SEQ ID NO: 11355 - DNA, 486 bp, Glycine max; identical to SEQ ID NO: 8430
  CDS (1)..(486)

SEQ ID NO: 11356 - protein, 161 aa, Glycine max; identical to SEQ ID NO: 8431

SEQ ID NO: 11357 - DNA, 480 bp, Glycine max; identical to SEQ ID NO: 8794
  CDS (1)..(480)

SEQ ID NO: 11358 - protein, 159 aa, Glycine max; identical to SEQ ID NO: 8795

SEQ ID NO: 11359 - DNA, 477 bp, Glycine max; identical to SEQ ID NO: 8804
  CDS (1)..(477)

SEQ ID NO: 11360 - protein, 158 aa, Glycine max; identical to SEQ ID NO: 8805

SEQ ID NO: 11361 - DNA, 456 bp, Hordeum vulgare; identical to SEQ ID NO: 8798
  CDS (1)..(456)

SEQ ID NO: 11362 - protein, 151 aa, Hordeum vulgare; identical to SEQ ID NO: 8799

SEQ ID NO: 11363 - DNA, 477 bp, Hordeum vulgare; identical to SEQ ID NO: 8800
  CDS (1)..(477)

SEQ ID NO: 11364 - protein, 158 aa, Hordeum vulgare; identical to SEQ ID NO: 8801

SEQ ID NO: 11365 - DNA, 480 bp, Hordeum vulgare
  CDS (1)..(480)
atggcgggcatggtgttcggcttggagaccccgatgatgaccgccctgcagcacctgctggacatcccagacggcgaggctggtgccgccggcggcgagaagcagggcccgacgcgcgcctacgtccgcgacgcgcgcgccatggcggccaccccagccgacgtgaaggagctgccgggcgcgtacgcgttcgtggtggacatgccggggctcgggtccggcgacatcaaggtgcaggtggaggacgagcgggtgctggtcatcagcggcgagcgccggagggaggagaaggaggacgccaagtacgtgcggatggagcgccgcatgggcaagatgatgcgcaagttcgtgctccccgagaacgccgacatggagaagatctccgccgcgtgccgcgacggcgtgctcaccgtcaccgtcgagaagctgccgccgcccgagcccaagaagcccaagaccatccaggtccaggtcgcctga

SEQ ID NO: 11366 - protein, 159 aa, Hordeum vulgare
MAGMVFGLETPMMTALQHLLDIPDGEAGAAGGEKQGPTRAYVRDARAMAATPADVKELPGAYAFVVDMPGLGSGDIKVQVEDERVLVISGERRREEKEDAKYVRMERRMGKMMRKFVLPENADMEKISAACRDGVLTVTVEKLPPPEPKKPKTIQVQVA

SEQ ID NO: 11367 - DNA, 477 bp, Hordeum vulgare
  CDS (1)..(477)
atgtcgctgatccgccgcagcaacgtgttcgaccccttctccctcgacttcttcgaccccttcgacggcttccccttcggctccggcagcagcaacagcggcggcagcctcgtcccgcgcacctcctctgacacggcggccttcgcgggggcgcgcatcgactggaaggagacgcccgaggcgcacgtgttcaaggcggacgtgccggggctgaagaaggaagaggtgaaggtggaggtggaggacggcaacatcctccagatcagcggcgagaggaacaaggagcaggaggagaagacggacacctggcacagggtggagcgcagcagcggcaagttcctgcgcaggttcaggctcccggagaacgccaaggcggagcaggtgaaggcgtccatggagaacggcgtgctcaccgtcaccgtgcccaaggaggaggccaagaatcctgaggtcaaggccatccagatctccggctag

SEQ ID NO: 11368 - protein, 158 aa, Hordeum vulgare
MSLIRRSNVFDPFSLDFFDPFDGFPFGSGSSNSGGSLVPRTSSDTAAFAGARIDWKETPEAHVFKADVPGLKKEEVKVEVEDGNILQISGERNKEQEEKTDTWHRVERSSGKFLRRFRLPENAKAEQVKASMENGVLTVTVPKEEAKNPEVKAIQISG

SEQ ID NO: 11369 - DNA, 486 bp, Hordeum vulgare
  CDS (1)..(486)
atgtcgctgattccccgcggcaacgccttcgaccccttctccgtcgacctctggaaccccttcgacggcttccccttcggctccggcagcagcagcagtggtggcagcctcttcccctcgttcccgcgcacatcctctgacacggcggccttcgctggggcgcgcatcgactggaaggagacgcccgaggcgcacgtgttcaaggcggacgtgccggggctgaagaaggaggaggtgaaggtggaggtggaggacggcaacatcctccagatcagcggcgagcggaacaaggagcaggaggagaagacggacacctggcacagggtggagcgcagcagcggcaagttcctgcgcaggttcaggctcccggaggacgccaaggcggaccagatcaaggcggccatggagaacggtgtgctcaccgtcactgtgcccaaagaggaggccaagaaacccgagatcaagtccatccagatctccggctag

SEQ ID NO: 11370 - protein, 161 aa, Hordeum vulgare
MSLIPRGNAFDPFSVDLWNPFDGFPFGSGSSSSGGSLFPSFPRTSSDTAAFAGARIDWKETPEAHVFKADVPGLKKEEVKVEVEDGNILQISGERNKEQEEKTDTWHRVERSSGKFLRRFRLPEDAKADQIKAAMENGVLTVTVPKEEAKKPEIKSIQISG

SEQ ID NO: 11371 - DNA, 465 bp, Zea mays; identical to SEQ ID NO: 8810
  CDS (1)..(465)

SEQ ID NO: 11372 - protein, 154 aa, Zea mays; identical to SEQ ID NO: 8811

SEQ ID NO: 11373 - DNA, 477 bp, Triticum aestivum; identical to SEQ ID NO: 8814
  CDS (1)..(477)

SEQ ID NO: 11374 - protein, 158 aa, Triticum aestivum; identical to SEQ ID NO: 8815

SEQ ID NO: 11375 - DNA, 489 bp, Triticum aestivum
  CDS (1)..(489)
atggagggcaggatgttcgggctggagaccccgctgatgacggcgctgcagcacctgctggacatcccagacggcgaggccggcggggccggcaacgccggcggcgagaagcagggcccgacgcgcgcctacgtccgcgacgcgcgcgccatggcggccaccccggccgacgtgaaggagctgccgggcgcgtacgcgttcgtggtggacgtgccggggctggggtccggcgacatcaaggtgcaggtggaggacgagcgggtgctggtgatcagcggcgagcgccggagggaggagaaggaggacgccaggtacctgcggatggagcgccgcatgggcaagctgatgcgcaagttcgtgctgcccgagaacgccgacacggagaagatctccgccgtgtgccgcgacggcgtgctcaccgtctccgtccagaagctgccgccgcccgagcccaagaagcccaagaccatccaggtccaggtcgcctga

SEQ ID NO: 11376 - protein, 162 aa, Triticum aestivum
MEGRMFGLETPLMTALQHLLDIPDGEAGGAGNAGGEKQGPTRAYVRDARAMAATPADVKELPGAYAFVVDVPGLGSGDIKVQVEDERVLVISGERRREEKEDARYLRMERRMGKLMRKFVLPENADTEKISAVCRDGVLTVSVQKLPPPEPKKPKTIQVQVA

SEQ ID NO: 11377 - DNA, 489 bp, Triticum aestivum
  CDS (1)..(489)
atggcgggcatggtgtttggcttggagaacccgatgatgaccgccctgcagcacctgctggacatcccggacggggaggctggtggagccggtgccgccggcggcgagaagcagggcccgacgcgcgcctacgtccgcgacgcgcgcgccatggcggccaccccggccgacgtgaaggagctgccgggcgcgtacgcgttcgtggtggacatgccggggctcgggtccggcgacatcaaggtgcaggtggaggacgagagggtgctggtgatcagcggcgagcggcggagggaggagaaggaggacgccaagtacctgcggatggagcgccgcatgggcaagctgatgcgcaagtacgtgctgccagagaacgccgacatggagaagatctccgccgtgtgccgcgacggcgtgctcaccgtcaccgtcgagaagctgccgccgcccgagcccaagaagcccaagaccatccaggtccaggtcgcctga

SEQ ID NO: 11378 - protein, 162 aa, Triticum aestivum
MAGMVFGLENPMMTALQHLLDIPDGEAGGAGAAGGEKQGPTRAYVRDARAMAATPADVKELPGAYAFVVDMPGLGSGDIKVQVEDERVLVISGERRREEKEDAKYLRMERRMGKLMRKYVLPENADMEKISAVCRDGVLTVTVEKLPPPEPKKPKTIQVQVA

SEQ ID NO: 11379 - DNA, 456 bp, Triticum aestivum; identical to SEQ ID NO: 8818
  CDS (1)..(456)

SEQ ID NO: 11380 - protein, 151 aa, Triticum aestivum; identical to SEQ ID NO: 8819

SEQ ID NO: 11381 - DNA, 456 bp, Triticum aestivum; identical to SEQ ID NO: 8820
  CDS (1)..(456)

SEQ ID NO: 11382 - protein, 151 aa, Triticum aestivum; identical to SEQ ID NO: 8821

SEQ ID NO: 11383 - DNA, 459 bp, Triticum aestivum; identical to SEQ ID NO: 8822
  CDS (1)..(459)

SEQ ID NO: 11384 - protein, 152 aa, Triticum aestivum; identical to SEQ ID NO: 8823

SEQ ID NO: 11385 - DNA, 489 bp, Triticum aestivum
  CDS (1)..(489)
atggcgggcatggtgttcggcttggagaacccgatgatgacggcgctccagcacctgctggacatcccagatggcgaggccggcggagccggtgccggccgcggcgagaagcagggcccgacgcgcgcctacgtccgggatgcgcgcgccatggcggccaccccggcggacgtgaaggagctgccgggcgcgtacgcgttcgtggtggacatgccggggctgggttccggcgacatcaaggtgcaggtggaggacgagcgggtgctggtgatcagcggcgagcggagcagggaggaggaggaggacgccaagtacctgcggatggagcgccgcatgggcaagctgatgcgcaagttcgtgctccccgagaacgccgacatggagaagatctccgccgcgtgccgcgacggcgtgctgaccgtcaccgtcgagaagctgccgccgcccgagcccaagaagcccaagaccatccaggtccaggttgcctga

SEQ ID NO: 11386 - protein, 162 aa, Triticum aestivum
MAGMVFGLENPMMTALQHLLDIPDGEAGGAGAGRGEKQGPTRAYVRDARAMAATPADVKELPGAYAFVVDMPGLGSGDIKVQVEDERVLVISGERSREEEEDAKYLRMERRMGKLMRKFVLPENADMEKISAACRDGVLTVTVEKLPPPEPKKPKTIQVQVA

SEQ ID NO: 11387 - DNA, 480 bp, Triticum aestivum
  CDS (1)..(480)
atggcgggcatggtgttcggcttggagaacccaatgatgacggcgctgcaacacctgctggacatcccagacggcgaggccggtgcagccggtggagagaagcagggcccgacgcgcgcctacgtccgcgacgcgcgcgccatggcggccaccccggccgacgtgaaggagctgccgggcgcgtacgcgttcgtggtggacatgccggggctggggtccggcgacatcaaggtgcaggtggaggacgagcgggtgctggtcatcagcggcgagcggagcagggaggagaaggaggacgccaagtacctgcggatggagcgccgcatgggcaagctgatgcgcaagttcgtgctgccagagaacgccgacatggagaagatctccgccgcgtgccgcgacggcgtgctcaccgtcaccgtcgagaagctgccgccgcccgagcccaagaagcccaagaccatccaggtccaggtcgcctga

SEQ ID NO: 11388 - protein, 159 aa, Triticum aestivum
MAGMVFGLENPMMTALQHLLDIPDGEAGAAGGEKQGPTRAYVRDARAMAATPADVKELPGAYAFVVDMPGLGSGDIKVQVEDERVLVISGERSREEKEDAKYLRMERRMGKLMRKFVLPENADMEKISAACRDGVLTVTVEKLPPPEPKKPKTIQVQVA

SEQ ID NO: 11389 - DNA, 450 bp, Zea mays; identical to SEQ ID NO: 8612
  CDS (1)..(450)

SEQ ID NO: 11390 - protein, 149 aa, Zea mays; identical to SEQ ID NO: 8613

SEQ ID NO: 11391 - DNA, 495 bp, Zea mays
  CDS (1)..(495)
atggacgcggtgatgttcgggctggagactcccctgatggccgcgctgcagcacctgctggacgtgcccgacggcgacgccggcgcgggcggcgacaacaagacgggcagcggcggcagcgccacgcgcacctacgtccgcgacgcgcgcgccatggcggccaccccggccgacgtgaaggagctgcccggcgcgtacgcgttcgtggtggacatgccggggctgggcacgggcgacatccgggtgcaggtggaggacgagcgggtgctggtggtcagcggcgagcggcgccgggaggagcgcgaggacgacgccaagtacctgcgcatggagcggcggatgggcaagttcatgcgcaagttcgtgctgccggacaacgccgacgtcgacaaggtcgcccccgtgtgcagggacggcgtgctcacggtgaccgtcgaaaagctgcccccgccggagcccaagaagcccaagaccatcgaggtcaaggtcgcctga

SEQ ID NO: 11392 - protein, 164 aa, Zea mays
MDAVMFGLETPLMAALQHLLDVPDGDAGAGGDNKTGSGGSATRTYVRDARAMAATPADVKELPGAYAFVVDMPGLGTGDIRVQVEDERVLVVSGERRREEREDDAKYLRMERRMGKFMRKFVLPDNADVDKVAPVCRDGVLTVTVEKLPPPEPKKPKTIEVKVA

SEQ ID NO: 11393 - DNA, 459 bp, Zea mays
  CDS (1)..(459)
atgtcgctcgtgaggcgcagcaacgtgttcgaccccttctccatggacctctgggaccccttcgacaccatgttccgctccatcgtcccgtcggcggtctccaccaactccgagactgccgccttcgccagcgcccgcatcgactggaaggagacgcccgaggcgcacgtgttcaaggccgacctccccggcgtcaagaaggaggaggtcaaggtcgaggtcgaggacggcaacgtgctggtcatcagcggccagcgcagcagggagaaggaggacaaggacgacaagtggcaccgcgtcgagcgcagcagcggccagttcgtcaggcgcttccgcctgccggagaacgccaaggtggatcaggtcaaggctggcctcgagaacggcgtgctcacggtcaccgtgcccaaggcggaggagaagaagcctgaggtgaaggctattgagatctctggttga

SEQ ID NO: 11394 - protein, 152 aa, Zea mays; identical to SEQ ID NO: 8611

SEQ ID NO: 11395 - DNA, 516 bp, Zea mays
  CDS (1)..(516)
atgacggagctgttcgacacggccgtgaccagcctcctccacctgccggaggtgctggaccgcctcgccgccgcagacggcgaccggcggtcggccggcaaccacgcggcgcacggccacggccacggacgcgtccacgggctcggcggcggcggcggagcgccggtggacatcgtggagagcccccgcgagtacgccttcgtgctcgacgtacccggcctctccaagtccgacatccaggtgacgctggaggaggaccgggtgctggtgatgaagggcggcagcgggaagcggaagcgcgatgaggaggaggacatgaacggcgaagggtgccgatacatccggttggagcgcggcgcggcgccgcggtcgttcgtgcgcaagttccggctgccggaggacgcggacacgggcggcgttgcggcgcgctgcgagaacggtgtgctcaccgtcaccgtcaagaagctgccgccgccggagaagaaggccaagaccgtgcaggtcaccatcgcctag

SEQ ID NO: 11396 - protein, 171 aa, Zea mays
MTELFDTAVTSLLHLPEVLDRLAAADGDRRSAGNHAAHGHGHGRVHGLGGGGGAPVDIVESPREYAFVLDVPGLSKSDIQVTLEEDRVLVMKGGSGKRKRDEEEDMNGEGCRYIRLERGAAPRSFVRKFRLPEDADTGGVAARCENGVLTVTVKKLPPPEKKAKTVQVTIA

SEQ ID NO: 11397 - DNA, 465 bp, Zea mays; identical to SEQ ID NO: 8830
  CDS (1)..(465)

SEQ ID NO: 11398 - protein, 154 aa, Zea mays; identical to SEQ ID NO: 8831

SEQ ID NO: 11399 - DNA, 483 bp, Zea mays; identical to SEQ ID NO: 8832
  CDS (1)..(483)

SEQ ID NO: 11400 - protein, 160 aa, Zea mays; identical to SEQ ID NO: 8833

SEQ ID NO: 11401 - DNA, 483 bp, Zea mays; identical to SEQ ID NO: 8834
  CDS (1)..(483)

SEQ ID NO: 11402 - protein, 160 aa, Zea mays; identical to SEQ ID NO: 8835

SEQ ID NO: 11403 - DNA, 477 bp, Zea mays; identical to SEQ ID NO: 8614
  CDS (1)..(477)

SEQ ID NO: 11404 - protein, 158 aa, Zea mays; identical to SEQ ID NO: 8615

SEQ ID NO: 11405 - DNA, 498 bp, Zea mays
  CDS (1)..(498)
atggacgggaggatgttcggtctcgagacccccctgatggtggcgctgcagcaccttctggacgtgcccgacggcgacgccggcgcgggcggcgacaaggcgagtggtgccgcggcgggcggcgggcccacgcgcacctacgtccgcgacgcgcgcgccatggcggccaccccggccgacgtcaaggagctcccgggcgcgtacgcgttcgtggtggacatgccggggctgggcacgggcgacatcaaggtgcaggtggaggacgagcgggtgctggtgatcagcggcgagcggcgccgggaggagcgcgaggacgccaagtacctgcgcatggagcggcggatgggcaagttcatgcgcaagttcgtgctgccggacaacgccgacatggacaagatctcggcggtgtgcagggacggcgtgctcaccgtgaccgtcgagaagctgcccccgcccgagcccaagaaacccaagaccatcgagggcaaggtcgcctga

SEQ ID NO: 11406 - protein, 165 aa, Zea mays
MDGRMFGLETPLMVALQHLLDVPDGDAGAGGDKASGAAAGGGPTRTYVRDARAMAATPADVKELPGAYAFVVDMPGLGTGDIKVQVEDERVLVISGERRREEREDAKYLRMERRMGKFMRKFVLPDNADMDKISAVCRDGVLTVTVEKLPPPEPKKPKTIEGKVA

SEQ ID NO: 11407 - DNA, 489 bp, Zea mays
  CDS (1)..(489)
atgatgcctggtctcgagacccccctgatggtggcgctgcagcaccttctggacgtgcccgacggcgacgccggcgcgggcggcgacaaggcgagtggtgccgcggcgggcggcgggcccacgcgcacctacgtccgcgacgcgcgcgccatggcggccaccccggccgacgtcaaggagctcccgggcgcgtacgcgttcgtggtggacatgccggggctgggcacgggcgacatcaaggtgcaggtggaggacgagcgggtgctggtgatcagcggcgagcggcgccgggaggagcgcgaggacgccaagtacctgcgcatggagcggcggatgggcaagttcatgcgcaagttcgtgctgccggacaacgccgacatggacaagatctcggcggtgtgcagggacggcgtgctcaccgtgaccgtcgagaagctgcccccgcccgagcccaagaaacccaagaccatcgaggtcaaggtcgcctga

SEQ ID NO: 11408 - protein, 162 aa, Zea mays
MMPGLETPLMVALQHLLDVPDGDAGAGGDKASGAAAGGGPTRTYVRDARAMAATPADVKELPGAYAFVVDMPGLGTGDIKVQVEDERVLVISGERRREEREDAKYLRMERRMGKFMRKFVLPDNADMDKISAVCRDGVLTVTVEKLPPPEPKKPKTIEVKVA

SEQ ID NO: 11409 - DNA, 459 bp, Zea mays
  CDS (1)..(459)
atgtcgccggcgagcagcagcaacccgctgtcgctggacttctgggcgtcgtccgccgacccgttcggcgtcgtccggccgctggcggagcagtgccccgtcctcaccaacgtgcgcgtcgactggaaggagacccccgaggcgcacgtgttcagggccgaccttccgggcgtcaggaaggaggctgccaaggtcgaggtggaggacggcaacgtgctcgtcatcagcggcgagcgcgccagggaggaggaggagaaggaggaggccggcaaggacgaggcgtggcgctggcgcctcgtcgagcgcagcagcggcaggttccagaggcggttccgcctgccgcgcggcgccaggctggaccaggttcacgcgtccatggagaacggcgtgctcaccgtcaccgtgcccaaggaggaggccaagaagccgcaggtcagggctgtcgagatctctggttga

SEQ ID NO: 11410 - protein, 152 aa, Zea mays
MSPASSSNPLSLDFWASSADPFGVVRPLAEQCPVLTNVRVDWKETPEAHVFRADLPGVRKEAAKVEVEDGNVLVISGERAREEEEKEEAGKDEAWRWRLVERSSGRFQRRFRLPRGARLDQVHASMENGVLTVTVPKEEAKKPQVRAVEISG

SEQ ID NO: 11411 - DNA, 459 bp, Zea mays
  CDS (1)..(459)
atgtcgctcgtgaggcgcagcaacgtgttcgaccccttctcgatggatctctgggaccccttcgacaccatgttccgctccatcgtcccgtcggcgacctccaccaactccgagactgccgccttcgccagcgcccgcatcgactggaaggagacgcccgaggcgcacgtgttcaaggccgacctccccggcgtcaagaaggaagaggtcaaggtcgaggtcgaggacggcaacatgctggtcatcagcggccagcgcagcagggagaaggaggacaaggacgacaagtggcaccgcgtcgagcgcagcagcggccagttcgtcaggcgcttccgcctgccggagaacaccaaggtggatcaggtcaaggctggcctcgagaacggcgtgctcacggtcaccgtgcccaaggcggaggagaagaagcctgaggtgaaggctattgagatctctggttga

SEQ ID NO: 11412 - protein, 152 aa, Zea mays; identical to SEQ ID NO: 8449

SEQ ID NO: 11413 - DNA, 21 bp, Artificial sequence
  primer
atgagtgctgttgcgattaac

SEQ ID NO: 11414 - DNA, 21 bp, Artificial sequence
  primer
tcaagaaacagcgatttgaac

SEQ ID NO: 11415 - protein, 232 aa, Artificial sequence
  consensus sequence
  Variant (2)..(23): Xaa in position 2 to 23 is any amino acid
  Variant (24)..(70): Xaa in position 24 to 70 is any or no amino acid
  Variant (72)..(76): Xaa in position 72 to 76 is any amino acid
  Variant (77)..(94): Xaa in position 77 to 94 is any or no amino acid
  Variant (96)..(97): Xaa in position 96 to 97 is any amino acid
  Variant (99)..(99): Xaa in position 99 is any amino acid
  Variant (100)..(101): Xaa in position 100 to 101 is any or no amino acid
  Variant (103)..(106): Xaa in position 103 to 106 is any amino acid
  Variant (108)..(109): Xaa in position 108 to 109 is any amino acid
  Variant (111)..(111): Xaa in position 111 is any amino acid
  Variant (114)..(120): Xaa in position 114 to 120 is any amino acid
  Variant (121)..(121): Xaa in position 121 is any or no amino acid
  Variant (123)..(123): Xaa in position 123 is any amino acid
  Variant (126)..(128): Xaa in position 126 to 128 is any amino acid
  Variant (129)..(130): Xaa in position 129 to 130 is any or no amino acid
  Variant (132)..(132): Xaa in position 132 is any amino acid
  Variant (136)..(136): Xaa in position 136 is any amino acid
  Variant (137)..(143): Xaa in position 137 to 143 is any or no amino acid
  Variant (145)..(152): Xaa in position 145 to 152 is any amino acid
  Variant (153)..(175): Xaa in position 153 to 175 is any or no amino acid
  Variant (177)..(177): Xaa in position 177 is any amino acid
  Variant (180)..(181): Xaa in position 180 to 181 is any amino acid
  Variant (182)..(183): Xaa in position 182 to 183 is any or no amino acid
  Variant (185)..(185): Xaa in position 185 is any amino acid
  Variant (187)..(187): Xaa in position 187 is any amino acid
  Variant (189)..(189): Xaa in position 189 is any amino acid
  Variant (191)..(191): Xaa in position 191 is any amino acid
  Variant (194)..(202): Xaa in position 194 to 202 is any amino acid
  Variant (203)..(204): Xaa in position 203 to 204 is any or no amino acid
  Variant (206)..(208): Xaa in position 206 to 208 is any amino acid
  Variant (209)..(209): Xaa in position 209 is any or no amino acid
  Variant (213)..(214): Xaa in position 213 to 214 is any amino acid
  Variant (219)..(219): Xaa in position 219 is any amino acid
  Variant (221)..(228): Xaa in position 221 to 228 is any amino acid
  Variant (229)..(231): Xaa in position 229 to 231 is any or no amino acid
MXXXXXXXXXXXXXXXXXXXXXXXXXXXXXXXXXXXXXXXXXXXXXXXXXXXXXXXXXXXXXXXXXXXXXAXXXXXXXXXXXXXXXXXXXXXXXDXXEXXXPXXXXFXXDXPGXXXXXXXXVXVEXXXXXLXISGXXXXXXXXRXXXXXXXXXXXXXXXXXXXXXXXXXXXXXXXRXERXXXXGXFXRXFXLPXXXXXXXXXXXAXXXXGVLXXTVTVXKXXXXXXXXXXXI

SEQ ID NO: 11416 - protein, 14 aa, Artificial sequence
  protein pattern
  Variant (2)..(5): Xaa in position 2 to 5 is any amino acid
  Variant (11)..(11): Xaa in position 11 is any amino acid
  Variant (12)..(12): Xaa in position 12 is Ile, Leu or Val
  Variant (13)..(13): Xaa in position 13 is any amino acid
AXXXXGVLTVXXXK

SEQ ID NO: 11417 - protein, 17 aa, Artificial sequence
  protein pattern
  Variant (2)..(2): Xaa in position 2 is any amino acid
  Variant (3)..(3): Xaa in position 3 is Ala, Glu or Ser
  Variant (4)..(4): Xaa in position 4 is His or Tyr
  Variant (5)..(5): Xaa in position 5 is any amino acid
  Variant (7)..(8): Xaa in position 7 to 8 is any amino acid
  Variant (10)..(10): Xaa in position 10 is Ile, Leu, Met or Val
  Variant (13)..(13): Xaa in position 13 is Ile, Leu or Val
  Variant (14)..(15): Xaa in position 14 to 15 is any amino acid
  Variant (16)..(16): Xaa in position 16 is Ala, Asp, Glu, Gly, Asn or Ser
  Variant (17)..(17): Xaa in position 17 is Ala, Asp, Glu or Gln
PXXXXFXXDXPGXXXXX

SEQ ID NO: 11418 - DNA, 2775 bp, Arabidopsis thaliana
  CDS (1)..(2775)
atggattcaacaaatggtaacggagctgatcttgaatcagcaaatggggcaaacgggagtggggttactgaggcattaccacctcctccaccagttatacctccaaatgtggaaccagttcgtgttaaaactgaacttgctgagaagaaggggccagttcgagttcctatggctcgaaaaggatttggaacaaggggccaaaagatccccttgttaacaaatcatttcaaagtcgatgtggctaatcttcagggtcatttcttccactacagtgtggctctattctatgatgatggtcgtcctgttgaacaaaagggtgttggaagaaaaatccttgacaaggtgcatcagacttaccattctgatctggatggtaaagagtttgcttatgacggtgagaagacgttgtttacatatggagctttgcctagtaacaagatggatttttctgtggtgcttgaggaagtatctgctacaagggctaatggaaacggaagccccaatgggaatgatagtccaagtgatggtgataggaaaagactgcgtaggcctaaccggtccaaaaactttagagtggagatcagctatgcggccaaaattcctcttcaagctcttgctaatgcaatgcggggacaagaatcagagaattcccaggaggcaatacgggttcttgatatcatattgaggcaacatgctgctagacaaggttgcttgcttgttcgacagtcttttttccacaatgatccaaccaactgtgaaccagttggtggtaacatcttaggatgtaggggatttcactccagtttcagaacaacgcagggtggcatgtcacttaatatggatgttacaaccaccatgatcatcaagcctggtccagtggttgatttcctaattgctaaccaaaatgctagggacccttattcgattgactggtctaaggctaaacgaacccttaagaacctaagggtaaaggtcagcccctcaggccaagaattcaagataaccggattgagtgacaagccttgcagggaacaaacgtttgaattgaagaaaaggaacccaaatgaaaatggagagttcgaaactactgaagttacagttgctgactacttccgcgatacaaggcatattgatttgcaatattctgcggatttgccttgcatcaatgttgggaagccaaagcgacccacttacattcctctcgagctctgcgcgttggttccacttcagaggtacacaaaagcacttaccacgttccaaagatctgcccttgttgagaaatccagacagaaaccccaagagaggatgactgttctgtccaaagctctgaaagttagcaactatgatgcggaaccactcctgcgatcctgtggcatttcgatcagctccaactttactcaggtggagggtcgtgttctaccagctcccaagctgaaaatgggatgtggatctgaaacctttcccagaaatggtcgctggaacttcaacaacaaggaatttgttgagcccaccaaaattcaacgatgggttgttgtcaatttctctgctcgctgtaatgtacgtcaagttgttgatgatctgataaaaattggaggatcaaaaggaattgaaattgcttctccctttcaagtgtttgaggagggtaatcaattccgccgtgctcctcctatgattcgtgttgagaacatgtttaaggacatccaatcgaaactccctggtgtcccacaattcatactatgtgtgctccctgacaaaaagaacagtgatctctatggtccatggaagaaaaaaaacttaactgaatttggcattgttactcaatgcatggctccaacgcggcaacctaatgatcagtatcttactaacttacttctgaagattaatgcaaagcttggaggcctgaactcaatgttaagtgtagagcgtacacctgcgttcactgtgatttctaaggttccaaccattatccttgggatggatgtttcacatggatctcctgggcagtctgatgtcccgtccatcgctgctgtggtgagttctagggagtggccactgatatccaaatatagagcatctgttcggacacagccttctaaggctgagatgattgagtcccttgtcaagaaaaatggaactgaagacgatggcattatcaaggagttgctggtagatttctacaccagctcgaataagagaaaaccagagcatatcataattttcagggatggtgtgagtgaatctcaattcaatcaggttctgaatattgaacttgatcagatcatcgaggcttgcaagctcttagacgcaaattggaacccaaagttccttttgttggtggctcaaaagaatcatcataccaagttcttccagccaacgtctcctgaaaatgttcctccagggacaatcattgacaacaaaatatgtcacccaaagaacaatgatttctacctctgtgctcacgctggaatgattggaactacccgcccaactcactaccacgtcctgtatgatgagattggtttttcagctgacgaacttcaggaacttgtccactcgctctcctatgtgtaccaaagaagcaccagtgccatttctgttgttgcgccgatctgctatgctcacttggcagctgctcagcttgggacgttcatgaagtttgaagatcagtctgagacatcatcaagccatggtggtatcacagctccaggaccaatctctgttgcacagctcccaagactcaaagacaacgtcgccaactccatgttcttctgttaa

SEQ ID NO: 11419 - protein, 924 aa, Arabidopsis thaliana
MDSTNGNGADLESANGANGSGVTEALPPPPPVIPPNVEPVRVKTELAEKKGPVRVPMARKGFGTRGQKIPLLTNHFKVDVANLQGHFFHYSVALFYDDGRPVEQKGVGRKILDKVHQTYHSDLDGKEFAYDGEKTLFTYGALPSNKMDFSVVLEEVSATRANGNGSPNGNDSPSDGDRKRLRRPNRSKNFRVEISYAAKIPLQALANAMRGQESENSQEAIRVLDIILRQHAARQGCLLVRQSFFHNDPTNCEPVGGNILGCRGFHSSFRTTQGGMSLNMDVTTTMIIKPGPVVDFLIANQNARDPYSIDWSKAKRTLKNLRVKVSPSGQEFKITGLSDKPCREQTFELKKRNPNENGEFETTEVTVADYFRDTRHIDLQYSADLPCINVGKPKRPTYIPLELCALVPLQRYTKALTTFQRSALVEKSRQKPQERMTVLSKALKVSNYDAEPLLRSCGISISSNFTQVEGRVLPAPKLKMGCGSETFPRNGRWNFNNKEFVEPTKIQRWVVVNFSARCNVRQVVDDLIKIGGSKGIEIASPFQVFEEGNQFRRAPPMIRVENMFKDIQSKLPGVPQFILCVLPDKKNSDLYGPWKKKNLTEFGIVTQCMAPTRQPNDQYLTNLLLKINAKLGGLNSMLSVERTPAFTVISKVPTIILGMDVSHGSPGQSDVPSIAAVVSSREWPLISKYRASVRTQPSKAEMIESLVKKNGTEDDGIIKELLVDFYTSSNKRKPEHIIIFRDGVSESQFNQVLNIELDQIIEACKLLDANWNPKFLLLVAQKNHHTKFFQPTSPENVPPGTIIDNKICHPKNNDFYLCAHAGMIGTTRPTHYHVLYDEIGFSADELQELVHSLSYVYQRSTSAISVVAPICYAHLAAAQLGTFMKFEDQSETSSSHGGITAPGPISVAQLPRLKDNVANSMFFC

SEQ ID NO: 11420 - DNA, 2793 bp, arabidopsis thaliana
  CDS (1)..(2793)
atggattcaacaaatggtaacggagctgatcttgaatcagcaaatggggcaaacgggagtggggttactgaggcattaccacctcctccaccagttatacctccaaatgtggaaccagttcgtgttaaaactgaacttgctgagaagaaggggccagttcgagttcctatggctcgaaaaggatttggaacaaggggccaaaagatccccttgttaacaaatcatttcaaagtcgatgtggctaatcttcagggtcatttcttccactacagtgtggctctattctatgatgatggtcgtcctgttgaacaaaagggtgttggaagaaaaatccttgacaaggtgcatcagacttaccattctgatctggatggtaaagagtttgcttatgacggtgagaagacgttgtttacatatggagctttgcctagtaacaagatggatttttctgtggtgcttgaggaagtatctgctacaagtaaggattttgtgagcagggctaatggaaacggaagccccaatgggaatgaaagtccaagtgatggtgataggaaaagactgcgtaggcctaaccggtccaaaaactttagagtggagatcagctatgcggccaaaattcctcttcaagctcttgctaatgcaatgcggggacaagaatcagagaattcccaggaggcaatacgggttcttgatatcatattgaggcaacatgctgctagacaaggttgcttgcttgttcgacagtcttttttccacaatgatccaaccaactgtgaaccagttggtggtaacatcttaggatgtaggggatttcactccagtttcagaacaacgcagggtggcatgtcacttaatatggatgttacaaccaccatgatcatcaagcctggtccagtggttgatttcctaattgctaaccaaaatgctagggacccttattcgattgactggtctaaggctaaacgaacccttaagaacctaagggtaaaggtcagcccctcaggccaagaattcaagataaccggattgagtgacaagccttgcagggaacaaacgtttgaattgaagaaaaggaacccaaatgaaaatggagagttcgaaactactgaagttacagttgctgactacttccgcgatacaaggcatattgatttgcaatattctgcggatttgccttgcatcaatgttgggaagccaaagcgacccacttacattcctctcgagctctgcgcgttggttccacttcagaggtacacaaaagcacttaccacgttccaaagatctgcccttgttgagaaatccagacagaaaccccaagagaggatgactgttctgtccaaagctctgaaagttagcaactatgatgcggaaccactcctgcgatcctgtggcatttcgatcagctccaactttactcaggtggagggtcgtgttctaccagctcccaagctgaaaatgggatgtggatctgaaacctttcccagaaatggtcgctggaacttcaacaacaaggaatttgttgagcccaccaaaattcaacgatgggttgttgtcaatttctctgctcgctgtaatgtacgtcaagttgttgatgatctgataaaaattggaggatcaaaaggaattgaaattgcttctccctttcaagtgtttgaggagggtaatcaattccgccgtgctcctcctatgattcgtgttgagaacatgtttaaggacatccaatcgaaactccctggtgtcccacaattcatactatgtgtgctccctgacaaaaagaacagtgatctctatggtccatggaagaaaaaaaacttaactgaatttggcattgttactcaatgcatggctccaacgcggcaacctaatgatcagtatcttactaacttacttctgaagattaatgcaaagcttggaggcctgaactcaatgttaagtgtagagcgtacacctgcgttcactgtgatttctaaggttccaaccattatccttgggatggatgtttcacatggatctcctggacagtctgatgtcccgtccatcgctgctgtggtgagttctagggagtggccactgatatccaaatatagagcatctgttcggacacagccttctaaggctgagatgattgagtcccttgtcaagaaaaatggaactgaagacgatggcattatcaaggagttgctggtagatttctacaccagctcgaataagagaaaaccagagcatatcataattttcagggatggtgtgagtgaatctcaattcaatcaggttctgaatattgaacttgatcagatcatcgaggcttgcaagctcttagacgcaaattggaacccaaagttccttttgttggtggctcaaaagaatcatcataccaagttcttccagccaacgtctcctgaaaatgttcctccagggacaatcattgacaacaaaatatgtcacccaaagaacaatgatttctacctctgtgctcacgctggaatgattggaactacccgcccaactcactaccacgtcctgtatgatgagattggtttttcagctgacgaacttcaggaacttgtccactcgctctcctatgtgtaccaaagaagcaccagtgccatttctgttgttgcgccgatctgctatgctcacttggcagctgctcagcttgggacgttcatgaagtttgaagatcagtctgagacatcatcaagccatggtggtatcacagctccaggaccaatctctgttgcacagctcccaagactcaaagacaacgtcgccaactccatgttcttctgttaa

SEQ ID NO: 11421 - protein, 930 aa, arabidopsis thaliana
MDSTNGNGADLESANGANGSGVTEALPPPPPVIPPNVEPVRVKTELAEKKGPVRVPMARKGFGTRGQKIPLLTNHFKVDVANLQGHFFHYSVALFYDDGRPVEQKGVGRKILDKVHQTYHSDLDGKEFAYDGEKTLFTYGALPSNKMDFSVVLEEVSATSKDFVSRANGNGSPNGNESPSDGDRKRLRRPNRSKNFRVEISYAAKIPLQALANAMRGQESENSQEAIRVLDIILRQHAARQGCLLVRQSFFHNDPTNCEPVGGNILGCRGFHSSFRTTQGGMSLNMDVTTTMIIKPGPVVDFLIANQNARDPYSIDWSKAKRTLKNLRVKVSPSGQEFKITGLSDKPCREQTFELKKRNPNENGEFETTEVTVADYFRDTRHIDLQYSADLPCINVGKPKRPTYIPLELCALVPLQRYTKALTTFQRSALVEKSRQKPQERMTVLSKALKVSNYDAEPLLRSCGISISSNFTQVEGRVLPAPKLKMGCGSETFPRNGRWNFNNKEFVEPTKIQRWVVVNFSARCNVRQVVDDLIKIGGSKGIEIASPFQVFEEGNQFRRAPPMIRVENMFKDIQSKLPGVPQFILCVLPDKKNSDLYGPWKKKNLTEFGIVTQCMAPTRQPNDQYLTNLLLKINAKLGGLNSMLSVERTPAFTVISKVPTIILGMDVSHGSPGQSDVPSIAAVVSSREWPLISKYRASVRTQPSKAEMIESLVKKNGTEDDGIIKELLVDFYTSSNKRKPEHIIIFRDGVSESQFNQVLNIELDQIIEACKLLDANWNPKFLLLVAQKNHHTKFFQPTSPENVPPGTIIDNKICHPKNNDFYLCAHAGMIGTTRPTHYHVLYDEIGFSADELQELVHSLSYVYQRSTSAISVVAPICYAHLAAAQLGTFMKFEDQSETSSSHGGITAPGPISVAQLPRLKDNVANSMFFC

SEQ ID NO: 11422 - DNA, 2706 bp, Zea mays
  CDS (1)..(2706)
atggagtctcacaatggcgaggccaatgacttgcctccaccacctcctctgattgctggtgttgaaccacttaaagctgatgaaacaaagatgccattgaaacctaggagtctggtccagagaaatggatttggcagaaaggggcagccaataaagctgataacaaatcacttcaaagtttctcttgtgaatgctgaagaatttttctaccattactatgtcaatttgaagtatgaagatgatacaccggttgatcgcaaagggtcaggaaggaaagtgattgaaaaactgcagcaaacttatgctgctgaacttgcaaataaagattttgcctatgatggtgagaagagcctgttcacaattggtgctcttcctcaagttaaaaatgagtttactgtcgtggttgaagatttttcaactggaaagactcctgcaaacggcagtccaggaaatgacagtcctcccggaagtgacaggaaaagggtcagaaggccttacaatacaaagacctataaggtcgagctctcttttgcagcaaaaattcctatgagtgcaatctcacaggccttaagaggtcaggaatcagagcacactcaggaagcaattcgagtgattgacattattctgaggcagcactcagctaagcagggttgcctattagtaaggcaatcattcttccacaacaatccttccaattttgttgacctgggtggtggtgtagtgggctgtagaggttttcattctagttttcgagcaacccagagtggactttcactcaatatcgatgtgtcgactacaatgatagtgaaacctggtcctgtcattgattttctgcttgacaatcagaaagttggtgattcaagcatgattgattgggctaagggcaagcgtgcactgaagaacttgaggataaaaataagtccagcgaaccaagaacagaagattgttggtctcagcgaaagaacttgtcgtgagcaattattcacactgaaacataaaaatggtaacaatggtgactctgaagagatcactgtttatgattacttcgtaaagcagcgtggcatagtgctgcaatactctggtgatcttccttgcatcaatgtgggaaaactaaagcggccaacatattttccaattgagttatgcagtcttgtgcctttacaaagatacactaaagctttgaacacacttcagaggtcatcactcgtggagaaatctaggcagaaaccgcaggaaaggatgtctgttttatctgatgtgctgcaaagaagcaactatgatgcagagcccatgttgaaggcatgcgggattacaattgctagaaatttcacagaagttgatggtagggtattgcagccacctaagcttaaagctgggaatggtgaagacatttttacacgcaatggtagatggaacttcaacaataagaggctcattagagcttgtagtgtcgagaaatgggcggtggtaaacttttctgcacgatgcaatgtcagggatcttgtccgggatctcatcaagtgtggaggcatgaagggcattatggttgatgctccttttgctgtatttgatgagaatccttcaatgagacggtcacctgctataagaagggttgaagacatgtttgaacaagtgaaaactaagcttcctggagcaccaaagtttcttttgtgtgttctagctgaaaggaagaattctgatatttatgggccttggaagaagaaatgccttgctgaatttgggatcgttacacaatgtgtggcaccaactagagtgaacgaccagtatcttacaaatgtcctacttaagataaatgcaaagctgggtggcatgaattcgttgctccaaattgaaacatccccagcaattcctcttgtatccaaggtcccaactataatcttgggaatggatgtgtcacacggttctcctggacattctgatgtaccatctattgctgctgttgttagttctcgtgaatggcctcttatctcgaaatacagagcttctgtccgcacccaatcacctaaaatggaaatgattgactcattgtttaagccacgggaagctgaagatgatggtctgatccgggagtgtctgattgacttctacaccagttctgggaagagaaagcctgaccaagttatcatattcagggacggtgttagcgaaagtcagtttaatcaggtgctgaacattgagttgcaacaaatcatcgaggcttgcaaatttcttgatgagaaatggaatcccaagttcacgttgattattgcccagaagaatcatcacactaaatttttcattcctggaaagccagataatgtcccaccaggaactgtggtggacaacaaagtctgccatccaaagaacttcgatttctacatgtgtgcgcatgctggaatgatcgggactacgaggccaactcactaccacatcctgcatgatgagataggcttcagtcctgatgatctgcaggagctggtgcattcgctctcttatgtgtaccaaaggagcacaacagccatatcagtcgttgctcccatctgctacgcacatctggcagctgctcaggttggccagttcataaagttcgatgagatgtcggagacgtcctccagtcatggcgggcatacttcggcgggcagcgttccggtccaggagctgccgcgcctgcatgagaaagtgaggagctcgatgttcttttgctga

SEQ ID NO: 11423 - protein, 901 aa, Zea mays
MESHNGEANDLPPPPPLIAGVEPLKADETKMPLKPRSLVQRNGFGRKGQPIKLITNHFKVSLVNAEEFFYHYYVNLKYEDDTPVDRKGSGRKVIEKLQQTYAAELANKDFAYDGEKSLFTIGALPQVKNEFTVVVEDFSTGKTPANGSPGNDSPPGSDRKRVRRPYNTKTYKVELSFAAKIPMSAISQALRGQESEHTQEAIRVIDIILRQHSAKQGCLLVRQSFFHNNPSNFVDLGGGVVGCRGFHSSFRATQSGLSLNIDVSTTMIVKPGPVIDFLLDNQKVGDSSMIDWAKGKRALKNLRIKISPANQEQKIVGLSERTCREQLFTLKHKNGNNGDSEEITVYDYFVKQRGIVLQYSGDLPCINVGKLKRPTYFPIELCSLVPLQRYTKALNTLQRSSLVEKSRQKPQERMSVLSDVLQRSNYDAEPMLKACGITIARNFTEVDGRVLQPPKLKAGNGEDIFTRNGRWNFNNKRLIRACSVEKWAVVNFSARCNVRDLVRDLIKCGGMKGIMVDAPFAVFDENPSMRRSPAIRRVEDMFEQVKTKLPGAPKFLLCVLAERKNSDIYGPWKKKCLAEFGIVTQCVAPTRVNDQYLTNVLLKINAKLGGMNSLLQIETSPAIPLVSKVPTIILGMDVSHGSPGHSDVPSIAAVVSSREWPLISKYRASVRTQSPKMEMIDSLFKPREAEDDGLIRECLIDFYTSSGKRKPDQVIIFRDGVSESQFNQVLNIELQQIIEACKFLDEKWNPKFTLIIAQKNHHTKFFIPGKPDNVPPGTVVDNKVCHPKNFDFYMCAHAGMIGTTRPTHYHILHDEIGFSPDDLQELVHSLSYVYQRSTTAISVVAPICYAHLAAAQVGQFIKFDEMSETSSSHGGHTSAGSVPVQELPRLHEKVRSSMFFC

SEQ ID NO: 11424 - DNA, 2733 bp, Zea mays
  CDS (1)..(2733)
atgggctctcatgatggcgaggatgaagagttgccacccccccctccggtgccaccagatgtgattcccattaaagctgaagatgctgtgggtgaatcaccagcaaaccatatattaaagccaaagagattactgatggacaggcctggtataggaagaaaagggcagccgacccagctctattcaaatcactttaaagtcgctgtgaagagtacagaagacgtcttctttcactactatgtaaacctgaagtatgaggatgatcgacccgttgatggtaaagggatcggcagaaaggtgattgataaactgcagcagacatatcgtgcagagctttctaacaaggactttgcatatgatggagaaaagagcctgtttacagttggtggtcttccacaaaaaaagaatgagttcaccgttgtcttggaggacgtatctactggaaagactgctgccaatgggagccctggaggtaatgacagtcctggaggtggtgataggaagagagtgaggaggccataccagacgaaaactttcaaagtggagataaattttgcagcagaggttcctatgagtgctattggtcaagtcattagaggcgaagaatctgagaactccctggaggcgcttcgtgttcttgatatcatactgaggcagcattccgcagaacaaggctgccttttggttaagcaatcatttttctacaacaacccttcatgctttgttgacttgggtggtggtgtgatgggttgtcgtggatttcattcaagcttccgtggcacacagagtggactttccctcaatgttgatgtctcaacaacaatgatcgtgaaacctggccctgttattgattttcttctttctaaccagaatgttaatgatcctagcagaattgattggcaaaaggccaagcgtgctctcaagggcttgaggattagaaccactcctgcaaattcagaattcaagatttttggtctcagcgagaggatctgcaaagaacaaacgtttccgctgaggcagagaaatggtagcaacggagattgtgataccattgaaataactgtctatgactactatgcaaagaaaggaatcgatctaaagtattctggtgatttcccctgtataaatacagggaaggcaaagcgcccaacatattttccaatcgagctatgctcgcttgttccgcttcaaagatacaccaaagctttgtctacgctacaaaggtcatcccttgtggagaagtctagacagaagcctgaagaaaggatgaccgttctaaatgatgcactgcaacgcagtaactacgattctgaccccatgttgagggcatgtggtgtttcagttgctccaaaatttacccaagttgaaggaaggatccttcaagccccaaagctgaaagccggcaatggtgatgatatcttttcacgaaatggacggtggaatttcactaataggaagttttatgaaacctgctctgtgaataagtgggcggtcgttaatttctctgcacgttgtgatgttcggaatcttatccgtgacctgatgaggaatgcatctgcaaagggaattcaaatggaggaaccttttgatgtgtttgaagagagtccctctatgaggcgtgcacctgtgtcaagaagggtggatgatatgtttgggcagataaaatcaaaacttcctggagctcctaggttcctcttgtgccttctccctgagaggaaaaattgtgaaatctatggtccttggaagagaaagtgcctggccgagtttggtattgtcacacagtgtctagctccattaagagtcaatgatccgtacctgcttaatttgctgatgaagatcaatgcaaagcttggtggtctgaactcgttgctgcaagttgaagcatcttcgtcaataccacatgtgtcgcaagtacccaccatcatcttaggtatggatgtttcacatggtcatccaggacaagatagaccttcggttgcagcggtggttagttctcgtcaatggcctcttatctctagatatagagcatcagtgcacacccaatctgccagactagaaatgatgtcctcgttgtttaagccgcggggtactgatgatgatggcctcatccgggaatcactgatcgacttccacactagctctggaaagcgaaaaccagaacacataattattttcagggatggagtcagtgaaagtcagtttacccaggtcatcaacattgagctggatcagatcatcgaggcatgtaagtttctggatgagaagtggtcacccaagttcactgtgattgttgctcaaaagaaccaccacaccaagttctttcagacggcatcaccagacaatgttcttcctggaactgtggtggatagtaaagtttgccatcctaagaacttcgacttctacatgtgtgcacatgctgggatgattggaacaacaaggccgacccactatcatgttctgcacgacgagataggtttcagtgccgacgagatgcaggagtttgttcattcgctctcttacgtgtaccagaggagcacgacagccatctcagttgttgctccagtgtgctacgcccacctcgctgcagcccaggtgagcacgttcctgagattggaggagatgtcagacgcgtcctccagccagggaggagggcatacctcggctggcagtgctcctgtgccggagctgcctcgcctgcatgacaaagtcaggagctccatgttcttctgctag

SEQ ID NO: 11425 - protein, 910 aa, Zea mays
MGSHDGEDEELPPPPPVPPDVIPIKAEDAVGESPANHILKPKRLLMDRPGIGRKGQPTQLYSNHFKVAVKSTEDVFFHYYVNLKYEDDRPVDGKGIGRKVIDKLQQTYRAELSNKDFAYDGEKSLFTVGGLPQKKNEFTVVLEDVSTGKTAANGSPGGNDSPGGGDRKRVRRPYQTKTFKVEINFAAEVPMSAIGQVIRGEESENSLEALRVLDIILRQHSAEQGCLLVKQSFFYNNPSCFVDLGGGVMGCRGFHSSFRGTQSGLSLNVDVSTTMIVKPGPVIDFLLSNQNVNDPSRIDWQKAKRALKGLRIRTTPANSEFKIFGLSERICKEQTFPLRQRNGSNGDCDTIEITVYDYYAKKGIDLKYSGDFPCINTGKAKRPTYFPIELCSLVPLQRYTKALSTLQRSSLVEKSRQKPEERMTVLNDALQRSNYDSDPMLRACGVSVAPKFTQVEGRILQAPKLKAGNGDDIFSRNGRWNFTNRKFYETCSVNKWAVVNFSARCDVRNLIRDLMRNASAKGIQMEEPFDVFEESPSMRRAPVSRRVDDMFGQIKSKLPGAPRFLLCLLPERKNCEIYGPWKRKCLAEFGIVTQCLAPLRVNDPYLLNLLMKINAKLGGLNSLLQVEASSSIPHVSQVPTIILGMDVSHGHPGQDRPSVAAVVSSRQWPLISRYRASVHTQSARLEMMSSLFKPRGTDDDGLIRESLIDFHTSSGKRKPEHIIIFRDGVSESQFTQVINIELDQIIEACKFLDEKWSPKFTVIVAQKNHHTKFFQTASPDNVLPGTVVDSKVCHPKNFDFYMCAHAGMIGTTRPTHYHVLHDEIGFSADEMQEFVHSLSYVYQRSTTAISVVAPVCYAHLAAAQVSTFLRLEEMSDASSSQGGGHTSAGSAPVPELPRLHDKVRSSMFFC

SEQ ID NO: 11426 - DNA, 2748 bp, Glycine max
  CDS (1)..(2748)
atggattcatttgagccagatggaaatgggaaggagtcactgccaccaccacctcctgttgttccctctgatattgtacctctcaaagcagaggaggtgctctgtacccctaccgagcataataagaaaaaggcttcccgacttccaatagccagatctggtctgggatcaaaaggaaataaaatacaattactaaccaatcacttcaaagttaatgttgctaaaaatgatgggcatttcttccattatagtgtggcttttacttatgaagatggacgccctgtagaaggtaagggtgtagggagaaagataatagatagggtgcaggagacatatcattctgacttaaatggtaaggactttgcatatgatggggagaaaagtctgtttactgttggctctcttcctcaaaacaagcttgagtttgaagttgttcttgaggatgtcacctctaacaggaataatggcaattgcagccctgatggtctaggggacaatgagagtgacagaaagaggatgcgacgtccttatcgttcgaagtcattcaaagtagagataagctttgctgcaaaaattccaatgcaggccattgccagtgccttacgcgggcaagagactgagaattttcaagaagccatcagagttcttgatatcattttgaggcagcatgctgctaagcaaggctgcttacttgtacgccaatcctttttccacaataatccaaataattttgctgatgtaggaggtggtgtcctaggctgtagaggattccactcaagctttagaactacacagagtggcctgtctcttaacatagatgtgtcaactacaatgataatttctcctgggcctgtggtggatttcttaatttccaatcaaaatgtgagagatccttttcaacttgactgggctaaggccaaaaggaccctaaaaaatctgaggattaaaactagcccatccaatcaagaattcaaaatttctgggctcagtgaactcccatgcagagagcagacttttactttgaaaggtaaaggtgggggggatggtgaagatggtaatgaggaaatcactgtatatgattattttgttaaggttcgtaagatagatctccgatactctgctgaccttccatgtatcaatgttggcaagcctaaacgaccaacatttttccccattgaggtttgtgaattggtatcattgcaacgatatacaaaagctctgtccacgcttcaaagggcttcattagtggagaagtcgaggcagaagccacaagagaggatgaaaattttgtctgatgcactgagaacaagcaactatggtgctgaacctatgctccggaattgtggaatttctataagcactggcttcactgaagtggagggccgggtgttgcctgcaccaaggttgaagtttggcaatggtgaggatctcaatcctaggaatgggagatggaatgtcagcagagtgaaatttgtggaaccatcaaagatagaaagatgggctgttgctaacttttctgcacgctgtgatgtacgaggacttgtacgggacctcattagaattggagatatgaaaggaattactatagaacaaccatttgacgtgtttgatgagaatccacagtttaggcgtgccccccctatggttagagtggagaaaatgttcgagcatatccaatctaaacttcctggggctcctcagttccttctctgtttgcttcctgatcggaaaaattgtgatatttatggtccatggaaaaagaagaatcttgctgattttggaatcataaatcagtgtatgtgtcctttaagggtcaatgaccagtacctgactaatgttatgttgaagatcaatgccaagcttggtgggttgaattcattgttaggcgttgaacattctccttctcttcctgttgtttccaaagctcccaccctcattctgggaatggacgtgtcacatggctcacctgggcagactgacattccttcaattgctgcggtggtcagctctagacactggcctctgatatcaaagtatagggcatgtgttcgtacgcaatctgcaaagatggaaatgattgataatttgttcaagctagtatctgaaaaggaagatgaaggcatcataagggaacttttgcttgatttctatacaacttctgggaggagaaaaccggaaaatataatcatattcagggatggggttagtgagtcacaattcaatcaagttttgaatattgaactcgatcgaatcattgaggcttgcaaatttctcgatgaaaattgggagccaaaatttgtggtaattgttgctcagaagaaccaccacactagatttttccagcctggctctcccgacaatgtcccacctggaactgttatcgacaataaaatttgtcatcccagaaattatgatttctacctatgtgcacatgctggaatgataggaactagtaggcctacccattatcatgtgctgcttgatcaggttggtttctctccggatcagctgcaggagcttgtccattcattatcatatgtgtatcagaggagcactactgccatttctgttgttgctccaatatgctatgcgcacttggctgctactcagttggggcagttcatgaaatttgaggacaaatctgaaacatcttcaagccatggtggattgagcggtgcaagtgctgttcccgtccctcagttgcctcccttgcaagagaatgtccgcaacacaatgttcttttgttga

SEQ ID NO: 11427 - protein, 915 aa, Glycine max
MDSFEPDGNGKESLPPPPPVVPSDIVPLKAEEVLCTPTEHNKKKASRLPIARSGLGSKGNKIQLLTNHFKVNVAKNDGHFFHYSVAFTYEDGRPVEGKGVGRKIIDRVQETYHSDLNGKDFAYDGEKSLFTVGSLPQNKLEFEVVLEDVTSNRNNGNCSPDGLGDNESDRKRMRRPYRSKSFKVEISFAAKIPMQAIASALRGQETENFQEAIRVLDIILRQHAAKQGCLLVRQSFFHNNPNNFADVGGGVLGCRGFHSSFRTTQSGLSLNIDVSTTMIISPGPVVDFLISNQNVRDPFQLDWAKAKRTLKNLRIKTSPSNQEFKISGLSELPCREQTFTLKGKGGGDGEDGNEEITVYDYFVKVRKIDLRYSADLPCINVGKPKRPTFFPIEVCELVSLQRYTKALSTLQRASLVEKSRQKPQERMKILSDALRTSNYGAEPMLRNCGISISTGFTEVEGRVLPAPRLKFGNGEDLNPRNGRWNVSRVKFVEPSKIERWAVANFSARCDVRGLVRDLIRIGDMKGITIEQPFDVFDENPQFRRAPPMVRVEKMFEHIQSKLPGAPQFLLCLLPDRKNCDIYGPWKKKNLADFGIINQCMCPLRVNDQYLTNVMLKINAKLGGLNSLLGVEHSPSLPVVSKAPTLILGMDVSHGSPGQTDIPSIAAVVSSRHWPLISKYRACVRTQSAKMEMIDNLFKLVSEKEDEGIIRELLLDFYTTSGRRKPENIIIFRDGVSESQFNQVLNIELDRIIEACKFLDENWEPKFVVIVAQKNHHTRFFQPGSPDNVPPGTVIDNKICHPRNYDFYLCAHAGMIGTSRPTHYHVLLDQVGFSPDQLQELVHSLSYVYQRSTTAISVVAPICYAHLAATQLGQFMKFEDKSETSSSHGGLSGASAVPVPQLPPLQENVRNTMFFC

SEQ ID NO: 11428 - DNA, 2751 bp, Triticum aestivum
  CDS (1)..(2751)
atggagtcacacggagaggacctgccaccaccaccaccactcccgccaaatgcagagccgataaaagctgagtcggctgatgacttgccaccaccaccacccctgctgcctatcaaacctgaagaagcaaagaagatctcaaagcctaagagggccctgatcgctcgtcctggttttggcaagaggggaaatcctatacagcttgtgacaaatcatttcaaagtctcgttgaagacgacagacgagttcttccatcattactatgtaaatctgaagtatgaagatgacaggcctgttgatggaaaaggtgttggtagaaaagtcattgataagcttgctcagacttatccatcggaactagcccataaagactttgcctatgatggtgaaaagagtctttttaccattggtgccctcccacaaattaacaatgagtttgttgtggttcttgaagatgtttccagtggaaagactcctgcaaatggcagccctggaaacgacagtccagacaagaagagagtgaaaaggccatatcaaactaaaaccttcaaggtggagttgagctttgctgctagaatccccatgagtgctattgcaatggcactcaaaggccaggaatcagagcacacgcaagaagccattcgggttattgatatcatattaagacagcactctgccaaacagggctgcctgttagtccgccagtcattttttcacaacaatccttcaaactttgtggacttgggtgggggtgtgatgggctgccgaggtttccactcaagctttcgagccacacagagcgggctttctcttaatattgatgtttctacaacaatgattgtgaaacctggccctgttgtcgattttctgctggccaaccagaaggttgaccaccctaataaaattgattgggctaaggccaagcgtgcacttaagaatttaaggataaaaacaagcccagcaaatacagaatacaagattgttggtttgagtgagaggaattgttatgaacaaatgttttccctcaagcaaaggaatggtgggaatggtgaccctgaagcaatagaaatatctgtttatgattactttgtgaagaaccgtggcattgagctgaggtactctggtgatttcccttgtataaatgttgggaaacctaggcggccaacatattttcccattgagctctgccagctggtccctttacaaaggtataccaaatctttgagtaccctacaaagatcatctcttgttgagaagtccaggcagaagcctcaagagaggatgtcagttttgtctgatgtactgaaacgcagcagctatgatacagaacccatgttgaaggcatgtggaatttcgatagctcagggctttacacaggtggctggtagggtactgcaggcccccaagctcaaagctggaaatggtgaagatattttcacaaggaatggacgttggaatttcaacaacaagaggcttgctagagcttgtgtggtggacagatgggcagttgtaaacttttcggctaggtgtaacaccatgaaccttgtcaatgacctcatcaagtgtgggggcatgaagggcattacagtagaaaaacctcatattgtaattgaagagaatggttcaatgagacgtgcacctgctccaaaaagggttgaggatatgtttgagcaagtgaagtctaagcttcctggggctccgaagtttctcttgtgtattcttgctgagaggaagaactcagatgtttatggtccatggaagcgaaaatgccttgctgactttgggattgtcactcaatgtgtggccccaacaagggtcaatgaccaatatctgacaaatgttctgctgaagatcaatgcaaaacttggtggaatgaactcactactacaaattgaaatgtccccaagtatacctcttgtatcaaaggtcccaactctcatcttgggaatggatgtgtcccatggatcccctggacagtctgatataccgtccattgcagcagttgttggttctcgggaatggcctcttgtctcgaaatatagggcttcagtgcgctcgcagtcaccaaagctcgaaatgatagattcattgttcaagccacaaggaactgatgatgatggccttgttcgggagtgtctcattgacttctacaccagttctggaaaaaggaaaccagatcagatcatcatcttcagggatggtgttagtgagagccagtttaatcaggtgctgaacattgaattggatcaaataattgaggcctgcaagttcttggatgaaaattggaaccccaagttcacgctgattgttgcccagaaaaatcaccacaccaaattcttcatacctggatctcctgacaatgtccctccaggcactgttgtagataatgcagtctgccatccaaggaattatgacttctacatgtgcgctcatgctggaatgattgggactacaaggccaacacactaccatatcctgcatgatgagatacactttgctgcggatgacctgcaggatcttgtgcactcgctctcatatgtgtaccaaaggagcacgacagccatatcagttgtttctccaatctgctatgcacatcttgcggctgctcaggtggcgcagttcataaagtttgatgagatgtctgagacgtcgtcgagccagggcggtggccacacctctgccggcagcgctccagtgcaggagctgcctcgcctccatgagaaagtccgcagcagcatgttcttctgctga

SEQ ID NO: 11429 - protein, 916 aa, Triticum aestivum
MESHGEDLPPPPPLPPNAEPIKAESADDLPPPPPLLPIKPEEAKKISKPKRALIARPGFGKRGNPIQLVTNHFKVSLKTTDEFFHHYYVNLKYEDDRPVDGKGVGRKVIDKLAQTYPSELAHKDFAYDGEKSLFTIGALPQINNEFVVVLEDVSSGKTPANGSPGNDSPDKKRVKRPYQTKTFKVELSFAARIPMSAIAMALKGQESEHTQEAIRVIDIILRQHSAKQGCLLVRQSFFHNNPSNFVDLGGGVMGCRGFHSSFRATQSGLSLNIDVSTTMIVKPGPVVDFLLANQKVDHPNKIDWAKAKRALKNLRIKTSPANTEYKIVGLSERNCYEQMFSLKQRNGGNGDPEAIEISVYDYFVKNRGIELRYSGDFPCINVGKPRRPTYFPIELCQLVPLQRYTKSLSTLQRSSLVEKSRQKPQERMSVLSDVLKRSSYDTEPMLKACGISIAQGFTQVAGRVLQAPKLKAGNGEDIFTRNGRWNFNNKRLARACVVDRWAVVNFSARCNTMNLVNDLIKCGGMKGITVEKPHIVIEENGSMRRAPAPKRVEDMFEQVKSKLPGAPKFLLCILAERKNSDVYGPWKRKCLADFGIVTQCVAPTRVNDQYLTNVLLKINAKLGGMNSLLQIEMSPSIPLVSKVPTLILGMDVSHGSPGQSDIPSIAAVVGSREWPLVSKYRASVRSQSPKLEMIDSLFKPQGTDDDGLVRECLIDFYTSSGKRKPDQIIIFRDGVSESQFNQVLNIELDQIIEACKFLDENWNPKFTLIVAQKNHHTKFFIPGSPDNVPPGTVVDNAVCHPRNYDFYMCAHAGMIGTTRPTHYHILHDEIHFAADDLQDLVHSLSYVYQRSTTAISVVSPICYAHLAAAQVAQFIKFDEMSETSSSQGGGHTSAGSAPVQELPRLHEKVRSSMFFC

SEQ ID NO: 11430 - DNA, 3036 bp, Oryza sativa
  CDS (1)..(3036)
atggcctcacggaggccaacgcaccgccaccataccgaggctccagatcctggtggaagagggagagggagaggccgtgccgcccgatatgctcagcctcagcctcagcctcagcagcagcagcagcagcaaggacgaggatgccgtgctagaggtgcctcgccgccgccgccgccgcagcagcagcagcagcaacagccaaggtctactcctactcgtgctaccactgtcaccgtggcttcctcttcatctaccacggccaccgcatcatcaagccctctagctcccgagctgcgccaagcaataatggaagctccccgtcccagtgagctcgctcaaccctcacccactccgcctcaggaacaacctgtggatgccgctaccacgacgccgcaccatattccatcctcaagcaagtcaattaggtttcctttgcgcccggggaagggtaccattggcaccaggtgcatggtcaaggccaatcatttcttcgctcacctgcccaacaaggatcttcatcactacgatgtctccatcactccagaagttacatcacgcattgttaaccgagctgtgatcaaggagctggtaaatctgtacaaggcatcttatctgggtgggaggctgcctgcatatgatggtagaaagagcttatacacggctggcccattgccgtttacttcacaggagtttcagatcactttacttgacgacgatgatggttctggttctgagaggcgacagaggactttccgagtagtaatcaagttcgccgcacgggccgaccttcaccggcttgagttgtttttagctgggaggcacgcagaagctccacaggaggcactgcaagttcttgatattgtgctgcgagagctaccatcagcaagatatgcgccatttggacgttccttcttttcggcttacttgggtaggaggcaaccccttggtgagggattggaaagctggcgtggattttaccagagcattcggcctactcagatgggcttatcactgaatattgatatgtcagctacagctttcattgagccgttacctgttattgattttgttgcacaactattgaattctgacatccattcaaggccgctttctgatgccgaacgtgttaagatcaagaaagccttgagaggagtaaaggtggaagttacccaccgtggcaacatgaggcggaagtaccggatatctggtttgacaattcagccaactcgtgagctaacttttcctgttgatgaaggaggcacagtgaagtcagttgtacagtactttcaagagacatatggctttgccatccaacacacctaccttccatgccttacagttcagcgattaaattacctgcctatggaggtctgcaaaatagtggaaggacagagatactccaagagattaaatcagaatcagataagagctcttttggaggagacatgccaacacccacgtgatcgggagcgtgatattattaagatggttaaacataacgcttatcaggatgatccttacgcaaaagagtttggcattaagataagtgatcgtctggcatcagtagaggcacgaattttaccggctccacggcttaagtacaatgagactggtcgagagaaggattgcttaccaagagttggtcaatggaatatgatgaacaagaaaatggtaaatggtggtaaagtcagaagctggatgtgcgtcaattttgcccgtaatgtgcaggaaagtgttgttcgtgggttctgccatgaacttgctctgatgtgtcaagcctcaggaatggatttcgctccagaacctatccttccaccactaaatgcacatccagatcaagtggagcgtgctctaaaagctaggtatcatgatgcaatgaacgttcttggaccccagcgcagggaacttgatttgcttattgggatactacctgataacaatggctcgctttatggtgatttgaagcgcgtgtgtgaaatagatcttggaatagtttcacaatgctgttgcacgaagcaggtgttcaaaatgaacaaacaaattcttgcaaatcttgctctgaagataaatgtcaaggttgggggcaggaacactgtgctggtggatgctgtgtcaaggcgtattcctctggtaaccgacagacctacaattatatttggtgctgatgttacccatcctcatcctggagaggacagcagtccctcaattgctgctgttgtagcctcccaagattggcctgaggtgacaaagtatgctgggttggtttctgctcaagcccaccgacaagagctgatagaagatctatataaaatctggcaggatccacagagaggaacagttagtggtggcatgatccgtgagctgcttatatccttcaaaagatcaactggtgagaagccccagcgaataatattttacagggatggcgttagtgaaggccaattttaccaagttctactttatgaattgaatgcaatccgaaaagcatgtgcctccctggagacaaattaccaaccaaaggtgactttcattgtggttcagaaacgtcaccacacaagattatttgcacataatcacaacgatcagaactcagttgacaggagcgggaacatactccctggtacggttgtagattcaaagatccgtcatccaactgagtttgacttctacctgtgtagccatgctggcattaagggtactagtcgtccagctcattatcatgtcttgtgggatgaaaacaacttcacagctgatgcattgcagattcttaccaacaacctttgctacacctatgcaaggtgcactcgctctgtatcaattgttccacctgcttattatgctcatctggctgccttccgtgctcgtttctatatggaaccagatacatctgacagcagctctgtcgttagtgggcctggtgtacgtgggccactttctggctcatcaacatcacgtactcgggcccctggtggtgcagctgttaagccacttcctgctctgaaggatagtgtgaagagggtcatgttctactgctga

SEQ ID NO: 11431 - protein, 1011 aa, Oryza sativa
MASRRPTHRHHTEAPDPGGRGRGRGRAARYAQPQPQPQQQQQQQGRGCRARGASPPPPPQQQQQQQPRSTPTRATTVTVASSSSTTATASSSPLAPELRQAIMEAPRPSELAQPSPTPPQEQPVDAATTTPHHIPSSSKSIRFPLRPGKGTIGTRCMVKANHFFAHLPNKDLHHYDVSITPEVTSRIVNRAVIKELVNLYKASYLGGRLPAYDGRKSLYTAGPLPFTSQEFQITLLDDDDGSGSERRQRTFRVVIKFAARADLHRLELFLAGRHAEAPQEALQVLDIVLRELPSARYAPFGRSFFSAYLGRRQPLGEGLESWRGFYQSIRPTQMGLSLNIDMSATAFIEPLPVIDFVAQLLNSDIHSRPLSDAERVKIKKALRGVKVEVTHRGNMRRKYRISGLTIQPTRELTFPVDEGGTVKSVVQYFQETYGFAIQHTYLPCLTVQRLNYLPMEVCKIVEGQRYSKRLNQNQIRALLEETCQHPRDRERDIIKMVKHNAYQDDPYAKEFGIKISDRLASVEARILPAPRLKYNETGREKDCLPRVGQWNMMNKKMVNGGKVRSWMCVNFARNVQESVVRGFCHELALMCQASGMDFAPEPILPPLNAHPDQVERALKARYHDAMNVLGPQRRELDLLIGILPDNNGSLYGDLKRVCEIDLGIVSQCCCTKQVFKMNKQILANLALKINVKVGGRNTVLVDAVSRRIPLVTDRPTIIFGADVTHPHPGEDSSPSIAAVVASQDWPEVTKYAGLVSAQAHRQELIEDLYKIWQDPQRGTVSGGMIRELLISFKRSTGEKPQRIIFYRDGVSEGQFYQVLLYELNAIRKACASLETNYQPKVTFIVVQKRHHTRLFAHNHNDQNSVDRSGNILPGTVVDSKIRHPTEFDFYLCSHAGIKGTSRPAHYHVLWDENNFTADALQILTNNLCYTYARCTRSVSIVPPAYYAHLAAFRARFYMEPDTSDSSSVVSGPGVRGPLSGSSTSRTRAPGGAAVKPLPALKDSVKRVMFYC

SEQ ID NO: 11432 - DNA, 2730 bp, Oryza sativa
  CDS (1)..(2730)
atggaagctccccgtcccagtgagctcgctcaaccctcacccactccgcctcaggaacaacctgtggatgccgctaccacgacgccgcaccatattccatcctcaagcaagtcaattaggtttcctttgcgcccggggaagggtaccattggcaccaggtgcatggtcaaggccaatcatttcttcgctcacctgcccaacaaggatcttcatcactacgatgtctccatcactccagaagttacatcacgcattgttaaccgagctgtgatcaaggagctggtaaatctgtacaaggcatcttatctgggtgggaggctgcctgcatatgatggtagaaagagcttatacacggctggcccattgccgtttacttcacaggagtttcagatcactttacttgacgacgatgatggttctggttctgagaggcgacagaggactttccgagtagtaatcaagttcgccgcacgggccgaccttcaccggcttgagttgtttttagctgggaggcacgcagaagctccacaggaggcactgcaagttcttgatattgtgctgcgagagctaccatcagcaagatatgcgccatttggacgttccttcttttcgccttacttgggtaggaggcaaccccttggtgagggattggaaagctggcgtggattttaccagagcattcggcctactcagatgggcttatcactgaatattgatatgtcagctacagctttcattgagccgttacctgttattgattttgttgcacaactattgaattctgacatccattcaaggccgctttctgatgccgaacgtgttaagatcaagaaagccttgagaggagtaaaggtggaagttacccaccgtggcaacatgaggcggaagtaccggatatctggtttgacaattcagccaactcgtgagctaacttttcctgttgatgaaggaggcacagtgaagtcagttgtacagtactttcaagagacatatggctttgccatccaacacacctaccttccatgccttacagttcagcgattaaattacctgcctatggaggtctgcaaaatagtggaaggacagagatactccaagagattaaatcagaatcagataagagctcttttggaggagacatgccaacacccacgtgatcgggagcgtgatattattaagatggttaaacataacgcttatcaggatgatccttacgcaaaagagtttggcattaagataagtgatcgtctggcatcagtagaggcacgaattttaccggctccacggcttaagtacaatgagactggtcgagagaaggattgcttaccaagagttggtcaatggaatatgatgaacaagaaaatggtaaatggtggtaaagtcagaagctggatgtgcgtcaattttgcccgtaatgtgcaggaaagtgttgttcgtgggttctgccatgaacttgctctgatgtgtcaagcctcaggaatggatttcgctccagaacctattcttccaccactaaatgcacatccagatcaagtggagcgtgctctaaaagctaggtatcatgatgcaatgaacgttcttggaccccagcgcagggaacttgatttgcttattggaaaactacctgataacaatggctcgctttatggtgatttgaagcgcgtgtgtgaaatagatcttggaatagtttcacaatgctgttgcacgaagcaggtgttcaaaatgaacaaacaaattcttgcaaatcttgctctgaagataaatgtcaaggttgggggcaggaacactgtgctggtggatgctgtgtcaaggcgtattcctctggtaaccgacagacctacaattatatttggtgctgatgttacccatcctcatcctggagaggacagcagtccctcaattgctgctgttgtagcctcccaagattggcctgaggtgacaaagtatgctgggttggtttctgctcaagcccaccgacaagagctgatagaagatctatataaaatctggcaggatccacagagaggaacagttagtggtggcatgatccgtgagctgcttatatccttcaaaagatcaactggtgagaagccccagcgaataatattttacagggatggcgttagtgaaggccaattttaccaagttctactttatgaattgaatgcaatccgaaaagcatgtgcctccctggagacaaattaccaaccaaaggtgactttcattgtggttcagaaacgtcaccacacaagattatttgcacataatcacaacgatcagaactcagttgacaggagcgggaacatactccctggtacggttgtagattcaaagatctgtcatccaactgagtttgacttctacctgtgtagccatgctggcattaagggtactagtcgtccagctcattatcatgtcttgtgggatgaaaacaacttcacagctgatgcattgcagattcttaccaacaacctttgctacacctatgcaaggtgcactcgctctgtatcaattgttccacctgcttattatgctcatctggctgccttccgtgctcgtttctatatggaaccagatacatctgacagcagctctgtcgttagtgggcctggtgtacgtgggccactttctggctcatcaacatcacgtactcgggcccctggtggtgcagctgttaagccacttcctgctctgaaggatagtgtgaagagggtcatgttctactgctga

SEQ ID NO: 11433 - protein, 909 aa, Oryza sativa
MEAPRPSELAQPSPTPPQEQPVDAATTTPHHIPSSSKSIRFPLRPGKGTIGTRCMVKANHFFAHLPNKDLHHYDVSITPEVTSRIVNRAVIKELVNLYKASYLGGRLPAYDGRKSLYTAGPLPFTSQEFQITLLDDDDGSGSERRQRTFRVVIKFAARADLHRLELFLAGRHAEAPQEALQVLDIVLRELPSARYAPFGRSFFSPYLGRRQPLGEGLESWRGFYQSIRPTQMGLSLNIDMSATAFIEPLPVIDFVAQLLNSDIHSRPLSDAERVKIKKALRGVKVEVTHRGNMRRKYRISGLTIQPTRELTFPVDEGGTVKSVVQYFQETYGFAIQHTYLPCLTVQRLNYLPMEVCKIVEGQRYSKRLNQNQIRALLEETCQHPRDRERDIIKMVKHNAYQDDPYAKEFGIKISDRLASVEARILPAPRLKYNETGREKDCLPRVGQWNMMNKKMVNGGKVRSWMCVNFARNVQESVVRGFCHELALMCQASGMDFAPEPILPPLNAHPDQVERALKARYHDAMNVLGPQRRELDLLIGKLPDNNGSLYGDLKRVCEIDLGIVSQCCCTKQVFKMNKQILANLALKINVKVGGRNTVLVDAVSRRIPLVTDRPTIIFGADVTHPHPGEDSSPSIAAVVASQDWPEVTKYAGLVSAQAHRQELIEDLYKIWQDPQRGTVSGGMIRELLISFKRSTGEKPQRIIFYRDGVSEGQFYQVLLYELNAIRKACASLETNYQPKVTFIVVQKRHHTRLFAHNHNDQNSVDRSGNILPGTVVDSKICHPTEFDFYLCSHAGIKGTSRPAHYHVLWDENNFTADALQILTNNLCYTYARCTRSVSIVPPAYYAHLAAFRARFYMEPDTSDSSSVVSGPGVRGPLSGSSTSRTRAPGGAAVKPLPALKDSVKRVMFYC

SEQ ID NO: 11434 - DNA, 3198 bp, Oryza sativa
  CDS (1)..(3198)
atgatgagaaagaaaaaaactgaaccccgtaatgctggggaaagttctggaactcaacaagccactggagctcctggacggggtccttcacagcgacctgagagagctcaacagcatggaggtggtggttggcagcctgccaatcctcaatatgctcaacaagctggtcgtggtggtggacaacaccagggacgtggtggacgttaccagggtcgtggagggccaacatcacatcaaccaggtggtggtccggttgaatatcaagcacatgagtactatggccgtggtgtccaacggcaaggaggaatgccacaacacaggagtggcagtggtggacatggagttcctgccagtccatcaagaacagttcccgagctgcaccaagcctcacaagaccagtaccaagctacggtggttgcaccatcaccatcaagaactggcccatcttcgctgcctgttgaggccagcagcgaagaagtccaacatcagtttcaggaacttgccatccagggtcaaagccccactagccaggccattcaaccagcaccaccatcgagcaaatcagtgagatttccaatgcgccctggcaagggtacatttggtgataggtgcatcgtgaaagccaaccatttctttgctgaattgcctgacaaagaccttcaccagtatgatgtgtctataactcctgaggttccttcacgtggtgtcaatcgtgctgtcattggagaaattgtaacacaatataggcagtctcatttgggtggccgtcttccagtctatgatggaaggaagagcttatacacagctggtccattaccatttacttctaggacctttgacgttattctgcaggatgaggaagagagccttgctgttgggcaaggtgcacagaggcgtgagagaccatttaaggtcgtgatcaaatttgctgcacgcgctgatctccaccatttagccatgtttttagctggaaggcaagcggatgctcctcaagaagctcttcaagttcttgacattgttctacgtgaattgcctactgcaaggtactctccagttgcaaggtcattttattcgcctaacttaggaaggcgccaacaacttggcgagggcctggaaagttggcgtggtttttaccaaagcatacgacccacgcagatgggactttctctgaatattgatatgtcatcgacagcattcattgagcctctacctgtgattgactttgttgcacagcttttgaacagagacatctcagttagaccattatctgatgctgatcgtgtgaagatcaagaaggccctaaggggtgtaaaggttgaggtcacacatagaggcaatatgcgcaggaagtatcgcatttctggccttacctcgcaagcaacacgagagttgtcttttcccattgataatcatggtactgtgaagacggtggtgcaatacttccaggagacatatggatttaacattaagcacacaactttgccttgcttgcaagtgggcaatcaacaaaggccaaattatctaccaatggaggtctgtaagattgtggagggacagcgttactcaaaaagactaaatgagaagcagataactgctcttcttaaagtgacctgccagcgccctcaagagcgtgagctggacattttgcagactgtgcatcacaatgcataccatcaggatccatatgcacaggagtttggcataaggatcgatgagcgacttgcatctgttgaagctcgtgttctaccacccccctggcttaagtaccacgatagtggcagagagaaggatgtcttgccaagaattggccaatggaatatgatgaataagaaaatggtcaatggtggtagagttaacaactggacatgcatcaatttttctcgtcatgtccaagataatgctgctaggagtttctgtcgcgagcttgctattatgtgccaaatatctgggatggacttctcaattgatcctgtggttcctctagtgactgcaagacctgaacatgtggaaagagcgctcaaggcacgctatcaagaggccatgaatatactgaaaccacagggcggggagcttgacctgctgattgcaatattgcctgacaataatggttctctttatggcgatctcaaaaggatatgtgagactgatcttggattggtctcgcaatgctgtcttacgaagcatgtttttaagatgagcaaacagtatttagcaaacgttgcccttaaaatcaatgttaaggtgggaggaagaaatacagtacttgttgatgctttgacaaggaggattccccttgtcagtgacagaccaactatcatatttggtgcggatgttactcatcctcatcctggagaagattccagtccttccattgcagctgtggttgcttctcaagactggcctgaagtcactaagtatgctggattggtgagtgcccaagcccatcgtcaagaattgatacaagatcttttcaaagtatggcaagacccgcatagaggaactgttactggtggcatgatcaaggagcttctcatttctttcaagagggctactggacagaaacctcagaggataatattttacagggatggtgtcagcgaggggcagttttatcaagttttgttgtatgagcttgatgccattagaaaggcttgtgcatccctggaacccaactatcagcctccagttacctttgtggtggtccagaagcggcatcacacaaggttgtttgctaataatcacaacgaccagcgtactgttgatagaagtggaaacattctgcctggaactgttgttgactcaaagatttgccatccaaccgagtttgatttctacctgtgtagccatgctggcatacagggaacaagccgtcctgctcattatcatgttctgtgggatgagaacaaatttactgcagacgagttgcaaaccctcacgaacaacttgtgctacacgtatgcaaggtgcactcgctctgtatcaattgtgcctcctgcgtactatgctcatctggcagccttccgagctcgcttttacatggagccagagacatctgacagtggatcaatggcgagtggagctgcaacgagccgtggccttccaccaggtgtgcgcagcgccagggttgctggaaatgtagccgtcaggcctctacctgctctcaaggaaaacgtgaagcgtgtcatgttttactgctaa

SEQ ID NO: 11435 - protein, 1065 aa, Oryza sativa
MMRKKKTEPRNAGESSGTQQATGAPGRGPSQRPERAQQHGGGGWQPANPQYAQQAGRGGGQHQGRGGRYQGRGGPTSHQPGGGPVEYQAHEYYGRGVQRQGGMPQHRSGSGGHGVPASPSRTVPELHQASQDQYQATVVAPSPSRTGPSSLPVEASSEEVQHQFQELAIQGQSPTSQAIQPAPPSSKSVRFPMRPGKGTFGDRCIVKANHFFAELPDKDLHQYDVSITPEVPSRGVNRAVIGEIVTQYRQSHLGGRLPVYDGRKSLYTAGPLPFTSRTFDVILQDEEESLAVGQGAQRRERPFKVVIKFAARADLHHLAMFLAGRQADAPQEALQVLDIVLRELPTARYSPVARSFYSPNLGRRQQLGEGLESWRGFYQSIRPTQMGLSLNIDMSSTAFIEPLPVIDFVAQLLNRDISVRPLSDADRVKIKKALRGVKVEVTHRGNMRRKYRISGLTSQATRELSFPIDNHGTVKTVVQYFQETYGFNIKHTTLPCLQVGNQQRPNYLPMEVCKIVEGQRYSKRLNEKQITALLKVTCQRPQERELDILQTVHHNAYHQDPYAQEFGIRIDERLASVEARVLPPPWLKYHDSGREKDVLPRIGQWNMMNKKMVNGGRVNNWTCINFSRHVQDNAARSFCRELAIMCQISGMDFSIDPVVPLVTARPEHVERALKARYQEAMNILKPQGGELDLLIAILPDNNGSLYGDLKRICETDLGLVSQCCLTKHVFKMSKQYLANVALKINVKVGGRNTVLVDALTRRIPLVSDRPTIIFGADVTHPHPGEDSSPSIAAVVASQDWPEVTKYAGLVSAQAHRQELIQDLFKVWQDPHRGTVTGGMIKELLISFKRATGQKPQRIIFYRDGVSEGQFYQVLLYELDAIRKACASLEPNYQPPVTFVVVQKRHHTRLFANNHNDQRTVDRSGNILPGTVVDSKICHPTEFDFYLCSHAGIQGTSRPAHYHVLWDENKFTADELQTLTNNLCYTYARCTRSVSIVPPAYYAHLAAFRARFYMEPETSDSGSMASGAATSRGLPPGVRSARVAGNVAVRPLPALKENVKRVMFYC

SEQ ID NO: 11436 - DNA, 2670 bp, Oryza sativa (japonica cultivar-group)
  CDS (1)..(2670)
atggctgccaaaattggtgaaattgtccaagtacataatgataatcctgtaaagagagtacctattgcacgacctagctttggccgtgaaggaaagcaaatcaagctgctctcaaaccacttcactgtgaagcttagtggaattgatgcggttttctaccaatacagtgtttccatcaaatctgaggatgataaggtgattgatggaaagggtattggccgaaaggtcatggataaagtgctgcaaacatacagctctgagcttgctgggaaggaatttgcgtatgatggtgaaaaatgtctatttactgtggggcctcttccacagaacaactttgagttcactgttatcttggaggaaacatcttcaagagctgctggtgggagtctagggcatggaagccctaatcaaggtgacaagaagcgatcaaagtgcacacatcttgcaaaaaaaattgtagtgggcataagttatgcagcaaagattcccctgaagtcagtagctttggcccttcaaggaagcgagtcagatcatgctcaggatgctctgagagtccttgatattgtcttaaggcaacaacaggctaagcgaggttgcctgcttgttaggcaatcatttttcagtgatgactttagaaacttagttgatttaactggtggagttagtggatgtcgtggactccactcgagtttccgtactaccattggtggtttatctttgaacatggatgtttcaaccactatgattgtgactcctggaccggtttttgatttcctccttacaaatcaaaatgtcagagacattagagatatcgactggcccagggccaagaaaatgttgaaaaacctgagagttaaagctattcacaataacatggagttcaagatcattggtctgagtgatgagccatgctctagacaaacattccccatgaaagtacgaaatggaagcagtgaaggtgaaaccgttgaaattactgtccaggaatattttaagtccaagcaggtggatttaacaatgccttatttgccatgtcttgatgtgggaaaaccaaaacgcccaaattatgttccaattgaggttgctggcaccaatcctctgtgccatatggtatcacttcaaagatatacaaaggcgctttcttctcaacaaagagcaaccttggttgaaaaatcacgtcagaaacctcaagagcgcatgcgagttgttactgatgctgtaaaaaacaatagatatgatgatgatccaatcttatcttcttgtggaattaaaattgagaaacaactcactcgtgtcgatggtcgtgttctgtctgcaccaacgctagtcgtggggaatagtgaagattgcattccaaacagaggcagatggaactacaataacaagaggctatttgagcctgtcaagattgagcgttgggcaattgttaatttctctgctcggtgtgacatgagccggatctcaagagacctgataaactgtggacgaactaaaggcattattattgaacgccctttcaccttggtagatgaggatagccaatctaggagatgtactcctgttgtaagggttgaaagcatgtttgaaaaagtgaaagcaaaccttcctggtcctcctgaatttttgctgtgtgttttaccagaaaggaaaaattgtgatctctatgggccatggaagaagaaaaaccttcatgagatgggtattattactcaatgcattgttcctagtgttaagatgaatgatcagtactataccaatgttcttctgaaaatcaatgctaagcttggtggaatgaactccaagctttcattggagcatcgacatatgattcccattgtcaatcaaacacccacattaattttgggaatggatgtttcacatggttcgccaggtcgagctgatgtaccatcaattgctgcggttgttgggtccagatgttggccgctgatatcacgctacagagcatctgtccggacccagtctccaaaggtagagatgattgattctctttttaagccactggacgatggaaaagatgatggcataataagggaacttctactggacttctacaagaccagtcaacaaagaaagccgaagcagataatcattttcagggatggtgtgagcgagtctcaatttagccaagtactgaatgttgagcttaatcaaattataaaggcatatcaatatatggatcaggggccaattcctaagttcacagtgatcattgctcaaaagaatcaccacacaaaacttttccaagaaaatactccagacaacgttcctccagggactgttgtagattctggtattgttcatccaagacagtatgatttctacatgtatgctcatgctggacctataggtacctcaaggcccacccattaccatgtcttgctcgatgagattggtttcttgcccgatgacgtgcagaaactagttttgtcgctttcttatgtgtatcagaggagcaccactgcaatatctgttgtggcacctatctgttatgctcatctcgcagcagcgcagatgggccagttcatgaaattcgaggaattcgctgagacttcgtctggaagtggtggtgtcccttcgtcatcaggagcagtggtcccagagttgccgcgcctgcatgctgatgtctgcagttcgatgttcttttgttga

SEQ ID NO: 11437 - protein, 889 aa, Oryza sativa (japonica cultivar-group)
MAAKIGEIVQVHNDNPVKRVPIARPSFGREGKQIKLLSNHFTVKLSGIDAVFYQYSVSIKSEDDKVIDGKGIGRKVMDKVLQTYSSELAGKEFAYDGEKCLFTVGPLPQNNFEFTVILEETSSRAAGGSLGHGSPNQGDKKRSKCTHLAKKIVVGISYAAKIPLKSVALALQGSESDHAQDALRVLDIVLRQQQAKRGCLLVRQSFFSDDFRNLVDLTGGVSGCRGLHSSFRTTIGGLSLNMDVSTTMIVTPGPVFDFLLTNQNVRDIRDIDWPRAKKMLKNLRVKAIHNNMEFKIIGLSDEPCSRQTFPMKVRNGSSEGETVEITVQEYFKSKQVDLTMPYLPCLDVGKPKRPNYVPIEVAGTNPLCHMVSLQRYTKALSSQQRATLVEKSRQKPQERMRVVTDAVKNNRYDDDPILSSCGIKIEKQLTRVDGRVLSAPTLVVGNSEDCIPNRGRWNYNNKRLFEPVKIERWAIVNFSARCDMSRISRDLINCGRTKGIIIERPFTLVDEDSQSRRCTPVVRVESMFEKVKANLPGPPEFLLCVLPERKNCDLYGPWKKKNLHEMGIITQCIVPSVKMNDQYYTNVLLKINAKLGGMNSKLSLEHRHMIPIVNQTPTLILGMDVSHGSPGRADVPSIAAVVGSRCWPLISRYRASVRTQSPKVEMIDSLFKPLDDGKDDGIIRELLLDFYKTSQQRKPKQIIIFRDGVSESQFSQVLNVELNQIIKAYQYMDQGPIPKFTVIIAQKNHHTKLFQENTPDNVPPGTVVDSGIVHPRQYDFYMYAHAGPIGTSRPTHYHVLLDEIGFLPDDVQKLVLSLSYVYQRSTTAISVVAPICYAHLAAAQMGQFMKFEEFAETSSGSGGVPSSSGAVVPELPRLHADVCSSMFFC

SEQ ID NO: 11438 - DNA, 2733 bp, Zea mays
  CDS (1)..(2733)
atgggctctcatgatggcgaggatgaagagttgccacccccccctccggtgccaccagatgtgattcccattaaagctgaagatgctgtgggtgaatcaccagcaaaacagatattaaagccaaagagattactgatggacaggcctggtataggaagaaaacaccagccgacccagctctattcaaatcactttaaagtcgctgtgaagagtacagaagacgtcttctttcactactatgtaaacctgaagtatgaggatgatcgacccgttgatggtaaagggatcggcagaaaggtgattgataaactgcagcagacatatcgtgcagagctttctaacaaggactttgcatatgatggagaaaagagcctgtttacagttggtggtcttccacaaaaaaagaatgagttcaccgttgtcttggaggacgtatctactggaaagactgctgccaatgggagccctggaggtaatgacagtcctggaggtggtgataggaagagagtgaggaggccataccagacgaaaacattcaaagtggagataaattttgcagcagaggttcctatgagtgctattggtcaagtcattagaggcgaagaatctgagaactccctggaggcgcttcgtgttcttgatatcatactgaggcagcattccgcagaacaaggctgccttttggttaagcaatcatttttctacaacaacccttcatgctttgttgacttgggtggtggtgtgatgggttgtcgtggatttcattcaagcttccgtggcacacagagtggactttccctcaatgttgatgtctcaacaacaatgatcgtgaaacctggccctgttattgattttcttctttctaaccagaatgttaatgatcctagcagaattgattggcaaaaggccaagcgtgctctcaagggcttgaggattagaaccactcctgcaaattcagaattcaagatttttggtctcagcgagaggatctgcaaagaacaaacgtttccgctgaggcagagaaatggtagcaacggagattgtgataccattgaaataactgtctatgactactatgcaaagaaaggaatcgatctaaagtattctggtgatttcccctgtataaatacagggaaggcaaagcgcccaacatattttccaatcgagctatgctcgcttgttccgcttcaaagatacaccaaagctttgtctacgctacaaaggtcatcccttgtggagaagtctagacagaagcctgaagaaaggatgaccgttctaaatgatgcactgcaacgcagtaactacgattctgaccccatgttgagggcatgtggtgtttcagttgctccaaaatttacccaagttgaaggaaggatccttcaagccccaaagctgaaagccggcaatggtgatgatatcttttcacgaaatggacggtggaatttcactaataggaagttttatgaaacctgctctgtgaataagtgggcggtcgttaatttctctgcacgttgtgatgttcggaatcttatccgtgacctgatgaggaatgcatctgcaaagggaattcaaatggaggaaccttttgatgtgtttgaagagagtccctctatgaggcgtgcacctgtgtcaagaagggtggatgatatgtttgggcagataaaatcaaaacttcctggagctcctaggttcctcttgtgccttctccctgagaggaaaaattgtgaaatctatggtccttggaagagaaagtgcctggccgagtttggtattgtcacacagtgtctagctccattaagagtcaatgatccggacctgcttaatttgctgatgaagatcaatgcaaagcttggtggtctgaactcgttgctgcaagttgaagcatcttcgtcaataccacatgtgtcgcaagtacccaccatcatcttaggtatggatgtttcacatggtcatccaggacaagatagaccttcggttgcagcggtggttagttctcgtcaatggcctcttatctctagatatagagcatcagtgcacacccaatctgccagactagaaatgatgtcctcgttgtttaagccgcggggtactgatgatgatggcctcatccgggaatcactgatcgacttctacactagctctggaaagcgaaaaccagaacacataattattttcagggatggagtcagtgaaagtcagtttacccaggtcatcaacattgagctggatcagatcatcgaggcatgtaagtttctggatgagaagtggtcacccaagttcactgtgattgttgctcaaaagaaccaccacaccaagttctttcagacggcatcaccagacaatgttcttcctggaactgtggtggatagtaaagtttgccatcctaagaacttcgacttctacatgtgtgcacatgctgggatgattggaacaacaaggccgacccactatcatgttctgcacgacgagataggtttcagtgccgacgagatgcaggagtttgttcattcgctctcttacgtgtaccagaggagcacgacagccatctcagtggttgctccagtgtgctacgcccacctcgctgcagcccaggtgagcacgttcctgagattggaggagatgtcagacgcgtcctccagccagggaggagggcatacctcggctggcagtgctcctgtgccggagctgcctcgcctgcatgacaaagtcaggagctccatgttcttctgctag

SEQ ID NO: 11439 - protein, 910 aa, Zea mays
MGSHDGEDEELPPPPPVPPDVIPIKAEDAVGESPAKQILKPKRLLMDRPGIGRKHQPTQLYSNHFKVAVKSTEDVFFHYYVNLKYEDDRPVDGKGIGRKVIDKLQQTYRAELSNKDFAYDGEKSLFTVGGLPQKKNEFTVVLEDVSTGKTAANGSPGGNDSPGGGDRKRVRRPYQTKTFKVEINFAAEVPMSAIGQVIRGEESENSLEALRVLDIILRQHSAEQGCLLVKQSFFYNNPSCFVDLGGGVMGCRGFHSSFRGTQSGLSLNVDVSTTMIVKPGPVIDFLLSNQNVNDPSRIDWQKAKRALKGLRIRTTPANSEFKIFGLSERICKEQTFPLRQRNGSNGDCDTIEITVYDYYAKKGIDLKYSGDFPCINTGKAKRPTYFPIELCSLVPLQRYTKALSTLQRSSLVEKSRQKPEERMTVLNDALQRSNYDSDPMLRACGVSVAPKFTQVEGRILQAPKLKAGNGDDIFSRNGRWNFTNRKFYETCSVNKWAVVNFSARCDVRNLIRDLMRNASAKGIQMEEPFDVFEESPSMRRAPVSRRVDDMFGQIKSKLPGAPRFLLCLLPERKNCEIYGPWKRKCLAEFGIVTQCLAPLRVNDPDLLNLLMKINAKLGGLNSLLQVEASSSIPHVSQVPTIILGMDVSHGHPGQDRPSVAAVVSSRQWPLISRYRASVHTQSARLEMMSSLFKPRGTDDDGLIRESLIDFYTSSGKRKPEHIIIFRDGVSESQFTQVINIELDQIIEACKFLDEKWSPKFTVIVAQKNHHTKFFQTASPDNVLPGTVVDSKVCHPKNFDFYMCAHAGMIGTTRPTHYHVLHDEIGFSADEMQEFVHSLSYVYQRSTTAISVVAPVCYAHLAAAQVSTFLRLEEMSDASSSQGGGHTSAGSAPVPELPRLHDKVRSSMFFC

SEQ ID NO: 11440 - DNA, 3177 bp, Glycine max
  CDS (1)..(3177)
atggtcagaaagagaagaactgaactacccagtgggggtgaaagctctgaggctcaacgccctgctgaaaggagtgcaccaccccaacaacaggctgctgctgctgccccaggaggggctggaccccaaggaggcagaggttggggtccccaaggaggacgaggaggctatggtgggggccgcagtcgtgggatgccccaacagcaatatggtgcccctcctgaatatcaaggtaggggaaggggagggccttctcagcaaggaggccgtggagggtatggcggtggccgaagtggtggtggtatgggcagtggccgtggcgtaggtccttcatatggtggcccatccaggccaccggcacccgagctgcaccaagcaacctcagttcaattctatcaaactggggtgagttctcagcctgcattatctgaggccagttcatcactgccgccgccggaacctgttgatttggaacagtcaatggcgcagatggtgcttcattctgaagctgctccttctccgcctcctgcaagtaaatcatcaatgaggttccctcttcgaccaggaaagggtagctatggcaccaaatgtgttgtcaaggctaatcatttctttgccgagttacccaacaaagatctgcatcaatatgatgtaacaattactcctgaagtgacatcaagaggagtgaaccgtgctgttatggagcagttggtgaggctgtatcgggaatctcacttgggtaagagacttcctgcttacgatgggcgcaagagcctctatactgctggaccacttccttttatgtcaaaggagttcagaattgttcttgctgatgatgatgaaggagctggaggccagaggagggacagggaattcaaggttgtgataaaattggctgcacgggcagatcttcaccatttaggactctttttacagggaaggcaaactgatgctcctcaagaggctttgcaggtccttgacattgttctgcgtgaactccctactacaaggtattgtcctgtaggaagatcattttattcacctgatttgggtagaagacagcctttaggtgagggattggaaagctggcgtggtttctaccagagtattcggcctacacagatggggctatcactgaacattgatatgtcttccactgcatttattgagccattgccagtaattgatttcgtaactcaactgctgaacagagatgtatccgcccggccactttctgatgctgatcgtgtgaagatcaagaaagctctccggggtatcaaagttgaagtgacacatcgtggaaacatgagaagaaaatatcgtatctctggtctgacttcacaggcaaccagagaattgacattcccagtagatgaaaggggaaccatgaaatctgttgtggagtacttctatgagacatatgggtttgtcattcaacatactcagtggccttgtctgcaagttggcaatacacagagaccaaactatttgccaatggaggtttgcaagatagtggaaggtcaaaggtactcaaaaaggcttaatgagaggcaaatcactaatttgctgagagttacatgccagcgtcctggtgagagggagcgtgatatcatgcagacagtacaccacaacgcataccacgaagatccttatgctaaagaatttgggatcaagatcagtgagaagcttgctcaagttgaagctcgcatccttcctgctccatggctcaaatatcacgatacgggcagagaaaaggattgtcttcctcaagttgggcaatggaatatgatgaataagaaaatggttaatgggggaacagttaacaactggttctgcataaacttttcgaggaatgttcaagatagtgttgcccgcggtttttgctatgaacttgctcagatgtgttatatatctggaatggcatttacacctgagccagtagttcccccagtcagtgctcgccctgatcaagtggaaaaggttcttaaaactcggtatcacgatgccaagaataaactgcaaggaaaagagcttgatttactcattgttatcttgccggataataatggatcactatatggtgacctcaaacgtatttgtgagacagatctaggacttgtttcacaatgttgcttaactaagcatgtcttcaaaatgagcaagcagtaccttgcaaatgttgctttgaaaattaatgtcaaagttggagggagaaacactgtactggttgatgcgctctcacgacgcattcccttggtcagtgacagacctacaattatttttggagctgatgtgactcatccacatcctggagaggattcaagtccatcaattgcagcagttgtggcttcgcaagactatcctgaaattacaaagtatgctggtttagtttgtgcccaagctcataggcaggaactcattcaggatcttttcaaacaatggcaagatccagtcagaggaacagtgactggtggaatgatcaaggaacttcttatatcttttaggagagctacaggacaaaagccacaacgcatcatattttatagggatggtgttagtgagggtcaattttatcaggttctactgtttgagcttgatgctattcgaaaggcatgtgcatccctggaacccaactatcagcctcctgtgacttttgtggtggttcaaaagcgtcaccacacaaggctctttgccagcaaccatcacgataagagttcttttgacaggagtggcaacatattgcctggtactgttgttgactccaaaatctgccatcccaccgaatttgacttttatctctgcagccatgctggaatacagggtacaagccgtcctgctcactaccatgtgttgtgggatgaaaacaattttactgctgatgccttgcaaacactcaccaataatctttgctacacatatgctcggtgcacccgatctgtttcaattgtgcctcctgcatactatgctcaccttgctgcattccgtgcaaggttttacatggaacccgagacttcggatagtggctctatgacaagtggtgctgttgcaggccgtgggatgggtggcggcggtggtggtggtgtagggcgtagcacccgggcacctggtgctaatgctgctgtgagaccattgcctgcactcaaagagaacgttaagagagttatgttttattgttaa

SEQ ID NO: 11441 - protein, 1058 aa, Glycine max
MVRKRRTELPSGGESSEAQRPAERSAPPQQQAAAAAPGGAGPQGGRGWGPQGGRGGYGGGRSRGMPQQQYGAPPEYQGRGRGGPSQQGGRGGYGGGRSGGGMGSGRGVGPSYGGPSRPPAPELHQATSVQFYQTGVSSQPALSEASSSLPPPEPVDLEQSMAQMVLHSEAAPSPPPASKSSMRFPLRPGKGSYGTKCVVKANHFFAELPNKDLHQYDVTITPEVTSRGVNRAVMEQLVRLYRESHLGKRLPAYDGRKSLYTAGPLPFMSKEFRIVLADDDEGAGGQRRDREFKVVIKLAARADLHHLGLFLQGRQTDAPQEALQVLDIVLRELPTTRYCPVGRSFYSPDLGRRQPLGEGLESWRGFYQSIRPTQMGLSLNIDMSSTAFIEPLPVIDFVTQLLNRDVSARPLSDADRVKIKKALRGIKVEVTHRGNMRRKYRISGLTSQATRELTFPVDERGTMKSVVEYFYETYGFVIQHTQWPCLQVGNTQRPNYLPMEVCKIVEGQRYSKRLNERQITNLLRVTCQRPGERERDIMQTVHHNAYHEDPYAKEFGIKISEKLAQVEARILPAPWLKYHDTGREKDCLPQVGQWNMMNKKMVNGGTVNNWFCINFSRNVQDSVARGFCYELAQMCYISGMAFTPEPVVPPVSARPDQVEKVLKTRYHDAKNKLQGKELDLLIVILPDNNGSLYGDLKRICETDLGLVSQCCLTKHVFKMSKQYLANVALKINVKVGGRNTVLVDALSRRIPLVSDRPTIIFGADVTHPHPGEDSSPSIAAVVASQDYPEITKYAGLVCAQAHRQELIQDLFKQWQDPVRGTVTGGMIKELLISFRRATGQKPQRIIFYRDGVSEGQFYQVLLFELDAIRKACASLEPNYQPPVTFVVVQKRHHTRLFASNHHDKSSFDRSGNILPGTVVDSKICHPTEFDFYLCSHAGIQGTSRPAHYHVLWDENNFTADALQTLTNNLCYTYARCTRSVSIVPPAYYAHLAAFRARFYMEPETSDSGSMTSGAVAGRGMGGGGGGGVGRSTRAPGANAAVRPLPALKENVKRVMFYC

SEQ ID NO: 11442 - DNA, 3222 bp, Zea mays
  CDS (1)..(3222)
atggtgaggaagaagagaactggccctggcggctctggagaaacttctggagagtcttcaggagcttctggacaaggttcctcacagaggcctgaacggactcaacaacctggggcaggacgtggctgggtgcctcagcagggtggccgtggtggcgggcaacaccagggtcgtggtggacattatcaaggccgtggagggccaggtccacatcaccctggtggactgcctgagtatcaccagcgtgaataccagggacgaggtggtgagtaccagggacagtaccaggggcgtggtggtgcccgctccagaggtggaatttcacagccatactatggtgggcataggggaggtagtgttggacgaaatgttcctccaggtccatccagaacagttcccgagctgcaccaagccccatacgtccagtatcaagccccggtgatttcaccatccccatcgggacctggctcatcctcacagcctatggcagaggtgagctctggacaagtccagcaacagtttgagcaacttgccattcatggtcagagttccatgagtcaagaagttcaagtggcaccagcatcaagcaaatcggttcgattcccattacgccccggcaagggcacttatggggacaggtgcattgtgaaggcgaatcatttttttgctgagcttcctgacaaagaccttcaccaatatgatgtaactataacacctgaagttacttcacgtggcgttaatcgtgctgtcatgggagagcttgtaacactatatagacaatcccatttgggtgggcgtctacctgcgtacgatggaagaaagagcctttataccgctggaccattgccttttacttctatgacatttgaaattaccttgcaagatgaggaagatagtgttggcggtggccagggcggacaaaggcgcgagagagtatttagggtggtgatcaaatttgcggcccgtgctgatctccatcatctggctatgtttctagctggaaggcaagcagacgctcctcaagaagctcttcaagtgcttgacattgtactacgtgaattgcctactgcgaggtattctcctgttggtaggtcattttattctcccaacttagggagacgtcagcaacttggtgagggtttggaaagttggcgcggtttttaccaaagcataaggccgacacagatgggcctttcactgaatattgatatgtcctctactgcatttatcgagcctctccctgtgattgattttgttgctcagcttcttaatagagatatttcagttaggccattgtctgattctgatcgcgtgaagatcaaaaaagccttaagaggtgtgaaggttgaggtcactcacaggggaaacatgcgcagaaagtatcgcatttctggcctcacctcacaagcaacaagagagctatcattccctgttgatgatcgtggtactgtgaagactgtggtccaatacttcatggagacttatggttttagcatccagcacaccactttaccgtgcttgcaagtgggcaatcaacaaagaccaaattatctgcctatggaggtttgcaagatagttgaaggacagcgttactcaaagcgactcaatgagaaacaaatcactgctctactgaaagtgacctgccagcgccctcaagagcgtgagctggacattttacagactgtgcatcacaatgcgtactatgaagacccgtatgcacaggaatttggtataagaattgatgaacgccttgctgcagttgaagctcgtgttctgccaccaccaaggcttaaataccatgatagtggccgagagaaggatgttttgcccagagttggccaatggaacatgatgaataagaaaatggttaatggtggcagagtcagcaactgggcatgtattaacttctctcggaatgtgcaagatagtgccgctaggggtttctgtcatgaactggcaatcatgtgccaaatatcaggaatggatttttcccttgagcctgtgctgcctccagtgactgcaaggccagaacatgttgaaagagcgttgaaggcacgttatcaagatgcaatgaacatactgaggccacaggggagggaacttgatctgctgattgtaatactgcctgacattaatggttccttatatggggatctcaaaaggatctgtgagactgatctcggattggtctcccagtgttgtctgactaaacatgtttttaagatgagcaagcagtatcttgcaaatgttgcactcaaaataaatgttaaggttggtggaaggaatactgtacttgtagatgctttgacaaggagaatcccccttgtcagtgacagaccgaccataatatttggtgctgatgttacccatccacatcctggagaagattccagtccttccattgcagctgtggttgcttcgcaagactggcctgaggtcaccaaatatgctggactagtgagtgcccaagcccatcgccaggagctgatacaggatcttttcaaagtatggcaagatccacagagaaggacagtaactggtggcatgataaaggaacttctcatttctttcaagagagcaactggacagaagccccagaggatcatattctacagggatggtgtcagtgagggacagttctatcaagtattgttgtatgaacttgatgccatcagaaaggcctgtgcatccttggagcccaactaccagcctccagttacttttgtcgtggtgcagaaacgacatcacactaggctgtttgctaataaccacaacgatcagcgtacagttgatagaagcggaaacatactgcctggcaccgtggttgattcgaagatttgccatcctactgaatttgatttctacctgtgtagccatgctggcattcagggaacaagccgccctgctcattaccatgtcctgtgggacgagaacaagttcacagctgatgagctgcagactctgacaaacaacctatgctacacgtacgctaggtgcacccgctccgtgtcaattgtgcccccggcatactatgctcatctggcggccttccgagctcgcttctacatggagccagatacctctgacagtggctcaatggccagtggtgcccgtggccctccaccaggtgcggcacgcagcatgagaggagcggggagtgttgcggtcaggcccctacctgctctcaaggaaaacgtgaagcgtgtcatgttttactgctga

SEQ ID NO: 11443 - protein, 1073 aa, Zea mays
MVRKKRTGPGGSGETSGESSGASGQGSSQRPERTQQPGAGRGWVPQQGGRGGGQHQGRGGHYQGRGGPGPHHPGGLPEYHQREYQGRGGEYQGQYQGRGGARSRGGISQPYYGGHRGGSVGRNVPPGPSRTVPELHQAPYVQYQAPVISPSPSGPGSSSQPMAEVSSGQVQQQFEQLAIHGQSSMSQEVQVAPASSKSVRFPLRPGKGTYGDRCIVKANHFFAELPDKDLHQYDVTITPEVTSRGVNRAVMGELVTLYRQSHLGGRLPAYDGRKSLYTAGPLPFTSMTFEITLQDEEDSVGGGQGGQRRERVFRVVIKFAARADLHHLAMFLAGRQADAPQEALQVLDIVLRELPTARYSPVGRSFYSPNLGRRQQLGEGLESWRGFYQSIRPTQMGLSLNIDMSSTAFIEPLPVIDFVAQLLNRDISVRPLSDSDRVKIKKALRGVKVEVTHRGNMRRKYRISGLTSQATRELSFPVDDRGTVKTVVQYFMETYGFSIQHTTLPCLQVGNQQRPNYLPMEVCKIVEGQRYSKRLNEKQITALLKVTCQRPQERELDILQTVHHNAYYEDPYAQEFGIRIDERLAAVEARVLPPPRLKYHDSGREKDVLPRVGQWNMMNKKMVNGGRVSNWACINFSRNVQDSAARGFCHELAIMCQISGMDFSLEPVLPPVTARPEHVERALKARYQDAMNILRPQGRELDLLIVILPDINGSLYGDLKRICETDLGLVSQCCLTKHVFKMSKQYLANVALKINVKVGGRNTVLVDALTRRIPLVSDRPTIIFGADVTHPHPGEDSSPSIAAVVASQDWPEVTKYAGLVSAQAHRQELIQDLFKVWQDPQRRTVTGGMIKELLISFKRATGQKPQRIIFYRDGVSEGQFYQVLLYELDAIRKACASLEPNYQPPVTFVVVQKRHHTRLFANNHNDQRTVDRSGNILPGTVVDSKICHPTEFDFYLCSHAGIQGTSRPAHYHVLWDENKFTADELQTLTNNLCYTYARCTRSVSIVPPAYYAHLAAFRARFYMEPDTSDSGSMASGARGPPPGAARSMRGAGSVAVRPLPALKENVKRVMFYC

SEQ ID NO: 11444 - DNA, 3258 bp, Zea mays
  CDS (1)..(3258)
atggtgaggaagaagagaactggccctggtggctctggagaaacttctggagagtcttcaggagcctctggacaaggttcctcacagcagcctgagcgaactcaacaacctgggggaggacgtggctgggtgcctcaacagggtggccatggtggtgggcaacaccagggtcgtgatcgacattatcagggacgtggaggaccagggccacatcaccttggtagtggggcacctgagtatcacccgcgtgaataccagggacgtggtggtgaatatcagggacatggtggtgagtaccagggacggggtggtgactaccagggacgtggtggtggccgctccagaggtggaatgccacagccatactatggtgggcataggggaggtaatgttggacgcaatgttcctccaggtccgtccaggacagttcccgagctgcaccaagccccatatgtccagtatccagccccggtggtttcgccctccccatcgggacctggctcatcctcacagcctatggcagaggtgagctctggacaagtccagcaacagtttcagcaacttgccgatcgtggtcagagttccacgagccaagaaattcaagtggcaccagcatcaagcaaatcggttcgattcccgttacggcccggcaagggcacttatggggacaggtgcattgtgaaggcaaatcatttttttgctgagcttcctgacaaagaccttcaccaatatgatgtatctataacacctgaggttacttcacgtggcgtcaatcgtgctgtcatgggtgagcttgtaacaatatatagacaatcccatttgggtgggcgtctacctgcatacgatggaagaaagagcctgtatactgctggaccattgccatttacttctatggcatttgaaattaccttgcaagatgaggaagatagtcttggcggtcgccaaggtggacataggcgtgagagagtatttagggtggtgatcaaatttgcagcccgtgctgatctccaccatctggctatgtttctagctggaaggcaagcagatgcccctcaggaagctcttcaagtgcttgacattgtactacgtgaattgcctaccgcgaggtattctcctgtcggtaggtcattttactctcccaacttagggagacgtcaaaaacttggtgagggattggaaagttggcgtggtttttaccaaagcataaggccgacacagatgggcctttcactgaatattgatatgtcctctactgcatttatcgagcctctccctgtgatcgattttgttgctcagcttcttaacagagatatctcagttaggccattgtctgattctgatcgcgtgaagattaaaaaagccctaagaggtgtgaaggttgaggtgactcacaggggaaacatgcgcagaaaatatcgcatttctggcctcacctcacaagcaacaagagagctatcattccctgttgatgatcgtggtactgtgaagactgtggtgcaatacttcatggagacttatggttttagtatccagcacaccactttaccatgcttgcaagtgggtaatcaacaaagaccaaattatctgcctatggaggtttgcaagatagttgaaggacagcgttactcaaagcgactcaatgagaaacaaatcactgctctactgaaagtgacctgccagcgccctcaagagcgcgagctggacatcttacagactgtgcatcacaatgcatactatgaagacccctatgcactggaatttggtataagaattgatgaacgtcttgctgcagttgaagctcgtgttctgccaccaccaagacttaaataccatgatagtggccgagagaaggatgttttgcccagagttggccaatggaacatgatgaataagaaaatggttaatggtggcagagtgagcaactgggcatgtattaacttctctcggaatgtgcaagatagtgccgctaggggtttctctcatgagttggcagtcatgtgccaaatatcaggaatggattttgctcttgagcctgtgctgcctccagtgactgcaaggccagaacatgttgagagagcgttaaaggcacgttatcaagatgcaatgaacatactgaggccacagggaagggaacttgatctgctgatcgtaatactgcctgacaacaatggttctctttatggggatctcaaaaggatctgtgagactgaactcggattggtctcccagtgttgtctgactaaacatgtttttaagatgagcaagcagtaccttgcaaatgttgcactcaaaataaatgttaaggttgggggaaggaatactgtacttttagatgctttgtcaaggagaatcccccttgtcagtgacagaccgaccataatatttggtgctgatgttacccatccacatcctggagaagattccagtccttccattgcagccgttgttgcttcgcaagactggcccgaggtcacgaaatacgctggactagtgagtgcgcaagcccatcgccaggagctgatacaggatcttttcaaagtatggcaggacccgcagagaaggacggtaactggcggcatgataaaggaacttctcatttctttcaagagggcaactggacagaagccccagaggatcatattctacagggatggtgtcagtgagggacagttctatcaagtattgctgtacgaacttgatgccattagaaaggcctgtgcgtccctggagcccaactaccagcctccagttacttttgtcgtggtacagaagcgccatcacactaggctgtttgcgaacaaccacagtgatcagcgcacagtcgatagaagcggaaacatactgcctggcaccgtggtcgattcgaagatttgccatcctactgagtttgacttctacctgtgtagccatgctggcattcagggaacgagccgccctgctcactaccatgtcctgtgggacgagaacaagttcacagctgacgagctgcagaccctgacgaacaacctgtgctacacgtacgctaggtgcacccgctccgtgtccatcgtgcccccggcgtactacgctcatctggcagccttccgagctcgcttctacatggagccagacacctctgacagcgggtcactggccagcggtgcccgtggccccccacccggtgcggcacgcagcagcacgagaggggccgggagtgtcgaggtcaggcccctacctgctctcaaggagaacgtgaagcgtgtcatgttttactgctga

SEQ ID NO: 11445 - protein, 1085 aa, Zea mays
MVRKKRTGPGGSGETSGESSGASGQGSSQQPERTQQPGGGRGWVPQQGGHGGGQHQGRDRHYQGRGGPGPHHLGSGAPEYHPREYQGRGGEYQGHGGEYQGRGGDYQGRGGGRSRGGMPQPYYGGHRGGNVGRNVPPGPSRTVPELHQAPYVQYPAPVVSPSPSGPGSSSQPMAEVSSGQVQQQFQQLADRGQSSTSQEIQVAPASSKSVRFPLRPGKGTYGDRCIVKANHFFAELPDKDLHQYDVSITPEVTSRGVNRAVMGELVTIYRQSHLGGRLPAYDGRKSLYTAGPLPFTSMAFEITLQDEEDSLGGRQGGHRRERVFRVVIKFAARADLHHLAMFLAGRQADAPQEALQVLDIVLRELPTARYSPVGRSFYSPNLGRRQKLGEGLESWRGFYQSIRPTQMGLSLNIDMSSTAFIEPLPVIDFVAQLLNRDISVRPLSDSDRVKIKKALRGVKVEVTHRGNMRRKYRISGLTSQATRELSFPVDDRGTVKTVVQYFMETYGFSIQHTTLPCLQVGNQQRPNYLPMEVCKIVEGQRYSKRLNEKQITALLKVTCQRPQERELDILQTVHHNAYYEDPYALEFGIRIDERLAAVEARVLPPPRLKYHDSGREKDVLPRVGQWNMMNKKMVNGGRVSNWACINFSRNVQDSAARGFSHELAVMCQISGMDFALEPVLPPVTARPEHVERALKARYQDAMNILRPQGRELDLLIVILPDNNGSLYGDLKRICETELGLVSQCCLTKHVFKMSKQYLANVALKINVKVGGRNTVLLDALSRRIPLVSDRPTIIFGADVTHPHPGEDSSPSIAAVVASQDWPEVTKYAGLVSAQAHRQELIQDLFKVWQDPQRRTVTGGMIKELLISFKRATGQKPQRIIFYRDGVSEGQFYQVLLYELDAIRKACASLEPNYQPPVTFVVVQKRHHTRLFANNHSDQRTVDRSGNILPGTVVDSKICHPTEFDFYLCSHAGIQGTSRPAHYHVLWDENKFTADELQTLTNNLCYTYARCTRSVSIVPPAYYAHLAAFRARFYMEPDTSDSGSLASGARGPPPGAARSSTRGAGSVEVRPLPALKENVKRVMFYC

SEQ ID NO: 11446 - DNA, 2772 bp, Triticum aestivum
  CDS (1)..(2772)
atggacccgcatgatggagagcctgctgctgacgagttgccaccaccaccccctctgcctcccaacgtggtgcccatcatcgcagaagatgctgctgctgctagtgagagcgaaccgcccccaccgccacctccaagcaagccagcaaagcctaggaggcacataatggccaggcctcccaatggcttgggaaagaagggccagcccatccagctgcttgccaaccactacaaagtctctgtcaagccttcagaggagttcttcaaccactactatgttaatctcaagtatgaggatgatacgccagtcgacagcaagggcatcggcagaaaggtccttgataagctgcagcacacctaccattctgagctcgccaacaaggactttgcatacgatggtgaaaagagcctctttactatcggggctcttccgcagatcaacaatgagttcatcgtggtattggaagacatcggtagtggcaagactgctgccgggagtcctggaggtaacaacaatggtagtcctggaggtggtgaccagaagagggtgaggagaccctaccaggccaagaccttcaaggtggagctcaactttgcggcaacaattccaatggctgcaattgggcacgccatcagaggccaggaatcggagcactccctcgaggcacttcgagtgcttgacatcattctcaggcagcactccgcaaaacagggctgccttctagttcgccagtcgttcttccacaacaaccctagcagtttcgtcgacttgggcggtggtgtgatggggtgccggggatttcactcaagcttccgtggtacacagagtggactctccctaaacattgatgtttcaactaccatgatagttaaacctggtcctgtcattgactttcttctcgctaaccagaaagttgaccaccctgacaaaatcgactggcagaaggccaagcgtgctctcaagaacttgaggataaaaaccactcctgcaaattcagagttcaagattgttgggttgagcgagagaaattgcaacgaacagatgttcccgttgaggcggaggaatggggacaccactgaaactgttgagatcactgtctatgattactttgtgaagaacagaggaatagagctgcgctattctggcaatcttccctgtatcaatgctgggaggccaaagcgtccgacgtatttccccgtggagctttgcacgcttgttcctctgcaaagatacacgaaggctctgtcaactatgcagaggacttcgcttgtcgagaagtcaagacagaagcctcacgaaagaatgtcaacacttaatgatgcacttaagcgtagcaactatgatgctgaccccatgctgaaggcatgtggcattcaaattgcgcaaaatttcacccagattgaagggagggtcctgcctgctcccaagctgaaagctggcaacggtgaagagttcttcgcacgcaacgggcgctggaatattgcgaggaagaagctgattaggaccagctctgtcaagaggtggtccgtcgtcaacttctctgcacgctgtgatcttcgtggtcttgtccaagaccttaaaagggtcgcgactggaatgggactcgaatatgaggaccctcacactgtaattgaagagagcccgtcactgagacgagctccggtggcacgaagagtggaggagatgtttgcccagataaaggccaagctacctggagcacccttgttccttttgtgcctcctccctgagaggaagaactgcgaagtttatggtccttggaagaagaagtgtcttgctgatttcggcatagtcacccagtgtctagctccgcaaagagtcaatgaccagtacttgagtaatctgctgctcaagataaatgctaagctcggtggactcaacacactgcttcaaattgaagcagcccgtgcaatacccattgtggggaaggtgcccactatcatcctgggcatggatgtctcgcatggtcaacctggccaatccgacaggccttccattgctgcggtggtgagttctcgtgagtggcctctcatctctaaatacagagcaacagtgcacactcagtcacccaaacaggagatgatggcttccctgtttaaaccacggggaactgaagatgatggcctcattcgggaatctcttattgacttctacactagctctgggaagcgaaagccagaccaagtcatcattttcagggatggagttagcgaaagccagtttactcaggtcataaacatcgagcttgagcagatcattgaggcatgcaagtgccttgacgacaagtgggagcccaagttcacggtcattgttgctcagaaaaaccatcataccaggtttttccagacaaactcgccagaaaatgttcctcctggcactgtggtggataaacaagtgtgccatcccaagaactttgacttctacatgtgcgcgcatgctgggatgattggcacgtcgaggccaacgcattaccatgttctgcatgatgagatcggcttcagtggggatgagctccaggagtttgtgcactcgctctcctatgtgtaccagaggagcacgacggcgatatcagtagctgctccgatagcgtacgcgcatctggcggcggcgcaggtgggcaccttcatgaagtttgaggacatgtcggacacgtcgtcgagccagggagggggccacacgtctgcgggcagcgccccggtgccggagctgcctcggctgcacgagaaagtgaggagctccatgttcttctgctga

SEQ ID NO: 11447 - protein, 923 aa, Triticum aestivum
MDPHDGEPAADELPPPPPLPPNVVPIIAEDAAAASESEPPPPPPPSKPAKPRRHIMARPPNGLGKKGQPIQLLANHYKVSVKPSEEFFNHYYVNLKYEDDTPVDSKGIGRKVLDKLQHTYHSELANKDFAYDGEKSLFTIGALPQINNEFIVVLEDIGSGKTAAGSPGGNNNGSPGGGDQKRVRRPYQAKTFKVELNFAATIPMAAIGHAIRGQESEHSLEALRVLDIILRQHSAKQGCLLVRQSFFHNNPSSFVDLGGGVMGCRGFHSSFRGTQSGLSLNIDVSTTMIVKPGPVIDFLLANQKVDHPDKIDWQKAKRALKNLRIKTTPANSEFKIVGLSERNCNEQMFPLRRRNGDTTETVEITVYDYFVKNRGIELRYSGNLPCINAGRPKRPTYFPVELCTLVPLQRYTKALSTMQRTSLVEKSRQKPHERMSTLNDALKRSNYDADPMLKACGIQIAQNFTQIEGRVLPAPKLKAGNGEEFFARNGRWNIARKKLIRTSSVKRWSVVNFSARCDLRGLVQDLKRVATGMGLEYEDPHTVIEESPSLRRAPVARRVEEMFAQIKAKLPGAPLFLLCLLPERKNCEVYGPWKKKCLADFGIVTQCLAPQRVNDQYLSNLLLKINAKLGGLNTLLQIEAARAIPIVGKVPTIILGMDVSHGQPGQSDRPSIAAVVSSREWPLISKYRATVHTQSPKQEMMASLFKPRGTEDDGLIRESLIDFYTSSGKRKPDQVIIFRDGVSESQFTQVINIELEQIIEACKCLDDKWEPKFTVIVAQKNHHTRFFQTNSPENVPPGTVVDKQVCHPKNFDFYMCAHAGMIGTSRPTHYHVLHDEIGFSGDELQEFVHSLSYVYQRSTTAISVAAPIAYAHLAAAQVGTFMKFEDMSDTSSSQGGGHTSAGSAPVPELPRLHEKVRSSMFFC

SEQ ID NO: 11448 - DNA, 2751 bp, Triticum aestivum
  CDS (1)..(2751)
atggagtcacacggagaggacctgccaccaccaccaccactcccgccaaatgcagagccgataaaagctgagtcggctgatgacttgccaccaccaccacccctgctgcctatcaaacctgaagaagcaaagaagatctcaaagcctaagagggccctgatcgctcgtcctggttttggcaagaggggaaatcctatacagcttgtgacaaatcatttcaaagtctcgttgaagacgacagacgagttcttccatcattactatgtaaatctgaagtatgaagatgacaggcctgttgatggaaaaggtgttggtagaaaagtcattgataagcttgctcagacttatccatcggaactagcccataaagactttgcctatgatggtgaaaagagtctttttaccattggtgccctcccacaaattaacaatgagtttgttgtggttcttgaagatgtttccagtggaaagactcctgcaaatggcagccctggaaacgacagtccagacaagaagagagtgaaaaggccatatcaaactaaaaccttcaaggtggagttgagctttgcagctagaatccccatgagtgctattgcaatggcactcaaaggccaggaatcagagcacacgcaagaagccattcgggttattgatatcatattaagacaacactctgccaaacagggctgcctgttagtccgccagtcattttttcacaacaatccttcaaactttgtggacttgggtgggggtgtgatgggctgccgaggtttccactcaagctttcgagccacacagagcgggctttctcttaatattgatgtttctacaacaatgattgtgaaacctggccctgttgttgattttctgctggccaaccagaaggttgaccaccctaataaaattgattgggctaaggccaagcgtgcacttaagaatttaaggataaaaacaagcccagcaaatacagaatacaagattgttggtttgagtgagaggaattgttatgaacaaatgttttccctcaagcaaaggaatggtgggaatggtgaccctgaagcaatagaaatatctgtttatgattactttgtgaagaaccgtggcattgagctgaggtactctggtgatttcccttgtataaatgttgggaaacctaggcggccaacatattttcccattgagctctgccagctggtgcctttgcaaaggtataccaaatctttgagtaccctacaaagatcatctcttgttgagaagtccaggcagaagcctcaagagaggatgtcagttttgtctgatgtactgaaacgcagcagctatgatacagaacccatgctgaaggcatgtggaatttcgatagctcaaggctttactcaagtgtctggtagggtactgcaggcccccaagctcaaagctggaaatggtgaagatattttcacaaggaatggacgttggaatttcaacaacaagaggcttgctagagcttgcgtggttgacagatgggcggttgtaaacttttcggctaggtgtaacaccatgaaccttgtcaatgacctcatcaagtgtgggggcatgaagggcattacagtagaaaaacctcatattgtaattgaagagaatggttcaatgagacgtgcacctgctccaaaaagggttgaggatatgtttgagcaagtgaagtctaagcttcctggggctcccaagtttctcttgtgtattcttgctgagaggaagaactcagatgtttatggtccatggaagcgaaaatgccttgctgactttgggattgtcactcaatgtgtggccccaacaagggtcaatgaccaatatctgacaaatgttctgctgaagatcaatgcaaaacttggtggaatgaactcactgctacaaattgaaatgtccccaagtatacctcttgtatcaaaggtcccaactctcatcttgggaatggatgtgtcccatggatcccctggacagtctgatataccgtccattgcagcagttgttggttctcgggaatggcctcttgtctcgaaatatagggcttcagtgcgctcgcagtcaccaaagctcgaaatgatagattcattgttcaagccacaaggaactgatgatgatggccttgttcgggagtgtctcattgacttctacaccagttctggaaaaaggaaaccagatcagatcatcatcttcagggatggtgttagtgagagccagtttaatcaggtgctgaacattgaattggatcaaataattgaggcctgcaagttcttggatgaaaattggaaccccaagttcacgctgattgttgcccagaaaaatcaccacaccaaattcttcatacctggatctcctgacaatgtccctccaggcactgttgtagataatgcagtctgccatccaaggaattatgacttctacatgtgcgctcatgctggaatgattgggactacaaggccaacacactaccatatcctgcatgatgagatacactttgctgcggatgacctgcaggatcttgtgcactcgctctcatatgtgtaccaaaggagcacgacagccatatcagttgtttctccaatctgctatgcacatcttgcggctgctcaggtggcgcagttcataaagtttgatgagatgtctgagacgtcgtcgagccagggcggtggccacacctctgccggcagcgctccagtgcaggagctgcctcgcctccatgagaaagtccgcagcagcatgttcttctgctga

SEQ ID NO: 11449 - protein, 916 aa, Triticum aestivum
MESHGEDLPPPPPLPPNAEPIKAESADDLPPPPPLLPIKPEEAKKISKPKRALIARPGFGKRGNPIQLVTNHFKVSLKTTDEFFHHYYVNLKYEDDRPVDGKGVGRKVIDKLAQTYPSELAHKDFAYDGEKSLFTIGALPQINNEFVVVLEDVSSGKTPANGSPGNDSPDKKRVKRPYQTKTFKVELSFAARIPMSAIAMALKGQESEHTQEAIRVIDIILRQHSAKQGCLLVRQSFFHNNPSNFVDLGGGVMGCRGFHSSFRATQSGLSLNIDVSTTMIVKPGPVVDFLLANQKVDHPNKIDWAKAKRALKNLRIKTSPANTEYKIVGLSERNCYEQMFSLKQRNGGNGDPEAIEISVYDYFVKNRGIELRYSGDFPCINVGKPRRPTYFPIELCQLVPLQRYTKSLSTLQRSSLVEKSRQKPQERMSVLSDVLKRSSYDTEPMLKACGISIAQGFTQVSGRVLQAPKLKAGNGEDIFTRNGRWNFNNKRLARACVVDRWAVVNFSARCNTMNLVNDLIKCGGMKGITVEKPHIVIEENGSMRRAPAPKRVEDMFEQVKSKLPGAPKFLLCILAERKNSDVYGPWKRKCLADFGIVTQCVAPTRVNDQYLTNVLLKINAKLGGMNSLLQIEMSPSIPLVSKVPTLILGMDVSHGSPGQSDIPSIAAVVGSREWPLVSKYRASVRSQSPKLEMIDSLFKPQGTDDDGLVRECLIDFYTSSGKRKPDQIIIFRDGVSESQFNQVLNIELDQIIEACKFLDENWNPKFTLIVAQKNHHTKFFIPGSPDNVPPGTVVDNAVCHPRNYDFYMCAHAGMIGTTRPTHYHILHDEIHFAADDLQDLVHSLSYVYQRSTTAISVVSPICYAHLAAAQVAQFIKFDEMSETSSSQGGGHTSAGSAPVQELPRLHEKVRSSMFFC

SEQ ID NO: 11450 - DNA, 2706 bp, Zea mays
  CDS (1)..(2706)
atggagtctcacaatggcgaggccaatgacttgcctccaccacctcctctgattgctggtgttgaaccacttaaagctgatgaaacaaagatgccattgaaacctaggagtctggtccagagaaatggatttggcagaaaggggcagccaataaagctgataacaaatcacttcaaagtttctcttgtgaatgctgaagaatttttctaccattactatgtcaatttgaagtatgaagatgatacaccggttgatcgcaaagggtcaggaaggaaagtgattgaaaaactgcagcaaacttatgctgctgaacttgcaaataaagattttgcctatgatggtgagaagagcctgttcacaattggtgctcttcctcaagttaaaaatgagtttactgtcgtggttgaagatttttcaactggaaagactcctgcaaacggcagtccaggaaatgacagtcctcccggaagtgacaggaaaaggctcagaaggccttacaatacaaagacctataaggtcgagctctcttttgcagcaaaaattcctatgagtgcaatctcacaggccttaagaggtcaggaatcagagcacactcaggaagcaattcgagtgattgacattattctgaggcagcactcagctaagcagggttgcctattagtaaggcaatcattcttccacaacaatccttccaattttgttgacctgggtggtggtgtagtgggctgtagaggttttcattctagttttcgagcaacccagagtggactttcactcaatatcgatgtgtcgactacaatgatagtgaaacctggtcctgtcattgattttctgcttgacaatcagaaagttggtgattcaagcatgattgattgggctaagggcaagcgtgcactgaagaacttgaggataaaaataagtccagcgaaccaagaacagaagattgttggtctcagcgaaagaacttgtcgtgagcaattattcacactgaaacataaaaatggtaacaatggtgactctgaagagatcactgtttatgattacttcgtaaagcagcgtggcatagtgctgcaatactctggtgatcttccttgcatcaatgtgggaaaactaaagcggccaacatattttccaattgagttatgcagtcttgtgcctttacaaagatacactaaagctttgaacacacttcagaggtcatcactcgtggagaaatctaggcagaaaccgcaggaaaggatgtctgttttatctgatgtgctgcaaagaagcaactatgatgcagagcccatgttgaaggcatgcgggattacaattgctagaaatttcacagaagttgatggtagggtattgcagccacctaagcttaaagctgggaatggtgaagacatttttacacgcaatggtagatggaacttcaacaataagaggctcattagagcttgtagtgtcgagaaatgggcggtggtaaacttttctgcacgatgcaatgtcagggatcttgtccgggatctcatcaagtgtggaggcatgaagggcattatggttgatgctccttttgctgtatttgatgagaatccttcaatgagacggtcacctgctataagaagggttgaagacatgtttgaacaagtgaaaactaagcttcctggagcaccaaagtttcttttgtgtgttctagctgaaaggaagaattctgatatttatgggccttggaagaagaaatgccttgctgaatttgggatcgttacacaatgtgtggcaccaactagagtgaacgaccagtatcttacaaatgtcctacttaagataaatgcaaagctgggtggcatgaattcgttgctccaaattgaaacatccccagcaattcctcttgtatccaaggtcccaactataatcttgggaatggatgtgtcacacggttctcctggacattctgatgtaccatctattgctgctgttgttagttctcgtgaatggcctcttatctcgaaatacagagcttctgtccgcacccaatcacctaaaatggaaatgattgactcattgtttaagccacgggaagctgaagatgatggtctgatccgggagtgtctgattgacttctacaccagttctgggaagagaaagcctgaccaagtcatcatattcagggacggtgttagcgaaagtcagtttaatcaggtgctgaacattgagttgcaacaaatcatcgaggcttgcaaatttcttgatgagaaatggaatcccaagttcacgttgattattgcccagaagaatcatcacactaaatttttcattcctggaaagccagataatgtcccaccaggaactgtggtggacaacaaagtctgccatccaaagaacttcgatttctacatgtgtgcgcatgctggaatgatcgggactacgaggccaactcactaccacatcctgcatgatgagataggcttcagtcctgatgatctgcaggagctggtgcattcgctctcttatgtgtaccaaaggagcacaacagccatatcagtcgttgctcccatctgctacgcacatctggcagctgctcaggttggccagttcataaagttcgatgagatgtcggagacgtcctccagtcatggcgggcatacttcggcgggcagcgttccggtccaggagctgccgcgcctgcatgagaaagtgaggagctcgatgttcttttgctga

SEQ ID NO: 11451 - protein, 901 aa, Zea mays
MESHNGEANDLPPPPPLIAGVEPLKADETKMPLKPRSLVQRNGFGRKGQPIKLITNHFKVSLVNAEEFFYHYYVNLKYEDDTPVDRKGSGRKVIEKLQQTYAAELANKDFAYDGEKSLFTIGALPQVKNEFTVVVEDFSTGKTPANGSPGNDSPPGSDRKRLRRPYNTKTYKVELSFAAKIPMSAISQALRGQESEHTQEAIRVIDIILRQHSAKQGCLLVRQSFFHNNPSNFVDLGGGVVGCRGFHSSFRATQSGLSLNIDVSTTMIVKPGPVIDFLLDNQKVGDSSMIDWAKGKRALKNLRIKISPANQEQKIVGLSERTCREQLFTLKHKNGNNGDSEEITVYDYFVKQRGIVLQYSGDLPCINVGKLKRPTYFPIELCSLVPLQRYTKALNTLQRSSLVEKSRQKPQERMSVLSDVLQRSNYDAEPMLKACGITIARNFTEVDGRVLQPPKLKAGNGEDIFTRNGRWNFNNKRLIRACSVEKWAVVNFSARCNVRDLVRDLIKCGGMKGIMVDAPFAVFDENPSMRRSPAIRRVEDMFEQVKTKLPGAPKFLLCVLAERKNSDIYGPWKKKCLAEFGIVTQCVAPTRVNDQYLTNVLLKINAKLGGMNSLLQIETSPAIPLVSKVPTIILGMDVSHGSPGHSDVPSIAAVVSSREWPLISKYRASVRTQSPKMEMIDSLFKPREAEDDGLIRECLIDFYTSSGKRKPDQVIIFRDGVSESQFNQVLNIELQQIIEACKFLDEKWNPKFTLIIAQKNHHTKFFIPGKPDNVPPGTVVDNKVCHPKNFDFYMCAHAGMIGTTRPTHYHILHDEIGFSPDDLQELVHSLSYVYQRSTTAISVVAPICYAHLAAAQVGQFIKFDEMSETSSSHGGHTSAGSVPVQELPRLHEKVRSSMFFC

SEQ ID NO: 11452 - DNA, 2907 bp, Zea mays
  CDS (1)..(2907)
atgacgtggttagtgccaatgagattcgtgtgccaaatgtgtccttgctactcaaggaggtcatatggaacaagtaaaacgaaatttctgcatcagcaatctgggagacctcgcctcgtccgtcctcctgcctacttccttgcttttggtaggtgctgcttgttttatcttgaaatgggctctcatgatggcgaggatgaagagttgccacccccccctccggtgccaccagatgtgattcccattaaagctgaagatgctgtgggtgaatcaccagcaaaccatatattaaagccaaagagattactgatggacaggcctggtataggaagaaaagggcagccgacccagctctattcaaatcactttaaagtcgctgtgaagagtacagaagacgtcttctttcactactatgtaaacctgaagtatgaggatgatcgacccgttgatggtaaagggatcggcagaaaggtgattgataaactgcagcagacatatcgtgcagagctttctaacaaggactttgcatatgatggagaaaagagcctgtttacagttggtggtcttccacaaaaaaagaatgagttcaccgttgtcttggaggacgtatctactggaaagactgctgccaatgggagccctggaggtaatgacagtcctgggggtggtgataggaagagagtgaggaggccataccagacgaaaactttcaaagtggagataaattttgcagcagaggttcctatgagtgctattggtcaagtcattagaggcgaagaatctgagaactccctggaggcgcttcgtgttcttgatatcatactgaggcagcattccgcagaacaaggctgccttttggttaagcaatcatttttctacaacaacccttcatgctttgttgacttgggtggtggtgtgatgggttgtcgtggatttcattcaagcttccgtggcacacagagtggactttccctcaatgttgatgtctcaacaacaatgatcgtgaaacctggccctgttattgattttcttctttctaaccagaatgttaatgatcctagcagaattgattggcaaaaggccaagcgtgctctcaagggcttgaggattagaaccactcctgcaaattcagaattcaagatttttggtctcagcgagaggatctgcaaagaacaaacgtttccgctgaggcagagaaatggtagcaacggagattgtgataccattgaaataactgtctatgactactatgcaaagaaaggaatcgatctaaagtattctggtgatttcccctgtataaatacagggaaggcaaagcgcccaacatattttccaatcgagctatgctcgcttgttccgcttcaaagatacaccaaagctttgtctacgctacaaaggtcatcccttgtggagaagtctagacagaagcctgaagaaaggatgaccgttctaaatgatgcactgcaacgcagtaactacgattctgaccccatgttgagggcatgtggtgtttcagttgctccaaaatttacccaagttgaaggaaggatccttcaagccccaaagctgaaagccggcaatggtgatgatatcttttcacgaaatgggcggtggaatttcactaataggaagttttatgaaacctgctctgtgaataagtgggcggtcgttaatttctctgcacgttgtgatgttcggaatcttatccgtgacctgatgaggaatgcatctgcaaagggaattcaaatggaggaaccttttgatgtgtttgaagagagtccctctatgaggcgtgcacctgtgtcaagaagggtggatgatatgtttgggcagataaaatcaaaacttcctggagctcctaggttcctcttgtgccttctccctgagaggaaaaattgtgaaatctatggtccttggaagagaaagtgcctggccgagtttggtattgtcacacagtgtctagctccattaagagtcaatgatccgtacctgcttaatttgctgatgaagatcaatgcaaagcttggtggtctgaactcgttgctgcaagttgaagcatcttcgtcaataccacatgtgtcgcaagtacccaccatcatcttaggtatggatgtttcacatggtcatccaggacaagatagaccttcggttgcagcggtggttagttctcgtcaatggcctcttatctctagatatagagcatcagtgcacacccaatctgccagactagaaatgatgtcctcgttgtttaagccgcggggtactgatgatgatggcctcatccgggaatcactgatcgacttctacactagctctggaaagcgaaaaccagaacacataattattttcagggatggagtcagtgaaagtcagtttacccaggtcatcaacattgagctggatcagatcatcgaggcatgtaagtttctggatgagaagtggtcacccaagttcactgtgattgttgctcaaaagaaccaccacaccaagttctttcagacggcatcaccagacaatgttcttcctggaactgtggtggatagtaaagtttgccatcctaagaacttcgacttctacatgtgtgcacatgctgggatgattggaacaacaaggcccacccactatcatgttctgcacgacgagataggtttctctgccgacgagatgcaggagtttgttcattcgctatcttacgtgtaccagaggagcacgacagccatctcagtggttgctccagtgtgctacgcccacctcgctgcagcccaggtgagcacgttcctgagattggaggagatgtcagacgcgtcctccagccagggaggagggcatacctcggctggcagtgctcctgtgccggagctgcctcgcctgcatgacaaagtcaggagctccatgttcttctgctag

SEQ ID NO: 11453 - protein, 968 aa, Zea mays
MTWLVPMRFVCQMCPCYSRRSYGTSKTKFLHQQSGRPRLVRPPAYFLAFGRCCLFYLEMGSHDGEDEELPPPPPVPPDVIPIKAEDAVGESPANHILKPKRLLMDRPGIGRKGQPTQLYSNHFKVAVKSTEDVFFHYYVNLKYEDDRPVDGKGIGRKVIDKLQQTYRAELSNKDFAYDGEKSLFTVGGLPQKKNEFTVVLEDVSTGKTAANGSPGGNDSPGGGDRKRVRRPYQTKTFKVEINFAAEVPMSAIGQVIRGEESENSLEALRVLDIILRQHSAEQGCLLVKQSFFYNNPSCFVDLGGGVMGCRGFHSSFRGTQSGLSLNVDVSTTMIVKPGPVIDFLLSNQNVNDPSRIDWQKAKRALKGLRIRTTPANSEFKIFGLSERICKEQTFPLRQRNGSNGDCDTIEITVYDYYAKKGIDLKYSGDFPCINTGKAKRPTYFPIELCSLVPLQRYTKALSTLQRSSLVEKSRQKPEERMTVLNDALQRSNYDSDPMLRACGVSVAPKFTQVEGRILQAPKLKAGNGDDIFSRNGRWNFTNRKFYETCSVNKWAVVNFSARCDVRNLIRDLMRNASAKGIQMEEPFDVFEESPSMRRAPVSRRVDDMFGQIKSKLPGAPRFLLCLLPERKNCEIYGPWKRKCLAEFGIVTQCLAPLRVNDPYLLNLLMKINAKLGGLNSLLQVEASSSIPHVSQVPTIILGMDVSHGHPGQDRPSVAAVVSSRQWPLISRYRASVHTQSARLEMMSSLFKPRGTDDDGLIRESLIDFYTSSGKRKPEHIIIFRDGVSESQFTQVINIELDQIIEACKFLDEKWSPKFTVIVAQKNHHTKFFQTASPDNVLPGTVVDSKVCHPKNFDFYMCAHAGMIGTTRPTHYHVLHDEIGFSADEMQEFVHSLSYVYQRSTTAISVVAPVCYAHLAAAQVSTFLRLEEMSDASSSQGGGHTSAGSAPVPELPRLHDKVRSSMFFC

SEQ ID NO: 11454 - DNA, 3177 bp, Glycine max
  CDS (1)..(3177)
atggtcagaaagagaagaactgaactacccagtgggggtgaaagctctgaggctcaacgccctgctgaaaggagtgcaccaccccaacaacaggctgctgctgctgccccaggaggggctggaccccaaggaggcagaggttggggtccccaaggaggacgaggaggctatggtgggggccgcagtcgtgggatgccccaacagcaatatggtgcccctcctgaatatcaaggtaggggaaggggagggccttctcagcaaggaggccgtggagggtatggcggtggccgaagtggtggtggtatgggcagtggccgtggcgtaggtccttcatatggtggcccatccaggccaccggcacccgagctgcaccaagcaacctcagttcaattctatcaaactggggtgagttctcagcctgcattatctgaggccagttcatcactgccgccgccggaacctgttgatttggaacagtcaatggcgcagatggtgcttcattctgaagctgctccttctccgcctcctgcaagtaaatcatcaatgaggttccctcttcgaccaggaaagggtagctatggcaccaaatgtgttgtcaaggctaatcatttctttgccgagttgcccaacaaagatctgcatcaatatgatgtaacaattactcctgaagtgacatcaagaggagtgaaccgtgctgttatggagcagttggtgaggctgtatcgggaatctcacttgggtaagagacttcctgcttacgatgggcgcaagagcctctatactgctggaccacttccttttatgtcaaaggagttcagaattgttcttgctgatgatgatgaaggagctggaggccagaggagggacagggaattcaaggttgtgataaaattggctgcacgggcagatcttcaccatttaggactctttttacagggaaggcaaactgatgctcctcaagaggctttgcaggtccttgacattgttctgcgtgaactccctactacaaggtattgtcctgtaggaagatcattttattcacctgatttgggtagaagacagcctttaggtgagggattggaaagctggcgtggtttctaccagagtattcggcctacacagatggggctatccctgaacattgatatgtcttccactgcatttattgagccattgccggtaattgacttcgtaaatcaactgctgaacagagatgtatctgcccggccattatctgatgctgatcgtgttaagatcaagaaagctcttcgaggtatcaaagttgaagtaacacatcgtggaaacatgagaaggaaatatcgtatctctggtctgacttcacaggcaaccagagaattgacattcccagtagatgaaaggggaaccatgaaatctgttgtggagtacttctatgagacatatgggtttgtcattcaacatactcagtggccttgtctgcaagttggcaatacacagagacctaactatttgccaatggaggtttgcaagatagtggaaggtcaaaggtactcaaaaaggcttaatgagaggcaaatcaccgctttgctgaaagttacatgccagcgtcctgttgagagggagcgtgatatcatgcagacagtacaccacaatgcataccatgaagatccttatgccaaagaatttgggatcaagatcagtgagaagcttgctcaagttgaagctcgcatccttcctgctccatggctcaaatatcacgatacgggcagagaaaaggattgtcttcctcaagttgggcaatggaatatgatgaataagaaaatggttaatgggggaacagttaacaactggttctgcataaacttttcgaggaatgttcaagatagtgttgcccgcggtttttgctatgaacttgctcagatgtgttatatatctggaatggcatttacacctgagccagtagttcccccagtcagtgctcgccctgatcaagtggaaaaggttcttaaaactcggtatcacgatgccaagaataaactgcaaggaaaagagcttgatttactcattgttatcttgccggataataatggatcactatatggtgacctcaaacgtatttgtgagacagatctaggacttgtttcacaatgttgcttaactaagcatgtcttcaaaatgagcaagcagtaccttgcaaatgttgctttgaaaattaatgtcaaagttggagggagaaacactgtactggttgatgcgctctcacgacgcattcccttggtcagtgacagacctacaattatttttggagctgatgtgactcatccacatcctggagaggattcaagtccatcaattgcagcagttgtggcttcgcaagactatcctgaaattacaaagtatgctggtttagtttgtgcccaagctcataggcaggaactcatccaggatcttttcaaacaatggcaagatccagtcagaggaacagtgactggtggaatgatcaaggaacttcttatatcttttaggagagctacaggacaaaagccacaacgcatcatattttatagggatggtgttagtgagggtcaattttatcaggttctactgtttgagcttgatgctattcgaaaggcatgtgcatccctggaacccaactatcagcctcctgtgacttttgtggtggttcaaaagcgtcaccacacaaggctctttgccagcaaccatcacgataagagttcttttgacaggagtggcaacatattgcctggtactgttgttgactccaaaatctgccatcccaccgaatttgacttttatctctgcagccatgctggaatacagggtacaagccgtcctgctcactaccatgtgttgtgggatgaaaacaattttactgctgatgccttgcaaacactcaccaataatctttgctacacatatgctcggtgcacccgatctgtttcaattgtgcctcctgcatactatgctcaccttgctgcattccgtgcaaggttttacatggaacccgagacttcggatagtggctctatgacaagtggtgctgttgcaggccgtgggatgggtggcggcggtggtggtggtgtagggcgtagcacccgggcacctggtgctaatgctgctgtgagaccattgcctgcactcaaagagaacgttaagagagttatgttttattgttaa

SEQ ID NO: 11455 - protein, 1058 aa, Glycine max
MVRKRRTELPSGGESSEAQRPAERSAPPQQQAAAAAPGGAGPQGGRGWGPQGGRGGYGGGRSRGMPQQQYGAPPEYQGRGRGGPSQQGGRGGYGGGRSGGGMGSGRGVGPSYGGPSRPPAPELHQATSVQFYQTGVSSQPALSEASSSLPPPEPVDLEQSMAQMVLHSEAAPSPPPASKSSMRFPLRPGKGSYGTKCVVKANHFFAELPNKDLHQYDVTITPEVTSRGVNRAVMEQLVRLYRESHLGKRLPAYDGRKSLYTAGPLPFMSKEFRIVLADDDEGAGGQRRDREFKVVIKLAARADLHHLGLFLQGRQTDAPQEALQVLDIVLRELPTTRYCPVGRSFYSPDLGRRQPLGEGLESWRGFYQSIRPTQMGLSLNIDMSSTAFIEPLPVIDFVNQLLNRDVSARPLSDADRVKIKKALRGIKVEVTHRGNMRRKYRISGLTSQATRELTFPVDERGTMKSVVEYFYETYGFVIQHTQWPCLQVGNTQRPNYLPMEVCKIVEGQRYSKRLNERQITALLKVTCQRPVERERDIMQTVHHNAYHEDPYAKEFGIKISEKLAQVEARILPAPWLKYHDTGREKDCLPQVGQWNMMNKKMVNGGTVNNWFCINFSRNVQDSVARGFCYELAQMCYISGMAFTPEPVVPPVSARPDQVEKVLKTRYHDAKNKLQGKELDLLIVILPDNNGSLYGDLKRICETDLGLVSQCCLTKHVFKMSKQYLANVALKINVKVGGRNTVLVDALSRRIPLVSDRPTIIFGADVTHPHPGEDSSPSIAAVVASQDYPEITKYAGLVCAQAHRQELIQDLFKQWQDPVRGTVTGGMIKELLISFRRATGQKPQRIIFYRDGVSEGQFYQVLLFELDAIRKACASLEPNYQPPVTFVVVQKRHHTRLFASNHHDKSSFDRSGNILPGTVVDSKICHPTEFDFYLCSHAGIQGTSRPAHYHVLWDENNFTADALQTLTNNLCYTYARCTRSVSIVPPAYYAHLAAFRARFYMEPETSDSGSMTSGAVAGRGMGGGGGGGVGRSTRAPGANAAVRPLPALKENVKRVMFYC

SEQ ID NO: 11456 - DNA, 3306 bp, Oryza sativa (japonica cultivar-group)
  CDS (1)..(3306)
atggtgaagaagaaaagaactgggtctggcagcaccggtgagagttctggagaggctccaggagctcctggccatggttcttcacagcgagctgagagaggtcctcaacagcatgggggaggacgtggttgggtgcctcaacatggtggccgtggtggtgggcaataccagggccgtggtggacattatcagggccgtggagggcaaggttcacaccatccaggtggagggcctcctgagtatcagggtcgtggagggccaggttcacatcatccaggtggtgggcctcctgactatcagggccgtggaggatcaggttcacatcacccaggtggtgggcctcccgagtatcaaccgcgtgactatcaaggacgtggtggtccacgccccagaggtggaatgccacagccatactatggcggacctagggggagtggcggacgtagtgttccttcaggttcatcaagaacagttcccgagctgcaccaagccccacatgtccaataccaagccccgatggtttcaccaaccccatcgggagctggctcatcctctcagcctgcggcggaggtgagcagtggacaagtccaacaacagtttcagcaacttgccacccgtgatcaaagttcgaccagccaagccattcaaatagcaccaccgtcaagcaaatcagttagattcccgttgcgccctggcaagggtacatatggggacaggtgcattgtgaaggcgaaccatttctttgctgaacttcctgataaagaccttcaccaatacgacgtatctattactcctgaggttacttcacgtggcgtgaatcgtgctgttatgtttgagttagtaacgctgtatagatattcccatttgggcgggcgtctacctgcctatgatggaaggaagagtctttacacagctggaccattgccatttgcttctaggacatttgaaattactcttcaagatgaggaagatagtcttggtggtggccaaggcacccaaaggcgtgagagactatttagggtggtgatcaagtttgctgcccgtgctgatcttcaccatttggctatgtttctagctggaaggcaagcagatgctcctcaagaagcccttcaagtccttgacattgtgttacgtgaattgcctaccacaaggtactcaccagttggtcggtcattttattctcccaatttagggagacgccagcaacttggtgagggtttggaaagttggcgtggtttttaccaaagcataaggcctacccagatgggtctctcactgaatattgatatgtcatcaactgcatttattgagcctctacctgtgattgactttgttgctcagcttctgaacagagacatctcagttagaccattatctgattctgatcgtgtgaagataaagaaagctctaagaggtgtgaaggttgaggtgacgcatagaggaaacatgcgtagaaaatatcgtatatctggactcacttcacaggcaacaagggagttatcattccctgtcgatgatcgtggtactgtgaagactgtggtgcaatattttctggagacatatggttttagtattcagcacaccactttgccttgccttcaagtgggcaatcagcaaaggcccaattatctgcctatggaggtttgtaagatcgttgagggacagcgttactcgaagcggcttaacgagaaacagattactgcgctattgaaagtgacttgccagcgacctcaagagcgtgaactggatattttgcggactgtatctcacaatgcataccatgaagatcagtatgcgcaggaatttggcataaaaattgatgagcgtcttgcatctgttgaagctcgtgttctgcctcccccaaggcttaaataccatgatagtgggagagaaaaggatgtattgccgagagttggccagtggaacatgatgaataagaaaatggtcaatggtgggagagtcaacaactgggcatgtattaacttctctagaaatgtgcaagatagtgctgccaggggcttctgtcatgagctggctatcatgtgccaaatatctggaatggattttgcactggaacctgtgctgcccccacttactgctagacctgaacatgtggaaagagcactgaaggcacgctatcaagatgcaatgaacatgctcagaccgcagggcagggaacttgatttactgattgtaatactgcctgacaataatggttctctttatggggatctcaaaagaatctgtgagactgatcttggattggtctcccaatgttgtttgacaaaacatgtttttaaaatgagcaagcagtatcttgcaaatgttgcccttaaaataaacgttaaggtggggggaaggaatactgtacttgtggatgctttgacaaggaggattccccttgtcagtgacagaccaactatcatatttggtgcggatgttactcatcctcatcctggagaagattccagtccttccattgcagctgtggttgcttctcaagactggcctgaagtcactaagtatgctggattggtgagtgcccaagcccatcgtcaagaattgatacaagatcttttcaaagtatggcaagacccgcatagaggaactgttactggtggcatgatcaaggagcttctcatttctttcaagagggctactggacagaaacctcagaggataatattttacagggatggtgtcagcgaggggcagttttatcaagttttgttgtatgagcttgatgccattagaaaggcttgtgcatccctggaacccaactatcagcctccagttacctttgtggtggtccagaagcggcatcacacaaggttgtttgctaataatcacaacgaccagcgtactgttgatagaagtggaaacattctgcctggaactgttgttgactcaaagatttgccatccaaccgagtttgatttctacctgtgtagccatgctggcatacagggaacaagccgtcctgctcattatcatgttctgtgggatgagaacaaatttactgcagacgagttgcaaaccctcacgaacaacttgtgctacacgtatgcaaggtgcactcgctctgtatcaattgtgcctcctgcgtactatgctcatctggcagccttccgagctcgcttttacatggagccagagacatctgacagtggatcaatggcgagtggagctgcaacgagccgtggccttccaccaggtgtgcgcagcgccagggttgctggaaatgtagccgtcaggcctctacctgctctcaaggaaaacgtgaagcgtgtcatgttttactgctaa

SEQ ID NO: 11457 - protein, 1101 aa, Oryza sativa (japonica cultivar-group)
MVKKKRTGSGSTGESSGEAPGAPGHGSSQRAERGPQQHGGGRGWVPQHGGRGGGQYQGRGGHYQGRGGQGSHHPGGGPPEYQGRGGPGSHHPGGGPPDYQGRGGSGSHHPGGGPPEYQPRDYQGRGGPRPRGGMPQPYYGGPRGSGGRSVPSGSSRTVPELHQAPHVQYQAPMVSPTPSGAGSSSQPAAEVSSGQVQQQFQQLATRDQSSTSQAIQIAPPSSKSVRFPLRPGKGTYGDRCIVKANHFFAELPDKDLHQYDVSITPEVTSRGVNRAVMFELVTLYRYSHLGGRLPAYDGRKSLYTAGPLPFASRTFEITLQDEEDSLGGGQGTQRRERLFRVVIKFAARADLHHLAMFLAGRQADAPQEALQVLDIVLRELPTTRYSPVGRSFYSPNLGRRQQLGEGLESWRGFYQSIRPTQMGLSLNIDMSSTAFIEPLPVIDFVAQLLNRDISVRPLSDSDRVKIKKALRGVKVEVTHRGNMRRKYRISGLTSQATRELSFPVDDRGTVKTVVQYFLETYGFSIQHTTLPCLQVGNQQRPNYLPMEVCKIVEGQRYSKRLNEKQITALLKVTCQRPQERELDILRTVSHNAYHEDQYAQEFGIKIDERLASVEARVLPPPRLKYHDSGREKDVLPRVGQWNMMNKKMVNGGRVNNWACINFSRNVQDSAARGFCHELAIMCQISGMDFALEPVLPPLTARPEHVERALKARYQDAMNMLRPQGRELDLLIVILPDNNGSLYGDLKRICETDLGLVSQCCLTKHVFKMSKQYLANVALKINVKVGGRNTVLVDALTRRIPLVSDRPTIIFGADVTHPHPGEDSSPSIAAVVASQDWPEVTKYAGLVSAQAHRQELIQDLFKVWQDPHRGTVTGGMIKELLISFKRATGQKPQRIIFYRDGVSEGQFYQVLLYELDAIRKACASLEPNYQPPVTFVVVQKRHHTRLFANNHNDQRTVDRSGNILPGTVVDSKICHPTEFDFYLCSHAGIQGTSRPAHYHVLWDENKFTADELQTLTNNLCYTYARCTRSVSIVPPAYYAHLAAFRARFYMEPETSDSGSMASGAATSRGLPPGVRSARVAGNVAVRPLPALKENVKRVMFYC

SEQ ID NO: 11458 - DNA, 2730 bp, Oryza sativa
  CDS (1)..(2730)
atggaagctccccgtcccagtgagctcgctcaaccctcacccactccgcctcaggaacaacctgtggatgccgctaccacgacgccgcaccatattccatcctcaagcaagtcaattaggtttcctttgcgcccggggaagggtaccattggcaccaggtgcatggtcaaggccaatcatttcttcgctcacctgcccaacaaggatcttcatcactacgatgtctccatcactccagaagttacatcacgcattgttaaccgagctgtgatcaaggagctggtaaatctgtacaaggcatcttatctgggtgggaggctgcctgcatatgatggtagaaagagcttatacacggctggcccattgccgtttacttcacaggagtttcagatcactttacttgacgacgatgatggttctggttctgagaggcgacagaggactttccgagtagtaatcaagttcgccgcacgggccgaccttcaccggcttgagttgtttttagctgggaggcacgcagaagctccacaggaggcactgcaagttcttgatattgtgctgcgagagctaccatcagcaagatatgcgccatttggacgttccttcttttcgccttacttgggtaggaggcaaccccttggtgagggattggaaagctggcgtggattttaccagagcattcggcctactcagatgggcttatcactgaatattgatatgtcagctacagctttcattgagccgttacctgttattgattttgttgcacaactattgaattctgacatccattcaaggtcgctttttgatgccgaacgtgttaagatcaagaaagccttgagaggagtaaaggtggaagttacccaccgtggcaacatgaggcggaagtaccggatatctggtttgacaattcagccaactcgtgagctaacttttcctgttgatgaaggaggcacagtgaagtcagttgtacagtactttcaagagacatatggctttgccatccaacacacctaccttccatgccttacagttcagcgattaaattacctgcctatggaggtctgcaaaatagtggaaggacagagatactccaagagattaaatcagaatcagataagagctcttttggaggagacatgccaacacccacgtgatcgggagcgtgatattattaagatggttaaacataacgcttatcaggatgatccttacgcaaaagagtttggcattaagataagtgatcgtctggcatcagtagaggcacgaattttaccggctccacggcttaagtacaatgagactggtcgagagaaggattgcttaccaagagttggtcaatggaatatgatgaacaagaaaatggtaaatggtggtaaagtcagaagctggatgtgcgtcaattttgcccgtaatgtgcaggaaagtgttgttcgtgggttctgccatgaacttgctctgatgtgtcaagcctcaggaatggatttcgctccagaacctattcttccaccactaaatgcacatccagatcaagtggagcgtgctctaaaagctaggtatcatgatgcaatgaacgttcttggaccccagcgcagggaacttgatttgcttattggaaaactacctgataacaatggctcgctttatggtgatttgaagcgcgtgtgtgaaatagatcttggaatagtttcacaatgctgttgcacgaagcaggtgttcaaaatgaacaaacaaattcttgcaaatcttgctctgaagataaatgtcaaggttgggggcaggaacactgtgctggtggatgctgtgtcaaggcgtattcctctggtaaccgacagacctacaattatatttggtgctgatgttacccatcctcatcctggagaggacagcagtccctcaattgctgctgttgtagcctcccaagattggcctgaggtgacaaagtatgctgggttggtttctgctcaagcccaccgacaagagctgatagaagatctatataaaatctggcaggatccacagagaggaacagttagtggtggcatgatccgtgagctgcttatatccttcaaaagatcaactggtgagaagccccagcgaataatattttacagggatggcgttagtgaaggccaattttaccaagttctactttatgaattgaatgcaatccgaaaagcatgtgcctccctggagacaaattaccaaccaaaggtgactttcattgtggttcagaaacgtcaccacacaagattatttgcacataatcacaacgatcagaactcagttgacaggagcgggaacatactccctggtacggttgtagattcaaagatctgtcatccaactgagtttgacttctacctgtgtagccatgctggcattaagggtactagtcgtccagctcattatcatgtcttgtggaatgaaaacaacttcacagctgatgcattgcagattcttaccaacaacctttgctacacctatgcaaggtgcactcgctctgtatcaattgttccacctgcttattatgctcatctggctgccttccgtgctcgtttctatatggaaccagatacatctgacagcagctctgtcgttagtgggcctggtgtacgtgggccactttctggctcatcaacatcacgtactcgggcccctggtggtgcagctgttaagccacttcctgctctgaaggatagtgtgaagagggtcatgttctactgctga

SEQ ID NO: 11459 - protein, 909 aa, Oryza sativa
MEAPRPSELAQPSPTPPQEQPVDAATTTPHHIPSSSKSIRFPLRPGKGTIGTRCMVKANHFFAHLPNKDLHHYDVSITPEVTSRIVNRAVIKELVNLYKASYLGGRLPAYDGRKSLYTAGPLPFTSQEFQITLLDDDDGSGSERRQRTFRVVIKFAARADLHRLELFLAGRHAEAPQEALQVLDIVLRELPSARYAPFGRSFFSPYLGRRQPLGEGLESWRGFYQSIRPTQMGLSLNIDMSATAFIEPLPVIDFVAQLLNSDIHSRSLFDAERVKIKKALRGVKVEVTHRGNMRRKYRISGLTIQPTRELTFPVDEGGTVKSVVQYFQETYGFAIQHTYLPCLTVQRLNYLPMEVCKIVEGQRYSKRLNQNQIRALLEETCQHPRDRERDIIKMVKHNAYQDDPYAKEFGIKISDRLASVEARILPAPRLKYNETGREKDCLPRVGQWNMMNKKMVNGGKVRSWMCVNFARNVQESVVRGFCHELALMCQASGMDFAPEPILPPLNAHPDQVERALKARYHDAMNVLGPQRRELDLLIGKLPDNNGSLYGDLKRVCEIDLGIVSQCCCTKQVFKMNKQILANLALKINVKVGGRNTVLVDAVSRRIPLVTDRPTIIFGADVTHPHPGEDSSPSIAAVVASQDWPEVTKYAGLVSAQAHRQELIEDLYKIWQDPQRGTVSGGMIRELLISFKRSTGEKPQRIIFYRDGVSEGQFYQVLLYELNAIRKACASLETNYQPKVTFIVVQKRHHTRLFAHNHNDQNSVDRSGNILPGTVVDSKICHPTEFDFYLCSHAGIKGTSRPAHYHVLWNENNFTADALQILTNNLCYTYARCTRSVSIVPPAYYAHLAAFRARFYMEPDTSDSSSVVSGPGVRGPLSGSSTSRTRAPGGAAVKPLPALKDSVKRVMFYC

SEQ ID NO: 11460 - DNA, 3279 bp, Zea mays
  CDS (1)..(3279)
atggtgaggaagaagagaactggccctggtggctctggagaaacttctggagagtcttcaggagcctctggacaaggttcctcacagcagcctgagcgaactcaacaacctgggggaggacgtggctgggtgcctcaacagggtggccatggtggtgggcaacaccagggtcgtgatcgacattatcagggacgtggaggaccagggccacatcaccttggtagtggggcacctgagtatcacccgcgtgaataccagggacgtggtggtgaatatcagggacatggtggtgagtaccagggacggggtggtgactaccagggacgtggtggtggccgctccagaggtggaatgccacagccatactatggtgggcataggggaggtaatgttggacgcaatgttcctccaggtccgtccaggacagttcccgagctgcaccaagccccatatgtccagtatccagccccggtggtttcgccctccccatcgggacctggctcatcctcacagcctatggcagaggtgagctctggacaagtccagcaacagtttcagcaacttgccgatcgtggtcagagttccacgagccaagaaattcaagtggcaccagcatcaagcaaatcggttcgattcccgttacggcccggcaagggcacttatggggacaggtgcattgtgaaggcaaatcatttttttgctgagcttcctgacaaagaccttcaccaatatgatgtatctataacacctgaggttacttcacgtggcgtcaatcgtgctgtcatgggtgagcttgtaacaatatatagacaatcccatttgggtgggcgtctacctgcatacgatggaagaaagagcctgtatactgctggaccattgccatttacttctatggcatttgaaattaccttgcaagatgaggaagatagtcttggcggtcgccaaggtggacataggcgtgagagagtatttagggtggtgatcaaatttgcagcccgtgctgatctccaccatctggctatgtttctagctggaaggcaagcagatgcccctcaggaagctcttcaagtgcttgacattgtactacgtgaattgcctaccgcgaggtattctcctgtcggtaggtcattttactctcccaacttagggagacgtcaaaaacttggtgagggattggaaagttggcgtggtttttaccaaagcataaggccgacacagatgggcctttcactgaatattgatatgtcctctactgcatttatcgagcctctccctgtgatcgattttgttgctcagcttcttaacagagatatctcagttaggccattgtctgattctgatcgcgtgaagattaaaaaagccctaagaggtgtgaaggttgaggtgactcacaggggaaacatgcgcagaaaatatcgcatttctggcctcacctcacaagcaacaagagagctatcgtatgtgtctttcattgctggtatgagattccctgttgatgatcgtggtactgtgaagactgtggtgcaatacttcatggagacttatggttttagtatccagcacaccactttaccatgcttgcaagtgggtaatcaacaaagaccaaattatctgcctatggaggtttgcaagatagttgaaggacagcgttactcaaagcgactcaatgagaaacaaatcactgctctactgaaagtgacctgccagcgccctcaagagcgcgagctggacatcttacagactgtgcatcacaatgcatactatgaagacccctatgcactggaatttggtataagaattgatgaacgtcttgctgcagttgaagctcgtgttctgccaccaccaagacttaaataccatgatagtggccgagagaaggatgttttgcccagagttggccaatggaacatgatgaataagaaaatggttaatggtggcagagtgagcaactgggcatgtattaacttctctcggaatgtgcaagatagtgccgctaggggtttctctcatgagttggcagtcatgtgccaaatatcaggaatggattttgctcttgagcctgtgctgcctccagtgactgcaaggccagaacatgttgagagagcgttaaaggcacgttatcaagatgcaatgaacatactgaggccacagggaagggaacttgatctgctgatcgtaatactgcctgacaacaatggttctctttatggggatctcaaaaggatctgtgagactgaactcggattggtctcccagtgttgtctgactaaacatgtttttaagatgagcaagcagtaccttgcaaatgttgcactcaaaataaatgttaaggttgggggaaggaatactgtacttttagatgctttgtcaaggagaatcccccttgtcagtgacagaccgaccataatatttggtgctgatgttacccatccacatcctggagaagattccagtccttccattgcagccgttgttgcttcgcaagactggcccgaggtcacgaaatacgctggactagtgagtgcgcaagcccatcgccaggagctgatacaggatcttttcaaagtatggcaggacccgcagagaaggacgggaacttctcatttctttcaagagggcaactggacagaagccccagaggatcatattctacagtttttgagtttcagggatggtgtcagtgagggacagttctatcaagtattgctgtacgaacttgatgccattagaaaggcctgtgcgtccctggagcccaactaccagcctccagttacttttgtcgtggtacagaagcgccatcacactaggctgtttgcgaacaaccacagtgatcagcgcacagtcgatagaagcggaaacatactgcctggcaccgtggtcgattcgaagatttgccatcctactgagtttgacttctacctgtgtagccatgctggcattcagggaacgagccgccctgctcactaccatgtcctgtgggacgagaacaagttcacagctgacgagctgcagaccctgacgaacaacctgtgctacacgtacgctaggtgcacccgctccgtgtccatcgtgcccccggcgtactacgctcatctggcagccttccgagctcgcttctacatggagccagacacctctgacagcgggtcactggccagcggtgcccgtggccccccacccggtgcggcacgcagcagcacgagaggggccgggagtgtcgaggtcaggcccctacctgctctcaaggagaacgtgaagcgtgtcatgttttactgctga

SEQ ID NO: 11461 - protein, 1092 aa, Zea mays
MVRKKRTGPGGSGETSGESSGASGQGSSQQPERTQQPGGGRGWVPQQGGHGGGQHQGRDRHYQGRGGPGPHHLGSGAPEYHPREYQGRGGEYQGHGGEYQGRGGDYQGRGGGRSRGGMPQPYYGGHRGGNVGRNVPPGPSRTVPELHQAPYVQYPAPVVSPSPSGPGSSSQPMAEVSSGQVQQQFQQLADRGQSSTSQEIQVAPASSKSVRFPLRPGKGTYGDRCIVKANHFFAELPDKDLHQYDVSITPEVTSRGVNRAVMGELVTIYRQSHLGGRLPAYDGRKSLYTAGPLPFTSMAFEITLQDEEDSLGGRQGGHRRERVFRVVIKFAARADLHHLAMFLAGRQADAPQEALQVLDIVLRELPTARYSPVGRSFYSPNLGRRQKLGEGLESWRGFYQSIRPTQMGLSLNIDMSSTAFIEPLPVIDFVAQLLNRDISVRPLSDSDRVKIKKALRGVKVEVTHRGNMRRKYRISGLTSQATRELSYVSFIAGMRFPVDDRGTVKTVVQYFMETYGFSIQHTTLPCLQVGNQQRPNYLPMEVCKIVEGQRYSKRLNEKQITALLKVTCQRPQERELDILQTVHHNAYYEDPYALEFGIRIDERLAAVEARVLPPPRLKYHDSGREKDVLPRVGQWNMMNKKMVNGGRVSNWACINFSRNVQDSAARGFSHELAVMCQISGMDFALEPVLPPVTARPEHVERALKARYQDAMNILRPQGRELDLLIVILPDNNGSLYGDLKRICETELGLVSQCCLTKHVFKMSKQYLANVALKINVKVGGRNTVLLDALSRRIPLVSDRPTIIFGADVTHPHPGEDSSPSIAAVVASQDWPEVTKYAGLVSAQAHRQELIQDLFKVWQDPQRRTGTSHFFQEGNWTEAPEDHILQFLSFRDGVSEGQFYQVLLYELDAIRKACASLEPNYQPPVTFVVVQKRHHTRLFANNHSDQRTVDRSGNILPGTVVDSKICHPTEFDFYLCSHAGIQGTSRPAHYHVLWDENKFTADELQTLTNNLCYTYARCTRSVSIVPPAYYAHLAAFRARFYMEPDTSDSGSLASGARGPPPGAARSSTRGAGSVEVRPLPALKENVKRVMFYC

SEQ ID NO: 11462 - DNA, 3237 bp, Zea mays
  CDS (1)..(3237)
atgctagtgcccatcatggtgaggaagaagagaactggccctggcggctctggagaaacttctggagagtcttcaggagcttctggacaaggttcctcacagcggcctgaacggactcaacaacctggggcaggacgtggctgggtgcctcagcagggtggccgtggtggcgggcaacaccagggtcgtggtggacattatcaaggccgtggagggccaggtccacatcaccctggtggactgcctgagtatcaccagcgtgaataccagggacgaggtggtgagtaccagggacagtaccaggggcgtggtggtgcccgctccagaggtggaatttcacagccatactatggtgggcataggggaggtagtgttggacgaaatgttcctccaggtccatccagaacagttcccgagctgcaccaagccccatacgtccagtatcaagccccggtgatttcaccatccccatcgggacctggctcatcctcacagcctatggcagaggtgagctctggacaagtccagcaacagtttgagcaacttgccattcatggtcagagttccatgagtcaagaagttcaagtggcaccagcatcaagcaaatcggttcgattcccattacgccccggcaagggcacttatggggacaggtgcattgtgaaggcgaatcatttttttgctgagcttcctgacaaagaccttcaccaatatgatgtaactataacacctgaagttacttcacgtggcgttaatcgtgctgtcatgggagagcttgtaacactatatagacaatcccatttgggcgggcgtctacctgcgtacgatggaagaaagagcctttataccgctggaccattgccttttacttctatgacatttgaaattaccttgcaagatgaggaagatagtgttggcggtggccagggcggacaaaggcgcgagagagtatttagggtggtgatcaaatttgcggcccgtgctgatctccatcatctggctatgtttctagctggaaggcaagcagacgctcctcaagaagctcttcaagtgcttgacattgtactacgtgaattgcctactgcgaggtattctcctgttggtaggtcattttattctcccaacttagggagacgtcagcaacttggtgagggtttggaaagttggcgcggtttttaccaaagcataaggccgacacagatgggcctttcactgaatattgatatgtcctctactgcatttatcgagcctctccctgtgattgattttgttgctcagcttcttaatagagatatttcagttaggccattgtctgattctgatcgcgtgaagatcaaaaaagccttaagaggtgtgaaggttgaggtcactcacaggggaaacatgcgcagaaagtatcgcatttctggcctcacctcacaagcaacaagagagctatcattccctgttgatgatcgtggtactgtgaagactgtggtccaatacttcatggagacttatggttttagcatccagcacaccactttaccgtgcttgcaagtgggcaatcaacaaagaccaaattatctgcctatggaggtttgcaagatagttgaaggacagcgttactcaaagcgactcaatgagaaacaaatcactgctttactgaaagtgacctgccagcgccctcaagagcgtgagctggacattttacagactgtgcatcacaatgcgtactatgaagacccgtatgcacaggaatttggtataagaattgatgaacgccttgctgcagttgaagctcgtgttctgccaccaccaaggcttaaataccatgatagtggccgagagaaggatgttttgcccagagttggccaatggaacatgatgaataagaaaatggtaaatggtggcagagtcagcaactgggcatgtattaacttctctcggaatgtgcaagatagtgccgctaggggtttctgtcatgaactggcaatcatgtgccaaatatcaggaatggatttttcccttgagcctgtgctgcctccagtgactgcaaggccagaacatgttgaaagagcgttgaaggcacgttatcaagatgcaatgaacatactgaggccacaggggagggaacttgatctgctgattgtaatactgcctgacattaatggttccttatatggggatctcaaaaggatctgtgagactgatctcggattggtctcccagtgttgtctgactaaacatgtttttaagatgagcaagcagtatcttgcaaatgttgcactcaaaataaatgttaaggttggtggaaggaatactgtacttgtagatgctttgacaaggagaatcccccttgtcagtgacagaccgaccataatatttggtgctgatgttacccatccacatcctggagaagattccagtccttccattgcagctgtggttgcttcgcaagactggcctgaggtcaccaaatatgctggactagtgagtgcccaagcccatcgccaggagctgatacaggatcttttcaaagtatggcaagatccacagagaaggacagtaactggtggcatgataaaggaacttctcatttctttcaagagagcaactggacagaagccccagaggatcatattctacagggatggtgtcagtgagggacagttctatcaagtattgttgtatgaacttgatgccatcagaaaggcatgtgcatccttggagcccaactaccagcctccagttacttttgtcgtggtgcagaaacgacatcacactaggctgtttgctaataaccacaacgatcagcgtacagttgatagaagcggaaacatactgcctggcaccgtggttgattcgaagatttgccatcctactgaatttgatttctacctgtgtagccatgctggcattcagggaacaagccgccctgctcattaccatgtcctgtgggacgagaacaagttcacagctgatgagctgcagactctgacaaacaacctatgctacacgtacgctaggtgcacccgctccgtgtcaattgtgcccccggcatactatgctcatctggcagccttccgagctcgcttctacatggagccagatacctctgacagtggctcaatggccagtggtgcccgtggccctccaccaggtgcggcacgcagcatgagaggagcggggagtgttgcggtcaggcccctacctgctctcaaggaaaacgtgaagcgtgtcatgttttactgctga

SEQ ID NO: 11463 - protein, 1078 aa, Zea mays
MLVPIMVRKKRTGPGGSGETSGESSGASGQGSSQRPERTQQPGAGRGWVPQQGGRGGGQHQGRGGHYQGRGGPGPHHPGGLPEYHQREYQGRGGEYQGQYQGRGGARSRGGISQPYYGGHRGGSVGRNVPPGPSRTVPELHQAPYVQYQAPVISPSPSGPGSSSQPMAEVSSGQVQQQFEQLAIHGQSSMSQEVQVAPASSKSVRFPLRPGKGTYGDRCIVKANHFFAELPDKDLHQYDVTITPEVTSRGVNRAVMGELVTLYRQSHLGGRLPAYDGRKSLYTAGPLPFTSMTFEITLQDEEDSVGGGQGGQRRERVFRVVIKFAARADLHHLAMFLAGRQADAPQEALQVLDIVLRELPTARYSPVGRSFYSPNLGRRQQLGEGLESWRGFYQSIRPTQMGLSLNIDMSSTAFIEPLPVIDFVAQLLNRDISVRPLSDSDRVKIKKALRGVKVEVTHRGNMRRKYRISGLTSQATRELSFPVDDRGTVKTVVQYFMETYGFSIQHTTLPCLQVGNQQRPNYLPMEVCKIVEGQRYSKRLNEKQITALLKVTCQRPQERELDILQTVHHNAYYEDPYAQEFGIRIDERLAAVEARVLPPPRLKYHDSGREKDVLPRVGQWNMMNKKMVNGGRVSNWACINFSRNVQDSAARGFCHELAIMCQISGMDFSLEPVLPPVTARPEHVERALKARYQDAMNILRPQGRELDLLIVILPDINGSLYGDLKRICETDLGLVSQCCLTKHVFKMSKQYLANVALKINVKVGGRNTVLVDALTRRIPLVSDRPTIIFGADVTHPHPGEDSSPSIAAVVASQDWPEVTKYAGLVSAQAHRQELIQDLFKVWQDPQRRTVTGGMIKELLISFKRATGQKPQRIIFYRDGVSEGQFYQVLLYELDAIRKACASLEPNYQPPVTFVVVQKRHHTRLFANNHNDQRTVDRSGNILPGTVVDSKICHPTEFDFYLCSHAGIQGTSRPAHYHVLWDENKFTADELQTLTNNLCYTYARCTRSVSIVPPAYYAHLAAFRARFYMEPDTSDSGSMASGARGPPPGAARSMRGAGSVAVRPLPALKENVKRVMFYC

SEQ ID NO: 11464 - DNA, 3042 bp, Zea mays
  CDS (1)..(3042)
atggcctctcgtgggcgcggtggtggcggagggaaaggccctagcggtgggcggggcggtgaaggcagggggcgggggatccgtggcgggggaggttaccatcacggcgacgatggaggcggcgaacgcggaggcagaggcgacccgggccgagggcgcggggtcggcggtcgtggccgcggtcccggaggccgaggtgtcgacgaccaccagcagcagccgccgccgctcgggaacacagagggcggaggccagggccgcggcggcatggcggtagcggtaccgccagcccgccccgccgcgccctgtcctctagcgccggacgccgctgccccggcatttcccgcagcagcggcctcgtcttctgcgcaagcgcctcgagcccccaccgaggcggctggagctgccttggcggatggcatggggaagttggccgtggcggacgaccggcccgctgctcctcccgtgcccgcaggtaaacccgtcgcgcaaggtcccgcgcaccagccccaggaggctccgccactctcgaggaagaggatcgtgccgccgccccgccccggtttaggcacgtctgggagaaagctggcggttcgcgcgaaccacttctttgtcgaggtgtccgtgaacgacatcttccattacgacgttttaatcaatcctgaaccaaaagcaagaaaaaccaacaggatgctgctctcagagcttgtcaagatacatggcgcgacatctctcgcccacaagacacctgcatatgatggaagcaagagcctgtacactgcaggcgagctgccgttcaaatcaatggagtttgttgtcaagttggggaaggcgggccgagaagttgactacaaggtgacaatccgatacgcggcacggcctaacgtgtaccaacttaagcaattgatcaattctcagctaaggaacacgccatttgacgcaatccaagcactggatgttgtcttgagagagtcgccttctctcaactatgtaactctttctcgatccttcttctccaagaagttcggtgatgacgacattggcggtgggctagagtgctggagaggatattaccagagcttgcgtccaactcaaatgggcctctcattgaacattgatacatgctcgacttcattttaccaacctatcgatgtggtaaaatttgttgccgattgtctccagctgacaaaccctggccaaccttttttggacagggatcgtttaaagcttaagagagccctgcgcggagttcttgttgagactgaacaccagcagggaaagagaagcatctacaggataactgggattacttctgttccattggctcaactgagcttttcttgtaacgaaggccctcagctgactgttgttgagtactttgcacaacggtacaatgtccagctgcgctacactgcttggccctgcctgcagtcgggcaatgattctaagccgatatatttaccaatggaggtgtgcaaaatcattgaagggcagaagtaccctaggaagctcagcgacacacaggtggccaacatactgaaggcaacctgtaaacgtcctcaggatagggaggagaacattattaagatggttcgccacaacaactattctgctgataagatggcacaggtgtttgggatcactgtggccaaccagatggctaatgtgcaagcccgtgttctgcctccacctatgctgaaataccacgaatctggaaaggagaaaaccgttgcaccaagcttggggcaatggaatatgattaacaagaaaatggtcaatggtggaaccattcacagctggacttgtctgagcttttcgcggatcccgcttcgtttggtagacgaaatatgccatgaattggttcaaaagtgcaattccattggcatgagtttcaatccaaggccggtgacagaagttcagaaagactcacacaacaacatagaagctgctttaagggatgttcacaggagggctccgaatctgcagctgcttattgtgattcttccagatgttactggttattatggggaaattaagaggatgtgcgagactgaccttggtatagtatctcagtgcatcaatccgaagaagaatagaaacaagcagtattttgaaaatcttgcccttaaaatcaatgtgaaggctggagggcgcaatacagtgcttgagagagcctctgtgcctaatgggataccttttgtctcagatgtgccaacaatcatttttggtgctgatgttacccatcctacagcaggagaagaatcctcggcttctgttggagctgtggttgcatccatggactggccacaggtcacaacatataaagctctggtctcggcacaagcacacagggaagagattatacaaaatctcggcggaatgataagggagttgctgatttcgttctataagaggactggcaaaaagcccaaaaggattatattttacagggatggaataagtgaaggacaattcaaccatgttttgctccttgaaatggacgcgataaggaaggcttgtgcctctctggaagatgggtatctacccccagtgacatttgtcgtaatacagaaaaggcaccacacaaggctcttccctggagttcatggaaggagagatgttactgacagaagtgggaacattcttcctggaactgtggttgataccgagatttgtcatccgcgggagtttgatttctacctttgtagccatgctggaattcagggaaccagcaggccaatacactatcatgtcctctacgatgaaaaccgtttctcggctgatgggctgcagatactcacaaacagcctgtgctacacatacgcacgatgcacgcgcgctgtctcagttgttccaccagcctactacgctcacctggcagcattccgcgggaggtactacgacgaacaaggtagcagccccgcccccgatggaacctcagttgtcggtggcgatgccgctgcagccggtgatgatccacctgcgtgccgcaggctcccccagatcaaggagaatgtgaaggaagtgatgttcttctgctag

SEQ ID NO: 11465 - protein, 1013 aa, Zea mays
MASRGRGGGGGKGPSGGRGGEGRGRGIRGGGGYHHGDDGGGERGGRGDPGRGRGVGGRGRGPGGRGVDDHQQQPPPLGNTEGGGQGRGGMAVAVPPARPAAPCPLAPDAAAPAFPAAAASSSAQAPRAPTEAAGAALADGMGKLAVADDRPAAPPVPAGKPVAQGPAHQPQEAPPLSRKRIVPPPRPGLGTSGRKLAVRANHFFVEVSVNDIFHYDVLINPEPKARKTNRMLLSELVKIHGATSLAHKTPAYDGSKSLYTAGELPFKSMEFVVKLGKAGREVDYKVTIRYAARPNVYQLKQLINSQLRNTPFDAIQALDVVLRESPSLNYVTLSRSFFSKKFGDDDIGGGLECWRGYYQSLRPTQMGLSLNIDTCSTSFYQPIDVVKFVADCLQLTNPGQPFLDRDRLKLKRALRGVLVETEHQQGKRSIYRITGITSVPLAQLSFSCNEGPQLTVVEYFAQRYNVQLRYTAWPCLQSGNDSKPIYLPMEVCKIIEGQKYPRKLSDTQVANILKATCKRPQDREENIIKMVRHNNYSADKMAQVFGITVANQMANVQARVLPPPMLKYHESGKEKTVAPSLGQWNMINKKMVNGGTIHSWTCLSFSRIPLRLVDEICHELVQKCNSIGMSFNPRPVTEVQKDSHNNIEAALRDVHRRAPNLQLLIVILPDVTGYYGEIKRMCETDLGIVSQCINPKKNRNKQYFENLALKINVKAGGRNTVLERASVPNGIPFVSDVPTIIFGADVTHPTAGEESSASVGAVVASMDWPQVTTYKALVSAQAHREEIIQNLGGMIRELLISFYKRTGKKPKRIIFYRDGISEGQFNHVLLLEMDAIRKACASLEDGYLPPVTFVVIQKRHHTRLFPGVHGRRDVTDRSGNILPGTVVDTEICHPREFDFYLCSHAGIQGTSRPIHYHVLYDENRFSADGLQILTNSLCYTYARCTRAVSVVPPAYYAHLAAFRGRYYDEQGSSPAPDGTSVVGGDAAAAGDDPPACRRLPQIKENVKEVMFFC

SEQ ID NO: 11466 - DNA, 3162 bp, Zea mays
  CDS (1)..(3162)
atggcgagccatcagcgcggaggaggtcgggttggcggcggcggctggggtcaggcgaaccccaacgttattcagggccaggcggggcggggctacggcggcggtcgaggtggtcagtactacggcgacgacagccgcggtcgaggtggtcagtactacggcgacgacagcggcggacgtggcggcggcaggggcggtggtcgtggcttcgacggccgcgacggcggcggataccaggaaggtcgtggcgggggccgcggcggcggcggataccaggaagggcgtggcgggggccgcggcggcggcagataccaggaaggacgtggtggtggccggggtggcggcggctactactatgaaggacgtggcggggaccgtggtggcggcggctactatggaggacatggtgggggctaccaggaaggccgtggcgggggccgaggtggtcgcggctaccagggacagggaggcagcgactacggccgcgagcgcgggcatggcggcctacaaaccccacgtcctgctctgcgccaagccggtccgcccctcgcggaccgctacgcggccgacgcagccgcgttgagggacaagttcaagacgatggacattcaccgcgacgagcccatgtttccagcgcgcccgggcttcggcgccgtggggacgccgtgcgtcgtcaaggccaaccacttctttgtcggcctcgtcgaaaagggcctgcaccactacgacgtggccatctcaccagagacgacgctaaggggcatatacaggcaagtcatgtcgaagctggtttccgagaaccggcagaccgagcttggcggccgcctgcctgcatacgacgggcagaagtcactgttcaccgccggagagctgcccttcaagaccaaggaattcgttgtcaccttgtctggcaggatggaaaggaggtacaaggtggtgatcaagcatgccacggcggtcagcctcgaccagctgttgatgctcatggcagggtacccaacggacatcccggcgcaggcgctgcaggtgcttgacattgtgctgcgtgacattgtgctcaacgaacgcaacaccatggagtacgttgcagttggccggtccttcttctcaccactcatagactcaatgggacccaagaaccttggcttgggtgtggagggatggaagggtttctatcagaccatcaggccgacacaaaaaggcttatctgtgatcatagacatttcttcatcagctttcattcgacccctgccactgattgactttgttatggagattctgaacaaagataacaggacctttagaagtattacttccatggatcttgtcaagctcaagaaagccctcaagggtatgaggattgaagtcacacaccgaggagacatacgccggaagtaccgaattgccagcttgacaaacagtcctccatcttcacagttctttgaatcatctgctggagttcagaagtccgtagcagattacttcagagaggcataccatctggaaatgcactatgattttctcccatgcctccaagttggcagtgatcagaggccgaattacctccctatggaggtttgcaagatagtagctggacagcaataccggaagaagttggaaggccaacaggtctctaaactaatggactccacctgccagcgcccatctctccgcgaggacaacatttgtcagattgttgagcaaaatgactacaataaaactgagcgtgcaagtgaatttggcatggaggttgattatcgtcctacttcagtgcaggctagagttctgccagctcccactctgaagtaccgtggcactggatctgacagtttgtgttgtccaaaggatggtcagtggaacatgataaaaaagcaagtagtagatggtgcaagggtgggcaactgggcctgcgttaacttttgtcaagagttgcgtgcagatggtgttggtaaattttgctctgatctggtcaagtggtctcgcactactggagtggacatggataacttgagacttccaatatataccgctcgtcctgaacaagctgaaactgatcttcgtaggctctatcaggatgctcggaacaagctaagagggcaaaagtttgatcttttgcttgctatactgccagagaaaaatggcagcttatatggtaatttcaaaaggatctgcgagacagagattggtatcatgtcgcagtgttgtttggataaaaatgttagaagtgcaggccctgcatattttgctaatgttgctattaagatcaatgccaagtttggaggaagaaacttagaatttgctaatcccaaagaaagcttaccgggtgttacaattgaaccaacaattatatttggtgctgatgtcactcaccctgccgctctagatgataccgccccttccattgcttctgttgttgcctcccaagactggcccaaggtggctaactataatgggattgtccgtgcacaaggtcatcgtaaagagctcatcaatggcctggaagacattgtcaaggaactcctacttgcattcgaggagaggtctaagcggagacccaagcagctgatcttctacagggatggcgtaagtgagggccaattcaaacaagtgctggaacaagaaatccctgagatagagaaggcatggaaagctctttacaatgagaagccaaagatcaccttcctagtggtgcagaagaggcaccacacaaggctcttcccaaacaacccaaatgatcgccaatgggcggacaagagtggaaatattctacctggcactgttgttgacaaggatatctgccacccaacagaatttgatttcttcctgtgcagccatgctgggatcaagggaactagccgtcctgcgcattaccatgtcctgagagacgacaacaacttcactgcagacgcgctgcagtctctcacatataacctatgcttcttgtattcaagctgcactcgctctgtgtcaatcgctcccccagcatactacgcccacaagttagcgttccgcgcccgcttctacgtcaaccaagactctgatgcggcgacaagtgtcggctcttatggttcatcagctccctctgctgctgctgctgctgctggtccgaagccgcttccggagatcaagggtgaactgagaaggctcatgttctactgctag

SEQ ID NO: 11467 - protein, 1053 aa, Zea mays
MASHQRGGGRVGGGGWGQANPNVIQGQAGRGYGGGRGGQYYGDDSRGRGGQYYGDDSGGRGGGRGGGRGFDGRDGGGYQEGRGGGRGGGGYQEGRGGGRGGGRYQEGRGGGRGGGGYYYEGRGGDRGGGGYYGGHGGGYQEGRGGGRGGRGYQGQGGSDYGRERGHGGLQTPRPALRQAGPPLADRYAADAAALRDKFKTMDIHRDEPMFPARPGFGAVGTPCVVKANHFFVGLVEKGLHHYDVAISPETTLRGIYRQVMSKLVSENRQTELGGRLPAYDGQKSLFTAGELPFKTKEFVVTLSGRMERRYKVVIKHATAVSLDQLLMLMAGYPTDIPAQALQVLDIVLRDIVLNERNTMEYVAVGRSFFSPLIDSMGPKNLGLGVEGWKGFYQTIRPTQKGLSVIIDISSSAFIRPLPLIDFVMEILNKDNRTFRSITSMDLVKLKKALKGMRIEVTHRGDIRRKYRIASLTNSPPSSQFFESSAGVQKSVADYFREAYHLEMHYDFLPCLQVGSDQRPNYLPMEVCKIVAGQQYRKKLEGQQVSKLMDSTCQRPSLREDNICQIVEQNDYNKTERASEFGMEVDYRPTSVQARVLPAPTLKYRGTGSDSLCCPKDGQWNMIKKQVVDGARVGNWACVNFCQELRADGVGKFCSDLVKWSRTTGVDMDNLRLPIYTARPEQAETDLRRLYQDARNKLRGQKFDLLLAILPEKNGSLYGNFKRICETEIGIMSQCCLDKNVRSAGPAYFANVAIKINAKFGGRNLEFANPKESLPGVTIEPTIIFGADVTHPAALDDTAPSIASVVASQDWPKVANYNGIVRAQGHRKELINGLEDIVKELLLAFEERSKRRPKQLIFYRDGVSEGQFKQVLEQEIPEIEKAWKALYNEKPKITFLVVQKRHHTRLFPNNPNDRQWADKSGNILPGTVVDKDICHPTEFDFFLCSHAGIKGTSRPAHYHVLRDDNNFTADALQSLTYNLCFLYSSCTRSVSIAPPAYYAHKLAFRARFYVNQDSDAATSVGSYGSSAPSAAAAAAGPKPLPEIKGELRRLMFYC

SEQ ID NO: 11468 - DNA, 2901 bp, Zea mays
  CDS (1)..(2901)
atgctcgaggtcctggacatggcgccgccgccaccaccgccgccgccgccgccgcatgcgcggcaccatcagggggcagccaagggcggccacgcggagcggaggaagcaaccgctgcagagcagcgtgacgcagcccaaggcggaaccggcggcggcggcggcggcggccgtgctgccggagggaggcaagaggtgcggaggaggcggcgggaggcgccgcggcgggcgcggccgggccaaggcaccacctggtgagcctcgcgtcgcgctagcgctggcgcctccgccgcgcacggtcattggcccgcccgtgccgagcaaggggctgtcgttctgccgccgccccggattcgggaccgtgggcgcgcgctgcgtcgtcaaggccaaccacttcctcgccgagctcccggacaaggacctcatccagtatgatgtgaagatcacgccggaggtgagctcgcggaccgtgaaccgggccataatggctgagctggtccgcctctaccgctcgtccgacctggggatgcggctcccggcctacgacggccgcaagaatctctacaccgccgggaccctcccgttcgacgctcgcgagttcgtcgtgcggctcaccgatgaggacgacggcaccggcgtcccgcctcgggagagggagtacagggtcgccatcaagttcgccgcgcgcgccgacctccaccacctcaggcagttcatcgccggacggcaggcggacgcgccgcaggaagccctacaggtactcgacatcgtgctccgcgagctcgccaaccagaggtacgtgtccatagggcggtccttctactcgccggacatcaggaagccgcagcggctcggcgacggcctgcagtcatggtgtgggttctaccagagcatccggccgacccagatgggattgtcactcaacatcgacatgtcgtccacggcgtttattgaacccctgccggtgatcgagttcgtggcccagatattaggaaaggatgtcatatcaaggccattggccgatgctaaccgaatcaagatcaagaaggcattacggggcgtaaaagttgaggtcacgcaccgggggaatgtaaggcgcaagtatcgcatatctgggctcacaacacagccaactcatgaactgattttcccaattgatgaacaaatgaatatgaaatctgtcgtggagtacttcaaggaaatgtatggtttcaccattcagcatcctcatcttccttgccttcaggttggaaaccaaaagaaggcgaactatttaccaatggaggcctgcaagatcgttgaaggccagagatacacgaagaggttgaatgaaaaacagatcacatcgttgctaaaggttacatgccaaaggcctcgagaacaagagatggatattttacagacagttcatcaaaatggatatgagcaagatccatatgcgaaggaatttgggatcaacattagtgagaagctaacctatgttgaagcccgagtccttcctgcaccttggctgaagtatcatgacactggaaaagagaaagagtgcttaccacaggttggtcagtggaacatggtaaacaagaaagtgataaacggatgcaaggtgagccactgggcatgtataaacttctcaaggagtgttccagaagccacagctcggggattttgccaggaattggcacaaatgtgtcaaatttcgggcatggaatttaacagtgagcccgtgatgccaatatattcagctagaccagatcaagtagtgaaggcacttaaaagtgtgtataatattgcactgaacaaactcaagggtaaagaacttgaacttcttctggctatactccccgacaacaatggtccgttatatggtgacatcaaacgtatttgtgaaactgatttgggattgatatcacaatgttgcttaaccaagcatgtttttaagatcagcaaacagtacttggcaaatgtctcactgaaaattaatgttaagatgggaggaagaaacactgtgctcctggacgcaataagttggagcattcctttggtcagtgacatcccaactattatatttggtgcagatgtaacacaccctgaaaccggggaggactcaagtccatcaatcgctgccgttgttgcttctcaagattggccagaagttacaaagtatgctggattggtttgtgctcaggcacaccggcaagagctcattcaggacctttacaaaacatggcacgatcctcagagaggcactgtaacaggcggcatgatcagggagctgttaatatccttcaggaaggccactgggcagaagccattgagaataatattctacagggacggtgttagtgaaggccagttctatcaagttctcctttacgagttagatgccatccgtaaggcatgcgcatccctagaaccaaattaccagcctcctgtaacatttgtggtggttcaaaaacgtcatcatacgagactatttacaaacaatcacaaagacagaagtagcatggacaagagtggaaatattttgccaggaactgttgttgattctaagatatgccacccaacagagtttgatttctacctctgtagtcatgctggaatccagggaacaagtaggcccgctcactaccatgtcctctgggatgagaacaatttcacagcagacgaaatgcaaacactgacaaacaacctttgctacacttatgcccggtgcacacgctcggtttctgttgtccctcctgcatactacgcacacctggcagcattccgggcgcggttctacatggaaccagagatgtcggagaaccagacgtcgaagagctccaatggcacgaacggaggcttggtgaagcccctgcctgctgtgaaggagaaggtgaaaagggtgatgttctactgctga

SEQ ID NO: 11469 - protein, 966 aa, Zea mays
MLEVLDMAPPPPPPPPPPHARHHQGAAKGGHAERRKQPLQSSVTQPKAEPAAAAAAAVLPEGGKRCGGGGGRRRGGRGRAKAPPGEPRVALALAPPPRTVIGPPVPSKGLSFCRRPGFGTVGARCVVKANHFLAELPDKDLIQYDVKITPEVSSRTVNRAIMAELVRLYRSSDLGMRLPAYDGRKNLYTAGTLPFDAREFVVRLTDEDDGTGVPPREREYRVAIKFAARADLHHLRQFIAGRQADAPQEALQVLDIVLRELANQRYVSIGRSFYSPDIRKPQRLGDGLQSWCGFYQSIRPTQMGLSLNIDMSSTAFIEPLPVIEFVAQILGKDVISRPLADANRIKIKKALRGVKVEVTHRGNVRRKYRISGLTTQPTHELIFPIDEQMNMKSVVEYFKEMYGFTIQHPHLPCLQVGNQKKANYLPMEACKIVEGQRYTKRLNEKQITSLLKVTCQRPREQEMDILQTVHQNGYEQDPYAKEFGINISEKLTYVEARVLPAPWLKYHDTGKEKECLPQVGQWNMVNKKVINGCKVSHWACINFSRSVPEATARGFCQELAQMCQISGMEFNSEPVMPIYSARPDQVVKALKSVYNIALNKLKGKELELLLAILPDNNGPLYGDIKRICETDLGLISQCCLTKHVFKISKQYLANVSLKINVKMGGRNTVLLDAISWSIPLVSDIPTIIFGADVTHPETGEDSSPSIAAVVASQDWPEVTKYAGLVCAQAHRQELIQDLYKTWHDPQRGTVTGGMIRELLISFRKATGQKPLRIIFYRDGVSEGQFYQVLLYELDAIRKACASLEPNYQPPVTFVVVQKRHHTRLFTNNHKDRSSMDKSGNILPGTVVDSKICHPTEFDFYLCSHAGIQGTSRPAHYHVLWDENNFTADEMQTLTNNLCYTYARCTRSVSVVPPAYYAHLAAFRARFYMEPEMSENQTSKSSNGTNGGLVKPLPAVKEKVKRVMFYC

SEQ ID NO: 11470 - DNA, 2733 bp, Zea mays
  CDS (1)..(2733)
atgggctctcatgatggcgaggatgaagagttgccacccccccctccggtgccaccagatgtgattcccattaaagctgaagatgctgtgggtgaatcaccagcaaaccatatattaaagccaaagagattactgatggacaggcctggtataggaagaaaagggcagccgacccagctctattcaaatcactttaaagtcgctgtgaagagtacagaagacgtcttctttcactactatgtaaacctgaagtatgaggatgatcgacccgttgatggtaaagggatcggcagaaaggtgattgataaactgcagcagacatatcgtgcagagctttctaacaaggactttgcatatgatggagaaaagagcctgtttacagttggtggtcttccacaaaaaaagaatgagttcaccgttgtcttggaggacgtatctactggaaagactgctgccaatgggagccctggaggtaatgacagtcctggaggtggtgataggaagagagtgaggaggccataccagacgaaaactttcaaagtggagataaattttgcagcagaggttcctatgagtgctattggtcaagtcattagaggcgaagaatctgagaactccctggaggcgcttcgtgttcttgatatcatactgaggcagcattccgcagaacaaggctgccttttggttaagcaatcatttttctacaacaacccttcatgctttgttgacttgggtggtggtgtgatgggttgtcgtggatttcattcaagcttccgtggcacacagagtggactttccctcaatgttgatgtctcaacaacaatgatcgtgaaacctggccctgttattgattttcttctttctaaccagaatgttaatgatcctagcagaattgattggcaaaaggccaagcgtgctctcaagggcttgaggattagaaccactcctgcaaattcagaattcaagatttttggtctcagcgagaggatctgcaaagaacaaacgtttccgctgaggcagagaaatggtagcaacggagattgtgataccattgaaataactgtctatgactactatgcaaagaaaggaatcgatctaaagtattctggtgatttcccctgtataaatacagggaaggcaaagcgcccaacatattttccaatcgagctatgctcgcttgttccgcttcaaagatacaccaaagctttgtctacgctacaaaggtcatcccttgtggagaagtctagacagaagcctgaagaaaggatgaccgttctaaatgatgcactgcaacgcagtaactacgattctgaccccatgttgagggcatgtggtgtttcagttgctccaaaatttacccaagttgaaggaaggatccttcaagccccaaagctgaaagccggcaatggtgatgatatcttttcacgaaatggacggtggaatttcactaataggaagttttatgaaacctgctctgtgaataagtgggcggtcgttaatttctctgcacgttgtgatgttcggaatcttatccgtgacctgatgaggaatgcatctgcaaagggaattcaaatggaggaaccttttgatgtgtttgaagagagtccctctatgaggcgtgcacctgtgtcaagaagggtggatgatatgtttgggcagataaaatcaaaacttcctggagctcctaggttcctcttgtgccttctccctgagaggaaaaattgtgaaatctatggtccttggaagagaaagtgcctggccgagtttggtattgtcacacagtgtctagctccattaagagtcaatgatccgtacctgcttaatttgctgatgaagatcaatgcaaagcttggtggtctgaactcgttgctgcaagttgaagcatcttcgtcaataccacatgtgtcgcaagtacccaccatcatcttaggtatggatgtttcacatggtcatccaggacaagatagaccttcggttgcagcggtggttagttctcgtcaatggcctcttatctctagatatagagcatcagtgcacacccaatctgccagactagaaatgatgtcctcgttgtttaagccgcggggtactgatgatgatggcctcatccgggaatcactgatcgacttctacactagctctggaaagcgaaaaccagaacacataattattttcagggatggagtcagtgaaagtcagtttacccaggtcatcaacattgagctggatcagatcatcgaggcatgtaagtttctggatgagaagtggtcacccaagttcactgtgattgttgctcaaaagaaccaccacaccaagttctttcagacggcatcaccagacaatgttcttcctggaactgtggtggatagtaaagtttgccatcctaagaacttcgacttctacatgtgtgcacatgctgggatgattggaacaacaaggccgacccactatcatgttctgcacgacgagataggtttcagtgccgacgagatgcaggagtttgttcattcgctctcttacgtgtaccagaggagcacgacagccatctcagtggttgctccagtgtgctacgcccacctcgctgcagcccaggtgagcacgttcctgagattggaggagatgtcagacgcgtcctccagccagggaggagggcatacctcggctggcagtgctcctgtgccggagctgcctcgcctgcatgacaaagtcaggagctccatgttcttctgctag

SEQ ID NO: 11471 - protein, 910 aa, Zea mays
MGSHDGEDEELPPPPPVPPDVIPIKAEDAVGESPANHILKPKRLLMDRPGIGRKGQPTQLYSNHFKVAVKSTEDVFFHYYVNLKYEDDRPVDGKGIGRKVIDKLQQTYRAELSNKDFAYDGEKSLFTVGGLPQKKNEFTVVLEDVSTGKTAANGSPGGNDSPGGGDRKRVRRPYQTKTFKVEINFAAEVPMSAIGQVIRGEESENSLEALRVLDIILRQHSAEQGCLLVKQSFFYNNPSCFVDLGGGVMGCRGFHSSFRGTQSGLSLNVDVSTTMIVKPGPVIDFLLSNQNVNDPSRIDWQKAKRALKGLRIRTTPANSEFKIFGLSERICKEQTFPLRQRNGSNGDCDTIEITVYDYYAKKGIDLKYSGDFPCINTGKAKRPTYFPIELCSLVPLQRYTKALSTLQRSSLVEKSRQKPEERMTVLNDALQRSNYDSDPMLRACGVSVAPKFTQVEGRILQAPKLKAGNGDDIFSRNGRWNFTNRKFYETCSVNKWAVVNFSARCDVRNLIRDLMRNASAKGIQMEEPFDVFEESPSMRRAPVSRRVDDMFGQIKSKLPGAPRFLLCLLPERKNCEIYGPWKRKCLAEFGIVTQCLAPLRVNDPYLLNLLMKINAKLGGLNSLLQVEASSSIPHVSQVPTIILGMDVSHGHPGQDRPSVAAVVSSRQWPLISRYRASVHTQSARLEMMSSLFKPRGTDDDGLIRESLIDFYTSSGKRKPEHIIIFRDGVSESQFTQVINIELDQIIEACKFLDEKWSPKFTVIVAQKNHHTKFFQTASPDNVLPGTVVDSKVCHPKNFDFYMCAHAGMIGTTRPTHYHVLHDEIGFSADEMQEFVHSLSYVYQRSTTAISVVAPVCYAHLAAAQVSTFLRLEEMSDASSSQGGGHTSAGSAPVPELPRLHDKVRSSMFFC

SEQ ID NO: 11472 - DNA, 3084 bp, Zea mays
  CDS (1)..(3084)
atgtatattactcaaccaaaaaaaaagcgcattgagtttgtcagtttcactgcccacggcatgggatcttggagacaaaaactgcctgggttaggcgagggctcaggctcaggctcacaggctgctgaggccggcggtggtgggagaggtttccgtggccgtggtggcttctaccatcaacagcagtccccacaaggtggtcgtggtcgtggaactggctactacagtggtggtggtggtggtagaggtggacgtggggcagtcccgtccgccatagctcccgagctgcgccaagcaatgcaaacttcaaatgaacctgataacatcccagcgccagaggcaggctcccagtcccaggatgcgccgtcaccaagcgaagaggctgtggatcagctgaaaggcttgtctgtacaggacattgtgcaggcgtttccagtgtcgagcaagttccctcaccgcccaggaaatggaagcgttggcaccaggtgtttggtgaaggcaaatcacttctttgctgaattattacctgccaagaaggatcttcatcagtatgatgtttcagttaccccggaagtgacatcgcgaattgtgaaccgttctgtcatggaggagctggtgaggctgcacaagctgtcatatttgggaggtcggcttccagcctatgatggtagaaagagcctgtacacggctggacccctgccattcacttcgaaagaatttcacatcactctactcgaggaagacgatggttctggagtagagaggcgtaagaagacatacaaggtagtgattaaatttgccgcaagggctgacctccggcgtctggagcagtttttagctggaaggcaggcagaggctcctcaagaagccttgcaagttcttgatattgttctgcgggagctgccgacaacaagatatgcaccgtttgggcgatcgtttttctctcctgacctggggaggaggcgttcccttggtgagggaatagaaagctggcgtgggttttaccagagcattcgccctactcaaatgggcttgtcattgaatattgatatgtctgcaactgctttctttgagccattacctgtcatagattttgttgcacagcttttaaacaccgacgacatctactcgaggcccctcttagacgctgaacgtgtcaagataaagaaggccttaagaggcgtgaaggtggaagttacgcaccgtggtaacatgcgacgcaagtatcgaatagctggtttaacatctcaggaaactcgggagctaacttttcctgttgatcaaggtggcacagtgaagtcagttgtacagtattttcaagagacctatggctttgccatccagcacacctacctgccctgtctgcaggttggcaaccagcagcacccaaattaccttccaatggaggtctgcaagatagtggagggacagaggtactctaagagattaaaccagagtcagataagagctcttttagaggagacatgccaacgcccacatgatcgtgagcgcgacattattcagatgatgaatcataactcttaccatgaggatccttatgctaaagagtttggcattaagatcagcgagcgtttggcttcgattgaggcacggattttacctgctcctcggctcaaatataatgaaaccggcagagagaaggactgtttgcctagagttgggcagtggaatatgatgaacaagaaaatggtaaacggtggcagagtgaggagctggacctgtgtgaattttgctcggaatgtgcaagagaatgttgctattggattctgccgtgaacttgctcggatgtgccaggcctcgggaatggacttcgcgctggagcctatccttccgcctatatacgcgcatcctgataaagtggagagagctctgaaagccaggttccatgacgcgatgaacttgctcggaccacagcgcagagaacaactcgacttgctgctcattggaatactccctgataacaacggttctctttatggtgatctgaagcgtatctgtgaaatcgaccttggattagtttcccagtgctgctgcgcaaagcaagtctttaagatgaacaagcagatactggcaaaccttgcgctgaagataaatgtcaaggtcggaggaaggaacacggtgctggctgatgcggtgtcaagacgcattcccttggtgactgacaggcctaccatcatattcggtgccgatgtgacccatcctcatcctggagaagatagcagcccttccattgctgctgttgtggcttcccaagactggcctgaggtgacaaagtatgctggtctagtttctgctcagtctcataggcaagagctgatagaggatctctacaacgtcacacacgatcctcagaaaggaaccgtttgtggtggcatggtcagggagcttcttatatccttcaaaaaatcaactggtcaaaagcctcagaggatactattctacagggatggtgtgagtgaagggcagttctaccaagttctactgcatgaactggatgctatccgaaaggcgtgtgcatcgctggaagcaaactaccaaccgcaggtgactttcatcgtcgtccagaaacgccaccataccaggctgttcgcgcacaaccacaacgaccagaattcggtcgacaggagcggcaacatacttcctggaactgtcgtggactcgaagatctgccaccctacagagttcgacttcttcctgtgcagccatgctggcatcaagggcaccagccgtcctgctcactaccatgtcttgtgggacgagaacaacttcacagccgacgcactgcagaccctcaccaacaacctttgctacacctacgcgaggtgcacgcgctctgtgtccattgtcccgccggcgtactacgctcacctggccgcattccgcgcccggttctacatggagcctgacagctcagacagcgggtcgctggcgagtggcgcccgtggaggcggagcgccctccagctcgtcaacgtcccgcagcacccgcgccaccgccggcggagccgttagacccctccccgcgctcaaggacagcgtcaagaaggtcatgttctactgctga

SEQ ID NO: 11473 - protein, 1027 aa, Zea mays
MYITQPKKKRIEFVSFTAHGMGSWRQKLPGLGEGSGSGSQAAEAGGGGRGFRGRGGFYHQQQSPQGGRGRGTGYYSGGGGGRGGRGAVPSAIAPELRQAMQTSNEPDNIPAPEAGSQSQDAPSPSEEAVDQLKGLSVQDIVQAFPVSSKFPHRPGNGSVGTRCLVKANHFFAELLPAKKDLHQYDVSVTPEVTSRIVNRSVMEELVRLHKLSYLGGRLPAYDGRKSLYTAGPLPFTSKEFHITLLEEDDGSGVERRKKTYKVVIKFAARADLRRLEQFLAGRQAEAPQEALQVLDIVLRELPTTRYAPFGRSFFSPDLGRRRSLGEGIESWRGFYQSIRPTQMGLSLNIDMSATAFFEPLPVIDFVAQLLNTDDIYSRPLLDAERVKIKKALRGVKVEVTHRGNMRRKYRIAGLTSQETRELTFPVDQGGTVKSVVQYFQETYGFAIQHTYLPCLQVGNQQHPNYLPMEVCKIVEGQRYSKRLNQSQIRALLEETCQRPHDRERDIIQMMNHNSYHEDPYAKEFGIKISERLASIEARILPAPRLKYNETGREKDCLPRVGQWNMMNKKMVNGGRVRSWTCVNFARNVQENVAIGFCRELARMCQASGMDFALEPILPPIYAHPDKVERALKARFHDAMNLLGPQRREQLDLLLIGILPDNNGSLYGDLKRICEIDLGLVSQCCCAKQVFKMNKQILANLALKINVKVGGRNTVLADAVSRRIPLVTDRPTIIFGADVTHPHPGEDSSPSIAAVVASQDWPEVTKYAGLVSAQSHRQELIEDLYNVTHDPQKGTVCGGMVRELLISFKKSTGQKPQRILFYRDGVSEGQFYQVLLHELDAIRKACASLEANYQPQVTFIVVQKRHHTRLFAHNHNDQNSVDRSGNILPGTVVDSKICHPTEFDFFLCSHAGIKGTSRPAHYHVLWDENNFTADALQTLTNNLCYTYARCTRSVSIVPPAYYAHLAAFRARFYMEPDSSDSGSLASGARGGGAPSSSSTSRSTRATAGGAVRPLPALKDSVKKVMFYC

SEQ ID NO: 11474 - DNA, 3309 bp, Zea mays
  CDS (1)..(3309)
atggtgaggaagaaaaggactggccctggagagagttctggggagacttctggagcgcctggtcagggctcctcacagcgtcctcaggcaacacaacagggtgcccgaggtggaggacaacaccaggtgcgtggtggatatccgggccatggagtgccgccttcagagcacccaggtggtgggccgcctgagtatcaaccacgtggctatcagggacgtggcgttccacctttacttcctggtggtgggccgcctgagcctcaaccgcgtggctaccagggacatggtggataccagggccgtggcgggccaccttcacagcatcctggtggtgggccatcacctgggtctcagcctcgtggctaccagggacgtggtggtctgcgtcccagagggggagtgccgcagccataccgtggcgggcatgtgggaggtagtgttggaccaattgttccttcaggtccgtctagaccagttcccgagctgcaccaagccccagatgtccaacatcaagcccctgtggtggcagcaccatcaccaccgggagctggctcgtcctcgcagcctgggatggccgaggtgagcactggacaagtccagcaacttgtgattcatgaccaaagttcagccagccaagttagtcaggtagcaccagcatcaagcaaagctgttagattcccattgcgccctggcaagggtacgcatgggtccaggtgcatcgtgaaggcaaatcatttctttgctgagctgcctgataaagacctccaccaatacgatgtatcaataacacctgtggttccttcacgtggtgtcaatcgtgctgtcatgaaagagcttgtaaaccttcatagacactcccatttggatgggcgtctgcctgcatatgatggaaggaagagtctttatacagctggagcattgccatttacttcgaagacattcgaaattactctgcaagatgaagaaaacagtcttggtggaggacaaagacaccaaaggggccagagggtctttcaggtggtgatcaaatttgctgctcgcgctgatctccaccatttggctatgtttctagctgggaggcaaccagatgctcctcaagaggctattcaagtacttgacattgtactacgtgaatttcctactgccaggtattgtcctgttggtagatcattttattctcccaatttagggagacgccagcaacttggtgaaggtttggaaacttggcgtggtttctatcaaagcataaggcccacacagatgggtctttctctgaatattgatatgtcctctactgcatttattgagcccctccctgtgattgattttgttgctcagcttcttgacagagatatctcagttagaccattgtctgattctgatcgtgtgaagattaaaaaagccctacgaggtgtgaaagtcgaggtcacacaccgtggaaacatgcgtaggaagtatcggatatctggcctcacttcacaagcaacaagggagttatcattccctattgatgatcgtggtactgttaagactgtggtgcaatacttcctggagacttatggctttaatattcagcacaccactttaccttgtttgcaagtgggcaatcagcaaagaataaattatctgcctatggaggtctgtaagatagttgagggacagcgttactcaaaacgactcaatgagaaacagatcactgctctactgaaggtgacttgccagcgtccccaagagcgtgagaaagccatcttgcagactgtgcatcacaatgcctactccgaggatccttatgcccaggaatttggtataaagattgatgagcgtcttgcatccgttgaagctcgtgttctgcctcctccaaggctgaaataccatgatagtggcagagagagggatgtattgccaagagttgggcagtggaatatgatgaataagaaaatggtcaatggtggtagagttagcagctgggcatgcattaacttctcacgaaatgtgcaagatggtgctgctaggagtttctgtcatgatctcgctttgatgtgccaagtatcaggaatggattttgcacttgaacctgtgctgccccctgtctatgcgaggcctgaacatgttgaaagagcactaaagagactttatcaagatgccatgagcatactcaggcctcagggccgagagcttgacttgctgatggtaatactgcctgacaataatggctctctttacggggatcttaaaaggatatgtgagactgatcttggattggtctcccaatgctgtctgactaaacatgttttcaaggcgaacaagcatcagtatcttgcaaatgttgccctgaaaataaatgttaaggttgggggaaggaatactgtacttgttgatgctttggcaaggagaatcccccttgtcagtgacgtagctactattatctttggtgctgatgtgacccatccccatcctggggaagattctagtccttccattgcagctgtggttgcttctcaagactggcctgaggttacgaagtatgcaggattagtgagtgctcaaacccatcgccaagaattgatacaggatcttttcaacgtacggcaagatccccaaaggggggctgtctctggtggcatgattagggaacttctcatttctttctggagggcgactggacaaaaacccaagaggatcatattctacagggatggtgtcagtgagggacagttctaccaagttctgttgtacgaacttgatgccattagaaaggcctgtgcatcattggagtctgattaccagcctccagttacctttgtcgtggtccagaagcgtcatcacaccaggttgtttgttaataatcacaatgatcagcgtgctgccgatagaagtggcaacatactgccgggcactgtggtggactcgaagatttgccatccaaccgagtttgatttctacctgtgcagccatgctggcattcagggaacaagccgtcctgcccattatcatgttctgtgggatgagaacaaatttacggctgatgggttgcaaactctcaccaacaacttgtgttacacgtatgccaggtgcacacgctcagtatcaatcgttcctcctgcatactatgctcatctggcagccttccgagctcggttttacatggagccagatacaagtgacagcggatctgtggcgagcggtgctacgacaagccgtggccctccaccaggggcgcgcaacaccagggctggtgctgcgaatgttgctgtgaggccattacctgctctcaaggaaaacgtgaagcgcgtcatgttctactgctaa

SEQ ID NO: 11475 - protein, 1102 aa, Zea mays
MVRKKRTGPGESSGETSGAPGQGSSQRPQATQQGARGGGQHQVRGGYPGHGVPPSEHPGGGPPEYQPRGYQGRGVPPLLPGGGPPEPQPRGYQGHGGYQGRGGPPSQHPGGGPSPGSQPRGYQGRGGLRPRGGVPQPYRGGHVGGSVGPIVPSGPSRPVPELHQAPDVQHQAPVVAAPSPPGAGSSSQPGMAEVSTGQVQQLVIHDQSSASQVSQVAPASSKAVRFPLRPGKGTHGSRCIVKANHFFAELPDKDLHQYDVSITPVVPSRGVNRAVMKELVNLHRHSHLDGRLPAYDGRKSLYTAGALPFTSKTFEITLQDEENSLGGGQRHQRGQRVFQVVIKFAARADLHHLAMFLAGRQPDAPQEAIQVLDIVLREFPTARYCPVGRSFYSPNLGRRQQLGEGLETWRGFYQSIRPTQMGLSLNIDMSSTAFIEPLPVIDFVAQLLDRDISVRPLSDSDRVKIKKALRGVKVEVTHRGNMRRKYRISGLTSQATRELSFPIDDRGTVKTVVQYFLETYGFNIQHTTLPCLQVGNQQRINYLPMEVCKIVEGQRYSKRLNEKQITALLKVTCQRPQEREKAILQTVHHNAYSEDPYAQEFGIKIDERLASVEARVLPPPRLKYHDSGRERDVLPRVGQWNMMNKKMVNGGRVSSWACINFSRNVQDGAARSFCHDLALMCQVSGMDFALEPVLPPVYARPEHVERALKRLYQDAMSILRPQGRELDLLMVILPDNNGSLYGDLKRICETDLGLVSQCCLTKHVFKANKHQYLANVALKINVKVGGRNTVLVDALARRIPLVSDVATIIFGADVTHPHPGEDSSPSIAAVVASQDWPEVTKYAGLVSAQTHRQELIQDLFNVRQDPQRGAVSGGMIRELLISFWRATGQKPKRIIFYRDGVSEGQFYQVLLYELDAIRKACASLESDYQPPVTFVVVQKRHHTRLFVNNHNDQRAADRSGNILPGTVVDSKICHPTEFDFYLCSHAGIQGTSRPAHYHVLWDENKFTADGLQTLTNNLCYTYARCTRSVSIVPPAYYAHLAAFRARFYMEPDTSDSGSVASGATTSRGPPPGARNTRAGAANVAVRPLPALKENVKRVMFYC

SEQ ID NO: 11476 - DNA, 2715 bp, Oryza sativa
  CDS (1)..(2715)
atggagtccaacagtggtgaaatcgaggagttgccacctcccccacctttgccaccaaatgctgagccaattaaaactgatgatacaaaaaagttatcaaaacctaagagggccttgatggctcgctctggttgtggcaaaaaagggcagccgatacagctgctgacgaaccacttcaaggtttcactgaaggcagcagacgaatttttccatcactactatgttaatctgaagtatgaggatgatagaccagtggatggaaagggcataggtagaaaggtgctggacaaactccagcagacctatgcgtctgagctggcaaataaagattttgcatacgatggtgagaagagcctgttcaccattggtgctcttcctcaagtgaacaatgagttcacggtagttctggaagacttcaacactggaaagtcatctgcaaatggtggcagccctggcaatgacagtccaggaaatgacaggaaaagggttagaaggccatatcagacaaaaacttttaaagttgagctgaactttgcagcaaaaattcctatgagcgccattgctcaggccttgagaggccaggaatctgaaaacacccaagaagcaattcgtgttattgatatcatattaagacagcattccgcaaaacagggttgccttttggttcgccaatcctttttccataacaatccttcaaattttgttgacttgggtggtggtgtgatgggctgtaggggattccattcaagcttccgagctacacagagtggactttcactcaatatcgatgtgtccacaacgatgattgtgaaacctggtcctgtggtagattttctacttgccaaccagaaggttgatcacccaaacaaaattgactgggcaaaggccaagcgtgctctgaagaatttaaggataaaaacaagtccagcaaatactgaatacaagattgttggtttgagtgagagaaactgctatgaacaaatgttcactttgaagcaaagaaatggtgatggtgaacctgaaggtgtggaagtatctgtttacgagtactttgtgaagaatcggggcatagagttgagatactctggtgattttccctgtatcaatgtggggaaaccaaaacggccaacttattttccaattgagctctgctctcttgtgcctttgcaaaggtataccaaggctttgagtacactacagaggtcttcgcttgttgagaagtccaggcagaaacctgaagaaaggatgtcagttttgtctgatgtgctgaaacgcagcaactatgattcagagcctatgttgaattcttgtggtatttcaattgctcgaggttttacacaagttgctggcagggtgctgcaggcccccaagctaaaagctggaaatggtgaagatctttttgcacgtaatgggcggtggaactttaataataagaggctcattaaggctagcagtatcgagaaatgggcagttgttaacttctctgcacggtgtaatattagggatcttgtccgagacatcatcaagtgtggtggcatgaaaggaattaaagtagaagatccatttgatgtcattgaggaggacccttcaatgcgacgagctcctgctgcaagaagggtagatggcatgattgacaagatgcaaaaaaagcttcctggacaaccaaagtttctgctctgtgttcttgctgagaggaagaattcagatatttatgggccctggaagcggaaatgtcttgctgaatttgggattattacacaatgtgtggcccctactagggtcaatgatcagtatattacaaatgtactgttaaagataaatgcaaagcttggtggcttgaactccctgcttcaaattgaaacatccccttccattcctcttgtatccaaggtcccgacaataatattgggaatggatgtttcccatggatcacctggacagtctgatataccttcaattgctgcggtcgttagttctcgtgaatggcctcttgtatcaaaatacagggcttcagtccgttctcagtcacctaagttagaaatgattgatggactatttaagccacaaggagctcaggaagatgatggcctcattcgggagttattagttgacttctataccagtactggtaaacgtaagcctgatcaagtcattatcttcagggatggggtcagtgagagccagtttacccaggtgctgaacattgagctggatcaaataattgaggcatgcaagtttcttgacgaaaactggtctccaaagtttacactgattgttgcacagaagaatcatcataccaaattttttgtgcctggatctcaaaataacgttcctcctggtactgttgtggacaacgcagtctgtcatccaaggaacaatgacttctacatgtgtgcgcacgctggaatgattggaactacaaggcctacacattatcatatccttcatgatgagataggcttctctgctgacgatcttcaggagttggtccactccctttcctatgtctaccagaggagcactacagccatatcagtcgttgcacccatttgctacgcgcatctcgctgctgctcaggtcagccagttcatcaagttcgacgagatgtcggagacgtcgtcgagccatggtggccatacctcggcgggcagcgctccggtgcccgagctgcctcgcctgcataacaaagtcaggagctccatgttcttctgctga

SEQ ID NO: 11477 - protein, 904 aa, Oryza sativa
MESNSGEIEELPPPPPLPPNAEPIKTDDTKKLSKPKRALMARSGCGKKGQPIQLLTNHFKVSLKAADEFFHHYYVNLKYEDDRPVDGKGIGRKVLDKLQQTYASELANKDFAYDGEKSLFTIGALPQVNNEFTVVLEDFNTGKSSANGGSPGNDSPGNDRKRVRRPYQTKTFKVELNFAAKIPMSAIAQALRGQESENTQEAIRVIDIILRQHSAKQGCLLVRQSFFHNNPSNFVDLGGGVMGCRGFHSSFRATQSGLSLNIDVSTTMIVKPGPVVDFLLANQKVDHPNKIDWAKAKRALKNLRIKTSPANTEYKIVGLSERNCYEQMFTLKQRNGDGEPEGVEVSVYEYFVKNRGIELRYSGDFPCINVGKPKRPTYFPIELCSLVPLQRYTKALSTLQRSSLVEKSRQKPEERMSVLSDVLKRSNYDSEPMLNSCGISIARGFTQVAGRVLQAPKLKAGNGEDLFARNGRWNFNNKRLIKASSIEKWAVVNFSARCNIRDLVRDIIKCGGMKGIKVEDPFDVIEEDPSMRRAPAARRVDGMIDKMQKKLPGQPKFLLCVLAERKNSDIYGPWKRKCLAEFGIITQCVAPTRVNDQYITNVLLKINAKLGGLNSLLQIETSPSIPLVSKVPTIILGMDVSHGSPGQSDIPSIAAVVSSREWPLVSKYRASVRSQSPKLEMIDGLFKPQGAQEDDGLIRELLVDFYTSTGKRKPDQVIIFRDGVSESQFTQVLNIELDQIIEACKFLDENWSPKFTLIVAQKNHHTKFFVPGSQNNVPPGTVVDNAVCHPRNNDFYMCAHAGMIGTTRPTHYHILHDEIGFSADDLQELVHSLSYVYQRSTTAISVVAPICYAHLAAAQVSQFIKFDEMSETSSSHGGHTSAGSAPVPELPRLHNKVRSSMFFC

SEQ ID NO: 11478 - DNA, 2736 bp, Oryza sativa
  CDS (1)..(2736)
atggacgctcatgatggtgaggccgatgagttgccgccgcctcctcccgtacctgcaaatgtggtgcctattaaagctgatgacgttgagagcgaggtgccagcaaacaaaccagcaaaacctaagcggtttccaatggccaggcctggtttagggagaaaaggacagccaatccagctcttggcgaatcattacaaagtttctgtgaagagtagtgaagaatatttcttccactacaatgttattctgaagtatgaggatgatcgaccggttgatgggaaaggggtaggtcgaaaggtgattgataaactgcagcaaacctaccgttctgagctttcaagcaaggactttgcctatgatggtgaaaagagcctgtttacaattggtgctcttccacaagtaactaatgagttcacagtggtgttggaggatgtttcaactggaaagactgctgccaatggaagccctggaggtaatgacagccctggaggtagtgacaggaagagagttaggagaccataccagaccaagactttcaaagtggagctgtgctttgcagcaaagatccctatgaatgcaattgctcaggccataaaaggtcaagaatcagagaactcccaagaagctctcagagttcttgatataatattaaggcagcactctgctaaacagggctgccttttagtacgccagtcatttttccacaacaatcctaataactttgttgacctgggtggtggtgtgatgggctgtcgaggattccattcaagtttccgtggcacacagagtggactttctctgaatatcgatgtttcgacaactatgattgttaaacctggtcctgttatcgattttcttcttgccaaccagaaagttgatcaccctgacagaattgattggcaaaaggccaagcgtgctctcaagaacttgaggataagaaccacccctgtgaattcagaattcaagatcattggtttgagtgacagaaattgcaacgaacagatgttttcgttgaggcagaggaatgggaacaatggggatgttgatgaagttgaagttacagtctatgattactttgtgaaaaacaaaggcatagagctgcgctattctggcaatcttccttgcataaatgtggggaaaccaaagcgtccaacttattttccaatagagctatgctctcttattccactacaaagatacaccaaagctttgtcaacactgcaaaggtcctcccttgttgagaaatccagacagaagccccaggaaagaatgtcagtccttaatgatgcacttcgacatagtaattatgattctgatcccatgttgagggcatctggcatttcaattgcccaaaattttactcaagttgaaggaagggtcctgcaacccccaaagctgaaagctggcaatggtgaagatatattcccacgcaatggtcggtggaacttcaacaataagaaactgattcagacctgttctgtcgataagtgggcagtagttaatttctctgcacgctgtgatgtgcgaaatcttatccgggacctcataagaaatgcatctgcgaaggggattcaaatggccgaaccttttgatgtgtttgaagagagcccctcattgaggcgagcacctgtatcaagaagagtagatgatatgtttgaacagataaaatcgaaacttcctggagctccgaaattcctcttgtgccttcttcctgagaggaaaaattgtgaagtttatggtccttggaagaggaagtgtcttgctgaattcggtattgtcacacaatgccttgctccacaaagagtcaatgatcagtacctactcaatttgctattgaagataaatgccaagcttggtggaataaactcattgctgcaaattgaagcatccccttcaatacctcttgtatcgaagacacctaccatcatcttaggtatggatgtgtcacacggtcaaccaggacaatctgatagaccttccattgctgcggtggttagctctcgccaatggcctctcatctctaaatacagagcatcggtgcacactcagtcacctaagctagaaatgatgtcttccttgtttaagccacgaggaactgaagatgatggcctcattcgggaatcgctgattgacttctacactagttctggaaaacggaaaccggatcatgttatcgttttcagggatggagttagtgaaagccagtttactcaggtcattaacattgagcttgatcagatcattgaggcatgcaaatttctcgatgagaagtggtcaccaaagttcacagtgattgttgctcagaagaatcatcataccaaattttttcagtctggatctccagataatgttccgccaggtactgttgtggacaaacaagtgtgccatccaaggaattatgacttctacatgtgtgctcatgctggaatgattggaacgacgaggccaacacattatcatgttctgcacgatgagataggtttctcccctgatgatctgcaggagctagtgcactcactctcttatgtgtatcagagaagcacaacagccatatcagttgttgctccgatttgctatgcccatcttgctgctgctcaggtgggcacattcctcaagttcgaagatatgtcggacgcgtcgtccagccaaggaggtcatacgtctgtcggaagtgtaccggtgcctgagctgcctcgcctccatgagaaagtgaggagctccatgtttttctgctga

SEQ ID NO: 11479 - protein, 911 aa, Oryza sativa
MDAHDGEADELPPPPPVPANVVPIKADDVESEVPANKPAKPKRFPMARPGLGRKGQPIQLLANHYKVSVKSSEEYFFHYNVILKYEDDRPVDGKGVGRKVIDKLQQTYRSELSSKDFAYDGEKSLFTIGALPQVTNEFTVVLEDVSTGKTAANGSPGGNDSPGGSDRKRVRRPYQTKTFKVELCFAAKIPMNAIAQAIKGQESENSQEALRVLDIILRQHSAKQGCLLVRQSFFHNNPNNFVDLGGGVMGCRGFHSSFRGTQSGLSLNIDVSTTMIVKPGPVIDFLLANQKVDHPDRIDWQKAKRALKNLRIRTTPVNSEFKIIGLSDRNCNEQMFSLRQRNGNNGDVDEVEVTVYDYFVKNKGIELRYSGNLPCINVGKPKRPTYFPIELCSLIPLQRYTKALSTLQRSSLVEKSRQKPQERMSVLNDALRHSNYDSDPMLRASGISIAQNFTQVEGRVLQPPKLKAGNGEDIFPRNGRWNFNNKKLIQTCSVDKWAVVNFSARCDVRNLIRDLIRNASAKGIQMAEPFDVFEESPSLRRAPVSRRVDDMFEQIKSKLPGAPKFLLCLLPERKNCEVYGPWKRKCLAEFGIVTQCLAPQRVNDQYLLNLLLKINAKLGGINSLLQIEASPSIPLVSKTPTIILGMDVSHGQPGQSDRPSIAAVVSSRQWPLISKYRASVHTQSPKLEMMSSLFKPRGTEDDGLIRESLIDFYTSSGKRKPDHVIVFRDGVSESQFTQVINIELDQIIEACKFLDEKWSPKFTVIVAQKNHHTKFFQSGSPDNVPPGTVVDKQVCHPRNYDFYMCAHAGMIGTTRPTHYHVLHDEIGFSPDDLQELVHSLSYVYQRSTTAISVVAPICYAHLAAAQVGTFLKFEDMSDASSSQGGHTSVGSVPVPELPRLHEKVRSSMFFC

SEQ ID NO: 11480 - DNA, 3105 bp, Oryza sativa
  CDS (1)..(3105)
atggagcacgagcgcggtggcggtggccgcggccgcgggaggggtcgcggtggcgggcgtggcggcggtggcggcgatggtcgcggaggcggttatggtggtgctggtggtggtggtgtcggcgggcgcggtgggcgtgggcctcctggtggtggtggtggacgcgggtacgagcccggcggcgggcgtgggtacggtggcggcggcggcggtggtggacgtgggtatggcggcggaggcggcggtggtgggtacgagtccggcggtgggcgtgggtatggcggcggtggacgtgggtatgaatccggcggtgggcgtggacctggcggcggcggccgtgggcacgagtccggcggtggcggtggccgcggcgggaacgtgtgggcgcagccggggagagggcgcggaggagcccccgccccggcgccggcgccagcaccagcagcgaggaggatccaggacgagggggccgcgaggtcgtcgggtaccgttgagcgcattgcttctactgaggttgtaagagtacaaccacctgcacccccagttgctgtgtctcgtagtggcacgcgtgtgccaatgcgaagacctgatggtggaggctcagtatcgaaagccaaggtcaaattgttggtgaaccattttatagttaagtaccgacaggcatcaactgtttttcactatgacatagacatcaagcttgatataagttcccccaaggcttcagacaaggagctatccaagggagattttcttactgtcaaggacgagctcttcaaggatgagagctttcggcggctttcatcagctgttgcttatgatggaaaaagaaatttatttacttgtgctgagctaccagatggtttgtttcgtgtcaaagtccgttcacggacttacattgtatctgtggagttcaagaagaagcttcctttgagccaactctcggaactgcctgtgcccagagaggtcttgcaggggcttgatgtcattgtgcgtgaggcctctagctggcgcaagattatcattggtcagggattttactcgcagggccgcagtgtgcccattgggccggatgttgtagctctcaaaggaacccagcagaccctgaaatgcactcagaaaggactgatcctttgtgtggactattcggttatgccgtttcgcaaagctggacctgtgttggatcttgttcagaagtctgtgagataccttgactacaggacaacactaaacaaacaccaattggacactttgaagaatgaactcaaaggccagcgtgtcactgtaaatcataggaggacaaagcagaagtacattgttaaaggtttgactgataaacctgcaagtcagataacttttgtagattctgaatcaggacagaccaagaagcttcttgattactattcgcagcagtatggcaaggttattgagtatcaaatgcttccatgcttggatttgagcaagagcaaggacaagcaaaactatgtgccgattgaattgtgtgatcttcttgaagggcagagatacccaaaagcaagcttaaataggaattctgataaaacactgaaagaaatggctttgatccctgcctcaagtaggaaggaggagattctggagttggtgaatgctgacgatgggccttgcaggggtgaaattgctcagcagttcgggatttctttggatgtacaaatgatggaagtcactggtaggacccttcctcctcccagcctaaaacttggcacctccagtggccaaccccccaaattcaatattgatcagcctaactgccagtggaaccttacgaggaaaagactagcagagggcggggtgctacagtgctggggcgttgtggacttcagtgcagattctgggcagtacgccctgaatgggaacatgtttattgacaagattgtcaggaagtgctgcgaccttggcgtacagatgaaccgtaacccatgcattgtgcaactgttagatatggaggtgctatccgatccacatcagctcttcgaggagcttaacaaagctaagcaggcggcagccagtaagaaacagaagctgcagctcctcttctgcccaatgtctgatcagcatcctgggtacaagacgctgaagcttatctgcgagacgcagctggggatccagacccagtgcttcttgagcttcctcgcgaacaaacaacagggacaggaccagtacatgtccaaccttgctctgaagatcaacggcaagattggaggaagcaacatccaactgtttggtgaatcgctcccgcggatctccggcgcgccatacatgttcatcggcgccgacgtgaatcacccatcgccggggaacgtcgagagcccgtcgattgcagcagtggtggcctcggtggatcaaggcgccagcaagtacgtgccaagaatccgcgctcagcctcaccgctgcgaggtgatccagcacctcggcgacatgtgcaaggagctcatcggcgtgttcgagaagcggaaccgcgtgaagccccagaggatcatctacttccgcgacggcgtcagcgacggtcagttcgacatggtgctgaacgaggagctggcggacatggagaaggcgatcaagaccaaggactactccccgacgatcaccgtgatcgtggccaagaagcggcaccacaccaggctgttccccaaggacctgaaccagcagcagaccaagaacggcaacgtgctccccggcacggtggtggacaccggcgtggtcgacccggcggcgtacgacttctacctgtgcagccacaacgggctgatcgggacgagccggccgacgcactactacagccttctggacgagcacggcttcgcctccgacgacctgcagaagctggtgtacaacctctgcttcgtcttcgcccgctgcaccaagccggtgtcgctggccacgcccgtctactacgccgacctcgccgcctaccgcggcaggctctactacgagggcatgatgatgtcgcagccgccaccgtcttccgcggcgtcggcgtcgtcggcatcctcctccggcgccggcgcttccgacttcaggagcttcccggcgctgcacgaggatctggtggacaacatgttcttcatctga

SEQ ID NO: 11481 - protein, 1034 aa, Oryza sativa
MEHERGGGGRGRGRGRGGGRGGGGGDGRGGGYGGAGGGGVGGRGGRGPPGGGGGRGYEPGGGRGYGGGGGGGGRGYGGGGGGGGYESGGGRGYGGGGRGYESGGGRGPGGGGRGHESGGGGGRGGNVWAQPGRGRGGAPAPAPAPAPAARRIQDEGAARSSGTVERIASTEVVRVQPPAPPVAVSRSGTRVPMRRPDGGGSVSKAKVKLLVNHFIVKYRQASTVFHYDIDIKLDISSPKASDKELSKGDFLTVKDELFKDESFRRLSSAVAYDGKRNLFTCAELPDGLFRVKVRSRTYIVSVEFKKKLPLSQLSELPVPREVLQGLDVIVREASSWRKIIIGQGFYSQGRSVPIGPDVVALKGTQQTLKCTQKGLILCVDYSVMPFRKAGPVLDLVQKSVRYLDYRTTLNKHQLDTLKNELKGQRVTVNHRRTKQKYIVKGLTDKPASQITFVDSESGQTKKLLDYYSQQYGKVIEYQMLPCLDLSKSKDKQNYVPIELCDLLEGQRYPKASLNRNSDKTLKEMALIPASSRKEEILELVNADDGPCRGEIAQQFGISLDVQMMEVTGRTLPPPSLKLGTSSGQPPKFNIDQPNCQWNLTRKRLAEGGVLQCWGVVDFSADSGQYALNGNMFIDKIVRKCCDLGVQMNRNPCIVQLLDMEVLSDPHQLFEELNKAKQAAASKKQKLQLLFCPMSDQHPGYKTLKLICETQLGIQTQCFLSFLANKQQGQDQYMSNLALKINGKIGGSNIQLFGESLPRISGAPYMFIGADVNHPSPGNVESPSIAAVVASVDQGASKYVPRIRAQPHRCEVIQHLGDMCKELIGVFEKRNRVKPQRIIYFRDGVSDGQFDMVLNEELADMEKAIKTKDYSPTITVIVAKKRHHTRLFPKDLNQQQTKNGNVLPGTVVDTGVVDPAAYDFYLCSHNGLIGTSRPTHYYSLLDEHGFASDDLQKLVYNLCFVFARCTKPVSLATPVYYADLAAYRGRLYYEGMMMSQPPPSSAASASSASSSGAGASDFRSFPALHEDLVDNMFFI

SEQ ID NO: 11482 - DNA, 2922 bp, Oryza sativa
  CDS (1)..(2922)
atggcgccgccccggcaccagccggcagctgggaaggcgggcggcgggcgcgggcatgggcatgggcatgggcatggtggtggtggtggtgggccggcggcgaggaagcagccgttgcagagtagcatggcgcagcccaaggcggagacggcggcggcgacggcggcggtcgcgccgccggagggagggaagaagtgcggcggcggtggcgggaggcggcgcggcgggcgcgggcgcggcggcagggcgggtgcggggccggggccggggctggcggcggcgccggccgtggtggtggcgcccgcggcgcgcgccgtcattgggccgccggtggcgagcaaggggctgtcgttctgccggcggccggggttcgggacggtgggcgcccggtgcgtcgtgaaggcgaaccacttcctcgccgagctccccgacaaggatctcacccagtacgacgtgaagatcacgccggaggtgagctcccggagcgtgaaccgggcaatcatgtcggagctggtccgcctctaccacgactccgatctcggaggtcgcctcccggcctacgacggccgcaagaacctctataccgccgggacgctcccgttcgacgcgcgcgagttcgtcgtccgcctcaccgacgacgacgacggcaccggcgtcccgccacgggagagggagtacagggtcgccatcaagttcgccgcgcgcgccgacctccaccacctccggcagttcatcgccgggcgccaggccgacgcgccgcaggaggctctccaggtgctcgacatcgtgctccgtgagcttgccaaccgcaggtatgtctcgatagggcggtcgttctactcgccggacataaggaagccgcagcggctcggcgatggcctacagtcatggtgtgggttctaccagagcatccggccgactcagatggggttgtcgcttaacattgatatgtcatctaccgcgttcatcgagccgctaccagtgatcgaattcgtggcccaaatactagggaaggatgtcatatcgaggccattgtcggatgcaaacagaatcaagatcaagaaagccttgcggggcgtgaaagttgaagtcactcaccggggaaatgtgaggcggaagtatcgcatttcagggctgacaacacaaccaactcatgaactgattttcccaatcgatgaccaaatgaacatgaaatctgtcgtagagtatttcaaggaaatgtatggcttcaccattcagcatccccatcttccctgccttcaggtgggaaaccaaaagaaggcaaactatctaccaatggaggcctgtaagattgttgagggtcagagatatacaaagaggttgaatgaaaagcagatcacatcattactcaaggttacttgccgtaggcctagagaacaggagatggatattctacagacagttcaacaaaatggatatgagcaagacccttatgcaaaagaatttggaatcaacattagtgagaagctaacctcagttgaagctcgggtccttcctgcaccttggctgaaatatcatgatactgggaaggaaaaggagtgcttgccacaagttggtcagtggaacatggtgaacaagaaagtgataaatgggtgcaaggtgaatcattgggcttgtataaatttctcaaggagtgtgcaagaaactactgctcggggattctgccaggagttggcacaaatgtgtcagatatccggcatggaattcaacagtgagcctgtgataccaatatactcagctagaccagatcaagtagagaaggcgcttaagcatgtgtataatatgtcattaaacaagctcaagggaaaagagcttgagcttcttttggccatcctccctgacaacaatggttctttatatggtgatataaaacgtatatgtgaaactgacttggggttgatatcacaatgttgcttaaccaaacatgttttcaagatcagcaagcagtacctggcaaatgtctcacttaaaatcaatgttaagatgggaggaagaaacaccgtgctgctggatgcaataagttggaggattcctttggtcagtgacataccaactattatatttggtgcagatgtcacgcatcctgaaaccggggaggactctagcccatccattgctgctgttgttgcatctcaagactggccagaagttacaaagtatgctggattggtgtgtgctcaggctcatcggcaagagctcattcaagatctttacaagacatggcatgatcctcaaagaggcaccgtaacaggaggcatgatcagggagctcttaatatccttcaggaaggccactgggcaaaagccattgagaataattttctacagggatggtgtcagtgaaggccaattctaccaagttctcctctatgagttggatgctatccgcaaggcatgtgcatctctagaaccaaattatcagcctcctgtaacattcgtggttgtccaaaagcgtcaccatacaagactcttcgcaaacaatcacaaagacagaagtagcacggacaaaagtggaaacattttgcctggaactgttgttgattcaaagatctgccacccatcagagtttgatttctacctctgtagccatgctggaattcagggaacaagtaggccagctcactaccacgtcctttgggatgagaacaatttcactgcagacgaaatgcagacattgacaaacaacctttgctacacttatgcacggtgcacacgctctgtttctgttgttccacctgcatactatgcgcatctggctgcgtttcgagcgcggttctacatggagccagagatgtcggagaaccagacgacgtcgaagagctccactgggacgaacggaacctcggtgaagccattgcctgcggtgaaggagaaggtgaagagggtgatgttctactgttga

SEQ ID NO: 11483 - protein, 973 aa, Oryza sativa
MAPPRHQPAAGKAGGGRGHGHGHGHGGGGGGPAARKQPLQSSMAQPKAETAAATAAVAPPEGGKKCGGGGGRRRGGRGRGGRAGAGPGPGLAAAPAVVVAPAARAVIGPPVASKGLSFCRRPGFGTVGARCVVKANHFLAELPDKDLTQYDVKITPEVSSRSVNRAIMSELVRLYHDSDLGGRLPAYDGRKNLYTAGTLPFDAREFVVRLTDDDDGTGVPPREREYRVAIKFAARADLHHLRQFIAGRQADAPQEALQVLDIVLRELANRRYVSIGRSFYSPDIRKPQRLGDGLQSWCGFYQSIRPTQMGLSLNIDMSSTAFIEPLPVIEFVAQILGKDVISRPLSDANRIKIKKALRGVKVEVTHRGNVRRKYRISGLTTQPTHELIFPIDDQMNMKSVVEYFKEMYGFTIQHPHLPCLQVGNQKKANYLPMEACKIVEGQRYTKRLNEKQITSLLKVTCRRPREQEMDILQTVQQNGYEQDPYAKEFGINISEKLTSVEARVLPAPWLKYHDTGKEKECLPQVGQWNMVNKKVINGCKVNHWACINFSRSVQETTARGFCQELAQMCQISGMEFNSEPVIPIYSARPDQVEKALKHVYNMSLNKLKGKELELLLAILPDNNGSLYGDIKRICETDLGLISQCCLTKHVFKISKQYLANVSLKINVKMGGRNTVLLDAISWRIPLVSDIPTIIFGADVTHPETGEDSSPSIAAVVASQDWPEVTKYAGLVCAQAHRQELIQDLYKTWHDPQRGTVTGGMIRELLISFRKATGQKPLRIIFYRDGVSEGQFYQVLLYELDAIRKACASLEPNYQPPVTFVVVQKRHHTRLFANNHKDRSSTDKSGNILPGTVVDSKICHPSEFDFYLCSHAGIQGTSRPAHYHVLWDENNFTADEMQTLTNNLCYTYARCTRSVSVVPPAYYAHLAAFRARFYMEPEMSENQTTSKSSTGTNGTSVKPLPAVKEKVKRVMFYC

SEQ ID NO: 11484 - DNA, 2721 bp, Glycine max
  CDS (1)..(2721)
atggcttcttcggggccaaatggaactgacaacggggattcgttgcctcccccgcctcctgttgtcccatcagatgttgtacctgtcaaagctgagctggagaagaagaaggctttgcggcttccaatagccaggcgtggccttgcttcaaaagggacaaagctgcaacttctcaccaatcactacagggtgaacgttgcaaatactgacgggcatttttatcagtatagtgttgctcttttttatgatgatggacgacctgtggagggtaagggtgtagggaggaagcttctggacagggtgcatgagacgtatgattctgaattgaatgggaaggattttgcatatgatggtgagaagactctgtttactcttgggtctcttgctcgcaacaagcttgagtttacggtcgttttggaggatattattgcttccagaaacaatggaaactgcagcccagatggcaatggagaactgaatgagagtgacaaaaagaggatgaggcgccctaatagttccaaggcatttaaagttgagcttagctatgcttcaaagattccattgcaggccattgccaatgctctacgtggacaggaatccgagaattatcaagaagctataagagtgcttgatatcattttgaggcaacatgctgctaagcaaggctgtttgcttgtgaggcaatcgttcttccacaatgatcccaagaattttgctgatgtaggaggaggtgtacttggatgcaggggtttccattctagctttagaactacacaaagtggactgtctttgaacatagatgtctcaaccacgatgataattacccctgggcctgtggtggacttcctaatatccaatcaaaatgtgagagaccccttttcacttgactgggccaaggccaagaggacattaaaaaatctgaggattaaagcgagcccatctaatcaagaattcaaaataactgggattagtgaattcccttgcaaagatcaaacgtttaccttgaagagaaaaggtggtgatgatgttgctgaggaagaagtgacagtatatgattattttgttaatatccgcaagatagatcttcgatattctggggatctcccatgtattaacgttggaaagccaaaaaggccaacttatatccctcttgagctttgctctttggtatccctgcaacgttatacaaaagcactatccactcttcaaagggcttcattggtggagaagtccaggcagaagccacaggagaggatgagggttttgactgatgcacttaaaagtagcaattatggttccgaaccaatgctacgtaattgtgggatctctataagccccaactttactgaagttgagggtcgggttttacaagctccgcggttaaaatttggtaatggggaagacttcaatcctagaaatgggaggtggaacttcaataacaagaaaattgtcaagccaactaaaatagaaagatgggctgtggttaacttctctgcacgctgtgatacacgagggcttgtgagggatctcattaagtgtggtggaatgaaaggaattgtgatagatcagccatttgatgtgtttgaagaaaatggtcagtttaggcgtgcaccgcctgtggttcgagtagagaagatgtttgaattggttcagtctaaacttcctggggctcctcagtttcttctttgtctgcttcctgagaggaaaaattctgatctttatggtccatggaagaagaagaatcttgctgagtttggaatcgtgactcagtgtatagctccgaccagggtcaatgaccaatatttgactaatgttctgttgaaaatcaatgctaagcttggtggcctgaactcaatactaggtgttgagcattctccttctattcctattgtttctagagcaccaaccattattattggcatggatgtgtctcatggttcgccagggcaaacagatattccttcaattgccgcggtggtcagctcccgagaatggccactaatatcaaagtatagggctagcgtccgtacccagtctccaaagatggaaatgattgataatttgttcaagaaggtttctgacaaggaggatgaaggcataatgagggagcttctacttgatttctatacaagttctgggaatagaaagcccgataatataatcatattcagggacggtgttagtgagtcccagttcaatcaagttttgaacattgaacttgatcaaattatcgaggcttgcaagtttttagatgaaaagtggaaccccaagtttttggtgattgttgctcaaaagaaccatcatactaaattctttcaacctggagctcctgacaatgttcctcctggaactgtaattgataacaaaatttgccatcctcggaattatgatttctatatgtgtgcacatgctggaatgattggtactagcaggcccacacactaccatgttctgttagacgagattggcttttcacctgatgatctacaagagcttgtacattcattatcatatgtgtatcagaggagcaccactgccatttctgtcgttgctccaatttgctatgctcatctggctgctactcagatgggtcagtttatgaaatttgaagacaaatctgagacatcttcgagtcatggtggttctggtatgcctgctcctcccgtccctcagttgccaagattgcaggaaaatgtttcgagctcaatgttcttttgttga

SEQ ID NO: 11485 - protein, 906 aa, Glycine max
MASSGPNGTDNGDSLPPPPPVVPSDVVPVKAELEKKKALRLPIARRGLASKGTKLQLLTNHYRVNVANTDGHFYQYSVALFYDDGRPVEGKGVGRKLLDRVHETYDSELNGKDFAYDGEKTLFTLGSLARNKLEFTVVLEDIIASRNNGNCSPDGNGELNESDKKRMRRPNSSKAFKVELSYASKIPLQAIANALRGQESENYQEAIRVLDIILRQHAAKQGCLLVRQSFFHNDPKNFADVGGGVLGCRGFHSSFRTTQSGLSLNIDVSTTMIITPGPVVDFLISNQNVRDPFSLDWAKAKRTLKNLRIKASPSNQEFKITGISEFPCKDQTFTLKRKGGDDVAEEEVTVYDYFVNIRKIDLRYSGDLPCINVGKPKRPTYIPLELCSLVSLQRYTKALSTLQRASLVEKSRQKPQERMRVLTDALKSSNYGSEPMLRNCGISISPNFTEVEGRVLQAPRLKFGNGEDFNPRNGRWNFNNKKIVKPTKIERWAVVNFSARCDTRGLVRDLIKCGGMKGIVIDQPFDVFEENGQFRRAPPVVRVEKMFELVQSKLPGAPQFLLCLLPERKNSDLYGPWKKKNLAEFGIVTQCIAPTRVNDQYLTNVLLKINAKLGGLNSILGVEHSPSIPIVSRAPTIIIGMDVSHGSPGQTDIPSIAAVVSSREWPLISKYRASVRTQSPKMEMIDNLFKKVSDKEDEGIMRELLLDFYTSSGNRKPDNIIIFRDGVSESQFNQVLNIELDQIIEACKFLDEKWNPKFLVIVAQKNHHTKFFQPGAPDNVPPGTVIDNKICHPRNYDFYMCAHAGMIGTSRPTHYHVLLDEIGFSPDDLQELVHSLSYVYQRSTTAISVVAPICYAHLAATQMGQFMKFEDKSETSSSHGGSGMPAPPVPQLPRLQENVSSSMFFC

SEQ ID NO: 11486 - DNA, 2727 bp, Glycine max
  CDS (1)..(2727)
atgaaggatccagtggaggatcaagtgaaatctaggagtgcactgcagaaacccaaagaccatagaagaagagatagaagaagaagaagccaatgcaaacaagagaaattacaagaaacaggacttgacacacaattggtttcctctgcttgcaaaagtcttgtgtttcctgcaaggcctggctatggccagctggggacaaagtgtctggtcaaagccaaccacttcctggcagatatatcagcatctgatttgagccattacaatgttaaaataacacctgaggttacttctcgtaagacaagcaaagccatcatagctgagttagtgaggcttcacaggaacactgacttggggatgaggcttcctgtttatgatggaggaagaaatctctacactgctggcttgcttccttttgcattcaaagagttcaccatactactgagcaaggatgatgagggcactggttctaccagggaaaaagaatttgaagtggtgatcaagtttgcagctcgtgttagcatgcatcaattacgtgagcttctgagtgggaaacaagtggacaccccacaagaggcgcttactgtcattgacattgtattgagggagcttgcgactcagagctacgtgtcaattgggaggtttctctattctccgaatttaagaaaaccacagcagctaggtggtggcctggaatcatggcgcggcttctaccagagtataaggccaactcagatgggattgtcacttaatattgacatgtcatcaatggcgtttattgaaccacttcctgtaattgactttgttgctcaaattttgggaaaagatgttctctcaaagccattgtcagatgcagatcgtgtcaagattaagaaagccttaagaggtgtgaaagtagaagttacacatagaggaagttttcgaaggaagtacaggattacaggattgacatcacagcctacaagggagcttagtttccccgtcgatgagaaaatgaacatgaaatcagtagttgattactttcaagaaatgtatggatatacaatcatatattctcatctaccctgccttcaagtaggaagccaaaagaaggtgaactatttgcctatggaggcatgtaagatagttgggggtcagagatatacaaaagggcttaacgaaaagcagataacttctctgctaaaggtctcatgccagagaccacgtgaacaagagacagatattctccagacaattcacgaaactgattatgagtataatccctatgcaaaggagtttgggatcagcattgacagcaagcttgcatcagttgaggctcgggttcttcctgctccatggttgaaatatcacgagactggaagggagaaagaatacttgccacaagttggtcaatggaacatgatgaacaagaaagttataaacggaagcactgtaagatattgggcatgcattaatttctcccgaagtatccaagaaagtattgctcgcgggttttgccaacagttagttcaaatgtgccaaatctcaggcatggaatttagtctagaccctgtgattcctatatattcagcaagacctgatctggtaaagaaagccttgaagtacgtacattctgctgtacttgataaacttagtgggaaagaactagagttgctgattgccattcttccagacaacaatggctctctgtatggtgatctcaaaagaatctgtgaaacagatctggggttgatttctcagtgctgtcttacaaaacacgtattcaagatcaatagacagtatttggcaaatgtggcgctgaagatcaatgttaagatgggaggaaggaacacagtacttttggatgcgctaagttggagaatcccattggttagtgacattccaacaataatttttggagcagatgtaactcatccagaatctggagaggacccttgtccatccattgctgctgttgtagcctcccaggactggccagaagtgacaaaatatgcaggattggtatgtgctcagcctcatcgcgaggaactcattcaagacctttttaaatgttggaagaatcctcatcacggtatagtttatggtggcatgatcagagagctgttactctcttttaagaaggcaactggacaaaaaccattgaggataatattttacagggatggggtaagtgaaggacagttctaccaggttttgttgcatgagcttgatgccatccgtaaggcttgtgcatctttggaacctagttaccaacctcctgtaacatttgttgtggttcaaaagcggcatcacactagactcttctcaaacaatcatgacgacagaaatagcactgataagagtgggaatatcttacctggtactgtggtggattctaagatctgtcatcctacggaattcgacttctatttatgtagtcatgcaggaattcagggtacaagtagaccagctcattatcatgttctgtgggacgagaacaatttcactgctgatgagatccaatctctgaccaacaacttgtgctacacctatgcaagatgtacacgatcggtttctgtagtgcctcctgcgtactatgctcatttggcagcttacagagctcgattctacatggaacctaatgtccatgaaattgctaaagctcgaggtggaagatcaaaagatgagtcagttcggccactgccagctctgaaagagaaggtgaagaatgtaatgttttactgttga

SEQ ID NO: 11487 - protein, 908 aa, Glycine max
MKDPVEDQVKSRSALQKPKDHRRRDRRRRSQCKQEKLQETGLDTQLVSSACKSLVFPARPGYGQLGTKCLVKANHFLADISASDLSHYNVKITPEVTSRKTSKAIIAELVRLHRNTDLGMRLPVYDGGRNLYTAGLLPFAFKEFTILLSKDDEGTGSTREKEFEVVIKFAARVSMHQLRELLSGKQVDTPQEALTVIDIVLRELATQSYVSIGRFLYSPNLRKPQQLGGGLESWRGFYQSIRPTQMGLSLNIDMSSMAFIEPLPVIDFVAQILGKDVLSKPLSDADRVKIKKALRGVKVEVTHRGSFRRKYRITGLTSQPTRELSFPVDEKMNMKSVVDYFQEMYGYTIIYSHLPCLQVGSQKKVNYLPMEACKIVGGQRYTKGLNEKQITSLLKVSCQRPREQETDILQTIHETDYEYNPYAKEFGISIDSKLASVEARVLPAPWLKYHETGREKEYLPQVGQWNMMNKKVINGSTVRYWACINFSRSIQESIARGFCQQLVQMCQISGMEFSLDPVIPIYSARPDLVKKALKYVHSAVLDKLSGKELELLIAILPDNNGSLYGDLKRICETDLGLISQCCLTKHVFKINRQYLANVALKINVKMGGRNTVLLDALSWRIPLVSDIPTIIFGADVTHPESGEDPCPSIAAVVASQDWPEVTKYAGLVCAQPHREELIQDLFKCWKNPHHGIVYGGMIRELLLSFKKATGQKPLRIIFYRDGVSEGQFYQVLLHELDAIRKACASLEPSYQPPVTFVVVQKRHHTRLFSNNHDDRNSTDKSGNILPGTVVDSKICHPTEFDFYLCSHAGIQGTSRPAHYHVLWDENNFTADEIQSLTNNLCYTYARCTRSVSVVPPAYYAHLAAYRARFYMEPNVHEIAKARGGRSKDESVRPLPALKEKVKNVMFYC

SEQ ID NO: 11488 - DNA, 2748 bp, Glycine max
  CDS (1)..(2748)
atggattcatttgagccagatggaaatgggaaggagtcactgccaccaccacctcctgttgttccctctgatattgtacctctcaaagcagaggaggtgctctgtacccctaccgagcataataagaaaaaggcttcccgacttccaatagccagatctggtctgggatcaaaaggaaataaaatacaattactaaccaatcacttcaaagttaatgttgctaaaaatgatgggcatttcttccattatagtgtggcttttacttatgaagatggacgccctgtagaaggtaagggtgtagggagaaagataatagatagggtgcaggagacatatcattctgacttaaatggtaaggactttgcatatgatggggagaaaagtctgtttactgttggctctcttcctcaaaacaagcttgagtttgaagttgttcttgaggatgtcacctctaacaggaataatggcaattgcagccctgatggtctaggggacaatgagagtgacagaaagaggatgcgacgtccttatcgttcgaagtcattcaaagtagagataagctttgctgcaaaaattccaatgcaggccattgccagtgccttacgcgggcaagagactgagaattttcaagaagccatcagagttcttgatatcattttgaggcagcatgctgctaagcaaggctgcttacttgtacgccaatcctttttccacaataatccaaataattttgctgatgtaggaggtggtgtcctaggctgtagaggattccactcaagctttagaactacacagagtggcctgtctcttaacatagatgtgtcaactacaatgataatttctcctgggcctgtggtggatttcttaatttccaatcaaaatgtgagagatccttttcaacttgactgggctaaggccaaaaggaccctaaaaaatctgaggattaaaactagcccatccaatcaagaattcaaaatttctgggctcagtgaactcccatgcagagagcagacttttactttgaaaggtaaaggtgggggggatggtgaagatggtaatgaggaaatcactgtatatgattattttgttaaggttcgtaagatagatctccgatactctgctgaccttccatgtatcaatgttggcaagcctaaacgaccaacatttttccccattgaggtttgtgaattggtatcattgcaacgatatacaaaagctctgtccacgcttcaaagggcttcattagtggagaagtcgaggcagaagccacaagagaggatgaaaattttgtctgatgcactgagaacaagcaactatggtgctgaacctatgctccggaattgtggaatttctataagcactggcttcactgaagtggagggccgggtgttgcctgcaccaaggttgaagtttggcaatggtgaggatctcaatcctaggaatgggagatggaatgtcagcagagtgaaatttgtggaaccatcaaagatagaaagatgggctgttgctaacttttctgcacgctgtgatgtacgaggacttgtacgggacctcattagaattggagatatgaaaggaattactatagaacaaccatttgacgtgtttgatgagaatccacagtttaggcgtgccccccctatggttagagtggagaaaatgttcgagcatatccaatctaaacttcctggggctcctcagttccttctctgtttgcttcctgatcggaaaaattgtgatatttatggtccatggaaaaagaagaatcttgctgattttggaatcataaatcagtgtatgtgtcctttaagggtcaatgaccagtacctgactaatgttatgttgaagatcaatgccaagcttggtgggttgaattcattgttaggcgttgaacattctccttctcttcctgttgtttccaaagctcccaccctcattctgggaatggacgtgtcacatggctcacctgggcagactgacattccttcaattgctgcggtggtcagctctagacactggcctctgatatcaaagtatagggcatgtgttcgtacgcaatctgcaaagatggaaatgattgataatttgttcaagctagtatctgaaaaggaagatgaaggcatcataagggaacttttgcttgatttctatacaacttctgggaggagaaaaccggaaaatataatcatattcagggatggggttagtgagtcacaattcaatcaagttttgaatattgaactcgatcgaatcattgaggcttgcaaatttctcgatgaaaattgggagccaaaatttgtggtaattgttgctcagaagaaccaccacactagatttttccagcctggctctcccgacaatgtcccacctggaactgttatcgacaataaaatttgtcatcccagaaattatgatttctacctatgtgcacatgctggaatgataggaactagtaggcctacccattatcatgtgctgcttgatcaggttggtttctctccggatcagctgcaggagcttgtccattcattatcatatgtgtatcagaggagcactactgccatttctgttgttgctccaatatgctatgcgcacttggctgctactcagttggggcagttcatgaaatttgaggacaaatctgaaacatcttcaagccatggtggattgagcggtgcaggtgctgttcccgtccctcagttgcctcccttgcaggagaatgtccgcaacacaatgttcttttgttga

SEQ ID NO: 11489 - protein, 915 aa, Glycine max
MDSFEPDGNGKESLPPPPPVVPSDIVPLKAEEVLCTPTEHNKKKASRLPIARSGLGSKGNKIQLLTNHFKVNVAKNDGHFFHYSVAFTYEDGRPVEGKGVGRKIIDRVQETYHSDLNGKDFAYDGEKSLFTVGSLPQNKLEFEVVLEDVTSNRNNGNCSPDGLGDNESDRKRMRRPYRSKSFKVEISFAAKIPMQAIASALRGQETENFQEAIRVLDIILRQHAAKQGCLLVRQSFFHNNPNNFADVGGGVLGCRGFHSSFRTTQSGLSLNIDVSTTMIISPGPVVDFLISNQNVRDPFQLDWAKAKRTLKNLRIKTSPSNQEFKISGLSELPCREQTFTLKGKGGGDGEDGNEEITVYDYFVKVRKIDLRYSADLPCINVGKPKRPTFFPIEVCELVSLQRYTKALSTLQRASLVEKSRQKPQERMKILSDALRTSNYGAEPMLRNCGISISTGFTEVEGRVLPAPRLKFGNGEDLNPRNGRWNVSRVKFVEPSKIERWAVANFSARCDVRGLVRDLIRIGDMKGITIEQPFDVFDENPQFRRAPPMVRVEKMFEHIQSKLPGAPQFLLCLLPDRKNCDIYGPWKKKNLADFGIINQCMCPLRVNDQYLTNVMLKINAKLGGLNSLLGVEHSPSLPVVSKAPTLILGMDVSHGSPGQTDIPSIAAVVSSRHWPLISKYRACVRTQSAKMEMIDNLFKLVSEKEDEGIIRELLLDFYTTSGRRKPENIIIFRDGVSESQFNQVLNIELDRIIEACKFLDENWEPKFVVIVAQKNHHTRFFQPGSPDNVPPGTVIDNKICHPRNYDFYLCAHAGMIGTSRPTHYHVLLDQVGFSPDQLQELVHSLSYVYQRSTTAISVVAPICYAHLAATQLGQFMKFEDKSETSSSHGGLSGAGAVPVPQLPPLQENVRNTMFFC

SEQ ID NO: 11490 - DNA, 2721 bp, Glycine max
  CDS (1)..(2721)
atggcttctttcgggccaaatggaactgaaaatgaggattcgttgcctcccccacctcccgttgtaccatcagatgttgtacctgttaaagctgagccggagaagaaaaaggcttcaaggtttccaatagccaggcgtggccttgcttcaaaagggacgaagctgcaacttctcaccaatcactacagagtgaacgttgcaaacactgatgggcatttttatcagtatagtgttgctcttttttatgatgatggacgacctgtggagggtaagggtgtagggaggaagcttctggacagggtgcatgaaacgtatgattctgaattgaatgggaaagattttgcatatgatggtgagaagactctgtttactctcgggtctcttgctcgcaacaagcttgagtttacggttgttctggaggatgttattgctaccagaaacaatggaaactgcagcccagagggcaatggagaactgaatgagagtgacaaaaagaggatgaggcgccctaatagatccaaggcatttaaagtggaacttagctatgcttcaaagattccattgcaggccattgccaatgctctacgtggacaggaatctgagaattatcaagaagcaataagagtgcttgatatcattttgaggcaacatgctgctaagcaagggtgtttgcttgtgcggcaatcgttctttcacaacaatcccaagaattttgctgatgtaggaggaggtgtacttggttgcaggggcttccactctagttttagaactactcaaagtggactgtctttgaacatagatgtctcaaccaccatgataattacccctgggcctgtggttgacttcctaatatccaatcaaaatgtgagagaccccttttcacttgattgggcaaaggccaagaggacattaaaaaacctgaggattaaatcgagcccatctaatcaagaattcaaaatcactgggcttagtgaactcccttgcaaagatcaaatgtttacattgaagaaaaaaggtggtgatgatgacactgaggaagaagtgacagtatatgattattttgttaatatccgcaagatagatcttcggtattctggggatctcccatgtatcaacgttgggaaaccaaaaaggccaacttacattcctcttgagctgtgttctttggtatcacttcaacgttatacaaaagcactatccacacttcaaaggtcttcattggtggagaagtccaggcagaagccacaagagaggatgagggtcttgtctgatgcacttaaaagtagcaattatggttctgaaccaatgctacgcaattgtggaatctctataagccccaactttactgaagttgagggtcgggttttacaagctccacggttgaaatttggtaatggggaggacttcaatcctagaaatgggaggtggaacttcaataacaagaaaattgtcaagccaactaaaatagaaagatgggctgtggttaacttctctgcacgctgtgatatacgagggcttgtgagggatctcattaagtgtggtggaatgaaaggcattgtgatagatcagccgtttgatgtgtttgaagaaaatggtcagtttaggcgtgcaccgccagtggttcgagttgagaagatgtttgagttggtccagtcaaaacttcctggggctcctcagtttcttctttgtctgcttcctgagaggaaaaattctgatctttatggtccatggaagaagaagaatcttgctgagtttggaattgtgactcagtgtatagctccgacaagggtcaatgaccaatatttgactaatgttctgttgaaaatcaatgctaagcttggtggtctgaactcaatgttaggcgttgagcattctccttctattcctattgtttctagagcgccaaccatcattattggcatggatgtgtctcatggttcgccagggcaaacagatattccttcaattgctgcggtggtcagctctagagaatggcctctaatatcaaagtatagggccagtgtccgtacgcagtctccaaagatggaaatgattgataatttgttcaagaaagtttccgacaaggaggatgaaggcataatgagggagcttctacttgatttctatacaagttctggaaatagaaagcccgataatataatcatattcagggatggtgttagtgagtcccagttcaatcaagttttgaacattgaacttgatcaaattatcgaggcttgcaagtttttagatgaaaagtggaatcccaagtttttggtgattgttgctcaaaagaaccatcatactaaattctttcaacctggagctcctgacaatgttcctcctggaacggtaattgataacaaaatttgtcatcctcggaattatgatttctacatgtgtgcacatgctggaatgattggtactagcaggcctacacactaccatgttctcttagacgagattggcttttcacctgatgatctacaggagcttgtgcattcattatcatatgtgtatcagaggagcacaactgccatttctgtcgttgctccaatatgctatgctcatctggctgcaactcagatgggtcaatttatgaaatttgaggacaaatctgagacatcttcaagtcatggtggttctggtatacctgctcctcccgtccctcagttgccaagattgcaggacaaagtttcgagctcaatgttcttttgttga

SEQ ID NO: 11491 - protein, 906 aa, Glycine max
MASFGPNGTENEDSLPPPPPVVPSDVVPVKAEPEKKKASRFPIARRGLASKGTKLQLLTNHYRVNVANTDGHFYQYSVALFYDDGRPVEGKGVGRKLLDRVHETYDSELNGKDFAYDGEKTLFTLGSLARNKLEFTVVLEDVIATRNNGNCSPEGNGELNESDKKRMRRPNRSKAFKVELSYASKIPLQAIANALRGQESENYQEAIRVLDIILRQHAAKQGCLLVRQSFFHNNPKNFADVGGGVLGCRGFHSSFRTTQSGLSLNIDVSTTMIITPGPVVDFLISNQNVRDPFSLDWAKAKRTLKNLRIKSSPSNQEFKITGLSELPCKDQMFTLKKKGGDDDTEEEVTVYDYFVNIRKIDLRYSGDLPCINVGKPKRPTYIPLELCSLVSLQRYTKALSTLQRSSLVEKSRQKPQERMRVLSDALKSSNYGSEPMLRNCGISISPNFTEVEGRVLQAPRLKFGNGEDFNPRNGRWNFNNKKIVKPTKIERWAVVNFSARCDIRGLVRDLIKCGGMKGIVIDQPFDVFEENGQFRRAPPVVRVEKMFELVQSKLPGAPQFLLCLLPERKNSDLYGPWKKKNLAEFGIVTQCIAPTRVNDQYLTNVLLKINAKLGGLNSMLGVEHSPSIPIVSRAPTIIIGMDVSHGSPGQTDIPSIAAVVSSREWPLISKYRASVRTQSPKMEMIDNLFKKVSDKEDEGIMRELLLDFYTSSGNRKPDNIIIFRDGVSESQFNQVLNIELDQIIEACKFLDEKWNPKFLVIVAQKNHHTKFFQPGAPDNVPPGTVIDNKICHPRNYDFYMCAHAGMIGTSRPTHYHVLLDEIGFSPDDLQELVHSLSYVYQRSTTAISVVAPICYAHLAATQMGQFMKFEDKSETSSSHGGSGIPAPPVPQLPRLQDKVSSSMFFC

SEQ ID NO: 11492 - DNA, 2925 bp, Glycine max
  CDS (1)..(2925)
atgccagtgaggcagatgaaagaaagttcggagcaacaccttgtgatcaaaccccatttgcagaatcctatgaatcaagccaagaagacaaccaaagctgcacaaaatggcaaaggtccaccgccacaagaaaaccataatcaaactttgcctaactcaaagaacaagggaagaagaagggggagaggtggcagaaaatctgatcaaggagatgttatgatgaggcctagttgcaggccatgcactgcaccactaacaagtagtgcaaatgggaacgctgaaaatggttgtatctctgatacgggttttcccacttcaagcaagtctttgacctttgctcgtaggcctgggtatggacaagttgggacaaaatgcattgtgaaggctaaccacttctttgcagagttaccagacaaggacttgaaccaatatgatgttactattaccccagaagtgtcttctagaacagtaaacaggtctatcatagcagaacttgtgaggctgtataaagagtctgacttggggatgagacttccagcatatgatggcagaaaaagtctgtacactgcagggcagcttccctttgcttggagagagtttaagattaagcttgtagatgaagaggatggagttaatggccccaaaagggaaagagagtacagggtggtgatcaagtttgttgctcgggcaaatttgtatcacttgggccaatttctagctggtaagcgtgctgatgcaccgcaagaggcacttcaaattcttgacattgtactaagagagctgtcaactaagaggtattgccccattgggaggtccttcttttcacctgatattagaacaccgcaacggcttggagagggattagagtcatggtgtggattttaccagagtataaggcctacacaaatgggcctttcccttaatattgatatggcatctgctgcgtttattgagcctctgccagtagtggaatttgttggtcagctattaggaaaagatgtgctgtcaaggccattgtcagatgctgatcgcattaagattaagaaagcccttagaggagttaaagttgaagtaacacacagaggaagtgtgagaagaaagtatcgtgtttctgggttgacttctcaacctaccagagaacttgtgtttcctgttgatgagaactcaactatgaaatcagtagttgaatacttccaagagatgtatggtttcactattcaatatactcaccttccttgccttcaagtaggaaaccaaaagaaggcgaactatttacctatggaggcctgcaaaattgttgaggggcaacgttatacaaaaagattgaatgagaagcaaattacggctctattgaaagttacttgccagaggcctcgcgatcgggaaaatgacattttacggaccgttcaacataatgcttatgatcaagatccttatgcaaaggaatttggaattaaaatcagtgaaaagctagcttctgttgaagcacgaattcttcctgctccttggcttaaatatcatgaaagtgggaaagaaaagaactgtttaccccaagttggtcagtggaatatgatgaacaagaaaatgattaatggaatgactgttagccggtgggcatgcataaatttttcacggagcgtgcaagatagtgttgctcgtactttttgtaatgagcttgctcaaatgtgtcaagtatctggcatggaatttaatccagagcccgttatccccatctacaatgccaagcctgaacaggtggagaaagctttgaaacatgtttaccatgtggcagggagcaaaactaaagcaaaggaattggagcttttgttagcaatattgccagacaataatgggtctctctatggtgatctcaagcgaatttgtgaaactgaccttggcttaatttcacaatgctgtctgacaaagcatgtcttcaaaatcactaaacagtacctggctaatgtgtctctgaagatcaatgtgaagatgggaggtagaaacactgtacttcttgatgctgtaagctgcagaataccattggttagtgacataccaaccataatttttggagcagatgtaacccacccagaaaatggagaagactcgagcccttcaatagcagctgtagtagcatcccaggactggcccgaagtgacaaaatatgccggtttggtatgcgcccaagctcataggcaggaacttatacaagatttgtacaaaacttggcaagaccctgttcgtggcacagttagtggtggcatgatccgagatttactggtttcctttagaaaggcaacaggacaaaagccactacgaattatattttacagggacggtgtaagtgaagggcaattttaccaagttttactttatgagttggatgcgattcggaaggcatgtgcttccttagaaccaaactaccagcctccagtaacattcatagttgtgcaaaaaagacatcatacccggttatttgcaaacaactacagggacagaagtagtacagataggagtgggaatatattgcctgggactgtcgttgattccaaaatctgccatccaacagaatttgatttttatctctgcagccatgctggcatccagggtactagtcggccagctcattatcatgtcctgtgggatgaaaacaacttcacagcagatggaattcagtctctgacaaacaatctttgttatacatatgccaggtgtacgcgctcagtatcagttgttcctccagcatattatgcacatttagcagcgttccgagcacgtttctatatggagccagatatgcaagacaatggctctgcaggtgatggcaatggttatggtgccaaagcaacacgagcagctggtgattatagtgtcaagccattgccagacttgaaagaaaatgtgaagagggtcatgttttactgttag

SEQ ID NO: 11493 - protein, 974 aa, Glycine max
MPVRQMKESSEQHLVIKPHLQNPMNQAKKTTKAAQNGKGPPPQENHNQTLPNSKNKGRRRGRGGRKSDQGDVMMRPSCRPCTAPLTSSANGNAENGCISDTGFPTSSKSLTFARRPGYGQVGTKCIVKANHFFAELPDKDLNQYDVTITPEVSSRTVNRSIIAELVRLYKESDLGMRLPAYDGRKSLYTAGQLPFAWREFKIKLVDEEDGVNGPKREREYRVVIKFVARANLYHLGQFLAGKRADAPQEALQILDIVLRELSTKRYCPIGRSFFSPDIRTPQRLGEGLESWCGFYQSIRPTQMGLSLNIDMASAAFIEPLPVVEFVGQLLGKDVLSRPLSDADRIKIKKALRGVKVEVTHRGSVRRKYRVSGLTSQPTRELVFPVDENSTMKSVVEYFQEMYGFTIQYTHLPCLQVGNQKKANYLPMEACKIVEGQRYTKRLNEKQITALLKVTCQRPRDRENDILRTVQHNAYDQDPYAKEFGIKISEKLASVEARILPAPWLKYHESGKEKNCLPQVGQWNMMNKKMINGMTVSRWACINFSRSVQDSVARTFCNELAQMCQVSGMEFNPEPVIPIYNAKPEQVEKALKHVYHVAGSKTKAKELELLLAILPDNNGSLYGDLKRICETDLGLISQCCLTKHVFKITKQYLANVSLKINVKMGGRNTVLLDAVSCRIPLVSDIPTIIFGADVTHPENGEDSSPSIAAVVASQDWPEVTKYAGLVCAQAHRQELIQDLYKTWQDPVRGTVSGGMIRDLLVSFRKATGQKPLRIIFYRDGVSEGQFYQVLLYELDAIRKACASLEPNYQPPVTFIVVQKRHHTRLFANNYRDRSSTDRSGNILPGTVVDSKICHPTEFDFYLCSHAGIQGTSRPAHYHVLWDENNFTADGIQSLTNNLCYTYARCTRSVSVVPPAYYAHLAAFRARFYMEPDMQDNGSAGDGNGYGAKATRAAGDYSVKPLPDLKENVKRVMFYC

SEQ ID NO: 11494 - DNA, 3189 bp, Glycine max
  CDS (1)..(3189)
atgtgtcccatgcgtgcagttttcgtcatggtcagaaagagaagaactgaactaccaagtgggggtgaaagctctgaggctcaacacccttctgaaaggagtgcaccaccgccccaacaacaagctgctgctgctgccccaggaggggctggaccccaaggaggcagaggctggggtccccaaggaggaagaggagggggccgcagccgtgggatgccccaacagcaatatggtgcccctcctgattatcaaggtaggggaaggggagggccttctcagcaaggaggccgtggaggatatggcagtggccgaagtggtggtggtggtggtggtatgggcagtggccgtggcgttggtccttcatatggtggcccatcgaggccaccggcacccgagctgcaccaagcaacctcagttcagtcatatcaaactggggtgagttctcagcctgcatcatctgaggccagttcatccctgccgccagagcctattgatttggaacagtcaatggggcagatggtgcttcattctgaacctgctcctactcctcctcctgcaagtaaatcatcaatgaggtttccccttcgacctggaaagggtagctatggcaccaagtgtgttgttaaggctaatcatttctttgctgagttacccaacaaagatctgcatcaatatgatgttacaattactccagaagtgatatcaagaggggtgaaccgtgctgttatggagcagttggtgagactgtaccgggaatctcacttgggtaagagactccctgcttatgatggacgcaagagcctctatactgctggaccacttccttttatgtcaaaggagttcagaattgttctcgttgatgatgatgaaggagctggaggccagaggagggacagggagttcaaggttgtgataaaattggctgcacgtgcagaccttcaccatttgggactctttttacaaggaaggcaaactgatgctcctcaagaggctttgcaggtccttgacattgttctgcgcgaactccctactacaaggtattgtcctgttggaagatcattttattcacctgatttgggcagaagacagcctttaggtgagggattggaaagctggcgtggtttctaccagagtattcggcctacacagatggggctatcactgaacattgatatgtcttccactgcatttattgagccattgccagtaattgatttcgtaactcaactgctgaacagagatgtatccgcccggccactttctgatgctgatcgtgtgaagatcaagaaagctctccggggtatcaaagttgaagtgacacatcgtggaaacatgagaagaaaatatcgtatctctggtctgacttcacaggcaaccagagaattgacattcccggtagatgaaaggggaaccatgaaatctgttgtggagtacttctatgagacatatgggtttgtcattcaacatactcagtggccttgtctgcaagttggcaatgcacagagaccaaactatttgccaatggaggtttgcaagatagtggagggtcaaaggtactcgaaaaggcttaatgagaggcaaatcactaatttgctgagagttacatgccagcgtcctggtgagagggagcgtgatatcatgcagacagtacaccacaacgcataccacgaagatccttatgctaaagaatttggaatcaagattagcgagaaacttgctcaagttgaagctcgcatccttcctgctccatggctcaaatatcacgatacgggcagagaaaaggattgtcttcctcaagttgggcaatggaatatgatgaataagaaaatggttaatggggggacagttaacaactggttctgcataaacttttcaaggaatgttcaagatagtgttgcccgtggtttttgctatgaacttgctcagatgtgttatatatctggaatggcatttacacctgagccagtagtccccccagtcagtgctcgccctgatcaagtggaaaaggttcttaaaactcggtatcatgatgccaagaacaaactgcaaggaagagagcttgatttgctcatcgttatcttgcccgataataatggatctctttatggtgatctcaaacggatatgtgagactgacctaggacttgtttcacaatgttgcttaactaagcatgtcttcaaaatgagcaagcagtaccttgcaaatgttgctttgaaaattaatgtcaaagttggagggagaaacactgtactggttgatgcgctctcacgacgcattcccttggtcagtgacagacctacaattatttttggagctgatgtgactcatccacatcctggagaggattcaagcccatcaattgcagcagttgtggcttcgcaagactatcctgaaattacaaagtatgctggtttagtttgtgcccaagttcataggcaggaactcattcaggatcttttcaaacaatggcaagatccagtcagaggaacagtgactggtggaatgatcaaggaacttcttatatcttttaggagagctacaggacaaaagccacaacgcatcatattttatagggatggtgtgagtgagggacagttttatcaggttctactgtttgagcttgatgctattcgaaaggcatgtgcatccctggaacccaattatcagcctcctgtgacttttgtggtggttcaaaagcgtcaccacacaaggctctttgctagcaaccatcatgataagagttctgttgacaagagtggcaacatattgcctggcactgttgttgactccaaaatctgccatcccaccgaatttgacttttatctctgcagccatgctggaatacagggtacaagccgtcctgctcactaccatgtgttgtgggatgaaaacaattttactgctgatgccttgcaaacactcaccaacaatctttgctacacatatgctcggtgcacccggtctgtttcaatcgtgcctcctgcatactatgctcaccttgctgcattccgcgcaaggttttacatggaaccagagacgtcggatagtggctctatgacaagtggtgctgttgcaggccgtgggatgggcggtgtagggcgtagcacgcgtgtacctggtgccaatgctgctgtgagaccattgcctgcactcaaggagaacgtcaagagagttatgttttattgttaa

SEQ ID NO: 11495 - protein, 1062 aa, Glycine max
MCPMRAVFVMVRKRRTELPSGGESSEAQHPSERSAPPPQQQAAAAAPGGAGPQGGRGWGPQGGRGGGRSRGMPQQQYGAPPDYQGRGRGGPSQQGGRGGYGSGRSGGGGGGMGSGRGVGPSYGGPSRPPAPELHQATSVQSYQTGVSSQPASSEASSSLPPEPIDLEQSMGQMVLHSEPAPTPPPASKSSMRFPLRPGKGSYGTKCVVKANHFFAELPNKDLHQYDVTITPEVISRGVNRAVMEQLVRLYRESHLGKRLPAYDGRKSLYTAGPLPFMSKEFRIVLVDDDEGAGGQRRDREFKVVIKLAARADLHHLGLFLQGRQTDAPQEALQVLDIVLRELPTTRYCPVGRSFYSPDLGRRQPLGEGLESWRGFYQSIRPTQMGLSLNIDMSSTAFIEPLPVIDFVTQLLNRDVSARPLSDADRVKIKKALRGIKVEVTHRGNMRRKYRISGLTSQATRELTFPVDERGTMKSVVEYFYETYGFVIQHTQWPCLQVGNAQRPNYLPMEVCKIVEGQRYSKRLNERQITNLLRVTCQRPGERERDIMQTVHHNAYHEDPYAKEFGIKISEKLAQVEARILPAPWLKYHDTGREKDCLPQVGQWNMMNKKMVNGGTVNNWFCINFSRNVQDSVARGFCYELAQMCYISGMAFTPEPVVPPVSARPDQVEKVLKTRYHDAKNKLQGRELDLLIVILPDNNGSLYGDLKRICETDLGLVSQCCLTKHVFKMSKQYLANVALKINVKVGGRNTVLVDALSRRIPLVSDRPTIIFGADVTHPHPGEDSSPSIAAVVASQDYPEITKYAGLVCAQVHRQELIQDLFKQWQDPVRGTVTGGMIKELLISFRRATGQKPQRIIFYRDGVSEGQFYQVLLFELDAIRKACASLEPNYQPPVTFVVVQKRHHTRLFASNHHDKSSVDKSGNILPGTVVDSKICHPTEFDFYLCSHAGIQGTSRPAHYHVLWDENNFTADALQTLTNNLCYTYARCTRSVSIVPPAYYAHLAAFRARFYMEPETSDSGSMTSGAVAGRGMGGVGRSTRVPGANAAVRPLPALKENVKRVMFYC

SEQ ID NO: 11496 - DNA, 2799 bp, Glycine max
  CDS (1)..(2799)
atgccagtgagacagatgagggagggctcagaacagcacattgtgatcaaaccccatttgcagaaccccatgaatggagctaagaaggttcctagagctgttcaaaatggcaaaggttcaccaccgccaccactgtcacaacaggaactaccccacaaccaaacttcacctcatgcaaggaacaaggggagaagaaggagccgaggtggaggaagaaaatgtgatcaaggagatgttttgatgagacctattgtgactagtggtgttgaaaatggaagcaccatgtgtggtgaaaaagagatgagttaccctacttcaagcaagtcgttgagctttgctcctagacctggctatggacaagttggaacaaagtgcattgtgaaggctaaccacttctttgcagagttaccagacaaggacttgaaccagtatgatgtcagtattacccctgaagtgtcttccaaagcagtgaacaggtccattatagcagaacttgtgaggctgtataaagagtctgaccttgggatgaggcttccagcatatgatggcagaaaaagtatgtacactgcggggccacttcccttttcatggagagagtttaagataaaggttgtggatgatgaggatggagttaatggctccaaaagggaaagagaatatagagtggtgatcaagtttgttgccagggcaaatttgcatcacttgggccagtttctggctggtaaatgtgctgatgctccacaagagacactccaaattcttgacattgtattaagagagctatcatctaagaggttttgcccaattgggaggtccttcttttcacctgatattagaacaccacaacggcttggagagggtttggaatcatggtgtggattttaccaaagcataaggcctactcagatgggtctttccctcaatattgatatggcttctgctgcgttcattgaacctcttccagttgtggaatatgttgaccagctattaggaaaagatatcctgtcgaggcaattgtccgacgctgatcgcattaaaattaagaaagtccttagaggtgttaaagttgaagtaacccacagagggagtgttagaagaaagtatcgagtttctggtttgacttctcaaccaaccagagaacttgtgtttcccgttgatgagaattcaactatgaagtccgtagttgaatacttccaagagatgtatggtttcacaattaaatattctcaccttccttgccttcaagtaggaaatcaaaagaaagcaaattatttacctatggaggcctgcaaaattgttgagggacaacgatatacaaaaaggttgaatgagaagcaaatcactgctctcttgaaagttacttgtcaaagacctcgcgatcgagaaaatgacattttgcagcttaaatataacgaaagtgggaaagaaaagaattgtttaccccaagttggccagtggaatatgatgaacaagaaaatgataaatgggatgactgtcagccagtgggcatgcataaatttttcacgaagcgtacaagacagtgttgctcgcactttttgtaatgaattagtccaaatgtgccaagtatctggcatggaatttaatccagagcctgttatccccatctacaatgccaaatcagaacatgtggagaaagctttgaagtatgtttaccatgtgtcaacaaacaaaacaaaaggaaaggaattggagcttttgttagcaatattgcccgacaacaatggttctctctatggtgatctcaagcgtatttgtgaaacggaccttggtttaatttctcaatgttgtttgactaagcatgtctttaagatcactaagcagtatttggctaatgtgtctttgaaaatcaatgtcaagatgggaggtagaaacaccgttctggttgatgctgtaagctgtagaataccattggttagtgacataccaactataatatttggagcggatgttacccatcctgaaaatggagaagactccagcccttcaatagcagctgtagtagcatctcaagactggcctgaactgacaaaatatgctggtttagtgtgtgctcaagctcatagacaggaactcatacaagatttgtacaaaatgtggcacgaccctgttcgtggcttagtcagtggtggtatgatccgagatttgttgatttcctttagaaaggcaaccggtcagaagcctctaaggattatattttatagggatggtgtaagtgaagggcaattttaccaagttctactttatgagttggatgcaattcggaaggcatgcgcttctttagaaccaaactatcaacctccagtaactttcatagttgtacaaaaaagacaccatactcggttgtttgcaaataaccacagggacaggaacagtacagataagagtggaaatatattgcctgggactgtagttgattccaaaatctgtcatccaacagaatttgatttttatctctgtagtcatgctggcatccagggtacgagtcgtccagctcattatcatgttctgtgggatgaaaacaacttcacagcagatggaattcagtctttgacaaacaatctctgttatacatatgccaggtgtacacgctctgtatctgttgttcctccagcgtattacgcacatttagcagcttttcgagcacgtttctatatggagccagacctgcagcaggagaatggctcctcaggtggtggctccagggcaacaagagcaggtggagtcaagccattgccagccttgaaagaaaatgtgaagagagttatgttttattgttag

SEQ ID NO: 11497 - protein, 932 aa, Glycine max
MPVRQMREGSEQHIVIKPHLQNPMNGAKKVPRAVQNGKGSPPPPLSQQELPHNQTSPHARNKGRRRSRGGGRKCDQGDVLMRPIVTSGVENGSTMCGEKEMSYPTSSKSLSFAPRPGYGQVGTKCIVKANHFFAELPDKDLNQYDVSITPEVSSKAVNRSIIAELVRLYKESDLGMRLPAYDGRKSMYTAGPLPFSWREFKIKVVDDEDGVNGSKREREYRVVIKFVARANLHHLGQFLAGKCADAPQETLQILDIVLRELSSKRFCPIGRSFFSPDIRTPQRLGEGLESWCGFYQSIRPTQMGLSLNIDMASAAFIEPLPVVEYVDQLLGKDILSRQLSDADRIKIKKVLRGVKVEVTHRGSVRRKYRVSGLTSQPTRELVFPVDENSTMKSVVEYFQEMYGFTIKYSHLPCLQVGNQKKANYLPMEACKIVEGQRYTKRLNEKQITALLKVTCQRPRDRENDILQLKYNESGKEKNCLPQVGQWNMMNKKMINGMTVSQWACINFSRSVQDSVARTFCNELVQMCQVSGMEFNPEPVIPIYNAKSEHVEKALKYVYHVSTNKTKGKELELLLAILPDNNGSLYGDLKRICETDLGLISQCCLTKHVFKITKQYLANVSLKINVKMGGRNTVLVDAVSCRIPLVSDIPTIIFGADVTHPENGEDSSPSIAAVVASQDWPELTKYAGLVCAQAHRQELIQDLYKMWHDPVRGLVSGGMIRDLLISFRKATGQKPLRIIFYRDGVSEGQFYQVLLYELDAIRKACASLEPNYQPPVTFIVVQKRHHTRLFANNHRDRNSTDKSGNILPGTVVDSKICHPTEFDFYLCSHAGIQGTSRPAHYHVLWDENNFTADGIQSLTNNLCYTYARCTRSVSVVPPAYYAHLAAFRARFYMEPDLQQENGSSGGGSRATRAGGVKPLPALKENVKRVMFYC

SEQ ID NO: 11498 - DNA, 2919 bp, Glycine max
  CDS (1)..(2919)
atgccagtgagacagatgagggagagctcagaacaacaccttgtgatcaaaccccatttgcagaaccccatgaatggagctaagaaggttcctagagctgttcaaaatggcaaaggtccaccaccaccgccactgccacaacaggaactaccccacaaccaaacttcacctcatgtaaggaacaaggggagaagaaggagcagaggtggaggaagaaaatgtgatcaaggagatgttttgatgagacctattgtggcaagtggtgttgaaaatggaagcaccatgtgtggtgaaatagagatgagttgccccacttcaagcaagtctttgagctttgctcctaggcctggctatggacaagttgggacaaagtgcattgtgaaggctaaccacttctttgcagagttaccagacaaggacttgaaccagtatgatgtcagtattacccccgaagtgtcttccaaagcagtgaacaggtccattatagcagaacttgtgaggctgtataaagagtctgaccttgggatgaggcttccagcatatgatggcagaaaaagtctgtacactgcagggccacttcccttttcctggagagagttcaagataaaggttgtggatgatgaggatagagttaatggccccaaaagggaaagagattatagagtggtgatcaagtttgttgccagggccaatttgcaccacttgggccagtttctagcgggtaaatgtgctgaagctccacaagaggcactccaaattcttgacattgtattaagagagctatcatctaagaggttttgcccaattgggaggtccttcttttcacctgatattagaacaccacaacggcttggagagggtttggaatcgtggtgtggattttaccaaagcataaggcctactcagatgggtctttcactcaatattgatatggcttctgctgcgttcattgaacctcttccagttgtggaatatgttggccagctattaggaaaagatattctgtcgaggcaattgtctgatgctgatcgcattaaaattaagaaagcccttagaggagttaaagtcgaagtaacccaccgagggagtgttagaagaaagtatcgagtttctggtttgacttgtcaaccaaccagagaacttgtgtttcctgttgatgagaattcaactatgaagtcagtagttgaatactttcaagagatgtatggtttcacaattaaatatactcaccttccttgccttcaagtaggaaatcaaaagaaggcaaattatttacctatggaggcctgcaaaattgttgagggacaacgatatacaaaaaggttgaatgagaagcaaatcactgctctcctgaaagttacttgtcaaagacctcgtgatcgagaaaatgacattttgcagaccattcagcacaatgcttatggtcaagatccttatgcaaaggaatttgggattaaaattagtgaaaagctagcttctgtagaagcgcgaattctccctgccccatggcttaaatatcatgaaagtgggaaagaaaagaattgtttaccccaagttggtcagtggaatatgatgaacaagaaaatgataaatgggatgactgtcagccagtgggcatgcataaatttttcacgaagtgtacaagacagtgttgctcgcactttttgtaccgagctagctcaaatgtgccaagtatctggcatggaatttaatccagagcctgttatccccatctacaatgccaaacctgagcatgtggagaaagctttgaagcatgtttaccatgcgtcaacaaacaaaaccaaaggaaaggaattggagcttttgttagcaatattgccggacaacaatggttctctctatggtgatctcaagcgtatttgtgaaaccgaccttggtttaatttctcaatgttgtttgacaaagcatgtctttaagatcacaaagcagtatttggctaatgtgtctctgaaaatcaatgtcaagatgggaggtagaaacaccgttcttgttgatgctgtaagctgtagaataccattggttagtgacataccaactataatatttggagcagatgttacccatcctgaaaatggagaagactccagcccttcaatagcagccgttgtagcatctcaagactggcctgaagtgacgaaatatgccggtttagtgtgtgctcaagctcatagacaggaactcatacaagatttgtacaaaatgtggcacgaccctgttcgtggcttagtcagtggtggcatgatccgagacttgttgatttcctttagaaaggcaacagggcagaagcctctaagaattatcttttatagggatggtgtaagtgaagggcagttttaccaagttctactttatgagttggatgcaattcggaaggcatgtgcttctttagaaccaaactatcaacctccagtaactttcatagttgtacaaaaaagacaccatacccggttgtttgcaaataaccacagggacaggaacagtacagataagagtggaaatatattgcctgggactgttgttgattccaaaatctgtcatccaacagaatttgatttttatctgtgcagtcatgctggcatccagggtacgagtcgtccagctcattatcatgttctgtgggatgaaaacaacttcacagcagatggaattcagtctttgacaaacaatctctgttatacatatgccaggtgtacacgctccgtatctgttgttcctccagcgtattatgcacatttggcagcttttcgagcgcggttctatatggagccagacctgcagcaggagaatggctcctcaggtggtggctccaaggcaacaagagcaggtggggtgtgtggtggggtgaagccattgccagcattgaaagaaaatgtgaagagagtcatgttttattgttag

SEQ ID NO: 11499 - protein, 972 aa, Glycine max
MPVRQMRESSEQHLVIKPHLQNPMNGAKKVPRAVQNGKGPPPPPLPQQELPHNQTSPHVRNKGRRRSRGGGRKCDQGDVLMRPIVASGVENGSTMCGEIEMSCPTSSKSLSFAPRPGYGQVGTKCIVKANHFFAELPDKDLNQYDVSITPEVSSKAVNRSIIAELVRLYKESDLGMRLPAYDGRKSLYTAGPLPFSWREFKIKVVDDEDRVNGPKRERDYRVVIKFVARANLHHLGQFLAGKCAEAPQEALQILDIVLRELSSKRFCPIGRSFFSPDIRTPQRLGEGLESWCGFYQSIRPTQMGLSLNIDMASAAFIEPLPVVEYVGQLLGKDILSRQLSDADRIKIKKALRGVKVEVTHRGSVRRKYRVSGLTCQPTRELVFPVDENSTMKSVVEYFQEMYGFTIKYTHLPCLQVGNQKKANYLPMEACKIVEGQRYTKRLNEKQITALLKVTCQRPRDRENDILQTIQHNAYGQDPYAKEFGIKISEKLASVEARILPAPWLKYHESGKEKNCLPQVGQWNMMNKKMINGMTVSQWACINFSRSVQDSVARTFCTELAQMCQVSGMEFNPEPVIPIYNAKPEHVEKALKHVYHASTNKTKGKELELLLAILPDNNGSLYGDLKRICETDLGLISQCCLTKHVFKITKQYLANVSLKINVKMGGRNTVLVDAVSCRIPLVSDIPTIIFGADVTHPENGEDSSPSIAAVVASQDWPEVTKYAGLVCAQAHRQELIQDLYKMWHDPVRGLVSGGMIRDLLISFRKATGQKPLRIIFYRDGVSEGQFYQVLLYELDAIRKACASLEPNYQPPVTFIVVQKRHHTRLFANNHRDRNSTDKSGNILPGTVVDSKICHPTEFDFYLCSHAGIQGTSRPAHYHVLWDENNFTADGIQSLTNNLCYTYARCTRSVSVVPPAYYAHLAAFRARFYMEPDLQQENGSSGGGSKATRAGGVCGGVKPLPALKENVKRVMFYC

SEQ ID NO: 11500 - DNA, 2742 bp, Glycine max
  CDS (1)..(2742)
atgacggaggaagttcctgggattgtagaagctgctgaacctccaacatcatcacaatcacctgctgatgtgccacataatttggaaacagaacaaatgactcctacaaagtattctattatcagtaggaatggggttgggaccacaggaaaacacatacctttacttgtgaatctctttgaagttgctgttaatgttccagacacagtattttttcagtatagtgttgctattactttcgaagataaacaagctgttgaaagcaagggcattgggagaaaagtgattgataggctttaccaaacatactcttctgaacttggtggcaaaaggtttgtatatgatggagggaaaactttgtacacagtgggtcctctgccactaaataagtacgagttcaaagtgttgctggagaaatcatttacaaaacggtatttcttgtgtatgactgtcttatttatcagtagtgccaagagtcctggtgctaatggaagccttcatgaggaaactaaaaggtcaaaacattcatttcagtcaaagacattcatggtggagataagttttgctaccaaaataccacttcagtccattgttatttccttgaaagaggttgagtcggataccaattctcaagatgctttgagagtgcttgatactatactgaggcagcgtgcagctaactgtgggtgtctcttggtaaggcaatctttttttcatgatgactcaagaaatttcaatgatgttggggctggtgtaacagcagtctcaggttttcattccagttttcgttccacacagcgaggattgtctctcaatattgacgtgtcaacaactattatcataaaacctggacctgtaattgattttctgttatcaaatcagcaagtgaaggaaccccgttatattgactgggaaaaggcgaaaaaaatgcttaaaaatttaagggtgcaagcaactcatcataaccaggaatttaaaatttctgggttgagtgagaaaccatgcattcagcaactttttagtatgaaggttaaaaatgatgacaacaatagcagagggcagacagtggatattactgtttatgaatattttgccaaacactgtggcatagagttgacctcatctgcttatcttccatgtcttgatgttgggaaaccaaaacgtcccgtctatcttcccttggagctatgttcacttgtttccctccaacggtatacaaaggttttatctctgatgcaaagagcatctttagttgaaaaatcacgccaaaagcctcaagatagaatcaaaattttaaaaagtgctgtaggaaaatgctatgatgatgatcctgttcttgctgcatgtggcatttctattgagaaacaactgaatctgattgaaggtcgtgttcttgaaacaccaaagttgaaggttggtaagaatgatgattgcatcccccataacggaaggtggaattttaataagaagacacttctacaagcatcacatattgattattgggctgttgtcaacttttctgcaagttgtgatactagttacatatcaagggagctgatcagatgtggaatgagcaagggcattaacattgaacggccatatactttgatagaggaggaaccacagttgagaaaatctcaccctgttgcaagggttgaaagaatgtttgacctgcttgcatcaaaactgaatagagagccaaagttgattctttgtgtcttgccagagaggaaaatttgtgatatatatgggccttggaaaaagaagtgtctgagtgaaattggtgttgtcacacagtgcattgcccctgtcaagatcactaatcaataccttactaatgttcttcttaaaatcaattctaagcttggaggaataaattctctgttggcaatagagcattctgggcatcttcccctgattaaagataccccaacgatgattttggggatggatgtctctcacaattcacttggtcgattagatagtccatcaatagcagctgttgttggatctcgacattggccactgatttcaaggtatagagcgtctgtgagaatgcaggcatccaaggtggagatgattgatgctctatacaagccattggaaaatgggagtgatgatggtattatcagagaattgcttttagatttctatgattctagtaatggacgcaagccaactcaatttattgtattcagggatggagttagtgaatcacaattcgaacaagttttaactatcgagcttaaccagataatcaaggcctatcaacatcttggtgaggttaatgttccccagttcactgtgattgtggcacaaaaaaagcatcatattaagctgtttctgcctaatggcccagaaaatgttcctcctgggacggttgtggatacaacaattacgcatccaagaaattatgatttttacatgtgtgctcatgcagggatgcttggaacatccaggcctgtacattatcatgtgctacttgatgagattggtttctcggcagatggcttgcaaaatttgatccattcgttgtcctatgtgaaccaaaggagcacaattgcaacctcagttgtggcacccatatgctatgctcaccatgctgcagctcagatgggacaacttttgaattttgatgattcatcagaaacaggttcaagtcctgcttcagagggaggcatccccatcccagagcttccaaggttgcacaggaatgtcaggagttccatgttcttctgttga

SEQ ID NO: 11501 - protein, 913 aa, Glycine max
MTEEVPGIVEAAEPPTSSQSPADVPHNLETEQMTPTKYSIISRNGVGTTGKHIPLLVNLFEVAVNVPDTVFFQYSVAITFEDKQAVESKGIGRKVIDRLYQTYSSELGGKRFVYDGGKTLYTVGPLPLNKYEFKVLLEKSFTKRYFLCMTVLFISSAKSPGANGSLHEETKRSKHSFQSKTFMVEISFATKIPLQSIVISLKEVESDTNSQDALRVLDTILRQRAANCGCLLVRQSFFHDDSRNFNDVGAGVTAVSGFHSSFRSTQRGLSLNIDVSTTIIIKPGPVIDFLLSNQQVKEPRYIDWEKAKKMLKNLRVQATHHNQEFKISGLSEKPCIQQLFSMKVKNDDNNSRGQTVDITVYEYFAKHCGIELTSSAYLPCLDVGKPKRPVYLPLELCSLVSLQRYTKVLSLMQRASLVEKSRQKPQDRIKILKSAVGKCYDDDPVLAACGISIEKQLNLIEGRVLETPKLKVGKNDDCIPHNGRWNFNKKTLLQASHIDYWAVVNFSASCDTSYISRELIRCGMSKGINIERPYTLIEEEPQLRKSHPVARVERMFDLLASKLNREPKLILCVLPERKICDIYGPWKKKCLSEIGVVTQCIAPVKITNQYLTNVLLKINSKLGGINSLLAIEHSGHLPLIKDTPTMILGMDVSHNSLGRLDSPSIAAVVGSRHWPLISRYRASVRMQASKVEMIDALYKPLENGSDDGIIRELLLDFYDSSNGRKPTQFIVFRDGVSESQFEQVLTIELNQIIKAYQHLGEVNVPQFTVIVAQKKHHIKLFLPNGPENVPPGTVVDTTITHPRNYDFYMCAHAGMLGTSRPVHYHVLLDEIGFSADGLQNLIHSLSYVNQRSTIATSVVAPICYAHHAAAQMGQLLNFDDSSETGSSPASEGGIPIPELPRLHRNVRSSMFFC

SEQ ID NO: 11502 - DNA, 2766 bp, Glycine max
  CDS (1)..(2766)
atgtctcctcgcggtggctccaagcagcaaccagattcacgccgtcaagcgccaccgtccgcggcggcggcggtgccttctcctcccggaagaggacgcggccgtggacgcggagaatcctccgttcccgcgccttctctgcaacttacaatgcaaccttcggcgccgtcgtcgtcgaaggcggtgaggttcaaggaacggccagggttcggtcttgctggggagaaaatcaaagttcgagcgaatcattttcaagtccaagtcgccgaacaagatctatttcattatgacgtctctatcaatcctgagattacttcgaagaaggtttctagagatgttatgactttgcttgtgcaagcgcatcgtgaaaagattctcggaaatcgcataccagcctacgatgggggaaagagtcttttcaccgctggatccttgcccttcgaatctaaggattttgtgatcgtgctaaaagacgacgatgaaccaggctcgtcgtcttcttcctctcctactaggaaaaaacgtgaacgcgagtatagagtcaccatcaggcttgcttccagaactgacattcaccacctcagtcagtttctcaggcgccgtcagttggattgtccttatgagactatccaggctcttgatgttgttctgcgtgctacaccgtctgaaaggttcgttgttgtgggaagatcgttcttctcaccttctttggggaaacctggatcgcttggtagcggaacggagtactggaggggctattaccagagccttcgcccaactcagatgggcctgtctcttaacattaatgtgtcggcgagggctttttatgagcctattcctgtgattgatttcattgaaagtcattttagggccaatccttccaggcctttgcctgatcaggatcgaatcaagcttaagagagtactgagaggagtgaaggtagaagtgactcatggaaagaatcttagacgttacaagatcactggagtcacaaaagaacaactcagaaagttaatgtttactcttgatgacaatagaacaaaaagctcagttgttcaatattttcatgagaaatacaatattgtgttgaagcatacgcttcttcctgctcttcaagctggtagtgacattaaaccaatttttctgcctatggagctttgtcaaattgtggctggacaaagatatacaaagagattgaatgaggagcaagtaactaatcttttaagggcatcttgtcagcgtcctcgtgatagagaaaactctatcagacaggtggtgaggcaaagtaatttcagcacagacaaatttgtgagtcactttggaattcaagtgagggaggatccagcattgcttgatgctcgagttcttcctgcaccaatgctaaaatatcatgacacaggtagagaatcaagtgttgaacccaaaatgggccaatggaatatgattgataagaaaatgtttaatgctggtgttgtggaacattggacttgcctcaacttttctggaaaaataaacagagagtttccaagtgcattttgtcataagttggccagaatgtgtagtaacaagggcatgcgttttaattcaaagcctttactgcccataacatctgctcaaagtagtcaaatagagagtgctcttgtaaatttgcataagcagtctattacaagactagcaaaccaaggaagactccaattgttgatcataattttgccagatttcgaggggtcctatgaaaaaataaagcgtatttgtgaaactgagctaggaatagtgtctcagtgttgtcagccgaggcatgtttgccagatgaagccacaatatcttgaaaatgtggccctcaagataaatgtgaaggttggtggcagtaacacagtattgaatgatgcaattgctagaataattcctcgtgtgtctgacagacctacattaatcttgggtgcggatgtaacacatccacagccaggggaagattctagtccttctattgctgcagtagttgcatctatggattggccttatgtaacaaggtacagaggagttgtttctgctcagactcaccgtgaagaaatcatccaagatctttataatacatgtgaagatcctgtgaaggggaaggtgcattcgggaattatcagggagttacttcgcgctttccgtttgtctactaatcagaagccagagaggattatattctacagggatggagtaagtgagggccaattcagccaggttttgctgtacgagatggatgcaatacggcgggcttgtgcttcactacaagaaggctatttaccccgtgttacttttgtggtggtccaaaaacgacaccacacaaggttatttcctgtagatcatggaagtcatgatcagacaaataaaagtggaaatataatgccagggactgtcgtagacacacacatatgccaccctcgggagtttgatttttacctcaacagtcatgctggaatgcaaggaactagtcgaccaacacattatcatgtgctgttcgatgaaaacaacttcactgctgacgggttgcaaatgtttactaataatttgtgttatacgtatgcaaggtgtactcgatcagtctcaatagttccacctgtgtattatgcacatttggctgccttcagggctcgctgttacattgaagttgcaacatcagattctggttctgcaagtggaggccgggctgctaactgtgaggttagattgccttcggttaaggaaaatgtgaaagatgtgatgtttttctgttaa

SEQ ID NO: 11503 - protein, 921 aa, Glycine max
MSPRGGSKQQPDSRRQAPPSAAAAVPSPPGRGRGRGRGESSVPAPSLQLTMQPSAPSSSKAVRFKERPGFGLAGEKIKVRANHFQVQVAEQDLFHYDVSINPEITSKKVSRDVMTLLVQAHREKILGNRIPAYDGGKSLFTAGSLPFESKDFVIVLKDDDEPGSSSSSSPTRKKREREYRVTIRLASRTDIHHLSQFLRRRQLDCPYETIQALDVVLRATPSERFVVVGRSFFSPSLGKPGSLGSGTEYWRGYYQSLRPTQMGLSLNINVSARAFYEPIPVIDFIESHFRANPSRPLPDQDRIKLKRVLRGVKVEVTHGKNLRRYKITGVTKEQLRKLMFTLDDNRTKSSVVQYFHEKYNIVLKHTLLPALQAGSDIKPIFLPMELCQIVAGQRYTKRLNEEQVTNLLRASCQRPRDRENSIRQVVRQSNFSTDKFVSHFGIQVREDPALLDARVLPAPMLKYHDTGRESSVEPKMGQWNMIDKKMFNAGVVEHWTCLNFSGKINREFPSAFCHKLARMCSNKGMRFNSKPLLPITSAQSSQIESALVNLHKQSITRLANQGRLQLLIIILPDFEGSYEKIKRICETELGIVSQCCQPRHVCQMKPQYLENVALKINVKVGGSNTVLNDAIARIIPRVSDRPTLILGADVTHPQPGEDSSPSIAAVVASMDWPYVTRYRGVVSAQTHREEIIQDLYNTCEDPVKGKVHSGIIRELLRAFRLSTNQKPERIIFYRDGVSEGQFSQVLLYEMDAIRRACASLQEGYLPRVTFVVVQKRHHTRLFPVDHGSHDQTNKSGNIMPGTVVDTHICHPREFDFYLNSHAGMQGTSRPTHYHVLFDENNFTADGLQMFTNNLCYTYARCTRSVSIVPPVYYAHLAAFRARCYIEVATSDSGSASGGRAANCEVRLPSVKENVKDVMFFC

SEQ ID NO: 11504 - DNA, 3075 bp, Glycine max
  CDS (1)..(3075)
atggaagagacagaggactcaaccaatgccaaccagaaattcaccaccaaaagaaggagcttcaggaatggaggcaactctcatgagcatcatcattatcaccatcaccaccaccaccaccaccatcatcatcactatcagcaccatcaccatcatcatcagctgctacaatactcaactcagcttggcttttgcaacaaccagaacaagtatcagagatactacccagctcttcttcctctaccttctcttatacctcttcaacaacttcctttgactccacccttccctccgaacctcaccatcaaatcaaaaacccatttgcgcaaacctccatgcatgctcaatagctccccgtcctcagattacaagctctctcagccaccacttgatcctggtttaattttcctttacctcttcccctcctttgaagcaatccataggcaacaaagtaaattggcagtaattgttgcaaggaggccagactctggtggcaaagaaggttctgtgatctctcttcttgccaaccactttttggtgcaatttgatccatcacagaagatatatcattacaatgttgaaatcactcctcatccctccaaggatgttgccagagcaatcaagcagaagttggtaaataacaattctgcggtcctctgtggtgctactccagcatatgatggtagaaagaatctttatagtccagttgaattccaaaatgacaagcttgagttctacataagcctcccaatccccactagcaagctgacttcaccttatggagaaatgtctgacttgaaagagaagcatgaacagcttaaacttttcaggataaatatcaaactggtctcgaagatcaatgggaaggagttgagtaactatttgagcaaagaggatgatgattggattccacttccacaggattatctgcatgctttggatgtagttcttagggaaagtccaaccgagaaatgcatacctgtagggaggtcattctattcaagttcaatgggaagaagcaaagacattggtggaggagctgttggattgagaggcttctttcagagtcttagaccaacacaacaaggacttgctctcaacgtggatttctcagtaactgctttccatgagagcataggagtgattgcatacttgcagaagcgcctcgagtttcttcgagacctgtctcaaagaaagacagctcaattaaccggtgaagagaggaaggaagtggagaaggcattgaagaacatcagggtcttcgtttgccatagagaaactgttcaacgatatcgtgtctatggcttgactgaggaggttactgaaaatctttggtttgctgacagagatgggaagaatctgaggttggtgaattactttaaagatcagtataactatgacatacaattcagaaaactgccatgcttgcaaattagtaggagtaagccttgttatctccctatggagctttgtgtgatctgtgaaggccagaagttccttgggaaactgtctgatgatcaaacagcaagaatactcaaaatgggctgccaaagaccgggagaacgaaaaaccattgtcgaaggagtcatgagaggaactgttgggcctaccagtggtgatcaggaaaaagaattcaaactccaagtatcaagagaaatgacaaagttgactggtagaattcttcaccctcccaaactaaagcttggagatggaggtcatgtgagaaacctgactccttcacgtcacgaccgccagtggaaccttcttgatggacatgtcttcgaaggaactacaattgaaaggtgggcactaattagttttgggggcacacctgaccagaagtccaatgtccccagattcataaaccagttatgtcaaaggtgtgaacaattgggcatttttcttaacaagaacacagttattagtccccagtttgaatcaatccaaattcttaacaatgtcacccttttggaatctaagctcaagaggatcctgaggacagcctcaaacaatctccagcttcttatttgcataatggagagaaaacacaaagggtatgcagacttgaaacgaattgctgagacaagtgttggtgttgtgagccaatgctgcctgtaccccaatctcaacaagttgagttcacaatttttggccaatttggccctcaaaatcaacgccaaagttggtggatgcacagttgccttgtacaactcattgccatcgcagttaccgcgcctctttcatattgacgagccggtgatattcatgggtgcagatgtgacacatcctcaccctctagatgatgtcagtccatctgtcgctgctgtcgtcggcagcatgaattggccaacagcaaacaagtacatttcaagaataaggtctcaaacacatagacaagaaatcatcctggacctaggcgcaatggtgggggagttgcttgatgatttttaccaggaggtagagaaactccctaacagaatcattttcttccgagacggggtcagtgaaactcagttttacaaagtgctggaagaggaacttcaatccatcaggtgtgcatgctcaaggtttcctggctacaaacctaccattacttttgcagttgtgcaaaagaggcatcacacaaggttgtttccctttgaaactgaccagtcttcaactcaaaaaaacaattttctatatgaaaacattcctccagggactgtggttgattctgtgatcactcatccaaaggagtttgatttctatctttgtagccattggggtgttaaaggaacaagtaggccaactcactaccatgtcttgtgggatgaaaaccagtttacttctgatgaacttcagaaactggtttacaacttgtgctacacttttgttaggtgtaccaagccaatttctttggtgcctcctgcatattatgcacatttggctgcatatagaggcagactctaccttgagagatcagagtccttaggtttattcagaagcacatctacactatccagagctgctcctccaaagacagcacctctacctaaacttagtgaaaacatcaagaagctcatgttctattgctag

SEQ ID NO: 11505 - protein, 1024 aa, Glycine max
MEETEDSTNANQKFTTKRRSFRNGGNSHEHHHYHHHHHHHHHHHHYQHHHHHHQLLQYSTQLGFCNNQNKYQRYYPALLPLPSLIPLQQLPLTPPFPPNLTIKSKTHLRKPPCMLNSSPSSDYKLSQPPLDPGLIFLYLFPSFEAIHRQQSKLAVIVARRPDSGGKEGSVISLLANHFLVQFDPSQKIYHYNVEITPHPSKDVARAIKQKLVNNNSAVLCGATPAYDGRKNLYSPVEFQNDKLEFYISLPIPTSKLTSPYGEMSDLKEKHEQLKLFRINIKLVSKINGKELSNYLSKEDDDWIPLPQDYLHALDVVLRESPTEKCIPVGRSFYSSSMGRSKDIGGGAVGLRGFFQSLRPTQQGLALNVDFSVTAFHESIGVIAYLQKRLEFLRDLSQRKTAQLTGEERKEVEKALKNIRVFVCHRETVQRYRVYGLTEEVTENLWFADRDGKNLRLVNYFKDQYNYDIQFRKLPCLQISRSKPCYLPMELCVICEGQKFLGKLSDDQTARILKMGCQRPGERKTIVEGVMRGTVGPTSGDQEKEFKLQVSREMTKLTGRILHPPKLKLGDGGHVRNLTPSRHDRQWNLLDGHVFEGTTIERWALISFGGTPDQKSNVPRFINQLCQRCEQLGIFLNKNTVISPQFESIQILNNVTLLESKLKRILRTASNNLQLLICIMERKHKGYADLKRIAETSVGVVSQCCLYPNLNKLSSQFLANLALKINAKVGGCTVALYNSLPSQLPRLFHIDEPVIFMGADVTHPHPLDDVSPSVAAVVGSMNWPTANKYISRIRSQTHRQEIILDLGAMVGELLDDFYQEVEKLPNRIIFFRDGVSETQFYKVLEEELQSIRCACSRFPGYKPTITFAVVQKRHHTRLFPFETDQSSTQKNNFLYENIPPGTVVDSVITHPKEFDFYLCSHWGVKGTSRPTHYHVLWDENQFTSDELQKLVYNLCYTFVRCTKPISLVPPAYYAHLAAYRGRLYLERSESLGLFRSTSTLSRAAPPKTAPLPKLSENIKKLMFYC

SEQ ID NO: 11506 - DNA, 3249 bp, Oryza sativa Japonica Group
  CDS (1)..(3249)
atggccttccagttggacaacgggtactactcccatcaagctttagccatgatgagaaagaaaaaaactgaaccccgtaatgctggggaaagttctggaactcaacaagccactggagctcctggacggggtccttcacagcgacctgagagagctcaacagcatggaggtggtggttggcaacctgccaatcctcaatatgctcaacaagctggtcgtggtggtggacaacaccagggacgtggtggacgttaccagggtcgtggagggccaacatcacatcaaccaggtggtggtccggttgaatatcaagcacatgagtactatggccgtggtgtccaacggcaaggaggaatgccacaacacaggagtggcagtggtggacatggagttcctgccagtccatcaagaacagttcccgagctgcaccaagcctcacaagaccagtaccaagctacggtggttgcaccatcaccatcaagaactggcccatcttcgctgcctgttgaggccagcagcgaagaagtccaacatcagtttcaggaacttgccatccagggtcaaagccccactagccaggccattcaaccagcaccaccatcgagcaaatcagtgagatttccaatgcgccctggcaagggtacatttggtgataggtgcatcgtgaaagccaaccatttctttgctgaattgcctgacaaagaccttcaccagtatgatgtgtctataactcctgaggttccttcacgtggtgtcaatcgtgctgtcattggagaaattgtaacacaatataggcagtctcatttgggtggccgtcttccagtctatgatggaaggaagagcttatacacagctggtccattaccatttacttctaggacctttgacgttattctgcaggatgaggaagagagccttgctgttgggcaaggtgcacagaggcgtgagagaccatttaaggtcgtgatcaaatttgctgcacgcgctgatctccaccatttagccatgtttttagctggaaggcaagcggatgctcctcaagaagctcttcaagttcttgacattgttctacgtgaattgcctactgcaaggtactctccagttgcaaggtcattttattcgcctaacttaggaaggcgccaacaacttggcgagggcctggaaagttggcgtggtttttaccaaagcatacgacccacgcagatgggactttctctgaatattgatatgtcatcgacagcattcattgagcctctacctgtgattgactttgttgcacagcttttgaacagagacatctcagttagaccattatctgatgctgatcgtgtgaagatcaagaaggccctaaggggtgtaaaggttgaggtcacacatagaggcaatatgcgcaggaagtatcgcatttctggccttacctcgcaagcaacacgagagttgtcttttcccattgataatcatggtactgtgaagacggtggtgcaatacttccaggagacatatggatttaacattaagcacacaactttgccttgcttgcaagtgggcaatcaacaaaggccaaattatctaccaatggaggtctgtaagattgtggagggacagcgttactcaaaaagactaaatgagaagcagataactgctcttcttaaagtgacctgccagcgccctcaagagcgtgagctggacattttgcagactgtgcatcacaatgcataccatcaggatccatatgcacaggagtttggcataaggatcgatgagcgacttgcatctgttgaagctcgtgttctaccacccccctggcttaagtaccacgatagtggcagagagaaggatgtcttgccaagaattggccaatggaatatgatgaataagaaaatggtcaatggtggtagagttaacaactggacatgcatcaatttttctcgtcatgtccaagataatgctgctaggagtttctgtcgcgagcttgctattatgtgccaaatatctgggatggacttctcaattgatcctgtggttcctctagtgactgcaagacctgaacatgtggaaagagcgctcaaggcacgctatcaagaggccatgaatatactgaaaccacagggcggggagcttgacctgctgattgcaatattgcctgacaataatggttctctttatggcgatctcaaaaggatatgtgagactgatcttggattggtctcgcaatgctgtcttacgaagcatgtttttaagatgagcaaacagtatttagcaaacgttgcccttaaaatcaatgttaaggtgggaggaagaaatacagtacttgttgatgctttgacaaggaggattccccttgtgagtgataggccaacgatcatttttggtgctgatgttacacatccccatcctggagaagattctagcccttccattgcagctgttgttgcttctcaagactggcctgaggtcaccaaatatgccggattagtgagtgcacaggcccatcgtcaggaattgatacaggatctttttaaagtatggaaagatcctcaaagaggaactgtaagtggtggaatgatcagagagcttctcatttctttcaagagggcaactggacagaaaccccagaggattatattttacagggatggtgtcagtgaaggacagttttatcaggttctgttttatgagcttgatgccattagaaaggcatgtgcatctttggaagccgattatcagccacccgttacctttgtggtggtccagaagcgtcatcacacaaggctgtttgctaataaccacaaggaccagcgcactgttgacagaagtggaaatatactaccaggcaccgtggttgattcaaagatatgccatcctactgagtttgatttctacctgtgtagccatgcgggcattcagggaacaagtcgccctgcacattatcatgttctgtgggatgagaacaagttcactgctgatggtttgcaaactctgacaaacaacttgtgctacacctatgcaaggtgcacccgttccgtatcaatcgttcctcctgcatattatgcccatctcgcggcatttcgagctcgattttacatggagccggatacttcagatagtgggtcgatggcgagcggtgcccatacccgtggcggtggcccccttcctggtgcacgcagcactaagcctgctgggaatgttgctgtaaggccgcttcctgatctgaaggaaaatgtcaaacgtgtcatgttctactgctaa

SEQ ID NO: 11507 - protein, 1082 aa, Oryza sativa Japonica Group
MAFQLDNGYYSHQALAMMRKKKTEPRNAGESSGTQQATGAPGRGPSQRPERAQQHGGGGWQPANPQYAQQAGRGGGQHQGRGGRYQGRGGPTSHQPGGGPVEYQAHEYYGRGVQRQGGMPQHRSGSGGHGVPASPSRTVPELHQASQDQYQATVVAPSPSRTGPSSLPVEASSEEVQHQFQELAIQGQSPTSQAIQPAPPSSKSVRFPMRPGKGTFGDRCIVKANHFFAELPDKDLHQYDVSITPEVPSRGVNRAVIGEIVTQYRQSHLGGRLPVYDGRKSLYTAGPLPFTSRTFDVILQDEEESLAVGQGAQRRERPFKVVIKFAARADLHHLAMFLAGRQADAPQEALQVLDIVLRELPTARYSPVARSFYSPNLGRRQQLGEGLESWRGFYQSIRPTQMGLSLNIDMSSTAFIEPLPVIDFVAQLLNRDISVRPLSDADRVKIKKALRGVKVEVTHRGNMRRKYRISGLTSQATRELSFPIDNHGTVKTVVQYFQETYGFNIKHTTLPCLQVGNQQRPNYLPMEVCKIVEGQRYSKRLNEKQITALLKVTCQRPQERELDILQTVHHNAYHQDPYAQEFGIRIDERLASVEARVLPPPWLKYHDSGREKDVLPRIGQWNMMNKKMVNGGRVNNWTCINFSRHVQDNAARSFCRELAIMCQISGMDFSIDPVVPLVTARPEHVERALKARYQEAMNILKPQGGELDLLIAILPDNNGSLYGDLKRICETDLGLVSQCCLTKHVFKMSKQYLANVALKINVKVGGRNTVLVDALTRRIPLVSDRPTIIFGADVTHPHPGEDSSPSIAAVVASQDWPEVTKYAGLVSAQAHRQELIQDLFKVWKDPQRGTVSGGMIRELLISFKRATGQKPQRIIFYRDGVSEGQFYQVLFYELDAIRKACASLEADYQPPVTFVVVQKRHHTRLFANNHKDQRTVDRSGNILPGTVVDSKICHPTEFDFYLCSHAGIQGTSRPAHYHVLWDENKFTADGLQTLTNNLCYTYARCTRSVSIVPPAYYAHLAAFRARFYMEPDTSDSGSMASGAHTRGGGPLPGARSTKPAGNVAVRPLPDLKENVKRVMFYC

SEQ ID NO: 11508 - DNA, 3036 bp, Oryza sativa Japonica Group
  CDS (1)..(3036)
atggcctcacggaggccaacgcaccgccaccataccgaggctccagatcctggtggaagagggagagggagaggccgtgccgcccgatatgctcagcctcagcctcagcctcagcagcagcagcagcagcaaggacgaggatgccgtgctagaggtgcctcgccgccgccgccgccgcagcagcagcagcagcaacagccaaggtctactcctactcgtgctaccactgtcaccgtggcttcctcttcatctaccacggccaccgcatcatcaagccctctagctcccgagctgcgccaagcaataatggaagctccccgtcccagtgagctcgctcaaccctcacccactccgcctcaggaacaacctgtggatgccgctaccacgacgccgcaccatattccatcctcaagcaagtcaattaggtttcctttgcgcccggggaagggtaccattggcaccaggtgcatggtcaaggccaatcatttcttcgctcacctgcccaacaaggatcttcatcactacgatgtctccatcactccagaagttacatcacgcattgttaaccgagctgtgatcaaggagctggtaaatctgtacaaggcatcttatctgggtgggaggctgcctgcatatgatggtagaaagagcttatacacggctggcccattgccgtttacttcacaggagtttcagatcactttacttgacgacgatgatggttctggttctgagaggcgacagaggactttccgagtagtaatcaagttcgccgcacgggccgaccttcaccggcttgagttgtttttagctgggaggcacgcagaagctccacaggaggcactgcaagttcttgatattgtgctgcgagagctaccatcagcaagatatgcgccatttggacgttccttcttttcgccttacttgggtaggaggcaaccccttggtgagggattggaaagctggcgtggattttaccagagcattcggcctactcagatgggcttatcactgaatattgatatgtcagctacagctttcattgagccgttacctgttattgattttgttgcacaactattgaattctgacatccattcaaggccgctttctgatgccgaacgtgttaagatcaagaaagccttgagaggagtaaaggtggaagttacccaccgtggcaacatgaggcggaagtaccggatatctggtttgacaattcagccaactcgtgagctaacttttcctgttgatgaaggaggcacagtgaagtcagttgtacagtactttcaagagacatatggctttgccatccaacacacctaccttccatgccttacagttcagcgattaaattacctgcctatggaggtctgcaaaatagtggaaggacagagatactccaagagattaaatcagaatcagataagagctcttttggaggagacatgccaacacccacgtgatcgggagcgtgatattattaagatggttaaacataacgcttatcaggatgatccttacgcaaaagagtttggcattaagataagtgatcgtctggcatcagtagaggcacgaattttaccggctccacggcttaagtacaatgagactggtcgagagaaggattgcttaccaagagttggtcaatggaatatgatgaacaagaaaatggtaaatggtggtaaagtcagaagctggatgtgcgtcaattttgcccgtaatgtgcaggaaagtgttgttcgtgggttctgccatgaacttgctctgatgtgtcaagcctcaggaatggatttcgctccagaacctattcttccaccactaaatgcacatccagatcaagtggagcgtgctctaaaagctaggtatcatgatgcaatgaacgttcttggaccccagcgcagggaacttgatttgcttattgggatactacctgataacaatggctcgctttatggtgatttgaagcgcgtgtgtgaaatagatcttggaatagtttcacaatgctgttgcacgaagcaggtgttcaaaatgaacaaacaaattcttgcaaatcttgctctgaagataaatgtcaaggttgggggcaggaacactgtgctggtggatgctgtgtcaaggcgtattcctctggtaaccgacagacctacaattatatttggtgctgatgttacccatcctcatcctggagaggacagcagtccctcaattgctgctgttgtagcctcccaagattggcctgaggtgacaaagtatgctgggttggtttctgctcaagcccaccgacaagagctgatagaagatctatataaaatctggcaggatccacagagaggaacagttagtggtggcatgatccgtgagctgcttatatccttcaaaagatcaactggtgagaagccccagcgaataatattttacagggatggcgttagtgaaggccaattttaccaagttctactttatgaattgaatgcaatccgaaaagcatgtgcctccctggagacaaattaccaaccaaaggtgactttcattgtggttcagaaacgtcaccacacaagattatttgcacataatcacaacgatcagaactcagttgacaggagcgggaacatactccctggtacggttgtagattcaaagatctgtcatccaactgagtttgacttctacctgtgtagccatgctggcattaagggtactagtcgtccagctcattatcatgtcttgtgggatgaaaacaacttcacagctgatgcattgcagattcttaccaacaacctttgctacacctatgcaaggtgcactcgctctgtatcaattgttccacctgcttattatgctcatctggctgccttccgtgctcgtttctatatggaaccagatacatctgacagcagctctgtcgttagtgggcctggtgtacgtgggccactttctggctcatcaacatcacgtactcgggcccctggtggtgcagctgttaagccacttcctgctctgaaggatagtgtgaagagggtcatgttctactgctga

SEQ ID NO: 11509 - protein, 1011 aa, Oryza sativa Japonica Group
MASRRPTHRHHTEAPDPGGRGRGRGRAARYAQPQPQPQQQQQQQGRGCRARGASPPPPPQQQQQQQPRSTPTRATTVTVASSSSTTATASSSPLAPELRQAIMEAPRPSELAQPSPTPPQEQPVDAATTTPHHIPSSSKSIRFPLRPGKGTIGTRCMVKANHFFAHLPNKDLHHYDVSITPEVTSRIVNRAVIKELVNLYKASYLGGRLPAYDGRKSLYTAGPLPFTSQEFQITLLDDDDGSGSERRQRTFRVVIKFAARADLHRLELFLAGRHAEAPQEALQVLDIVLRELPSARYAPFGRSFFSPYLGRRQPLGEGLESWRGFYQSIRPTQMGLSLNIDMSATAFIEPLPVIDFVAQLLNSDIHSRPLSDAERVKIKKALRGVKVEVTHRGNMRRKYRISGLTIQPTRELTFPVDEGGTVKSVVQYFQETYGFAIQHTYLPCLTVQRLNYLPMEVCKIVEGQRYSKRLNQNQIRALLEETCQHPRDRERDIIKMVKHNAYQDDPYAKEFGIKISDRLASVEARILPAPRLKYNETGREKDCLPRVGQWNMMNKKMVNGGKVRSWMCVNFARNVQESVVRGFCHELALMCQASGMDFAPEPILPPLNAHPDQVERALKARYHDAMNVLGPQRRELDLLIGILPDNNGSLYGDLKRVCEIDLGIVSQCCCTKQVFKMNKQILANLALKINVKVGGRNTVLVDAVSRRIPLVTDRPTIIFGADVTHPHPGEDSSPSIAAVVASQDWPEVTKYAGLVSAQAHRQELIEDLYKIWQDPQRGTVSGGMIRELLISFKRSTGEKPQRIIFYRDGVSEGQFYQVLLYELNAIRKACASLETNYQPKVTFIVVQKRHHTRLFAHNHNDQNSVDRSGNILPGTVVDSKICHPTEFDFYLCSHAGIKGTSRPAHYHVLWDENNFTADALQILTNNLCYTYARCTRSVSIVPPAYYAHLAAFRARFYMEPDTSDSSSVVSGPGVRGPLSGSSTSRTRAPGGAAVKPLPALKDSVKRVMFYC

SEQ ID NO: 11510 - DNA, 3117 bp, Oryza sativa Japonica Group
  CDS (1)..(3117)
atgggatcaaggagaccaagactgcctgggtttggtgaggactgtgagcctcgtggtggtgggagaggaggaggtggccgtggccgtggcagctactacccacaggcacagcaataccacccacaaggacatggtggccgtggaggagcaggctactaccatggtgctgctcctcaacctcgcggcgcaatggtggtgcagcaatggcgtcctgctactgctgctgctgagcatttgggccatcaacagccctacaacagcagtgtgagaccacagcactattatggtccgtctgccatagctcccgagctgctccaagcaatggatgctccacatgagcctcctgccaatgtctcctcaccagaagcagcctctccggaggcatcatcaccacggtctcttgctcttgaggtcacagagcagcttcaggacttgtctgtgcagtaccaattaagtgagagccaggaagagattgtccaacatgttcctgtgtccaccaaatcatttaaatttcctcaccgccctggaagtgggagtattggaaccagatgtttagtgaaggcgaatcacttctttgctcaactgccagacaaggatcttcatcagtatgacgtttcaatcaccccggagcttacatcacgaattcggagccgtgctgtgatggaagagttggtgagactgcacaagatgtcatacttgggaggacgtcttccagcctatgatggtaggaagagcctttacacggccggtccattgccgtttacttcaaaagaatttcgcatctctttgcttgaggaagatgatggttctggttcggagaggcgtcagaaaacatataacgtggtgattaagtttgctgcaagagctgatcttcaccgtcttgagcaatttctagctggaaggcaggcagaggctccccaggaggccttgcaagttcttgatattgtcttgcgagagttgccaacagcaagatatgcaccctttggtcgatccttcttctctcctgacctggggaggagacgatccctcggtgagggactagaaacctggcgtgggttttatcagagcattcgtcctactcaaatgggcttgtcactgaatattgatatgtcggcaactgctttctttgagccgttaccagtcatagattttgtcatacagcttttaaatactgacatccgctcgaggcccttatcagatgctgagcgtgtcaagatcaagaaggccttaagaggagtgaaggtaggagttactcaccgtggcaacatgcgccggaagtatcggatatctggtttgacatctcaggcaactcgggaactgacttttcctgttgatcaaggaggcacagtgaaatctgttgtacaatattttcaagagacatatggatttgcgatccagcatacctatcttccttgtctgcaagttggcaatcagcagcgtccaaattacctaccaatggaggtctgcaaaatagtggaaggacagaggtactccaagagactgaaccagaatcagataagggctcttttagaggagacatgtcagcgcccacacgatagggagcgtgacataattcagatggtgaatcacaactcctaccatgaagatccttatgcaaaggagtttggcattaagatcagcgagcgtctggccttggttgaggcacggattttacctgcccctcggctcaagtataatgagactggcagagagaaggattgcttgcctagagttggtcagtggaatatgatgaacaagaaaatggtaaatggtggtagagtcaggagctggatatgtgtcaattttgctcgaaatgtgcaagagagtgttgctagtggattttgtcgtgaactggcccgcatgtgccaggcctcaggaatggactttgctttggagcctgttcttccatctatgtatgcacgtcctgatcaagtggaacgagctctgaaagccaggttccatgatgcaatgaacatacttgggccacagcacaaggagctcgatttacttatcggactgcttcctgataacaatggttctctttatggtgatttgaagcgtatatgcgaaattgaccttggattggtttcccagtgctgttgcacaaagcaagtgtttaaaatgaacaaacaaatcctagcaaatcttgctctgaagataaatgtgaaggttgggggaaggaacactgtactggttgatgcagtgtcgagacgcattccgttggtaactgacaggcctactattatattcggtgctgatgtcacccatcctcaccctggcgaagatagcagcccatccattgctgctgttgtggcctcccaagattggcctgaagtgacaaagtatgctggtttagtttctgctcaatctcacagacaagagttaatagatgatctgtataacatcacgcatgatcctcatagagggcccatctgcggtggaatggtcagggaacttcttatatccttcaaaagatcaactggtcaaaagcctcaacggataatattctatagggatggtgttagtgaagggcaattttaccaggttctattgcatgagcttgatgcaatccgaaaggcttgtgcatcactcgaagcaaattaccaaccgcaggtgactttcattgtggttcagaagcgccaccacacgagattatttgcacacaaccacaatgatcagaattcagtcgacaggagtgggaacatattgcctggtactgttgttgactccaagatttgccatcctacggagtttgacttcttcttgtgcagccatgctggaatcaagggcacaagccgtcccgctcattaccacgtcctgtgggatgaaaacaacttcacagctgatgcgttgcagaccctcaccaacaacctctgttacacttatgcgaggtgcacacgatccgtatctattgttccaccagcatactatgctcatctggcggcgttcagagcccgtttctacatggagtcagatagctcggacagtggttcaatggcgagtggtcgtggaggaggttcgtctacatcgcgcagcactcgtgctgcaggtggtggagccgtcaggccccttcctgcactcaaggacagcgtcaagaatgtcatgttctactgttag

SEQ ID NO: 11511 - protein, 1038 aa, Oryza sativa Japonica Group
MGSRRPRLPGFGEDCEPRGGGRGGGGRGRGSYYPQAQQYHPQGHGGRGGAGYYHGAAPQPRGAMVVQQWRPATAAAEHLGHQQPYNSSVRPQHYYGPSAIAPELLQAMDAPHEPPANVSSPEAASPEASSPRSLALEVTEQLQDLSVQYQLSESQEEIVQHVPVSTKSFKFPHRPGSGSIGTRCLVKANHFFAQLPDKDLHQYDVSITPELTSRIRSRAVMEELVRLHKMSYLGGRLPAYDGRKSLYTAGPLPFTSKEFRISLLEEDDGSGSERRQKTYNVVIKFAARADLHRLEQFLAGRQAEAPQEALQVLDIVLRELPTARYAPFGRSFFSPDLGRRRSLGEGLETWRGFYQSIRPTQMGLSLNIDMSATAFFEPLPVIDFVIQLLNTDIRSRPLSDAERVKIKKALRGVKVGVTHRGNMRRKYRISGLTSQATRELTFPVDQGGTVKSVVQYFQETYGFAIQHTYLPCLQVGNQQRPNYLPMEVCKIVEGQRYSKRLNQNQIRALLEETCQRPHDRERDIIQMVNHNSYHEDPYAKEFGIKISERLALVEARILPAPRLKYNETGREKDCLPRVGQWNMMNKKMVNGGRVRSWICVNFARNVQESVASGFCRELARMCQASGMDFALEPVLPSMYARPDQVERALKARFHDAMNILGPQHKELDLLIGLLPDNNGSLYGDLKRICEIDLGLVSQCCCTKQVFKMNKQILANLALKINVKVGGRNTVLVDAVSRRIPLVTDRPTIIFGADVTHPHPGEDSSPSIAAVVASQDWPEVTKYAGLVSAQSHRQELIDDLYNITHDPHRGPICGGMVRELLISFKRSTGQKPQRIIFYRDGVSEGQFYQVLLHELDAIRKACASLEANYQPQVTFIVVQKRHHTRLFAHNHNDQNSVDRSGNILPGTVVDSKICHPTEFDFFLCSHAGIKGTSRPAHYHVLWDENNFTADALQTLTNNLCYTYARCTRSVSIVPPAYYAHLAAFRARFYMESDSSDSGSMASGRGGGSSTSRSTRAAGGGAVRPLPALKDSVKNVMFYC

SEQ ID NO: 11512 - DNA, 2739 bp, Bombyx mori
  CDS (1)..(2739)
atgtaccccgttggtcaacctccagcgggggagacgagtggtggggcagtaggtgttgcaggagccgtgggtgcacctgctggcacgcctggagcagcgcccgtagctccgagcgctgcaccagttggagcaccggccccaggcgtggcaggtggtgcagcaggtctgccactagtatctccagcagcagcggcgcctccagatctgccagtgctaacatgtcctcgacgaccaaaccttggccacgagggcaggccaataatgctgagagcaaaccattttcaaatatcaatgccaagagggtttgttcatcactatgatgtgaatattcaacctgataaatgccctaggaaggtgaatagagaaatagttgagacaatggtgcactgttataataaaatatttggagccctcaaaccagtgtttgatggaagaaataatttgtacacaagagaccctcttcccataggaaatgatagaatggaattagaagtaattttacctggtgaaggaaaagacagagtgttccgtgttactattaaatgggtagctcaggtttcattgtttgcactggaagaggcattggaaggtcgcacaagacaaatcccttatgatgcaatcttagctctggatgtagtgatgagacatttaccatcaatgatgtatacccctgttggacgctcatttttctcttcaccagagggatattatcatccccttggtggtggacgagaagtttggtttggttttcatcaatcggtgagaccaagccaatggaaaatgatgcttaatattgatgtgtcagcaactgctttttataaagctcagcccgttatagagttcatgtgtgaagttcttgatatacgagatattaatgaccaaagaaaaccattaacagactcacagagagttaagtttactaaagaaattaaaggtttgaaaatagaaatcacgcattgtggtactatgaagcgtaaatacagagtgtgcaatgtgacacgtaggcctgctcaaatgcagtcttttcctcttcaactagaaaatggacaaacagtagaatgcacagtagctaaatattttttggacaaatataagatgaagcttagataccctcatctgccatgtttacaagtaggccaggaacacaaacacacatacctacctcttgaagtttgtaatattgttccgggacagagatgtataaaaaaattaacagatatgcaaacatcaaccatgatcaaagcaacagcacgttccgctccagacagggagagggaaatcaataatttggtccgtcgagcaaacttcaatactgattcgtatgtaaaagaatttgggctaaccatatccaataacatgatggaggttcgcggccgagtgctacctccgccgaagctgcaatatggtggtcgtgtgtcctcactgggtggacagcaagcattaccgaatcagggagtttgggacatgcgaggaaaacagttttttatgggagtcgagataagagtatgggcgatagcatgtttcgcgccacaaagaacagtacgagaggatgctctcaagaattttactcaacaacttcaaaagatatccaacgacgctggcatgccaataatagggcaaccctgtttctgcaagtacgctacagggccagaccaagtggagcctatgtttaaatacttaaagtctacatttgtgcagctacagctcgttgtcgtcgtgttaccaggaaaaacacctgtctatgccgaagtaaaaagagttggtgacacagtattgggaatggcaactcaatgtgtacaagcgaagaacgtaaacaaaacttcaccgcagaccctcagtaatttatgtttaaaaattaatgttaaactgggaggcattaattctattctcgttccatctcttcgtccgaaggtgttcaacgagcccgtgatcttcctgggcgtggacgtgacgcacccgcccgccggtgacaacaagaagccttccatcgcggccgtcgtcggctccatggacgcgcatccgtcgcggtacgccgccaccgtcagggtacagcagcaccggcaagagatagttcacgaaatgagcagcatggtccaggagctgctcatcatgttttacaagagcaccggcggattcaaaccccaccggatcatcatgtatcgcgacggcatctccgaaggccagttcctgcacgtcttacagcatgagctgactgctgtgagggaggcttgtatcaagctggaagcggagtacaagccgggcatcactttcatcgtggtacagaagcgacatcacacgcggctgttctgcgccgacaagaaggagcagtccggcaagtccgggaacatcccggccgggaccacggtcgacctcggcatcacgcatcccaccgaattcgatttctacctgtgcagtcaccagggcatccagggtacgtcgcggccgtcgcactaccacgtgctgtgggacgacaaccacttcggttcggacgagctgcagtgcctcacgtaccagctgtgccacacgtacgtgcgctgcacgcgctccgtgtccatcccggcgccggcctactacgcgcacctggtcgccttccgcgcgcgctaccacctcgtcgagaaggagcacgactcgggcgagggcagccaccagtccgcctgcagcgaggaccgcacgcccggcgccatggcgcgcgccatcaccgtgcacgccgtcaccaagaaggtcatgtacttcgcctaa

SEQ ID NO: 11513 - protein, 912 aa, Bombyx mori
MYPVGQPPAGETSGGAVGVAGAVGAPAGTPGAAPVAPSAAPVGAPAPGVAGGAAGLPLVSPAAAAPPDLPVLTCPRRPNLGHEGRPIMLRANHFQISMPRGFVHHYDVNIQPDKCPRKVNREIVETMVHCYNKIFGALKPVFDGRNNLYTRDPLPIGNDRMELEVILPGEGKDRVFRVTIKWVAQVSLFALEEALEGRTRQIPYDAILALDVVMRHLPSMMYTPVGRSFFSSPEGYYHPLGGGREVWFGFHQSVRPSQWKMMLNIDVSATAFYKAQPVIEFMCEVLDIRDINDQRKPLTDSQRVKFTKEIKGLKIEITHCGTMKRKYRVCNVTRRPAQMQSFPLQLENGQTVECTVAKYFLDKYKMKLRYPHLPCLQVGQEHKHTYLPLEVCNIVPGQRCIKKLTDMQTSTMIKATARSAPDREREINNLVRRANFNTDSYVKEFGLTISNNMMEVRGRVLPPPKLQYGGRVSSLGGQQALPNQGVWDMRGKQFFMGVEIRVWAIACFAPQRTVREDALKNFTQQLQKISNDAGMPIIGQPCFCKYATGPDQVEPMFKYLKSTFVQLQLVVVVLPGKTPVYAEVKRVGDTVLGMATQCVQAKNVNKTSPQTLSNLCLKINVKLGGINSILVPSLRPKVFNEPVIFLGVDVTHPPAGDNKKPSIAAVVGSMDAHPSRYAATVRVQQHRQEIVHEMSSMVQELLIMFYKSTGGFKPHRIIMYRDGISEGQFLHVLQHELTAVREACIKLEAEYKPGITFIVVQKRHHTRLFCADKKEQSGKSGNIPAGTTVDLGITHPTEFDFYLCSHQGIQGTSRPSHYHVLWDDNHFGSDELQCLTYQLCHTYVRCTRSVSIPAPAYYAHLVAFRARYHLVEKEHDSGEGSHQSACSEDRTPGAMARAITVHAVTKKVMYFA

SEQ ID NO: 11514 - DNA, 2571 bp, Tribolium castaneum
  CDS (1)..(2571)
atggcacctctcccagacggtcccgacccatccacaaaacaaaaacagcccccaactttcgccccccaaaaggaatcttcattttccactcaaaaacttaaaagttctttgagcgactgcctttcacaaactgtcattatcaaaccaggagtcaaaggcagacccataaaaatcgaaagcaaccatttatccttgaacgtgggcacactcacagaagcttaccattacgacgtctccatcacacctgacactcccaaaagcttcctccgcgatgtcatgaaccttttcgctcggaaacactatccgaaaaaccacccggccttcgacggccggaaaaatctctactcgcctaaaaaattgcctttgcccaacgacaccatgagtgataccattgaacttgaaggagaaaacaagaaacgggggtttaaagttgtggttaaactggcgagaactgtagatttgtcgccacttcgtgatattttacaaacgagacaatcgccacaagacgctttacaatgcctggatattgtcctaagaaacgctccttctaacagctgcataagctcagggaggtgtttttttacacctccaagggagggccaaattttgcgtctgggggacggcatggaaatgtactacgggttttatcaatcggctatcagaggctggaaacagccgctcctgaacgttgatgttgtccataaggcgtttcccgaagccttgaacgtcctagacctcgtgtgcgaactagggagcgactacaggaacactatgacacgacaagacctcaaccaacccctcactgatttcgtgcaaaaagccttggaaaaattcctcaaacagttgaaagtcacgtatgaaataccgggccaaagtggctcaagacgcatttttcgcgtcaatggcctccgtgcgcccccaagtcaggcccggtttacgcttggcgatggcaaagtcaccacggtggagaaatattaccaagaagtcaaacgctgcagactccagtatccgcatttgccgaccctttgggtgggttcgagacaacgtgaggtcctcataccgttggaattttgcacggtggtgagcgggcaagtcgtcaatcgcaaaatgaacgagaaccaaaccagtgttatgatcaaaaaagcggccacttcgacggacgttcgcaaagataagatcatgcaagttctgcgaaaggcaaattacaatagtgatccctgtgtcagggagttcggattttcggtaaataatagtttcgagaagttggatgggcgcgttttgcagccgccgactctgctgtatgcccggaaggcggaagttacgccgagtaagggtgtgtggagggccgacatgaatcggttttttgtgggggctattgtacacaaatggacgattgtgtcctgtacgaggcatccggagaggggggagcagttggccgatatgatcttcagaatggctagttcgaacggcatgcagatcacctccaaggccactggtccgttccagcacctcggcggtcgccaaaacctgcgcgatatcatcgactacttcaagaggaagcaagaccacgacctcatcatcgtcgtggtccccaacagcggcccccaatactcactggtgaaacaagcggctgaactaaacgtcggctgcctgacccagtgcatcaaagaacgcactatcgccaaactcaacccgcaaataatcgccaacatcctcctcaaaatcaacagcaagctgaacggcacaaaccacatactttcctcccgcttgcccatcatgtcccgtccgtgcatcatcatgggggccgacgtcacccatcccggccccgacgccaaggacgtgcccagcgtcgcggcggtgacggcgtcgcacgaccccaacgccttccagtacaacatctgctggcgcttgcagccccctaaagtcgaaattatcgaagatctgtgcgctattacagtcgaacagttgatgtttttctaccgaaaaactcgtcacaagccggaaacgatcgtgtttttccgggacggggtgtctgagggacagtttgcggaagtgaggcgagcggaaatttccgccatacaccaagcgtgtaaaaaactacaaagggagggctatgagcccaggattacgttcctggtggtgcagaaaagacaccatacgaggcttttcccgacaaatccccgggattcggaggataggaataacaatgttccagccgggacttgtgtagatacgcatattactaatccgatgatgcaggacttttatttggtgtcccatgcgagtatacaaggggtggcaaagcctacgaagtattgtacgctttgggatgataataatatgagtaatgatgatattgaggagttgacatattatttgtgtcacatgtttacgaggtgcaatagatcggttagttatccggcaccgacttattatgcacatttggcggcagcgagggctaaggtttatgtcgagaatgttaagctggacttgactcagttgaagacacatcagcagaagtgtcagattcaagagagcattgtgaaggagaaaccgatgttctttgtttag

SEQ ID NO: 11515 - protein, 856 aa, Tribolium castaneum
MAPLPDGPDPSTKQKQPPTFAPQKESSFSTQKLKSSLSDCLSQTVIIKPGVKGRPIKIESNHLSLNVGTLTEAYHYDVSITPDTPKSFLRDVMNLFARKHYPKNHPAFDGRKNLYSPKKLPLPNDTMSDTIELEGENKKRGFKVVVKLARTVDLSPLRDILQTRQSPQDALQCLDIVLRNAPSNSCISSGRCFFTPPREGQILRLGDGMEMYYGFYQSAIRGWKQPLLNVDVVHKAFPEALNVLDLVCELGSDYRNTMTRQDLNQPLTDFVQKALEKFLKQLKVTYEIPGQSGSRRIFRVNGLRAPPSQARFTLGDGKVTTVEKYYQEVKRCRLQYPHLPTLWVGSRQREVLIPLEFCTVVSGQVVNRKMNENQTSVMIKKAATSTDVRKDKIMQVLRKANYNSDPCVREFGFSVNNSFEKLDGRVLQPPTLLYARKAEVTPSKGVWRADMNRFFVGAIVHKWTIVSCTRHPERGEQLADMIFRMASSNGMQITSKATGPFQHLGGRQNLRDIIDYFKRKQDHDLIIVVVPNSGPQYSLVKQAAELNVGCLTQCIKERTIAKLNPQIIANILLKINSKLNGTNHILSSRLPIMSRPCIIMGADVTHPGPDAKDVPSVAAVTASHDPNAFQYNICWRLQPPKVEIIEDLCAITVEQLMFFYRKTRHKPETIVFFRDGVSEGQFAEVRRAEISAIHQACKKLQREGYEPRITFLVVQKRHHTRLFPTNPRDSEDRNNNVPAGTCVDTHITNPMMQDFYLVSHASIQGVAKPTKYCTLWDDNNMSNDDIEELTYYLCHMFTRCNRSVSYPAPTYYAHLAAARAKVYVENVKLDLTQLKTHQQKCQIQESIVKEKPMFFV

SEQ ID NO: 11516 - DNA, 2868 bp, Strongylocentrotus purpuratus
  CDS (1)..(2868)
atgtatcaaccaccctttccaccaaatttcccatatgggatgcccaactatccgccaaatcaacctggaatcccagggcagttcccacccggtggtccccccgggggtccgcccggaggtcctccacctggtggccctcccggcggcggcccaccaggtggtccccctggtggccctccaagtggccctccaggtggcccacctggtggtccccccttcacccctcctccaagccaacagcccccaccccctggggggcctccgcaaccaccaggtacccctcccgttgctcccacagagctggtagccatgcccaggaggcctggctttggtatagacggtcgtcctatcgcccttcgtgcaaaccacttccaggtgaagatcccgcccctggatcttttccattatgaagttaacatcactccagaaaagtgtcccaggagaatcaacagagatgtgatagacacgctagtgactgcctacaaagggagattctttcagaacaatctgcctgtgtttgacgggaggacaaacatgtactgtaaagatgagattccactagatcgggaaaagcaagtggaactcgaagtgaccttacccggtgaagggaaagacaggatattcaaagcttccatcaagtttgaaggcaaggtcagtttgtccctgctagaggctgccctgaagggggaagtgatgaacatcccacacgaggctgtgcaagccctggatgtcatcatgagacatctaccttcactgaggtacaccccggtgggtcgatccttcttctcccctcccgaggagtactcccatcccttgggtggtggtcgagaggtgtggtttggtttccatcagagcatccgcccatccatgtggaaaatgatgctcaatatagacgtgtctgcaacggccttctacagctgtcaatcagtgatagacttcctgtgtgaggtcctggacatccaggatctatcggatcaacggcgccctctatcagactcacatagagtgaagttcaccaaagagatcaaaggactaaagattgagatcactcactgtggaaacatgaagagaaaatacagagtgtgcaatgtgaccaagagatctgcacagacacaaacgttcccatggcaactagagaatggtcaaacagtggaatgcacagtggccaaatacttcagagaaagacataatctcatcttgcaataccctcatctcccctgtctgcaggttggacaggagcagcgccacacctacctacctctggaggtttgcaatatcgtagctgggcagcgctgcattaagaaactcactgaccttcagacgtctaccatgataaaggccacagccagatcagccccagacagagagaaagaaatcaaaagtctggtacataaagctgacttcaacaatgaccagtatgtaaggcagtttgggttgagtatcagtaatgagatggtcaccatagaaggcagagttctaccagctccgaagatccaatatggaggaaagttaaacaagccccagcaagccatccctaaccagggtgtgtgggacatgagaggcaaacagttccactttggggttgagattgaagtgtgggccattgcctgctttgcaccccagcatcaatgcagggaagaagccctcaggaatttcacactccagcttcagaagatctccaacgaagctggcatgcctatcaaatggcagccgggcttctgcaagtacgccgtgggcgccgatcaggtggaagccatgttcaggcatctcaagaagatgtggcccaaactccagctcatcatcgtcgttctgccgggcaagacacccgtctatgctgaagtgaagcgagttggtgacattctgctaggtatagccacacagtgtgtacaggtcaagaatgtgaacagaaccacggcacaaaccctctccaatctctgcctcaagatcaaagtcaaactgggaggagtgaacaacatcctggcccctaacatcagaccccgcatatttagcgagcctgtcatcttttgcggagctgacgttacgcatcccccagccggtgatgataagaaaccttctatcgcggctgttgtgggaagtatggacggccatcctagccgttactgcgcgagtgtccgcattcagactcaccgtgtcgagatcatccaggacctgcaggccatggtcaaggagctgctcgttgagttctacaagtcgaccaggtacaagccagccaggatcatcatgtacagggatggggtcagcgaaggtcaattcttacaggttctagccaatgagatgaacgctatcagagatgcctgcaggtcactggaggaaggttacgagcctggtatcacgttcattgtggtgcagaagagacatcataccagactcttctgtgctgagagaagagaacagattggaaggagtggtaacatcccagcaggtactacagtagacagcggcatcacccatcctctagaatatgacttctacctgtgcagtcacgctggtattcagggcaccagtcgtccctctcactaccacgtcctctgggacgacaacggtttcaaggctgacgaactccagtgtctaacctaccagctgtgccacacctacgtacgctgcacccgtagcgtgtccatccctgcccccgcctactacgcccacctggtggccttccgtgccagataccatctggtagagaaggaccacgatagatatgaccatgacagtgtcatatccagtgcaaacagcaatgggggagacggaagccaccacggacgtgacggctacggacgcacccccaaggagatgtctgctgccatcaaggttcatgacgatacactcaaggtcatgtacttcgcctag

SEQ ID NO: 11517 - protein, 955 aa, Strongylocentrotus purpuratus
MYQPPFPPNFPYGMPNYPPNQPGIPGQFPPGGPPGGPPGGPPPGGPPGGGPPGGPPGGPPSGPPGGPPGGPPFTPPPSQQPPPPGGPPQPPGTPPVAPTELVAMPRRPGFGIDGRPIALRANHFQVKIPPLDLFHYEVNITPEKCPRRINRDVIDTLVTAYKGRFFQNNLPVFDGRTNMYCKDEIPLDREKQVELEVTLPGEGKDRIFKASIKFEGKVSLSLLEAALKGEVMNIPHEAVQALDVIMRHLPSLRYTPVGRSFFSPPEEYSHPLGGGREVWFGFHQSIRPSMWKMMLNIDVSATAFYSCQSVIDFLCEVLDIQDLSDQRRPLSDSHRVKFTKEIKGLKIEITHCGNMKRKYRVCNVTKRSAQTQTFPWQLENGQTVECTVAKYFRERHNLILQYPHLPCLQVGQEQRHTYLPLEVCNIVAGQRCIKKLTDLQTSTMIKATARSAPDREKEIKSLVHKADFNNDQYVRQFGLSISNEMVTIEGRVLPAPKIQYGGKLNKPQQAIPNQGVWDMRGKQFHFGVEIEVWAIACFAPQHQCREEALRNFTLQLQKISNEAGMPIKWQPGFCKYAVGADQVEAMFRHLKKMWPKLQLIIVVLPGKTPVYAEVKRVGDILLGIATQCVQVKNVNRTTAQTLSNLCLKIKVKLGGVNNILAPNIRPRIFSEPVIFCGADVTHPPAGDDKKPSIAAVVGSMDGHPSRYCASVRIQTHRVEIIQDLQAMVKELLVEFYKSTRYKPARIIMYRDGVSEGQFLQVLANEMNAIRDACRSLEEGYEPGITFIVVQKRHHTRLFCAERREQIGRSGNIPAGTTVDSGITHPLEYDFYLCSHAGIQGTSRPSHYHVLWDDNGFKADELQCLTYQLCHTYVRCTRSVSIPAPAYYAHLVAFRARYHLVEKDHDRYDHDSVISSANSNGGDGSHHGRDGYGRTPKEMSAAIKVHDDTLKVMYFA

SEQ ID NO: 11518 - DNA, 3042 bp, Zea mays
  CDS (1)..(3042)
atggcctctcgtgggcgcggtggtggcggagggaaaggccctagcggtgggcggggcggtgaaggcagggggcgggggatccgtggcgggggaggttaccatcacggcgacgatggaggcggcgaacgcggaggcagaggcgacccgggccgagggcgcggggtcggcggtcgtggccgcggtcccggaggccgaggtgtcgacgaccaccagcagcagccgccgccgctcgggaacacagagggcggaggccagggccgcggcggcatggcggtagcggtaccgccagcccgccccgccgcgccctgtcctctagcgccggacgccgctgccccggcatttcccgcagcagcggcctcgtcttctgcgcaagcgcctcgagcccccaccgaggcggctggagctgccttggcggatggcatggggaagttggccgtggcggacgaccggcccgctgctcctcccgtgcccgcaggtaaacccgtcgcgcaaggtcccgcgcaccagccccaggaggctccgccactctcgaggaagaggatcgtgccgccgccccgccccggtttaggcacgtctgggagaaagctggcggttcgcgcgaaccacttctttgtcgaggtgtccgtgaacgacatcttccattacgacgttttaatcaatcctgaaccaaaagcaagaaaaaccaacaggatgctgctctcagagcttgtcaagatacatggcgcgacatctctcgcccgcaagacacctgcatatgatggaagcaagagcctgtacactgcaggcgagctgccgttcaaatcaatggagtttgttgtcaagttggggaaggcgggccgagaagttgactacaaggtgacaatccgatacgcggcacggcctaacgtgtaccaacttaagcaattgatcaattctcagctaaggaacacgccatttgacgcaatccaagcactggatgttgtcttgagagagtcgccttctctcaactatgtaactctttctcgatccttcttctccaagaagttcggtgatgacgacattggcggtgggctagagtgctggagaggatattaccagagcttgcgtccaactcaaatgggcctctcattgaacattgatacatgctcgacttcattttaccaacctatcgatgtggtaaaatttgttgccgattgtctccagctgacaaaccctggccaaccttttttggacagggatcgtttaaagcttaagagagccctgcgcggagttcttgttgagactgaacaccagcagggaaagagaagcatctacaggataactgggattacttctgttccattggctcaactgagcttttcttgtaacgaaggccctcagctgactgttgttgagtactttgcacaacggtacaatgtccagctgcgctacactgcttggccctgcctgcagtcgggcaatgattctaagccgatatatttaccaatggaggtgtgcaaaatcattgaagggcagaagtaccctaggaagctcagcgacacacaggtggccaacatactgaaggcaacctgtaaacgtcctcaggatagggaggagaacattattaagatggttcgccacaacaactattctgctgataagatggcacaggtgtttgggatcactgtggccaaccagatggctaatgtgcaagcccgtgttctgcctccacctatgctgaaataccacgaatctggaaaggagaaaaccgttgcaccaagcttggggcaatggaatatgattaacaagaaaatggtcaatggtggaaccattcacagctggacttgtctgagcttttcgcggatcccgcttcgtttggtagacgaaatatgccatgaattggttcaaaagtgcaattccattggcatgagtttcaatccaaggccggtgacagaagttcagaaagactcacacaacaacatagaagctgctttaagggatgttcacaggagggctccgaatctgcagctgcttattgtgattcttccagatgttactggttattatggggaaattaagaggatgtgcgagactgaccttggtatagtatctcagtgcatcaatccgaagaagaatagaaacaagcagtattttgaaaatcttgcccttaaaatcaatgtgaaggctggagggcgcaatacagtgcttgagagagcctctgtgcctaatgggataccttttgtctcagatgtgccaacaatcatttttggtgctgatgttacccatcctacagcaggagaagaatcctcggcttctgttggagctgtggttgcatccatggactggccacaggtcacaacatataaagctctggtctcggcacaagcacacagggaagagattatacaaaatctcggcggaatgataagggagttgctgatttcgttctataagaggactggcaaaaagcccaaaaggattatattttacagggatggaataagtgaaggacaattcaaccatgttttgctccttgaaatggacgcgataaggaaggcttgtgcctctctggaagatgggtatctacccccagtgacatttgtcgtaatacagaaaaggcaccacacaaggctcttccctggagttcatggaaggagagatgttactgacagaagtgggaacattcttcctggaactgtggttgataccgagatttgtcatccgcgggagtttgatttctacctttgtagccatgctggaattcagggaaccagcaggccaatacactatcatgtcctctacgatgaaaaccgtttctcggctgatgggctgcagatactcacaaacagcctgtgctacacatacgcacgatgcacgcgcgctgtctcagttgttccaccagcctactacgctcacctggcagcattccgcgggaggtactacgacgaacaaggtagcagccccgcccccgatggaacctcagttgtcggtggcgatgccgctgcagccggtgatgatccacctgcgtgccgcaggctcccccagatcaaggagaatgtgaaggaagtgatgttcttctgctag

SEQ ID NO: 11519 - protein, 1013 aa, Zea mays
MASRGRGGGGGKGPSGGRGGEGRGRGIRGGGGYHHGDDGGGERGGRGDPGRGRGVGGRGRGPGGRGVDDHQQQPPPLGNTEGGGQGRGGMAVAVPPARPAAPCPLAPDAAAPAFPAAAASSSAQAPRAPTEAAGAALADGMGKLAVADDRPAAPPVPAGKPVAQGPAHQPQEAPPLSRKRIVPPPRPGLGTSGRKLAVRANHFFVEVSVNDIFHYDVLINPEPKARKTNRMLLSELVKIHGATSLARKTPAYDGSKSLYTAGELPFKSMEFVVKLGKAGREVDYKVTIRYAARPNVYQLKQLINSQLRNTPFDAIQALDVVLRESPSLNYVTLSRSFFSKKFGDDDIGGGLECWRGYYQSLRPTQMGLSLNIDTCSTSFYQPIDVVKFVADCLQLTNPGQPFLDRDRLKLKRALRGVLVETEHQQGKRSIYRITGITSVPLAQLSFSCNEGPQLTVVEYFAQRYNVQLRYTAWPCLQSGNDSKPIYLPMEVCKIIEGQKYPRKLSDTQVANILKATCKRPQDREENIIKMVRHNNYSADKMAQVFGITVANQMANVQARVLPPPMLKYHESGKEKTVAPSLGQWNMINKKMVNGGTIHSWTCLSFSRIPLRLVDEICHELVQKCNSIGMSFNPRPVTEVQKDSHNNIEAALRDVHRRAPNLQLLIVILPDVTGYYGEIKRMCETDLGIVSQCINPKKNRNKQYFENLALKINVKAGGRNTVLERASVPNGIPFVSDVPTIIFGADVTHPTAGEESSASVGAVVASMDWPQVTTYKALVSAQAHREEIIQNLGGMIRELLISFYKRTGKKPKRIIFYRDGISEGQFNHVLLLEMDAIRKACASLEDGYLPPVTFVVIQKRHHTRLFPGVHGRRDVTDRSGNILPGTVVDTEICHPREFDFYLCSHAGIQGTSRPIHYHVLYDENRFSADGLQILTNSLCYTYARCTRAVSVVPPAYYAHLAAFRGRYYDEQGSSPAPDGTSVVGGDAAAAGDDPPACRRLPQIKENVKEVMFFC

SEQ ID NO: 11520 - DNA, 3147 bp, Arabidopsis thaliana
  CDS (1)..(3147)
atggtgagaaagagaagaacggatgctccatctgaaggaggtgaaggctctgggtctcgtgaagctggtccagtctcaggtggtggacgtggttcacagcgaggtggtttccagcagggaggaggacaacaccaaggtggaaggggttatactcctcaacctcaacagggaggtcgtggtggtcgtggatatgggcaaccaccacaacagcaacaacagtatggaggaccacaagagtaccaaggaagaggaagaggaggacctcctcatcaaggaggtcgaggagggtatggcggtggccgtggaggtggaccttcttctggaccaccgcagagacaatcagttcccgagctgcatcaagctacctcacctacttatcaagcggtgtcttctcagcctacactgtctgaggtgagtcctacccaggtaccagaacctactgttctggctcagcaatttgaacaactctctgttgaacaaggagctcccagtcaggcaatccagcctataccttcttctagcaaggctttcaagtttccaatgaggcctggtaaaggacagagtggaaagcgttgcattgtgaaggctaaccatttctttgctgaactgcctgataaggatttgcaccattatgatgttaccattactccggaagttacatcaaggggtgtcaatcgtgctgtgatgaaacaacttgttgataattatcgtgattctcaccttggaagtcgtcttccagcgtatgatggtcgaaaaagtctttacactgctggtccacttccctttaactccaaggagttcagaatcaatcttcttgacgaagaagtaggggctggaggtcaaagacgagaaagggaatttaaagttgtgatcaagctagttgcacgtgctgatctgcatcacctaggaatgtttttggaggggaaacaatcagatgccccacaggaagctctgcaggttcttgacattgttcttcgtgagctgccgacctctaggtatattccggtgggccggtccttttattcccctgatataggaaaaaaacaatcattgggggatggcttggagagctggcgtggattctaccaaagcattcgtcctacacagatgggcttatcactcaatattgatatgtcatcgacagccttcatagaggcaaaccctgtgattcagtttgtctgtgatttgcttaaccgggatatttcttctcgacctttatctgatgctgatcgtgttaagataaaaaaggctcttagaggtgtcaaagttgaagtgactcatcgaggaaacatgcgccggaagtaccgcatttccggtttgactgctgtggccactcgggaattgacattcccagtagatgaaagaaatactcagaaatctgttgtagaatacttccacgaaacatatggttttcgcattcagcacactcaactaccatgcttgcaagttgggaattctaataggcctaattacttaccaatggaggtatgcaagattgttgaaggccagcggtattccaaaagattgaatgagagacagatcactgctttgctgaaggttacctgtcagcgcccgatagatcgagaaaaagatatcttacagacggtgcaactcaatgattatgctaaagataattatgctcaagagtttggcatcaaaataagtacttctctggcttctgttgaggctcgtatactgcctcctccatggcttaagtaccacgagtctggaagggaagggacttgtctgccacaagttggtcaatggaacatgatgaataagaaaatgatcaatggtggaacggtgaataattggatctgcatcaacttttctaggcaagtgcaggacaatctagcgcgtacattttgtcaggaacttgctcaaatgtgttacgtatctggcatggcatttaatccggaaccagtcctcccaccagtcagtgctcgccctgagcaagtagagaaggtcttgaagactagatatcatgatgccacatcaaaactctcccaaggaaaagaaattgatctgcttattgtcattctgcccgataataatggatcattatacggtgatttgaaacgcatatgtgagactgaactcggcatagtctctcaatgttgcctgacaaagcatgtctttaagatgagcaaacaatacatggctaatgttgcgctgaagattaatgtgaaggttggaggaagaaacacagtgcttgttgatgctctatctaggcggattcctctagtcagtgatcgacccaccattatatttggtgctgatgttacccaccctcaccctggagaggattcaagcccatctattgctgctgttgtggcatctcaggattggcctgaaatcactaaatatgctggattagtttgcgctcaagcgcataggcaggagctcattcaggatctgttcaaagagtggaaggatcctcagaaaggtgtggtgactggtggcatgataaaggagttgctcatagccttccgtagatcaactgggcataaaccactaaggatcatcttctacagggatggagtcagtgagggacaattttaccaagttttgctctatgaacttgatgccatccgcaaggcctgtgcttcgctggaagcaggttatcaaccaccagtgacatttgtggtggtgcagaagcgtcatcacacgaggctgtttgctcagaaccacaatgatcgccattcggtggacagaagtgggaatattttacctggcactgttgtggactctaaaatctgccaccctacagagtttgacttttacctctgtagtcatgctggtattcagggcacttctcgacctgctcattaccacgttctttgggatgagaacaactttactgcagatggacttcaatctctgaccaataacttatgttacacgtatgcaagatgcacacgctcagtttcaattgttccccctgcatattatgcacatctagcagcttttagggctcgattctacatggagccagagacatcagacagtggctcaatggctagtgggagcatggcacgtggaggtggaatggctggtagaagcacacgcgggcctaatgtcaatgctgcagtgaggccactcccagctctgaaagagaatgtgaagcgtgtcatgttctactgctga

SEQ ID NO: 11521 - protein, 1048 aa, Arabidopsis thaliana
MVRKRRTDAPSEGGEGSGSREAGPVSGGGRGSQRGGFQQGGGQHQGGRGYTPQPQQGGRGGRGYGQPPQQQQQYGGPQEYQGRGRGGPPHQGGRGGYGGGRGGGPSSGPPQRQSVPELHQATSPTYQAVSSQPTLSEVSPTQVPEPTVLAQQFEQLSVEQGAPSQAIQPIPSSSKAFKFPMRPGKGQSGKRCIVKANHFFAELPDKDLHHYDVTITPEVTSRGVNRAVMKQLVDNYRDSHLGSRLPAYDGRKSLYTAGPLPFNSKEFRINLLDEEVGAGGQRREREFKVVIKLVARADLHHLGMFLEGKQSDAPQEALQVLDIVLRELPTSRYIPVGRSFYSPDIGKKQSLGDGLESWRGFYQSIRPTQMGLSLNIDMSSTAFIEANPVIQFVCDLLNRDISSRPLSDADRVKIKKALRGVKVEVTHRGNMRRKYRISGLTAVATRELTFPVDERNTQKSVVEYFHETYGFRIQHTQLPCLQVGNSNRPNYLPMEVCKIVEGQRYSKRLNERQITALLKVTCQRPIDREKDILQTVQLNDYAKDNYAQEFGIKISTSLASVEARILPPPWLKYHESGREGTCLPQVGQWNMMNKKMINGGTVNNWICINFSRQVQDNLARTFCQELAQMCYVSGMAFNPEPVLPPVSARPEQVEKVLKTRYHDATSKLSQGKEIDLLIVILPDNNGSLYGDLKRICETELGIVSQCCLTKHVFKMSKQYMANVALKINVKVGGRNTVLVDALSRRIPLVSDRPTIIFGADVTHPHPGEDSSPSIAAVVASQDWPEITKYAGLVCAQAHRQELIQDLFKEWKDPQKGVVTGGMIKELLIAFRRSTGHKPLRIIFYRDGVSEGQFYQVLLYELDAIRKACASLEAGYQPPVTFVVVQKRHHTRLFAQNHNDRHSVDRSGNILPGTVVDSKICHPTEFDFYLCSHAGIQGTSRPAHYHVLWDENNFTADGLQSLTNNLCYTYARCTRSVSIVPPAYYAHLAAFRARFYMEPETSDSGSMASGSMARGGGMAGRSTRGPNVNAAVRPLPALKENVKRVMFYC

SEQ ID NO: 11522 - DNA, 2637 bp, Arabidopsis thaliana
  CDS (1)..(2637)
atggagacatcttcatctctgccactgtcacccataagtatagaaccagaacagcccagccatcgagattatgacatcacaactagacgtggggttggaaccacaggcaacccaatagaattgtgcaccaatcactttaatgtttctgtgagacagccggatgtagtattttaccagtacactgttagtatcaccacagaaaacggtgatgctgttgatgggacaggaataagcagaaagcttatggaccaactattcaagacttactcttctgatcttgatggtaaaaggttggcatatgatggagagaagactttatatactgttggtcctctaccacagaacgaatttgactttctagtcatcgtggaagggtcattttcaaaacgtgattgtggtgtctctgatggtggtagttcttccggtacttgcaagcgatcaaaacgttctttcttgccaagaagttacaaggttcagatacattatgctgcagaaataccgttgaagactgttcttggcactcagagaggagcttatacaccagataagagtgctcaggatgcacttagagtgcttgacattgtactgaggcagcaagcagctgaaaggggatgccttttggtcagacaggcatttttccatagcgatgggcaccccatgaaagttggaggaggtgttataggtattcgaggtttacattcgagctttcgtccaactcatggaggactctcgcttaacattgatgtgtcaacaacaatgatcttagaacctggtccagttattgaattcctgaaagccaatcagagtgttgagacaccacggcaaatcgactggattaaggctgcgaaaatgcttaaacatatgagggttaaggcaacacaccgtaacatggaatttaaaattataggtctaagttcgaaaccgtgcaatcagcaactgttttcaatgaagattaaagatggtgaacgtgaggtacctattagagagattactgtgtatgactatttcaagcaaacctacacagagcctatttcttctgcgtactttccatgccttgatgttggcaagccagatcggcccaactatcttccactggagttttgtaatcttgtatctctgcaacgttatacaaaaccattgtcagggaggcaaagagttttacttgttgaaagttcaagacaaaaacctctagagagaattaaaacactcaatgatgcaatgcatacctactgctatgacaaggacccatttttggctggatgtggcatctccattgaaaaagaaatgactcaagttgaaggccgtgttctcaagcccccaatgctgaagtttggcaagaatgaagattttcaaccttgcaacggacggtggaactttaacaacaagatgcttctagaaccaagagctattaaaagctgggctatcgtcaacttttcttttccatgcgacagtagtcacatttcccgtgagcttataagctgtggcatgaggaaaggcattgaaattgatcgaccttttgcactagttgaagaggatccacagtacaaaaaagcaggtcctgttgaaagggtagaaaaaatgattgcaacgatgaagttaaaatttccagatcctcctcattttatcctctgtattctgccagaacggaaaacttctgatatctatggtccctggaagaagatatgcctcactgaagaagggatccacacacaatgcatctgcccaatcaagatcagtgaccaatatctcaccaatgtacttctgaagataaattcgaagcttggaggcatcaattctctgttgggaatagagtactcttacaacattccattgataaacaaaattcccaccttgattttgggtatggatgtatctcatgggcctccaggtcgggcagatgttccttcagtagcagcggttgttggttcaaaatgctggcccttaatctcaaggtatagggcagctgtaagaactcagtcaccacgtctggagatgattgattcgctcttccaacctatcgagaacactgagaaaggagataacggtatcatgaacgaattatttgtagagttctatcggacaagcagggcacggaaacctaagcagattatcattttcagggatggtgtgagtgaatcacagttcgagcaagtcttgaagatcgaagtggaccaaattataaaggcgtatcaacgtcttggtgaatctgatgtgccaaaattcactgtcattgtggctcagaagaaccaccacaccaagttgtttcaagctaagggtcctgaaaatgttcctgcaggaactgtcgtggacaccaagatcgtacacccgacaaactacgatttttacatgtgtgctcatgcaggaaaaataggaacttcaagaccggctcattaccatgtattacttgatgagattggtttctcccccgatgacttgcagaatctcatccattctctctcctatgtcaaccaacgtagcacaactgcaacttcgatcgtggctccagtacgatacgctcatcttgcagcagctcaagttgcgcaattcacaaagtttgaaggtatatcggaggacgggaaagttccagagcttccacgtctgcacgagaatgtcgaaggcaacatgttcttctgctga

SEQ ID NO: 11523 - protein, 878 aa, Arabidopsis thaliana
METSSSLPLSPISIEPEQPSHRDYDITTRRGVGTTGNPIELCTNHFNVSVRQPDVVFYQYTVSITTENGDAVDGTGISRKLMDQLFKTYSSDLDGKRLAYDGEKTLYTVGPLPQNEFDFLVIVEGSFSKRDCGVSDGGSSSGTCKRSKRSFLPRSYKVQIHYAAEIPLKTVLGTQRGAYTPDKSAQDALRVLDIVLRQQAAERGCLLVRQAFFHSDGHPMKVGGGVIGIRGLHSSFRPTHGGLSLNIDVSTTMILEPGPVIEFLKANQSVETPRQIDWIKAAKMLKHMRVKATHRNMEFKIIGLSSKPCNQQLFSMKIKDGEREVPIREITVYDYFKQTYTEPISSAYFPCLDVGKPDRPNYLPLEFCNLVSLQRYTKPLSGRQRVLLVESSRQKPLERIKTLNDAMHTYCYDKDPFLAGCGISIEKEMTQVEGRVLKPPMLKFGKNEDFQPCNGRWNFNNKMLLEPRAIKSWAIVNFSFPCDSSHISRELISCGMRKGIEIDRPFALVEEDPQYKKAGPVERVEKMIATMKLKFPDPPHFILCILPERKTSDIYGPWKKICLTEEGIHTQCICPIKISDQYLTNVLLKINSKLGGINSLLGIEYSYNIPLINKIPTLILGMDVSHGPPGRADVPSVAAVVGSKCWPLISRYRAAVRTQSPRLEMIDSLFQPIENTEKGDNGIMNELFVEFYRTSRARKPKQIIIFRDGVSESQFEQVLKIEVDQIIKAYQRLGESDVPKFTVIVAQKNHHTKLFQAKGPENVPAGTVVDTKIVHPTNYDFYMCAHAGKIGTSRPAHYHVLLDEIGFSPDDLQNLIHSLSYVNQRSTTATSIVAPVRYAHLAAAQVAQFTKFEGISEDGKVPELPRLHENVEGNMFFC

SEQ ID NO: 11524 - DNA, 2691 bp, Arabidopsis thaliana
  CDS (1)..(2691)
atggattctgatgaaccgaatgggagtggattaccacctccaccacctttcgttccagcaaatcttgtccctgaagtggagcctgtaaaaaagaacattcttctcccaatggctcggcctcgaggcagcggctccaaaggacagaagattcctcttcttactaatcactttggagtcaagttcaacaaaccaagcggttacttctttcattacagtgttgctatcaattatgaagatggccgtccagtggaggctaaaggtatcggccgaaagattcttgacaaagttcaggagacctatcaaagtgatttgggtgccaaatactttgcttatgatggcgagaagactctcttcactgttggtgctcttcccagcaacaaacttgacttctctgttgttcttgaagaaataccttctagcagaaatcacgctggaaatgatacaaatgatgctgatagaaaaagatcaaggcgtcccaaccaaactaagaaattcatggttgagataagttatgctgcaaagatccccatgcaggctattgcaagcgctcttcaagggaaggagacagagaatcttcaagacgctctgagagtgctggatattattttgcgccagagtgcagctaggcaaggttgcctccttgttcgccagtcctttttccacaatgacgtaaagaactttgtacctattggtggaggtgtcagtggttgcagagggttccattcaagtttcagaactactcagggaggcttatccctgaatattgacacttcaactacgatgatagtacaacctggacctgtagttgatttcctgcttgctaaccagaacaagaaagatccatacggaatggactggaacaaggctcgacgtgtcctcaagaatctgagagttcaaattactctttccaatagagaatacaagataagtggactaagtgaacacagctgcaaagatcaactatttacatggaggaaacctaacgacaagggagaatttgaggaggttgagatcacagtgctcaattactataaagagcgtaacattgaagtgcgttattcaggtgacttcccttgcatcaatgttggtaagccgaagcgtcccacttacttccccattgagttctgtaatcttgtgtctctacagcgatacacaaaatcgcttaccaattttcagagggctgccctagttgaaaagtctaggcagaagccacctgaaaggatggcctcgctaaccaaaggtctgaaggacagcaattacaatgccgacccggtattgcaagatagtggtgttagcattatcaccaattttacccaagttgaaggccgtatcttaccaacaccaatgctgaaagtgggcaagggagaaaacctttccccaatcaaaggaaaatggaactttatgcgtaagacactcgctgagccaacgacggttactagatgggctgttgtgaacttctctgctcgctgtgatacaaatacacttattcgtgacttgattaaatgtggacgggagaaaggaattaatgtagagcctccattcaaggatgtcatcaacgagaatcctcagtttaggaatgcaccagctactgtgagagtagagaatatgtttgagcagataaaatccaaactcccaaagccgcctctgttccttctttgcatactcgctgaaaggaaaaactctgatgtttatggcccttggaaaaaaaagaatcttgttgatcttggaattgtgactcagtgcattgctcccaccagactgaacgatcagtatctcaccaatgttctcctgaagataaatgccaagcttggtggattgaattcgttgttagctatggagcgctcaccagcaatgccaaaagtaacgcaagttcctaccatcattgttgggatggatgtatcccatggttcccctggccagtctgatataccatcaattgctgctgttgtgagctcaagacaatggccactcatctcaaaatataaggcatgtgtacgcacacaatcacgcaaaatggaaatgattgataatctcttcaaacccgtcaatggcaaagacgaaggaatgttcagggaactcttgttagacttttactacagttcagagaataggaaaccagagcacatcattattttcagggatggtgtaagcgagtctcagttcaatcaagttcttaatattgaattggatcagatgatgcaggcatgcaagtttcttgatgatacgtggcatccgaagtttacagtgatagttgcccagaagaaccaccacacaaagttcttccagtctcgaggccctgataatgttcctccaggaacaatcattgacagccagatctgtcacccacgcaactttgatttctatctctgcgcccatgctggcatgattggaactacaaggccaacacattaccatgttctgtatgacgagattgggtttgccacagacgacctccaagaacttgtgcattctctgtcctatgtctaccagaggagcaccactgcgatctcagtcgttgcacctgtatgttacgctcatttggcagctgcacagatgggaactgtgatgaagtatgaagagttgtctgagacttcttcgagccatggaggaatcaccacacctggagcagtccctgtgccacctatgccgcagctgcacaataatgtttcaacctccatgttcttctgttga

SEQ ID NO: 11525 - protein, 896 aa, Arabidopsis thaliana
MDSDEPNGSGLPPPPPFVPANLVPEVEPVKKNILLPMARPRGSGSKGQKIPLLTNHFGVKFNKPSGYFFHYSVAINYEDGRPVEAKGIGRKILDKVQETYQSDLGAKYFAYDGEKTLFTVGALPSNKLDFSVVLEEIPSSRNHAGNDTNDADRKRSRRPNQTKKFMVEISYAAKIPMQAIASALQGKETENLQDALRVLDIILRQSAARQGCLLVRQSFFHNDVKNFVPIGGGVSGCRGFHSSFRTTQGGLSLNIDTSTTMIVQPGPVVDFLLANQNKKDPYGMDWNKARRVLKNLRVQITLSNREYKISGLSEHSCKDQLFTWRKPNDKGEFEEVEITVLNYYKERNIEVRYSGDFPCINVGKPKRPTYFPIEFCNLVSLQRYTKSLTNFQRAALVEKSRQKPPERMASLTKGLKDSNYNADPVLQDSGVSIITNFTQVEGRILPTPMLKVGKGENLSPIKGKWNFMRKTLAEPTTVTRWAVVNFSARCDTNTLIRDLIKCGREKGINVEPPFKDVINENPQFRNAPATVRVENMFEQIKSKLPKPPLFLLCILAERKNSDVYGPWKKKNLVDLGIVTQCIAPTRLNDQYLTNVLLKINAKLGGLNSLLAMERSPAMPKVTQVPTIIVGMDVSHGSPGQSDIPSIAAVVSSRQWPLISKYKACVRTQSRKMEMIDNLFKPVNGKDEGMFRELLLDFYYSSENRKPEHIIIFRDGVSESQFNQVLNIELDQMMQACKFLDDTWHPKFTVIVAQKNHHTKFFQSRGPDNVPPGTIIDSQICHPRNFDFYLCAHAGMIGTTRPTHYHVLYDEIGFATDDLQELVHSLSYVYQRSTTAISVVAPVCYAHLAAAQMGTVMKYEELSETSSSHGGITTPGAVPVPPMPQLHNNVSTSMFFC

SEQ ID NO: 11526 - DNA, 2967 bp, Arabidopsis thaliana
  CDS (1)..(2967)
atgccgattaggcaaatgaaagatagctctgagactcacttagttatcaaaacccaacctttaaagcaccacaatccaaaaaccgttcaaaacggtaaaatccctcctccttctccttctccggtgacggtgactactccggcgacggttactcagagtcaagcttcttcaccttcaccaccgtcaaagaatcgtagccggaggagaaaccgtggtggaagaaaatctgatcaaggagatgtttgtatgagacctagctctcgtcctcgtaaaccgccaccgccaagtcaaaccacttcctccgccgtctccgtcgccaccgccggtgagattgtcgctgtgaatcatcagatgcagatgggtgttcgtaaaaactcaaactttgctccaagacctggatttggaacacttggaactaaatgcattgttaaagctaaccactttctcgctgatttgcctaccaaggatttgaatcagtatgatgttacaattactcctgaagtgtcatcaaagagtgttaacagagctataattgctgagttagttagactttacaaagagtctgatctcgggaggagacttccggcttacgatggccggaaaagtctttacactgctggagaacttccttttacttggaaggagttcagtgttaagattgttgatgaagatgacggtatcatcaatggccctaaaagggagagatcatataaggtggcaatcaagtttgttgcacgggcaaatatgcatcacttaggcgagtttctagctggtaaacgggcagattgtccgcaagaggcggtgcagattcttgatattgtactcagggagttgtcggttaagaggttttgtcccgttggaagatctttcttttcgcctgatattaaaacaccgcagcgactcggtgaagggttagagtcatggtgtgggttttaccagagtattagaccaactcaaatgggtttatcactaaatatcgatatggcttcagctgcattcatcgagcctcttccagtgatagagtttgtagcacagcttcttggaaaggatgtcttgtcgaagccattgtcggattctgatcgcgtcaagattaagaagggtcttagaggagtgaaagtagaggttactcacagagcgaatgtaagaaggaaataccgtgttgcgggtttaacaactcaaccaacaagagagctaatgtttccagtagatgagaactgtactatgaagtcagttattgagtatttccaagagatgtatggattcacgatccagcacacgcatttgccatgtctccaagttggaaaccaaaagaaggcaagctatttgccgatggaggcatgcaaaattgtcgagggacaacggtacacgaaaaggttgaatgagaagcagattactgctctcttgaaagttacatgccaaaggccgagggacagagaaaacgatattttgcggactgtccaacacaacgcatatgatcaagatccatatgcaaaggagtttggcatgaacataagcgaaaagttagcttctgttgaagctcgtattcttccagctccatggcttaagtatcacgagaacgggaaagaaaaagattgtctcccgcaagttggtcagtggaatatgatgaacaagaaaatgatcaacgggatgactgtgagcagatgggcctgtgttaacttctcacgcagcgttcaagaaaacgttgctcgtggattttgtaatgaacttggtcagatgtgtgaagtctcaggcatggagtttaatccagaacccgtgataccaatatatagtgcgaggcccgatcaagtcgagaaagctctaaagcatgtttatcacacttcaatgaacaaaaccaaaggcaaagagttagagcttctgctggcaatattacctgataacaacggttcactttatggtgatcttaagagaatctgtgaaaccgagcttggtttgatatctcaatgttgtctcacaaaacatgtgttcaagattagcaaacagtatctggcaaatgtatcccttaaaatcaacgtaaagatgggaggaaggaacacagttctagtagacgccataagctgtagaataccactggttagcgatataccgacaatcatttttggcgcagacgtgactcacccagagaacggggaagagtcaagcccttcaatcgctgctgttgttgcttctcaagactggcctgaagtgacaaaatatgcgggtttagtttgtgctcaagctcacaggcaagaacttatacaagatttgtataaaacatggcaagatcctgttcgcggtactgttagtggcggtatgatcagggaccttcttatctcatttagaaaagcaacagggcaaaaaccgcttcgaattatcttttatcgtgatggagtaagcgaagggcaattctatcaagttttactctatgagttggatgcaattcgaaaggcttgtgcatcgcttgaaccgaattatcagccaccggtgacattcatagttgtacagaagcgtcaccacactcgtttgtttgctaataatcaccgagacaaaaacagtactgaccgaagcggaaatatcttaccaggtactgtagttgacactaaaatatgtcatccaactgaattcgacttctacctttgtagccatgcgggtattcagggaacaagcaggcctgcacattaccatgttctttgggacgagaacaatttcacagcagatggtattcaatctctgactaacaatctctgttatacctatgcgcggtgcactcggtcggtctctatagttcctccagcgtattatgctcatcttgcagcatttcgagcacgtttctacctggaaccggagataatgcaagacaacggatcaccgggtaaaaagaacacgaaaacaacaactgtcggagacgtaggtgtgaagcctttaccagccttgaaggagaatgtgaagagagtaatgttctactgctaa

SEQ ID NO: 11527 - protein, 988 aa, Arabidopsis thaliana
MPIRQMKDSSETHLVIKTQPLKHHNPKTVQNGKIPPPSPSPVTVTTPATVTQSQASSPSPPSKNRSRRRNRGGRKSDQGDVCMRPSSRPRKPPPPSQTTSSAVSVATAGEIVAVNHQMQMGVRKNSNFAPRPGFGTLGTKCIVKANHFLADLPTKDLNQYDVTITPEVSSKSVNRAIIAELVRLYKESDLGRRLPAYDGRKSLYTAGELPFTWKEFSVKIVDEDDGIINGPKRERSYKVAIKFVARANMHHLGEFLAGKRADCPQEAVQILDIVLRELSVKRFCPVGRSFFSPDIKTPQRLGEGLESWCGFYQSIRPTQMGLSLNIDMASAAFIEPLPVIEFVAQLLGKDVLSKPLSDSDRVKIKKGLRGVKVEVTHRANVRRKYRVAGLTTQPTRELMFPVDENCTMKSVIEYFQEMYGFTIQHTHLPCLQVGNQKKASYLPMEACKIVEGQRYTKRLNEKQITALLKVTCQRPRDRENDILRTVQHNAYDQDPYAKEFGMNISEKLASVEARILPAPWLKYHENGKEKDCLPQVGQWNMMNKKMINGMTVSRWACVNFSRSVQENVARGFCNELGQMCEVSGMEFNPEPVIPIYSARPDQVEKALKHVYHTSMNKTKGKELELLLAILPDNNGSLYGDLKRICETELGLISQCCLTKHVFKISKQYLANVSLKINVKMGGRNTVLVDAISCRIPLVSDIPTIIFGADVTHPENGEESSPSIAAVVASQDWPEVTKYAGLVCAQAHRQELIQDLYKTWQDPVRGTVSGGMIRDLLISFRKATGQKPLRIIFYRDGVSEGQFYQVLLYELDAIRKACASLEPNYQPPVTFIVVQKRHHTRLFANNHRDKNSTDRSGNILPGTVVDTKICHPTEFDFYLCSHAGIQGTSRPAHYHVLWDENNFTADGIQSLTNNLCYTYARCTRSVSIVPPAYYAHLAAFRARFYLEPEIMQDNGSPGKKNTKTTTVGDVGVKPLPALKENVKRVMFYC

SEQ ID NO: 11528 - DNA, 2676 bp, Caenorhabditis elegans
  CDS (1)..(2676)
atgcccggcgattcgctgacatcgtcgtctttcatgccagatggtggcgcagaaacgtcgagctcttcacagttgggcggctcggctcacggagcaattggcacaaaacccgacgcaggcgtccaattccagtgcccagtccgtccgaaccatggagtcgagggccgatccatcctcctgcgagccaatcattttgcagtacggatccccggaggttcagtccaacattatcaaattgacgtctttccggacaagtgcccaagacgggttaatcgcgaggtaatcggctgcctgatctcctccttctcaaaatatttcaccaatattcgaccagtctacgatggaaagcgtaacatgtacacgcgggagcccctaccaattggcacggagcccatgaactttgaggtgacgctgcctggagattcagcagtggaacggaagttctcagtgacgatgaagtggatcggtcaggtctgtctgtcagctctggacgatgccatggaaggtagagtgcggcaggttccacatgaagccgttcagtcgatcgatgtgattcttcgccacttgccaagtttgaagtacaccccggttggaaggtcgtttttcacacctccaggcgtcatgaagcccggcatgcaaatgcaccaggagagcaaactcggtggaggccgcgaagtatggtttggattccatcaatccgtccgaccatcccaatggaagatgatgctcaacattgacgtctccgccacggccttttaccgcgcgatgccagtcatcgaattcgtcgccgaggtgctcgagctcccagtccaagctctcgccgagcgtcgggccctctccgatgctcaacgcgtcaaattcaccaaagagatccgtggactcaagattgagatcacccattgtggagccgtgcgccggaagtacagagtttgcaacgtcacacgccgcccggcccagacccagaccttcccattgcaactggagactggccaaactattgagtgtactgtagccaagtacttctttgacaagtaccgtatccagctgaagtacccccaccttccatgcctccaagtcggtcaggagcagaagcatacgtacctgccaccagaggtctgcgatattgttccaggacagcgttgtctgaagaagctcaccgatgtgcagacgtccaccatgatcaaggccacggctcgttccgctccagagcgtgagcgtgagatttgtaagctagtaagcaaggctgagctctccgcggatccatttgctcatgaattcggaatcactatcaatccagcaatgactgaagtcaagggacgtgtgctctcggctccgaagcttctctatggaggtcgtcatcgtgccacaactgcccttccgaaccagggagtctgggatatgcgcgggaagcagttccacactggaatggaagtccgtacctgggcgattgcatgctttgctcagcaatctcatgtcaaggaaaatgatctcaggatgttcacgactcaattgcaaaggatctctaccgacgctggaatgccaatcatcggtacccctatgttctgcaaatatgcttctggagtggagcaggtggagccgatgttcaagtacttgaagcagacctattcggcgattcagttgattgtggtggtgctgccaggaaagactccgatctatgccgaagtgaaacgcgtcggagacaccgtcctcggaatcgccacccagtgcgtccaggccaagaacgccatccgaaccaccccgcagacactctccaacctctgtctcaagatgaatgtgaagcttggtggagtcaacagcatcctcctgccaaacgtgcgtccacggatcttcaacgagcccgtcatcttcctgggttgcgacatcacccatccagcagccggtgatacccgtaagccatccatcgccgcagtggtaggatctatggatgctcacccgagtagatatgcggcaacagttcgggtccagcagcaccgtcaggagatcattacggatctgacatatatggttcgagagttgcttgtccagttctaccgtaacacgaggttcaagccagcccgaattgtggtctacagagatggagtgtctgagggtcaactcttcaatgtgctccaatatgagctccgcgcaattcgtgaagcttgtgtgatgcttgagagtggataccagccaggaatcacatttatcgctgtgcaaaagagacatcacacaaggctcttcgccgcggataaagctgatcaagtaggaaaagcattcaacatcccaccaggaacaactgtagatgtgggaatcacgcatccaacggaattcgacttcttcctctgctcccacgctggtatccaaggaacatcccgaccatctcactaccatgtgctctgggatgacaatgatctgacggccgacgagcttcaacagttgacctaccaaatgtgtcatacctatgtaagatgcacgaggtctgtgtcgatcccggcgccggcgtactatgcacatctggtggcgttccgtgctcgttatcacttggtcgatagggatcatggatccggagaggaaggatcacaaccttcggggacgtcgtcggaggatacaacattgtcaagcatggccaaggccgtacaggttcatcccgactcgaacaacgtcatgtattttgcctaa

SEQ ID NO: 11529 - protein, 891 aa, Caenorhabditis elegans
MPGDSLTSSSFMPDGGAETSSSSQLGGSAHGAIGTKPDAGVQFQCPVRPNHGVEGRSILLRANHFAVRIPGGSVQHYQIDVFPDKCPRRVNREVIGCLISSFSKYFTNIRPVYDGKRNMYTREPLPIGTEPMNFEVTLPGDSAVERKFSVTMKWIGQVCLSALDDAMEGRVRQVPHEAVQSIDVILRHLPSLKYTPVGRSFFTPPGVMKPGMQMHQESKLGGGREVWFGFHQSVRPSQWKMMLNIDVSATAFYRAMPVIEFVAEVLELPVQALAERRALSDAQRVKFTKEIRGLKIEITHCGAVRRKYRVCNVTRRPAQTQTFPLQLETGQTIECTVAKYFFDKYRIQLKYPHLPCLQVGQEQKHTYLPPEVCDIVPGQRCLKKLTDVQTSTMIKATARSAPEREREICKLVSKAELSADPFAHEFGITINPAMTEVKGRVLSAPKLLYGGRHRATTALPNQGVWDMRGKQFHTGMEVRTWAIACFAQQSHVKENDLRMFTTQLQRISTDAGMPIIGTPMFCKYASGVEQVEPMFKYLKQTYSAIQLIVVVLPGKTPIYAEVKRVGDTVLGIATQCVQAKNAIRTTPQTLSNLCLKMNVKLGGVNSILLPNVRPRIFNEPVIFLGCDITHPAAGDTRKPSIAAVVGSMDAHPSRYAATVRVQQHRQEIITDLTYMVRELLVQFYRNTRFKPARIVVYRDGVSEGQLFNVLQYELRAIREACVMLESGYQPGITFIAVQKRHHTRLFAADKADQVGKAFNIPPGTTVDVGITHPTEFDFFLCSHAGIQGTSRPSHYHVLWDDNDLTADELQQLTYQMCHTYVRCTRSVSIPAPAYYAHLVAFRARYHLVDRDHGSGEEGSQPSGTSSEDTTLSSMAKAVQVHPDSNNVMYFA

SEQ ID NO: 11530 - DNA, 3034 bp, Caenorhabditis elegans
  CDS (26)..(3034)
gtctaacgtcgcctcaaacgacccaatgtccggcgggccgcaatatttgccaggagtcatgaattctaccattcaacagcaaccacagagcgcaacatcgtcgtttctgccaagtggaccgattagttcgacgtccacctcctcgcaagttgttccaacatctggagccacccagcagccgcctttcccgtcggcacaagcggctgcgtcaacagcgctccaaaatgatctagaagaaatatttaattctccgcctactcagccacaaacatttagcgatgttcctcaaagacaagccggaagcctggctccaggagttcccattggtaatacaagtgtctcaattggagaaccagcaaatacacttggaggcggtttaccaggcggagcaccgggacaattacctggcggcaaccagagtggtattcaattccaatgtcctcgacgcccaaaccacggagttgagggtcgctcaattcttcttcgcgccaaccactttgcagtgagaattcctggaggaactattcaacactaccaggtcgatgttactccagacaagtgcccaagaagagttaatcgcgagattatcagctgcttgataagcgcattctccaagtacttcactaatattcgccctgtttacgatggaaagcgcaatatgtacacccgcgagccccttccaattggaagagaacgtatggatttcgatgtcacacttcctggagactccgccgttgagcgtcaattttcggtttctttgaaatgggtcggacaagtttctctctccactctggaggatgccatggaaggaagagttcgccaggttccattcgaagccgttcaagctatggatgtcattcttcgtcatcttccaagcttgaaatacactcctgtcggacgttcattcttctcgccaccagttcctaatgcttctggagtcatggcaggatcatgccctccccaggcttctggagctgtcgcaggaggtgcccactccgctggacaatatcacgccgagagcaaactcgggggtggccgtgaagtctggtttggattccatcagtcggttcgcccatctcagtggaaaatgatgcttaacattgatgtctctgcgactgctttctatcgttccatgccagtcattgagttcatcgccgaagttttggagcttccagttcaagctcttgctgagcgtcgtgctctatctgatgctcaacgtgtcaagttcaccaaggaaattcgtggtctcaaaattgaaatcacccactgtggacaaatgcgcagaaagtatcgtgtctgcaacgtcactcgtcgtccagctcaaactcaaactttcccacttcaattggagactggtcaaactattgagtgcactgtcgccaagtatttctatgacaagtacagaattcaactcaaatacccacacttgccatgcctccaagttggacaggaacaaaagcacacctacctgccaccagaggtgtgcaacattgttccaggacaacgttgcatcaagaagcttacggatgtgcagacatcgacaatgattaaggctacagctcgttctgctccagaacgtgagcgtgagatttccaacttggtccgcaaggccgagttctcagctgatccatttgctcacgaattcggaatcaccatcaacccagcaatgactgaagtcaagggacgcgttctttctgctccaaaacttctctacggtggacgcactcgagccaccgctctcccgaatcaaggagtttgggatatgcgtggaaaacagttccacactggaatcgatgttcgtgtctgggcgatcgcttgttttgctcaacaacagcatgtcaaggagaacgatctccgcatgttcaccaaccagcttcagcggatttccaacgacgctggtatgccaatcgtcggaaatccatgcttctgcaagtacgctgttggagtcgagcaggttgagccaatgttcaagtacttgaaacaaaactactctggaattcaacttgtagtggttgttctccctggaaaaactccagtttatgctgaagttaaacgtgttggagacacagttttgggtatcgccacccagtgcgtgcaagccaagaacgcaatccgaacaactccacaaactctttctaatttatgcttgaagatgaacgtaaagcttggaggagtcaacagtattctgcttccaaacgtacgcccaagaatcttcaacgaaccagtcattttctttggatgtgacatcactcatccaccagcaggagactctcgcaaaccatccatcgcagcagttgtcggctcaatggatgctcatcctagcagatatgctgcaaccgtccgtgtccaacaacatcgtcaagagatcatctcagatttaacctacatggtccgcgagcttcttgttcaattctaccgcaacactcgcttcaagccagccagaatcgttgtctaccgtgatggagtttctgaggggcaattcttcaacgttcttcaatatgagcttcgcgcgattcgcgaggcttgcatgatgcttgaaagaggatatcaaccaggaatcactttcatcgccgtccaaaagagacatcacactcgtctctttgctgttgataagaaggatcaagtcggaaaagcatacaatattccgccaggaactactgtcgatgtaggaattacccacccaaccgagtttgacttctacttgtgctctcatgctggtattcaaggaacatctcgtccatcccattaccatgttctttgggatgacaacaatctgacagccgacgaacttcaacagctcacatatcaaatgtgccatacctacgtcagatgcacacgatccgtttcaattccagcgccagcatattatgctcatttggtagcgttccgcgctcgttatcatcttgtcgatcgcgagcatgactctggagaaggttctcagccatctggaacttccgaggataccaccttgtcgaacatggctagagctgtgcaggttcatccggatgccaacaacgtcatgtactttgcttaa

SEQ ID NO: 11531 - protein, 1002 aa, Caenorhabditis elegans
MSGGPQYLPGVMNSTIQQQPQSATSSFLPSGPISSTSTSSQVVPTSGATQQPPFPSAQAAASTALQNDLEEIFNSPPTQPQTFSDVPQRQAGSLAPGVPIGNTSVSIGEPANTLGGGLPGGAPGQLPGGNQSGIQFQCPRRPNHGVEGRSILLRANHFAVRIPGGTIQHYQVDVTPDKCPRRVNREIISCLISAFSKYFTNIRPVYDGKRNMYTREPLPIGRERMDFDVTLPGDSAVERQFSVSLKWVGQVSLSTLEDAMEGRVRQVPFEAVQAMDVILRHLPSLKYTPVGRSFFSPPVPNASGVMAGSCPPQASGAVAGGAHSAGQYHAESKLGGGREVWFGFHQSVRPSQWKMMLNIDVSATAFYRSMPVIEFIAEVLELPVQALAERRALSDAQRVKFTKEIRGLKIEITHCGQMRRKYRVCNVTRRPAQTQTFPLQLETGQTIECTVAKYFYDKYRIQLKYPHLPCLQVGQEQKHTYLPPEVCNIVPGQRCIKKLTDVQTSTMIKATARSAPEREREISNLVRKAEFSADPFAHEFGITINPAMTEVKGRVLSAPKLLYGGRTRATALPNQGVWDMRGKQFHTGIDVRVWAIACFAQQQHVKENDLRMFTNQLQRISNDAGMPIVGNPCFCKYAVGVEQVEPMFKYLKQNYSGIQLVVVVLPGKTPVYAEVKRVGDTVLGIATQCVQAKNAIRTTPQTLSNLCLKMNVKLGGVNSILLPNVRPRIFNEPVIFFGCDITHPPAGDSRKPSIAAVVGSMDAHPSRYAATVRVQQHRQEIISDLTYMVRELLVQFYRNTRFKPARIVVYRDGVSEGQFFNVLQYELRAIREACMMLERGYQPGITFIAVQKRHHTRLFAVDKKDQVGKAYNIPPGTTVDVGITHPTEFDFYLCSHAGIQGTSRPSHYHVLWDDNNLTADELQQLTYQMCHTYVRCTRSVSIPAPAYYAHLVAFRARYHLVDREHDSGEGSQPSGTSEDTTLSNMARAVQVHPDANNVMYFA

SEQ ID NO: 11532 - DNA, 2853 bp, Drosophila melanogaster
  CDS (1)..(2853)
atgtatccagttggacaacagtcacagtggaccccctcgcccactcggcctcagagtccctctcaggcgcagactagcttcgacacgctcacatcaccaccagcgcccggctcgtcggtcaatcccaccgccgtcaccagcccaagtgcccagaatgtggccgctggtggagcaactgtggccggtgcagcagcaactgccgcccaggtggcctccgccttgggtgccaccaccggcagcgtgacgccagcaattgccaccgcaacgccagccacgcagccggatatgcccgtctttacgtgtccacgacgcccgaatctcggacgagagggtcgcccgattgtgctgcgcgccaatcacttccaggtgacaatgccgcgtggctatgtgcatcactatgacatcaatatacagccggacaagtgtccgcgaaaggtgaaccgtgagattatcgagactatggtgcatgcctatagcaagatcttcggagtgctcaagccggtgttcgatggtcgcaacaatctgtatacccgcgatcccctgcccattggcaacgagcgtctagagctggaggttactctacccggcgagggcaaagatcgaatctttcgcgtgacgatcaagtggcaggctcaggtctcgctcttcaatttggaggaagctctcgaaggccgcacgcggcagataccctatgatgccattttggcgctcgatgtggtcatgcgccatctgcccagcatgacgtacacgccagtgggacgtagcttcttcagttccccggagggttactaccatcccctgggtggtggacgcgaggtttggttcggtttccatcagagcgtaaggccctcgcagtggaagatgatgctcaatatcgatgtctcggccaccgctttctacaaggctcaaccagtcattgacttcatgtgcgaggtgctggacattcgcgacatcaacgagcagcgcaaaccgctcaccgattcgcagcgcgtcaagttcacgaaggagatcaagggtttgaagatcgagatcacccactgcggccagatgcgtcgcaagtatcgtgtgtgcaacgtcactcgccgccccgctcagatgcaatcattcccactgcagctggagaacggacagaccgtagagtgcaccgtggccaagtacttcctggacaagtaccgcatgaaattgcgctacccgcacttgccctgcctgcaggttggccaagagcacaagcacacttacctgcctctagaggtgtgcaacattgtggccggacagcggtgcattaaaaagctgaccgatatgcagacgtcgaccatgatcaaggccacagctcgttcagctccggatcgtgagcgtgagattaacaacttggtaaagcgcgccgacttcaacaacgattcgtatgtgcaagagtttggcctgaccatctccaattcgatgatggaggtacgaggacgcgtcttgcctcctcccaagcttcagtatgggggacgtgtgtctaccggcctcaccggccagcagctgttcccgccacagaacaaggtgagcttggcctcgcccaaccagggtgtatgggatatgcgaggcaagcagttcttcactggcgtcgagatccgcatctgggccatcgcctgttttgccccacagcgcacggtgcgcgaggatgcgctgcgtaatttcacccagcagctgcagaagatctcaaacgatgcaggcatgccgataattggacagccgtgcttctgtaagtacgccaccgggccggatcaagtggaacccatgttccgttacctgaagatcaccttccccggcctgcaactcgtcgtggttgtgctgcccggcaagactccagtatacgccgaggtgaagcgtgtaggtgacaccgttctgggtatggccacccagtgtgtgcaggccaagaacgtgaacaagacatcgccacagacgctctctaatctgtgtctgaagatcaacgtcaagttgggcggcatcaattcaattctggtcccctccattcggccaaaggtcttcaatgagccggtcatctttttgggtgccgatgtgacacacccaccagctggcgacaacaagaaaccatcgattgccgccgtcgtgggctccatggatgcccatccatcgcggtatgccgccaccgttcgcgtacagcagcaccgacaggagatcatccaggagctgagcagcatggtgcgcgagctgttgatcatgttctacaagtcgacgggcggctacaagccccaccgcatcatactctatcgtgacggagtctccgagggacaattcccacatgtcctgcaacacgaattgaccgccattcgcgaggcctgcattaagctagagccagagtatcggccgggcatcacattcattgtggtgcagaagcgccatcacactcgactcttctgcgcggagaagaaggagcagagcggcaaatcgggcaatattcccgcaggcaccaccgtcgatgtgggcatcacacatcccaccgaatttgatttctatctatgcagccatcagggcatccagggcaccagtcgcccctcgcactaccacgttctgtgggacgacaatcactttgactcggacgagctgcagtgcctcacgtatcagctatgccatacgtacgtgcgctgcacccgatccgtcagtataccggcgccagcctactacgcccatttagtggccttccgtgccagatatcatctggtggagaaggagcacgattcgggcgagggttcgcaccagagcggctgctcagaggatcgtacgccaggtgccatggccagggccatcactgtgcacgcggataccaagaaggtcatgtactttgcctaa

SEQ ID NO: 11533 - protein, 950 aa, Drosophila melanogaster
MYPVGQQSQWTPSPTRPQSPSQAQTSFDTLTSPPAPGSSVNPTAVTSPSAQNVAAGGATVAGAAATAAQVASALGATTGSVTPAIATATPATQPDMPVFTCPRRPNLGREGRPIVLRANHFQVTMPRGYVHHYDINIQPDKCPRKVNREIIETMVHAYSKIFGVLKPVFDGRNNLYTRDPLPIGNERLELEVTLPGEGKDRIFRVTIKWQAQVSLFNLEEALEGRTRQIPYDAILALDVVMRHLPSMTYTPVGRSFFSSPEGYYHPLGGGREVWFGFHQSVRPSQWKMMLNIDVSATAFYKAQPVIDFMCEVLDIRDINEQRKPLTDSQRVKFTKEIKGLKIEITHCGQMRRKYRVCNVTRRPAQMQSFPLQLENGQTVECTVAKYFLDKYRMKLRYPHLPCLQVGQEHKHTYLPLEVCNIVAGQRCIKKLTDMQTSTMIKATARSAPDREREINNLVKRADFNNDSYVQEFGLTISNSMMEVRGRVLPPPKLQYGGRVSTGLTGQQLFPPQNKVSLASPNQGVWDMRGKQFFTGVEIRIWAIACFAPQRTVREDALRNFTQQLQKISNDAGMPIIGQPCFCKYATGPDQVEPMFRYLKITFPGLQLVVVVLPGKTPVYAEVKRVGDTVLGMATQCVQAKNVNKTSPQTLSNLCLKINVKLGGINSILVPSIRPKVFNEPVIFLGADVTHPPAGDNKKPSIAAVVGSMDAHPSRYAATVRVQQHRQEIIQELSSMVRELLIMFYKSTGGYKPHRIILYRDGVSEGQFPHVLQHELTAIREACIKLEPEYRPGITFIVVQKRHHTRLFCAEKKEQSGKSGNIPAGTTVDVGITHPTEFDFYLCSHQGIQGTSRPSHYHVLWDDNHFDSDELQCLTYQLCHTYVRCTRSVSIPAPAYYAHLVAFRARYHLVEKEHDSGEGSHQSGCSEDRTPGAMARAITVHADTKKVMYFA

SEQ ID NO: 11534 - DNA, 2775 bp, Arabidopsis thaliana
  CDS (1)..(2775)
atggattcaacaaatggtaacggagctgatcttgaatcagcaaatggggcaaacgggagtggggttactgaggcattaccacctcctccaccagttatacctccaaatgtggaaccagttcgtgttaaaactgaacttgctgagaagaaggggccagttcgagttcctatggctcgaaaaggatttggaacaaggggccaaaagatccccttgttaacaaatcatttcaaagtcgatgtggctaatcttcagggtcatttcttccactacagtgtggctctattctatgatgatggtcgtcctgttgaacaaaagggtgttggaagaaaaatccttgacaaggtgcatcagacttaccattctgatctggatggtaaagagtttgcttatgacggtgagaagacgttgtttacatatggagctttgcctagtaacaagatggatttttctgtggtgcttgaggaagtatctgctacaagggctaatggaaacggaagccccaatgggaatgaaagtccaagtgatggtgataggaaaagactgcgtaggcctaaccggtccaaaaactttagagtggagatcagctatgcggccaaaattcctcttcaagctcttgctaatgcaatgcggggacaagaatcagagaattcccaggaggcaatacgggttcttgatatcatattgaggcaacatgctgctagacaaggttgcttgcttgttcgacagtcttttttccacaatgatccaaccaactgtgaaccagttggtggtaacatcttaggatgtaggggatttcactccagtttcagaacaacgcagggtggcatgtcacttaatatggatgttacaaccaccatgatcatcaagcctggtccagtggttgatttcctaattgctaaccaaaatgctagggacccttattcgattgactggtctaaggctaaacgaacccttaagaacctaagggtaaaggtcagcccctcaggccaagaattcaagataaccggattgagtgacaagccttgcagggaacaaacgtttgaattgaagaaaaggaacccaaatgaaaatggagagttcgaaactactgaagttacagttgctgactacttccgcgatacaaggcatattgatttgcaatattctgcggatttgccttgcatcaatgttgggaagccaaagcgacccacttacattcctctcgagctctgcgcgttggttccacttcagaggtacacaaaagcacttaccacgttccaaagatctgcccttgttgagaaatccagacagaaaccccaagagaggatgactgttctgtccaaagctctgaaagttagcaactatgatgcggaaccactcctgcgatcctgtggcatttcgatcagctccaactttactcaggtggagggtcgtgttctaccagctcccaagctgaaaatgggatgtggatctgaaacctttcccagaaatggtcgctggaacttcaacaacaaggaatttgttgagcccaccaaaattcaacgatgggttgttgtcaatttctctgctcgctgtaatgtacgtcaagttgttgatgatctgataaaaattggaggatcaaaaggaattgaaattgcttctccctttcaagtgtttgaggagggtaatcaattccgccgtgctcctcctatgattcgtgttgagaacatgtttaaggacatccaatcgaaactccctggtgtcccacaattcatactatgtgtgctccctgacaaaaagaacagtgatctctatggtccatggaagaaaaaaaacttaactgaatttggcattgttactcaatgcatggctccaacgcggcaacctaatgatcagtatcttactaacttacttctgaagattaatgcaaagcttggaggcctgaactcaatgttaagtgtagagcgtacacctgcgttcactgtgatttctaaggttccaaccattatccttgggatggatgtttcacatggatctcctggacagtctgatgtcccgtccatcgctgctgtggtgagttctagggagtggccactgatatccaaatatagagcatctgttcggacacagccttctaaggctgagatgattgagtcccttgtcaagaaaaatggaactgaagacgatggcattatcaaggagttgctggtagatttctacaccagctcgaataagagaaaaccagagcatatcataattttcagggatggtgtgagtgaatctcaattcaatcaggttctgaatattgaacttgatcagatcatcgaggcttgcaagctcttagacgcaaattggaacccaaagttccttttgttggtggctcaaaagaatcatcataccaagttcttccagccaacgtctcctgaaaatgttcctccagggacaatcattgacaacaaaatatgtcacccaaagaacaatgatttctacctctgtgctcacgctggaatgattggaactacccgcccaactcactaccacgtcctgtatgatgagattggtttttcagctgacgaacttcaggaacttgtccactcgctctcctatgtgtaccaaagaagcaccagtgccatttctgttgttgcgccgatctgctatgctcacttggcagctgctcagcttgggacgttcatgaagtttgaagatcagtctgagacatcatcaagccatggtggtatcacagctccaggaccaatctctgttgcacagctcccaagactcaaagacaacgtcgccaactccatgttcttctgttaa

SEQ ID NO: 11535 - protein, 924 aa, Arabidopsis thaliana
MDSTNGNGADLESANGANGSGVTEALPPPPPVIPPNVEPVRVKTELAEKKGPVRVPMARKGFGTRGQKIPLLTNHFKVDVANLQGHFFHYSVALFYDDGRPVEQKGVGRKILDKVHQTYHSDLDGKEFAYDGEKTLFTYGALPSNKMDFSVVLEEVSATRANGNGSPNGNESPSDGDRKRLRRPNRSKNFRVEISYAAKIPLQALANAMRGQESENSQEAIRVLDIILRQHAARQGCLLVRQSFFHNDPTNCEPVGGNILGCRGFHSSFRTTQGGMSLNMDVTTTMIIKPGPVVDFLIANQNARDPYSIDWSKAKRTLKNLRVKVSPSGQEFKITGLSDKPCREQTFELKKRNPNENGEFETTEVTVADYFRDTRHIDLQYSADLPCINVGKPKRPTYIPLELCALVPLQRYTKALTTFQRSALVEKSRQKPQERMTVLSKALKVSNYDAEPLLRSCGISISSNFTQVEGRVLPAPKLKMGCGSETFPRNGRWNFNNKEFVEPTKIQRWVVVNFSARCNVRQVVDDLIKIGGSKGIEIASPFQVFEEGNQFRRAPPMIRVENMFKDIQSKLPGVPQFILCVLPDKKNSDLYGPWKKKNLTEFGIVTQCMAPTRQPNDQYLTNLLLKINAKLGGLNSMLSVERTPAFTVISKVPTIILGMDVSHGSPGQSDVPSIAAVVSSREWPLISKYRASVRTQPSKAEMIESLVKKNGTEDDGIIKELLVDFYTSSNKRKPEHIIIFRDGVSESQFNQVLNIELDQIIEACKLLDANWNPKFLLLVAQKNHHTKFFQPTSPENVPPGTIIDNKICHPKNNDFYLCAHAGMIGTTRPTHYHVLYDEIGFSADELQELVHSLSYVYQRSTSAISVVAPICYAHLAAAQLGTFMKFEDQSETSSSHGGITAPGPISVAQLPRLKDNVANSMFFC

SEQ ID NO: 11536 - DNA, 2955 bp, Drosophila melanogaster
  CDS (1)..(2955)
atgtccacggagcgtgagctggctcccggtgggccagctcagctccatccgcacacgctgccgctgacttttccggatctccagatgacctccaccgtgggcatcattgggaaagtctacgagtcacagtggaccccctcgcccactcggcctcagagtccctctcaggcgcagactagcttcgacacgctcacatcaccaccagcgcccggctcgtcggtcaatcccaccgccgtcaccagcccaagtgcccagaatgtggccgctggtggagcaactgtggccggtgcagcagcaactgccgcccaggtggcctccgccttgggtgccaccaccggcagcgtgacgccagcaattgccaccgcaacgccagccacgcagccggatatgcccgtctttacgtgtccacgacgcccgaatctcggacgagagggtcgcccgattgtgctgcgcgccaatcacttccaggtgacaatgccgcgtggctatgtgcatcactatgacatcaatatacagccggacaagtgtccgcgaaaggtgaaccgtgagattatcgagactatggtgcatgcctatagcaagatcttcggagtgctcaagccggtgttcgatggtcgcaacaatctgtatacccgcgatcccctgcccattggcaacgagcgtctagagctggaggttactctacccggcgagggcaaagatcgaatctttcgcgtgacgatcaagtggcaggctcaggtctcgctcttcaatttggaggaagctctcgaaggccgcacgcggcagataccctatgatgccattttggcgctcgatgtggtcatgcgccatctgcccagcatgacgtacacgccagtgggacgtagcttcttcagttccccggagggttactaccatcccctgggtggtggacgcgaggtttggttcggtttccatcagagcgtaaggccctcgcagtggaagatgatgctcaatatcgatgtctcggccaccgctttctacaaggctcaaccagtcattgacttcatgtgcgaggtgctggacattcgcgacatcaacgagcagcgcaaaccgctcaccgattcgcagcgcgtcaagttcacgaaggagatcaagggtttgaagatcgagatcacccactgcggccagatgcgtcgcaagtatcgtgtgtgcaacgtcactcgccgccccgctcagatgcaatcattcccactgcagctggagaacggacagaccgtagagtgcaccgtggccaagtacttcctggacaagtaccgcatgaaattgcgctacccgcacttgccctgcctgcaggttggccaagagcacaagcacacttacctgcctctagaggtgtgcaacattgtggccggacagcggtgcattaaaaagctgaccgatatgcagacgtcgaccatgatcaaggccacagctcgttcagctccggatcgtgagcgtgagattaacaacttggtaaagcgcgccgacttcaacaacgattcgtatgtgcaagagtttggcctgaccatctccaattcgatgatggaggtacgaggacgcgtcttgcctcctcccaagcttcagtatgggggacgtgtgtctaccggcctcaccggccagcagctgttcccgccacagaacaaggtgagcttggcctcgcccaaccagggtgtatgggatatgcgaggcaagcagttcttcactggcgtcgagatccgcatctgggccatcgcctgttttgccccacagcgcacggtgcgcgaggatgcgctgcgtaatttcacccagcagctgcagaagatctcaaacgatgcaggcatgccgataattggacagccgtgcttctgtaagtacgccaccgggccggatcaagtggaacccatgttccgttacctgaagatcaccttccccggcctgcaactcgtcgtggttgtgctgcccggcaagactccagtatacgccgaggtgaagcgtgtaggtgacaccgttctgggtatggccacccagtgtgtgcaggccaagaacgtgaacaagacatcgccacagacgctctctaatctgtgtctgaagatcaacgtcaagttgggcggcatcaattcaattctggtcccctccattcggccaaaggtcttcaatgagccggtcatctttttgggtgccgatgtgacacacccaccagctggcgacaacaagaaaccatcgattgccgccgtcgtgggctccatggatgcccatccatcgcggtatgccgccaccgttcgcgtacagcagcaccgacaggagatcatccaggagctgagcagcatggtgcgcgagctgttgatcatgttctacaagtcgacgggcggctacaagccccaccgcatcatactctatcgtgacggagtctccgagggacaattcccacatgtcctgcaacacgaattgaccgccattcgcgaggcctgcattaagctagagccagagtatcggccgggcatcacattcattgtggtgcagaagcgccatcacactcgactcttctgcgcggagaagaaggagcagagcggcaaatcgggcaatattcccgcaggcaccaccgtcgatgtgggcatcacacatcccaccgaatttgatttctatctatgcagccatcagggcatccagggcaccagtcgcccctcgcactaccacgttctgtgggacgacaatcactttgactcggacgagctgcagtgcctcacgtatcagctatgccatacgtacgtgcgctgcacccgatccgtcagtataccggcgccagcctactacgcccatttagtggccttccgtgccagatatcatctggtggagaaggagcacgattcgggcgagggttcgcaccagagcggctgctcagaggatcgtacgccaggtgccatggccagggccatcactgtgcacgcggataccaagaaggtcatgtactttgcctaa

SEQ ID NO: 11537 - protein, 984 aa, Drosophila melanogaster
MSTERELAPGGPAQLHPHTLPLTFPDLQMTSTVGIIGKVYESQWTPSPTRPQSPSQAQTSFDTLTSPPAPGSSVNPTAVTSPSAQNVAAGGATVAGAAATAAQVASALGATTGSVTPAIATATPATQPDMPVFTCPRRPNLGREGRPIVLRANHFQVTMPRGYVHHYDINIQPDKCPRKVNREIIETMVHAYSKIFGVLKPVFDGRNNLYTRDPLPIGNERLELEVTLPGEGKDRIFRVTIKWQAQVSLFNLEEALEGRTRQIPYDAILALDVVMRHLPSMTYTPVGRSFFSSPEGYYHPLGGGREVWFGFHQSVRPSQWKMMLNIDVSATAFYKAQPVIDFMCEVLDIRDINEQRKPLTDSQRVKFTKEIKGLKIEITHCGQMRRKYRVCNVTRRPAQMQSFPLQLENGQTVECTVAKYFLDKYRMKLRYPHLPCLQVGQEHKHTYLPLEVCNIVAGQRCIKKLTDMQTSTMIKATARSAPDREREINNLVKRADFNNDSYVQEFGLTISNSMMEVRGRVLPPPKLQYGGRVSTGLTGQQLFPPQNKVSLASPNQGVWDMRGKQFFTGVEIRIWAIACFAPQRTVREDALRNFTQQLQKISNDAGMPIIGQPCFCKYATGPDQVEPMFRYLKITFPGLQLVVVVLPGKTPVYAEVKRVGDTVLGMATQCVQAKNVNKTSPQTLSNLCLKINVKLGGINSILVPSIRPKVFNEPVIFLGADVTHPPAGDNKKPSIAAVVGSMDAHPSRYAATVRVQQHRQEIIQELSSMVRELLIMFYKSTGGYKPHRIILYRDGVSEGQFPHVLQHELTAIREACIKLEPEYRPGITFIVVQKRHHTRLFCAEKKEQSGKSGNIPAGTTVDVGITHPTEFDFYLCSHQGIQGTSRPSHYHVLWDDNHFDSDELQCLTYQLCHTYVRCTRSVSIPAPAYYAHLVAFRARYHLVEKEHDSGEGSHQSGCSEDRTPGAMARAITVHADTKKVMYFA

SEQ ID NO: 11538 - DNA, 3153 bp, Arabidopsis thaliana
  CDS (1)..(3153)
atggtgagaaagagaagaacggatgctccatctgaaggaggtgaaggctctgggtctcgtgaagctggtccagtctcaggtggtggacgtggttcacagcgaggtggtttccagcagggaggaggacaacaccaaggtggaaggggttatactcctcaacctcaacagggaggtcgtggtggtcgtggatatgggcaaccaccacaacagcaacaacagtatggaggaccacaagagtaccaaggaagaggaagaggaggacctcctcatcaaggaggtcgaggagggtatggcggtggccgtggaggtggaccttcttctggaccaccgcagagacaatcagttcccgagctgcatcaagctacctcacctacttatcaagcggtgtcttctcagcctacactgtctgaggtgagtcctacccaggtaccagaacctactgttctggctcagcaatttgaacaactctctgttgaacaaggagctcccagtcaggcaatccagcctataccttcttctagcaaggctttcaagtttccaatgaggcctggtaaaggacagagtggaaagcgttgcattgtgaaggctaaccatttctttgctgaactgcctgataaggatttgcaccattatgatgttaccattactccggaagttacatcaaggggtgtcaatcgtgctgtgatgaaacaacttgttgataattatcgtgattctcaccttggaagtcgtcttccagcgtatgatggtcgaaaaagtctttacactgctggtccacttccctttaactccaaggagttcagaatcaatcttcttgacgaagaagtaggggctggaggtcaaagacgagaaagggaatttaaagttgtgatcaagctagttgcacgtgctgatctgcatcacctaggaatgtttttggaggggaaacaatcagatgccccacaggaagctctgcaggttcttgacattgttcttcgtgagctgccgacctctagaatcaggtatattccggtgggccggtccttttattcccctgatataggaaaaaaacaatcattgggggatggcttggagagctggcgtggattctaccaaagcattcgtcctacacagatgggcttatcactcaatattgatatgtcatcgacagccttcatagaggcaaaccctgtgattcagtttgtctgtgatttgcttaaccgggatatttcttctcgacctttatctgatgctgatcgtgttaagataaaaaaggctcttagaggtgtcaaagttgaagtgactcatcgaggaaacatgcgccggaagtaccgcatttccggtttgactgctgtggccactcgggaattgacattcccagtagatgaaagaaatactcagaaatctgttgtagaatacttccacgaaacatatggttttcgcattcagcacactcaactaccatgcttgcaagttgggaattctaataggcctaattacttaccaatggaggtatgcaagattgttgaaggccagcggtattccaaaagattgaatgagagacagatcactgctttgctgaaggttacctgtcagcgcccgatagatcgagaaaaagatatcttacagacggtgcaactcaatgattatgctaaagataattatgctcaagagtttggcatcaaaataagtacttctctggcttctgttgaggctcgtatactgcctcctccatggcttaagtaccacgagtctggaagggaagggacttgtctgccacaagttggtcaatggaacatgatgaataagaaaatgatcaatggtggaacggtgaataattggatctgcatcaacttttctaggcaagtgcaggacaatctagcgcgtacattttgtcaggaacttgctcaaatgtgttacgtatctggcatggcatttaatccggaaccagtcctcccaccagtcagtgctcgccctgagcaagtagagaaggtcttgaagactagatatcatgatgccacatcaaaactctcccaaggaaaagaaattgatctgcttattgtcattctgcccgataataatggatcattatacggtgatttgaaacgcatatgtgagactgaactcggcatagtctctcaatgttgcctgacaaagcatgtctttaagatgagcaaacaatacatggctaatgttgcgctgaagattaatgtgaaggttggaggaagaaacacagtgcttgttgatgctctatctaggcggattcctctagtcagtgatcgacccaccattatatttggtgctgatgttacccaccctcaccctggagaggattcaagcccatctattgctgctgttgtggcatctcaggattggcctgaaatcactaaatatgctggattagtttgcgctcaagcgcataggcaggagctcattcaggatctgttcaaagagtggaaggatcctcagaaaggtgtggtgactggtggcatgataaaggagttgctcatagccttccgtagatcaactgggcataaaccactaaggatcatcttctacagggatggagtcagtgagggacaattttaccaagttttgctctatgaacttgatgccatccgcaaggcctgtgcttcgctggaagcaggttatcaaccaccagtgacatttgtggtggtgcagaagcgtcatcacacgaggctgtttgctcagaaccacaatgatcgccattcggtggacagaagtgggaatattttacctggcactgttgtggactctaaaatctgccaccctacagagtttgacttttacctctgtagtcatgctggtattcagggcacttctcgacctgctcattaccacgttctttgggatgagaacaactttactgcagatggacttcaatctctgaccaataacttatgttacacgtatgcaagatgcacacgctcagtttcaattgttccccctgcatattatgcacatctagcagcttttagggctcgattctacatggagccagagacatcagacagtggctcaatggctagtgggagcatggcacgtggaggtggaatggctggtagaagcacacgcgggcctaatgtcaatgctgcagtgaggccactcccagctctgaaagagaatgtgaagcgtgtcatgttctactgctga

SEQ ID NO: 11539 - protein, 1050 aa, Arabidopsis thaliana
MVRKRRTDAPSEGGEGSGSREAGPVSGGGRGSQRGGFQQGGGQHQGGRGYTPQPQQGGRGGRGYGQPPQQQQQYGGPQEYQGRGRGGPPHQGGRGGYGGGRGGGPSSGPPQRQSVPELHQATSPTYQAVSSQPTLSEVSPTQVPEPTVLAQQFEQLSVEQGAPSQAIQPIPSSSKAFKFPMRPGKGQSGKRCIVKANHFFAELPDKDLHHYDVTITPEVTSRGVNRAVMKQLVDNYRDSHLGSRLPAYDGRKSLYTAGPLPFNSKEFRINLLDEEVGAGGQRREREFKVVIKLVARADLHHLGMFLEGKQSDAPQEALQVLDIVLRELPTSRIRYIPVGRSFYSPDIGKKQSLGDGLESWRGFYQSIRPTQMGLSLNIDMSSTAFIEANPVIQFVCDLLNRDISSRPLSDADRVKIKKALRGVKVEVTHRGNMRRKYRISGLTAVATRELTFPVDERNTQKSVVEYFHETYGFRIQHTQLPCLQVGNSNRPNYLPMEVCKIVEGQRYSKRLNERQITALLKVTCQRPIDREKDILQTVQLNDYAKDNYAQEFGIKISTSLASVEARILPPPWLKYHESGREGTCLPQVGQWNMMNKKMINGGTVNNWICINFSRQVQDNLARTFCQELAQMCYVSGMAFNPEPVLPPVSARPEQVEKVLKTRYHDATSKLSQGKEIDLLIVILPDNNGSLYGDLKRICETELGIVSQCCLTKHVFKMSKQYMANVALKINVKVGGRNTVLVDALSRRIPLVSDRPTIIFGADVTHPHPGEDSSPSIAAVVASQDWPEITKYAGLVCAQAHRQELIQDLFKEWKDPQKGVVTGGMIKELLIAFRRSTGHKPLRIIFYRDGVSEGQFYQVLLYELDAIRKACASLEAGYQPPVTFVVVQKRHHTRLFAQNHNDRHSVDRSGNILPGTVVDSKICHPTEFDFYLCSHAGIQGTSRPAHYHVLWDENNFTADGLQSLTNNLCYTYARCTRSVSIVPPAYYAHLAAFRARFYMEPETSDSGSMASGSMARGGGMAGRSTRGPNVNAAVRPLPALKENVKRVMFYC

SEQ ID NO: 11540 - DNA, 2994 bp, Arabidopsis thaliana
  CDS (1)..(2994)
atgtcaaatcgtggtggtggtggtcacggcggcgctagtcgtggtcgaggaggtggacgaaggtctgaccagagacaagatcagtcttctggtcaagttgcttggccgggtttacaacaaagctacggtggtcgtggtggttctgtttccgccggtagaggtcgtggaaacgtcggaagaggtgaaaatactggagatctgacggcgacgcaagttccggttgcttctgctgtttctggcgggagaggtcgtggtaacatcggagatccgacgttttctgttgcgtcttcgtctaagacggtgtctgttgcttcttcatctaaagaggaaagtaagaatacggaggtttctgagaccatgtcgaaccttcagattacttcgacggagacgaaacctgaaatgacgtcacttcctccggcgtcatctaaagcggttacgtttccggtacggccaggacgtggtactttggggaagaaagtcatggttcgtgcgaatcatttccttgttcaagttgctgatcgtgatctctaccattacgatgtttcgatcaatcctgaggttatatcaaagacagtgaacagaaacgtgatgaaacttctggttaagaattataaagactctcacttgggagggaagtcaccagcgtatgatggaaggaaaagcctctatactgctggtccattaccttttgactcgaaagagtttgttgtgaatctggcggagaaaagagctgacggttcctctgggaaggacagaccgtttaaagttgctgtaaagaatgtgacaagcactgatctttatcagttgcaacagttccttgatcgtaagcaaagagaggctccatatgatactatccaagtgcttgatgttgttcttagggataagccctctaatgattatgtctctgttgggaggtcttttttccacactagtttgggaaaggacgcaagagatggtaggggtgagcttggagatggtattgagtactggagaggttatttccaaagtctaaggctgactcagatgggtttgtctctgaacattgacgtttcagcaagatcattttatgaaccgattgttgtcactgactttattagcaagtttctgaatataagggacttaaacaggccacttagagactcagatcgacttaaggtgaagaaagttttgaggacactgaaagttaagttgcttcactggaacggcacaaaaagtgccaaaattagtgggatttctagtctacccatcagggagctaaggttcactctggaggacaaatcagagaagacggttgttcaatattttgctgaaaaatataattatagagtgaaataccaggctctacctgctattcaaacagggagtgacacaagacccgtctacctaccaatggagctctgccaaattgacgaagggcaaagatacaccaaaaggctcaatgagaagcaagtgactgcattgctaaaagctacctgccaacgaccccctgatagagagaactcgatcaaaaacttggttgtgaaaaataattacaatgatgatctgagcaaggagtttgggatgtcagtgactacccaactagcctcgattgaagctcgtgtacttcccccaccgatgttgaagtaccatgacagtggtaaagagaaaatggtaaatccaaggctaggacagtggaacatgattgacaagaaaatggttaatggagcaaaagtcacttcttggacttgcgtaagtttctctactcggattgaccgtggtttaccccaagagttctgcaaacagttgattgggatgtgtgtcagcaaaggaatggaatttaagcctcaacctgctattccgttcatctcttgtccccctgaacatattgaggaagctcttctcgatatccacaaaagggcacctggtctccaactgttgattgtaatattgcctgatgtgactggatcatatggaaaaataaaaaggatctgtgaaacagaattggggattgtctctcagtgttgccaacctagacaagttaataaactcaacaagcagtacatggaaaatgttgccttgaagatcaatgtcaagactgggggaaggaacactgttcttaatgatgctattagaagaaacatacctcttattactgatcgtccaaccatcatcatgggtgctgatgtgactcacccacagcctggagaggactcaagtccttctattgctgctgttgtggcctctatggactggcctgagataaacaaataccgaggattggtttctgctcaagctcatagggaagaaattattcaggacctgtataagctggttcaggatccacaacgtgggctagtccactctggtttgataagggaacatttcatagcattcaggagagctacaggccagatacctcaaaggatcatcttctatcgtgacggagtaagcgaagggcagtttagtcaggttctgctacatgagatgactgctatccgcaaggcttgtaactctctccaagagaattatgttcctcgtgttactttcgtgattgtccagaaacgtcaccacacacgtttgttccctgagcaacacgggaatcgtgatatgactgataagagtggcaatattcaaccaggtactgtcgtggacactaaaatctgtcaccctaatgaattcgacttctatttgaacagccatgctggtattcagggaacaagcaggccggcacattaccatgtacttctcgatgagaacggtttcaccgctgatcagttgcaaatgctcacaaacaacctctgctacacgtatgcgaggtgtacaaaatctgtgtcaattgtgccaccagcctactacgctcacttggctgcattccgtgcccgctactacatggagagtgagatgtctgatggaggttcgagcaggtccaggagctcaacaacaggtgtgggtcaagtcatttcgcagctcccagcaataaaagataacgtcaaggaggttatgttttattgctaa

SEQ ID NO: 11541 - protein, 997 aa, Arabidopsis thaliana
MSNRGGGGHGGASRGRGGGRRSDQRQDQSSGQVAWPGLQQSYGGRGGSVSAGRGRGNVGRGENTGDLTATQVPVASAVSGGRGRGNIGDPTFSVASSSKTVSVASSSKEESKNTEVSETMSNLQITSTETKPEMTSLPPASSKAVTFPVRPGRGTLGKKVMVRANHFLVQVADRDLYHYDVSINPEVISKTVNRNVMKLLVKNYKDSHLGGKSPAYDGRKSLYTAGPLPFDSKEFVVNLAEKRADGSSGKDRPFKVAVKNVTSTDLYQLQQFLDRKQREAPYDTIQVLDVVLRDKPSNDYVSVGRSFFHTSLGKDARDGRGELGDGIEYWRGYFQSLRLTQMGLSLNIDVSARSFYEPIVVTDFISKFLNIRDLNRPLRDSDRLKVKKVLRTLKVKLLHWNGTKSAKISGISSLPIRELRFTLEDKSEKTVVQYFAEKYNYRVKYQALPAIQTGSDTRPVYLPMELCQIDEGQRYTKRLNEKQVTALLKATCQRPPDRENSIKNLVVKNNYNDDLSKEFGMSVTTQLASIEARVLPPPMLKYHDSGKEKMVNPRLGQWNMIDKKMVNGAKVTSWTCVSFSTRIDRGLPQEFCKQLIGMCVSKGMEFKPQPAIPFISCPPEHIEEALLDIHKRAPGLQLLIVILPDVTGSYGKIKRICETELGIVSQCCQPRQVNKLNKQYMENVALKINVKTGGRNTVLNDAIRRNIPLITDRPTIIMGADVTHPQPGEDSSPSIAAVVASMDWPEINKYRGLVSAQAHREEIIQDLYKLVQDPQRGLVHSGLIREHFIAFRRATGQIPQRIIFYRDGVSEGQFSQVLLHEMTAIRKACNSLQENYVPRVTFVIVQKRHHTRLFPEQHGNRDMTDKSGNIQPGTVVDTKICHPNEFDFYLNSHAGIQGTSRPAHYHVLLDENGFTADQLQMLTNNLCYTYARCTKSVSIVPPAYYAHLAAFRARYYMESEMSDGGSSRSRSSTTGVGQVISQLPAIKDNVKEVMFYC

SEQ ID NO: 11542 - DNA, 2733 bp, Caenorhabditis elegans
  CDS (1)..(2733)
atgttccctctgcctgtacacaatggtcctagacttggaaaattatcgattttcgaaatgcccggcgattcgctgacatcgtcgtctttcatgccagatggtggcgcagaaacgtcgagctcttcacagttgggcggctcggctcacggagcaattggcacaaaacccgacgcaggcgtccaattccagtgcccagtccgtccgaaccatggagtcgagggccgatccatcctcctgcgagccaatcattttgcagtacggatccccggaggttcagtccaacattatcaaattgacgtctttccggacaagtgcccaagacgggttaatcgcgaggtaatcggctgcctgatctcctccttctcaaaatatttcaccaatattcgaccagtctacgatggaaagcgtaacatgtacacgcgggagcccctaccaattggcacggagcccatgaactttgaggtgacgctgcctggagattcagcagtggaacggaagttctcagtgacgatgaagtggatcggtcaggtctgtctgtcagctctggacgatgccatggaaggtagagtgcggcaggttccacatgaagccgttcagtcgatcgatgtgattcttcgccacttgccaagtttgaagtacaccccggttggaaggtcgtttttcacacctccaggcgtcatgaagcccggcatgcaaatgcaccaggagagcaaactcggtggaggccgcgaagtatggtttggattccatcaatccgtccgaccatcccaatggaagatgatgctcaacattgacgtctccgccacggccttttaccgcgcgatgccagtcatcgaattcgtcgccgaggtgctcgagctcccagtccaagctctcgccgagcgtcgggccctctccgatgctcaacgcgtcaaattcaccaaagagatccgtggactcaagattgagatcacccattgtggagccgtgcgccggaagtacagagtttgcaacgtcacacgccgcccggcccagacccagaccttcccattgcaactggagactggccaaactattgagtgtactgtagccaagtacttctttgacaagtaccgtatccagctgaagtacccccaccttccatgcctccaagtcggtcaggagcagaagcatacgtacctgccaccagaggtctgcgatattgttccaggacagcgttgtctgaagaagctcaccgatgtgcagacgtccaccatgatcaaggccacggctcgttccgctccagagcgtgagcgtgagatttgtaagctagtaagcaaggctgagctctccgcggatccatttgctcatgaattcggaatcactatcaatccagcaatgactgaagtcaagggacgtgtgctctcggctccgaagcttctctatggaggtcgtcatcgtgccacaactgcccttccgaaccagggagtctgggatatgcgcgggaagcagttccacactggaatggaagtccgtacctgggcgattgcatgctttgctcagcaatctcatgtcaaggaaaatgatctcaggatgttcacgactcaattgcaaaggatctctaccgacgctggaatgccaatcatcggtacccctatgttctgcaaatatgcttctggagtggagcaggtggagccgatgttcaagtacttgaagcagacctattcggcgattcagttgattgtggtggtgctgccaggaaagactccgatctatgccgaagtgaaacgcgtcggagacaccgtcctcggaatcgccacccagtgcgtccaggccaagaacgccatccgaaccaccccgcagacactctccaacctctgtctcaagatgaatgtgaagcttggtggagtcaacagcatcctcctgccaaacgtgcgtccacggatcttcaacgagcccgtcatcttcctgggttgcgacatcacccatccagcagccggtgatacccgtaagccatccatcgccgcagtggtaggatctatggatgctcacccgagtagatatgcggcaacagttcgggtccagcagcaccgtcaggagatcattacggatctgacatatatggttcgagagttgcttgtccagttctaccgtaacacgaggttcaagccagcccgaattgtggtctacagagatggagtgtctgagggtcaactcttcaatgtgctccaatatgagctccgcgcaattcgtgaagcttgtgtgatgcttgagagtggataccagccaggaatcacatttatcgctgtgcaaaagagacatcacacaaggctcttcgccgcggataaagctgatcaagtaggaaaagcattcaacatcccaccaggaacaactgtagatgtgggaatcacgcatccaacggaattcgacttcttcctctgctcccacgctggtatccaaggaacatcccgaccatctcactaccatgtgctctgggatgacaatgatctgacggccgacgagcttcaacagttgacctaccaaatgtgtcatacctatgtaagatgcacgaggtctgtgtcgatcccggcgccggcgtactatgcacatctggtggcgttccgtgctcgttatcacttggtcgatagggatcatggatccggagaggaaggatcacaaccttcggggacgtcgtcggaggatacaacattgtcaagcatggccaaggccgtacaggttcatcccgactcgaacaacgtcatgtattttgcctaa

SEQ ID NO: 11543 - protein, 910 aa, Caenorhabditis elegans
MFPLPVHNGPRLGKLSIFEMPGDSLTSSSFMPDGGAETSSSSQLGGSAHGAIGTKPDAGVQFQCPVRPNHGVEGRSILLRANHFAVRIPGGSVQHYQIDVFPDKCPRRVNREVIGCLISSFSKYFTNIRPVYDGKRNMYTREPLPIGTEPMNFEVTLPGDSAVERKFSVTMKWIGQVCLSALDDAMEGRVRQVPHEAVQSIDVILRHLPSLKYTPVGRSFFTPPGVMKPGMQMHQESKLGGGREVWFGFHQSVRPSQWKMMLNIDVSATAFYRAMPVIEFVAEVLELPVQALAERRALSDAQRVKFTKEIRGLKIEITHCGAVRRKYRVCNVTRRPAQTQTFPLQLETGQTIECTVAKYFFDKYRIQLKYPHLPCLQVGQEQKHTYLPPEVCDIVPGQRCLKKLTDVQTSTMIKATARSAPEREREICKLVSKAELSADPFAHEFGITINPAMTEVKGRVLSAPKLLYGGRHRATTALPNQGVWDMRGKQFHTGMEVRTWAIACFAQQSHVKENDLRMFTTQLQRISTDAGMPIIGTPMFCKYASGVEQVEPMFKYLKQTYSAIQLIVVVLPGKTPIYAEVKRVGDTVLGIATQCVQAKNAIRTTPQTLSNLCLKMNVKLGGVNSILLPNVRPRIFNEPVIFLGCDITHPAAGDTRKPSIAAVVGSMDAHPSRYAATVRVQQHRQEIITDLTYMVRELLVQFYRNTRFKPARIVVYRDGVSEGQLFNVLQYELRAIREACVMLESGYQPGITFIAVQKRHHTRLFAADKADQVGKAFNIPPGTTVDVGITHPTEFDFFLCSHAGIQGTSRPSHYHVLWDDNDLTADELQQLTYQMCHTYVRCTRSVSIPAPAYYAHLVAFRARYHLVDRDHGSGEEGSQPSGTSSEDTTLSSMAKAVQVHPDSNNVMYFA

SEQ ID NO: 11544 - DNA, 2958 bp, Drosophila pseudoobscura pseudoobscura
  CDS (1)..(2958)
atgtcaacggagcgcgagctggcttctggtgggccagctcagctcctgacgcacacgctgccgttgacatttcccgatctccagatcaacaccaccgtgggcatcattggaaaggtctacgagtcacagtggaccccctcgcccacgcgggctcagagtccctctcaggcgcagactagcttcgaaacgctcacatcaccaccagcgccgggctcttcggtcaatcccaccgctgtaaccagcccaagtgcccagaatgtggcagctgggggtgccactgtgggtgcgacggcctcatcagcagcctcccaggtcgcgtccaccctgggaaccacaaccgggactgtgactgctgcgattgccaccgctactccgaccaccaatccggatatgcccgtcttcacatgtccgcgtcgccccaatctgggacgcgagggcaggccgatcgtacttcgagccaatcactttcaggtgacgatgcctcgcggctatgtacatcattacgatatcaacatacagccggacaagtgtccgcgcaaggtgaatcgcgagattatcgagaccatggtgcaggcctacagcaagatatttggcgttctgaaacctgtattcgacggacggaacaacctgtacacccgcgatcctctgccgattggcaatgagcgcctcgagctggaggtgacactgcccggcgagggcaaggaccgcatctttcgcgtgacgattaagtggcaggcccaggtctcgttattcaacctggaggaggctctggagggtcgcacgcgtcaaataccctacgacgccatccttgccctggacgtggtcatgcgtcatctgccgagcatgacctatacgccagttggacgcagcttcttcagctcgccggatggctactatcatcctctgggtggtggccgtgaggtctggttcggtttccatcaaagcgtgaggccctcgcaatggaaaatgatgctgaacattgatgtctcggccactgctttctacaaggctcaacccgtgattgactttatgtgcgaggtgctggatatacgcgacatcatggagcagcgcaagccgctcacagactcgcagcgggtcaagttcaccaaggagatcaagggactcaagattgagatcacgcactgcggccagatgcggcgcaagtatcgtgtctgcaatgtaacccgccgaccggctcaaatgcaatcattcccactgcagttggagaatggtcaaactgtggagtgcactgtggccaagtatttcctggacaagtatcgaatgaagttgcgctacccccatctgccgtgcctgcaggtgggacaggagcacaagcacacctatcttccgctcgaggtgtgcaacattgtggctggccagcgatgcatcaaaaagctcaccgatatgcagacctcgacgatgatcaaggccactgcacgctcggcaccggatcgcgagcgtgagatcaacaacctggtgaagcgtgcggactttaacaatgactcgtatgtccaggagttcggtctggccatctccaattcgatgatggaggtgaggggacgagtgctaccgccgcccaagcttcagtatgggggacgtgtgtccactggcatcaccgggcagcagttgtttccgccccagaataaggtgagccttgcctcgcccaaccaaggtgtctgggacatgcgcggcaagcagttcttcacgggcgtggagatcaggatctgggccattgcctgctttgccccgcagcgaacagtgcgcgaggatgccttgaggaacttcacccagcagctgcagaagatctcaaacgacgccggtatgccgataataggccagccctgcttctgcaaatatgcaacggggccggatcaagtggagccgatgttccgatacctgaaaatcaccttcccggggctgcagctcgtagtggttgtgctgcccggcaagaccccggtctatgcggaggtcaagcgcgtgggcgacaccgtcttgggcatggccacccagtgtgtacaggcgaagaacgtgaacaagacatcgccccagacgctgtccaatctgtgtctgaagatcaatgtcaagctgggcggcatcaattcgattctggtgccctccatccggcccaaggtatttaacgagcccgttatcttcctgggagctgacgtcacacacccaccagccggcgataacaagaagccatcgattgctgctgttgttggttcaatggacgcccatccgtcgcgatatgcggccactgtgcgagtacagcaacaccgccaggagatcatccaggagctgagcagcatggtgcgcgagctactgattatgttctacaagtcgacgggtggctacaaaccccaccgaatcatcctgtaccgggacggcgtctccgagggacagttcccgcatgtgctgcagcacgagttgaccgccataagggaggcgtgcatcaagctagagcccgaatacaggccaggcatcacattcatcgtagtccagaagcgccatcacacgcgactcttctgcgccgagaagaaggagcagagcggcaagtctggcaatataccggcaggcaccaccgtcgacgtgggcatcacgcatccaaccgaatttgatttctatctgtgcagtcatcagggcattcaaggcaccagccggccctcgcactaccacgtgctctgggatgacaatcactttgactccgacgagcttcagtgcctcacgtatcagctgtgccacacctatgtgaggtgcacgcgctccgtcagtataccagctccagcctactatgcccacttggtggcttttcgtgcaaggtatcatctggtggagaaggagcacgactccggcgagggctcacaccagagcggatgctcagaggatcggacaccgggagccatggccagagccatcacggtccatgcggacacgaagaaggtcatgtactttgcctaa

SEQ ID NO: 11545 - protein, 985 aa, Drosophila pseudoobscura pseudoobscura
MSTERELASGGPAQLLTHTLPLTFPDLQINTTVGIIGKVYESQWTPSPTRAQSPSQAQTSFETLTSPPAPGSSVNPTAVTSPSAQNVAAGGATVGATASSAASQVASTLGTTTGTVTAAIATATPTTNPDMPVFTCPRRPNLGREGRPIVLRANHFQVTMPRGYVHHYDINIQPDKCPRKVNREIIETMVQAYSKIFGVLKPVFDGRNNLYTRDPLPIGNERLELEVTLPGEGKDRIFRVTIKWQAQVSLFNLEEALEGRTRQIPYDAILALDVVMRHLPSMTYTPVGRSFFSSPDGYYHPLGGGREVWFGFHQSVRPSQWKMMLNIDVSATAFYKAQPVIDFMCEVLDIRDIMEQRKPLTDSQRVKFTKEIKGLKIEITHCGQMRRKYRVCNVTRRPAQMQSFPLQLENGQTVECTVAKYFLDKYRMKLRYPHLPCLQVGQEHKHTYLPLEVCNIVAGQRCIKKLTDMQTSTMIKATARSAPDREREINNLVKRADFNNDSYVQEFGLAISNSMMEVRGRVLPPPKLQYGGRVSTGITGQQLFPPQNKVSLASPNQGVWDMRGKQFFTGVEIRIWAIACFAPQRTVREDALRNFTQQLQKISNDAGMPIIGQPCFCKYATGPDQVEPMFRYLKITFPGLQLVVVVLPGKTPVYAEVKRVGDTVLGMATQCVQAKNVNKTSPQTLSNLCLKINVKLGGINSILVPSIRPKVFNEPVIFLGADVTHPPAGDNKKPSIAAVVGSMDAHPSRYAATVRVQQHRQEIIQELSSMVRELLIMFYKSTGGYKPHRIILYRDGVSEGQFPHVLQHELTAIREACIKLEPEYRPGITFIVVQKRHHTRLFCAEKKEQSGKSGNIPAGTTVDVGITHPTEFDFYLCSHQGIQGTSRPSHYHVLWDDNHFDSDELQCLTYQLCHTYVRCTRSVSIPAPAYYAHLVAFRARYHLVEKEHDSGEGSHQSGCSEDRTPGAMARAITVHADTKKVMYFA

SEQ ID NO: 11546 - DNA, 2565 bp, Nematostella vectensis
  CDS (1)..(2565)
atggcttctaataatccagtgaatcgtgttggtggtaatttcaaccctccaaaaaggccaaatcatggctcaacaggacgcaccattgcacttcgagcaaatttcttccctgtccagttacctcgtggtaacattcatcactatgacctgtccatatgtccagacaaatgtcctcggcgagtcaatagggacgttgtagaggtcatggtgttaaattaccacaaagtatttggtggaatgaaacctgtgtttgatgggaggaagaatctatacacaagggatcctctacctattgggaaaacaccgacagagtttgaagttgtgctaccgacagacaacagccaagataagaaattcaaggtgacattgaagtgggtgtcacaagtaagtttgtatgctctagagaaggccttggagggcacatgtaaccagataccatttgagaccatccaggctcttgatgtggtactacggcatctgccatccatgaagtacacgcctgttggcagatccttcttctcccccccagatggctatgacttcccactcgaaagagggagggaggtttggttcggctttcatcaaagtatccgaccctctcagtggaagatgctactgaacattgatgtatctgcaacagcattttacaagtgccagtctgtggttgaattcatgtgtgaagttcttcgcataaggaaagatgatctggagaaacatgcacctctcaacgatgcagatagacttcgctttaccagagaaataaaaggacttaaagttgaaattactcactgtgggccaatgaaacgcaagtacagggtcatcaatgtgaccaagcaaccagcccaggccttgcagttcccccttacactagagtctggtcagacagcacagataactgtcgctcgctacttccaggacaagcataagcaaagactcagatatcctcaccttccttgtcttcaagttggccaagagcagcgccacacctatcttcctctcgaggtgtgtaacatagtgcctggccagcgctgcgtcaagaagcttacagacacccagacatctaagatgatccgagcgacagcacggtctgcaccagatagggagagggaaatccgaggactggtcaagaaggccaactttgatgaggacgcgtacgtaaaggactttagtatttccatcggcaaaaacatggttgagcttcaaggcagagttctacctcctccaaaacttgtctacggaggaaaggtgagaattgagaagataatacattccttctcaggggtatgggacatgagaggtaggcagcttttccacggcattgagatcaggacgtgggccattgcttgttttgtcaagcaacagatgtgtacagaggactctctacgaaggttctccaatcagctgatgaagatcagtgtagagcaaggcatgcctatctcctgcccgcctgtcttcttccgctatgcgcgcaacccagacgaggtcgagcgaatgttccgccggctgaaagaggcacaccccgacctgcaaatgatccttgttgttttaccgggaaagacgcctgtgtatgccgaggtgaagcgcgtcggtgacacaatgctaggcgtgataacgcaatgcatccaggggaaaaatgtcactaaaccctcaccccagaccctctccaatctctgtctcaagataaacgccaagcttggcggcgtcaacaatatactcgccccagaaatacgaccccctgtgttccgggagccggtgatattccttggcgctgatgtgacacatcccgctgctggtgacgataagcgaccatctgtagctgctgtggtggggagcatggatgcgcaccccagtcgctactatgcctctgtgcgggtgcagactcacagacaggaaatcatcgcggagctggcagccatggtgcgagagcttcttgtgcagttctaccgctcgacaaggcacaaaccgcaaaggatagtgttttaccgagatggagtcagcgagggtcaattccgacaggttcttgtgcacgagttgaaggcgatacgcgaggcgtgtatcaagcttgaggtgggatatcaacccggaatctctttcatcgtggtacagaagcgtcaccacacccgcctcttctgccaaagagaccaagacaagtgtggtaagagtggcaatgtgccccccggcaccaccgtggaccgagggatcacgcacccaaccgaatttgacttctacctgtgcagccacgccggcatacagggtacgagtagaccgtcgcattaccacgtgctgtgggacgataataacttctccgcagacgagctccaggccctcacctaccaactctgccacacatacgtgagatgcacgcgagccgtgtctataccagcacctgcctactacgcgcatttggtcgcgttccgcgcgcgataccatatgatggatagggacaaggaagcgggaaatgataacagttccgttgccagcggtgaagattgcaggggacctcaactactcgcaaacgccgtgcaagttcaccccaaggtcctacagggaatgtactttgcttga

SEQ ID NO: 11547 - protein, 854 aa, Nematostella vectensis
MASNNPVNRVGGNFNPPKRPNHGSTGRTIALRANFFPVQLPRGNIHHYDLSICPDKCPRRVNRDVVEVMVLNYHKVFGGMKPVFDGRKNLYTRDPLPIGKTPTEFEVVLPTDNSQDKKFKVTLKWVSQVSLYALEKALEGTCNQIPFETIQALDVVLRHLPSMKYTPVGRSFFSPPDGYDFPLERGREVWFGFHQSIRPSQWKMLLNIDVSATAFYKCQSVVEFMCEVLRIRKDDLEKHAPLNDADRLRFTREIKGLKVEITHCGPMKRKYRVINVTKQPAQALQFPLTLESGQTAQITVARYFQDKHKQRLRYPHLPCLQVGQEQRHTYLPLEVCNIVPGQRCVKKLTDTQTSKMIRATARSAPDREREIRGLVKKANFDEDAYVKDFSISIGKNMVELQGRVLPPPKLVYGGKVRIEKIIHSFSGVWDMRGRQLFHGIEIRTWAIACFVKQQMCTEDSLRRFSNQLMKISVEQGMPISCPPVFFRYARNPDEVERMFRRLKEAHPDLQMILVVLPGKTPVYAEVKRVGDTMLGVITQCIQGKNVTKPSPQTLSNLCLKINAKLGGVNNILAPEIRPPVFREPVIFLGADVTHPAAGDDKRPSVAAVVGSMDAHPSRYYASVRVQTHRQEIIAELAAMVRELLVQFYRSTRHKPQRIVFYRDGVSEGQFRQVLVHELKAIREACIKLEVGYQPGISFIVVQKRHHTRLFCQRDQDKCGKSGNVPPGTTVDRGITHPTEFDFYLCSHAGIQGTSRPSHYHVLWDDNNFSADELQALTYQLCHTYVRCTRAVSIPAPAYYAHLVAFRARYHMMDRDKEAGNDNSSVASGEDCRGPQLLANAVQVHPKVLQGMYFA

SEQ ID NO: 11548 - DNA, 2478 bp, Aedes aegypti
  CDS (1)..(2478)
atgccccgtggcttcgttcatcactacgacatcaacatccagccggacaaatgcccccggaaggtcaaccgggagatcatcgagacgatggtgcacgcgtacagtaaaatgttcggtgcgctgaagccggtattcgatgggcgtaacaatctgtacacacgggatcctctaccgatcggaaacgatcgtgtggagctggaggttacgctgccgggcgagggaaaggatcgcgtgttccgcgtcaccatcaaatgggtggcacaggtttcactgttcaacctggaggaagccctcgagggacgcacacgacagatcccatacgatgccatactggcgctggatgtggtaatgagacatctgcccagtatgacgtacaccccggttggcagaagtttcttcagttcgcccgatggttattaccatcccctgggcggaggtcgtgaagtgtggtttggtttccatcaaagcgtccgtccatcacagtggaagatgatgttgaatattgacgtttctgccacggctttctacaaagcacaaccggtcatcgagttcatgtgcgaggtactggacattagggatatcaacgagcaacgcaaacctctcaccgattctcaacgtgtcaaattcaccaaggaaatcaagggtctcaagatcgaaatcacccactgcggtacgatgcgtcgtaagtaccgcgtctgcaacgtcacccgtcgaccagcgcaaatgcaatccttccctctgcagctagaaaacggtcaaaccgtggagtgcaccgtggccaaatacttcctcgacaagtacaagatgaagcttcgctatcctcatctgccgtgcctgcaggtcggtcaagagcacaagcacacctatctcccattggaggtgtgcaacattgtagccggccagcggtgcatcaagaagctcaccgatatgcagacatcaaccatgatcaaagccacggccagatcggctcccgatcgtgaacgcgaaataaacagcctggtgcgtcgtgccgatttcaacaacgacgcctacgtgcaggaattcggcctggccatctcgaacagcatgatggaagtgcgcggccgggtgttgccaccgccgaagttacagtacggaggacgcgtttccagcatgagcggacaattactttctggtccacagaataaggtgagcttagcattaccaaaccaaggggtttgggacatgcgaggcaaacaatttttcaccggcgtcgaaatccgcgtctgggccattgcgtgctttgcgccgcagcgaaccgtccgtgaggacgccctgaggaacttcacccagcagctgcagaagatctccaacgatgccggaatgcccatcatcggacagccgtgcttctgcaagtacgccacggggccggaccaggtggagcccatgttcagatatctgaagaacacgttcaacgcgctgcagctggtggtggtcgtgctgcccggaaagacaccagtatacgcggaagtcaagcgcgtaggtgacaccgtactaggaatggcaacccagtgcgttcaggccaaaaacgtgaacaagacatcaccgcagacactgtccaacctctgcctgaagatcaacgtcaaactgggtggaatcaattcaatccttgtgccatcaatcagaccaaaggtattcgacgaaccggtcatcttcctgggtgcggacgtaactcatccaccggccggagacaacaagaagccctcgattgcggccgtggtcggttcgatggacgcccatccatcgcgttacgctgctacggtccgggtgcagcagcaccgccaggagatcatccaggagctgagcagtatggttcgggagttgctgatcatgttctacaaatcgacgggcggtttcaagccccatcggatcatcctgtaccgggatggcgtatcggagggacagttcccgcatgtgctgcagcacgagctgacggccattcgagaggcgtgcatcaagctggaagccgactacaagccgggtatcacgttcattgtggtgcagaagcgtcatcacacgagactattctgcgcagacaagaaggagcagagcggcaaatcgggcaacattccggccggtacgaccgtcgacgtgggcatcacccatccgaccgagttcgatttctatctctgcagtcaccagggcattcagggcaccagccgcccgtcgcattatcacgtcctgtgggacgacaatcacttcgaatccgatgagctccagtgcctgacgtatcaactgtgccacacgtatgtccggtgcacccgttccgtttcgattccggcaccggcgtattacgcccatttggtggcattcagggccaggtaccacttggtcgagaaagaacacgactcgggcgaaggatctcaccagagtggttgttccgaggacagaacgccgggcgcgatggctcgtgcaatcaccgtacatgccgataccaaaaaagttatgtacttcgcttaa

SEQ ID NO: 11549 - protein, 825 aa, Aedes aegypti
MPRGFVHHYDINIQPDKCPRKVNREIIETMVHAYSKMFGALKPVFDGRNNLYTRDPLPIGNDRVELEVTLPGEGKDRVFRVTIKWVAQVSLFNLEEALEGRTRQIPYDAILALDVVMRHLPSMTYTPVGRSFFSSPDGYYHPLGGGREVWFGFHQSVRPSQWKMMLNIDVSATAFYKAQPVIEFMCEVLDIRDINEQRKPLTDSQRVKFTKEIKGLKIEITHCGTMRRKYRVCNVTRRPAQMQSFPLQLENGQTVECTVAKYFLDKYKMKLRYPHLPCLQVGQEHKHTYLPLEVCNIVAGQRCIKKLTDMQTSTMIKATARSAPDREREINSLVRRADFNNDAYVQEFGLAISNSMMEVRGRVLPPPKLQYGGRVSSMSGQLLSGPQNKVSLALPNQGVWDMRGKQFFTGVEIRVWAIACFAPQRTVREDALRNFTQQLQKISNDAGMPIIGQPCFCKYATGPDQVEPMFRYLKNTFNALQLVVVVLPGKTPVYAEVKRVGDTVLGMATQCVQAKNVNKTSPQTLSNLCLKINVKLGGINSILVPSIRPKVFDEPVIFLGADVTHPPAGDNKKPSIAAVVGSMDAHPSRYAATVRVQQHRQEIIQELSSMVRELLIMFYKSTGGFKPHRIILYRDGVSEGQFPHVLQHELTAIREACIKLEADYKPGITFIVVQKRHHTRLFCADKKEQSGKSGNIPAGTTVDVGITHPTEFDFYLCSHQGIQGTSRPSHYHVLWDDNHFESDELQCLTYQLCHTYVRCTRSVSIPAPAYYAHLVAFRARYHLVEKEHDSGEGSHQSGCSEDRTPGAMARAITVHADTKKVMYFA

SEQ ID NO: 11550 - DNA, 2925 bp, Physcomitrella patens subsp. patens
  CDS (1)..(2925)
atgtatggaaggccctccagacctttccagcaaccgattcctccagcacccagacctctgccccaagggggaagaggcccttcgtacccagggcaagcatatggacgtggcggaggtcctcctgctcatttttctgcatcacctccaagttacggaccaggtgtaggtgcagttgttgagcagtttgggtcggtggttttgggtggtgtggggcatagttccaatgttggccaaatttcagaaccccatgtttctaaatatgaacagccatccacacctccaccaatttctagtaaacagctgaggtttcctttgcgtcctgacagaggaaggattggccaatggtgtatcgtgaaagcaaatcatttctttgccgagccacctgacaaagatctgcatcaatatgatgttacaatcaccccagaggttccatccagaggtatcaacagagccgtcatggagcagcttgttaaactttacagagagtctcacttgggcactaggcttcctgcttacgatggtaggaagagtctgtatacggctggaccccttccatttcagagcaaggaattcgagatcagactcttggacgaggatgatgggaccaaccaacctagacgggagaggcccttcaaagttgtaattaaatttgctgcccgagcagatttggatcatctcagacgatttcttcttgggcgccaagctgatgctcctcaagaagtcctacaagtcttagatattgtattgagggagcttcctacccatcggtattctcctgtaggacgctctttttattctcccaatctgggaactcgacagccgctaggagatggtctggaaagctggcggggcttctatcaaagtattcgaccaactcaaatggggctgtccctaaacattgacatgtcttccacagcgttcatagaacccaagactgtgatggagtttataggggatctcctcaacaaggacgtgacacgtggtctatccgatgctgatcgcatgaagatcaagaaagctcttcgtggagttaaagtggaagtgactcatcgcggaagtatgcgtcgcaagtaccgcatatctgggcttacaaatcaggccaccaatgaattggagttcccagttgatgataatggtaccttgaagtctgttaccgactattttcgggagacgtatggctatgttatccggcatccatctttgccttgcctccaagtagggaatgctcagcgtcccaactatcttcccatggaagtctgcaagatcgttgagggccagcggtactccaaacggctgaatgagcgccaaatcaccgcacttcttaaagttacttgtcagcgaccacgagacagagaacacgccattatgaatacggtacaccataatgcataccatcaagatccttatgctcaagaattcggaattagaatcagtaatgaacttgcgcaagtagaggctcgagtccttccagctccacggctcaagtaccatgacactggcagggaaaaagaatgtcttccacaagttggacaatggaacatgatgaacaagaaaatggttaatggtggaatcgtcaacaactgggcatgcatcaatttttcacgcaatgtccaggaaaatgttgctaagagtttctgtcaagagctggctcagatgtgtcagacatctggaatgcaatttactagggaccccgtagtgcctcttcaatattatcaccctgataactatgaccgagctttgattcatctatgtgatgacgtgtataaaaagacgaagggcaagagcttggatctcctcatagctattctaccagacaacaacgggcctttatatggtgatctgaagaagcaatgtgagactgtcctgggagtggtttcacaatgttgtttgactaagcatgtcttcaagatgagcaagcagtatttagcaaatgtggccctcaaaattaatgtgaaggtcggaggtcggaatactgttttggtagatgcactttcacgcaagatccctcttgtcagtgatattcccactataatatttggtgcagatgttacccaccctcaccctggagaggatttcagtccttccatagctgcagtggtagcttcgcaggattggcctgaggtcactaaatatgccggattggtgtgcgctcaagctcaccgtcaggagttgattcaggatctgtacaaagagtggaaggatcctcagaaaggcttgatgacaggagggatgatcaaggagctcctgatctctttctggcgcgcaacaggtcaaaagcctcttcgcatcattttttacagggatggagttagtgaagggcagttttatcaggtgcttctgttcgagctggacgcaatcaggaaagcttgcgcttcccttgaaccggattaccagcctccagtcacgtttgtggttgtgcagaagaggcaccacactcgattatttgccaacaatcacaatgataatcgctctacggatagaagtggcaacattttaccagggactgttgtggactcgaagatttgtcaccctacggagtttgacttttatctttgcagtcatgctggaattcaggggactagtcgacctgcacattatcatgtactatgggatgaaaataaattttctgcggacagtttgcagtcgttgacaaacaatctttgctatacgtatgcacggtgcacacgttcagtatctattgttcctccggcttattatgcgcatttggctgctttccgagcgcgcttctacatggatccagaagcttccgatactggatctctaactagtgggatgggaggggctaatcggagccagtacactggatcagcaacatctcgtaccaatcgtgtggtgggaggaaatgctgtgcgtccacttcctcctctgaaggagaacgtgaagagagtcatgttctactgttaa

SEQ ID NO: 11551 - protein, 974 aa, Physcomitrella patens subsp. patens
MYGRPSRPFQQPIPPAPRPLPQGGRGPSYPGQAYGRGGGPPAHFSASPPSYGPGVGAVVEQFGSVVLGGVGHSSNVGQISEPHVSKYEQPSTPPPISSKQLRFPLRPDRGRIGQWCIVKANHFFAEPPDKDLHQYDVTITPEVPSRGINRAVMEQLVKLYRESHLGTRLPAYDGRKSLYTAGPLPFQSKEFEIRLLDEDDGTNQPRRERPFKVVIKFAARADLDHLRRFLLGRQADAPQEVLQVLDIVLRELPTHRYSPVGRSFYSPNLGTRQPLGDGLESWRGFYQSIRPTQMGLSLNIDMSSTAFIEPKTVMEFIGDLLNKDVTRGLSDADRMKIKKALRGVKVEVTHRGSMRRKYRISGLTNQATNELEFPVDDNGTLKSVTDYFRETYGYVIRHPSLPCLQVGNAQRPNYLPMEVCKIVEGQRYSKRLNERQITALLKVTCQRPRDREHAIMNTVHHNAYHQDPYAQEFGIRISNELAQVEARVLPAPRLKYHDTGREKECLPQVGQWNMMNKKMVNGGIVNNWACINFSRNVQENVAKSFCQELAQMCQTSGMQFTRDPVVPLQYYHPDNYDRALIHLCDDVYKKTKGKSLDLLIAILPDNNGPLYGDLKKQCETVLGVVSQCCLTKHVFKMSKQYLANVALKINVKVGGRNTVLVDALSRKIPLVSDIPTIIFGADVTHPHPGEDFSPSIAAVVASQDWPEVTKYAGLVCAQAHRQELIQDLYKEWKDPQKGLMTGGMIKELLISFWRATGQKPLRIIFYRDGVSEGQFYQVLLFELDAIRKACASLEPDYQPPVTFVVVQKRHHTRLFANNHNDNRSTDRSGNILPGTVVDSKICHPTEFDFYLCSHAGIQGTSRPAHYHVLWDENKFSADSLQSLTNNLCYTYARCTRSVSIVPPAYYAHLAAFRARFYMDPEASDTGSLTSGMGGANRSQYTGSATSRTNRVVGGNAVRPLPPLKENVKRVMFYC

SEQ ID NO: 11552 - DNA, 3363 bp, Physcomitrella patens subsp. patens
  CDS (1)..(3363)
atgccgcggagacgcaagaccccgcgggaacttgaggagagtgcccaagctcaggctttagcagaagctcaagcatcggcattagcaggagcggaggggtcagctccttcagctgttgcgccggaacctgcttcgactccgactccagctgctggtggagctgctgttccagcccctattccagtgtcagcacctgcacagcacgttgcttctcaacatgttgagggccagggccatggtcaagctcactcccagcatttaggagagggctcgcaaggccaaggttcggggcattctcagggacagaggcaaaggcaaggacaagggcaagggcaaggtcaaggacaggggcaaggtcaaggacaggggcaaggtcaaggacaggggcaaggtcaaggacaggggcaagggcaaggacaggggcaagggcaagggcaaggacgcgatgaacccaatagcagtggacctcctgggcgggcgagaggaggcatgggaggaggcgagcgaggttctggaaggaggggtggcaggagccgctataatcagggaccccctgtgcatttcgctgcactgcctgcaggctatggatcaggtgtaggtccagttgttgagcagttcgggtcagtggttatagggggtgttggacctcgtttcaactctggtccaactcaagagcaagctgtttctaaatacgagccgccacccacgcctccaccgatttctagcaaacagttgagatttcctttgcgtccagaccgaggaaggatcggtctgaggtgtattgtgaaggcaaatcatttttttgtcgagctacctgacaaagatcttcatcagtacgatgtgactatcactccagaggtcacatccaggggtatcaacagggccgtcatggagcagcttgtgaagctttacagagagtcacacttgagctccaggcttcctgcgtatgatggtcggaagagtttgtataccgctgggccacttccgtttcagagcaaggaattccagatcagtcttttggacgaggatgatggaaccaaccaacctagacgggagaggcttttcaaagtggttatcaagtttgctgctcgagcagatttgcatcatcttgggcaatttcttcttggacgccaagctgatgctcctcaagaagccttgcaagtcctagatatcgtattgagggagcttcctacccaccggtgcgtttattctcctgtaggacgctcgttctattctcccaatctgggcactcgacagccgttaggagatggtcttgaaagctggcggggcttttatcaaagtattcgaccaactcaaatgggattgtccctaaacattgacatgtcttccacagcgttcatagaacccaagactgtaatggagtttataagggatctcctcaacaaggagttgacccgtagcctaagtgatgccgatcgtatgaagatcaagaaagctcttcgcggagtcaaagtggaagtgactcatcgcggaagtatgcgtcgcaaataccgtatatctgggcttacccatcaggctactaatgaactcgaatttccagttgatgagaatgggacattgaagtctgtcaccgactattttcgggaaacatacggctattttatccgtcatccgtctttgccgtgccttcaagtgggtaattctctgcgtcccaactaccttcccatggaagtatgcaagatcgttgaaggccagcgatattcgaaacggttgaatgagcgccaaattacagctcttctcaaagtaacttgccagcgacctcgagacagagaagcagatattatgcagacagtacaccacaatgcataccaccaagatccctatgctcaagagtttgggatcagaattagtaatgagcttgcgcaagtggaggcacgagtcctgccagctccacggctgaagtaccatgatactggcagggaaaaggagtgtcttccacaagttggacagtggaatatgatgaataagaaaatggtgaacggcggtatcgtgaactactgggcatgtatcaatttttcacgcactgtccaagagaatgtggcgaagaacttctgccaagagctggctcagatgtgccacacatccgggatgcaatttacaagagatcccgttgtgcctttgcaaagctaccgacccgagcactcggaccgagctctgtttcagctatgtgatgacgtgcacaaaaagactaagggcaagagcttggatctccttattgcaatccttccagacaacaacgggcctttgtatggtgatttgaagaagcaatgtgagactgtactgggtgtggtttctcagtgttgtttgaccaagcatgttttcaagatgagcaagcagtacctggcaaacgtggctctcaaaattaatgtcaaggttgggggtcggaacactgtcctggtggatgcacttacacgcaagattcctctcgtcagtgatattcccaccataatatttggtgcagatgttactcatccacatcctggagaggactccagtccctccattgctgcagtggtagcttcgcaggattggcccgaggtcaccaagtatgcagggttggtgtgtgctcaagctcaccgtcaggagttgattcaggatctgtacaaggaatggagggacccccagaaaggcacgatgacaggagggatgataaaggaactccttatctctttccggtgtgcgaccggtcaaaagccacttcggattatcttttacagagatggagtaagtgaaggtcaattttaccaggttcttctgtatgaactggacgcaatcaggaaagcttgcgcttcccttgaaccggattaccagcctccagtcacatttgtggtcgttcagaaaagacaccacactcgtttatttgccagcaatcataatgacaatcgctctactgatagaagtggcaacattttaccagggactgtagtggactcaaagatctgtcatcctacagaattcgatttctatctttgtagtcatgctgggattcagggaaccagtcgacctgcgcattaccatgtgctgtgggatgagaacaaattttctgcggatagtttacagtcgttgacaaataatctgtgctatacatatgcacggtgcacgcgctctgtttctattgttcctccagcatattatgcacatctagctgcttttcgtgccaggttctacatggatccagaagcttcagatactggttctgttactagtgggttgggaggggcgaatcgcagtcagtttactggatcgactgctggccgcactcatcgtgcggcgggaggaaatgccgtgcgcccacttccacctcttaaggagaatgtgaagagagtcatgttctactgttaa

SEQ ID NO: 11553 - protein, 1120 aa, Physcomitrella patens subsp. patens
MPRRRKTPRELEESAQAQALAEAQASALAGAEGSAPSAVAPEPASTPTPAAGGAAVPAPIPVSAPAQHVASQHVEGQGHGQAHSQHLGEGSQGQGSGHSQGQRQRQGQGQGQGQGQGQGQGQGQGQGQGQGQGQGQGQGQGQGQGQGRDEPNSSGPPGRARGGMGGGERGSGRRGGRSRYNQGPPVHFAALPAGYGSGVGPVVEQFGSVVIGGVGPRFNSGPTQEQAVSKYEPPPTPPPISSKQLRFPLRPDRGRIGLRCIVKANHFFVELPDKDLHQYDVTITPEVTSRGINRAVMEQLVKLYRESHLSSRLPAYDGRKSLYTAGPLPFQSKEFQISLLDEDDGTNQPRRERLFKVVIKFAARADLHHLGQFLLGRQADAPQEALQVLDIVLRELPTHRCVYSPVGRSFYSPNLGTRQPLGDGLESWRGFYQSIRPTQMGLSLNIDMSSTAFIEPKTVMEFIRDLLNKELTRSLSDADRMKIKKALRGVKVEVTHRGSMRRKYRISGLTHQATNELEFPVDENGTLKSVTDYFRETYGYFIRHPSLPCLQVGNSLRPNYLPMEVCKIVEGQRYSKRLNERQITALLKVTCQRPRDREADIMQTVHHNAYHQDPYAQEFGIRISNELAQVEARVLPAPRLKYHDTGREKECLPQVGQWNMMNKKMVNGGIVNYWACINFSRTVQENVAKNFCQELAQMCHTSGMQFTRDPVVPLQSYRPEHSDRALFQLCDDVHKKTKGKSLDLLIAILPDNNGPLYGDLKKQCETVLGVVSQCCLTKHVFKMSKQYLANVALKINVKVGGRNTVLVDALTRKIPLVSDIPTIIFGADVTHPHPGEDSSPSIAAVVASQDWPEVTKYAGLVCAQAHRQELIQDLYKEWRDPQKGTMTGGMIKELLISFRCATGQKPLRIIFYRDGVSEGQFYQVLLYELDAIRKACASLEPDYQPPVTFVVVQKRHHTRLFASNHNDNRSTDRSGNILPGTVVDSKICHPTEFDFYLCSHAGIQGTSRPAHYHVLWDENKFSADSLQSLTNNLCYTYARCTRSVSIVPPAYYAHLAAFRARFYMDPEASDTGSVTSGLGGANRSQFTGSTAGRTHRAAGGNAVRPLPPLKENVKRVMFYC

SEQ ID NO: 11554 - DNA, 2691 bp, Physcomitrella patens subsp. patens
  CDS (1)..(2691)
atgttgggacctttgcatgacccccttactcctagacaggaactacctccgacgccgccgccactatccagcaaaggtgtgaggttccctttgcgtccttcaaaagggagtaatggtctgagatgtattgtcatagccaatcatttctatgctgagctgcccgataaggatctgcatcattacgacgttgccatcaatccagagctcccatctaagggaatcaacagggctgttatggagcagctcgtgaagctctacagagaatctcatttaggcactaggctacctgcttatgacggtcgaaaaagtctttacaccgccggaccgcttccgtttcagagcagggagttcgaaattagtcttacggacgaggaggacggaagcaatcagcttaggagagcgaggcacttcaaggtggttataaaatttgctgcccgggcagatttgcaccatcttggagaatttcttgctggacgccaagctgatgctcctcaagaagctctgcaagttctggacattgttttgagagagctccctacccaccggtattctcccgttgggcgctatttctattcacccgatctgggcacgcgacggccattaggagatggtcttgaaagctggcggggcttttatcagagtattcgaccaactcaaatggggttgtccctaaacattgacatgtcttccacagcgttcattgaacctaaaactgttatagagtttgtaaaggatctcctgaggaaggatttaaaccgtagtctgaccgatgctgatcgcattaagatcaagaaagccctccgtggggtgaaggtggaagtcactcatcgcggaagtatgcggcgcaagtatcgcatatctgggctcactaatcaggccaccagtgaattgcaattccctgtggacgataatgggactatgaagtctgttactgactactttcgcgagacttatagctacacaattcgacatccagctttaccctgtctccaagtgggaaatactcagcgtcccaattatcttccaatggaagtctgcaaaattgttgagggccagcgatattccaaacggctgaatgagcgccaaattgctgcacttctacaagtcacttgtcagcgacccagagacagagagagagatattatgcagactgttcatcacaatgcgtatcatcaagacccatatgcccaggagtttggaatcaggatcagcaatgaattagcgcaagtggaggctcgaatcctaccagccccacgactgaagtaccatgataccggaagggaaaaagagtgccttccacaagttgggcagtggaacatgatgaacaagaaaatggtgaatggaggtatagttcagcactgggcttgtgtcaatttctcatcaaatgttcaagagaaaattgctcgcgacttctgcttagagctggctcagatgtgtcaaacatctggcatgcaatttgctcgagatcccattgtgccggtgaaaactgtccgtcctgataattcagaaaaagctttgtatcaactctgtgaagatgtgaatagaaggacaaaggggaagggcttggatctgcttattgcaattcttcccgacaacaacgggtctttgtatggcgatcttaagaaacagtgtgagactgtcctgggggtcgtgtctcaatgttgtttgacgaaacatgtatttaagatgagcaaacagtacttggcaaatgttgccctgaaaatcaatgtcaaggttggaggccgaaatactgttctggtggacgctctttctagaagaattcctcttgtcagtgacaaacccaccattatattcggtgcagatgtcactcatccgcaccccggagaagattcgagcccttctattgcggctgttgtggcatcgcaggattggcctgaggtcaccaagtacgctggtttagtgtgcgctcaaactcaccgtcaagagttgattgcggacctattcaaagaatacactgacccaatgaaggggaaaatgtttggagggatgattagggaacttctcatctctttccggagcgcaactggtcaaaagcctctccgtatcatcttttacagagatggagtaagcgagggccagttttcacaggttcttcttcatgagctagacgcaatcaggcgagcctgtgcttcgcttgaagaaggataccaacctccagtcacgtttgtagtggttcagaaaaggcaccacactcgtttgtttgccagtgatcgtcgcaatactgataggagtggcaacattctaccaggtacggttgtggactctacaatctgtcaccctacggaattcgacttctatctttgcagtcacgctggaattcagggtaccagtcgacctgcacattaccatgtattgtgggacgagaatagtttttctgctgacagtttgcagtcattgacaaacaacctatgctatacgtatgcacggtgcacacggtcagtgtcaatcgtcccccccgcatattatgctcatttggccgctttccgagcgagattctacatggatctagaatcttcggatactggatctgcaaccagtggaataggggcaaatcgtacacaggtcaccggatcaactgccgctcgcactaatcgggtggcaggaaatactgccgtgcgtccacttcctcctttgaaggaaaacgtcaaaagggtaatgttctactgttag

SEQ ID NO: 11555 - protein, 896 aa, Physcomitrella patens subsp. patens
MLGPLHDPLTPRQELPPTPPPLSSKGVRFPLRPSKGSNGLRCIVIANHFYAELPDKDLHHYDVAINPELPSKGINRAVMEQLVKLYRESHLGTRLPAYDGRKSLYTAGPLPFQSREFEISLTDEEDGSNQLRRARHFKVVIKFAARADLHHLGEFLAGRQADAPQEALQVLDIVLRELPTHRYSPVGRYFYSPDLGTRRPLGDGLESWRGFYQSIRPTQMGLSLNIDMSSTAFIEPKTVIEFVKDLLRKDLNRSLTDADRIKIKKALRGVKVEVTHRGSMRRKYRISGLTNQATSELQFPVDDNGTMKSVTDYFRETYSYTIRHPALPCLQVGNTQRPNYLPMEVCKIVEGQRYSKRLNERQIAALLQVTCQRPRDRERDIMQTVHHNAYHQDPYAQEFGIRISNELAQVEARILPAPRLKYHDTGREKECLPQVGQWNMMNKKMVNGGIVQHWACVNFSSNVQEKIARDFCLELAQMCQTSGMQFARDPIVPVKTVRPDNSEKALYQLCEDVNRRTKGKGLDLLIAILPDNNGSLYGDLKKQCETVLGVVSQCCLTKHVFKMSKQYLANVALKINVKVGGRNTVLVDALSRRIPLVSDKPTIIFGADVTHPHPGEDSSPSIAAVVASQDWPEVTKYAGLVCAQTHRQELIADLFKEYTDPMKGKMFGGMIRELLISFRSATGQKPLRIIFYRDGVSEGQFSQVLLHELDAIRRACASLEEGYQPPVTFVVVQKRHHTRLFASDRRNTDRSGNILPGTVVDSTICHPTEFDFYLCSHAGIQGTSRPAHYHVLWDENSFSADSLQSLTNNLCYTYARCTRSVSIVPPAYYAHLAAFRARFYMDLESSDTGSATSGIGANRTQVTGSTAARTNRVAGNTAVRPLPPLKENVKRVMFYC

SEQ ID NO: 11556 - DNA, 2895 bp, Culex quinquefasciatus
  CDS (1)..(2895)
atgaccatgaaccttggaccgtccgacatcacatcgaccgagcatgccgtcgatgcatttctcggaacgacaaccgagctgacagacctgacgatacagctagatgcgacgacccaacggcgcgacgctatccgcaaggaacgcaaagccaaacgagctcctccagctggtgcgaccgtcaacccgaccccgacgaccacttccggcgcgcagaatgtcgcgaccagcgccctcggtgtcgtcccggcgacgccgccagccccgccggatctgccggtgttcacctgcccacggcggccaaatctgggccgggagggtcgtccgatcgtgctgcgtgcgaaccacttccagatcacgatgccccggggcttcgtgcaccactacgacatcaacatccagccggacaagtgcccgcgcaaggtcaaccgggagatcatcgagacgatggtgcacgcgtacagcaagatgttcggcgccctcaagccggtcttcgacgggcggaacaacctgtacacgcgggatccgctcccgatcgggaacgatcgcgttgagctggaggtgacgctacctggtgaggggaaggaccgggtgttccgcgtgaccatcaagtgggttgcgcaggtttcgctgtttaacctggaggaagcgttggaaggacgtacccggcagattccgtacgatgcgatcctggcgttggacgtggtgatgcgccacttgcccagcatgacgtacacgccggtcggacggagcttcttcagctcgccggatggatactaccatccccttggaggtggtcgtgaagtttggttcggtttccatcagagcgtgcggccctcgcagtggaagatgatgctgaacattgacgtgtcggccaccgccttctacaaggcccagccggtgattgagttcatgtgcgaagtgctcgacatcagagacatcaacgagcagcgcaagccgctcaccgattcgcagcgcgtcaagttcaccaaggagatcaagggcctcaagatcgagatcacccactgcggtacgatgcgccgcaagtaccgggtttgcaacgtcacccggcgtccggcccagatgcagtccttcccgctgcagctggagaacggccagacggtggagtgcaccgtggccaagtacttcctggacaagtacaagatgaagctgcgctatccgcatctgccgtgtctgcaggtcggccaggagcacaagcacacctacctgccgctggaggtctgcaacattgtggcggggcagcgttgcatcaagaagctcaccgacatgcagacgtcgacgatgatcaaggccacggccagatccgctccggatcgtgaacgtgaaatcaacaacctggttcgccgcgccgatttcaacaacgacgcgtatgtgcaggagtttggcctggccatctccaacagtatgatggaggtccgtgggcgggtgttgccgccgccgaagctgcagtacggagggcgcgtttccagcatgagcggacaaactttaagcaccttcccccaagaaaccttagcaagtggcacgttaaaatcagcgaacaagttaccctctggtccgcagaacaaggtgagcttagcattaccaaaccaaggggtttgggacatgcgaggcaaacaatttttcaccggcgtcgagatccgcgtgtgggccatcgcctgcttcgcgccccagcgaaccgtccgggaggacgcgctgcgcaactttacccagcagctgcagaagatttccaacgacgccgggatgccgatcatcgggcagccctgcttctgcaagtacgccaccgggccggaccaggtcgagccgatgttcagatatctgaagaacactttcaaccagctacagctggtggtggtcgtgctgcccggcaagaccccggtttatgctgaagtcaagcgcgtcggagacaccgtcctgggcatggccacccagtgcgtgcaggccaagaacgtcaacaagacgtccccgcagacgctgtcgaatctgtgcttgaagatcaacgtcaaactgggcggcatcaactcgatcctcgtgccatcgatcagaccaaaggtattcgacgaaccggtcatcttcctgggcgcggacgtgacccacccaccggccggcgacaacaagaagccctcgatcgcggccgtcgtcggctcgatggacgcccatccgtcgcggtacgccgccacggttcgcgtccagcagcaccgccaggagatcatccaggagctgagtagcatggtgcgcgagctgttgatcatgttctacaagtcgaccgggggcttcaagccgcaccggatcatcctgtaccgggacggggtgtccgaagggcagttcccgcacgtgctgcagcacgagctgacggcgatccgcgaggcgtgcatcaagctggaggcggactacaagccgggcattacgttcatcgtggtgcagaagcgccaccacacgaggctgttctgcgcggacaagaaggagcagagcggcaagtccggcaacattccggccggaacgacggtggacgtgggaatcacgcacccgaccgagtttgacttttacctgtgcagtcaccagggtattcagggtaccagtcgcccgtcgcactaccacgtcctctgggacgacaaccacttcgagtcggacgagctgcagtgcctgacgtaccagctgtgccacacgtacgtccggtgtacgcggtcggtgtcgatccccgcaccagcctactacgcccatctggtggcgttccgggccagataccacctggtcgagaaggagcacgactcgggcgaaggatctcaccagagcggttgctccgaggaccggacgccgggcgcgatggcccgtgcaatcaccgtacacgcagataccaaaaaagttatgtactttgcttaa

SEQ ID NO: 11557 - protein, 964 aa, Culex quinquefasciatus
MTMNLGPSDITSTEHAVDAFLGTTTELTDLTIQLDATTQRRDAIRKERKAKRAPPAGATVNPTPTTTSGAQNVATSALGVVPATPPAPPDLPVFTCPRRPNLGREGRPIVLRANHFQITMPRGFVHHYDINIQPDKCPRKVNREIIETMVHAYSKMFGALKPVFDGRNNLYTRDPLPIGNDRVELEVTLPGEGKDRVFRVTIKWVAQVSLFNLEEALEGRTRQIPYDAILALDVVMRHLPSMTYTPVGRSFFSSPDGYYHPLGGGREVWFGFHQSVRPSQWKMMLNIDVSATAFYKAQPVIEFMCEVLDIRDINEQRKPLTDSQRVKFTKEIKGLKIEITHCGTMRRKYRVCNVTRRPAQMQSFPLQLENGQTVECTVAKYFLDKYKMKLRYPHLPCLQVGQEHKHTYLPLEVCNIVAGQRCIKKLTDMQTSTMIKATARSAPDREREINNLVRRADFNNDAYVQEFGLAISNSMMEVRGRVLPPPKLQYGGRVSSMSGQTLSTFPQETLASGTLKSANKLPSGPQNKVSLALPNQGVWDMRGKQFFTGVEIRVWAIACFAPQRTVREDALRNFTQQLQKISNDAGMPIIGQPCFCKYATGPDQVEPMFRYLKNTFNQLQLVVVVLPGKTPVYAEVKRVGDTVLGMATQCVQAKNVNKTSPQTLSNLCLKINVKLGGINSILVPSIRPKVFDEPVIFLGADVTHPPAGDNKKPSIAAVVGSMDAHPSRYAATVRVQQHRQEIIQELSSMVRELLIMFYKSTGGFKPHRIILYRDGVSEGQFPHVLQHELTAIREACIKLEADYKPGITFIVVQKRHHTRLFCADKKEQSGKSGNIPAGTTVDVGITHPTEFDFYLCSHQGIQGTSRPSHYHVLWDDNHFESDELQCLTYQLCHTYVRCTRSVSIPAPAYYAHLVAFRARYHLVEKEHDSGEGSHQSGCSEDRTPGAMARAITVHADTKKVMYFA

SEQ ID NO: 11558 - DNA, 2874 bp, Acyrthosiphon pisum
  CDS (1)..(2874)
atgaatcccaatcagccaaatactggaactcctggtgtcccaggaaagaaaaagcagaaaaaaggtgttcaacaagatagttcaaatactaatgttggacaaagtcaagaaccatcaaattcaggatcaaaagactttccgcaaatatctcaaagtaagccgaataaaaaacagcaggcaccacagaaacaaaataaaccaaaggatgcaaatcaaaaaccaaatcagaaacagaatcaatctgcagagcctaaacaaactaagaaacagaatcaacctggtgggacaaaaccaaatcaaaaacaatctgaaggcaataatccatctgccgctgttccaaaatcatctccaactcaaggcggtcaacaaattgaacaacaaattgtaatcttaaagagtaatttacatattcctaaaagaaaaaaccccaagactggtggttctttggggcgtgcaactgagattgaagtgaatcatcttcctcttaaccttgatcagttgttcaaaaaagttgtctaccacgtagatgtacaattcacaccagaactaccaaaaagacttctaagaaatgcattggaagaatttaacaacagacattacccgaaggttaattttgcatttgatgggcgaagaaatatgtatactataaaagagataaaagggaaatctgatacagtatcagttgtaaatgacgaaaataatagaacgattgactttggtatttcaacctcaattgtcaatacaattcatatgaataaaattgaggattatttaaaatctggatcatccaacactcccccaggtgaagcatttcaagcattggatattgttttgaaaaaccgaccatttgcattaagattcactaatgttggaagatcatttttcccagtaccacgtattacaccagtggacttgggtgaaggaatggaattatggaaaggattttttcaaagtcctgttatgggttggaaaccttatcttaatatagatgtggcacataaaggatttcccaagtatcaaccgttaataaacttcattacaaatgaaatgaattgtgatctcaattcagaaatggatcaaaggagttacaacacattggcaagttatgttaaaggattaaaaattgactttacggttccaaatcaacccaatacaaaacgttcatacaaagtagttggtctccttgacactgcctctagatttagatttgagatggaggatcctgttagaggtaaacaaacacttaatgtagtgcaatacttcagaattacacggaactatgttatcaagcatccaaatttaccttgtttacatgttggcaacgttaacaagaaaactgctattccaattgaactgtgccatgttcaaaaaggacaattgcgtttgaaaaaattatctgaaattcaaactgcggccatggtgaagaatgcagctcgacctcctggagaacgacgacaaactattgaaaattgcatcagagacattgcatacaacaaagatcctgtattgaaagactttggtattgaagttaaagaacattttgcttcaataccagcaagagttttggatcaaccttctttagcttatgctcaaaataaggaaactaaaccaagagctggtgtttggagacctgatagattttctaaagcagtacatattaacaaatgggttgtattgaatctagaccaacgtactaatattgcaagcataaaaaactttgaaaaaagtttgatgatgagtgctagagacttgaatgttgttatgagcccaatggatcctgtgatcaatatttttttgccaaggagtagtttggctgatataaaaacctctatagggaacgtttttacaaagcaaaaagcttgcaatacagaattgattgtggttgttattccagattatcctgcaggaatttatgcttctgttaagcaaaaatcagaattggaagttggtattcttacacaatgcattaaatccaagactatgtttagaatgaatacatcaacatcttctaatattctactaaaaataaactcaaaattgaacggaatcaatcatactcttgccatcagaagcagcccacctagtatggagggagcaattatttttggagctgatgtgacacatccatctcctgaacagactactattccttcagttgctgctgtaacagccagtcatgatacttatggaagtcaatacaatatggaatggcgcttgcaatctcctaaagtagaaattattcaagatctagaagacattgttcatatacagttgcttaaatataaagaaagaacaaaaactgtgccaaaaaaaatattttattttagagatggtgtaagcgaaggccaatttctacagttgttggaatatgaactgattgctattcgaagagcttgcctccgactcaatattgcctacaaaccttcagtgacatttttggttgtacagaaacgacatcacaccagaatgtttccaaagttcagttatgatatggatgggaagttttctaatgtcccttctggcacaattatagacactcaaattacccatccaacagaacttgatttttatttgtgtagccatgctagtattcaaggcacatcccgaccaaccaagtatcatctgatatgggatgacaataatttcactgaagaccagttggaacagctgacattctacctctgctttatgtttgtacgttgtactcgttctgtttcatatccggcacctacatactatgctcatttggctgcatttagagcccgagcttatattgaaaacaaaaccatcaatctgaataatttagaagatgagcaaaccagaaatcaactgaaccattcattcacagttaatacacctatgttttttgtttaa

SEQ ID NO: 11559 - protein, 957 aa, Acyrthosiphon pisum
MNPNQPNTGTPGVPGKKKQKKGVQQDSSNTNVGQSQEPSNSGSKDFPQISQSKPNKKQQAPQKQNKPKDANQKPNQKQNQSAEPKQTKKQNQPGGTKPNQKQSEGNNPSAAVPKSSPTQGGQQIEQQIVILKSNLHIPKRKNPKTGGSLGRATEIEVNHLPLNLDQLFKKVVYHVDVQFTPELPKRLLRNALEEFNNRHYPKVNFAFDGRRNMYTIKEIKGKSDTVSVVNDENNRTIDFGISTSIVNTIHMNKIEDYLKSGSSNTPPGEAFQALDIVLKNRPFALRFTNVGRSFFPVPRITPVDLGEGMELWKGFFQSPVMGWKPYLNIDVAHKGFPKYQPLINFITNEMNCDLNSEMDQRSYNTLASYVKGLKIDFTVPNQPNTKRSYKVVGLLDTASRFRFEMEDPVRGKQTLNVVQYFRITRNYVIKHPNLPCLHVGNVNKKTAIPIELCHVQKGQLRLKKLSEIQTAAMVKNAARPPGERRQTIENCIRDIAYNKDPVLKDFGIEVKEHFASIPARVLDQPSLAYAQNKETKPRAGVWRPDRFSKAVHINKWVVLNLDQRTNIASIKNFEKSLMMSARDLNVVMSPMDPVINIFLPRSSLADIKTSIGNVFTKQKACNTELIVVVIPDYPAGIYASVKQKSELEVGILTQCIKSKTMFRMNTSTSSNILLKINSKLNGINHTLAIRSSPPSMEGAIIFGADVTHPSPEQTTIPSVAAVTASHDTYGSQYNMEWRLQSPKVEIIQDLEDIVHIQLLKYKERTKTVPKKIFYFRDGVSEGQFLQLLEYELIAIRRACLRLNIAYKPSVTFLVVQKRHHTRMFPKFSYDMDGKFSNVPSGTIIDTQITHPTELDFYLCSHASIQGTSRPTKYHLIWDDNNFTEDQLEQLTFYLCFMFVRCTRSVSYPAPTYYAHLAAFRARAYIENKTINLNNLEDEQTRNQLNHSFTVNTPMFFV

SEQ ID NO: 11560 - DNA, 2679 bp, Acyrthosiphon pisum
  CDS (1)..(2679)
atgtatcccgtcggccaaccccctgcgccacctgttgtggccccagtaccagttggtgtacctggagcaatgggcgttcttcaacctcaggctcctgcattgcaaccacaactagttgatgtaccagtattcaattgtccacgccgaccaaatctgggacgagaaggccgaccaattgtgcttcgtgctaatcattttcaaatatcaatgcctcgtggttatgtacatcattatgacatcaatattcaaccagataaatgtcctcgaaaagtaaatcgtgaaattattgaaactatggtccatgcgtacagtaaactttttggtaatcttcgacctgtatttgatggtcgcaacaacttatatacaagagatccattgcctattggaaacgatcgaatggaattagaagttacattgcccggggaaggtaaagatagagtattccgtgttaatattaaatggttagctcaagtatcattatttgctttggaagaagcattagaaggccgcacaagacagataccatatgatgctattttggccttagatgtagtcatgcgacatcttccatcaatgacttacacaccagtaggtcgctcatttttttcttcgcctgaagggtactatcatccattaggtggtggtagagaagtttggtttggttttcaccagtcagtccggccatctcaatggaaaatgatgcttaatattgatgtgtcagcaacagctttttacaaagcacaacccgttatagaattcatgtgtgaagtgttggatattagagatattggtgaacaacgaaaaccattaacagattcacaaagagttaaatttacaaaagaaattaaaggtcttaaaatagagattacacattgtggagcaatgcgaaggaagtatagagtttgtaatgttacaagaagaccagctcaaatgcaatcttttccattgcaattggaaaatggtcaaacagtagaatgcacagttgctaaatatttcttagacaaatacaagatgaaattacgttatccacatttaccatgtcttcaagttggacaggaacataaacatacatatcttcctttggaggtctgtaacatagttgcgggtcagcggtgtattaaaaaattaactgacatgcaaacatcaaccatgataaaggcaactgcaaggagtgctcctgatcgtgaacgagagattaattccttagttcgtcgagctgattttaataatgattcatatgtacaagaatttggtcttaccatatcaaacagtatgatggaagtgcgtggtcgtgttttaccacccccaaaattacaatacggtggacgaactctaccaaatcagggaggattaaatgtccaacaaacgaaacaacaagcattaccaaatcaaggggtttgggatatgagaggcaaacagttctttacaggtgtcgaaattcgtaattgggcaatagcttgctttgcaccacagagaactgtgcgtgaggatgcgttaagaaatttcacaacacaactccaaaagataagcagtgatgctggcatgccaatagttggtcaaccatgtttttgtaaatatgctacaggacctgaccaagtagaacctatgttccgctatttaaaatcaacattcactggattacaacttgtagttgttgtcttaccagggaaaactccagtatatgctgaagtcaaaagagttggagacactgttctaggaatggctacacaatgtgttcaagcaaaaaatgttaataaaacgtcacctcaaacattgtccaatttatgtttaaagatcaatgtgaaattgggcggtatcaatagcattcttgtacctagcatcagacctaaagtattcaatgaaccagtgatatttttgggtgcagatgtaactcacccacctgcgggtgacaataaaaaaccatccattgcagcagtagtaggatctatggatgcacatcccagtcgttatgccgcaactgtacgtgtacaacaacacagacaagaaatcattcaagaacttagttctatggtcagggaactcctaatcatgttctacaagagcactggaggttataaacctcatagaattatattatatcgtgatggagtatccgaaggacagtttcctcatgtcttacaacatgaacttacagctattcgagaggcatgtataaagttagaaggtgattacaaaccaggaatcacttttattattgttcaaaaacgtcatcacaccagattgttctgcgctgataaaaaggaacaatcaggaaaatctggaaatattccagctggtacaacagttgatgttgggataacacatcctacagaatttgatttttacttatgtagtcatcaaggaattcagggaacaagtcggccaagtcattatcatgttctatgggacgacaaccattttgagtccgacgaattgcaatgcttaacataccaattgtgtcacacttatgtcagatgtacacgttctgtgtctatacctgcaccggcctattatgctcatttagttgcatttagggctagatatcacttagtcgaaaaagaacatgacagtggtgaaggatcacatcaatctggctgtagtgaagatagaacaccaggcgcaatggctcgagctattacagtacatgcagatacaaagaaagttatgtactttgcttaa

SEQ ID NO: 11561 - protein, 892 aa, Acyrthosiphon pisum
MYPVGQPPAPPVVAPVPVGVPGAMGVLQPQAPALQPQLVDVPVFNCPRRPNLGREGRPIVLRANHFQISMPRGYVHHYDINIQPDKCPRKVNREIIETMVHAYSKLFGNLRPVFDGRNNLYTRDPLPIGNDRMELEVTLPGEGKDRVFRVNIKWLAQVSLFALEEALEGRTRQIPYDAILALDVVMRHLPSMTYTPVGRSFFSSPEGYYHPLGGGREVWFGFHQSVRPSQWKMMLNIDVSATAFYKAQPVIEFMCEVLDIRDIGEQRKPLTDSQRVKFTKEIKGLKIEITHCGAMRRKYRVCNVTRRPAQMQSFPLQLENGQTVECTVAKYFLDKYKMKLRYPHLPCLQVGQEHKHTYLPLEVCNIVAGQRCIKKLTDMQTSTMIKATARSAPDREREINSLVRRADFNNDSYVQEFGLTISNSMMEVRGRVLPPPKLQYGGRTLPNQGGLNVQQTKQQALPNQGVWDMRGKQFFTGVEIRNWAIACFAPQRTVREDALRNFTTQLQKISSDAGMPIVGQPCFCKYATGPDQVEPMFRYLKSTFTGLQLVVVVLPGKTPVYAEVKRVGDTVLGMATQCVQAKNVNKTSPQTLSNLCLKINVKLGGINSILVPSIRPKVFNEPVIFLGADVTHPPAGDNKKPSIAAVVGSMDAHPSRYAATVRVQQHRQEIIQELSSMVRELLIMFYKSTGGYKPHRIILYRDGVSEGQFPHVLQHELTAIREACIKLEGDYKPGITFIIVQKRHHTRLFCADKKEQSGKSGNIPAGTTVDVGITHPTEFDFYLCSHQGIQGTSRPSHYHVLWDDNHFESDELQCLTYQLCHTYVRCTRSVSIPAPAYYAHLVAFRARYHLVEKEHDSGEGSHQSGCSEDRTPGAMARAITVHADTKKVMYFA

SEQ ID NO: 11562 - DNA, 2955 bp, Drosophila ananassae
  CDS (1)..(2955)
atgtctacggagcgcgagctggctcccggggggccagctcagctccacccgcacacgttgccattgacgttcccggacctgcagatcacctccgcggtgggcatcattggaaaggtctacgagtcacagtggaccccctcgcccactcggcctcagagtccctctcaggcgcagactagcttcgacacgctcacatcaccaccggcgcccggctcatcggtcaatcccaccgcggtcaccagcccgagtgcccagaatgtggcagctggtggagccactgtggccggtgctgctgcagcagccgcccaggtcgcctccgcccttggctcaaccaccggcagcgtgtcggcagccattgccaccgccacgccagccgcccaaccggacatgcccgtcttcacgtgcccccgccgtccgaatctgggccgggaaggtcgtccgattgtgctccgtgccaatcacttccaggtgacgatgccccgtggctatgtccaccactacgacatcaacatccagccggacaagtgtccgcgcaaggtcaaccgcgagatcatcgagactatggtccatgcctacagcaagatcttcggggtgctgaagcccgtgttcgatggccggaataacttgtacacccgtgaccccttgcccattggcaacgaacggctggagctggaggtcaccctgcccggcgagggcaaggatcgcatctttcgcgtgacgatcaagtggcaggctcaggtctctctcttcaacctggaggaggcgctcgagggtcgcacccgccagataccctatgacgccatcttggcgctcgacgtggtgatgcgtcatctgcccagtatgacgtacactccagtgggacgcagtttcttcagctcacccgacggctactaccatcctcttggcggtggtcgcgaggtgtggttcggtttccatcagagtgtgaggccttcgcagtggaagatgatgctcaacatcgatgtatcggctactgctttctacaagtcccaacccgtgattgacttcatgtgtgaggtgctggacattcgcgacatcaacgaacagcgcaagccgctcaccgactcccagcgcgtcaagttcaccaaggagatcaagggcctgaagatcgagatcacccactgtggtcagatgcgtcgcaagtaccgggtgtgcaacgtcacccgtcgtccagcccagatgcaatccttcccattgcaactggagaacggccagaccgtggagtgcactgtggccaagtatttcctggacaagtaccgcatgaagctgcgctacccgcatctgccctgcctccaggtgggccaggagcacaagcacacctatctgcccctggaggtgtgccacatcgtcgccggccagcgctgcatcaagaaactgaccgatatgcaaacttcgacgatgatcaaggccaccgcccgctcggctcccgatcgggagcgcgaaatcaacaatctggtgaagcgcgccgactttaacaacgactcctatgtgcaggagttcggcttaaccatctccaattcgatgatggaggtgcgcggacgcgtcctcccaccacccaagctgcagtacggcggacgtgtgtccacgggcatcactggccagcagttgttcccgccgcagaacaaagtgagtctcgcgtcgcccaaccagggtgtttgggatatgcgcggcaagcagttcttcaccggagtggagatccgcatttgggccattgcctgctttgctccgcagcgtactgtgcgcgaggatgcgctgcgcaactttactcagcagctgcagaagatttccaatgacgccggcatgcccattatcggccagccgtgcttctgcaaatatgccaccggaccggatcaggtcgagccgatgttccgctacctgaagatcaccttcccgggactgcaactcgttgtggtagtgcttcccggcaagacacctgtctatgccgaggttaagcgcgtgggcgacactgtcctgggcatggccacccagtgcgtccaggccaagaacgtgaacaagacatcgccgcagacgctgtccaatctctgtctcaagatcaacgtcaagctgggcggcatcaattcgatcctggtgccctccattcggccgaaggtattcaacgagccggttatcttcctgggagcggacgtaactcacccgccggctggcgacaacaagaaaccatcgattgccgcagtcgttgggtccatggatgctcatccgtcccggtatgcggccaccgtgcgagtgcagcagcatcgccaggagatcatccaggagttgagcagcatggtgagggagttgctcatcatgttctacaagtcaacgggcggctacaagccccaccgcatcatactctaccgcgacggcgtctccgaaggccagttcccccacgttctgcagcacgagctgaccgccattcgggaggcgtgcatcaagctggagccggaatatcggccgggcatcacgttcattgtggtgcagaaacgccaccacacgcgtctcttctgtgccgagaagaaggagcagagcggcaagtcgggcaacatacccgccggcaccaccgtcgatgtgggcatcacccatcccaccgagttcgacttctacctatgcagtcaccagggtatccagggcaccagtcgtccctcgcactaccatgtgctctgggacgacaaccactttgactcggacgagctgcagtgcctcacgtaccagctgtgtcacacctatgtgcgctgcacccgatccgtcagtataccagcgccggcgtactatgcccacttggtggccttccgtgccagatatcatcttgttgaaaaggaacacgactcgggcgagggatcgcaccagagcggctgctcagaggatcgcacaccaggtgccatggccagggccatcactgtgcatgcggacaccaagaaggtcatgtactttgcctaa

SEQ ID NO: 11563 - protein, 984 aa, Drosophila ananassae
MSTERELAPGGPAQLHPHTLPLTFPDLQITSAVGIIGKVYESQWTPSPTRPQSPSQAQTSFDTLTSPPAPGSSVNPTAVTSPSAQNVAAGGATVAGAAAAAAQVASALGSTTGSVSAAIATATPAAQPDMPVFTCPRRPNLGREGRPIVLRANHFQVTMPRGYVHHYDINIQPDKCPRKVNREIIETMVHAYSKIFGVLKPVFDGRNNLYTRDPLPIGNERLELEVTLPGEGKDRIFRVTIKWQAQVSLFNLEEALEGRTRQIPYDAILALDVVMRHLPSMTYTPVGRSFFSSPDGYYHPLGGGREVWFGFHQSVRPSQWKMMLNIDVSATAFYKSQPVIDFMCEVLDIRDINEQRKPLTDSQRVKFTKEIKGLKIEITHCGQMRRKYRVCNVTRRPAQMQSFPLQLENGQTVECTVAKYFLDKYRMKLRYPHLPCLQVGQEHKHTYLPLEVCHIVAGQRCIKKLTDMQTSTMIKATARSAPDREREINNLVKRADFNNDSYVQEFGLTISNSMMEVRGRVLPPPKLQYGGRVSTGITGQQLFPPQNKVSLASPNQGVWDMRGKQFFTGVEIRIWAIACFAPQRTVREDALRNFTQQLQKISNDAGMPIIGQPCFCKYATGPDQVEPMFRYLKITFPGLQLVVVVLPGKTPVYAEVKRVGDTVLGMATQCVQAKNVNKTSPQTLSNLCLKINVKLGGINSILVPSIRPKVFNEPVIFLGADVTHPPAGDNKKPSIAAVVGSMDAHPSRYAATVRVQQHRQEIIQELSSMVRELLIMFYKSTGGYKPHRIILYRDGVSEGQFPHVLQHELTAIREACIKLEPEYRPGITFIVVQKRHHTRLFCAEKKEQSGKSGNIPAGTTVDVGITHPTEFDFYLCSHQGIQGTSRPSHYHVLWDDNHFDSDELQCLTYQLCHTYVRCTRSVSIPAPAYYAHLVAFRARYHLVEKEHDSGEGSHQSGCSEDRTPGAMARAITVHADTKKVMYFA

SEQ ID NO: 11564 - DNA, 2904 bp, Drosophila erecta
  CDS (1)..(2904)
atgtccacggagcgtgagctggctcctggtgggccagctcagctccatccgcacacgttgccgctgacttttccggatctccagatgacctccgccgtgggcatcattgggaaagtctacgagtcacagtggaccccctcgcccactcggcctcagagtccctctcaggcgcagactagcttcgacacgctcacatcaccaccagcgcccggctcgtcggtcaatcccaccgccgtcaccagtccaagtgcccagaatgtggccgctggtggagcaactgtggccggtgcagcagcaactgccgcccaagtggcctccgccttgggagccaccaccggcagcgtgacgccagcaattgccaccgccacgccagccacgcagccggatatgcccgtctttacgtgtccacgacgtccaaatctcggacgtgagggtcgcccgattgtgctgcgcgccaatcacttccaggtgacgatgccgcgtggctatgtgcatcactatgacatcaatatacagccggacaagtgcccgcggaaggtgaaccgtgagattatcgagaccatggtgcatgcctacagcaagatcttcggagtgctcaagcctgtgttcgatggtcgcaacaatctgtacacccgcgatcccctgcccattggcaatgagcgtctggagctggaggtgactctacccggcgagggcaaggatcgaatctttcgcgtgacgatcaagtggcaggctcaggtctcgctcttcaatttggaggaagcactcgaaggccgcacccggcagataccctatgatgccattttggcgctcgatgtggtcatgcgtcatctgcccagcatgacgtacacgccagtgggacgcagcttcttcagttccccagagggctactaccatcccctgggtggtggacgcgaggtttggttcggtttccatcagagcgttaggccctcgcagtggaagatgatgctcaatatcgatgtctcggccaccgctttctataaggctcaaccagtcattgacttcatgtgcgaggtgttggacattcgcgacatcaacgagcaacgcaaaccgctcaccgattcgcagcgtgtcaagttcaccaaggagatcaagggtctcaagatcgagatcacccactgcggccagatgcgtcgcaagtatcgtgtgtgcaacgttactcgccgccccgctcagatgcaatcattcccactgcagctggagaacggacagaccgttgagtgcaccgtggccaagtacttcctggacaagtaccgcatgaagctgcgctacccgcacttgccctgcctgcaggtgggtcaagagcacaagcatacttacctgcctttggaggtgtgtaacattgtcgctggacagcggtgcatcaagaagctgaccgatatgcagacgtcgaccatgatcaaggccacggcccgttctgcaccggatcgcgagcgtgaaatcaacaatttggttaagcgcgccgacttcaacaacgattcgtatgtgcaggagtttggcctgaccatctccaattcgatgatggaggtacgtggacgcgtattgccgcctccaaagcttcagtataacaaggtgagcttggcctcgcccaaccagggtgtatgggatatgcgcggcaagcagttcttcactggcgtagagatccgcatctgggccatcgcctgttttgccccacagcgcacggtgcgcgaggatgcgctgcgcaatttcacccagcagctgcagaagatctcaaacgatgccggcatgccgatcattgggcagccgtgcttctgcaagtacgccaccgggccggatcaagtggaacccatgttccgttacctgaagatcaccttcccaggcctgcagctcgtcgtggtggtgctacccggcaagacaccggtgtacgccgaggtgaagcgtgtgggtgacaccgttttgggcatggccacccagtgtgtgcaggcgaagaacgtgaacaagacgtcgccacagacgctctcgaatctgtgtctcaagatcaacgtcaagttgggcggcatcaattcaattctggtgccctcgatccggccaaaggtcttcaatgagccggtcatctttttgggtgccgatgtaacacacccaccagctggcgacaacaagaaaccatcgattgccgccgtcgtcggctccatggatgctcatccatcgcgctatgccgccaccgttcgggtacagcagcaccgacaggagatcatccaggagctgagcagcatggtgcgcgaactgttgatcatgttctacaagtcgacgggcggctacaagccccaccgcatcatactctatcgtgacggagtctccgagggacagttcccacatgtcctgcaacacgagttgaccgccatccgggaggcctgcattaagctggagcccgagtaccggccgggcatcacgtttattgtggtgcagaagcgccatcacacacgactcttctgcgccgaaaagaaggagcagagcggcaagtcgggcaatattcccgcaggcaccaccgtcgatgtgggcatcacacatcccaccgaattcgatttctatctgtgcagccatcagggcatccagggcaccagtcgcccctcgcactaccacgtcctgtgggacgacaatcactttgactcggacgagctgcagtgcctcacgtaccagctatgccacacgtacgtgcgctgcacccgatccgtcagtataccggcgccagcctactacgcccatctggtggccttccgtgccagatatcatctggtggagaaggagcacgattcgggcgagggatcgcaccagagcggctgctcagaggatcgcacgccaggtgccatggcccgggccatcactgtgcacgcggataccaagaaggtcatgtactttgcctaa

SEQ ID NO: 11565 - protein, 967 aa, Drosophila erecta
MSTERELAPGGPAQLHPHTLPLTFPDLQMTSAVGIIGKVYESQWTPSPTRPQSPSQAQTSFDTLTSPPAPGSSVNPTAVTSPSAQNVAAGGATVAGAAATAAQVASALGATTGSVTPAIATATPATQPDMPVFTCPRRPNLGREGRPIVLRANHFQVTMPRGYVHHYDINIQPDKCPRKVNREIIETMVHAYSKIFGVLKPVFDGRNNLYTRDPLPIGNERLELEVTLPGEGKDRIFRVTIKWQAQVSLFNLEEALEGRTRQIPYDAILALDVVMRHLPSMTYTPVGRSFFSSPEGYYHPLGGGREVWFGFHQSVRPSQWKMMLNIDVSATAFYKAQPVIDFMCEVLDIRDINEQRKPLTDSQRVKFTKEIKGLKIEITHCGQMRRKYRVCNVTRRPAQMQSFPLQLENGQTVECTVAKYFLDKYRMKLRYPHLPCLQVGQEHKHTYLPLEVCNIVAGQRCIKKLTDMQTSTMIKATARSAPDREREINNLVKRADFNNDSYVQEFGLTISNSMMEVRGRVLPPPKLQYNKVSLASPNQGVWDMRGKQFFTGVEIRIWAIACFAPQRTVREDALRNFTQQLQKISNDAGMPIIGQPCFCKYATGPDQVEPMFRYLKITFPGLQLVVVVLPGKTPVYAEVKRVGDTVLGMATQCVQAKNVNKTSPQTLSNLCLKINVKLGGINSILVPSIRPKVFNEPVIFLGADVTHPPAGDNKKPSIAAVVGSMDAHPSRYAATVRVQQHRQEIIQELSSMVRELLIMFYKSTGGYKPHRIILYRDGVSEGQFPHVLQHELTAIREACIKLEPEYRPGITFIVVQKRHHTRLFCAEKKEQSGKSGNIPAGTTVDVGITHPTEFDFYLCSHQGIQGTSRPSHYHVLWDDNHFDSDELQCLTYQLCHTYVRCTRSVSIPAPAYYAHLVAFRARYHLVEKEHDSGEGSHQSGCSEDRTPGAMARAITVHADTKKVMYFA

SEQ ID NO: 11566 - DNA, 2973 bp, Drosophila grimshawi
  CDS (1)..(2973)
atgtcaacggagcgggagctggcggggggcccagctcagctccatacgctgccgttgacatttccacccgatttgggcacagcactgcaactgaacacagccgtgggcattattggcaaggtttatgagtcacagtggacaaccccctcgcccacgaggcctcagagcccctctcaggcgcagactagcttcgacacgctcacatcaccaccaacacccggttcatcggtaaatcccaccgccgtgaccagtccaagtgctcagaatgttgctgcgggcggtgctactgtgggtggtgcagcagccgctgcagcggctcaggctgcctccgccttgggctcgacgggcagtgtgacggcagcgattgcagcagctgctgcagcatcgccaaccactcaaccggatatgcccgtgtttacgtgcccccgtcgaccgaatctgggccgggagggcagaccgattgtgctgcgtgcgaatcactttcaggtgacaatgccacggggctatgtgcatcactatgacatcaatatacagccggataagtgtccgcgcaaggtgaatcgcgagatcattgagaccatggtgcatgcctatagcaagatctttggagtgctcaagcccgtctttgatgggcgaaataatttgtatacccgggatccgttgcccattggcaatgagcggctggagctggaggtaacgctgcccggcgagggcaaggatcgcatctttcgggtgacgatcaagtggcaggctcaagtctccctcttcaatctggaggaggcgctcgagggacgcacccgtcaaataccctacgatgccatcttggccctcgatgttgtcatgcgccatttgcccagcatgacgtatacgccggtgggacgcagtttctttagctcacccgatggctactatcatccccttggcggtggtcgtgaggtctggttcggtttccatcagagcgtgagaccctcgcaatggaaaatgatgctcaacattgatgtttcggccactgccttctacaaggctcagcccgtcattgattttatgtgcgaggtgctggacattcgcgacatcaacgagcagcgcaagccgctcaccgattcgcagcgcgtcaagttcaccaaggagattaagggactcaagatcgagattacacactgtggccagatgcgtcgcaagtatcgtgtctgcaatgtgaccaggcgaccagctcaaatgcaatccttcccgctgcagctggagaacggtcagaccgtggagtgcaccgtggccaagtactttttggataagtatcgcatgaagttgcgctatccgcatctgccctgcctgcaggtgggtcaggagcacaagcacacctatctgccgctcgaggtgtgcaacattgttgccggccagcgttgcattaaaaagctgaccgatatgcaaacctcaacgatgattaaggccacggcacgctctgctccggatcgtgagcgcgagattaataatctggtgaaacgggctgatttcaataatgattcatatgtgcaagaattcggcctgaccatttccaactcgatgatggaggtgcgtggacgagttctgccgccacccaagcttcaatatgggggacgtgtctcgtcgggcatcacgggacaacagctctttccgccacagaacaaagtgtcgctggcatcgccaaatcagggcgtttgggatatgcgcggcaagcaattcttcaccggtgtcgagatacgcatctgggcaattgcctgctttgcgccgcagcgcacggtgcgcgaggatgcattgcgtaatttcacccagcagctgcaaaagatctccaacgatgccggcatgccaatcattggtcagccgtgcttctgcaaatatgccacaggaccggatcaggtggagccaatgtttcgttatctgaaaatcaccttccccggcctacaactcgtggtcgttgtgctgcctggcaagacgcccgtctatgcggaggtgaagcgtgttggtgacacggtgctgggcatggccacccaatgtgtccaggcgaagaatgtgaacaagacatcgccacagaccctgtccaatctctgtctgaagatcaatgtgaaactgggcggcattaattccatactggtgccatcgatacgacccaaggtcttcaatgagcccgtcatcttcctcggtgcggatgtcacccatccgccagctggtgataataagaagccatcgattgctgctgttgttggttcgatggatgcgcatccatcgcgttatgcggccacggtgcgagtgcaacagcatcgccaggagatcattcaggagctgagcagcatggtgcgtgaattgctcatcatgttctacaaatccaccggtggctataagccacatcgcatcattctctatcgtgatggtgtctctgagggtcaatttccgcatgtgttgcaacatgaactgaccgccatacgcgaggcatgcatcaaattggagccagaatatcggccgggcattaccttcattgtggtgcagaagcgtcatcatacgcgtctcttctgcgcagagaagaaggagcagagcggcaaatcgggcaatattccagctggcaccacagtcgatgtgggcatcacacatcccacggaattcgatttctatttgtgcagccatcagggcatccagggcaccagtcgcccctcgcactaccatgtgctctgggatgacaatcatttcgattccgatgagctgcagtgcctcacgtatcaactgtgccacacttatgtccgttgcacgcgctccgtcagcatcccggcgccggcatattatgcccatttggttgccttccgcgccagataccatctggttgagaaggagcatgattccggcgagggttcacatcagagcggctcctccgaggatcgcacgcccggagcaatggcccgagccataacggttcatgccgacaccaaaaaggtcatgtactttgcctaa

SEQ ID NO: 11567 - protein, 990 aa, Drosophila grimshawi
MSTERELAGGPAQLHTLPLTFPPDLGTALQLNTAVGIIGKVYESQWTTPSPTRPQSPSQAQTSFDTLTSPPTPGSSVNPTAVTSPSAQNVAAGGATVGGAAAAAAAQAASALGSTGSVTAAIAAAAAASPTTQPDMPVFTCPRRPNLGREGRPIVLRANHFQVTMPRGYVHHYDINIQPDKCPRKVNREIIETMVHAYSKIFGVLKPVFDGRNNLYTRDPLPIGNERLELEVTLPGEGKDRIFRVTIKWQAQVSLFNLEEALEGRTRQIPYDAILALDVVMRHLPSMTYTPVGRSFFSSPDGYYHPLGGGREVWFGFHQSVRPSQWKMMLNIDVSATAFYKAQPVIDFMCEVLDIRDINEQRKPLTDSQRVKFTKEIKGLKIEITHCGQMRRKYRVCNVTRRPAQMQSFPLQLENGQTVECTVAKYFLDKYRMKLRYPHLPCLQVGQEHKHTYLPLEVCNIVAGQRCIKKLTDMQTSTMIKATARSAPDREREINNLVKRADFNNDSYVQEFGLTISNSMMEVRGRVLPPPKLQYGGRVSSGITGQQLFPPQNKVSLASPNQGVWDMRGKQFFTGVEIRIWAIACFAPQRTVREDALRNFTQQLQKISNDAGMPIIGQPCFCKYATGPDQVEPMFRYLKITFPGLQLVVVVLPGKTPVYAEVKRVGDTVLGMATQCVQAKNVNKTSPQTLSNLCLKINVKLGGINSILVPSIRPKVFNEPVIFLGADVTHPPAGDNKKPSIAAVVGSMDAHPSRYAATVRVQQHRQEIIQELSSMVRELLIMFYKSTGGYKPHRIILYRDGVSEGQFPHVLQHELTAIREACIKLEPEYRPGITFIVVQKRHHTRLFCAEKKEQSGKSGNIPAGTTVDVGITHPTEFDFYLCSHQGIQGTSRPSHYHVLWDDNHFDSDELQCLTYQLCHTYVRCTRSVSIPAPAYYAHLVAFRARYHLVEKEHDSGEGSHQSGSSEDRTPGAMARAITVHADTKKVMYFA

SEQ ID NO: 11568 - DNA, 2961 bp, Drosophila mojavensis
  CDS (1)..(2961)
atgtcaacggagcgggagctggctggcggaccagcccagctccatacgctaccgtttcccccagatctgggcacctcattgcaactgaacacagcggtgggcattattggcaaggtttatgagtcacagtggaccacctcctcgcccacgcggcctcagagcccctctcaggcgcagactagcttcgacacgctcacatcaccgccagcgcccggttcttcggtaaatcccaccgctgtgaccagtccgagtgctcagaatgttgctgcagggggtgccacggttggtggtgccgcggctgcggctgctgctcaagtggcgtctgcattgggcaccacgggcgtttcggcggcgattgctgcggcagcggtgtcgcccacaacgcagccagatatgcccgtcttcacgtgcccgcgacgaccaaatctgggaagggagggcaggccgatagtgctgcgtgcgaatcactttcaggtgacaatgccacgcggcttcgtgcatcactatgacatcaatatacagccggacaagtgcccgcgcaaggtgaatcgcgagatcatcgagactatggtgcaggcctacagcaagatctttggggtgctgaagccagtctttgatggacgtaacaatttgtatacacgggatcctctgcccattggcaatgaacgactggagctggaggtaacgctgcccggcgagggcaaggaccgcatctttcgtgtgacgattaagtggcaggcgcaagtgtcgctcttcaatctggaggaggctctggaggggcgcacgcgccaaataccttatgatgctatcttagcgcttgatgtggtcatgcggcatttgcctagcatggcgtatacgccagttggacgcagtttctttagttcaccggacggctactatcatcctttgggtggtggccgcgaagtctggtttggtttccatcagagcgtgcggccatctcagtggaaaatgatgctcaacattgatgtttcggctactgctttctacaaggctcaacctgtcatcgattttatgtgcgaggttttggacattcgcgacattaacgaacagcgcaaaccgctcaccgattcgcagcgcgttaagttcaccaaggaaatcaaaggactcaagattgaaatcacgcactgtggtcaaatgcgtcggaaatatcgcgtctgcaatgtgacccgtcgaccagctcaaatgcaatccttcccactgcaactggagaatggacaaaccgtcgagtgcactgtggccaagtactttttggataagtatcgcatgaagctgcgctacccgcatttgccctgcctgcaggtgggtcaggagcacaagcacacctatctaccacttgaggtgtgcaacattgtggctggacaacgttgcatcaaaaagctgaccgacatgcagacgtcgaccatgatcaaagcgactgcacgctcggcgcctgatcgtgagcgtgagattaacacgctggtgaagcgtgcggacttcaacaatgatccctatgtgcaggagtttgggctaaccatctccaattccatgatggaggtgcgtggccgggttttgccaccaccaaagcttcaatatgggggacgtatgtcgtcggggatcaccggacaacagctattgccgccacagaataaggtgagcctggcatctccgaatcaaggcgtttgggacatgcgtggcaagcagttcttcacgggtgtcgagatcagaatttgggcgattgcctgcttcgcaccacagcgcacagtccgcgaggatgccttgcggaactttacgctgcaactgcaaaagatctccaatgatgctggcatgcccatcattggacagccctgcttctgcaagtatgccacggggcccgatcaagtggagcccatgttccgttatttgaagattactttccctggactacagctggtggttgttgtcctgccgggcaagactccagtctatgccgaggtcaaacgagtgggcgacacggtccttggcatggccacgcagtgtgtccaggccaagaacgtgaacaagacctcgccacagacgctctcgaatctgtgtctcaagatcaatgtgaagctgggcggcattaactcgattctggtgccatccatacgacccaaggtcttcaatgagcccgtcatcttcctgggggccgatgtcacccatcccccggcaggcgacaacaagaaaccatcgatagccgctgtggttggctcaatggatgctcatccctcgcgctatgcggccacggtgcgtgtgcaacagcaccgccaggagatcatacaggagctgagtagcatggtgcgggaattgttgatcatgttctacaaatccaccggcggctataagccgcatcgtatcatactctatcgcgacggcgtctccgagggccagttcccacacgtgctgcaacacgagctgaccgctatacgcgaggcgtgcatcaaattggagccggaatacaggccaggcattacattcattgtcgttcagaagcgccatcacacgcgactcttctgcgccgagaaacgcgagcagagcggcaaatcgggcaatataccagcgggcaccaccgtcgacgttggcatcacccatcccacagagtttgatttctacttgtgcagccatcagggcatccagggcaccagtcgtccctctcactaccatgtgctctgggacgacaaccactttgattccgatgagctgcaatgccttacctatcagctgtgccacacctatgtccgttgcacgcggtctgtgagcatccctgcgccagcctactacgcccatctggttgccttccgagccagataccatctggttgaaaaggagcacgattccggcgaaggatcacatcaaagcggctcatccgaagatcgtacgcccggggccatggcacgcgccataacggttcatgccgacacgaagaaggtcatgtactttgcctaa

SEQ ID NO: 11569 - protein, 986 aa, Drosophila mojavensis
MSTERELAGGPAQLHTLPFPPDLGTSLQLNTAVGIIGKVYESQWTTSSPTRPQSPSQAQTSFDTLTSPPAPGSSVNPTAVTSPSAQNVAAGGATVGGAAAAAAAQVASALGTTGVSAAIAAAAVSPTTQPDMPVFTCPRRPNLGREGRPIVLRANHFQVTMPRGFVHHYDINIQPDKCPRKVNREIIETMVQAYSKIFGVLKPVFDGRNNLYTRDPLPIGNERLELEVTLPGEGKDRIFRVTIKWQAQVSLFNLEEALEGRTRQIPYDAILALDVVMRHLPSMAYTPVGRSFFSSPDGYYHPLGGGREVWFGFHQSVRPSQWKMMLNIDVSATAFYKAQPVIDFMCEVLDIRDINEQRKPLTDSQRVKFTKEIKGLKIEITHCGQMRRKYRVCNVTRRPAQMQSFPLQLENGQTVECTVAKYFLDKYRMKLRYPHLPCLQVGQEHKHTYLPLEVCNIVAGQRCIKKLTDMQTSTMIKATARSAPDREREINTLVKRADFNNDPYVQEFGLTISNSMMEVRGRVLPPPKLQYGGRMSSGITGQQLLPPQNKVSLASPNQGVWDMRGKQFFTGVEIRIWAIACFAPQRTVREDALRNFTLQLQKISNDAGMPIIGQPCFCKYATGPDQVEPMFRYLKITFPGLQLVVVVLPGKTPVYAEVKRVGDTVLGMATQCVQAKNVNKTSPQTLSNLCLKINVKLGGINSILVPSIRPKVFNEPVIFLGADVTHPPAGDNKKPSIAAVVGSMDAHPSRYAATVRVQQHRQEIIQELSSMVRELLIMFYKSTGGYKPHRIILYRDGVSEGQFPHVLQHELTAIREACIKLEPEYRPGITFIVVQKRHHTRLFCAEKREQSGKSGNIPAGTTVDVGITHPTEFDFYLCSHQGIQGTSRPSHYHVLWDDNHFDSDELQCLTYQLCHTYVRCTRSVSIPAPAYYAHLVAFRARYHLVEKEHDSGEGSHQSGSSEDRTPGAMARAITVHADTKKVMYFA

SEQ ID NO: 11570 - DNA, 2958 bp, Drosophila persimilis
  CDS (1)..(2958)
atgtcaacggagcgcgagctggctcctggcgggccagctcagctcctgacgcacacgctgccgttgacatttcccgatctccagatcaacaccaccgtgggcatcattggaaaggtctacgagtcacagtggaccccctcgcccacgcgggctcagagtccctctcaggcgcagactagcttcgaaacgctcacatcaccaccagcgccgggttcttcggtcaatcccaccgctgtaaccagcccaagtgcccagaatgtggcagctgggggtgccactgtgggtgcgacggcctcatcagcagcctcccaggtggcgtccaccctgggaaccacaaccgggactgtgactgctgcgattgccaccgctactccgaccaccaatccggatatgcccgtcttcacatgtccgcgtcgccccaatctgggacgcgagggcaggccgatcgtacttcgagccaatcactttcaggtgacgatgcctcgcggctatgtgcatcattacgatatcaacatacagccggacaagtgtccgcgcaaggtgaatcgcgagattatcgagaccatggtgcaggcgtacagcaagatctttggcgttctgaaacctgtattcgacggacggaacaacctgtacacccgcgatcctctgccgattggcaacgagcgcctcgagctggaggtgacactgcccggcgagggcaaggaccgcatctttcgcgtgacgatcaagtggcaggcccaggtctcgttattcaacctggaggaggctctggagggtcgcacgcgtcaaataccctacgacgccatccttgccctggacgtggtcatgcgacatctgccgagcatgacctatacgccagttggacgcagctttttcagctcgccggatggctattatcatcctctgggtggtggccgtgaggtctggttcggtttccatcaaagcgtgaggccctcgcaatggaaaatgatgctgaacattgatgtctcggccactgctttctacaaggctcaacccgtgattgactttatgtgcgaggtgctggatatacgcgacatcatggagcagcgcaagccgctcacagactcgcagcgggtcaagttcaccaaggagatcaagggactcaagattgagatcacgcactgcggccagatgcggcgcaagtatcgtgtctgcaatgtaacccgccgaccggctcaaatgcaatcattcccactgcagttggagaatggtcaaactgtggagtgcactgtggccaagtatttcctggacaagtatcgaatgaagttgcgctacccccatctgccgtgcctgcaggtgggacaggagcacaagcacacctatctgcccctcgaggtgtgcaacattgtggctggccagcgatgcatcaaaaagctcacggatatgcagacctcgacgatgatcaaggccactgcacgctcggcaccggatcgcgagcgtgagatcaacaacctggtgaagcgtgcggactttaacaatgactcgtatgtccaggagttcggtctggccatctccaattcgatgatggaggtgaggggacgagtgctaccgccgcccaagcttcagtatgggggacgtgtgtccactggcatcaccgggcagcagttgtttccgccccagaataaggtgagccttgcctcgcccaaccaaggtgtctgggacatgcgcggcaagcagttcttcacgggcgtggagatcaggatctgggccattgcctgctttgccccgcagcgaacagtgcgcgaggatgccttgaggaacttcacccagcagctgcagaagatctcaaacgacgccggtatgccgataataggccagccctgcttctgcaaatatgctacggggccggatcaagtggagcctatgttccgatacctgaaaatcaccttcccggggctgcagctcgtagtggttgtgctgcccggcaagaccccggtctatgcggaggtcaagcgcgtgggcgacaccgtcttgggcatggccacccagtgtgtacaggcgaagaacgtgaacaagacatcgccccagacgctgtccaatctgtgtctgaagatcaacgtcaagctgggcggcatcaattcgattctggtgccctccatccggcccaaggtatttaacgagcccgttatcttcctgggagctgacgtcacacacccaccagccggcgataacaagaagccatcgattgctgctgttgttggttcaatggacgcccatccgtcgcgatatgcggccactgtgcgagtacagcaacaccgccaggagatcatccaggagctgagcagcatggtgcgcgagctactgattatgttctacaagtcgacgggtggctacaaaccccaccgaatcatcctgtaccgggacggcgtctccgagggacagttcccgcatgtgctgcagcacgagttgaccgccataagggaggcgtgcatcaagctagagcccgaatacaggccaggcatcacattcatcgtagtccagaagcgccatcacacgcgactcttctgcgccgagaagaaggagcagagcggcaagtctggcaatataccggccggcaccaccgtcgacgtgggcatcacgcatccaaccgaatttgatttctatctgtgcagtcatcagggcattcaaggcaccagccggccctcgcactaccacgtgctctgggatgacaatcactttgactccgacgagcttcagtgcctcacgtatcagctgtgccacacctatgtgaggtgcacgcgctccgtcagtataccagctccagcctactatgcccacttggtggcttttcgtgcaaggtatcatctggtggagaaggagcacgactccggcgagggctcacaccagagcggatgctcagaggatcggacaccgggagctatggccagagccatcacggtccatgcggacacgaagaaggtcatgtactttgcctaa

SEQ ID NO: 11571 - protein, 985 aa, Drosophila persimilis
MSTERELAPGGPAQLLTHTLPLTFPDLQINTTVGIIGKVYESQWTPSPTRAQSPSQAQTSFETLTSPPAPGSSVNPTAVTSPSAQNVAAGGATVGATASSAASQVASTLGTTTGTVTAAIATATPTTNPDMPVFTCPRRPNLGREGRPIVLRANHFQVTMPRGYVHHYDINIQPDKCPRKVNREIIETMVQAYSKIFGVLKPVFDGRNNLYTRDPLPIGNERLELEVTLPGEGKDRIFRVTIKWQAQVSLFNLEEALEGRTRQIPYDAILALDVVMRHLPSMTYTPVGRSFFSSPDGYYHPLGGGREVWFGFHQSVRPSQWKMMLNIDVSATAFYKAQPVIDFMCEVLDIRDIMEQRKPLTDSQRVKFTKEIKGLKIEITHCGQMRRKYRVCNVTRRPAQMQSFPLQLENGQTVECTVAKYFLDKYRMKLRYPHLPCLQVGQEHKHTYLPLEVCNIVAGQRCIKKLTDMQTSTMIKATARSAPDREREINNLVKRADFNNDSYVQEFGLAISNSMMEVRGRVLPPPKLQYGGRVSTGITGQQLFPPQNKVSLASPNQGVWDMRGKQFFTGVEIRIWAIACFAPQRTVREDALRNFTQQLQKISNDAGMPIIGQPCFCKYATGPDQVEPMFRYLKITFPGLQLVVVVLPGKTPVYAEVKRVGDTVLGMATQCVQAKNVNKTSPQTLSNLCLKINVKLGGINSILVPSIRPKVFNEPVIFLGADVTHPPAGDNKKPSIAAVVGSMDAHPSRYAATVRVQQHRQEIIQELSSMVRELLIMFYKSTGGYKPHRIILYRDGVSEGQFPHVLQHELTAIREACIKLEPEYRPGITFIVVQKRHHTRLFCAEKKEQSGKSGNIPAGTTVDVGITHPTEFDFYLCSHQGIQGTSRPSHYHVLWDDNHFDSDELQCLTYQLCHTYVRCTRSVSIPAPAYYAHLVAFRARYHLVEKEHDSGEGSHQSGCSEDRTPGAMARAITVHADTKKVMYFA

SEQ ID NO: 11572 - DNA, 2904 bp, Drosophila sechellia
  CDS (1)..(2904)
atgtccacggagcgtgagctggctcccggtgggccagctcagctccatccgcacacgctgccgctgacttttccggatctccagatgacctccaccgtgggcatcattgggaaagtctacgagtcacagtggaccccctcgcccactcggcctcagagtccctctcaggcgcagactagcttcgacacgctcacatcaccaccagcgcccggctcgtcggtcaatcccaccgccgtcaccagcccaagtgcccagaatgtggccgctggtggagcaactgtggccggtgcagcagcaactgccgcccaggtggcctccgccttgggtgccaccaccggcagcgtgacgccagcaattgccaccgccacgccagccacgcagccggatatgccagtctttacgtgtccacgtcgcccgaatctcggacgagagggtcgcccgattgtgctgcgcgccaatcacttccaggtgacaatgccgcgtggctatgtgcatcactatgacatcaatatacagccggacaagtgtccgcgaaaggtgaaccgtgagattatcgagaccatggtgcatgcctatagcaagatcttcggagtgctcaagccggtgttcgatggtcgcaacaatctgtacacccgtgatcccctgcccattggcaacgagcgtctggaactggaggttactctacccggcgagggcaaggatcgaatctttcgcgtgacgatcaagtggcaggctcaggtctcgctcttcaatttggaggaagctctcgaaggccgcacgcggcagataccttatgatgccattttggcgctcgatgtggtcatgcgccatctgcccagcatgacgtacacgccagtggggcgcagcttcttcagttccccggagggttactaccatcccctgggtggtggacgcgaggtttggttcggtttccatcagagcgtaaggccctcgcagtggaagatgatgctcaatatcgatgtctcggccaccgctttctacaaggctcaaccagtcattgacttcatgtgcgaggtgctggacattcgcgacatcaacgagcagcgaaaaccgctcaccgattcgcagcgcgtcaagttcaccaaggagatcaagggtctcaagatcgagatcacccactgcggccagatgcgtcgcaagtatcgtgtgtgcaacgtcactcgccgccccgctcagatgcaatcattcccactgcagctggagaacggacagaccgtagagtgcaccgtggccaagtacttcctggacaagtaccgcatgaagttgcgttacccgcacttgccctgcctgcaggttggccaagagcacaagcacacttacctgcctctggaggtatgcaacattgtggccggacagcggtgcatcaagaagctgaccgatatgcagacgtcgaccatgatcaaggccacagctcgttctgctccggatcgcgagcgtgagattaacaacttggttaagcgcgccgacttcaacaacgattcgtatgtgcaggagtttggcctgaccatctccaattcgatgatggaggtacgaggacgcgtcttgccgcctcccaagcttcagtataacaaggtgagcttggcctcgcccaaccagggtgtatgggatatgcgcggcaagcagttcttcactggcgtcgagatccgcatctgggccatcgcctgtttcgccccacagcgcacggtgcgcgaggatgcgctgcgtaatttcacccagcagctgcagaagatctcaaacgatgccggcatgccgataattggacagccgtgcttctgcaagtacgccaccgggccggatcaagtggaacccatgttccgttacctgaagatcaccttccccggcctgcagctcgtcgtggttgtgctgcccggcaagacaccggtgtacgccgaggtgaagcgtgtgggtgacaccgttctgggcatggccacccagtgtgtgcaggccaagaacgtgaacaagacgtcgccacaaacgctctctaatctgtgtctgaagatcaacgtcaagttgggcggcatcaattcaattctggtcccctctattcggccaaaggtcttcaatgagccggtcatctttttgggtgccgatgtgacacacccaccagctggcgacaacaagaaaccatcgattgccgccgtcgtgggctccatggatgcccatccatcgcgctatgccgccaccgttcgcgtacagcagcaccgacaggagatcatccaggagctgagcagcatggtgcgcgagctgttgatcatgttctacaagtcgacgggcggctacaagccccaccgcatcatactctatcgtgacggagtctccgagggacaattcccacatgtcctgcaacacgaactgaccgccattcgggaggcctgcattaagctggagccagaatatcggccgggcatcacattcattgtggtgcagaagcgccatcacacacgactcttctgcgcggagaagaaggagcagagcggcaagtcgggcaatattcccgcaggcaccaccgtcgatgtgggcatcacacatcccaccgaattcgatttctatctgtgcagccatcagggcattcagggcaccagtcgcccctcgcactaccacgttctgtgggacgacaatcactttgactcggacgagctgcagtgcctcacgtatcagctatgccatacgtacgtgcgctgcacccgatccgtcagtataccggcgccagcctactacgcccatttagtggccttccgtgccagataccatctggtggagaaggagcacgattcgggcgagggctcgcaccagagcggctgctcagaggatcgcacgccaggtgccatggccagggccatcactgtgcacgcggataccaagaaggtcatgtactttgcctaa

SEQ ID NO: 11573 - protein, 967 aa, Drosophila sechellia
MSTERELAPGGPAQLHPHTLPLTFPDLQMTSTVGIIGKVYESQWTPSPTRPQSPSQAQTSFDTLTSPPAPGSSVNPTAVTSPSAQNVAAGGATVAGAAATAAQVASALGATTGSVTPAIATATPATQPDMPVFTCPRRPNLGREGRPIVLRANHFQVTMPRGYVHHYDINIQPDKCPRKVNREIIETMVHAYSKIFGVLKPVFDGRNNLYTRDPLPIGNERLELEVTLPGEGKDRIFRVTIKWQAQVSLFNLEEALEGRTRQIPYDAILALDVVMRHLPSMTYTPVGRSFFSSPEGYYHPLGGGREVWFGFHQSVRPSQWKMMLNIDVSATAFYKAQPVIDFMCEVLDIRDINEQRKPLTDSQRVKFTKEIKGLKIEITHCGQMRRKYRVCNVTRRPAQMQSFPLQLENGQTVECTVAKYFLDKYRMKLRYPHLPCLQVGQEHKHTYLPLEVCNIVAGQRCIKKLTDMQTSTMIKATARSAPDREREINNLVKRADFNNDSYVQEFGLTISNSMMEVRGRVLPPPKLQYNKVSLASPNQGVWDMRGKQFFTGVEIRIWAIACFAPQRTVREDALRNFTQQLQKISNDAGMPIIGQPCFCKYATGPDQVEPMFRYLKITFPGLQLVVVVLPGKTPVYAEVKRVGDTVLGMATQCVQAKNVNKTSPQTLSNLCLKINVKLGGINSILVPSIRPKVFNEPVIFLGADVTHPPAGDNKKPSIAAVVGSMDAHPSRYAATVRVQQHRQEIIQELSSMVRELLIMFYKSTGGYKPHRIILYRDGVSEGQFPHVLQHELTAIREACIKLEPEYRPGITFIVVQKRHHTRLFCAEKKEQSGKSGNIPAGTTVDVGITHPTEFDFYLCSHQGIQGTSRPSHYHVLWDDNHFDSDELQCLTYQLCHTYVRCTRSVSIPAPAYYAHLVAFRARYHLVEKEHDSGEGSHQSGCSEDRTPGAMARAITVHADTKKVMYFA

SEQ ID NO: 11574 - DNA, 2970 bp, Drosophila virilis
  CDS (1)..(2970)
atgtcaacggagcgggagctggccggcgggccagctcagctccatacgctgccgttgacattttcacccgatttgggcactgcgctgcagctgaactctgcggtgggcattatgggcaaggtttatgagtcacagtggaccaccccctcgcccacgcggcctcagagcccctctcaggcgcagactagcttcgacacgctcacatcaccaccagcgcccggttcatcggtaaatcccaccgctgtgaccagtccgagtgctcagaatgttgctgccggcggtgccaccgttggtggtgcagctgctgcagccgctgctcaggttgcgtctgctcttggctccacggccagcgtatcggcagccattgccgctgcagcggcatcgcccactacgcagccggatatgccggtattcacgtgcccgcgacgaccgaatctgggccgggagggcagaccaattgtgctccgtgcgaatcactttcaggtgacaatgccgcgtggttttgtgcaccattacgacatcaatatacagccggacaagtgtccgcgcaaggtgaatcgcgagatcattgagaccatggtgcatgcgtatagcaagatctttggggtgctcaagcccgtgtttgatggacgcaataatttgtatactcgcgatccgctgcccattggcaatgagcgtctggagctggaggtgacgctgcccggcgagggcaaggatcgcatcttccgtgtgacgatcaaatggcaggcgcaggtgtccctttttaatctggaggaggcgctcgaggggcgtactcgccaaataccctacgatgccatattggcactcgatgtggtcatgcgtcacttgcccagcatgacgtacacgcccgtgggacgcagtttctttagctcacccgatggctattatcatcctctgggtggcggtcgtgaggtctggtttggtttccatcagagcgtacggccatcgcagtggaaaatgatgctcaacattgatgtttcggctaccgccttctacaaggcacaaccggtcattgattttatgtgcgaggtcctggacatacgcgacatcaatgagcagcgcaaaccgctcaccgattcgcagcgcgtcaagttcaccaaggagatcaagggactcaagattgagattacgcactgtggccaaatgcgtcgcaaatatcgcgtctgcaacgttacacggcgaccagctcaaatgcaatccttcccgctgcagctagaaaacgggcagactgtggagtgcaccgtggccaagtactttttggataagtatcgcatgaagctgcgctatccgcatttgccctgcctgcaggtgggtcaggagcacaagcacacctacctcccgctcgaggtgtgcaacatagtggccggccagcgttgcatcaagaagctcaccgatatgcagacatcaacaatgatcaaggccaccgcacgctcggcaccagatcgcgaacgcgagattaacaatctggtcaagcgtgctgacttcaacaatgactcgtatgtccaggagttcggtctgaccatctccaattctatgatggaagtgcgcggccgagtgttaccgccaccaaagctacaatatgggggacgtgtctcgtcgggcataaccggacagcagctgttgccgccacagaacaaggtcagcctggcgtcgcccaatcagggcgtttgggatatgcgtggcaagcagttcttcacgggcgtcgagatacgcatttgggcaattgcctgctttgcgccacagcgcacagtgcgcgaggatgcgttgcgtaactttacactgcaactgcaaaagatctccaatgatgctggaatgcccatcattgggcaaccttgcttctgcaagtatgctactggaccggatcaggtggagcccatgtttcgttatctgaagataaccttccccgggctgcagcttgtcgttgtcgtgctgccgggtaaaacgcccgtctatgcggaggtgaagcgtgtgggcgacacggtgctgggcatggccacgcagtgtgtgcaggccaagaatgtgaacaagacatcgccacagacgctctccaatctgtgcctcaagatcaatgttaagctgggtggcattaactccattttggtgccctcgatacgacccaaggtcttcaatgagcccgtcattttcctgggcgccgatgtcacccatccgccggctggtgacaacaagaagccatccatagccgctgttgttggctcgatggatgcgcatccgtcgcgttatgcggccacggtgcgcgttcagcagcatcgccaggagataatacaggagctaagcagcatggtgcgcgaactgcttatcatgttctacaaatccaccggtggctataagccgcatcgcatcatactctatcgcgacggcgtctccgagggtcaattcccccatgtgctgcagcacgagctgaccgccatacgcgaggcatgcatcaaattggagccagagtaccgaccgggcatcacatttattgtcgtacagaagcgtcatcatacgcgactcttctgcgccgagaagagggagcagagtggcaaatcgggcaacatacccgccggcaccaccgtcgacgttggcatcacacatcccacggagtttgatttctatttgtgcagccatcagggcattcagggcaccagtcgcccctcccactatcatgtactctgggatgataatcactttgattccgatgagctgcaatgcctcacctatcaactgtgccacacctatgtgcgctgcacgcgctctgtcagcatcccagcgccggcctactatgcgcatttggttgccttccgtgccagatatcatctggtcgaaaaggagcacgattccggcgagggatcgcatcagagcggctcctccgaggatcgcacgcccggagccatggcacgcgctataacggttcatgccgataccaaaaaggtcatgtactttgcctaa

SEQ ID NO: 11575 - protein, 989 aa, Drosophila virilis
MSTERELAGGPAQLHTLPLTFSPDLGTALQLNSAVGIMGKVYESQWTTPSPTRPQSPSQAQTSFDTLTSPPAPGSSVNPTAVTSPSAQNVAAGGATVGGAAAAAAAQVASALGSTASVSAAIAAAAASPTTQPDMPVFTCPRRPNLGREGRPIVLRANHFQVTMPRGFVHHYDINIQPDKCPRKVNREIIETMVHAYSKIFGVLKPVFDGRNNLYTRDPLPIGNERLELEVTLPGEGKDRIFRVTIKWQAQVSLFNLEEALEGRTRQIPYDAILALDVVMRHLPSMTYTPVGRSFFSSPDGYYHPLGGGREVWFGFHQSVRPSQWKMMLNIDVSATAFYKAQPVIDFMCEVLDIRDINEQRKPLTDSQRVKFTKEIKGLKIEITHCGQMRRKYRVCNVTRRPAQMQSFPLQLENGQTVECTVAKYFLDKYRMKLRYPHLPCLQVGQEHKHTYLPLEVCNIVAGQRCIKKLTDMQTSTMIKATARSAPDREREINNLVKRADFNNDSYVQEFGLTISNSMMEVRGRVLPPPKLQYGGRVSSGITGQQLLPPQNKVSLASPNQGVWDMRGKQFFTGVEIRIWAIACFAPQRTVREDALRNFTLQLQKISNDAGMPIIGQPCFCKYATGPDQVEPMFRYLKITFPGLQLVVVVLPGKTPVYAEVKRVGDTVLGMATQCVQAKNVNKTSPQTLSNLCLKINVKLGGINSILVPSIRPKVFNEPVIFLGADVTHPPAGDNKKPSIAAVVGSMDAHPSRYAATVRVQQHRQEIIQELSSMVRELLIMFYKSTGGYKPHRIILYRDGVSEGQFPHVLQHELTAIREACIKLEPEYRPGITFIVVQKRHHTRLFCAEKREQSGKSGNIPAGTTVDVGITHPTEFDFYLCSHQGIQGTSRPSHYHVLWDDNHFDSDELQCLTYQLCHTYVRCTRSVSIPAPAYYAHLVAFRARYHLVEKEHDSGEGSHQSGSSEDRTPGAMARAITVHADTKKVMYFA

SEQ ID NO: 11576 - DNA, 2958 bp, Drosophila willistoni
  CDS (1)..(2958)
atgtcaacggagcgggagctggcacctggtgggccagctcagctccatacgcatacgctgccgttgacatttcccgatctccagctgagctctaccgtgggcataattggcaaagtgtatgagtcacagtggaccccctcgcccacgcggcctcagagtccctctcaggcgcagactagcttcgacacgctcacatcaccatcagcacctgggtcatctgttaatcccaccgctgtgaccagtccgagtgctcagaatgttgctgccggcggtgccacagtgggtggtgcagctgctgcggcagctgctcaagttgcctccgcattgggtggcaccacaacgaccagtgtatcggctgccatagccgctacagcaactcctcaaccggatatgccagtttttacgtgcccacgtcgtcccaatttgggacgcgaaggacggcccattgtactacgtgccaatcatttccaggtgactatgccgcgtggctatgtccatcattatgatatcaatatccaaccggataaatgtccacgcaaagtgaatcgtgagattattgagacaatggtgcacgcatatagcaagatatttggtgtccttaaaccagtattcgatggacgtaacaatctatatacacgtgatccgttgcccattggtaatgagcgcctggaattggaggttactctgcccggtgagggcaaagatcgtatcttccgggtgaccatcaagtggcaagctcaagtctcactcttcaatctggaagaggctttagagggacgaacacgtcaaattccgtatgatgccattttagctctcgatgtggttatgcgtcatttgccaagcatgacctatacaccagttggtcggagtttctttagctcacccgatggctattatcatcccttgggtggtggtcgtgaggtctggtttggtttccatcaaagtgtcaggccatcgcaatggaaaatgatgctcaatatagatgtttcggctacggctttctataaggctcaacccgtcattgatttcatgtgcgaagtcttggatatacgtgacataaacgagcaacgtaaacctctgaccgattcgcagcgtgttaaattcaccaaggagatcaagggactcaaaattgagattactcattgtggttcaatgcgacgcaaatatcgcgtttgtaatgttacccgtcgtccagcacaaatgcaatccttcccactgcagctcgataatggtcagactgtggaatgtactgtggccaaatatttcttggataaatatcgcatgaaattacgttatccacatttgccctgccttcaggtgggccaagagcacaagcacacatatctacccttggaggtgtgcaacattgtcgccggacagagatgcattaagaaattaaccgatatgcaaacatcgaccatgatcaaggccactgcacgctcggctcccgatcgtgagcgtgagattaataatctggtgaaacgtgccgatttcaataatgattcgtatgtccaggagtttggtctaaccatatccaattcgatgatggaagtccgtggtcgtgtcttgccgccaccaaaacttcaatatgggggacgtgtgtccactgggattacgggtcagcaattgttcccaccgcaaaataaggttagccttgcgtcgcccaatcaaggtgtttgggatatgcgaggcaaacaattcttcactggcgtcgagatacgcatatgggccattgcctgttttgctccacagcgtacagtgcgcgaggatgcgttgagaaattttacccaacagctgcagaagatctccaatgatgcgggcatgccgataattggccaaccatgcttctgtaaatatgccactgggccagatcaggtggaaccaatgttccgttacctgaagataacattcccgggacttcaattggtggtcgttgtcttgccaggcaagactcccgtctatgctgaggtgaaacgtgtcggtgacactgtcttgggcatggccacacagtgtgtgcaggccaagaatgtgaataagacgtcaccgcaaacattgtccaatctatgtctcaagatcaatgttaaattgggtggcatcaattcgatactggtaccctcaatacgtccaaaggtcttcaatgagcccgtcatattcctgggtgccgatgttacacacccgccagctggcgacaacaagaagccatcgatagccgccgttgtcggttccatggatggccatccgtcacgctatgcggccaccgtacgcgtccaacaacatcgccaggagattatccaagagttgagcagcatggtgcgtgagcttctcattatgttctataaatccaccggtggctataagccacatcgtattatactctatcgcgatggcgtatccgaaggacaatttccacacgttctgcagcatgaattgacggccattcgggaggcttgcattaaactggaacccgattatcgtcccggcatcacattcattgtggtccagaaacgtcatcacacacgcctcttctgtgccgagaaacgggagcagagtggcaaatcgggcaatatcccagcaggcaccacagtcgatgtgggcatcacccatccaaccgaattcgatttctatttgtgcagtcatcaaggcattcaaggcaccagtcggccatcccactatcatgtcctctgggatgacaatcatttcgattcggatgagctgcaatgccttacatatcaattgtgtcacacttatgtgcgttgcactcgatcggttagcatccctgctccggcctactatgcccatttggtggctttccgtgccagataccatctggttgaaaaagagcatgattctggcgaaggatcacatcagagtggctgctcagaggatcgtacaccaggagccatggccagggccataactgtccacgctgacaccaagaaggtcatgtactttgcctaa

SEQ ID NO: 11577 - protein, 985 aa, Drosophila willistoni
MSTERELAPGGPAQLHTHTLPLTFPDLQLSSTVGIIGKVYESQWTPSPTRPQSPSQAQTSFDTLTSPSAPGSSVNPTAVTSPSAQNVAAGGATVGGAAAAAAAQVASALGGTTTTSVSAAIAATATPQPDMPVFTCPRRPNLGREGRPIVLRANHFQVTMPRGYVHHYDINIQPDKCPRKVNREIIETMVHAYSKIFGVLKPVFDGRNNLYTRDPLPIGNERLELEVTLPGEGKDRIFRVTIKWQAQVSLFNLEEALEGRTRQIPYDAILALDVVMRHLPSMTYTPVGRSFFSSPDGYYHPLGGGREVWFGFHQSVRPSQWKMMLNIDVSATAFYKAQPVIDFMCEVLDIRDINEQRKPLTDSQRVKFTKEIKGLKIEITHCGSMRRKYRVCNVTRRPAQMQSFPLQLDNGQTVECTVAKYFLDKYRMKLRYPHLPCLQVGQEHKHTYLPLEVCNIVAGQRCIKKLTDMQTSTMIKATARSAPDREREINNLVKRADFNNDSYVQEFGLTISNSMMEVRGRVLPPPKLQYGGRVSTGITGQQLFPPQNKVSLASPNQGVWDMRGKQFFTGVEIRIWAIACFAPQRTVREDALRNFTQQLQKISNDAGMPIIGQPCFCKYATGPDQVEPMFRYLKITFPGLQLVVVVLPGKTPVYAEVKRVGDTVLGMATQCVQAKNVNKTSPQTLSNLCLKINVKLGGINSILVPSIRPKVFNEPVIFLGADVTHPPAGDNKKPSIAAVVGSMDGHPSRYAATVRVQQHRQEIIQELSSMVRELLIMFYKSTGGYKPHRIILYRDGVSEGQFPHVLQHELTAIREACIKLEPDYRPGITFIVVQKRHHTRLFCAEKREQSGKSGNIPAGTTVDVGITHPTEFDFYLCSHQGIQGTSRPSHYHVLWDDNHFDSDELQCLTYQLCHTYVRCTRSVSIPAPAYYAHLVAFRARYHLVEKEHDSGEGSHQSGCSEDRTPGAMARAITVHADTKKVMYFA

SEQ ID NO: 11578 - DNA, 2529 bp, Schizosaccharomyces japonicus yFS275
  CDS (1)..(2529)
atgaaacccaaaacagatcttgttttgcgtagcaactatgataaatactcaaaggatggttacggtactattggaagacccatcactttattgtccaacttttacagaatcgagaaccttcccaatgataccatttatcaatatcatgttgtaattggagacggtacacgtgttcctagaaagcttgtaaacaagatttggaattctgaggatgtgaagaagtttttgaaaaagtcttggaaaaactgtgtgtttgatggacgcagtcttttattctccaaggacaagattgaggatggagcaacggacgttgtcgtggatcctgaccgtcctgaacgaaaagtggctttcgccattcaaagaacaagtaacatcaacttggaaacggtgactcaatttgtacaatctcgctacagtcttgatccccaagttttgggaggtattatgttcctcgatttactgttaaagaagacacctagcgaaactttgtatggcttcaaccgctccttctttacgggaaatcgtccttatcaacttggcggcggtttggatgcctggaagggtttctatcaatctattcgacctggacagggttttatgaccgtcaatattgatgtttgtactagcgctttctggcgtgaagattctttacttcgtgttttgcttgactataccaatcgtcatcatccaaatgatttggagagaatgcaacttgcggcaatcggtcgtagattccgtcttcttaaggtcacatgtcaacatcgtaacaatgccggtactgcattgagcaagaaacagtattctattgaacgtttctctagcggcagcgccttggatgaaactttcctacgtcgtgtacctaattctgacaaagaggaacgcatctctgttgctgattactttttggagcaccataatgtccggttggaatttcctaacctgccttgtgccatcattaagaatggcgctaagctgccacttgaactgtgttacattgtgaagggtcaacgctacagcgcaaaactgaatagtaaccaaactgcacaaatgattcgttttgcttgtcagcgtcctcatgagcgtgtcaaggatattgaacaatttgttcattcgtcagcatgggacaaggatcccaacttgaaggaatatggcatgagaatttcacgaaacatgcttgatgtacctgcacgaattcttgatgcaccccgcattatgtatcatgatgattatgaacatcctcgtgacggtcgttggaaccttcgaggaaagcgattccttatcactcccgacagacccgtacgttcttgggcagtggtttgtttcttgcccacaagaattctgcccaacaataaaattgagaatttcttgagaacgtatgtgaatacccttactggtttgggaatcagttttgagtgcaagaatcctcgcatttatcgtcaagatcctcgtggtaatttggaaggtcttttaggagacgtgattaagaagactgccgactttcacagggccactcctgactacttgttcttcattctggattctaattcacctgagccgtatgcgacaattaaacgactttgtaataccaagtttggtattcctagtcaatgtgctttaagaaagcatattgaaggcgcaaagcctcagtattgtgcgaacttgggtatgaaggtgaacgcgaaactcggaggcgttaatgttcaccttgagcccaagtcttttccacttggaaacatccctaccattatcctcggcggtgatgtgtatcaccctgctagaggaggctctggtgcttccattggatcaatggttggcagtattgatcttcatggctgtaaatatacagccatgtcccgcgctcaaaaccgcaaccaggaaatgattcaaggaatgaaagacatggttgtctacttcttacaaggtttccgccatatcacgaagaaggaacctgcacaaattatttatttccgtgatggcgtttctgacggtcaatttaagcaagtcgttgatgaggagcttgcggaaattaagcaagcctgctactttctctctccaaagtacaagcctagaattttagtatgttctacgcaaaagcgtcatcacgctcgtttcttcgttaaaaaacctcaagatggtgaccgtaatggtaatcctaagcctggtactattgtggaaaaggtggttacacatccttttgagtacgacttttaccttgtgtcacatccttctttgcaaggtgtttcggtgcccattcattatactgtcttgtatgatgaaattaaaatgcctcctgatcaattccagtcattgtgctacaacttgtgctatgtctatgcccgtgcgacaactgctgtctctcttgtgccacctgtttactatgctcacttgcttagcaacatggctcgtttccaagatgatactgctaaagatgatgccagcagtgttgcctctggagccacggaacctgaagaggtgaaacccttaagaaaggttgctccttcgctaaagacgaagatgtggttcatgtga

SEQ ID NO: 11579 - protein, 842 aa, Schizosaccharomyces japonicus yFS275
MKPKTDLVLRSNYDKYSKDGYGTIGRPITLLSNFYRIENLPNDTIYQYHVVIGDGTRVPRKLVNKIWNSEDVKKFLKKSWKNCVFDGRSLLFSKDKIEDGATDVVVDPDRPERKVAFAIQRTSNINLETVTQFVQSRYSLDPQVLGGIMFLDLLLKKTPSETLYGFNRSFFTGNRPYQLGGGLDAWKGFYQSIRPGQGFMTVNIDVCTSAFWREDSLLRVLLDYTNRHHPNDLERMQLAAIGRRFRLLKVTCQHRNNAGTALSKKQYSIERFSSGSALDETFLRRVPNSDKEERISVADYFLEHHNVRLEFPNLPCAIIKNGAKLPLELCYIVKGQRYSAKLNSNQTAQMIRFACQRPHERVKDIEQFVHSSAWDKDPNLKEYGMRISRNMLDVPARILDAPRIMYHDDYEHPRDGRWNLRGKRFLITPDRPVRSWAVVCFLPTRILPNNKIENFLRTYVNTLTGLGISFECKNPRIYRQDPRGNLEGLLGDVIKKTADFHRATPDYLFFILDSNSPEPYATIKRLCNTKFGIPSQCALRKHIEGAKPQYCANLGMKVNAKLGGVNVHLEPKSFPLGNIPTIILGGDVYHPARGGSGASIGSMVGSIDLHGCKYTAMSRAQNRNQEMIQGMKDMVVYFLQGFRHITKKEPAQIIYFRDGVSDGQFKQVVDEELAEIKQACYFLSPKYKPRILVCSTQKRHHARFFVKKPQDGDRNGNPKPGTIVEKVVTHPFEYDFYLVSHPSLQGVSVPIHYTVLYDEIKMPPDQFQSLCYNLCYVYARATTAVSLVPPVYYAHLLSNMARFQDDTAKDDASSVASGATEPEEVKPLRKVAPSLKTKMWFM

SEQ ID NO: 11580 - DNA, 2502 bp, Branchiostoma floridae
  CDS (1)..(2502)
atggacctgttccgttgcccccgacgacccgacatcggtaaccacgggcgaaggatcctcctgagagccaatcacttcaaagtgtcgatgccgaaaggcgatatccaccactacgatgtcaacatcatgccggataaatgtcctagaagagttaacagagaaatcatagaaaagatggtccaagcctacaaccgcatcttcggtgaccttcgacctgtcttcgatgggcggaaaaatctgtacacacgggacccgctaccaatcggaactgagaaggtggagctggatgtgacgttgccaggcgacggggggaaggatcgtcacttcaaagtgtccatcaagtgggttgccaaggtgagcctgtacacgctggagcaggcgcttgagggccgcctcgcacagatccccttcgaggccatccaggccctcgacgtcgtcatgcgacacctgccatccatgacgtacacccctgtaggtcgctcgttcttctcgtcccccgaaggttacagccacccgctgggcgggggtcgcgaggtctggttcgggtttcaccagagcgtccggccgtcccagtggaaaatgatgctcaacatagatgtttcagccacagcgttctacaaggcccagccagttatagagttcatgtgtgaagttctcgacatccgagacatcaacgaacagagacggccgctaaccgactctcagagagtcaagttcaccaaggaaattaaagacccgcacagacacaaacgtaagtaccgcgtctgtaacgtcactcggagacccgcacagacacaaacgttcccactgcagctggaggatggcaggacggtggagtgtaccgtggcgaaatacttcttagagagacacaagagaaaactggagtttccccacctcccctgtctacaggtgggacaggagcagaaacacacctaccttcctttggaggtctgtaacattgttgccgggcaacgctgcatcaagaagctgacagacatgcagacctccaccatgattaaggctacagctcggtccgcacccgacagagaaaaggaaatcatcaaattgatgcagaaagcgaacttcaactccgacccctacgtccgagacttcgggatcaacatctccacagacatggcagagatcgagggcagagttctggacccgcccatgcttcagtatggaggcaggacgcgagcgacggtagtaccgaaccagggcgtgtgggacatgcgagggaagcagttccacactggcatagagatccgagtctgggccatggcgtgcttcgctccgcagaggcagtgcagtgagcaggcgctcaggaatttcacgcagtctctccagcgtatctccaacgatgctggcatgccaatcctgggccagccctgcttctgtaagtacgccaccggcgctgaccaggtcgagaagatgttccgatacctgaagaacaccttccagggcctgcagcttattctagtggtgctgccgggaaaaacacctgtttatgcggaggtgaagagagtgggtgacacgttgctaggcgtggccacgcagtgcgtccaggtgaagaacgtcatcaagacgtctccccagacgctgtccaacctgtgcctcaagatcaacgtcaaactgggaggggtcaacaacatcctggtcccccacatacgtccgcgggtgttccgtgagccggtgatcttcctcggggctgacgtgacccaccctccggcgggcgacgaaaagaaaccgtccatcgcagcggttgtaggcagcatggacgcccatccgagccggtacgcggcgaccgttcggatccagacgcaccgtcaggagatcattgccgacctggcctccatggtgcgggagctgctgatccagttctacaagtccacccgcttcaaacccacacgcatcatcatgtaccgcgacggggtcagcgagggacagttccaacaggtgttgtggcacgagctgcgggcgatccgagaggcgtgcgtgcggctcgagattggctacgagcctggcgtgacgttcatcgtggtgcagaaacgacatcatacgcgactcttctgctccgacaagaaggaacagattgggaagagtggaaacatcccagcaggcaccactgttgatgtcggcatcacacatcccaccgagttcgacttctacctctgcagccatgcaggcatacagggtacaagtcgaccctcccactaccacgttctctgggacgacaacaactttgcggccgatgaccttcagatgctgacgtaccagctgtgccacacgtacgtccgctgcactcggagcgtctccattcccgcgcccgcttactacgcccacctggtcgccttccgtgctcgctaccacctcgtggagaaggaccacgacagcggcgaggggtcacatcgctccggagacagcggagagcggacgccgatggacatggcccgtgccgtcgaagtgcaccctgacacgctgcgcgtcatgtacttcgcgtaa

SEQ ID NO: 11581 - protein, 833 aa, Branchiostoma floridae
MDLFRCPRRPDIGNHGRRILLRANHFKVSMPKGDIHHYDVNIMPDKCPRRVNREIIEKMVQAYNRIFGDLRPVFDGRKNLYTRDPLPIGTEKVELDVTLPGDGGKDRHFKVSIKWVAKVSLYTLEQALEGRLAQIPFEAIQALDVVMRHLPSMTYTPVGRSFFSSPEGYSHPLGGGREVWFGFHQSVRPSQWKMMLNIDVSATAFYKAQPVIEFMCEVLDIRDINEQRRPLTDSQRVKFTKEIKDPHRHKRKYRVCNVTRRPAQTQTFPLQLEDGRTVECTVAKYFLERHKRKLEFPHLPCLQVGQEQKHTYLPLEVCNIVAGQRCIKKLTDMQTSTMIKATARSAPDREKEIIKLMQKANFNSDPYVRDFGINISTDMAEIEGRVLDPPMLQYGGRTRATVVPNQGVWDMRGKQFHTGIEIRVWAMACFAPQRQCSEQALRNFTQSLQRISNDAGMPILGQPCFCKYATGADQVEKMFRYLKNTFQGLQLILVVLPGKTPVYAEVKRVGDTLLGVATQCVQVKNVIKTSPQTLSNLCLKINVKLGGVNNILVPHIRPRVFREPVIFLGADVTHPPAGDEKKPSIAAVVGSMDAHPSRYAATVRIQTHRQEIIADLASMVRELLIQFYKSTRFKPTRIIMYRDGVSEGQFQQVLWHELRAIREACVRLEIGYEPGVTFIVVQKRHHTRLFCSDKKEQIGKSGNIPAGTTVDVGITHPTEFDFYLCSHAGIQGTSRPSHYHVLWDDNNFAADDLQMLTYQLCHTYVRCTRSVSIPAPAYYAHLVAFRARYHLVEKDHDSGEGSHRSGDSGERTPMDMARAVEVHPDTLRVMYFA

SEQ ID NO: 11582 - DNA, 2670 bp, Vitis vinifera
  CDS (1)..(2670)
atggaatcccagaagccgccaaatgctgaacctgctaagagatcatcatcaattccaaatcgactcccaatggcaagacgtggacttgggagaaccggcgaaactatacaacttgtaaccaaccatttcaaagtttccatgcactccaatgcgaacactggtgcccacttctaccaatataatgtatctctggctcatgaagatgggcacccggctgatgccaaagatattggcagaaaagttatggacaaagttcatgagacttatcacactgagatggctggtatgagctttgcctatgatggcgagaagagtttgtttacaattggctctcttccaagcaaaaagctccgattcacggttgtcttggaggatgcatcatcaaatagaatatcaactacaagaaacatagacagccctgatgatgggagtgaccgaaaaagatcaaggcgtccctaccattccaaaacattcaatgtggagattagttttgcagccaaattcccaatggattccattgtaagggcatcatacggccagccatcaaagcacctccaggacgccgctcgggttttagacatcatactaaggcagcatgcagcaaagaagggctgccttgttgtccgacagtcattttttgacaatctacctaggaatttcacacctttgggaggtggtgttcttggatgtcgaggtttcaattcaagcttcagagctactcaagggggtctattcttgaatatggatgtctctaccacactggtcatacagcctgatccagtgagagattttctcgtctctaatcaaaatgttaaagacatgtatcacattgactggagcaaggccaaaaggatgctaaaaaatctgagggtcaaaactttacactccaatgcagagtggaaaatcagtggattgagtgagaggacctgcagaaatcaaaccttcttaatgaaacaaagaaatgaagggccggatggggatgaagtccgaagtgttgaagtaacagtttatgactattttgtcaaacatcgaaaaataagtttacagtattctggggattttccatgcatcaacgttgggagatcaaagcaccccgtctatattcctctcgagctttgcacattggtttccttgcaacgctataccaagccattgtctactcagcagagatcttcacttgtggagaaatcacgacaaaagcctcaagaacggatgcgagtcatagaacaggcattaaaaagcaacaagtatgatgcaaacccaatgctccgttcttctggaatttcaattagtactcaatttacacaagttgaaggccgtatcttgccgactccaagtttgaaatcaggcaatgggcaggacttgtcacctcgaaacggaaggtggaacttcaacaataaggaactagctcaaccaacaaagattgacccttggcttattgcaagcttctcatcacgctgtaatatgaaaacactgattcaggatctcattaagtgtgcaaaaatgaaaggaatttccatgggatatccggctgaaatttttacagagaatcctcaatatatgcgacaaccagctcctgttagagtggacaagatgattggcactatgatgtcacaattcagacgtttgccccagtttattctttgtattcttccacagaagaagaactgcgacatctatggtccatggaaacggcaatgcctttcaggttgtggagttcccatacagtgcattgcaccatctacaccagtagtgaatgatcaatacctcactaatgtgttgttaaaaatcaatgccaagcttgggggtttgaattctttgttaactatgggatattgtccatcccttcatttgatttcaacgatacccactttaatccttggaatggatgtgtcccatggctctcctggtcggcctgatgtgccgtctattgctgcggtggtaagttccaggcattggccatcgatttctcaatatagagctacagtccgtacacagtctcccaaacttgagatgatagattctctattcgagcctctgcctaattccaaagatagtggcataatcaggggcaccctgttggacttctataaaacttcagcaaaaaggaagcctgaacacataatcattttcagggatggagtcggtgaatcgcaattcaaccaagtcttgaacattgaactggaacaaataattgaggcctgcaaactcctggatgagcaatggcatccaaagttcatggtgattattgcacagaagaatcaccatataagattcttccagaatggatccccgtctaatgttcctcccgggacaatcgtggacaacacaatatgtcatccaagaaacaatgatttctatttgtgtgcacatgctgggatgattgggacaagccggcctacgcattaccatgtattgctggatgagcttggcttttcagcagatgacttgcagcaacttgtgcattccttgtgttacgtatatcagaggagcaccacggctgtatctctagtggccccagtatgctatgctcacctggctgcagcccaagttgcccagtttatcaagtttgaggacttgccggagtcatcctctggtcatgctgctgctccagtaccacagttgccctccttccatgagaaggtcgctgatactatgttcttttgctaa

SEQ ID NO: 11583 - protein, 889 aa, Vitis vinifera
MESQKPPNAEPAKRSSSIPNRLPMARRGLGRTGETIQLVTNHFKVSMHSNANTGAHFYQYNVSLAHEDGHPADAKDIGRKVMDKVHETYHTEMAGMSFAYDGEKSLFTIGSLPSKKLRFTVVLEDASSNRISTTRNIDSPDDGSDRKRSRRPYHSKTFNVEISFAAKFPMDSIVRASYGQPSKHLQDAARVLDIILRQHAAKKGCLVVRQSFFDNLPRNFTPLGGGVLGCRGFNSSFRATQGGLFLNMDVSTTLVIQPDPVRDFLVSNQNVKDMYHIDWSKAKRMLKNLRVKTLHSNAEWKISGLSERTCRNQTFLMKQRNEGPDGDEVRSVEVTVYDYFVKHRKISLQYSGDFPCINVGRSKHPVYIPLELCTLVSLQRYTKPLSTQQRSSLVEKSRQKPQERMRVIEQALKSNKYDANPMLRSSGISISTQFTQVEGRILPTPSLKSGNGQDLSPRNGRWNFNNKELAQPTKIDPWLIASFSSRCNMKTLIQDLIKCAKMKGISMGYPAEIFTENPQYMRQPAPVRVDKMIGTMMSQFRRLPQFILCILPQKKNCDIYGPWKRQCLSGCGVPIQCIAPSTPVVNDQYLTNVLLKINAKLGGLNSLLTMGYCPSLHLISTIPTLILGMDVSHGSPGRPDVPSIAAVVSSRHWPSISQYRATVRTQSPKLEMIDSLFEPLPNSKDSGIIRGTLLDFYKTSAKRKPEHIIIFRDGVGESQFNQVLNIELEQIIEACKLLDEQWHPKFMVIIAQKNHHIRFFQNGSPSNVPPGTIVDNTICHPRNNDFYLCAHAGMIGTSRPTHYHVLLDELGFSADDLQQLVHSLCYVYQRSTTAVSLVAPVCYAHLAAAQVAQFIKFEDLPESSSGHAAAPVPQLPSFHEKVADTMFFC

SEQ ID NO: 11584 - DNA, 3258 bp, Vitis vinifera
  CDS (1)..(3258)
atggttaggaagaggagaactgaacttcccactgccagcagtggggagagctcggagtccactcaggaagctagtggagctagtggaggtagtggaggaggccgaggttctcagcagcctgcagcaacaccacaacaaggagctactgggatgggatttcaagggggtagaggttgggctcctcaatcacaacaaagcgggcgcggtgggtatgcaggtggccggggtcctcagcgtggtggaatggctccacaacagcaatacactgtcccgactgaatatcaaggtcggggtcgtggaggaggagcaccacctcagcaacctcctgcagcagctgctgcttatgagtctggaagcagaagccgagctcgtgtgggtggtggccgtggggtagagccagtgtcttctggtggccctccttctaagccgttaagttccgatctgcaccaagctacgcaggcgagttatgcagccgggggaactcctcatcgcgttccctctgaagccagttcatcacgtcaggctgctgagtctttgacacagcagctacagaaggtttctatccagcaggaggtgcctcccagccaggcaattcagcctgtcgctccctccagcaaatcaatgaggtttcctcttcgaccaggcaagggagttactggtaagaagtgtatagtcaaggctaatcacttctttgctgaacttccagataaagatttacaccagtatgatgtgtcaattaatccggaggttacatcaaggggggtgaaccgtgctgtgatggaacagctggtgaaattgtaccgggagtcacatcttggaaagcgactccctgcctacgatggaaggaaaagtctgtatactgctgggccgcttcctttcatttcaaaagagtttatgataactctcatagatgaagatgatggaacaggcgcccccaggagagagagggaattcaaagttgtgatcaaactggctgcacgtgctgatctacaccatttaggactgttcttacaggggaggcaagctgatgctccccaagaagctcttcaggttcttgacattgttttgcgcgagttgcctacaactaggtactgtcccgtggggcgatcattttattctcctgatctagggagaaggcagccattgggtgagggtttggaaagttggcgtggtttctatcagagtattcggccaactcagatgggactgtcactgaatattgatatgtcctcgactgcttttattgagccattgcctgtcattgattttgtgacacagcttctgaatcgggatgtttcttcccgaccattatctgatgctgatcgtgtaaagattaagaaggctctcagaggagtcaaagttgaagttactcatcggggaaatatgcgcagaaaatatcgtatatctggcttaacatcacaagcaacacgtgaattgacttttcctgttgatgatagaggaaccatgaaatctgtcgttgagtacttctatgaaacatatgggtttgtcattcagcattctcaatggccttgtctgcaagtgggaaatcaacagaggccaaattatttgcctatggaggtttgcaagattgttgaaggccaaagatattccaagaggttgaatgagaggcagattactgctttactgaaggtgacttgtcagcgtcctcaagaaagggagcatgacataatgcagacggttcaccataatgcttatcatgaggatccttatgctaaggagtttggtatcaaaatcagtgagaagctcgcttcagttgaagctcgcattttacctgctccatggcttaaataccatgatacgggaagggaaaaggattgtctgcctcaagttggccagtggaatatgatgaataagaaaatggtcaatggtggaactgtcaacaattggatttgcataaatttttcacgtggagtacaagagagtgtggctcgtgggttctgtcaggagcttgcacaaatgtgttatatttctggcatggcatttaatccggaaccagtacttccaccaattactgcacgtcctgatcaggtggagagagttttgaaggcaaggtttcatgaagccatgaccaaactccagccacagggcaaggagcttgatttgcttattgttattttgccagataataatggttcactctatggtgatttgaaacgaatctgtgagacagatcttgggcttgtttcacagtgttgcttacataaacatgtgtatagaatgagtaagcaatatctggcaaatgtggcattgaagattaatgtaaaggttggagggagaaatacggtgcttgttgatgcaatatcaaggcgcatacctctggtcagtgatcggcctactatcatttttggggctgatgttacccatcctcacccaggagaggattcaagcccatctattgctgctgttgtcgcctctcaagattggcccgagattacaaaatatgctggtttggtttgtgctcaggcccatcgacaggagctcatccaagatctttataagacttggcaggatcctgtaagaggaactgtgtctggtggaatgatcaaagaactgcttatatctttccgtagagcaactgggcagaaacctcagcgcataatattctatagggatggggtcagtgaagggcagttctatcaagtcttactatatgaacttgatgctattcgtaaggcatgtgcatctttggagccaaactatcagcctcctgtgacatttgttgtggttcagaaacgccatcatactagattgtttgcgaacaaccataatgaccggaatgcagttgacaagagtgggaatatattacctggtactgttgtagattctaagatctgccatcctactgagtttgacttttacctgtgcagccatgctggcattcagggcacaagccgacctgcccattaccatgtgttgtgggatgaaaacaagttcacagctgatgggctgcagtccctcacaaacaacctctgctacacatatgctaggtgcacacgctctgtttccatcgtgccccctgcatactatgctcatctggctgctttccgagcacgcttctatatggagccagagacatcagatagtgggtcaatgacaagcggtgctgctgctggtcgtgggggcatgggtgttggaggaccaggtcctcgaagcacacgggtatcaggtgctaatgcagccgttagacccctcccggccctcaaggagaatgtcaagagggtcatgttttactgttag

SEQ ID NO: 11585 - protein, 1085 aa, Vitis vinifera
MVRKRRTELPTASSGESSESTQEASGASGGSGGGRGSQQPAATPQQGATGMGFQGGRGWAPQSQQSGRGGYAGGRGPQRGGMAPQQQYTVPTEYQGRGRGGGAPPQQPPAAAAAYESGSRSRARVGGGRGVEPVSSGGPPSKPLSSDLHQATQASYAAGGTPHRVPSEASSSRQAAESLTQQLQKVSIQQEVPPSQAIQPVAPSSKSMRFPLRPGKGVTGKKCIVKANHFFAELPDKDLHQYDVSINPEVTSRGVNRAVMEQLVKLYRESHLGKRLPAYDGRKSLYTAGPLPFISKEFMITLIDEDDGTGAPRREREFKVVIKLAARADLHHLGLFLQGRQADAPQEALQVLDIVLRELPTTRYCPVGRSFYSPDLGRRQPLGEGLESWRGFYQSIRPTQMGLSLNIDMSSTAFIEPLPVIDFVTQLLNRDVSSRPLSDADRVKIKKALRGVKVEVTHRGNMRRKYRISGLTSQATRELTFPVDDRGTMKSVVEYFYETYGFVIQHSQWPCLQVGNQQRPNYLPMEVCKIVEGQRYSKRLNERQITALLKVTCQRPQEREHDIMQTVHHNAYHEDPYAKEFGIKISEKLASVEARILPAPWLKYHDTGREKDCLPQVGQWNMMNKKMVNGGTVNNWICINFSRGVQESVARGFCQELAQMCYISGMAFNPEPVLPPITARPDQVERVLKARFHEAMTKLQPQGKELDLLIVILPDNNGSLYGDLKRICETDLGLVSQCCLHKHVYRMSKQYLANVALKINVKVGGRNTVLVDAISRRIPLVSDRPTIIFGADVTHPHPGEDSSPSIAAVVASQDWPEITKYAGLVCAQAHRQELIQDLYKTWQDPVRGTVSGGMIKELLISFRRATGQKPQRIIFYRDGVSEGQFYQVLLYELDAIRKACASLEPNYQPPVTFVVVQKRHHTRLFANNHNDRNAVDKSGNILPGTVVDSKICHPTEFDFYLCSHAGIQGTSRPAHYHVLWDENKFTADGLQSLTNNLCYTYARCTRSVSIVPPAYYAHLAAFRARFYMEPETSDSGSMTSGAAAGRGGMGVGGPGPRSTRVSGANAAVRPLPALKENVKRVMFYC

SEQ ID NO: 11586 - DNA, 2733 bp, Vitis vinifera
  CDS (1)..(2733)
atggagaaaacaggtattgaggaagcaagtgggacaccacctttgcccccatcaccaagtatacccccaaatgtcaagccagagcaagtgggccctcctaagcgttctgttattagtaggaggggtgttggtactgctgggcggcgcatatctctgctcacgaaccacttcaaagtttctatgaatatttcagatgcaatgttttaccagtacagtgtttctattacttcagaggataagagagtggttgatggcaagggaattgggagaaaagtgatcgatcgactttacctaacatactcttctgaacttgctgggaagaaatttgcatacgatggagagaaaagtttgtacacagtgggccctctgccacaaaacaactttgagttcacagtcgtggttgaggagttgcttgcaagaaggcatgtcctctgtccaattgctaatggtagccctggtgcaaatggaagtcccagtggcaatggcaagcgaccaaagtgttcttttcgatcgaaaactttcaaggtggcaatcagctatgctgccaaaatacctttaaaatctattgttcttgccctcaaaggaagtgaggttgataataacgctcaggatgcattgagagtgcttgacattatattgagacagcaagcagctaacaggggctgccttttggtaaggcagtcattctttcatgatgattcgaggcactttactgatgtggggggaggagtaacaggctgtcggggtttccattctagtttccgtacaactcagggtggtttgtcactgaatatggatgtatctacaactatgatcctaactcctggacctgtgattgattttctgctagctaaccagaatatacgggatcctcgccatatcaactgggaaaaggctaaaaagatgctgaaaaatatgaggattaagacaaagcacagcaacatggaattcaaaatcactggcctaagtgagaagccctgtaatctgcaacattttcctctgaaaatgagaaacagcgatgatgcaaatgatgaagatcagactgtggagattactgtctatgaatattttactaaacaccgtggcatagaactatccatttctgcttacatgccatgccttaatgttggaaagccaaaacgacccaactatctacccctggagctttgtttgctagtttcactccaacgatatacaaaggcattgtctatcatgcagagatcaactttagttgaaaagtcaaggcaaaagcctcaggatcgaatacgaactgtgactgatgctgtgagaaactaccaatatgatgaggatcctgtgctttctgcatgcggtatttctattgacagacaattgactcaagttgatggtcgtgtccttgaggcaccaaagttgaaggttggtaatagtgaagattgcatccctcgtaatggaagatggaacttcaatcacaagaaacttttaacccctgttcgaattgaacgctgggcagttgtgaacttttccgctcgctgtgataccagccatctttcccgggagcttattaactgtggaaggaataagggcattcttattgaacgccctcatacactaattgaggaagatccacaatctagaagagctagccctgttgcaagagtggagaagatgtttgaaatagtaagggcaaagcttccaggtcctcctgaatttcttctgtgtgtcttgccggagaagaaaaattctgaaatttatggaccttggaagaagagaagtcttagtgattttggaattgtcacgcaatgcatttcccctactaaaatcaatgaccagtacctcacaaatgtacttcttaaaatcaataccaagcttggaggaacaaattctttgttggcaatagagcacacttctcgtatccccttgattaaagatactcctacaatgattttggggatggacgtctctcatgggtctcctggtcaagcagatgtcccatccatagctgcagttgttggctctcgatgttggccactgatctcaaggtatagagcatcagtaagaacacagtcacctaaggttgagatgattgatgctttatacaagcctttggcaaatgggaatgatgatggaatgatcagggagctgcttgtggacttctttcaaaccagcaatggacgcaaaccagcgcagattgttatattcagggatggagtgagtgaatcacagtttaatcaagttttgaacattgagctggagcaaatcatgaaggcctatcagcatcttggggaggttgattttcccaagttcacagtgattgtggctcaaaagaatcatcacacaaaactatttcaagctggtgcccctgaaaatgttccacctgggacagtagtggatacaaaaattgtgcatccaagaaattatgatttctacatgtgcgctcatgcagggatgattggaacatctcgcccagcacattatcatgtcttgcttgatgagattagcttctctcctgatgacttgcaacatcttatccactccctatcatatgtgtaccaaaggagcacaaccgccatctcaattgtggcacccgtttgctatgctcaccttgctgcccaacagatggggcagtttattaagtttgatgatctatctgaaacttcttcagcgaagagagccatcacaacagaagagagcgtccccgttccggagctccccaggttgcatgagaatgtccgaggttccatgttcttctgttga

SEQ ID NO: 11587 - protein, 910 aa, Vitis vinifera
MEKTGIEEASGTPPLPPSPSIPPNVKPEQVGPPKRSVISRRGVGTAGRRISLLTNHFKVSMNISDAMFYQYSVSITSEDKRVVDGKGIGRKVIDRLYLTYSSELAGKKFAYDGEKSLYTVGPLPQNNFEFTVVVEELLARRHVLCPIANGSPGANGSPSGNGKRPKCSFRSKTFKVAISYAAKIPLKSIVLALKGSEVDNNAQDALRVLDIILRQQAANRGCLLVRQSFFHDDSRHFTDVGGGVTGCRGFHSSFRTTQGGLSLNMDVSTTMILTPGPVIDFLLANQNIRDPRHINWEKAKKMLKNMRIKTKHSNMEFKITGLSEKPCNLQHFPLKMRNSDDANDEDQTVEITVYEYFTKHRGIELSISAYMPCLNVGKPKRPNYLPLELCLLVSLQRYTKALSIMQRSTLVEKSRQKPQDRIRTVTDAVRNYQYDEDPVLSACGISIDRQLTQVDGRVLEAPKLKVGNSEDCIPRNGRWNFNHKKLLTPVRIERWAVVNFSARCDTSHLSRELINCGRNKGILIERPHTLIEEDPQSRRASPVARVEKMFEIVRAKLPGPPEFLLCVLPEKKNSEIYGPWKKRSLSDFGIVTQCISPTKINDQYLTNVLLKINTKLGGTNSLLAIEHTSRIPLIKDTPTMILGMDVSHGSPGQADVPSIAAVVGSRCWPLISRYRASVRTQSPKVEMIDALYKPLANGNDDGMIRELLVDFFQTSNGRKPAQIVIFRDGVSESQFNQVLNIELEQIMKAYQHLGEVDFPKFTVIVAQKNHHTKLFQAGAPENVPPGTVVDTKIVHPRNYDFYMCAHAGMIGTSRPAHYHVLLDEISFSPDDLQHLIHSLSYVYQRSTTAISIVAPVCYAHLAAQQMGQFIKFDDLSETSSAKRAITTEESVPVPELPRLHENVRGSMFFC

SEQ ID NO: 11588 - DNA, 3228 bp, Vitis vinifera
  CDS (1)..(3228)
atggcggtctccataggggaagaagcggcggtgatcacccgcgccatcgccacggaggaggctttagaggaggtcgaaggcctgggtacagcagagggtacgaggaagacgcaccgccgccaccagtgcaccggtggagagggcctcccgaaatgggtcacgaccgagactactaccactatggcggaagcagtgataggtatggtggcaatggtggcggggggtggcggagctctggcctcagccctagaaattctccggcgtggcgccctcttcctccgtcgccgccgcggcgcccgcttcctctgccgtcgcccccccggcgccctcttcctccgctctcgcccccgcggcgccatcctcctccgctctcgcccccgcggcgccatcttcctccgtcgtcgcccccccggcgcccacttcctccgccgtcgccgcctcggcgcccgttgccttccatgcccgcttttgtcgagtcccggaggtctcctgatactgttccagtgccctagaaattttatgatttatatacatacattgtctgatggccttggaagctttgtttttattacttatactgatccttctattccagaaatggagccatcaaaacttttaggtagcttgacaccaacatcctccttggaacgcatggacagagttctccctataaggcgacctgacaaaggtggcacaaatgcaatccaatctaccatggttcgtgtcaatcatttccctgtgaaattcaactctgagaaaatcattctgcactatgatgttgatattaaaccagaggtgctacccaagcatggtcgtaccttgaagttatcaaagtctaatcgctgcatgataaaagagaagttgttctctgatgatccctcacgatttcccttgtcaagaacggcttttgatggtgagaagaatatttttagtgttgttgagctgcccactggaaaatttaaggtggagttctctgagagcgaagacatgaagatctgttcgtatatattcaccataaagcttgtgaatcaactagagcttcgcaagttgaaggattatttaagtgggaaacttttttccatacctcgtgagatattgcaagggatggatgtggtgatgaaggagaatcctgcaaggcatatgatctctgttggacggagcttttacccaactctgttctctctagatgatgatcttggacatggcattgtagcttctagaggatttttacatagcctcaagcccacggcccagggtttaaccttatgtttggactactcagtcttagcatttcgaaagccaattccggttatagatttccttgaggagcatgttaatggatttaagttgaatgatttaagaagagtaaggaaagaagttgaggttgctctaaaaggattaaaagttagagtcattcatcgtctttgcaaacaaaaatacactatctcaggattaagtggtgaggacacaaggtatctttcatttatcgctgaagacctagagggcaaatctccagcaaagaaagttgggattattgattatttcagggaaaaatatgggaaggatattaagtacaaggatattccgtgcttagatttggggaaaaacaataggaagaactatgtacccatggagttctgcatcttgactgagggacagaggtttctcaaagagaacttggatagaaatggggctcagaagttgaaaaatttgtcactggttgcccctaaagtcagagagaacaacatatgtgaaatggtgcgatcaaagactggaccatgtggtggagatatgatcaataactttgggattgaagtcaacatgaggatgactacagttgcaggacgtgtgattatggcacctgaattaaagctaggaggggctcataatggaaggatgagcaagattactgtggacaggaacaggtgtcactggaattttgtaggaaaatctgtggtggagggcaaacacattgatcggtgggctgtacttgatttcagtgcatatgaaggattcaacagactgaatcctgaccactttattcccaaatttatcaggcgctgtgcaagtcttggaattagaatggatgagccacttttgtatcagtcgtctcgaatgaatgccttctccaatgttgccatgcttcgtgaactgctcttaggagtagctggcagagctcatgatagtacaaaaaaccagttgcaaattcttgtatgtgtgatggctaggaaggatcctggctacaactatctcaagtggttctgtgaaaccaacattgggatagttactcaatgttgtttgtccagccctgcaaataaagcaaatgaccagtatcttgcaaacttggctctcaagatgaatgccaagcttggaggcagcaacgtggagctcattgaccggcttcctcattttgagaatgaaggttatgtaatgtttgtaggtgctgatgtcaatcatcctggtgcttggaactcagctagcccttccatagctgctgttgttgccactgtaaattggcctgctgtaaatcgttatgctgctcgtgtacgcccccagctccatcgaactgagaagattctaaattttggggacatgtgcctggagcttattgagacctatgctcaggtgaatagagccaagccggataagattgtggtgtttagggatggggtgagcgagggccaatttgacatggtgcttaatgaagaattagtagatctgaagggggctatccagaggggaaattacaacccaacaatcacacttattataacccagaagagacatcagactcgactgtttccagaaagcaagagggaaaggggtcaggacaggagcttcaatgagaatgtgtctccaggcacggttgtagacacaactgtggttcaccccttcgagtttgatttttatctttgtagccattatggtggtattgggacgagcaagccaacacactaccatgtcctctatgacgagcacaggttctcttctgaccaactccagaagcttatctacaacttgtgtttcacctttgtgcggtgtaccaaacctgtctcccttgttcctcctgtatactatgccgaccttgctgcatacagaggacggctctaccatgacgccctggagttggagcgcccagcttcagcttctgcagcctctgcagcttcatttgatgagaggttttaccgcttgcacggggatctggaaaatacgatgttttttgtttga

SEQ ID NO: 11589 - protein, 1075 aa, Vitis vinifera
MAVSIGEEAAVITRAIATEEALEEVEGLGTAEGTRKTHRRHQCTGGEGLPKWVTTETTTTMAEAVIGMVAMVAGGGGALASALEILRRGALFLRRRRGARFLCRRPPGALFLRSRPRGAILLRSRPRGAIFLRRRPPGAHFLRRRRLGARCLPCPLLSSPGGLLILFQCPRNFMIYIHTLSDGLGSFVFITYTDPSIPEMEPSKLLGSLTPTSSLERMDRVLPIRRPDKGGTNAIQSTMVRVNHFPVKFNSEKIILHYDVDIKPEVLPKHGRTLKLSKSNRCMIKEKLFSDDPSRFPLSRTAFDGEKNIFSVVELPTGKFKVEFSESEDMKICSYIFTIKLVNQLELRKLKDYLSGKLFSIPREILQGMDVVMKENPARHMISVGRSFYPTLFSLDDDLGHGIVASRGFLHSLKPTAQGLTLCLDYSVLAFRKPIPVIDFLEEHVNGFKLNDLRRVRKEVEVALKGLKVRVIHRLCKQKYTISGLSGEDTRYLSFIAEDLEGKSPAKKVGIIDYFREKYGKDIKYKDIPCLDLGKNNRKNYVPMEFCILTEGQRFLKENLDRNGAQKLKNLSLVAPKVRENNICEMVRSKTGPCGGDMINNFGIEVNMRMTTVAGRVIMAPELKLGGAHNGRMSKITVDRNRCHWNFVGKSVVEGKHIDRWAVLDFSAYEGFNRLNPDHFIPKFIRRCASLGIRMDEPLLYQSSRMNAFSNVAMLRELLLGVAGRAHDSTKNQLQILVCVMARKDPGYNYLKWFCETNIGIVTQCCLSSPANKANDQYLANLALKMNAKLGGSNVELIDRLPHFENEGYVMFVGADVNHPGAWNSASPSIAAVVATVNWPAVNRYAARVRPQLHRTEKILNFGDMCLELIETYAQVNRAKPDKIVVFRDGVSEGQFDMVLNEELVDLKGAIQRGNYNPTITLIITQKRHQTRLFPESKRERGQDRSFNENVSPGTVVDTTVVHPFEFDFYLCSHYGGIGTSKPTHYHVLYDEHRFSSDQLQKLIYNLCFTFVRCTKPVSLVPPVYYADLAAYRGRLYHDALELERPASASAASAASFDERFYRLHGDLENTMFFV

SEQ ID NO: 11590 - DNA, 2742 bp, Vitis vinifera
  CDS (1)..(2742)
atggattctggggaagatggaaatggggcacaagatgctttgccacctcccccacctgttccgccaaatgttgttccaataaaagctgattcagttgcttctgagccagttaagaaaaaggtcgcacgtgttccaatagctcgccgtggctttgcatccaaggggcaaaaaatagcactaactactaaccacttcaaagttaatgttactggtgctgatggtcacttcttccattacagtgtttccctttcatatgaagatggccgtcctgttgatggtaagggaattggaagaaaggttatcgatagagttcatgagacatatgatagcgagttaggtggaaaggactttgcttatgatggggagaagagtttgttcacagttggtcctcttccacgaaacaaacttgagttcactgttgtgcttgaggatgtttcatcaaataggaataatggcaatggaagtcctgatcgtggtagtccgaatgagagtgatcgaaaaaggatgcggcgtccttaccagtcaaagacttttaaagtagagattagctttgctgctaaaataccaatgcaggcaattgccaatgcactacgtggtcaagaatcagaaaactctcaagaagcacttagagttttggatatcattttaaggcagcatgcatcaaaacagggttgcctccttgttcgtcaatccttttttcacaatgatccaaaaaatttcattgatttgggagggggcgttcttggctgcagaggattccattcaagttttcgaaccacccaaggaggcttatcactgaatattgatgtatctactaccatgatagtgcaacctgggccagtggttgattttttaattgccaatcaaaatgcgagggatcctttttccctggactgggctaaggccaagaaaatgctaaaaaatctgagggtgaagacaagcccctcaaacaccgagtacaaaataactggactgagtgagaagccttgcaaggagcagttgtttacgcttaagcaaagaaatgggaaggatgagaatggcgaggcccaaacgattgaagtgactgtttttgattattttgttaatcatcgccgcatagaactacgttattctgcagatttaccttgcattaatgttgggaagccaaaacgaccgacttacttccctatagagctttgtaccttggtgtcgttacaacgttatactaaagcgttgtccactcttcaaagagcttcactggtggaaagatcaaggcaaaaaccacaagaaaggataggagttttgactaatgctttgagaagcaacaattatgatgctgagcctatgctacgttcctgtggcatttcaataagcagagacttgacccaaattgaaggccgtgttctggcagctccaaggttgaaagttggtaatggggaggatttctttccacgaaatgggcggtggaattttaacaataagaaactggtggagcccacaaagatagaacgttgggctgtggtcaacttctcggctcgctgtgatattcgaaacctcgtccgagaactgatcaaatgtggaggaatgaaaggaattcacattgatcctccatttgatgtatttgaagagaatccacaatctcgacgagccccacccattgttagggtggagaaaatgtttgaggagatacagtctaaactccctggagctcctcagttccttctctgtctacttccagagaggaaaaactctgatctatatggtccttggaaacgaaagaatctttctgaatatggaattgtgactcaatgcattgctcctacaagggttaatgatcaatatcttacgaatgttctcctaaagattaatgcaaaacttggtggattaaattctatgctagcagtagaacattccccttctattccaattgtttcgaagggacccaccataatccttgggatggatgtgtctcatggttctcctggacaatctgatgtaccatctattgctgcggttgtcagctccaggcagtggccactgatttcgcgctatagagcatcagttcgtacacaatctccaaaggttgagatgattgattctctgtataagcgagtatctgaaactgaagatgaaggcataattagagagcttttgctagacttttatgtgagttcaggcaaaagaaaacccgatcagattatcatattcagggatggagtcagcgagtctcagttcaatcaagttctgaacatcgaactggatcaaattattgaggcctgcaagttccttgatgagaagtggtctcccaaatttgtggtgattgttgcgcagaaaaaccatcataccaagtttttccaacatggatctcctgataacgtcccacctggcacagtcatagacaacaaagtttgtcatccacggaacaatgacttttatctctgtgcacatgctggaatgattggtactaccaggccgacgcattaccacgttctattggatgaagttggtttctcttcggatgatcttcaggagcttgtgcattctttatcctatgtgtaccaaaggagcaccactgccatttccgtagttgctcccatatgctatgcccacttagcagctactcagatgtctcagttcatgaagtttgaagacacgtcagagacatcctcaagccaaggtggactgacgtcagcagggcctgttccagtgcctcaactccccaaattgcaggagagtgtctgcaattcgatgttcttttgctga

SEQ ID NO: 11591 - protein, 913 aa, Vitis vinifera
MDSGEDGNGAQDALPPPPPVPPNVVPIKADSVASEPVKKKVARVPIARRGFASKGQKIALTTNHFKVNVTGADGHFFHYSVSLSYEDGRPVDGKGIGRKVIDRVHETYDSELGGKDFAYDGEKSLFTVGPLPRNKLEFTVVLEDVSSNRNNGNGSPDRGSPNESDRKRMRRPYQSKTFKVEISFAAKIPMQAIANALRGQESENSQEALRVLDIILRQHASKQGCLLVRQSFFHNDPKNFIDLGGGVLGCRGFHSSFRTTQGGLSLNIDVSTTMIVQPGPVVDFLIANQNARDPFSLDWAKAKKMLKNLRVKTSPSNTEYKITGLSEKPCKEQLFTLKQRNGKDENGEAQTIEVTVFDYFVNHRRIELRYSADLPCINVGKPKRPTYFPIELCTLVSLQRYTKALSTLQRASLVERSRQKPQERIGVLTNALRSNNYDAEPMLRSCGISISRDLTQIEGRVLAAPRLKVGNGEDFFPRNGRWNFNNKKLVEPTKIERWAVVNFSARCDIRNLVRELIKCGGMKGIHIDPPFDVFEENPQSRRAPPIVRVEKMFEEIQSKLPGAPQFLLCLLPERKNSDLYGPWKRKNLSEYGIVTQCIAPTRVNDQYLTNVLLKINAKLGGLNSMLAVEHSPSIPIVSKGPTIILGMDVSHGSPGQSDVPSIAAVVSSRQWPLISRYRASVRTQSPKVEMIDSLYKRVSETEDEGIIRELLLDFYVSSGKRKPDQIIIFRDGVSESQFNQVLNIELDQIIEACKFLDEKWSPKFVVIVAQKNHHTKFFQHGSPDNVPPGTVIDNKVCHPRNNDFYLCAHAGMIGTTRPTHYHVLLDEVGFSSDDLQELVHSLSYVYQRSTTAISVVAPICYAHLAATQMSQFMKFEDTSETSSSQGGLTSAGPVPVPQLPKLQESVCNSMFFC

SEQ ID NO: 11592 - DNA, 3120 bp, Vitis vinifera
  CDS (1)..(3120)
atggtgtttggaggtagagaaaacgaggtgtttggaggcagaggaaatgaaacattgttaactgcccgagtggagaagttagggagtttgcccacaataggatttaatggtccgcacgtaattatccaatgtcggacgtgggacagccggcgccttctcgtctctcttggtcttgggttggagagaggtttcttcaattctctctctacttttcaagccgagaaggaggaggagaagaagaagaaggtggagtggggtttgactgtgaggggaaaggaaaatgctgcatggggagactttttgaggcattttcctttactgtttctaggtttcttttttcccgagaaccaaacggcatttgaaatgaagccttcggacacaacggaggtcacagaggaggttctgccaccacctccatctgtgattcctcatgatggagttggcatacaagtaaaaccagaacatacatctgagtcggtgaagaaaacaacaaagccaaagcgtgtcccgatgtctaggcgtggttttggatctaaaggacaaaaaatatcactcctaacgaaccattttaaagttggtattactaatgctagtggccacttctttcactacagcgtaaccttgacatatgaagatggccggcctgttgaaatgaagggtgttggaagaaaaataatggataaagttcacgagacttatgacactgagctgtctgggaaggattttgcttatgatggggagaagagcttattcacggttggggccctcccacacaacaaactggaattcactgttgtgcttgacagtgtctcttcaaatagaaatactagaaatggcagccctgatgtcaatggaagtccaaatgggggtgaccgaaagaggccaaggcgcgcatcccagtctaaaacatttaaagtagagataagttttgctgccaaaatcccaatgcaggccattgcaagcgcattacgtggtcaagaatcagagaattctcaagaagccatcagagtcttagacataattttgaggcagcatgcagcaaaacagggctgccttcttgtccgtcaatcattctttcatgataactcaaggaattttacagacttgggaggtggtgtccttggatgcagagggtttcattccagttttcgagccacacaaggtggtttatctctaaatgttgatgggtccactactacaatcatacagcctggaccgcttgttgattttctcattgcaaaccaaaatgcacgagatccattccagctcgactggtcaaaggctaaacggactctcaaaaatttaaggataaaggtaaaaccttctaattcagagtacagaattgttggactgagtgaaagtccttgcaaagagcagatgttcaccctaaaaaataggggaaaaaatggaaatgatgatgctgaaagtatagaagtgacggtttatgattattttgttaactatcgccagatagagttgcgttattctggagacttaccttgcatcaatgttgggaaaccaaaaaggcctacgtacttgcctattgagctttgttttttggtttctttacaacgctatacgaaggcattaactgttcatcaaaggtccaccttggtagaaagatcaagacaaaagccccaagagaagatgacaatcttaactgatgtcatgaaaagcaacaattacgaggctgattcattgctgcgttcttgtggcatttcaatcagtactcaatttactcaagttgaaggtcgcgttctttcagccccaaggttaaaggcaggaaatggagaagatcttattgctagaaatgggcggtggagcttcaacaataagaaacttgctgaaccttcaaaaatcaagaattgggctgctgtaaacttctctgctcgctgtgatacaaagggtctatgtagagatatagccaggtttggagaaacgaaaggaattttcatagatcccccaatagatgtttttgaagagaatcctcaatttagacgagctccacctatggttcgagtggagaagatgtttgaacaaatgaagccacaattgcctgatggtcctccccattttattgtctgccttcttcctgataggaagaactctgacatatatggtccatggaaaaggaagtgccttgcagaatttggaatttttaatcaatgccttgcacctactagagttaatgatcagtatatcatgaatgtacttttgaagatcaatgccaaacttggtggtttgaattctctgttagccattgaaccatcaagaaatatacccttggtttccaaggttcctaccataatctttggaatggatgtgtcacatggctcccctggccaatctgatattccatctgttgctgctgttgtgagttctaggtgttggccactgatctctcgttacagagcttctgttcgtacacagtcaccgaaagttgaaatgatagattcgctttttaagccagtatcagatgataaagatttaggcattgtcagggagctgctgttggacttttatgtgagttcagggcaaacaaagcccactcaaataatcattttcagggatggagtcagtgaatcgcagttcaaccaagtcttgaacattgagctagatcaaattattgaggcttgcaagttcctcgatgagaagtggactcctaaattcacaataattattgcccagaaaaatcaccacacaaaattcttccaagctgggtctcaagataatgtgcctcctggaactgtaattgacagcaaagtctgtcatccaacgcacaacgatttctacatgtgcgcacatgcagggatgatagggacaacaagaccaacacattaccatgttcttctagacgagataggcttttcagctgatgatatgcaagaactcatccattctctgtcctatgtgtatcagagaagcactactgccatatccatcgtcgccccagttcgctatgcacacctggcggctacacaggtttcacagttcatgaagttcgatgactcctcggagacatcttcgagccatggaagtttgacttctgttggaggtccccctgtccccgaactccccaggttgcatgaaaaggtttgcagttctatgttcttttgctga

SEQ ID NO: 11593 - protein, 1039 aa, Vitis vinifera
MVFGGRENEVFGGRGNETLLTARVEKLGSLPTIGFNGPHVIIQCRTWDSRRLLVSLGLGLERGFFNSLSTFQAEKEEEKKKKVEWGLTVRGKENAAWGDFLRHFPLLFLGFFFPENQTAFEMKPSDTTEVTEEVLPPPPSVIPHDGVGIQVKPEHTSESVKKTTKPKRVPMSRRGFGSKGQKISLLTNHFKVGITNASGHFFHYSVTLTYEDGRPVEMKGVGRKIMDKVHETYDTELSGKDFAYDGEKSLFTVGALPHNKLEFTVVLDSVSSNRNTRNGSPDVNGSPNGGDRKRPRRASQSKTFKVEISFAAKIPMQAIASALRGQESENSQEAIRVLDIILRQHAAKQGCLLVRQSFFHDNSRNFTDLGGGVLGCRGFHSSFRATQGGLSLNVDGSTTTIIQPGPLVDFLIANQNARDPFQLDWSKAKRTLKNLRIKVKPSNSEYRIVGLSESPCKEQMFTLKNRGKNGNDDAESIEVTVYDYFVNYRQIELRYSGDLPCINVGKPKRPTYLPIELCFLVSLQRYTKALTVHQRSTLVERSRQKPQEKMTILTDVMKSNNYEADSLLRSCGISISTQFTQVEGRVLSAPRLKAGNGEDLIARNGRWSFNNKKLAEPSKIKNWAAVNFSARCDTKGLCRDIARFGETKGIFIDPPIDVFEENPQFRRAPPMVRVEKMFEQMKPQLPDGPPHFIVCLLPDRKNSDIYGPWKRKCLAEFGIFNQCLAPTRVNDQYIMNVLLKINAKLGGLNSLLAIEPSRNIPLVSKVPTIIFGMDVSHGSPGQSDIPSVAAVVSSRCWPLISRYRASVRTQSPKVEMIDSLFKPVSDDKDLGIVRELLLDFYVSSGQTKPTQIIIFRDGVSESQFNQVLNIELDQIIEACKFLDEKWTPKFTIIIAQKNHHTKFFQAGSQDNVPPGTVIDSKVCHPTHNDFYMCAHAGMIGTTRPTHYHVLLDEIGFSADDMQELIHSLSYVYQRSTTAISIVAPVRYAHLAATQVSQFMKFDDSSETSSSHGSLTSVGGPPVPELPRLHEKVCSSMFFC

SEQ ID NO: 11594 - DNA, 2988 bp, Vitis vinifera
  CDS (1)..(2988)
atgcctatgaggcagatgaaagagagctcagagcaacacctagtgatcaaaacccacttgcagaactccatgaacccagttcaaaagccccccaaaactgctcaaaatgggaaaggccccccatcccatgaacctcagaacgccaaacctcacagccaaacttcgccttcatcaaaaaacagagggaggagaagaggaagaggtggcagaaaatctgatcaaagcgatgttttcatgcgccccagttcaaggccctgcactgtagcagataagccagttttggcgcaccaggctggacctcttgttactgatattcctcatgggtgtgtcgaaaatgggggcaacatgtgtgaaatggagatgggttttccttcttcaagtaagtctttgacctttgcacctaggcccgggtatggtcaacttggaacaaaatgtattgtgaaggccaaccatttctttactgagttaccagagaaggacttgaatcagtatgatgtgacaattactcctgaagtgtcctcaagaacggttaacagagctatcatgaatgagctggtgaaactgtacaaagaatctgacttgggaatgagattgcctgcttatgatggtagaaagagtctatacactgctggtgagcttccgtttgcttggaaggagttcaaggttaagctagttgatgaagaggatggaatcaatggtcccaaaagagagagggagtataaagtggtcatcaagtttgtagcacgggcaagcttgcatcatttgggccagtttctggctggtaagcgagcagatgctccacaggaagctcttcaaattcttgacattgtattgagagagctctctactagaaggtactgtcctgttgggagatccttcttttctcctgatattagagcacctcaacgtcttggagaaggtttggagtcatggtgtggattctaccagagtataagacctactcagatgggtttgtcactgaatattgatatgtcttcggctgcattcattgaagctctccctgtaatagagtttgttggtcagctattaggcaaagatgtgttatctaggccattgtctgattctgaccgtgtgaagatcaaaaaggcccttagaggagtaaaagttgaagtaacacacagagggaatgtacgaagaaagtatcgtgtatcaggactaacatcccaacctacaagagaactagtttttcctgttgatgataattcaaccatgaagtcagttgtggaatacttccaagaaatgtatggctttacaattcaacatgcacaccttccttgccttcaagtaggaaaccagaagaaggctaactatttacctttggaggcctgcaaaattgtagaggggcagcggtataccaaaaggttgaatgagaggcaaattactgctctattaaaagttacatgccaaagacccagggatcaggaaaatgatattctgcagacggttcaacataatgcttatgatcaagatccatatgcaaaggagtttgggatcaaaatcagtgaaaaattagcttctgttgaggctcggattcttcctgctccttggctgaaatatcatgaaactgggaaggaaaaggattgtttgcctcaagtcggtcagtggaatatgatgaacaaaaaaatgatcaatggaatgactgttagccggtgggcatgtatcaacttctctcggagtgtgcaagagagtgttgctcgtgggttttgtaatgaattggctcaaatgtgtcaagtgtctggcatggaatttaaccccgaacctgttattccaatctacatggccagacctgatcaagtagagaaagctctgaagcatgtgtatcatgcatctatgaacaaactcaaaggaaaagaattggagcttctattagctattttacctgacaacaatgggtctttatatggtgatcttaagagaatatgtgaaaccgaccttggtctaatatcacaatgctgtctcacaaaacatgtcttcaagattagcaagcagtacttagccaatgtgtctctgaagattaatgttaagatgggtggtagaaacactgtccttttggatgctatcagttgcaggataccattagttagtgacataccaaccataatatttggagcagatgtgacgcatccagagaatggagaagactccagcccttcaattgctgctgtagtagcttctcaggactggcctgaagtcacaaaatatgcaggattggtttgtgctcaggctcacagacaggaactgatacaagatttatacaagacatggcatgatcctgttcgtggcacagttagtggtggcatgattcgggatcttttggtttcctttcggaaggcgacagggcagaagccactaaggattatattttacagggatggtgttagtgaagggcaattttatcaagtgctactttatgaactagatgcaatccggaaagcttgtgcttctctagaaccaaactatcaaccaccagttacttttattgtggttcaaaaacgacatcatacccgattgttcgctaacaaccacagggaccggaacagcactgacagaagcgggaatattttgcctggcacagtggttgattctaaaatttgccatccgactgaatttgatttttatctctgcagccatgctggtattcaggggacaagtaggcctgctcattaccatgttttatgggatgagaacaatttcacagcagatggaattcaatccttgacgaacaatctttgctacacatatgcaaggtgcacacgatcggtgtctgttgttcctccagcatattatgcacatttagcagcatttcgagcccgattctacatggagcctgacatgcaggagaatggttcaaatggaggtggcagtggtggtcatgccgccaaggctacacgagcatctggagagactggtgtccggccattgccagcacttaaagaaaatgtgaaaagagtaatgttttattgttag

SEQ ID NO: 11595 - protein, 995 aa, Vitis vinifera
MPMRQMKESSEQHLVIKTHLQNSMNPVQKPPKTAQNGKGPPSHEPQNAKPHSQTSPSSKNRGRRRGRGGRKSDQSDVFMRPSSRPCTVADKPVLAHQAGPLVTDIPHGCVENGGNMCEMEMGFPSSSKSLTFAPRPGYGQLGTKCIVKANHFFTELPEKDLNQYDVTITPEVSSRTVNRAIMNELVKLYKESDLGMRLPAYDGRKSLYTAGELPFAWKEFKVKLVDEEDGINGPKREREYKVVIKFVARASLHHLGQFLAGKRADAPQEALQILDIVLRELSTRRYCPVGRSFFSPDIRAPQRLGEGLESWCGFYQSIRPTQMGLSLNIDMSSAAFIEALPVIEFVGQLLGKDVLSRPLSDSDRVKIKKALRGVKVEVTHRGNVRRKYRVSGLTSQPTRELVFPVDDNSTMKSVVEYFQEMYGFTIQHAHLPCLQVGNQKKANYLPLEACKIVEGQRYTKRLNERQITALLKVTCQRPRDQENDILQTVQHNAYDQDPYAKEFGIKISEKLASVEARILPAPWLKYHETGKEKDCLPQVGQWNMMNKKMINGMTVSRWACINFSRSVQESVARGFCNELAQMCQVSGMEFNPEPVIPIYMARPDQVEKALKHVYHASMNKLKGKELELLLAILPDNNGSLYGDLKRICETDLGLISQCCLTKHVFKISKQYLANVSLKINVKMGGRNTVLLDAISCRIPLVSDIPTIIFGADVTHPENGEDSSPSIAAVVASQDWPEVTKYAGLVCAQAHRQELIQDLYKTWHDPVRGTVSGGMIRDLLVSFRKATGQKPLRIIFYRDGVSEGQFYQVLLYELDAIRKACASLEPNYQPPVTFIVVQKRHHTRLFANNHRDRNSTDRSGNILPGTVVDSKICHPTEFDFYLCSHAGIQGTSRPAHYHVLWDENNFTADGIQSLTNNLCYTYARCTRSVSVVPPAYYAHLAAFRARFYMEPDMQENGSNGGGSGGHAAKATRASGETGVRPLPALKENVKRVMFYC

SEQ ID NO: 11596 - DNA, 2817 bp, Vitis vinifera
  CDS (1)..(2817)
atgacccacatgcaaatgaagaacccagagcagaagcatgtgatctctactaggaagcctctgcagaattccatgaatcaacaaacatcatcagaaattatgcccagcactgaagaaagcttggaaaatgcaaaaaggagtatagggaggagaaagggaaggagaagggggaaaggagccaaagtggagcagttgcaggatccaaagcttgatttaagtgttggttctcatgactcaagcaaaggtctggtgttccaccgcaggcccggttatggtcaattgggaaggaaatgtgtagttaaagccaaccatttcctagcgcaagtgccagatacagacttgagtcaatatagtgttaccataacccccgaagttgcttctcgcaaaatcaacaaatctatcatggcccagttggtgaaacttcacagagatactgacctagggatgaggctccctgtttatgatggtaaacgggtcctttacactgctggactgcttccatttgtatcaaaagagttcactgtgaaactggttgaagaggatgaggggacagggattacaaaggagcgagagttcaaagtgacaatcaagtttgtaggtatcactagtatggtccaattgcgagagtttcttgctgggaaacaagttgatactccccatgaaataattaggatctttgatattgtgttaaatcaactagcagcccaaaggtatgtatcagttgggagatgcttatattctcctgatattaaaaatcctcagcaactaggtgggggtttacaatcatggcaaggcttctataagagtataaggccaactcagatggggttatcattgaacatcgatatgtcatcaactgcattcattgaaccattacctgttattgactttgtggctcaacttttggacaaagatgtattttcaaggccattgtcagatgcagaccgtgtcaaggttaagaaagctcttagaggtgttaaagttgaagttacgcacagaggaaatgtacgaaggaaatatcggatttcaggactgacatcacaacctacaagggaactaattttcccagttgatgagcaaatgaacatgaaatcagttgttgagtactttcaggagatgtatggatttaccattcgatattctcatctaccttgcctccaagtaggtaaccagaggaaagtgaattacttaccaatggaggcttgtaagattattgggggacagagatataccaaagggctgactgacaagcagataacttccttgttaaaagtaacatgccaaagacccagggatcgagaaacagacattttacagaccattaaccaaaatgggtatgagaaagatccctatgcgaaggagtttggcatcactgtagatgaaaagcttgcttcagttgaagctcgagttctacctgcaccatggcttaaatatcacgataccggaaaagaaaaagaatatttgccgcaagttggtcaatggaatatgacaaacaagaaaatgataaatggaagcactatcaattactgggcttgcatcaacttctcacgaagtgttcaggagagtactgtaagcggtttttgtcatcagctggttcaaatgtgcaaagtttctggcatggaattcaaccatgagccagtaattccaatacattcagctagaccggatcaggttaagaaggccttgaaacatgtatatagtgctgctgcaaacaaacttggaggaaaagagttggagttactcattgccattcttccagacaacaatggctctttgtatggtgatttgaagcggatttgtgacacagatctggggttgatttctcagtgctgtcttactaaaaatgtctacaagattagcaaccagtacctggcaaacgtgtcacttaaaatcaatgttaagatgggtggaagaaatactgtgcttttagatgctttgagttcaggaattcctttggttagtgacattccaacaatcatatttggagccgatgtaactcatccagagactggagatgactcttgtccatcaattgctgctgtagtagcctcccaagactggccagaagtcaccaagtatgctggattggtatgtgctcaggctcatcggcaagaacttattcaagatttgtataaaacctggaaagatcctcaagggggcacagttactggaggcatgatcagagagcttttactttcatttaaggcagccactggaaaaaaaccattgaggataatattttacagggatggtgtcagtgaagggcagttctaccaggttctactatatgaacttgatgccattcgtaaggcctgcgcatcattggaacctagttaccaacctccagtgacatttgttgtcgtccaaaaacggcaccacactagactctttgcaagcaaccacaatgacaaaagcagcactgataggagtgggaacatcttacctggtactgtggtcgattcgaagatctgccatcccagtgagtttgacttttatctatgcagtcatgcaggaatccaggggaccagccgacccgctcattatcatgttctctgggatgagaacaactttacagcagatgagatccaatctttgacgaacaacctctgttacacgtatgcaaggtgcactcggtctgtttctctagttcctcctgcgtattatgctcatctggcagcctacagagctcgattctacatggaacctgataagcctgagaatgcaataccaaattgcatgcgcacatcaaatgaatcacgcgtccggcccctgccagcattgaatgagaaggtgaagaatgtgatgttctactgttag

SEQ ID NO: 11597 - protein, 938 aa, Vitis vinifera
MTHMQMKNPEQKHVISTRKPLQNSMNQQTSSEIMPSTEESLENAKRSIGRRKGRRRGKGAKVEQLQDPKLDLSVGSHDSSKGLVFHRRPGYGQLGRKCVVKANHFLAQVPDTDLSQYSVTITPEVASRKINKSIMAQLVKLHRDTDLGMRLPVYDGKRVLYTAGLLPFVSKEFTVKLVEEDEGTGITKEREFKVTIKFVGITSMVQLREFLAGKQVDTPHEIIRIFDIVLNQLAAQRYVSVGRCLYSPDIKNPQQLGGGLQSWQGFYKSIRPTQMGLSLNIDMSSTAFIEPLPVIDFVAQLLDKDVFSRPLSDADRVKVKKALRGVKVEVTHRGNVRRKYRISGLTSQPTRELIFPVDEQMNMKSVVEYFQEMYGFTIRYSHLPCLQVGNQRKVNYLPMEACKIIGGQRYTKGLTDKQITSLLKVTCQRPRDRETDILQTINQNGYEKDPYAKEFGITVDEKLASVEARVLPAPWLKYHDTGKEKEYLPQVGQWNMTNKKMINGSTINYWACINFSRSVQESTVSGFCHQLVQMCKVSGMEFNHEPVIPIHSARPDQVKKALKHVYSAAANKLGGKELELLIAILPDNNGSLYGDLKRICDTDLGLISQCCLTKNVYKISNQYLANVSLKINVKMGGRNTVLLDALSSGIPLVSDIPTIIFGADVTHPETGDDSCPSIAAVVASQDWPEVTKYAGLVCAQAHRQELIQDLYKTWKDPQGGTVTGGMIRELLLSFKAATGKKPLRIIFYRDGVSEGQFYQVLLYELDAIRKACASLEPSYQPPVTFVVVQKRHHTRLFASNHNDKSSTDRSGNILPGTVVDSKICHPSEFDFYLCSHAGIQGTSRPAHYHVLWDENNFTADEIQSLTNNLCYTYARCTRSVSLVPPAYYAHLAAYRARFYMEPDKPENAIPNCMRTSNESRVRPLPALNEKVKNVMFYC

SEQ ID NO: 11598 - DNA, 2715 bp, Populus trichocarpa
  CDS (1)..(2715)
atggcatcatcttcgaatgcgccaccgccctcggcttcgagttcggcttcgatggaggagctgagtcaagagatcgcaaaaaaattgtcatttggaagtactagtgcgacgggagggtcggtgcctgtgtcatcaaaggccattgtgcctccgccccggccacaacttggaaggataggaaggaaatgtacgattagagcaaatcattttgtagttgaggtttctgatagagatctctttcactacgatgtggcaataactcctgaaattacatcgaagaaagtaaatagagatgtaatatctcagcttgttcgttcttatcgtgagtcccacttgggcaatcggatgccagcttatgatggcaggaaaagtctatacactgctggggcattgccttttgaagcaaaggaatttgtcgtgaagttggttgagaagaatgatcctgctagttcatccagttctgaacgtcaatttaacgtggcaatcaaatatgcatccaaagttgatatgcatcatttaaaggaattcctaagtggcagacaaaaggatgttccacaggaaaccatacaaatccttgacattgttctcagagcatcaccatcagaaaagtacgttactgttgggaggtcattcttctcacttgatttgggcaaaaaaggcgagcttggtaatggaatagaatactggagaggttattatcaaagtcttcggccaacccaaatgggactctctttaaatattgatgtgtcagccagatccttttatgagccaattttggtgactgagtttgtggccaagtacttcaatctcagagacttgtcaaggcctctttctgatcaggatcgtgttaaggtgaaaagggccttaagaggaatcaaagtggaaatttcatacagggactatgccagaagcttcaaggttactggcatatctaatctaccagtagacaagacaatgtttactctggatgataagaaaacaaaggtgtctgtccatcagtatttctgggacagatacaatattgggctgaaatatacatctttgcctccccttcaagccggaactgatgcgaaacccatttatttgcccatggagctctgtaagattgctggaggacagcgatacacaaagaaactaaatgaaagacaagtcactgcacttttaagagctacctgtcaacgcccttctgctagggaaaatagcattaaggaggcaaataatctctcttcgacatctttgaatgtgcttgtaaggaatgaatttggtattcaagtgaaagaagaactaacatcggttgatgcccgagttttacccccacccatgcttaaatatcatgatacagggcgagaagctagagtggatccacacttaggacaatggaatatgattaacaagaaaatggtgaatggtggcaaaattgatttctggacgtgtgtgaacttttctacaaaagtgcatagagacttgccatttgaattttgttggcaattaatggatatgtgcaacagcaaaggaatggaattccacccagatcccattattcagatacattcagctgattccaggcatattgagaaggctcttcatgatgttcataagaaatgtactgcaaaacttgcaaatcagaaggggaaacagcttcaactgctgatcattattctacctgatttcagtggatcctatgggaaaatcaaacgtatttgtgaaactgagttgggaatagtttcacaatgctgccagccccagcaggcaaagaagctcagcaaacaatacctggaaaatgttgctctcaaaattaatgtgaaggctggtggacgaaacactgtgttaaatgatgctattcaaagaagaattcctaacgttactgatcttcctactattatttttggtgctgatgtgacccatccacagccaggggaagactctagcccgtcgattgcagcagtagtggcttctatggactggccagaggtaaccaaatatagaggacttgtctctgcacaggctcatcgcgaggaaattattcaggatctttacaaaaaatatcaggatccacaaaagggtttagttcacagcggaatgatcagggagctgtttattgcattcagaagatcaacaggccaaaaacctcatagaattatattctatagagatggtgtaagtgaaggccaattcagccaagttctgctacatgagatgcaggcgatacgagaggcatgtggcaccctggaagaaggatattgtcctccggttacctttgttgtagtgcagaaacggcatcatacacgcttctttcctgctgaccatagcaagcgagatctgactgacaggagtggcaatatcctaccaggcacggtcgtggacactaaaatttgccaccctacagagtttgatttctaccttaacagtcacgctggaattcagggaactagcagacctacacactaccatgtattgtttgatgaaaacaacttcactgctgatggcttacaaaccctcactaacaatttgtgctacacgtatgcaagatgcactcggtctgtttccatagtgccccctgcatattacgcccatttggcagcttttagggctcggtattacattgagggtgaaacatcagacagtggttctactggtgcgactgggaggagtgtggaggcccgatctcttccagtcgtcaaagaaaatgtcaaggatgttatgttttactgttga

SEQ ID NO: 11599 - protein, 904 aa, Populus trichocarpa
MASSSNAPPPSASSSASMEELSQEIAKKLSFGSTSATGGSVPVSSKAIVPPPRPQLGRIGRKCTIRANHFVVEVSDRDLFHYDVAITPEITSKKVNRDVISQLVRSYRESHLGNRMPAYDGRKSLYTAGALPFEAKEFVVKLVEKNDPASSSSSERQFNVAIKYASKVDMHHLKEFLSGRQKDVPQETIQILDIVLRASPSEKYVTVGRSFFSLDLGKKGELGNGIEYWRGYYQSLRPTQMGLSLNIDVSARSFYEPILVTEFVAKYFNLRDLSRPLSDQDRVKVKRALRGIKVEISYRDYARSFKVTGISNLPVDKTMFTLDDKKTKVSVHQYFWDRYNIGLKYTSLPPLQAGTDAKPIYLPMELCKIAGGQRYTKKLNERQVTALLRATCQRPSARENSIKEANNLSSTSLNVLVRNEFGIQVKEELTSVDARVLPPPMLKYHDTGREARVDPHLGQWNMINKKMVNGGKIDFWTCVNFSTKVHRDLPFEFCWQLMDMCNSKGMEFHPDPIIQIHSADSRHIEKALHDVHKKCTAKLANQKGKQLQLLIIILPDFSGSYGKIKRICETELGIVSQCCQPQQAKKLSKQYLENVALKINVKAGGRNTVLNDAIQRRIPNVTDLPTIIFGADVTHPQPGEDSSPSIAAVVASMDWPEVTKYRGLVSAQAHREEIIQDLYKKYQDPQKGLVHSGMIRELFIAFRRSTGQKPHRIIFYRDGVSEGQFSQVLLHEMQAIREACGTLEEGYCPPVTFVVVQKRHHTRFFPADHSKRDLTDRSGNILPGTVVDTKICHPTEFDFYLNSHAGIQGTSRPTHYHVLFDENNFTADGLQTLTNNLCYTYARCTRSVSIVPPAYYAHLAAFRARYYIEGETSDSGSTGATGRSVEARSLPVVKENVKDVMFYC

SEQ ID NO: 11600 - DNA, 2793 bp, Populus trichocarpa
  CDS (1)..(2793)
atggaatccactgaagagccagaggccctccctccacctccatccgatgccctccctccacctccacctgatgccctccctccacctccacctgagataccgccaaatgtagttcctgttcaattgacaacagactctgttccggaggaaacaaaaaagatatcaaaaccaaaacgttccccgattgccaggcgtggatttgggtctagagggcaaaaaatacaactgctctcaaatcatttcaaagtttccatctctaatactggtggccacttttttcattactgtgtttccttgtcttatgaggatggtcgccctattgatgcaaagggcattgggagaagattaattgataaagttcatgagacctatggctcagaccttgctgggaaggactttgcatatgatggagagaagagcttatttacaattggtgctctgcctcgaaacaaaatggaattcactgttttgctcgatagtttctcatcaaataggaattctggaaatggcagtcctgttggcaacggaagtccaaacgagactgataaaaagaggatgaggcgggcattccagtccaaaacatttaaagtggagatgagttttgctgccaaaatccctatgcaggctattgcagctgctttgcgtggtcaagaatcagaaaactcacaggaagccttaagagtcttagacatcattttaagacagcatgcagccaaacagggttgccttcttgttcgccagtcattctttcacgatgatccaaagaactatgttgatctgggaggaggtgtccttggatgccgaggatttcattcgagctttagaacctcgcagggtggattatccctaaatatagatggttcgactacaacgataatacagcctgggcctcttattgactttctcatagccaaccagaatgtgtcaaacccctttcagattgactgggcaaaggctaagcgaacattgaaaaatctgaggataagggtgtcacctaccaatcaagagtacagaatcactggcttgagtgaaaatacttgcaaagagcaaatgttctctctgaaatcaagagcatctgatggaaatgatgttgaaagtgttgacattacagtttaccattattttgtaaatcatcgcagcatagatttacgctactctggagatttgccttgcatcaatgttggcaagcctaaaaggcccacttacattcctgtcgagctttgttcactgcttcccttgcaacgctatataaaggcactaactgtccttcagagatcacagttagtagaaaaatcaagacaaaaaccacaagaaaaaattaggatcttaactgatgttatgaaaagcaacaactatgctgcagaacaaatgttgcgttcttgtggtatcaccatcagcagccagtttactcaagttcaaggccgtgtcctaactgctccaaagttaaaggcaggaaatggcgaggatgttattccaagaaatgggcggtggaattttaatcataagaaatttttcgaaccttctaaaattgaaaactgggccgtggtgaacttttctgctcgttgtgatgtgcgtggtctagtcagagatttgataagatttggagaaatgaaagggattctcataagtgacccggtggatgttgttgaagagaatggtcagtttcgacgggcaccgcctcttgttcgagtggagaagatgtttgaacagatacagaaagcatttccaaatgcacctcctcgctttctcgtgtgtcttcttcctgataggaagaactctgacatatatggtccttggaaaagaaagaatcttgcagaatatggaattttcaatcaatgcctggcacccactagagttaatgagcagtatatacttaatgttctcctgaagataaatgctaagcttggtggtttgaattctttgttggccatggagcaatcacgaaacatcccattcgtctcgaaggttcctacaataatatttggaatggatgtatcacatggttcgcctggtcagtctgacatgccctccattgctgcggttgtcagttctagaaactggcctctactttctcgttatagagcttctgtgcgtagtcagtcaccaaaagttgagatggtagattctctttttacactaacaccggataagaaagatgattctgggattgtcagggaattgttgttggactactataggagttctggccaaacaaaaccagctcagataatcatattcagggatggagttagcgagtcacagttcaatcaagtcctcaacatcgagctggatcaaatcattgaggcatgcaagttccttgatgaaagctggtcacccaagttcactgttattgttgcacagaaaaatcatcacactaaatttttccaagatggatctccagacaatgttcctcctggaaccgttattgataatgctgtttgtcacccacaaagctatgatttctacatgtgtgcacatgcagggatgataggaacaacaaggccaacacattatcacgttcttttagatgagattggcttttcagctgatgatctacaggagttgattcactctttgtcttatgtgtaccaaagaagcacaacagcaatatctgtagttgctcctgtccgttatgctcacttggcagcaactcagatttcacaattcttgaagtgtgatgacatgtcagagacatcctcgagccatggaggtctaacttctgctgggcaaacccctgtgcccgagcttcctgagctacaccggaatgtctgcagctctatgtttttctgctga

SEQ ID NO: 11601 - protein, 930 aa, Populus trichocarpa
MESTEEPEALPPPPSDALPPPPPDALPPPPPEIPPNVVPVQLTTDSVPEETKKISKPKRSPIARRGFGSRGQKIQLLSNHFKVSISNTGGHFFHYCVSLSYEDGRPIDAKGIGRRLIDKVHETYGSDLAGKDFAYDGEKSLFTIGALPRNKMEFTVLLDSFSSNRNSGNGSPVGNGSPNETDKKRMRRAFQSKTFKVEMSFAAKIPMQAIAAALRGQESENSQEALRVLDIILRQHAAKQGCLLVRQSFFHDDPKNYVDLGGGVLGCRGFHSSFRTSQGGLSLNIDGSTTTIIQPGPLIDFLIANQNVSNPFQIDWAKAKRTLKNLRIRVSPTNQEYRITGLSENTCKEQMFSLKSRASDGNDVESVDITVYHYFVNHRSIDLRYSGDLPCINVGKPKRPTYIPVELCSLLPLQRYIKALTVLQRSQLVEKSRQKPQEKIRILTDVMKSNNYAAEQMLRSCGITISSQFTQVQGRVLTAPKLKAGNGEDVIPRNGRWNFNHKKFFEPSKIENWAVVNFSARCDVRGLVRDLIRFGEMKGILISDPVDVVEENGQFRRAPPLVRVEKMFEQIQKAFPNAPPRFLVCLLPDRKNSDIYGPWKRKNLAEYGIFNQCLAPTRVNEQYILNVLLKINAKLGGLNSLLAMEQSRNIPFVSKVPTIIFGMDVSHGSPGQSDMPSIAAVVSSRNWPLLSRYRASVRSQSPKVEMVDSLFTLTPDKKDDSGIVRELLLDYYRSSGQTKPAQIIIFRDGVSESQFNQVLNIELDQIIEACKFLDESWSPKFTVIVAQKNHHTKFFQDGSPDNVPPGTVIDNAVCHPQSYDFYMCAHAGMIGTTRPTHYHVLLDEIGFSADDLQELIHSLSYVYQRSTTAISVVAPVRYAHLAATQISQFLKCDDMSETSSSHGGLTSAGQTPVPELPELHRNVCSSMFFC

SEQ ID NO: 11602 - DNA, 2772 bp, Populus trichocarpa
  CDS (1)..(2772)
atggagtcttcagattcacggaaagatttgccaccacctccggctataattcctgctgacgtggtgaaaacagaattgggtccaacttgtgaacaaacaaagaaagcagcaaccccaaaacgagttcccatggctcgccgtggctacggagctaaaggacagagaatacaactactaactaaccatttcaaagtggcagtgcccaagtcaaatgaccacttctaccaatacagtgttgctctattttatgaagatggccacccgaccgatggaaagggaatcggaagaaaggttatggacaaagtccaggagacctatgattctgagctggaaggtaagcagcttgcttatgacggggagaagaccctgtttacgactggttctcttccacacaacaagctggaattcactgttgtgttggaagatgtctccttaaccagaggtggagataacgacagttccaggggtaatggcagccccagtgaaagtgatcaaaagcgaaggaagcggccctaccactccaaaacgattaaagtacaaatcagctacgcaactaaaattccagttcaagcaattgcagctgttctgcagggtcaagaatctgagcattttcaagaagctgtcagagttctagacattgtgctaagacagaatgcagcaaggcagggttgcctgttggtccgacagtcgtttttccataataatccaagaaacttcgttgagttgggaggtggtgtcatgggatgccgtggttttcattcaagttttcgagctgcccaggatggcctatccctgaatattgatgtatcaaccaccatgatagttaaacctggaccagtagtggacttcctaatcatgaatcagaatgttcgagatccttaccatattgactggacaaaggctaagaggatgcttaaaaatttgaggattaaaactaatcactccaacactgagtacaaaatcactggattgactgaaaaatcctgcagagagcaaactttctcgctaaaccaaagaagtggacgggacggggatggtgaagtgcaaactattgaggttacggtttatgattactttgtcaatcatcgcaacatgggattgcagtattcagctgatttcccgtgcattaatgttgggaaaccaaagcgcccatcgtattttcctcttgagctgtgcaatctggtttcgttacaacgctacaccaaagcgttgtccagcctgcaaagggcttcccttgtggagaaatcacggcagaagccccaagagcggatgagatctttgactgatgctttgagaagcagcaattatgatgctgatccaatgcttcgttcttctggaatttcaattagtgctcagtttactcaagttgaaggtcgtgttttatctgctcccaggttaaaagtgggaaatggagaggacttcttccctcgaaatgggagatggaatttcaacaacaagaaactagtggatccagtgaagattgaaaaatgggctatagtaaacttctctgcacgttgtgacatacgttatctgtgcaataacttgataaagtgtggagacatgaaaggcattagcataagtaatccatttgaggtatttgaagagagtccccagtttaggcgagaatctgctcctgtaagagtggagagaatgttcgaggccattaagtctaagcttccagggccgccacaatttctgttgtgtattcttccagagaggaagaactctgacatttatggtccatggaaaaggaaaaatctttctgatttagggatcgtcacacagtgcattgcacctacaaaggtgaatgatcagtacctgacaaatgtgctactgaaaatcaatgccaaggtagaattttgcaatgttataccgtttgagcttggtggaatgaattccttgttatcaattgagcatgctccttctatacctttggtgtctaagcttcccaccttaatacttgggatggatgtatcacatggctctcctggtcattctgatgtgccatctattgctgcggtggtaagttccaggcactggccattaatttctcgctacagagcttctgttcgcacccagtcacagaaggttgaaatgattgcaaatctattcaagcctgttgctggtactcgtgaggatcagggcattatcagggagtcacttctggacttctactcgagctcaggaaaaagaaagcctgatcagataattattttcagggatggagtgagcgagtcacagttcatccaagttctaaacattgaacttgaacaaattattgaggcctgcaagttcttggatgagaactggtgcccgaaattcatggtgattgttgcccagaaaaatcaccataccaagttcttccagtcgggatcacctgataatgttccacctggtactgtcattgacaacaaggtttgccatcccagaaacaatgacttctacatgtgtgctcatgctgggatgattggaacgactcggcctactcattaccatgttctacatgatgagcttggtttttctgcagatgatttacaagagcttgtgcactccttgtcatatgtgtatcagaggagcaccactgccatatctgtagttgctccaatttgctatgcccacttagctgcaagccagatgactcagtttatcaaattcgatgatttgtcagacacatcctctagccatggtggggttactgttccaggtgctgttccagttccagaattacctcgtctgcataataatgtcagcagttcgatgttcttctgttaa

SEQ ID NO: 11603 - protein, 923 aa, Populus trichocarpa
MESSDSRKDLPPPPAIIPADVVKTELGPTCEQTKKAATPKRVPMARRGYGAKGQRIQLLTNHFKVAVPKSNDHFYQYSVALFYEDGHPTDGKGIGRKVMDKVQETYDSELEGKQLAYDGEKTLFTTGSLPHNKLEFTVVLEDVSLTRGGDNDSSRGNGSPSESDQKRRKRPYHSKTIKVQISYATKIPVQAIAAVLQGQESEHFQEAVRVLDIVLRQNAARQGCLLVRQSFFHNNPRNFVELGGGVMGCRGFHSSFRAAQDGLSLNIDVSTTMIVKPGPVVDFLIMNQNVRDPYHIDWTKAKRMLKNLRIKTNHSNTEYKITGLTEKSCREQTFSLNQRSGRDGDGEVQTIEVTVYDYFVNHRNMGLQYSADFPCINVGKPKRPSYFPLELCNLVSLQRYTKALSSLQRASLVEKSRQKPQERMRSLTDALRSSNYDADPMLRSSGISISAQFTQVEGRVLSAPRLKVGNGEDFFPRNGRWNFNNKKLVDPVKIEKWAIVNFSARCDIRYLCNNLIKCGDMKGISISNPFEVFEESPQFRRESAPVRVERMFEAIKSKLPGPPQFLLCILPERKNSDIYGPWKRKNLSDLGIVTQCIAPTKVNDQYLTNVLLKINAKVEFCNVIPFELGGMNSLLSIEHAPSIPLVSKLPTLILGMDVSHGSPGHSDVPSIAAVVSSRHWPLISRYRASVRTQSQKVEMIANLFKPVAGTREDQGIIRESLLDFYSSSGKRKPDQIIIFRDGVSESQFIQVLNIELEQIIEACKFLDENWCPKFMVIVAQKNHHTKFFQSGSPDNVPPGTVIDNKVCHPRNNDFYMCAHAGMIGTTRPTHYHVLHDELGFSADDLQELVHSLSYVYQRSTTAISVVAPICYAHLAASQMTQFIKFDDLSDTSSSHGGVTVPGAVPVPELPRLHNNVSSSMFFC

SEQ ID NO: 11604 - DNA, 2991 bp, Populus trichocarpa
  CDS (1)..(2991)
atgcctgtaaggcaaatgaaagagagctcggagcagcacttagtgataaaaacccacatgcagaactccatgaaccaaccacaaaaacaccacaaaactgctcaaaatggaaaaggaccaccacaaccactccaagaaagttccaacactaaaccccaaaaccaggcctcacctcctgcaaagaacagagggaggagaagaggcagaggtggtagaaagtctgatcaaggagatgtatgtacgaggcctagttcaaggccttgtacagtggcacataaacctgttctgaacccaacaggtgatctcctggcaaatgcttctaatgggcatattgagaatagtaaaaatgtttgtgaaatggagatgggtttggggttccctacctcaagcaagtctttgagtttagctcctaggcctggttatggtcaagttgggactaagtgtattgttaaagccaaccatttccttgcagagttaccagacaaggacttgaaccagtatgatgttaccataactcctgaagtggcatcaagaactatgaacagagatattatggcagagctcgtgaggctttacaaagattctgacttgggaatgagactgcctgcttatgatggcagaaagagcttgtacacggctggtgagcttccttttgcttggaaggagttcataattaagcttattgatgaagaggatggtatcaatggtcccaagagagggagggaatacaaggtggtgatcaagtttgtcgcgagggccaatatgtatcatttaggtcaattcttagctgggaaacgtgctgatgccccgcaggaagctctacagattcttgacattgtactgagagagctatcttcaaagaggtattgccctgtcggaagatccttcttttcacctgatataagagcaccacaacgacttggtgatggcttagagtcctggtgtggattttaccagagtataaggcctactcaaatgggactgtccttaaatattgatatggcctcagctgctttcatcgagcctcttcctgtgatagagttcgttgcccagcttctaggcaaagatatattatcaaggccattgtctgattctgatcgagttaagattaagaagggtctcagaggagtgaaagttgaagttactcacagagggagtgtacgaagaaagtaccgtgtctcaggattgacatctcagcctacaagagaacttgtgtttcctgttgatgataactcgaccatgaagtcagttgttgaatacttccaggagatgtatggctttaccattcaacatacacatctaccttgccttcaggttggaaaccagaagaaagcaaactatctacctatggaggcttgcaaaattgtggaggggcagcgttatacaaaaaggttgaatgagaggcaaattactgccctcttaagagttacatgccaaagacccagggatcgagaaaatgacattttacagacagttcagcataatgcttatgatcaagatccttatgcaaaggaatttggtatcaaaatcagtgaaaagctagcttctgttgaggctcgaattctccctgccccttggctgaaatatcatgaaactggaaaagaaaaggattgcttgcctcaagttgggcaatggaatatgatgaacaagaaaatgattaatggaatgactgtaagccggtgggcatgtattaacttctctaggagtgtgcaagagagtgttgctcgtggcttttgcaatgaacttgcccaaatgtgtcaagtttctggaatggagttcaattcagagcctgtgatccctatttacaatgccaggcctgagcatgtagagaaagctttgaagcatgtgtatcatgcatccacgaacagaaccaaaggaaaagagctagagcttctcttagctattctacctgacaacaatgggtccctctatggtgatctgaagcgaatatgtgaaactgatcttggtttaataactcaatgttgtctctcaaaacacgttttcaagatcagtaagcagtacttggcaaacctgtcgctcaagatcaatgtaaagatgggtggtagaaatactgtccttttagatgctataagctgcagaataccattagttagcgacataccaaccattatttttggagcagatgtgactcacccagagaatggagaggactcaagcccctcgattgctgctgtggtagcttctcaggactggcctgaagtaacaaaatacgctggattggtatgtgctcaagctcacagacaggaactcatacaggacttatacaaaacatggcaagatcctgttcgtggtactgtaagtggtggcatgatcagagatctcctgatttctttcaggaaagcaacggggcaaaagccgctaaggatcatattttatagggatggtgtaagtgaagggcaattttatcaagttctgctttatgagttggatgcaattcggaaggcctgcgcttctttggagccaaattatcagccaccggtgactttcattgttgtacaaaaacgtcaccacacaagattgtttgctaacaaccatagggacaggaatagcacagacaagagtggaaacatattacctggcactgtggttgattctaaaatctgtcatccaacggaatttgacttttatctctgtagccatgctggtattcagggaacaagtagaccagcacactatcatgtgttgtgggatgagaacaatttcacagctgatggaatccagtccttgacaaacaatctctgttacacatacgcaaggtgcacgcggtctgtttcagtggttccacccgcatactatgcacatttagctgcttttcgtgctcgattttacacggagccagtaatgcaggagaatggctcagcaggcagtggtgcttgccatggtgctaagggaacgcggacaggagaatctggtgtccggccacttccagccttgaaagagaatgtaaagagagtaatgttttattgttag

SEQ ID NO: 11605 - protein, 996 aa, Populus trichocarpa
MPVRQMKESSEQHLVIKTHMQNSMNQPQKHHKTAQNGKGPPQPLQESSNTKPQNQASPPAKNRGRRRGRGGRKSDQGDVCTRPSSRPCTVAHKPVLNPTGDLLANASNGHIENSKNVCEMEMGLGFPTSSKSLSLAPRPGYGQVGTKCIVKANHFLAELPDKDLNQYDVTITPEVASRTMNRDIMAELVRLYKDSDLGMRLPAYDGRKSLYTAGELPFAWKEFIIKLIDEEDGINGPKRGREYKVVIKFVARANMYHLGQFLAGKRADAPQEALQILDIVLRELSSKRYCPVGRSFFSPDIRAPQRLGDGLESWCGFYQSIRPTQMGLSLNIDMASAAFIEPLPVIEFVAQLLGKDILSRPLSDSDRVKIKKGLRGVKVEVTHRGSVRRKYRVSGLTSQPTRELVFPVDDNSTMKSVVEYFQEMYGFTIQHTHLPCLQVGNQKKANYLPMEACKIVEGQRYTKRLNERQITALLRVTCQRPRDRENDILQTVQHNAYDQDPYAKEFGIKISEKLASVEARILPAPWLKYHETGKEKDCLPQVGQWNMMNKKMINGMTVSRWACINFSRSVQESVARGFCNELAQMCQVSGMEFNSEPVIPIYNARPEHVEKALKHVYHASTNRTKGKELELLLAILPDNNGSLYGDLKRICETDLGLITQCCLSKHVFKISKQYLANLSLKINVKMGGRNTVLLDAISCRIPLVSDIPTIIFGADVTHPENGEDSSPSIAAVVASQDWPEVTKYAGLVCAQAHRQELIQDLYKTWQDPVRGTVSGGMIRDLLISFRKATGQKPLRIIFYRDGVSEGQFYQVLLYELDAIRKACASLEPNYQPPVTFIVVQKRHHTRLFANNHRDRNSTDKSGNILPGTVVDSKICHPTEFDFYLCSHAGIQGTSRPAHYHVLWDENNFTADGIQSLTNNLCYTYARCTRSVSVVPPAYYAHLAAFRARFYTEPVMQENGSAGSGACHGAKGTRTGESGVRPLPALKENVKRVMFYC

SEQ ID NO: 11606 - DNA, 2964 bp, Populus trichocarpa
  CDS (1)..(2964)
atgtctcgccgtggtggcggccgacgatccgaaactcgtcgtgaccaggactcatccgctccgtcaccttcatttcagcgcggtggtggtggtggaggccgtggccgtggtggaagaggcgtctccactcctgctccgtctccaactccagttcgtgctcctacctcggcggcacccggctacctctccgcaaccgcaggtccttcggcaaaaccaactcctcaagcggcttatacagcggcggcggcttcgagttcctcttcagtcggggagctgagtcaagagaccgcaaagaagttgacattgggagggctggtgcctgtctcttcaaaggcgatagtgcctccgcgacgaccagattatggaaagatagggaagaaatgtgtgattagagcgaatcattttgtagttgaggtttctgatagagatctctttcactacgatgtggcaataactcctgaaattacatcaaagaaagtcaatagagatgtaatatctcaacttgttcgttcttaccgtgagtctcatctgggcaaccggatgccagcttatgatggcaggaaaagtctatacactgctggggcattgccttttgaagcaaaggagtttgttgtgaagttggctgagaggggtgatcctgccagttcatccagttctgtcaaaaaggaacgtcaatttaaggtggccatcaaatatgcatccaaagttgatatgtatcatttgaaggagttccttagtggtagacaagcggatgctccacaggaaaccatacaaatccttgacattgttctcagagcatcaccatcagagaagtacattactgttgggcgatcgtttttctcacctgatttgggtccaaaaggcgatctcggtgatggaatagaatattggagggggtattatcaaagtcttcggccaacccaaatgggactatctttcaatattgatgtgtcggccagatccttttatgagccaattttggtaactgagtttgtagcgaagtactttaattttagagacttatcaaggcctctttctgatcaggagcgtgttaaggtgaaaagggccttgagaggaatcaaagtacaaattacttacagtgactacactaaaagctacaaggttactggcatatctaatctaccagtaaacaaaacaatgtttactctggatgataagaaaacaaaggtgtcagtctatcagtattttttggagagatacaatattgggctgaaatatacatctttgcctccccttcaagctggaactgatgcaaaacctatttatttgcccatggagctttgtcagattgctggaggacaacgatacactaagaagctaaatgaaagacaagtcacagcccttttaagagcaacctgtcaacggccttctgctagggaaaataatattaagcaggcaaataatctctccttgacatctttatttccatcattgcgaatcttgatttttatggtaaggcaaaatgattacagtaagaatgcgcttgtgagggatgaatttggaattcaagtgaaagaagaactcacattggttgatgctcgagtattaccccctcccatgcttaaatatcatgatacagggcgagaagctagagtggatccgcgctttggacaatggaacatgatagacaagaaaatggtgaatggaggcagaatcgatttctggacctgtttgaacttctctacaagagtgcacagagagttgccatctgaattttgttggcagttaatggatatgtgcaataacaaaggaatggaattcaacccagaacccattattccaatacgctcagctgattctaggcaaattgagaaggctcttcatgatgttcataagcaatgcactgcagaacttgcaaatcagaaggggaaacagcttcagctgctgattattattctacctgatgtcaccggatcctatgggaaaatcaaacgtgtttgtgaaactgagttaggaatagtttcacaatgctgtcagccccagcaggcaaagaagcttagcaaacaatacatggaaaatgttgctctcaaaattaatgtgaaggctgggggacgaaacactgtattgaatgatgcttttcatagaagaattcctcttcttactgatgttcctactattgtttttggtgctgatgtaacccatccacaagcgggagaagacgcaggcccatcaattgcagcagtagttgcttctatggattggccagaggtaaccaagtatagaggacttgtctctgcacaggctcaccgtgaagaaattatcgaggatctttacaaaaaataccaggatccaaagaagggtttagttcatggtggaatgatcagggaactgttaattgctttcaaaagatccaccggccaaaaaccttttagaattatattctacagagatggtgttagtgaaggtcaattcagccaagttctgctgcatgagatgcaggcaatacgacaggcatgtggctccctagaagaagggtattgtcctcgggttacctttgtagtagttcagaaaaggcatcatacacgctttttccctgctgaccatagcaggcgtgatcagactgacaagagtggcaatattttaccaggtacagttgttgatactacaatttgccaccctacagagtttgacttctacctaaacagtcatgctggaattcagggaaccagcagacctacacattaccacgtgttgtttgatgaaaacaacttcagttctgatggtttacaaaccctcactaacaatttgtgctacacgtatgcaagatgcactcggtctgtttccatagtgcctcccgcatattatgctcatttggcagcttttagggcgcgatattacattgagggtgaaacatcagatgctggttcatctggtgggactgctgagttccgtcctcttccggttatcaaagaaaatgtgaaggatgttatgttttactgttga

SEQ ID NO: 11607 - protein, 987 aa, Populus trichocarpa
MSRRGGGRRSETRRDQDSSAPSPSFQRGGGGGGRGRGGRGVSTPAPSPTPVRAPTSAAPGYLSATAGPSAKPTPQAAYTAAAASSSSSVGELSQETAKKLTLGGLVPVSSKAIVPPRRPDYGKIGKKCVIRANHFVVEVSDRDLFHYDVAITPEITSKKVNRDVISQLVRSYRESHLGNRMPAYDGRKSLYTAGALPFEAKEFVVKLAERGDPASSSSSVKKERQFKVAIKYASKVDMYHLKEFLSGRQADAPQETIQILDIVLRASPSEKYITVGRSFFSPDLGPKGDLGDGIEYWRGYYQSLRPTQMGLSFNIDVSARSFYEPILVTEFVAKYFNFRDLSRPLSDQERVKVKRALRGIKVQITYSDYTKSYKVTGISNLPVNKTMFTLDDKKTKVSVYQYFLERYNIGLKYTSLPPLQAGTDAKPIYLPMELCQIAGGQRYTKKLNERQVTALLRATCQRPSARENNIKQANNLSLTSLFPSLRILIFMVRQNDYSKNALVRDEFGIQVKEELTLVDARVLPPPMLKYHDTGREARVDPRFGQWNMIDKKMVNGGRIDFWTCLNFSTRVHRELPSEFCWQLMDMCNNKGMEFNPEPIIPIRSADSRQIEKALHDVHKQCTAELANQKGKQLQLLIIILPDVTGSYGKIKRVCETELGIVSQCCQPQQAKKLSKQYMENVALKINVKAGGRNTVLNDAFHRRIPLLTDVPTIVFGADVTHPQAGEDAGPSIAAVVASMDWPEVTKYRGLVSAQAHREEIIEDLYKKYQDPKKGLVHGGMIRELLIAFKRSTGQKPFRIIFYRDGVSEGQFSQVLLHEMQAIRQACGSLEEGYCPRVTFVVVQKRHHTRFFPADHSRRDQTDKSGNILPGTVVDTTICHPTEFDFYLNSHAGIQGTSRPTHYHVLFDENNFSSDGLQTLTNNLCYTYARCTRSVSIVPPAYYAHLAAFRARYYIEGETSDAGSSGGTAEFRPLPVIKENVKDVMFYC

SEQ ID NO: 11608 - DNA, 3189 bp, Populus trichocarpa
  CDS (1)..(3189)
atggtgaggaagagaagaaccgaaattcctcaaagtgggggtgagagttctgagtcgcaggaaactgatactggtcggggtgcccagcccccagctgagaggagtggtccacctcaacagggaggaggtggaggaggataccaaggtggaaggggttggggtccccagtctcagcaaggaggtcgtggaggtgggtatggtggacgaggccggggagggatgcaacaacagcaatatggtggagcccctgagtaccagggccggggaagagggcaacctcagcaaggaggtcgaggatatggtggtggtcgtcctggaggtggccgcggagggccatcttcaggtggatttagaccaccagcacccgagctgcaccaagctaccccagctccttatccagctgtggtgaccactcagcccacgccatctgaggcaagttcttcgatgcgaccaccagagccatcgctagcaactgtatcgcagcagctgcagcaactatctgttgagcaagaaggttcttctagccaggcgattcagccgctgccagcctcaagtaaatcagtgaggttccctcttcgaccaggaaaaggtagcactggcattaggtgtattgtaaaggccaatcacttctttgctgagctaccagataaggatttgcaccaatatgatgtcaccataacaccagaggtcacatcaaggggtgttaatcgagctgtaatggaacaactggttaaactgtaccgggaatctcatcttggaaagcgtcttcctgcttatgatggacggaagagtctatatactgccggagcacttccttttcaggcgaaagatttcaagatcaccctcattgacgatgatgatggatcaggcgggccaaggagagagagagaattcaaagttacaatcaaattggctgctcgtgctgacctgcaccacttgggactttttttgcggggacagcaagctgatgcgcctcaggaagcccttcaagttcttgatatagttctgcgtgaattgcctactgctaggtattgtcctgtgggtcgatcattttattcccctgacctaggaaggagacaatcacttggtgagggcttggagagttggcgtggtttctatcaaagtattcgtcctactcagatgggactatcgctgaacattgatatgtcatccacggccttcattgagccactgccagtcattgattttgtgactcagttattaaatcgtgacgtttcctctagaccgttgtctgattctgatcgtgtaaagattaaaaaggcactaagaggcgtcaaagttgaagttacacaccgtggaaatatgcgcagaaagtaccgtatttctggcttaacatcacaggcaacacgggagctgactttcccggttgatgaaagaggaaccctgaaatctgtcgtggagtacttctacgaaacctatggttttgtaattcaacaccctcaatggccttgtctacaagtaggaaatcaacagagacctaattatttgcctatggaggtctgcaagattgttgagggtcagaggtactccaaaagattgaacgagagacagataactgcattgttgaaggtgacctgccagcgtcctcaggaaagggagaaagatattatgcagacggtttatcacaatgcataccacaatgatccatatgcaaaggagtttggtatcaaaatcagtgataagcttgcttcagttgaagctcgcattctgcctcccccatggcttaagtatcatgacacaggcagagagaaggattgtcttcctcaagttgggcagtggaatatgatgaataagaaaatggtcaatgggggaagagtgaataattggatctgcgtcaatttttcacgaaatgtgcaagacagtgtggctcgaggattttgctatgaacttgcacaaatgtgtcaaatttctggcatggactttgctcttgagccattgctggctcctgtcagtggtcgtcctgagcatgtagaaagggttttgaaaaatcgataccatgaagcaatgaccaagctccggccccatagcaaggaacttgacttgcttattgtgattctccctgacaacaatggttctctttatggtgatttgaagcgtatttgtgagacagatcttgggcttgtttcccagtgctgtttgacaaagcatgtgttcaaaatgagcaagcaatatcttgctaatgtggctttgaagataaatgtgaaggttggaggaaggaatacagtacttgtggatgcaatatctagacgtatccctctagtcagcgaccgacctactattatttttggtgctgatgttactcatcctcatcctggggaggactcaagcccatctattgcagccgttgtggcttcgcaagattggccagaggttaccaaatatgctggcctggtttgtgctcaagcccaccgacaagagcttatccaagatttatataaaacatggcaggatcctgtacgagggacagtgtctggtggcatgatcaaggagcttctcatatccttccgtagggcaaccgggcagaagccacagcgaattatattctacagagatggtgtcagtgaaggacagttttatcaagttttgttgtacgagcttgatgctattcgtaaggcatgtgcttctttagagcccaattaccagcctcctgtgacatttgttgtggttcagaagcgtcatcacacaaggctgtttgcaaatgatcaccgtgaccgcaatgctgttgacaggagtgggaatatattgcctggtactgttgtggactcgaagatctgccatcctactgaattcgacttctatttgtgtagtcacgctgggattcagggcacaagccgtccagctcattaccatgtactttgggatgagaacaagtttactgctgatgggctgcagtccctgacaaacaatctttgctacacatatgcacgatgcacgagatctgtttccattgtgccacctgcatactatgctcatcttgctgcatttcgagctcgtttctacatggagccagagacatcagacagtgaatcaattgcaagtggcatggctggtggtcgtggaggtgctggtgggggtcctcgtccaacacgtggacctggtgctaatgctgctgtgaggcctttacctgccttgaaggagaatgtcaagcgggttatgttctactgctag

SEQ ID NO: 11609 - protein, 1062 aa, Populus trichocarpa
MVRKRRTEIPQSGGESSESQETDTGRGAQPPAERSGPPQQGGGGGGYQGGRGWGPQSQQGGRGGGYGGRGRGGMQQQQYGGAPEYQGRGRGQPQQGGRGYGGGRPGGGRGGPSSGGFRPPAPELHQATPAPYPAVVTTQPTPSEASSSMRPPEPSLATVSQQLQQLSVEQEGSSSQAIQPLPASSKSVRFPLRPGKGSTGIRCIVKANHFFAELPDKDLHQYDVTITPEVTSRGVNRAVMEQLVKLYRESHLGKRLPAYDGRKSLYTAGALPFQAKDFKITLIDDDDGSGGPRREREFKVTIKLAARADLHHLGLFLRGQQADAPQEALQVLDIVLRELPTARYCPVGRSFYSPDLGRRQSLGEGLESWRGFYQSIRPTQMGLSLNIDMSSTAFIEPLPVIDFVTQLLNRDVSSRPLSDSDRVKIKKALRGVKVEVTHRGNMRRKYRISGLTSQATRELTFPVDERGTLKSVVEYFYETYGFVIQHPQWPCLQVGNQQRPNYLPMEVCKIVEGQRYSKRLNERQITALLKVTCQRPQEREKDIMQTVYHNAYHNDPYAKEFGIKISDKLASVEARILPPPWLKYHDTGREKDCLPQVGQWNMMNKKMVNGGRVNNWICVNFSRNVQDSVARGFCYELAQMCQISGMDFALEPLLAPVSGRPEHVERVLKNRYHEAMTKLRPHSKELDLLIVILPDNNGSLYGDLKRICETDLGLVSQCCLTKHVFKMSKQYLANVALKINVKVGGRNTVLVDAISRRIPLVSDRPTIIFGADVTHPHPGEDSSPSIAAVVASQDWPEVTKYAGLVCAQAHRQELIQDLYKTWQDPVRGTVSGGMIKELLISFRRATGQKPQRIIFYRDGVSEGQFYQVLLYELDAIRKACASLEPNYQPPVTFVVVQKRHHTRLFANDHRDRNAVDRSGNILPGTVVDSKICHPTEFDFYLCSHAGIQGTSRPAHYHVLWDENKFTADGLQSLTNNLCYTYARCTRSVSIVPPAYYAHLAAFRARFYMEPETSDSESIASGMAGGRGGAGGGPRPTRGPGANAAVRPLPALKENVKRVMFYC

SEQ ID NO: 11610 - DNA, 2610 bp, Populus trichocarpa
  CDS (1)..(2610)
atgatcagtaggcgtggggttgggactagtgggcgtcacatatctttgctcaccaaccactttaaagtttctgtcaatgttccagatgcagtattttaccagtataatgtttccattacctcagaagataatagagctgttgaaagcaagggaattgggaggaaactgatcgataggctttaccaaacttattcctcagaatttgctggtaaaagatttgcttatgatggggagaaaagtttgtacactgtgggccctcttccacagaacaagtcggagttcacagtggtgcttgaggaatcttttgcaaaacatgaaagtgggagccctggtggtggtgagagccctcctgcagctgttaagcgatcaaagcgctcttatcggtcaaagacttttaaggtagaaacaagctatgctgctaaaatccccttgaagtcaatagcccttgccctcaaaggaattgagatagacaatagcactcaggatgcactcagagtgctggatattatcttaaggcagcaagcagctaacagggggtgccttttggttaggcagtcgttctttcatgatgattcaaggaacttcaatgatgtgggaggtggtgtaactggtgttaagggtttccattctagcttccgtaccactcagggtggcttgtctcttaacatggatgtgtccactacaatgatcctaactcctgggccagtaattgattttctgatagttaatcaaaatgtccgggaacctcgctatgttgattgggtgaaggccagaaggatgttgaaaaatttgagggtgaagacgaagcataacaacatggagtttaaaataattggtctgagtgagaagccatgcaatcaacaatattttcctatgaaactgaaaaacagggacggagctaatgttgaagcacagattgttgaagttactgtatatgattatttcactaaacactgtggcatacaacttggttattctgcatacctaccctgccttgatgttggtaaaccaaaacgtccaaactacctgccactggagctttgttcacttatttcacttcaacggtataaaaaagctttatcttcaatgcaaagagcatctttggttgaaaaatcacgacaaaagcctcaggaaagaataaaaactgtgactgaagccatgagaagctactgttatgatgaggatcctgtgctttcttcatgtggtatttctatagaaaaacaaatgacccaggttgatggccgcatccttgaaaccccaaagttgaaggttggtaatagtgaggattgtatcccacgatatgtgagatggaactttaacaataagacacttttaaaccccaccagcatcagtaagtgggccattgtcaacttttctgctcgctgtgatattagtcacgtctcccgtgagcttatcaactgtggaaggagaaagggcattaatattgaacgcccacatacattaattgaagaggaccaacaatctagaagaggcagccctcttgctagagttgaaaggatgtttgagctgatcagagagaagcttccagggcctcctgaatttattctttgtgtattggcagagaggaaaaactcagatatttatggaccgtggaagaagacaagtctcagtgattttggcattgttacacagtgcatatccccgacgaagattaatgaccagtatcttacaaatgtgcttcttaagatcaattctaagctaggaggaataaattctctgttggcaattgagcactcctcacatattccattgataatggatactcctacaatgattctgggcatggatgtctctcatggctctccaggtcgatcagacatgccatcagtggctgcggttgttggatctcgatgttggccactgatttctaggtacagagcatctgtaagaacgcaatctcctaaggtggagatgattgatgctttgtacaagcctttagcaaatgggaatgatgatggtataataagggaactgctcgtggatttctttcaaacaagcaaggggcacaaaccaaaacaaattattgtgttcagggacggtgtcagcgagtcacaattcaatcaggtgctgaacattgagctggagcaaattatcaaggcctatcaacatcttggtgaggttgacataccgaagttcacagtaattgtggctcagaagaatcaccacacaaagctttttcaagctggtggtggcactgaaaatgttcctcctgggacagttgttgacacaaagattgttcatcctagaaactatgatttctacatgtgtgctcatgcaggcatgattggaacttcaaggccagcacactatcatgtcttgctcgatgagattggtttctctccagatgaattgctaaatcttgtccactctctttcatatgtgtatcaaaggagtaccactgctgtttcgattgtggctcccatatgttatgctcacctggctgcagcacagatagggcagtttatgaagtttgaggatttttctgaaacctcttccggacagagaagcatgacatcagttggaagcacccctgttccagagctccccaggttacacgaaaatgtcgagggttcaatgttcttctgctga

SEQ ID NO: 11611 - protein, 869 aa, Populus trichocarpa
MISRRGVGTSGRHISLLTNHFKVSVNVPDAVFYQYNVSITSEDNRAVESKGIGRKLIDRLYQTYSSEFAGKRFAYDGEKSLYTVGPLPQNKSEFTVVLEESFAKHESGSPGGGESPPAAVKRSKRSYRSKTFKVETSYAAKIPLKSIALALKGIEIDNSTQDALRVLDIILRQQAANRGCLLVRQSFFHDDSRNFNDVGGGVTGVKGFHSSFRTTQGGLSLNMDVSTTMILTPGPVIDFLIVNQNVREPRYVDWVKARRMLKNLRVKTKHNNMEFKIIGLSEKPCNQQYFPMKLKNRDGANVEAQIVEVTVYDYFTKHCGIQLGYSAYLPCLDVGKPKRPNYLPLELCSLISLQRYKKALSSMQRASLVEKSRQKPQERIKTVTEAMRSYCYDEDPVLSSCGISIEKQMTQVDGRILETPKLKVGNSEDCIPRYVRWNFNNKTLLNPTSISKWAIVNFSARCDISHVSRELINCGRRKGINIERPHTLIEEDQQSRRGSPLARVERMFELIREKLPGPPEFILCVLAERKNSDIYGPWKKTSLSDFGIVTQCISPTKINDQYLTNVLLKINSKLGGINSLLAIEHSSHIPLIMDTPTMILGMDVSHGSPGRSDMPSVAAVVGSRCWPLISRYRASVRTQSPKVEMIDALYKPLANGNDDGIIRELLVDFFQTSKGHKPKQIIVFRDGVSESQFNQVLNIELEQIIKAYQHLGEVDIPKFTVIVAQKNHHTKLFQAGGGTENVPPGTVVDTKIVHPRNYDFYMCAHAGMIGTSRPAHYHVLLDEIGFSPDELLNLVHSLSYVYQRSTTAVSIVAPICYAHLAAAQIGQFMKFEDFSETSSGQRSMTSVGSTPVPELPRLHENVEGSMFFC

SEQ ID NO: 11612 - DNA, 2766 bp, Populus trichocarpa
  CDS (1)..(2766)
atggagtctaatgaagagccagaggcccttgctcctccacctgatgccctccctcctcctccacctgagataccaccaaatgtagttcctgttcaattgacaacaggcacttttcctgaggaaacaaaaaagacatcaaaattaaaacgttccccgattaccaggcgcggagttgggtctagagggcaaaaaatacaactagtctcaaatcatttcaaagtttctatctctaatactggtggccacttttttcactacagtgtttccttatattatgaggacggtcgccctgtcgatgcaaagggcattgggagaagattaattgacaaagttcatgagacttatgggtcagatcttgccgggaaggactttgcatacgatggagagaagagcttattcacaattggtgctctgccacgaaacaaaatggaattcactgttttgcttgatagtttctcatcaaataggaattctggaaatggaagccctgttggcaatggaagtcctaatgagaccgataaaaagaggatgaggcgggcattccagtccaaaacatttaaagtggagatgagttttgctgccaaaatccctatgcaagctattgcagctgctttgcgtggtcaagaatcggaaaactctcaggaagccttaagagtcttggacatcattttaagacagcatgcagctaaacagggttgccttcttgttcgccagtcattctttcacaataatccaaagaactatgttgatctgggaggaggagtccttggatgccgaggatttcattcgagctttcgagccttgcagggtggattatccctaaatatggatggttcgactacaacgataatacagcctgggccacttattgactttctcatagccaaccagaatgtgtcaaacccttttcagatcgactgggcaaaggcaaagcggacaatgaaaaatttgaggataaaggtgtcacctaccaatcaagagtacagaatcactggcctaagtgaaaatagttgcaaagagcaaatgttttcgctgaaatcaagagcagctgatggaaatgatgttgaaagttttgacattacagtttatgattattttgttaatcatcgcagcatagatttacgttactctggagatttgccatgcatcaatgttggcaagcctaaaaggcctacttacattcccgtcgagctttgttcactgctttctttgcaacgctacacaaaggcactgactgtccatcagagatcgcagttggtagaaaaatcaagacaaaaaccccaagaaaagattaggatcttagctgatgtaatgaaaagcaacaactatgctgcagaaccaatgctgcgttcttgtggcatcaccatcagcagccagtttactcaagttcaaggccgtgtgcttcctgctccaaagttaaaagcaggaaatggtgaggatgttattccaagaaatgggcggtggaattttaataataagaaattttttgaaccttctaaaattgaaaactgggcagtggtgaacttttccgcccgttgtgatgtgcgtggtctagtaagagatttgataaaatttggagaaatgaaagggattctcataagtgacccgatggatgttcttgaagagaatgctcagtttcgacgggcaccacctcctgttcgagtggataagatgtttgaacagatacagacagcttttccagatgctcctcctcgctttcttgtgtgtcttcttcctgataggaagaactctgacatatatggtccttggaaacgaaagaatcttgcagaatatggaattttcaaccaatgcctggcacccactagagttaatgatcagtatatattgaatgttctcctgaagataaatgctaagctcggtggtttgaattctttgttggctatggagcaatcacgaaacatcccttttgtttcaaaagttcctacaataatatttgggatggatgtatcacatggctcgcctggccagtctgacatcccatccattgctgcggttgtcagttctagaaactggcctctactttctcgttatagagcttctgtgcgtagtcagtcaccaaaagttgagatggtagattctctttttaaactaacagcagataagaaagatgattgtgggattgttagggaattgttgttagactactataagagttctggccaaacaaagccagctcagataatcatattcagggatggagttagtgagtcgcagtttaatcaagtcctcaacatcgagctggatcaaatcattgaggcctgcaagttccttgatgaaagctggtcacccaagttcactgtaattgttgcacagaaaaatcaccacactaaattcttccaagatggatctccagacaatgttcctcctggaactgttattgataatgctgtttgtcacccacaaacctatgatttctacatgtgtgcccatgcagggatgataggaacaactaggccaacacattatcatgttcttttagatgagattggcttttcagctgatgatctacaggagttgattcactctttgtcttatgtgtaccaaagaagcacaacagcaatatccctagttgctccagtccggtacgcacacttggcagcaactcagatttcacaattcttgaagtttgatgacatgtcagagacatcttcgagccatggaggtctgacttctgctgggcaagcacctgtgcctgagcttcctgagctacaccacaatgtccgcagctctatgtttttctgctga

SEQ ID NO: 11613 - protein, 921 aa, Populus trichocarpa
MESNEEPEALAPPPDALPPPPPEIPPNVVPVQLTTGTFPEETKKTSKLKRSPITRRGVGSRGQKIQLVSNHFKVSISNTGGHFFHYSVSLYYEDGRPVDAKGIGRRLIDKVHETYGSDLAGKDFAYDGEKSLFTIGALPRNKMEFTVLLDSFSSNRNSGNGSPVGNGSPNETDKKRMRRAFQSKTFKVEMSFAAKIPMQAIAAALRGQESENSQEALRVLDIILRQHAAKQGCLLVRQSFFHNNPKNYVDLGGGVLGCRGFHSSFRALQGGLSLNMDGSTTTIIQPGPLIDFLIANQNVSNPFQIDWAKAKRTMKNLRIKVSPTNQEYRITGLSENSCKEQMFSLKSRAADGNDVESFDITVYDYFVNHRSIDLRYSGDLPCINVGKPKRPTYIPVELCSLLSLQRYTKALTVHQRSQLVEKSRQKPQEKIRILADVMKSNNYAAEPMLRSCGITISSQFTQVQGRVLPAPKLKAGNGEDVIPRNGRWNFNNKKFFEPSKIENWAVVNFSARCDVRGLVRDLIKFGEMKGILISDPMDVLEENAQFRRAPPPVRVDKMFEQIQTAFPDAPPRFLVCLLPDRKNSDIYGPWKRKNLAEYGIFNQCLAPTRVNDQYILNVLLKINAKLGGLNSLLAMEQSRNIPFVSKVPTIIFGMDVSHGSPGQSDIPSIAAVVSSRNWPLLSRYRASVRSQSPKVEMVDSLFKLTADKKDDCGIVRELLLDYYKSSGQTKPAQIIIFRDGVSESQFNQVLNIELDQIIEACKFLDESWSPKFTVIVAQKNHHTKFFQDGSPDNVPPGTVIDNAVCHPQTYDFYMCAHAGMIGTTRPTHYHVLLDEIGFSADDLQELIHSLSYVYQRSTTAISLVAPVRYAHLAATQISQFLKFDDMSETSSSHGGLTSAGQAPVPELPELHHNVRSSMFFC

SEQ ID NO: 11614 - DNA, 2439 bp, Ixodes scapularis
  CDS (1)..(2439)
atggtgttggcaaaccactttgccttggagctgccgaacggcaatgtctatcattacgataagaagatgcgcgccctcagcacccatgtcaaccggcgggtgattcagcagctcgtgaacaagtatcgtggggagctgaacaagtgccttcccgcgtttgacggccgcaagaatctgtacacgcggcgcaagctgcccttcgaggagcgcatcttcaccgtggactatcaagaggaagagccccgcagacccggcgagccctcgcagcagttctcagtgaagattcactatgcggccacggtcaacctggacgccctgcacgcagtctacaacaaccgggtgcgcgtggttccgcaagaggtgatccaggcgctggacatcatcatgcggcatgggccgtgcatgcagtggacccccgtggggcgctccatcttcatgttaccaagccccagggaccaaaactccattggaggcgggcaggaggtgtggttcggctactacaccagcgtgcggcccgcccagtggaagcccatgctgaacatcgaccgctcggccacttcgttttatgaggagcagacaccgctggagttcatggtgaagttctctcttgagacgacgagctccttgaacgacagtcacatcaacaccctcgacgaggaactcaaactgctcaaggtggaggcgatgcacctgccatacccccgtaagtaccgcgtgatcaagatcacgagggtatcggtagtgaagctcgagttttccctagaggacaacacgaagaccagcgtggcggagtacttccgcaagaaataccccaggtttgcccattatccccagctgccgtgcatcatggttggcagcgctacgagacctgtctacatcccgctcgaggcctgtaggattcccaagggccagccataccgcaggaagcttgctcccgacatgactaaggagatgataaagaggacggcacaaccacctgcattgcggtttgcgaaaatcaaggaagcggtgcaagacgtggtgcagaaaagtcaaccctacctcagcgagttcggcatcaagataagcactgaaccgacgcagctcaagggacgcgtcctcgaggcccccaccatcgttatgaagggtgatcagaagctccatcccagggagggctcctgggacctgagggacgtgcagttccaccaggccgcttctgtggagagctgggtactgctcggcatgaacactccgcgtctgagaagagacgagttggaaaatttcaccagacttttccagcagaccggagggaaacttggcatgtcagtcagacccccactggacgtcaggatgagggatgtggggagaatcagtaccagtcagatcctggcagagatcaagaaggacttccctggagtgcaacttgtcatagtcgtccttggtcggaactcctcctatgctgatatcaagcaaactgccgagacgagcctggggatcaggacgcagtgcatcctggagcaaaacttcaccaggaactgcaaacctcaactaatggtgaatctgtgtcagaaaataaacgcaaagatgggcggcataaacaacggcctcctgctggcgcagaagccagagatcttcaggaagccggttataatcattggagcggacgtgtcccaccctgctcctggggaccgcatccggccatccatcgcggcctgcgtggggagcctggactccatcccgtccaagtaccgtgcgtccatccgagtgcagctggaagaccaggaggcagtggcccgtgtcgagatgattaaggacctctcgggcatggtgatcgaactgctcaaggccttccgcgaggccacgcgccataagccggagcacatcatcttctaccgcgacggagtcagcgagggccagtttgccgaagtgcgcgacctcgagctgcaggccattcgggacgcgtgcctttcgctgcagcccgacggcagcttcaagcctccggtcacattcattgtggtccagaagcgccaccacactcggttcatgccaaccaatgaccgagacggtgtgggcaaggcccgcaatgtgcccccgggcaccaccgtggacacagtcgtcacacaccctgtggactttgactttttcctgtgcagccactacggcatccaggggaccagcaaacccgctcactactatgtcgtccacgacgactacaacttctcgtcggacgacctgcagaagttgagctactacctgtgccacacgtatgccaggtgcgcccgtagcgtcagcatccccgcgccggtgtactatgcgcacctggcggcgttcagggccaaggagcacattttcagcaaggtggatgtctcgtgcaaggccagctcgaatttctcgaccagggagtatgaacacgccgtggcccttacggatgtcatgaagcaaatcatgtactttgtctga

SEQ ID NO: 11615 - protein, 812 aa, Ixodes scapularis
MVLANHFALELPNGNVYHYDKKMRALSTHVNRRVIQQLVNKYRGELNKCLPAFDGRKNLYTRRKLPFEERIFTVDYQEEEPRRPGEPSQQFSVKIHYAATVNLDALHAVYNNRVRVVPQEVIQALDIIMRHGPCMQWTPVGRSIFMLPSPRDQNSIGGGQEVWFGYYTSVRPAQWKPMLNIDRSATSFYEEQTPLEFMVKFSLETTSSLNDSHINTLDEELKLLKVEAMHLPYPRKYRVIKITRVSVVKLEFSLEDNTKTSVAEYFRKKYPRFAHYPQLPCIMVGSATRPVYIPLEACRIPKGQPYRRKLAPDMTKEMIKRTAQPPALRFAKIKEAVQDVVQKSQPYLSEFGIKISTEPTQLKGRVLEAPTIVMKGDQKLHPREGSWDLRDVQFHQAASVESWVLLGMNTPRLRRDELENFTRLFQQTGGKLGMSVRPPLDVRMRDVGRISTSQILAEIKKDFPGVQLVIVVLGRNSSYADIKQTAETSLGIRTQCILEQNFTRNCKPQLMVNLCQKINAKMGGINNGLLLAQKPEIFRKPVIIIGADVSHPAPGDRIRPSIAACVGSLDSIPSKYRASIRVQLEDQEAVARVEMIKDLSGMVIELLKAFREATRHKPEHIIFYRDGVSEGQFAEVRDLELQAIRDACLSLQPDGSFKPPVTFIVVQKRHHTRFMPTNDRDGVGKARNVPPGTTVDTVVTHPVDFDFFLCSHYGIQGTSKPAHYYVVHDDYNFSSDDLQKLSYYLCHTYARCARSVSIPAPVYYAHLAAFRAKEHIFSKVDVSCKASSNFSTREYEHAVALTDVMKQIMYFV

SEQ ID NO: 11616 - DNA, 2556 bp, Ixodes scapularis
  CDS (1)..(2556)
atgttcgtgtgcccccggaggcccaacgtgggcacagaggggcggcccatcctgctgcgggccaatcacttccagatctcgatgcccaggggctacctgcaccactacgacgtgaccatcacccccgacaagtgcccacgcaaggtcaacagggagatcatagagacgatggtgcagtcgtactcgaagatctttgggcagcagaagcccgtgttcgacggccgcaagaacatgtacacccgggacgacatcccgatcgggaaggacaaggcggagctggaggtgaccctaccgggggaaggcaaggaccgggtgtttcgggtggccatcaaatgggtggcccaagtgagcctgtacgccctggaggaggtgctcgaggggcgctccaggcacatccccatggacgcagtacaagccctggatgtggtcatgcgccacttgccctccatgacgtacacccccgtgggccgctccttcttttcgtcgccggacggctacttccacccgctgggaggcggacgggaggtctggttcggtttccaccagagcgtgcgccccagccagtggaagatgatgctcaacattgacgtgtcggccacggccttctacaaggcgcagcccgtgacggagttcatgtgtgaggtgctggagctgcgtgacatcaacgagcagcgcaagcccctgacggactcccagcgggtcaagttcaccaaggagatcaagggcctcaagatcgagatcacccactgcggcaccatgcgccgcaagtaccgcgtctgcaacgtcacccgtaggcccgcacagctccagtcttttccactacagctggagaatggtcagacggtggagtgcacggtggccaagtacttcctcgacaagtacaagatgaagctgcggtacccgcatcttccctgcctgcaagtggggcaggagcacaagcacacctacctgcccctcgaggtgtgcaacattgtggctgggcagcggtgcatcaagaagctcacggacatgcagacgtccaccatgatcaaggcaacggcccgatctgcgccggatcgagagcgggagatcaacaatctggttcgcaaggcggacttcaacacggacccctacgtgcaggagtttggtctctccatcagtaatactatgatggaggtacgaggtcgcattctgcctcctccaaagctacagtatggagggcggaccaagcagcaggccatcccgaaccaaggggtgtgggacatgcggggcaagcagttccacacgggggtcgagatccgcatctgggccatcgcctgctttgcgccccagcgcacatccgcatctggggccatcgcctgctttgcgccccagcgcacgtgccgagaggacgccctgcgcaacttcacccagcagctgcagaagatcagcaacgacgcgggcatgcccatcattgggcagccctgcttctgcaagtatgccacgggcccggaccaggtggagcccatgttccgctacctcaagtccaccttccagggcctgcagctggtcgtggtcgtgctgccgggcaagacccccgtctacgcggaggtgaagcgtgtgggggacacggtgctggggatggcgacgcagtgcgtgcaggccaagaacgtgaacaagacgtctccccagaccctctcgaacctgtgcctcaagatcaatgtgaagctgggcggtatcaacagcatcctggtgcccagcatcaggcccaaagtcttcaacgagccggtcatcttcctgggtgcggacgtcacacacccgccggccggcgacaacaagaagccttccatcgccgcggtggtaggcagcatggacgcccacccgagccggtacgcggccacggtgcgggtgcagcagcaccggcaggagatcatccaggacctggcctcgatggtgaaggagctcctgatccagttctacaagtcgacacgcttcaagccgaaccgcatcatcttctaccgggacggcgtgtcggagggccagttccagcaggtgctgcaccacgagctgctggcggtgcgggaggcctgcatgaagctagaggcggactacaagccgggcatcacctttgtggtggtgcagaagcggcaccacacgcgcctcttctgctcggacaagaaagagcagattggcaagagcggcaacatccccgcgggcaccacggttgacctgggcatcacccacccgaccgagttcgacttctacctctgctcccacgcgggcatccagggcacaagccgcccgtcgcactaccacgtgctgtgggacgacaaccagttctctgcggatgagctgcagtgcctgacgtaccagctgtgccacacgtatgtgcgctgcacccggtcggtgtccatcccggccccggcctactacgcccacctggtggccttccgggcacgctaccacctcgtcgagaaggagcacgacagtggagaaggcagccaccagtcgagcaacggcgacgaccgcacagtcgtggcgctggcgcgcgccgtcaccatccacccagagaccctgaaggtcatgtacttcgcctga

SEQ ID NO: 11617 - protein, 851 aa, Ixodes scapularis
MFVCPRRPNVGTEGRPILLRANHFQISMPRGYLHHYDVTITPDKCPRKVNREIIETMVQSYSKIFGQQKPVFDGRKNMYTRDDIPIGKDKAELEVTLPGEGKDRVFRVAIKWVAQVSLYALEEVLEGRSRHIPMDAVQALDVVMRHLPSMTYTPVGRSFFSSPDGYFHPLGGGREVWFGFHQSVRPSQWKMMLNIDVSATAFYKAQPVTEFMCEVLELRDINEQRKPLTDSQRVKFTKEIKGLKIEITHCGTMRRKYRVCNVTRRPAQLQSFPLQLENGQTVECTVAKYFLDKYKMKLRYPHLPCLQVGQEHKHTYLPLEVCNIVAGQRCIKKLTDMQTSTMIKATARSAPDREREINNLVRKADFNTDPYVQEFGLSISNTMMEVRGRILPPPKLQYGGRTKQQAIPNQGVWDMRGKQFHTGVEIRIWAIACFAPQRTSASGAIACFAPQRTCREDALRNFTQQLQKISNDAGMPIIGQPCFCKYATGPDQVEPMFRYLKSTFQGLQLVVVVLPGKTPVYAEVKRVGDTVLGMATQCVQAKNVNKTSPQTLSNLCLKINVKLGGINSILVPSIRPKVFNEPVIFLGADVTHPPAGDNKKPSIAAVVGSMDAHPSRYAATVRVQQHRQEIIQDLASMVKELLIQFYKSTRFKPNRIIFYRDGVSEGQFQQVLHHELLAVREACMKLEADYKPGITFVVVQKRHHTRLFCSDKKEQIGKSGNIPAGTTVDLGITHPTEFDFYLCSHAGIQGTSRPSHYHVLWDDNQFSADELQCLTYQLCHTYVRCTRSVSIPAPAYYAHLVAFRARYHLVEKEHDSGEGSHQSSNGDDRTVVALARAVTIHPETLKVMYFA

SEQ ID NO: 11618 - DNA, 2709 bp, Pediculus humanus corporis
  CDS (1)..(2709)
atgagtaaaatctctgccccaccgcctggacctcctggtcctggaccagtaggacctcctggggctgttggtggtcctggaggtatggtcatgacttcaacggggggatcactgctcccctcttctcctccagaattgccaatgttttgctgtccgaggagaccaagtttaggtagagaaggtagaccgatagcacttcgcgcaaatcattttcagatctcaatgccccgtgggtacgttcatcattacgacattaacattcaaccagataaatgtccgagaaaagtaaatagagaaattattgaaaccatggtacatgcttattcgaaaatttttggttctttaaaaccggttttcgatggaaggcaaaatttatacacaagggatcctctcccgattggaaatgatagggtcgaattagaagtaacacttccgggtgaaggaaaagatagagtttttcgggtaacaattaaatgggtggcacaagtttcattattcgcactggaagaggcactggaaggtcgtacgaggcaaataccctttgatacgattttggccttagatgttgttatgcgtcatttaccgagtatgacatacactcctgtaggtcgtagttttttctctagtcccgatggatattatcatcctttgggaggtggaagagaagtgtggtttggttttcatcaaagcgtacggccctcgcagtggaaaatgatgttgaacattgatgtttcggccactgcgttttacaaggctcaaccggtgattgactttatgtgtgaagttttggatatacgagagattaacgaacaacgaaaaactctcacggattcgcaaagagttaaatttacgaaagaaataaaaggacttaaaatagaaataacgcattgcggtacaatgaggaggaaatacagagtgtgtaatgtaactaggaggccagctcacatgcaaagttttccattgcaattggaaaatggtcaaacggtagagtgtactgttgcaaaatactttttagacaaatacaaaatgaaattaaagtatgcccacttaccttgtcttcaagttggtcaagagcataagcatacatatcttcctttagaagtttgcaatattgtagctggacaaaggtgtataaaaaaattgactgacatgcaaacaagcacgatgataaaagcgacagcgagatctgctcccgatcgagaaaaagaaatcaatagtttagttagacgagctgattttaataacgacgcatacgttcaggaatttggcctaacgatatcaaacaacatgatggaagttagagggagagttttaccacctccgaaattgcaatacggtggaagatcgtctcttttaagcagcgacgaatttgctattagaaattcttttcatgccaaacaacaagcaatgccgatcggcggcgtttgggacatgagagggaaacaatttttctcagggatagaaatccgcgtttgggccattgcttgtttcgcaccgcaaagaactgttaaagacgatgcagtaagggcttttattcaacaacttcaaagaatttcaaacgacgctggaatgccgattgttggacaaccatgcttttgtaaatatgccacgggccccgatcaagtcgaacccatgttccggtacctgaaatctagttttcacgctttacaattagttgttgtcgtattgccgggaaaaactcccgtgtatgctgaagtcaaacgcgtcggcgatacattactaggaatggcaactcaatgtgttcaagcgaaaaatgttataaaaacctctccgcaaactctgtcgaatttatgtttaaaaataaacgttaaattgggcggtattaattcgatacttgtacctagcattagaccaaaggtgttcaacgaaccggtaatatttttaggagcagacgtaactcatccacctgctggtgataataaaaaaccttccattgctgccgtcgtgggatcgatggatggtcatcccagtcgttatgcagctaccgtgagagttcaacagcacaggcaagaaataatacaggaactcagttcgatggtgagagagcttttgttaatgttttacaaatctacgggaggttataaacctcataggatcatcatgtatcgtgacggtgtgtcggaaggacaatttttacacgtggttcttcaacacgaattgacggccgttagagaagcttgcattcaattggaaggagattacaaacccggtataacttttatcgttgtgcaaaaaagacatcacacgagattgttttgcgccgacaagaaggaacaatcgggtaaaagtggaaatataccggctggaacgacggttgacgtcggaatcacgcatccgacggaatttgatttttatttatgcagtcaccaaggaattcagggaacatccagaccgagtcactatcacgttttgtgggacgataatcgtttcgattcggatgaacttcaatgtttgacttatcaattgtgtcatacctacgtgagatgcacgaggtccgtgtccatacctgctcctgcctattacgctcatcttgttgcattccgtgcgaggtatcacctggtggaaaaagaacatgacagcgccgaaggttcgcatcagagtagttgttcggaagacagaacgccgggagccatggccagagcaataacagttcatccggaaacgaagaaagtcatgtatttcgcatag

SEQ ID NO: 11619 - protein, 902 aa, Pediculus humanus corporis
MSKISAPPPGPPGPGPVGPPGAVGGPGGMVMTSTGGSLLPSSPPELPMFCCPRRPSLGREGRPIALRANHFQISMPRGYVHHYDINIQPDKCPRKVNREIIETMVHAYSKIFGSLKPVFDGRQNLYTRDPLPIGNDRVELEVTLPGEGKDRVFRVTIKWVAQVSLFALEEALEGRTRQIPFDTILALDVVMRHLPSMTYTPVGRSFFSSPDGYYHPLGGGREVWFGFHQSVRPSQWKMMLNIDVSATAFYKAQPVIDFMCEVLDIREINEQRKTLTDSQRVKFTKEIKGLKIEITHCGTMRRKYRVCNVTRRPAHMQSFPLQLENGQTVECTVAKYFLDKYKMKLKYAHLPCLQVGQEHKHTYLPLEVCNIVAGQRCIKKLTDMQTSTMIKATARSAPDREKEINSLVRRADFNNDAYVQEFGLTISNNMMEVRGRVLPPPKLQYGGRSSLLSSDEFAIRNSFHAKQQAMPIGGVWDMRGKQFFSGIEIRVWAIACFAPQRTVKDDAVRAFIQQLQRISNDAGMPIVGQPCFCKYATGPDQVEPMFRYLKSSFHALQLVVVVLPGKTPVYAEVKRVGDTLLGMATQCVQAKNVIKTSPQTLSNLCLKINVKLGGINSILVPSIRPKVFNEPVIFLGADVTHPPAGDNKKPSIAAVVGSMDGHPSRYAATVRVQQHRQEIIQELSSMVRELLLMFYKSTGGYKPHRIIMYRDGVSEGQFLHVVLQHELTAVREACIQLEGDYKPGITFIVVQKRHHTRLFCADKKEQSGKSGNIPAGTTVDVGITHPTEFDFYLCSHQGIQGTSRPSHYHVLWDDNRFDSDELQCLTYQLCHTYVRCTRSVSIPAPAYYAHLVAFRARYHLVEKEHDSAEGSHQSSCSEDRTPGAMARAITVHPETKKVMYFA

SEQ ID NO: 11620 - DNA, 2928 bp, Sorghum bicolor
  CDS (1)..(2928)
atggcgccgccgccgccgccgccaccgccgcaggcgcaggcgcggcaccaccaccaccaccaccaggggccagccaacaagggcggcggccacgcggagcggacgaagcagccgctgcagagcagcgtgacgcagcccaaggcggagccaccggcggtggtggcggcggccgtgctgccggagggaggcaagcggtgcggaggaggaggaggagggaggcgccgcggcgggcgcggccgggccaaggcgccgccgggtgagtctcgtgctgcgctggcggtagcggtagcgccagcgccggcgcaggcgcctccgccgcgcacggtcattgggccgcccgtgccgagcaaggggctgtcgttctgccgccggccggggttcgggacggtgggtgcgcgctgcgtcgtcaaggctaaccacttcctcgccgagctcccggacaaggacctcacccagtatgatgtgaagatcacgccggaggtgagctcgcggaccgtgaaccgggccataatggcggagctggtccgcctctaccgcgcgtccgacctcggaatgcgactcccggcctacgacggccgcaagaatctctacaccgcgggcaccctcccgttcgactctcgcgagttcgtcgtgcgcctcaccgatgaggacgacggcaccggcgtgccgcctcgggagagggagtacagggtcgccatcaagttcgccgcgcgcgccgacctccaccacctcaggcagttcatcgccgggcggcaggcggacgcgccccaggaggccctacaggtactcgacatcgtgctccgcgagctcgccaaccagaggtacgtgtccatagggcggtccttctactcgccggacatcaggaggccgcagcggctaggcgacggcctgcagtcgtggtgtgggttctaccagagcatccggccgacacagatgggattgtcgcttaacatcgacatgtcgtccacggcgttcattgaacccctgccggtgatcgagttcgtggcccagatattaggaaaggatgtcatatcaaggccattatccgatgctaaccgaatcaagatcaagaaggcattgcgaggagtaaaagttgaggtcactcaccgggggaatgtaaggcgcaagtatcgcatttctgggttgacaacgcaaccaactcatgaactgattttcccaattgatgagcaaatgaatatgaaatctgtcgtggagtacttcaaggaaatgtatggtttcaccattcagcatcctcatcttccctgccttcaggttgggaaccaaaagaaggcgaactatctaccgatggaggcatgcaagatcgttgaaggccagagatacacgaagaggctgaatgaaaaacagatcacatcattgctgaaggttacatgccaaaggcctagagaacaggagatggatattctacagacagttcatcaaaatggatatgagcaagatccatatgcaaaggaatttgggatcaacattagtgagaagctaacctctgttgaagctcgagtccttcctgcaccttggttgaagtaccatgacactggaaaagagaaagagtgcttaccacaggttggtcaatggaacatggtaaacaagaaagtgataaatggatgcaaggtgagccattgggcgtgtataaacttctcaaggagtgttccagaaaacacagctaggggattttgccaggaattggcgcaaatgtgtcagatttcgggcatggaatttaacagtgagccagtgatgccattatattcagctagaccagaccaagtagtgaaggcacttaaaaatgtgtataatattgcattgaacaaactcaagggtaaagaacttgaacttcttttggctatcctccctgacaacaatggtccgttatatggtgacatcaaacgtatttgtgaaactgatttgggattgataacacaatgttgcttgaccaaacatgtttttaagatcagcaagcagtacttggcaaatgtctcactgaaaattaatgttaagatgggaggaagaaatactgtgctcctggatgcaataagttggaggattcctttggtcagtgacataccaactattatatttggtgcggatgtaacacatcctgaaactggggaggactcaagtccatcaattgctgccgttgttgcttctcaagattggccagaagttacaaagtatgctggattggtttgtgctcaggcacaccggcaagagctcattcaggacctttacaaaacatggcatgatcctcagagaggcactgtaacaggcggcatgatcagggagctcttaatatccttcaggaaggccactgggcagaagccattgagaataatattctacagggacggtgttagtgaaggccagttctaccaagttctcctttacgagttagatgccatccgtaaggcatgtgcgtccctagaaccaaattaccagcctcctgtaacatttgtggtagttcaaaaacgtcatcatacaagactttttgcaaataatcacaaagacagaagtagcatggacaagagtggaaatattttgccaggaaccgttgttgattctaagatatgccacccaacggagtttgatttctacctctgcagtcatgctggaattcagggaacaagtaggcctgctcactaccatgtcctctgggatgagaacaatttcacagcagacgaaatgcagacattgacaaacaacctttgctacacttatgcccggtgcacacgctcggtttctgttgtccctcctgcatactacgcacacctggcagcattccgggctcggttctacatggaaccagagatgtcagagaaccagacgtcaaagagctccaatagcacgaacggagtctcggtgaagcccctgcctgctgtgaaggagaaggtgaaaagggtgatgttctactgctga

SEQ ID NO: 11621 - protein, 975 aa, Sorghum bicolor
MAPPPPPPPPQAQARHHHHHHQGPANKGGGHAERTKQPLQSSVTQPKAEPPAVVAAAVLPEGGKRCGGGGGGRRRGGRGRAKAPPGESRAALAVAVAPAPAQAPPPRTVIGPPVPSKGLSFCRRPGFGTVGARCVVKANHFLAELPDKDLTQYDVKITPEVSSRTVNRAIMAELVRLYRASDLGMRLPAYDGRKNLYTAGTLPFDSREFVVRLTDEDDGTGVPPREREYRVAIKFAARADLHHLRQFIAGRQADAPQEALQVLDIVLRELANQRYVSIGRSFYSPDIRRPQRLGDGLQSWCGFYQSIRPTQMGLSLNIDMSSTAFIEPLPVIEFVAQILGKDVISRPLSDANRIKIKKALRGVKVEVTHRGNVRRKYRISGLTTQPTHELIFPIDEQMNMKSVVEYFKEMYGFTIQHPHLPCLQVGNQKKANYLPMEACKIVEGQRYTKRLNEKQITSLLKVTCQRPREQEMDILQTVHQNGYEQDPYAKEFGINISEKLTSVEARVLPAPWLKYHDTGKEKECLPQVGQWNMVNKKVINGCKVSHWACINFSRSVPENTARGFCQELAQMCQISGMEFNSEPVMPLYSARPDQVVKALKNVYNIALNKLKGKELELLLAILPDNNGPLYGDIKRICETDLGLITQCCLTKHVFKISKQYLANVSLKINVKMGGRNTVLLDAISWRIPLVSDIPTIIFGADVTHPETGEDSSPSIAAVVASQDWPEVTKYAGLVCAQAHRQELIQDLYKTWHDPQRGTVTGGMIRELLISFRKATGQKPLRIIFYRDGVSEGQFYQVLLYELDAIRKACASLEPNYQPPVTFVVVQKRHHTRLFANNHKDRSSMDKSGNILPGTVVDSKICHPTEFDFYLCSHAGIQGTSRPAHYHVLWDENNFTADEMQTLTNNLCYTYARCTRSVSVVPPAYYAHLAAFRARFYMEPEMSENQTSKSSNSTNGVSVKPLPAVKEKVKRVMFYC

SEQ ID NO: 11622 - DNA, 2730 bp, Sorghum bicolor
  CDS (1)..(2730)
atggggtctcatgatggtgaggatgaagagttgccaccacccccgcccgtgccaccagatgtggttcccattaaagctgaagatgttgtgggggaaccaccagcaaacaagccaataaagccaaagagattactgatggacaggcctggtataggaagaaaagggcagctagcccagctctattcaaatcactttaaagtcgccgtgaagagcacagaagacttcttctttcactattatgtgaacctgaagtatgaggatgatcaacctgttgaaggtaaagggattggcagaaaggtgattgataaactgcagcagacatatcgcgctgagctttccaacaaggattttgcatatgacggagaaaagagcctgtttacagttggtgggcttccacaaaaaaacaatgagttcactgtcgtcttggaggacgcgtctactggaaagactgctgccaatgggagccctggcggtaatgacagtcctggaggtggtgacaggaagagagtgaggaggccataccagacgaaaactttcaaagtggagataaattttgcagcaaaggttcctatgagtgctattggtcaagtcattagaggcgaagaaacggagaactccctggaggcacttcgtgttcttgatatcatactgaggcagcattccgcagaacaaggctgccttttggttaagcaatcgtttttctacaacaacccttcaaactttgttgacttgggtggtggcgtgatgggttgccgtggatttcattcaagtttccgcggcacacagagtggactttccctgaacgttgatgtctcaacaacaatgatcgtgaagcctggccctgttattgattttcttctttctaaccagaatgttaatgatcctagcagaattgattggcaaaaggccaagcgtgctctcaagggcttgaggattagaaccactcctgcaaatgcagaattcaagatttttggtctcagcgagaggatttgtaaagaacaaacgtttccgctgaggcagagaaatggtagcaacggagattgtgataccattgatataactgtctatgactactatgcgaagaaaggaattgatctaaagtactctggtgatttgccttgtataaatacagggagggcaaagcgtccaacatattttccaatcgagctatgctgccttgttccgcttcaaagatacaccaaagctttgtctacgctacaaaggtcatcccttgttgagaagtctagacagaagcctcaagaaaggatgacagttctaaacgatgcactgcaacgcagtaactatgattctgaccccatgttgagggcatgtggcgtttcagttgctccaaaatttacccaagttgaaggaaggatccttcaagccccaaagctgaaagccggcaatggtgatgatatcttctcacgaaatggacggtggaatttcaccaataggaagttttatcaaacctgctctgtggataagtgggcggttgttaatttctctgcacgttgtgatgttcggaatctcatccgtgacctgatgaggaatgcatctgcaaagggaattcaaatggaggaaccttttgatgtgtttgaagagagcccctctatgaggcgtgcacccgtgtcgagaagagtggatgatatgtttgggcagataaaatcaaaacttcctggagctcctaggttcctcatgtgccttctccctgagaggaaaaattgcgaagtctatggtccttggaagagaaagtgcctggccgagtttggtattgtcacacagtgtctagctccaacaagagtcaatgatccgtacctgcttaatttgctgatgaagattaatgcaaagcttggtggtctgaattcgttgctgcaagttgaagcatctccatcaataccccatgtgtcggaagtacccaccatcatcttgggtatggatgtgtctcatggccatccaggacaagataggccttcagttgcagccgtggttagttctcgtcaatggcctcttatctctaaatatagagcatcagtgcacacccaatccgccagactagaaatgatgtcctccttgtttaagccacggggtactgatgatgatggcctcattagggaatcactgattgacttctacactagctctggcaagcgaaaaccagaccacattatcattttcagggatggagtcagcgaaagtcagtttacccaggtcatcaacattgaactggatcagataattgaggcatgtaagtttcttgatgagaagtggtcacccaagttcactgtgattgttgctcaaaagaaccaccacaccaagttttttcagaccggatcaccagacaatgttcttcccggaactgtcgtggacaataaagtttgccatcctaagaactttgacttctacatgtgtgcacatgctgggatgattggaacaacaaggccgacccattatcatgttctgcacgatgagataggtttctctgctgacgaaatgcaggagtttgttcattcgctctcttatgtgtatcaaaggagcacaacagccatctcagtagttgctccaatctgctatgcccaccttgctgcagcccaggtgggcacgttcctgaaattcgaggagatgtcagacacgtcctccagccagggagggcatacctcggcgggcagtgctcccgtgccggagctgcctcgcctgcatgagaaagtgaggagttccatgttcttctgctga

SEQ ID NO: 11623 - protein, 909 aa, Sorghum bicolor
MGSHDGEDEELPPPPPVPPDVVPIKAEDVVGEPPANKPIKPKRLLMDRPGIGRKGQLAQLYSNHFKVAVKSTEDFFFHYYVNLKYEDDQPVEGKGIGRKVIDKLQQTYRAELSNKDFAYDGEKSLFTVGGLPQKNNEFTVVLEDASTGKTAANGSPGGNDSPGGGDRKRVRRPYQTKTFKVEINFAAKVPMSAIGQVIRGEETENSLEALRVLDIILRQHSAEQGCLLVKQSFFYNNPSNFVDLGGGVMGCRGFHSSFRGTQSGLSLNVDVSTTMIVKPGPVIDFLLSNQNVNDPSRIDWQKAKRALKGLRIRTTPANAEFKIFGLSERICKEQTFPLRQRNGSNGDCDTIDITVYDYYAKKGIDLKYSGDLPCINTGRAKRPTYFPIELCCLVPLQRYTKALSTLQRSSLVEKSRQKPQERMTVLNDALQRSNYDSDPMLRACGVSVAPKFTQVEGRILQAPKLKAGNGDDIFSRNGRWNFTNRKFYQTCSVDKWAVVNFSARCDVRNLIRDLMRNASAKGIQMEEPFDVFEESPSMRRAPVSRRVDDMFGQIKSKLPGAPRFLMCLLPERKNCEVYGPWKRKCLAEFGIVTQCLAPTRVNDPYLLNLLMKINAKLGGLNSLLQVEASPSIPHVSEVPTIILGMDVSHGHPGQDRPSVAAVVSSRQWPLISKYRASVHTQSARLEMMSSLFKPRGTDDDGLIRESLIDFYTSSGKRKPDHIIIFRDGVSESQFTQVINIELDQIIEACKFLDEKWSPKFTVIVAQKNHHTKFFQTGSPDNVLPGTVVDNKVCHPKNFDFYMCAHAGMIGTTRPTHYHVLHDEIGFSADEMQEFVHSLSYVYQRSTTAISVVAPICYAHLAAAQVGTFLKFEEMSDTSSSQGGHTSAGSAPVPELPRLHEKVRSSMFFC

SEQ ID NO: 11624 - DNA, 3330 bp, Sorghum bicolor
  CDS (1)..(3330)
atggtgaggaagaaaagaactggtccaggagagagttctggggaggcttctggagcgcctgggcagggctcctcacagcgtcctcaggcaactcaacagggtgcccgtggtggagggcaacaccagggccgtggtggatatcagggccgtggagcgccgccttcacagcacccaggtggtgggctgactgagtatcaaccgcgcgactaccagggacgcggtggatatcagggccgtggcggtccaccttcacaggttcctggtggtgggccgcctgagcctcagccgcgtgcctaccagggacacggtggataccagggccgtggcgggccaccttcacagcatcctggtggtgggccaccacctgggtctcaaccacgtgactatcagggacgtggtggtccgcgtcccagagggggaatgccgcagccacaccgtggcgggcatgtgggaggtagtgttggaccaagtgttccttcaggtccatctagaccagttcccgagctgcaccaagccccagatgtccaacatcaagcccctgtggtggcaacaccatcaccacaaggagctggctcgtcctcgcagcctaggaaggccgaggtgagcactggacaagtccagcaacagcttcagcaacttgtgattcatgaccagagttcagccagccaagctggtcaggtggcaccagcgtcaagcaaagcggttagattcccattgcgccctggcaagggtacgcatgggtccaggtgcatcgtgaaggcaaatcatttcattgctgagctgcctaataaagaccttcaccaatatgatgtatcgataacgccagaggttacttcacgcggtgtcaatcgtgctgtcatgggagagcttgtaaacctttatagacactcccatttggatgggcgtctgcctgcgtacgatggaagaaagagtctttatacagctggagcattgccgtttacttcgaagacattcgaaattactctgcaagatgaggaagacagtcatggtggaggccaaaggcgccagagggtatttcgggtggtgatcaaatttgctgctcgcgctgatctccaccatctggctatgtttctagctgggaggcaaccagatgctcctcaagaggctcttcaagtacttgacattgtgctgcgcgaattgcctactgccaggtattgtcctgttggtagatcattttattctcccaacttagggagacgtcagcaacttggtgaaggtttggaaacttggcgtggtttctaccaaagcataaggcccacacagatgggtctttctctgaatattgatatgtcctctactgcatttattgagcccctcccagtgactgaatttgttgctcagcttcttaacagagatatatcagttagaccattgtctgattctgatcgtgtgaagattaaaaaagccctacgaggtgtgaaagtcgaggtcacacaccgtggaaacatgcgtaggaaatatcggatatctggcctcacttcacaagcaacaagggagttatcattccctattgatgatcgtggtactgttaagactgtggtgcaatacttcctggagacttatggcttcagtattcagcacaccactttaccttgcttgcaagtgggcaatcagcaaagaccaaattatttgcctatggaggtctgtaagatagttgagggacagcgttactcaaaacggcttaatgagaaacagatcactgctctactgaaggtgacttgccagcgtccccatgagcgtgagaaagacatcttgcagactgttcatcataacgcctactctgaggatccttatgcccaggaatttggtataaggattgatgagcgtcttgcatctgttgaagctcgtgttctgcctcccccaaagctgaaataccatgatagtggcagagagagggatgtattgccaagagttggccagtggaatatgatgaataagaaaatggtcaatggtggtagagttagcagctgggcatgcattaacttctcaagaactgtgcaagatggcgctgccaggagtttctgtcatgaactggctttgatgtgccaagtatcaggaatggattttgcacttgaacctgtgctgcccccatgctatgcgaggcctgaacatgttgaaagagcattaaagggacgctatcaagatgccatgaacatactcaggcctcaggaccgagaacttgacttgctgattgtaatactgcctgacaataatggttctctttacggggatctcaaaaggatctgtgagactgatcttggattggtctcccaatgctgtctgactaaacatgttttcaaggcgaacaagcagcagtatcttgcaaatgttgccctgaaaataaatgtgaaggttgggggacggaatacggtacttgttgatgctttgacaaggagaattccccttgtcagtgatgtaccaactattatctttggtgctgatgtgacccatccccatcctggggaagattctagtccttccattgcagctgttgttgcttctcaagactggcctgaggttaccaagtatgcaggattagtgagtgctcaaacccatcgccaagaattgatacaggatcttttcaaagtatatcaagatccccaaaggggatctgtctctggtggcatggtcagggaacttctcatttctttctggaggtcaactaaacagaaaccaaaaaggatcatattctacagggatggtgtcagtgagggacagttctaccaagttctgttgcatgaacttgatgccattagaaaggcctgtgcatcattggagtccgattaccagcctccagttacgtttgttgtggtccagaagcgtcatcacactaggttgtttgctaataatcacaatgaccaacgtgctgttgataaaagtggaaacatactgcctggtactgtggtggactcaaagatctgccatccaactgaatttgatttctacctctgtagccatgctggcattcagggaacaagccgccctgcccattatcatgtcctgtgggatgagaacaaatttaccgcggatgggttgcaaactctcaccaacaacctgtgttacacgtatgctaggtgcactcgctcagtatcaatcgttcctcctgcatattatgctcacctggcagccttccgagctcgcttctacatggagccggataccactgacagtgggtctatggcgagtggtgctacgacaagccgtgccccaggaggggcacgcaacaccagggctggtgttggaaatgttgccgtgaggccattaccggccctcaaggaaaacgtgaagcgtgtcatgttctattgctaa

SEQ ID NO: 11625 - protein, 1109 aa, Sorghum bicolor
MVRKKRTGPGESSGEASGAPGQGSSQRPQATQQGARGGGQHQGRGGYQGRGAPPSQHPGGGLTEYQPRDYQGRGGYQGRGGPPSQVPGGGPPEPQPRAYQGHGGYQGRGGPPSQHPGGGPPPGSQPRDYQGRGGPRPRGGMPQPHRGGHVGGSVGPSVPSGPSRPVPELHQAPDVQHQAPVVATPSPQGAGSSSQPRKAEVSTGQVQQQLQQLVIHDQSSASQAGQVAPASSKAVRFPLRPGKGTHGSRCIVKANHFIAELPNKDLHQYDVSITPEVTSRGVNRAVMGELVNLYRHSHLDGRLPAYDGRKSLYTAGALPFTSKTFEITLQDEEDSHGGGQRRQRVFRVVIKFAARADLHHLAMFLAGRQPDAPQEALQVLDIVLRELPTARYCPVGRSFYSPNLGRRQQLGEGLETWRGFYQSIRPTQMGLSLNIDMSSTAFIEPLPVTEFVAQLLNRDISVRPLSDSDRVKIKKALRGVKVEVTHRGNMRRKYRISGLTSQATRELSFPIDDRGTVKTVVQYFLETYGFSIQHTTLPCLQVGNQQRPNYLPMEVCKIVEGQRYSKRLNEKQITALLKVTCQRPHEREKDILQTVHHNAYSEDPYAQEFGIRIDERLASVEARVLPPPKLKYHDSGRERDVLPRVGQWNMMNKKMVNGGRVSSWACINFSRTVQDGAARSFCHELALMCQVSGMDFALEPVLPPCYARPEHVERALKGRYQDAMNILRPQDRELDLLIVILPDNNGSLYGDLKRICETDLGLVSQCCLTKHVFKANKQQYLANVALKINVKVGGRNTVLVDALTRRIPLVSDVPTIIFGADVTHPHPGEDSSPSIAAVVASQDWPEVTKYAGLVSAQTHRQELIQDLFKVYQDPQRGSVSGGMVRELLISFWRSTKQKPKRIIFYRDGVSEGQFYQVLLHELDAIRKACASLESDYQPPVTFVVVQKRHHTRLFANNHNDQRAVDKSGNILPGTVVDSKICHPTEFDFYLCSHAGIQGTSRPAHYHVLWDENKFTADGLQTLTNNLCYTYARCTRSVSIVPPAYYAHLAAFRARFYMEPDTTDSGSMASGATTSRAPGGARNTRAGVGNVAVRPLPALKENVKRVMFYC

SEQ ID NO: 11626 - DNA, 3249 bp, Sorghum bicolor
  CDS (1)..(3249)
atgccagtgcccatcatggtgaggaagaagagaactggccctggtggctctggagaaacttctggagagtcttcaggaggttctggacaaggttcttcacagcggcctgagcgaactcaacaacctgggggaggacgtggctgggtgcctcaacagggtggtcgtggtggcgggcaacaccagggtcgtggtggacattatcagggccgcggaggacctgggtcacatcaccctggtggtgggccccctgagtatcacccgcgtgaataccagggacgtggcggtgaatatcagggacgaggtggtgagtaccagggacgtggtggcgcccgctccagaggtggaatgccacagccatactatggtgggcataggggaggtaatgttggacgaaatgttcctccaggtccttctagaacagttcccgagctgcaccaagccccttatgtccagtatcaagccccggtggtttcacaatccccatcgggacctggctcatcctcacagcctgtggcagaggtgagctctggacaagtccagcaacagtttcagcaacttgccattcgtggtcagtcttccacgagccaagaaattcaagtggcaccagcatcaagcaaatcggttcgattcccattgcgccctggcaagggcacttatggggacaggtgcattgtgaaggcaaatcatttctttgctgagcttcctgacaaagaccttcaccaatatgatgtatctataacacctgaggttacttcacgtggtgttaatcgtgctgtcatgggagagcttgtaagactatatagaatttcccatttgggtgggcgtctacctgcgtatgatggaagaaagagcctttataccgctggaccattgccatttacttctatgacatttgaaattacgttgcaagatgaggaagatagtcttggtggtggccaaggtggacaaaggcgcgagagagtatttagggtggtgatcaaatttgcggcccgtgctgatctccaccatctggctatgtttctagctggaaggcaagcggatgctcctcaagaagctcttcaagtgcttgacattgtactacgtgaattgcctactgcgaggtattctcctgttggtaggtcattttattctcccaacttagggagacgccagcaacttggtgagggtctggaaagttggcgtggcttttaccaaagcataaggccgacacagatgggcctttcactgaatattgatatgtcctctaccgcatttatcgagcctctccctgtgatcgattttgttgctcagcttcttaacagagatatctcagttagaccattgtctgattctgatcgtgtgaagatcaaaaaagccctaagaggtgtgaaggtcgaggtcactcacaggggaaacatgcgcagaaaatatcgcatttctggcctaacctcacaagcaacaagagagctatcattccctgttgatgatcgcggtactgtgaagactgtggtgcaatacttcatggagacttatggttttagtatccagcacaccactttaccgtgcttgcaagtgggcaatcaacaaagaccaaattatcttccaatggaggtttgcaaaatagttgaaggacagcgctactcaaagcgactcaatgagaagcaaatcactgctctactgaaagtgacctgccagcgccctcaagagcgtgagctggacatcttacagactgtgcatcacaatgcatactatgaagacccatatgcacaggaatttggcataagaattgatgaacgtcttgcagcagttgaagctcgtgttctgccaccaccaaggcttaaataccatgatagtggccgagagaaggatgttttgcccagagttggccaatggaacatgatgaataagaaaatggttaatggtggcagagtcagcaactgggcatgtattaacttctctcggaatgtgcaagatagtgctgctaggggtttctgtcacgagcttgcagtcatgtgccaaatatcaggaatggattttgctcttgagcctgtgctcgctccagtgactgcaagacctgaacatgttgaaagggcgttaaaggcccgttatcaagatgcaatgaacgtattgaggccacagggcagggaactcgatctgctgattgtaatactgcctgacaataatggttctctttatggggatctcaaaaggatctgtgagactgatcttggattggtctcccagtgttgtctgactaaacatgtttttaagatgagcaagcagtatcttgcaaatgttgcactcaaaataaatgttaaggttgggggaaggaatactgtacttgtagatgctttgacaaggagaatcccccttgtcagtgacaggccgaccataatatttggtgctgatgttacccatccacatcctggagaagattccagtccttccattgcagctgttgttgcttcacaagactggcctgaggtcaccaaatatgctggactagtgagtgcccaagctcatcgccaggagctgatacaggatcttttcaaagtatggcaagacccacagagaaggacagtaactggtggcatgataaaggaacttctcatttctttcaagagggcaactggacagaagccccaaaggatcatattctacagggatggtgtcagtgagggacagttctatcaagtattgttgtatgaacttgatgccatcagaaaggcctgtgcatccctggagcccaattaccagcctccagttacttttgtcgtggtccagaagcgacatcacactaggctgtttgctaataaccacaatgaccagcgtacagttgatagaagtggaaacatactgcctggcaccgtggttgattccaagatttgccatcctacggaatttgatttctacctgtgtagccatgccggcattcagggaacaagccgccctgctcattaccatgtcctgtgggatgagaacaagtttacagctgatgagctgcagactctgacaaacaacctgtgctacacgtacgctaggtgcactcgctccgtgtcaattgtgcccccggcatactatgctcatctggcagccttccgagctcgcttctacatggagccagatacctctgacagtgggtcaatggccagtggggcccgtgggcctccaccaggtggggcacgcggcatcagaggggccgggagtgttgcggtcaggcccctacccgctctcaaggaaaacgtgaagcgtgtcatgttttactgctga

SEQ ID NO: 11627 - protein, 1082 aa, Sorghum bicolor
MPVPIMVRKKRTGPGGSGETSGESSGGSGQGSSQRPERTQQPGGGRGWVPQQGGRGGGQHQGRGGHYQGRGGPGSHHPGGGPPEYHPREYQGRGGEYQGRGGEYQGRGGARSRGGMPQPYYGGHRGGNVGRNVPPGPSRTVPELHQAPYVQYQAPVVSQSPSGPGSSSQPVAEVSSGQVQQQFQQLAIRGQSSTSQEIQVAPASSKSVRFPLRPGKGTYGDRCIVKANHFFAELPDKDLHQYDVSITPEVTSRGVNRAVMGELVRLYRISHLGGRLPAYDGRKSLYTAGPLPFTSMTFEITLQDEEDSLGGGQGGQRRERVFRVVIKFAARADLHHLAMFLAGRQADAPQEALQVLDIVLRELPTARYSPVGRSFYSPNLGRRQQLGEGLESWRGFYQSIRPTQMGLSLNIDMSSTAFIEPLPVIDFVAQLLNRDISVRPLSDSDRVKIKKALRGVKVEVTHRGNMRRKYRISGLTSQATRELSFPVDDRGTVKTVVQYFMETYGFSIQHTTLPCLQVGNQQRPNYLPMEVCKIVEGQRYSKRLNEKQITALLKVTCQRPQERELDILQTVHHNAYYEDPYAQEFGIRIDERLAAVEARVLPPPRLKYHDSGREKDVLPRVGQWNMMNKKMVNGGRVSNWACINFSRNVQDSAARGFCHELAVMCQISGMDFALEPVLAPVTARPEHVERALKARYQDAMNVLRPQGRELDLLIVILPDNNGSLYGDLKRICETDLGLVSQCCLTKHVFKMSKQYLANVALKINVKVGGRNTVLVDALTRRIPLVSDRPTIIFGADVTHPHPGEDSSPSIAAVVASQDWPEVTKYAGLVSAQAHRQELIQDLFKVWQDPQRRTVTGGMIKELLISFKRATGQKPQRIIFYRDGVSEGQFYQVLLYELDAIRKACASLEPNYQPPVTFVVVQKRHHTRLFANNHNDQRTVDRSGNILPGTVVDSKICHPTEFDFYLCSHAGIQGTSRPAHYHVLWDENKFTADELQTLTNNLCYTYARCTRSVSIVPPAYYAHLAAFRARFYMEPDTSDSGSMASGARGPPPGGARGIRGAGSVAVRPLPALKENVKRVMFYC

SEQ ID NO: 11628 - DNA, 3087 bp, Sorghum bicolor
  CDS (1)..(3087)
atggggtcgaggaggggaaggcaacatcctggtgctggccacgccgcgcagcctccgcagccgggcgggagaggcgctgctcgtgctcagcagcccccgccgcagcctgctgcaggaagaggaggaggaggaggtcgtggagggatccagcagcaggggcgaggtggaggccgcacgtctcgtggcgggagtggagcgtggcgcccacgtggtgctggtgctacacctctgcagggggctgcctcgtcatccagcccttttgctcccgagctgcgccaagcaatggaggaggctcctcgtgagctcgcaccacaagcgccaccagtgcaggcggcaggtccttcgcagccatcgccagaggctcccccgcctgttcagcctagagagactgtgcctactgggcccactgcaggccaggagattattgtgcctaccgcacctccacaatcaagcaagtcattcaggtttcctttgcgcccaggaaagggcagtattggcaccaggtgcctggttaaggccaaccatttctttgctgagctgccagacaaggatcttcatcactacgatgtctcaatcacaccggaagttacctcaagggttgttggtcgagccatcatcaaggagctggtcaatctctacaagcaatcttacttgggtgggaggctaccggcctatgatggtaggaagagcctgtacacagccggcccactgccgtttacttcacaggaatttcatatcactttatttgacgatgatggtggccctggttccgagaggcgacgtaggaatttcaaagtagtcattaaatttgctgcacgagctgacctccaccgcctcgagctctttttagctgggaggcatgcagaagctcctcaagaggcattgcaggttctggatattgtgctgcgggaactgccttcatcaaggccaagatacgcaccatttggccggtcattcttttcgcctgacttgggccgaaggcagccccttggtgatggattagaaagctggcgtggattctaccagagcattcgtcctactcaaatgggcttgtcactcaacattgatatgtcagcgacagctttcattgagccattgcctgtaatcgaatttgttgcacagctgcttaattgtgaaattcactctaggccactctcagacgcggaacgggtgaagatcaagaaagccttgcgaggagttaaggtggaagttactcatcgtggaaacatgcggagaaagtatcgaatatctgggttaacaactcaggcgactcgagagttaacctttcctgttgatgaagggggtacaataaagtcagttgtacaatactttcaagagacatatggattttccattcaacacacctaccttccttgccttcaagttggcaatcaacagcgtccaaattacttgccaatggaggtctgcaaaatagtggagggacagaggtactccaagagattaaaccagaatcagatcagagctcttttggaggagacatgccagcacccacgcgatcgtgagcgtgatataattcggatggttaaacagaatgcctatgacaaggatgattatgcacaagagtttggcattaagattagcgatcgtctggcatcagttgaggcacggattttgccagctccacggcttaagtacaatgagactggtcgagagaaggactgcttacctagggttggtcagtggaatatgatgaacaagaaaatggtagatggtggtaaggtcagaagttggatatgtgtcaattttgctcgcaatgtgcaagacagtgttgttcgtgggttctgccatgaacttgcactgatgtgccaagcgtcaggaatggatttcgctcgggagcctgttcttccacctctatatgcacgtcctgatcaagtggagcgagctctgaaagctaggtaccatgatgccatgaacgttcttggacccaaacacaaggaacttgatttacttattggaatactacctgacaacaatggctcactttatggtgatttgaagcgtgtctgtgaaatagatcttgggatagtttcacagtgctgttgcacaaagcaggttttcaaaatgaacaacaaacaaattcttgcaaatcttgctctgaagattaatgtgaaggttgggggcaggaacaccgtgctggtagatgccgtctcaaggggaattcctctggtaactgatcgacctacaatcatatttggtgctgatgtgactcatcctcatcccggtgaggacagtagtccctcaattgctgctgttgtggcctcccaagattggccagaggtgacaaagtatgctggactagtttgtgctcaagctcatcggcaagagttgatagaggatttgtataaggtctggcaagatccacagagagggacagtcagcggtggaatgataagggagctacttgtatccttcaaaaaatcaactggtgagaagccccagcgaataatattttacagggatggtgtcagtgaaggacaattttatcaagttctgttgtatgagctcaatgctatccgaaaggcctgtgcctccctggaagcggagtaccaaccaaaggtgacttttgttgtggttcagaagcgccatcatactagattatttgctcacaaccacaatgatcagaattcaattgacaggagtggaaacatactcccaggtactgttgtagattcgaagatctgtcatcctactgaatttgacttctacttgtgtagccatgctggcattaagggcactagccgtccagctcattatcatgtcttgtgggatgaaaacaacttctctgctgacgagttgcagactcttacaaacaacctctgttacacttatgcaaggtgcacccgctctgtatcgatcgttccaccagcgtattatgctcacctggctgccttcagggctcgtttttacatggaaccagagacttctgacagtggatcggtggcaagtggtcctgcaggccgtggacctcagtcagcatcccatagcactcgggcccctggtggtgcagctgttaggccacttccagctctgaaggataacgtaaagagggtcatgttctactgctga

SEQ ID NO: 11629 - protein, 1028 aa, Sorghum bicolor
MGSRRGRQHPGAGHAAQPPQPGGRGAARAQQPPPQPAAGRGGGGGRGGIQQQGRGGGRTSRGGSGAWRPRGAGATPLQGAASSSSPFAPELRQAMEEAPRELAPQAPPVQAAGPSQPSPEAPPPVQPRETVPTGPTAGQEIIVPTAPPQSSKSFRFPLRPGKGSIGTRCLVKANHFFAELPDKDLHHYDVSITPEVTSRVVGRAIIKELVNLYKQSYLGGRLPAYDGRKSLYTAGPLPFTSQEFHITLFDDDGGPGSERRRRNFKVVIKFAARADLHRLELFLAGRHAEAPQEALQVLDIVLRELPSSRPRYAPFGRSFFSPDLGRRQPLGDGLESWRGFYQSIRPTQMGLSLNIDMSATAFIEPLPVIEFVAQLLNCEIHSRPLSDAERVKIKKALRGVKVEVTHRGNMRRKYRISGLTTQATRELTFPVDEGGTIKSVVQYFQETYGFSIQHTYLPCLQVGNQQRPNYLPMEVCKIVEGQRYSKRLNQNQIRALLEETCQHPRDRERDIIRMVKQNAYDKDDYAQEFGIKISDRLASVEARILPAPRLKYNETGREKDCLPRVGQWNMMNKKMVDGGKVRSWICVNFARNVQDSVVRGFCHELALMCQASGMDFAREPVLPPLYARPDQVERALKARYHDAMNVLGPKHKELDLLIGILPDNNGSLYGDLKRVCEIDLGIVSQCCCTKQVFKMNNKQILANLALKINVKVGGRNTVLVDAVSRGIPLVTDRPTIIFGADVTHPHPGEDSSPSIAAVVASQDWPEVTKYAGLVCAQAHRQELIEDLYKVWQDPQRGTVSGGMIRELLVSFKKSTGEKPQRIIFYRDGVSEGQFYQVLLYELNAIRKACASLEAEYQPKVTFVVVQKRHHTRLFAHNHNDQNSIDRSGNILPGTVVDSKICHPTEFDFYLCSHAGIKGTSRPAHYHVLWDENNFSADELQTLTNNLCYTYARCTRSVSIVPPAYYAHLAAFRARFYMEPETSDSGSVASGPAGRGPQSASHSTRAPGGAAVRPLPALKDNVKRVMFYC

SEQ ID NO: 11630 - DNA, 3135 bp, Sorghum bicolor
  CDS (1)..(3135)
atggcgagtcatcagcgcggaggaggtcgggttggcggcggtggcggccggggtcaggcgaaccacaacgtctctcagggccagggaggcaggggctacggcgggcgtggtggccagtactacggcgacgacagcggaggccgtggcggcggacgtggtggcggcggcaggggcggtggtcgtggcttcgacggccgcggcggcgggtaccaggaagcgcgtggcgggggccgaggcggcggcggcggataccaggaagggggccgcgggggccgaggcggcggcggcggttaccaggaaggacgtggcgggggacgaggtggcggcggctactatgaagggcacggcggtggccgaggtggtggcggctaccagggcggtggtcgaggtggtggtggcggctacaacgacggccgtggcgggggccgaggtggccgcggctaccagggacagggaggcagcgactacggccgcgatcgtgggtttggaggtctgcaacctccacgacctgatctgcgccaagccggtccgccgctcgcggatcgctacgcggccgacgcggccgcgcttagggagaagttcaagacgatggacatctaccgcgacgcgcccatgttcccagcgcgcccgggcttcggcgccatggggacgccgtgcgtcgtcagggccaaccacttcttcgtcggcctcgtcgacaagggcctgcaccactacgacgtgaccatttccccagagacgacgctaaagggcgtgtacaggcaagtcatgtcgaagctggtttcagagaacaggcagaccgagcttggcggccgcctacccgcatacgatggcaagaagtcactgttcaccgccggcgagctgcccttcaaaagcaaggaattcgtggtcactttgcctggcagggtggagaggaggtacaaggtggtcatcaagcatgccacggcggtcagcctgcaccagctgttcatgctcatggcaggctaccctacggacatccccatgcaggcgctgcaggtgctcgacattgtgctgcgtgacattgtgctcaacgaacgcaactccatggagtacgttgcagttggccggtccttcttctcaccacttgtaaagccaggacccaagaatcttggcctgggtgtggagggatggaatggtttctatcagagcatcaggccgacacagaagggcctgtctgtggtcgtagacatgtcttcaacagcttttgttcgacccatgccactgattgaatttgtgatggagattctgaacaaagatagcaggaccattagaaatattactcccatggagcttgtcaagctcaagaaagccctcaggggtgtgaggattgaagtcacacaccgaggagatgcacgccggaagtaccggattgccagcctgacaacgagtcctccttctttacagttctttgaatcgtccgctggagttcagaagtctgtcgcagattacttcagagaggcatacaatctggaaatgcactacgattctctcccatgcctccaagttggcagtgatgagaggccgaactacctccctatggaggtttgcaagatagtagctggacagcaataccggaagaagttggatggccaacaagtccttaatctaatggactcaacctgcctgcgcccatctgaccgtgagaacaacattcgtcaggttgttgagcaaaatgactacaatagaactgaacgtgcaagtgaattcggtctggaggttgactatcatcctacttcagttaatgctagagttctgccagcccccactctgaagtaccgtggcactggatctgaaagtttgtgttgtccaaaggatgggcagtggaacatgattaaaaagcaagtagtacatggtgcaagggtgggcaactgggcctgcgttaacttttgtcataatttacctagagatgttgttggtaaattctgttctgatctggttaagtggtctcgtactactggagtggacatggataacttgagaattccaatatacgctgttcgtcctgaacaagttgaaactgatcttcataagctatgtcacgatgctgggaacaggctaagagtgcaaaagatagatcttttgcttgctatactgccagagaaaaacggcaacttatatggtaatttcaaaaggatctgcgagacagagattggtatcatgtcgcagtgttgcctggataaaaatgttagaagtgcaggtcctccatactttgctaatgttgctattaagatcaatgccaagtttggaggaaggaacttagaatttgctaatcccaaagaaagcttaccggttgtttcgattgaaccaacaattatatttggtgccgatgtcactcaccctgctgctctggatgatactgccccttccattgcttctgttgttgcctcccaagactggcccacggtggctaactataatggcattgcccgtgcacaaggtcaccgtaaagagctcatcgatggcctggaagacattgtcaaggaactcctacttgcatttcaggaacggtctaagcagaggcccaagcagctgatcttctacagggatggcgtaagtgagggccaattcaaacaagtgctggaacaagaaatcccagagatagagaaggcatggaaagctctttacaatgagaagccaaagatcaccttcatagtggtgcagaagaggcaccacacaaggctcttcccaaatgatcgccaatggacagacaggagtggaaatattctacctggcactgtagttgataagagtatctgccacccaacagaatttgatttcttcctgtgcagccatgctggtatcaagggaacaagccgtcctacgcattaccatgtgctgcgagatgacaataagttcactgcagatgctctgcagtctctcacatataacttatgttacttgtattcaagctgcactcgctctgtttcaatcgctcctcccgcatactacgcccacaagctagcgttccgtgcccgcttctacatcaaccaaggctatgatacggcgacaagtgtcggctcttttggttcatctgctcctcctgctactgctggtcctggcctgaagccacttccggagatcaagggtgaactgaaaaggctcatgttctactgctag

SEQ ID NO: 11631 - protein, 1044 aa, Sorghum bicolor
MASHQRGGGRVGGGGGRGQANHNVSQGQGGRGYGGRGGQYYGDDSGGRGGGRGGGGRGGGRGFDGRGGGYQEARGGGRGGGGGYQEGGRGGRGGGGGYQEGRGGGRGGGGYYEGHGGGRGGGGYQGGGRGGGGGYNDGRGGGRGGRGYQGQGGSDYGRDRGFGGLQPPRPDLRQAGPPLADRYAADAAALREKFKTMDIYRDAPMFPARPGFGAMGTPCVVRANHFFVGLVDKGLHHYDVTISPETTLKGVYRQVMSKLVSENRQTELGGRLPAYDGKKSLFTAGELPFKSKEFVVTLPGRVERRYKVVIKHATAVSLHQLFMLMAGYPTDIPMQALQVLDIVLRDIVLNERNSMEYVAVGRSFFSPLVKPGPKNLGLGVEGWNGFYQSIRPTQKGLSVVVDMSSTAFVRPMPLIEFVMEILNKDSRTIRNITPMELVKLKKALRGVRIEVTHRGDARRKYRIASLTTSPPSLQFFESSAGVQKSVADYFREAYNLEMHYDSLPCLQVGSDERPNYLPMEVCKIVAGQQYRKKLDGQQVLNLMDSTCLRPSDRENNIRQVVEQNDYNRTERASEFGLEVDYHPTSVNARVLPAPTLKYRGTGSESLCCPKDGQWNMIKKQVVHGARVGNWACVNFCHNLPRDVVGKFCSDLVKWSRTTGVDMDNLRIPIYAVRPEQVETDLHKLCHDAGNRLRVQKIDLLLAILPEKNGNLYGNFKRICETEIGIMSQCCLDKNVRSAGPPYFANVAIKINAKFGGRNLEFANPKESLPVVSIEPTIIFGADVTHPAALDDTAPSIASVVASQDWPTVANYNGIARAQGHRKELIDGLEDIVKELLLAFQERSKQRPKQLIFYRDGVSEGQFKQVLEQEIPEIEKAWKALYNEKPKITFIVVQKRHHTRLFPNDRQWTDRSGNILPGTVVDKSICHPTEFDFFLCSHAGIKGTSRPTHYHVLRDDNKFTADALQSLTYNLCYLYSSCTRSVSIAPPAYYAHKLAFRARFYINQGYDTATSVGSFGSSAPPATAGPGLKPLPEIKGELKRLMFYC

SEQ ID NO: 11632 - DNA, 3111 bp, Sorghum bicolor
  CDS (1)..(3111)
atggcttcccgtgggcgcggtttcggcggagggcggcaaggccctggtggtgggcgcggcagcgagggcagggggcgcgggatcggtggcggcggaggttaccaacaaccctacggtcgcggcggtgatggaggcggtgaatccggaggccgaggcggcgtgggccgagggcgcggggtcggcggtcgcggcaacgggggaggccgcggacccggcggacgaggtggcgtcggctaccagcagccgccaccgccgccgctcgggaacgtagaggtcggaggccggggccgcggtggcgtggcggtagctgtaccagtaccagcccgccccgcggcgcctcgtcctcttgcgccggtcgtcgctgccccggcagttccagcagcggcctcgtcttctgcgccgccggcgcaagcgcctcgtgcccccgccggggcggctggaggcggagctgccttggcggcaggcatggggaggttggccgtggccgacaaccccgctcctcccgcgcctgctgcaggtagatccgaggcgcaaggtcctgcgcaccggcctccgcctccgcccctctcgagcaaggggatcactccgcctgcgcgccccgggttcggcacgttggggaggaagctcatcgttcgcgcaaaccacttcgctgtccaggttgccgacaacgacatctgccattatgacgttttaatcaatcctgaaccaaaggcaagaagaaccaacagggtgattctgtcagagcttctcaaggtgcatggtgcgacatccctcgcccataagatacctgcctatgatggaagcaagagcctatacaccgcaggcgagctgccattcaaatcaatggagtttgttgtcaagttggggcgccgagaaattgagtacaaggtgacaatccgatatgcggcacagccaaacctgtaccatcttcagcaattcctcaagggtcagcagagggacgccccatatgacacaattcaagcattggatgttgccctgagagagtctccttctctcaattatgtcactctttctcgatccttcttctccaagaagtttgataatggggtggacattggtggtgggctagagagctggagcggatattaccagagcttgcgcccaactcaaatgggcctctcattgaacattgatatatgctcgacttcattttaccaatctatccctgtggtaaaatttgttgatgattgtcttgggctgacaaaccctgcccaacctttttcggacagggatcgtttgaagcttaagaaagccctgcgtggagttcgtgttgagactacacaccagcaggggaaaaaaagcgcctacaagataactgggattactcctgttccattggctcagctgagcttttcttgtaacgaaggacctcagttgactgttgtccagtactttgctgaacggtacaactaccggttgcgctatactgcttggccctgccttcagtccggcaatgattctaagccgatatatttacctatggaggtgtgccaaatcattgaaggacagaggtaccctaggaagctcagcgacacacaggtgaccaatatactgaaggcaacctgtaaacgtcctcaggagagggaggggagcattattcagatggttcaccgcaacaactattcagctgataagatggcacaggtgtttgggatcactgtggccaaccagatggctaatgtgcaagctcgtgttctgcctgcacctatgctgaaatatcatgaatctggaagggagaaaacggttgcaccaagtttggggcaatggaatatgattaacaagaaaatggtcaatggtggaactgttcacagctggacttgtttgagcttttcgcggattcagcttcatatagtagacagaatatgcgaggacttggctcagatgtgcaattccattggcatggattttaatccaaggcccgtgacagaagttcagtcagcctcacccaaccacatagaagctgctttaagggatgtgcacatgagggctccaaatttgcagctgcttattgtcgttcttccagatgtttctggtcattatgggaaaattaagaggatatgcgagactgaccttggtatagtatctcagtgcatcaatccaaagaagaataaaaacaagcagtattttgaaaatgtcgcccttaaaatcaatgtgaaggtgggagggcgcaatacagtgcttgagagagcctttgtgcctaatggaataccttttgtctcagatgtgccaacaatcatttttggtgctgatgttacccatcctacagcaggagaagattcctcggcttctattgcagctgtggttgcatccatggactggccacaagtcacaacatataaagcactagtctcggcgcaagcacatagggaagagattatacaaaatctgttctggactggtacagatccagagaagggcactccagtgaacggtggaatgataagggagttgctgacttcattctttaagaggactggacgaaagcccaaaaggattatattttacagggatggtgtaagtgagggacaattcagccacgttttgctccatgaaatggacgcaatcaggaaggcctgtgcctctatggaagatggttatctaccaccagtgacattcgtggtggtacagaaaaggcaccacacaaggctcttccctgaagttcatggaaggagagatcttactgacaaaagcggaaacattcttcctggaactgtggttgatactagcatttgtcatcccagcgagtttgatttctacctctgtagccatgctggaattaagggaacaagcaggccaacacactatcatgtcctctatgatgagaaccgtttctcggctgatgctctgcagtttctcacaaacaacctttgctacacatacgcacgctgcacacgcgctgtttctgttgttccaccagcctactacgctcacctggcagcattccgcgcaaggtactatgacgaacaagagagcaccgatggaacctcagttgtcagtggtagcgccgccacagccggcggtggcccacctgcgttccgcaggctcccccagataaaggagaatgtgaaggaagtgatgttcttctgctga

SEQ ID NO: 11633 - protein, 1036 aa, Sorghum bicolor
MASRGRGFGGGRQGPGGGRGSEGRGRGIGGGGGYQQPYGRGGDGGGESGGRGGVGRGRGVGGRGNGGGRGPGGRGGVGYQQPPPPPLGNVEVGGRGRGGVAVAVPVPARPAAPRPLAPVVAAPAVPAAASSSAPPAQAPRAPAGAAGGGAALAAGMGRLAVADNPAPPAPAAGRSEAQGPAHRPPPPPLSSKGITPPARPGFGTLGRKLIVRANHFAVQVADNDICHYDVLINPEPKARRTNRVILSELLKVHGATSLAHKIPAYDGSKSLYTAGELPFKSMEFVVKLGRREIEYKVTIRYAAQPNLYHLQQFLKGQQRDAPYDTIQALDVALRESPSLNYVTLSRSFFSKKFDNGVDIGGGLESWSGYYQSLRPTQMGLSLNIDICSTSFYQSIPVVKFVDDCLGLTNPAQPFSDRDRLKLKKALRGVRVETTHQQGKKSAYKITGITPVPLAQLSFSCNEGPQLTVVQYFAERYNYRLRYTAWPCLQSGNDSKPIYLPMEVCQIIEGQRYPRKLSDTQVTNILKATCKRPQEREGSIIQMVHRNNYSADKMAQVFGITVANQMANVQARVLPAPMLKYHESGREKTVAPSLGQWNMINKKMVNGGTVHSWTCLSFSRIQLHIVDRICEDLAQMCNSIGMDFNPRPVTEVQSASPNHIEAALRDVHMRAPNLQLLIVVLPDVSGHYGKIKRICETDLGIVSQCINPKKNKNKQYFENVALKINVKVGGRNTVLERAFVPNGIPFVSDVPTIIFGADVTHPTAGEDSSASIAAVVASMDWPQVTTYKALVSAQAHREEIIQNLFWTGTDPEKGTPVNGGMIRELLTSFFKRTGRKPKRIIFYRDGVSEGQFSHVLLHEMDAIRKACASMEDGYLPPVTFVVVQKRHHTRLFPEVHGRRDLTDKSGNILPGTVVDTSICHPSEFDFYLCSHAGIKGTSRPTHYHVLYDENRFSADALQFLTNNLCYTYARCTRAVSVVPPAYYAHLAAFRARYYDEQESTDGTSVVSGSAATAGGGPPAFRRLPQIKENVKEVMFFC

SEQ ID NO: 11634 - DNA, 3264 bp, Sorghum bicolor
  CDS (1)..(3264)
atgtcgacgcgcgacggctgtggcggccggcgtggcggccacgaagcagcaggccgtggaggtggcggtggcggtggcggccgagggcggggcggccgtggcgccgcggagctcggtggccgtggcggacaagggcggggccggggcggcgcggagcttggtggtggccgaggtggcgccgtcggtgcggctcgtggcggcggtcgtggaggcggcgagcagagagggggacaccagttcttccacggcgcccaccagccggtcggtggtggtggtgggcgaggcggcggtggcggacattaccaccaccatggcggcgtgcctgctcagcaaggtgctcttcagggccagccgcgctggcaagtggccgcgccgccgccgccgccgccggcggcggcggcgtcgaggccgagacctgcggaagtcgaggcgctgagcggcgaggtggagaggaaagcggctgtgacggcagtggcagaggcagaggcgcgcgaggggccgtcgggcaccgcgcgtgagcctgctgccgccgcggcgagaatcgaggagcagcaagggacgtcgctgggggcggcagaccagggggctgccgctcaggggaggctgcctccggcgtcgagcaaggcgctggtgttccccccgcggccggggtacggcacgctcggccggaggtgccgcgtgcgcgccaaccatttcctcgtccaggtggcggacaaggagatctaccactacgacatcgtgattactccagaatcagagtcaaggaaaagaaatagatggatcgttaacgaactcgttaaactgcacaagcaatacttggatgggcgactgcctgtttatgatggtaggaagggccttttcactgctggtcctctaccgttcaaagccaaagaatttgttctaaaactaaccaatcctgagagagcaaaccaggggtatggtgttctaatttgtttctcatcatgcgcgcgcttgttctttatatgtgtttacgttgtaaattttaagccttgccttcctgcctgcagtgagaaagagtacagggtgaccataaaagatgctgcaaaaatagatatgcacagccttaggcagttcttggctggtaggcagagggaactgccacaggatactatccaaggccttgatattgctttgagggaatgtccaagtgaaaagtatgtatccatctcaagatcatttttctcaaaggcatttggacatggtggtgatattggcagtggtgtggaatgctggagggggtactaccaaagtctacgtgctacacaaatgggactgtccttgaatattgatatttcagcaactgcattttacaaggctcaaccgattttggactttgcattggagtacctcaatatacgtgacacctcaaggcgtttgtctgaccaggatcgcataaaattgaagaaagtcctcaaaggagtacgggttgtggcaacacatcgtcgtgatatagccatacgttacaagattactgggataacctcacttcccttgaatgatttaacgtttgatcaagatgggacaagggtttcagttgttcaatactttaaacaccaatataattactgtttgaaacacattcactggccatgccttcaagctggcagtgatagcaggccaacttatttacccatggaggtttgcaatatacttgaaggacaacgctattctagaaagctaaatgagcgccaagtcacaagcatcctgaagatggcatgtgagcgaccaactcaaagggagggtagcattttagaggtagttaataggaacaactacggtaatgatcattgtgccaaagaatttggtattaaggtgacaaatgaacttgccttggttgatgcgcgtgtgctgccagctccgacacttaagtaccatgactctgggcgagaaaaagtgtgtagtccttccattggtcagtggaacatgaacaacaagcaaataaatggaagaccttgtgttgatgttgggcaagctcgcccagataacttagaagctgcactcagaaatactcataggcagtctgcacaaatacttgcccaacaaggtgtgactagcccacagcttgatttactaattgttgtattgccagatgcaaatgcaagtttcttttatggaaggataaagcgtctttgtgaaactgaacttggtataataactcagtgttgtatacctaagaatgttcataaaggtggccgacaatatctccaaaacctggcccttaaaattaatgttaaggttggtggtcgtaatacagttcttgaagatgctttaaataggaggatacatttgttaacagatttgccaacaataatctttggagctgatgttacccacccagctccaggggaggatgcatccccgtctatcgctgcggttgttgcatcaatggattggccagaagtttcaaagtacaggtgcttggtgtcttctcaaggtcatagggaagagatcatagctgatcttttcacacaagtgaaggatccacaaaaaggactacttcatggtggaatgatcaggcatgctgaacatattaactttgctgttcttccaataaatgatctttcctttttttttttgaagtcatatcgttgctgcagggaactacttgtatcattctatagggcaaatgggagccgaaaaccgagcaggataattttctatcgagatggtgtcagtgaggggcagtttagccaggtcttgctttatgaagtggatgcaattcgaaaggcttgtgccagcttggaagagggctaccttcctccagttacatttgttgtggtgcaaaagcggcatcacacacggcttttccctgaagatcatcgtgcacaaggacagacagatcgtagtggaaatattttgccaggaactgttgttgacacgaagatatgtcatccaagtgaattcgacttctacctttgtagccactcgggcattcagggaacgagccgtccaacacactaccatgttctgtttgacgaaaacaatttcaccgctgatgcactacagacattgacctacaaactgtgctacacgtatgcgcggtgcacgcgatcagtctctatagttcccccagcatactacgcgcacctggcggctttccgtgcgcgccactacttggatgatggcctctccgaccagggatcgtcttctgtggcgagctctcgccagcaagatcgcgctgctccagtgaagcagctgccgaaggtgatggagagcgtcaagcagttcatgttctactgctga

SEQ ID NO: 11635 - protein, 1087 aa, Sorghum bicolor
MSTRDGCGGRRGGHEAAGRGGGGGGGGRGRGGRGAAELGGRGGQGRGRGGAELGGGRGGAVGAARGGGRGGGEQRGGHQFFHGAHQPVGGGGGRGGGGGHYHHHGGVPAQQGALQGQPRWQVAAPPPPPPAAAASRPRPAEVEALSGEVERKAAVTAVAEAEAREGPSGTAREPAAAAARIEEQQGTSLGAADQGAAAQGRLPPASSKALVFPPRPGYGTLGRRCRVRANHFLVQVADKEIYHYDIVITPESESRKRNRWIVNELVKLHKQYLDGRLPVYDGRKGLFTAGPLPFKAKEFVLKLTNPERANQGYGVLICFSSCARLFFICVYVVNFKPCLPACSEKEYRVTIKDAAKIDMHSLRQFLAGRQRELPQDTIQGLDIALRECPSEKYVSISRSFFSKAFGHGGDIGSGVECWRGYYQSLRATQMGLSLNIDISATAFYKAQPILDFALEYLNIRDTSRRLSDQDRIKLKKVLKGVRVVATHRRDIAIRYKITGITSLPLNDLTFDQDGTRVSVVQYFKHQYNYCLKHIHWPCLQAGSDSRPTYLPMEVCNILEGQRYSRKLNERQVTSILKMACERPTQREGSILEVVNRNNYGNDHCAKEFGIKVTNELALVDARVLPAPTLKYHDSGREKVCSPSIGQWNMNNKQINGRPCVDVGQARPDNLEAALRNTHRQSAQILAQQGVTSPQLDLLIVVLPDANASFFYGRIKRLCETELGIITQCCIPKNVHKGGRQYLQNLALKINVKVGGRNTVLEDALNRRIHLLTDLPTIIFGADVTHPAPGEDASPSIAAVVASMDWPEVSKYRCLVSSQGHREEIIADLFTQVKDPQKGLLHGGMIRHAEHINFAVLPINDLSFFFLKSYRCCRELLVSFYRANGSRKPSRIIFYRDGVSEGQFSQVLLYEVDAIRKACASLEEGYLPPVTFVVVQKRHHTRLFPEDHRAQGQTDRSGNILPGTVVDTKICHPSEFDFYLCSHSGIQGTSRPTHYHVLFDENNFTADALQTLTYKLCYTYARCTRSVSIVPPAYYAHLAAFRARHYLDDGLSDQGSSSVASSRQQDRAAPVKQLPKVMESVKQFMFYC

SEQ ID NO: 11636 - DNA, 2961 bp, Ricinus communis
  CDS (1)..(2961)
atgcctataaggcaaatgaaagagagttcagagcagcacctagtgttaaaaacccacttgcaaaacactatgaaccaacctcagaaacaccataaaattgcccaaaatggcaagggaccaccacaatctcaagaaactcacaacagcaaaccccaaaaccagacctcacctccaacaaaaaatagaggaagaagaagaggaagaggtggtagaaaatctgatcaaggagatgtctttacgagacccagttcaaggccttgtactgtggtgcataagccagtgaatcaagctggtggtctcttggcaaatgctcccaatggaaatagtggaaatatttgtgaaatggagatgggtttgggattccctacttctagcaagtccttaacttatgctcgtaggcctggttatggtcaacttgggacaaaatgcattgttaaggcgaaccacttctttgcagagctgctggacaaggacttaaaccagtatgatgttacgataactcctgaagtggcatcaagaactactaacagagctatcatggcagagcttgtgaggctctacaaagaatctgacttaggaatgagactgcctgcttatgatggcagaaagagtctttatacatctggtgagcttccctttgcttggaaggagttcatcattaagcttgttgatgaagatgatggagtcaatggccccaagagagaaagggagtacaaagtggtaatcaagtttgttgcgagggccaacatgcatcatctgggtcaatttttagctggtaaacgtgctgatgctccacaggaagctttgcaaattcttgacattgtactgagggagctctcaacaaggaggtactgcccagttggtagatccttcttttcaccagatattagagcaccacagcgacttggtgatggcttggagtcatggtgtgggttttaccagagtataagacctacacagatgggcctgtcactgaatattgatatggcttcagctgcattcattgagcctctccctgtaattgagcttgttgcccagcttctaggcaaggatgtgctatcaaggccattatctgatgctgatagaattaagatcaaaaaggctctcagaggagttaaagttgaagtaactcacagaggaaatgtacgaagaaagtatcgtgtctcaggattgacatctcaacctacgagagaacttgtatttcctgttgatgataactcaactatgaagtcagtagtagaatatttccaagaaatgtatggctttaccattcaacatacacatctaccttgccttcaagtaggaaaccagaagaaagccaactatctaccaatggaggcttgcaaaattgtagaggggcaaagatatacaaaaaggctgaatgagaggcaaattactgccctgttgaaagttacatgccaacgacctagggaccgggaaaatgacattttacagacagttcagcataatgcttatgatcaagacccttatgcaaaggaatttggaattaaaatcagcgaaaagctagcttctgttgaggctcgaattctccctgccccttggctgaaatatcatgatactggaaaggaaaaggattgcttgcctcaggttggccaatggaatatgatgaacaagaaaatgatcaatgggatgactgtaagtaggtgggcttgtattaacttttcaaggagtgtgcaagagagtgttgctcgtgggttttgcagtgaacttgctcagatgtgccaagtgtctggcatggaattcaatccagagcctgttatcccaatttacagtgccaggcctgagcaagttgagaaagctttgaagcatgtttatcatgcttccatgaacaaaaccaaaggaaaagagctggagcttttattagctattctacctgacaacaatggcaccctatatggtgatctcaaaaggatctgtgaaacggatcttggtttaatatcacaatgctgtcttacaaaacatgtcttcaagatcagcaagcagtatctggctaatgtgtcccttaagattaacgttaagatgggtggcagaaatactgtccttttggacgccataagctgtagaataccattagttagtgacataccaaccattatattcggagcagacgtgactcacccagagaatggggaggattcaagcccctcaattgcagctgtagtagcttcacaggactggcctgaagtgacaaaatatgctggattagtttgtgctcaggctcacaggcaagaactcatacaggacttgtacaaaacatggcaagatcctgttcgtggtactgttagtggtggcatgatcagagatcttctggtctcgtttcggaaggcaacaggccagaaaccgctaaggattatattttacagggacggtgttagtgaagggcaattttatcaagttctgctttatgaattagatgcaataagaaaggcctgtgcttctctagaaccaaactatcaacctcctgtgactttcattgttgtacaaaaacgccaccatactcgattgtttgctaacaaccatagggataggagtagcacagacaagagtgggaacatattacctggcactgtggttgattctaaaatctgtcatccgacagaattcgatttttacctctgtagccatgctggtattcaggggactagtaggcctgctcactaccatgttctgtgggatgagaacaacttcactgcagatggaatccagtctttgacaaacaatctgtgttacacatatgcaaggtgtactcgctccgtttccgttgtacctccggcatactatgcgcatttagctgcttttcgtgcccggttttacatggagccagaaatgcaggataacggctcaacaggtaccaggggaacacgagcagctggagaaactggagtccggccattgccagccttgaaggaaaatgtgaagagagtaatgttctattgttaa

SEQ ID NO: 11637 - protein, 986 aa, Ricinus communis
MPIRQMKESSEQHLVLKTHLQNTMNQPQKHHKIAQNGKGPPQSQETHNSKPQNQTSPPTKNRGRRRGRGGRKSDQGDVFTRPSSRPCTVVHKPVNQAGGLLANAPNGNSGNICEMEMGLGFPTSSKSLTYARRPGYGQLGTKCIVKANHFFAELLDKDLNQYDVTITPEVASRTTNRAIMAELVRLYKESDLGMRLPAYDGRKSLYTSGELPFAWKEFIIKLVDEDDGVNGPKREREYKVVIKFVARANMHHLGQFLAGKRADAPQEALQILDIVLRELSTRRYCPVGRSFFSPDIRAPQRLGDGLESWCGFYQSIRPTQMGLSLNIDMASAAFIEPLPVIELVAQLLGKDVLSRPLSDADRIKIKKALRGVKVEVTHRGNVRRKYRVSGLTSQPTRELVFPVDDNSTMKSVVEYFQEMYGFTIQHTHLPCLQVGNQKKANYLPMEACKIVEGQRYTKRLNERQITALLKVTCQRPRDRENDILQTVQHNAYDQDPYAKEFGIKISEKLASVEARILPAPWLKYHDTGKEKDCLPQVGQWNMMNKKMINGMTVSRWACINFSRSVQESVARGFCSELAQMCQVSGMEFNPEPVIPIYSARPEQVEKALKHVYHASMNKTKGKELELLLAILPDNNGTLYGDLKRICETDLGLISQCCLTKHVFKISKQYLANVSLKINVKMGGRNTVLLDAISCRIPLVSDIPTIIFGADVTHPENGEDSSPSIAAVVASQDWPEVTKYAGLVCAQAHRQELIQDLYKTWQDPVRGTVSGGMIRDLLVSFRKATGQKPLRIIFYRDGVSEGQFYQVLLYELDAIRKACASLEPNYQPPVTFIVVQKRHHTRLFANNHRDRSSTDKSGNILPGTVVDSKICHPTEFDFYLCSHAGIQGTSRPAHYHVLWDENNFTADGIQSLTNNLCYTYARCTRSVSVVPPAYYAHLAAFRARFYMEPEMQDNGSTGTRGTRAAGETGVRPLPALKENVKRVMFYC

SEQ ID NO: 11638 - DNA, 2964 bp, Ricinus communis
  CDS (1)..(2964)
atgtctcaccgtggtggtggccgacgtcaggaatctcagcgcgaccgacaatcctctgctacatccccgtcgttcaatcgcggaggcggtggtggacgtggcggtagaggccgaggtggagctggctccttttacgctcaacctgctcctcctccagcaggatcggactttccttcattatctcgtcccccgactacttcatccagagcggctgctgctcctcaagcagcgcctccttcttcatcttcgagagctccaccggctccggctccggctcctgctcctcctcctgcagcggcggcctcaacttccactcagatagagaagctgacgcatggggttgagcagttaacgacgacggccggagctcctacaccgtcgtcatcaaaggagattagatttcctaataggccagggtacggtagtatagggatgaagtgtgtggttaaagccaaccattttttggttgacgtcgctgatagagatctccgtcaatacgatgtgagcataactcctgaactaacctcaaagaagataaacagagatgttatatctcagctcattcgcatgtttcgtcagtcacatttgggtaaccgaagagcagcttatgatggtaggaaaagcttatacactgcagggcctttgccttttgagtctaaagaatttgttgtcaagcttgttgaatcaaataaaaatgccggttcttctgtttcatccaagaaggaacgtgaatttaaggtggcaattaaatttgcatctaagcctgatattcatcatttgaaacaattcttaatcggtagacaaatggattgcccacaagaaacgattcaagttcttgacattgttcttcgggaaacaccttcagagaagtatacccctgttgggaggtcatttttttcacctgatttgggccaaaagggagagcttggcgatggtatagagtattggagaggatactatcagagtcttcgcccaacccagatggggctttctcttaacatagatgtatcagctcgatcattctatgagcccattattgtgaccgactttgtttcaaaatacttgaagttgagagacatgtcaaggcctctctctgatcaagatcgaattaaggtgaaaaaggctctgaaatcagtgaaagtgcaaatacttcacagggagtatgctaaaagctataaagttactggcatatccaataaacccctgaatcagatattcttcaaattggatgacaagagcacagatatctcagttgtacagtatttccgtgaaaaatacaatattgggctaaaatatacgtccttgcctgcccttcaagctgggagtgatgcaaaaccaatttacttgcctatggagctttgtaagattgttgatggtcagaggtattcaaagaaacttaatgaaagacaagtaactgcactgctaagagcaacctgtcaacgccctcatgaacgagaggaaagcattaagcagatggtcaagcggaatagttacaaccaagatgtgcttgtaagggatgagtttggaatccaagtgaaagaagaacttacatttgttgatgcccgagttttgcctgctcccatgcttaattatcatgagactggaagggaatcaagggttgatccccgctgtgggcaatggaatatgattaacaagaaaatggtgaatggtgggagtgtgaatttttggacatgtgtgaacttctctttgaacatcaatcgagatttgcctgctgagttctgtaggcaattgattcagatgtgtgtcagcaaaggaatggcattcaatccaaaccctattattccaataagctcagctcatccaggtcaaattgggaagactcttaatgatattaagaggcaatgtgaggcaaaacttgtgaaacagctgcagttgctgataattattctacctgatatcagtggatcttatggaataattaagagagtctgtgaaacagaattgggaattgtttctcagtgttgccaaccacgacaagcagcaaaactgagtaaacagtattttgagaatgttgctctcaaaatcaatgttaaggttgggggaagaaacactgtgttgaatgatgccgtgcaaaggaggatcccacttgtgactgattgccctacaattatttttggtgctgatgtaactcatccaccaccaggggaggactctagtccgtcgatagcagcagtagtggcttcaatggactggcctgaggtaaccaagtatagaggcattgtctctgcacaggcgcatcgtgaagaaatcatccaggatttgtataaatcctttcaggatcctcagggaatattaaagcattcaggaatgatcagagaattgtttgttgcatttagaagagaaactgggatgaaacctaaaaggattatattctacagagatggtgttagtgaggggcagtttagtcaagttttgctgtatgagatggatgccataagaaaggcttgtgcctcactggaggagggatatcttccaccggttaccttcgttgtggtgcaaaaaaggcaccatacacgactttttcccgttgatcgtggtcagacagacaggagtggcaatattctgccaggcactgttattgacactaagatatgccaccagagggagttcgacttctacctgaacagccatgctggaattcagggaaccagcagaccaactcattaccatgtgctgtatgatgaaaatcatttcactgctgataatctgcaagtgctgactaataatctgtgttacacgtttgccaggtgtacacgctctgtgtccatagtccctcctgcctattatgcccatttagcagctttccgtgctcgatattacattgagggtgaaatgtcagatggtggatctaccagtggaaagagcacaacagggcggagtaaggaggtccagcctcttcctgtcatcaaagataatgtgaaagatgtgatgttttattgctga

SEQ ID NO: 11639 - protein, 987 aa, Ricinus communis
MSHRGGGRRQESQRDRQSSATSPSFNRGGGGGRGGRGRGGAGSFYAQPAPPPAGSDFPSLSRPPTTSSRAAAAPQAAPPSSSSRAPPAPAPAPAPPPAAAASTSTQIEKLTHGVEQLTTTAGAPTPSSSKEIRFPNRPGYGSIGMKCVVKANHFLVDVADRDLRQYDVSITPELTSKKINRDVISQLIRMFRQSHLGNRRAAYDGRKSLYTAGPLPFESKEFVVKLVESNKNAGSSVSSKKEREFKVAIKFASKPDIHHLKQFLIGRQMDCPQETIQVLDIVLRETPSEKYTPVGRSFFSPDLGQKGELGDGIEYWRGYYQSLRPTQMGLSLNIDVSARSFYEPIIVTDFVSKYLKLRDMSRPLSDQDRIKVKKALKSVKVQILHREYAKSYKVTGISNKPLNQIFFKLDDKSTDISVVQYFREKYNIGLKYTSLPALQAGSDAKPIYLPMELCKIVDGQRYSKKLNERQVTALLRATCQRPHEREESIKQMVKRNSYNQDVLVRDEFGIQVKEELTFVDARVLPAPMLNYHETGRESRVDPRCGQWNMINKKMVNGGSVNFWTCVNFSLNINRDLPAEFCRQLIQMCVSKGMAFNPNPIIPISSAHPGQIGKTLNDIKRQCEAKLVKQLQLLIIILPDISGSYGIIKRVCETELGIVSQCCQPRQAAKLSKQYFENVALKINVKVGGRNTVLNDAVQRRIPLVTDCPTIIFGADVTHPPPGEDSSPSIAAVVASMDWPEVTKYRGIVSAQAHREEIIQDLYKSFQDPQGILKHSGMIRELFVAFRRETGMKPKRIIFYRDGVSEGQFSQVLLYEMDAIRKACASLEEGYLPPVTFVVVQKRHHTRLFPVDRGQTDRSGNILPGTVIDTKICHQREFDFYLNSHAGIQGTSRPTHYHVLYDENHFTADNLQVLTNNLCYTFARCTRSVSIVPPAYYAHLAAFRARYYIEGEMSDGGSTSGKSTTGRSKEVQPLPVIKDNVKDVMFYC

SEQ ID NO: 11640 - DNA, 3192 bp, Ricinus communis
  CDS (1)..(3192)
atggtgaggaagaggagaactgaggctcctgcaagtgggggtgagagctctgagccccatgaagcggcaagtggaggatctcaacggccatatgagaggaatgcaccacctcaacagggaccaggtggaccataccaaggtggaaggagttggggtccgcagtctcagcaaggaggtcgcggcggtggtggacgtggacgtagcggtgggatgtctcaacaacaacagtatggtggtggccctgaatatcaaggcaggggaagaggtccacctcagcaaggtggtcgaggaggctatggcggtggtcgctccagtagtaaccgtggaggtccaccttctgttggtccatccagacctccagttcccgagctgcaccaagcaaccttggctccttaccaagctggggtgtcccctcagctgatgccatctgaggggagctcttcttctggtccaccagagccatctccggtggtagtagcccaacagatgcaggagctctctatccagcaagaagtttcttcaagccaaccaatccaggcaccaccaccctccagcaaatcaatgaggttcccacttaggcctgggaagggtagcactggaataaggtgtatagtgaaggctaaccacttctttgccgaattacccgacaaggatttgcaccaatatgatgttacaataacaccagaggtcacatcacggggtgtcaaccgtgctgtaatggaacaactggttaagttgtacagagagtctcatcttggaaagcgtcttcctgcatatgatggccgaaagagtctatacactgctgggccacttccctttatatcaaaggaattcaaaatcactctgattgatgaagatgatggatcaggcgggcaaaggagagagagggaatttagggttgtgatcaaattagctgctcgtgcggacctgcatcatttagggctctttttgcagggaaggcaagcagatgcaccacaggaagcccttcaagttcttgacattgttctgcgagagttacctactactaggtattgccctgtcggtcgatcattttattctcctgatctaggaagaaggcaaccccttggtgagggtttggagagctggcgtggtttttaccaaagcattcgacctacacagatgggattgtctttaaatattgatatgtcttccactgctttcattgaaccgctaccagtcattgactttgtgaatcaactgttgaaccgagatgtttcttctcgaccattgtctgatgctgaccgcgtgaagattaaaaaggctcttagaggagtcaaggtggaagttacacaccgtggaaatatgcgcagaaagtaccgcatatctggtttaacatcacaggcaacacgagagttgacttttccagttgacgaaagaggaacaatgaaatctgtcgtggagtacttctacgagacatatggttttgtaattcaacacacgcaatggccctgtctacaagtggggaatcagcagaggccgaattatctgcctatggaggtttgcaaggttgttgagggccagaggtactccaagagactgaacgagaggcagataactgccttgctgaaggtgacctgtcagcgtcctcaagaaagggagcgtgatattatgcagactgttcatcataatgcgtacggcaatgatccttatgcaaaggagtttggaatcaaaattagtgagaagcttgcttcagttgaagctcgcattttgcctgccccatggcttaaatatcatgatactggtagagagaaggattgcctgccacaagttggacaatggaacatgatgaataagaaaatggtcaacgggggaacagtgaacaactggatctgcataaatttttctagaaatgttcaagacagtgtggcccgtggattttgctatgaacttgcacaaatgtgttacatatctggaatggcatttaatcctgaacctgtacttcctccggttagtgctcgtccagagcaggtagagaaggtattgaaaactcgttaccatgatgccatgacaaaactccaacagggcaaggagcttgatctgcttatcgtaattctccctgacaataatggctctctttatggtgaactgaagcgcatttgtgagacggatcttggtcttgtttctcagtgctgtttaacaaagcatgtgttcaggatgaacaaacaatatttggcaaatgtggcattaaaaattaatgttaaggttgggggaagaaacactgtgcttgttgatgcattatcaaggcgcattcctttggttagtgatcggcccactattatttttggtgctgatgtcacccatccacatccgggggaagactcgagcccatctattgcagctgttgtggcttctcaagattggccagaagtaacgaaatatgctggcttggtttgtgcacaagcccatcggcaagagcttattcaagatctctttaaagaatggcaagaccctgtgagaggaagagttactggtggcatgattaaggaactccttatatctttccgcagagcaactgggcagaaacctcagcgtattatattttacagggatggtgttagtgaaggacaattctaccaagtgctgctgtatgaacttgatgctatccggaaggcgtgtgcttctttagaaccaaactatcagcctccagtgacatttgttgtggttcagaagcgtcaccacactaggttgtttgcaaacaaccataacgaccgtaatgctgttgacaagagcggaaatatactgcctggtactgtcgtggactctaagatctgccatccaactgaatttgacttctatctgtgtagccatgctgggattcagggtaccagccgtccagctcattaccatgtattatgggatgagaacaagtttactgccgacgggttacagtcccttacaaacaatctttgctacacatatgcgagatgcacgcgctctgtttccatcgtacctcctgcatactatgctcatcttgcagcatttcgagctcggttctacatggaaccagagacgtcagacagtggatcaatgacaagtggacctgtcggtggacgtggaggcatgggtggaggtgcaggtgccaggagcacacggggacctgcagctagtgctgctgtgcgacccttgcctgccttgaaggagaatgttaagcgggtcatgttttattgctag

SEQ ID NO: 11641 - protein, 1063 aa, Ricinus communis
MVRKRRTEAPASGGESSEPHEAASGGSQRPYERNAPPQQGPGGPYQGGRSWGPQSQQGGRGGGGRGRSGGMSQQQQYGGGPEYQGRGRGPPQQGGRGGYGGGRSSSNRGGPPSVGPSRPPVPELHQATLAPYQAGVSPQLMPSEGSSSSGPPEPSPVVVAQQMQELSIQQEVSSSQPIQAPPPSSKSMRFPLRPGKGSTGIRCIVKANHFFAELPDKDLHQYDVTITPEVTSRGVNRAVMEQLVKLYRESHLGKRLPAYDGRKSLYTAGPLPFISKEFKITLIDEDDGSGGQRREREFRVVIKLAARADLHHLGLFLQGRQADAPQEALQVLDIVLRELPTTRYCPVGRSFYSPDLGRRQPLGEGLESWRGFYQSIRPTQMGLSLNIDMSSTAFIEPLPVIDFVNQLLNRDVSSRPLSDADRVKIKKALRGVKVEVTHRGNMRRKYRISGLTSQATRELTFPVDERGTMKSVVEYFYETYGFVIQHTQWPCLQVGNQQRPNYLPMEVCKVVEGQRYSKRLNERQITALLKVTCQRPQERERDIMQTVHHNAYGNDPYAKEFGIKISEKLASVEARILPAPWLKYHDTGREKDCLPQVGQWNMMNKKMVNGGTVNNWICINFSRNVQDSVARGFCYELAQMCYISGMAFNPEPVLPPVSARPEQVEKVLKTRYHDAMTKLQQGKELDLLIVILPDNNGSLYGELKRICETDLGLVSQCCLTKHVFRMNKQYLANVALKINVKVGGRNTVLVDALSRRIPLVSDRPTIIFGADVTHPHPGEDSSPSIAAVVASQDWPEVTKYAGLVCAQAHRQELIQDLFKEWQDPVRGRVTGGMIKELLISFRRATGQKPQRIIFYRDGVSEGQFYQVLLYELDAIRKACASLEPNYQPPVTFVVVQKRHHTRLFANNHNDRNAVDKSGNILPGTVVDSKICHPTEFDFYLCSHAGIQGTSRPAHYHVLWDENKFTADGLQSLTNNLCYTYARCTRSVSIVPPAYYAHLAAFRARFYMEPETSDSGSMTSGPVGGRGGMGGGAGARSTRGPAASAAVRPLPALKENVKRVMFYC

SEQ ID NO: 11642 - DNA, 2754 bp, Ricinus communis
  CDS (1)..(2754)
atggaacctccggaagaggcagaggcattgcctccacctccacctgtggtaccggctgatgtagttcccattcaactaaaaccagaaccagacaatgttcctgagacaactgaaaaggcaataaaaccaaaacgtgttccaatgtccaggcgtggtaatggatctagaggacaaagaatagaactactaactaaccatttcaaagttggtgtcaactgtgatggtggccacttctctcactacagtgttgcgttgttttatgaggatggtcgccctgttgattcaaaggggattgggagaaaagttattgataaggttcgtgagacttatgattctgatcttgctggtaaggactttgcttatgatggagagaagagcttatttactgttggttctcttccacgtaacaaaatggaattcactgttttgcttgacgatgtctcatcaaataggattaatggcagtggcagtcctgttggtaatggaagtcctaacggaagtgagaaaaagaggatgaagcgggtgttccattctaaaacatataaagtggagataagttttgctgccaaaatcccaatgcaggctatcaaagctgctttgcgtggtcaagaatcagagaactcccaagaagccatcagagtcttagacattgttctgaggcagcatgcagcaaaacaaggctgtcttcttgttcgtcaatcattctttcatgatgattcgaggaactatgtcgatctggatggtggtgtactcggatgcaggggatttcattcaagttttagagtctcacaaggcggattatcactgaatattgatgggtcaactacaacaataatacagcctgggccattaattgactttcttctagccaaccaacatgtgtcaactccttttcaaattgattggtcaaaggctaaacgtaccctgaaaaatttgaggataagggtatcacccaccaatcaggagtacagaatcactggcttgagtgagaatctttgcaaggaccagatattctcaatgaaatcaaaaggactgaatgatggaaattgcgatgatggaatggtcgatattacagtttatgaatatttcgttaatcatcgtaatatagacttgcgctactctggtgatttgccttgcattaatgttggaaggcctaaacgacctactttctttcctattgagctgtgttcattgcttccgttgcaacgctatacaaaggcattatctgttattcagaggtcaaagttggttgaaagttcacgtcaaaagccccaggagaagatgaagatcttggctgatgtaatgaaaagcaacaactatggtgcagatcctatattgcgctcttgtggtattactatcagcagtcagtttactcaactggaaggccgtgttctaactgctccaaggttgaaagtgggaaacggggaagatttaattccaagaaatgcacggtggacctttaataataagaaatttgctgagcctgccagaattgaaaactgggcggtggtaaacttttcagctcgttgtgacattcgcggtttatgtagagatttatgtagagttggagaaatgaaagggattatgataagtcccccagagcatgtttttgaagagaatcctcaatttcgacatgcaccacctcctattcgagtggagaagatgtttgaacaaatacagccaagattccctgataatcctcctcgatttcttctgtctatttttcctgataggaagaattctgacatatatggtccatggaaaaggaagaatctggcagaatttggaattttcaatcaatgcctttgttcacctaatagactcagtgagatgtatgttacgaatgttctcatgaagataaatgccaagcttggtggtttaaatactttcttggctgttgaacaatcacgaaacgtccctttcgtttcaaaggttcctacaataatttttggtatggatgtttcacatggttctcctggacaatctgatgtgccatctattgctgcggtggtaagttctaggaattggccactactatctcgttatagagcttctgttcatagtcagtcaccaaaggttgagatgattgattccctttttaaaccagagggaaaagatgatgatggaataatcagggagttgctgctggacttctataggagttctggtcagacaaagccggctcagataatcatattcagggatggagtcagtgagtcacagtttaatcaagtcctcaacatcgagttaaatcaaatcattgaggcttgcaagttccttgatgaaagttggtcgcctaagttcactgtgattgtagcacaaaagaatcaccacactaaattcttccaattacgatctgcagaaaatgtccctccaggaactgttgtagataatggtgtttgccacccacaaagcaatgatttctacatgtgtgcccacgcagggatgattgggacaaccaggccaacacattaccatgttctgttagatgaaattggcttttcagctgatgatctacaagaactcattcattctctatcctatgtgtatcagagaagcacaagtgcagtatctgtagttgctcctgttcgttatgctcatttggcagcaactcaaataaggctattcatgaagtttgaagacatgtccgagacttcttcaagccatggaggcctgactacttcagggcctacccctgtgcccgagctaccagtgctgcaccagaaagtgcgcagttctatgtttttctgctga

SEQ ID NO: 11643 - protein, 917 aa, Ricinus communis
MEPPEEAEALPPPPPVVPADVVPIQLKPEPDNVPETTEKAIKPKRVPMSRRGNGSRGQRIELLTNHFKVGVNCDGGHFSHYSVALFYEDGRPVDSKGIGRKVIDKVRETYDSDLAGKDFAYDGEKSLFTVGSLPRNKMEFTVLLDDVSSNRINGSGSPVGNGSPNGSEKKRMKRVFHSKTYKVEISFAAKIPMQAIKAALRGQESENSQEAIRVLDIVLRQHAAKQGCLLVRQSFFHDDSRNYVDLDGGVLGCRGFHSSFRVSQGGLSLNIDGSTTTIIQPGPLIDFLLANQHVSTPFQIDWSKAKRTLKNLRIRVSPTNQEYRITGLSENLCKDQIFSMKSKGLNDGNCDDGMVDITVYEYFVNHRNIDLRYSGDLPCINVGRPKRPTFFPIELCSLLPLQRYTKALSVIQRSKLVESSRQKPQEKMKILADVMKSNNYGADPILRSCGITISSQFTQLEGRVLTAPRLKVGNGEDLIPRNARWTFNNKKFAEPARIENWAVVNFSARCDIRGLCRDLCRVGEMKGIMISPPEHVFEENPQFRHAPPPIRVEKMFEQIQPRFPDNPPRFLLSIFPDRKNSDIYGPWKRKNLAEFGIFNQCLCSPNRLSEMYVTNVLMKINAKLGGLNTFLAVEQSRNVPFVSKVPTIIFGMDVSHGSPGQSDVPSIAAVVSSRNWPLLSRYRASVHSQSPKVEMIDSLFKPEGKDDDGIIRELLLDFYRSSGQTKPAQIIIFRDGVSESQFNQVLNIELNQIIEACKFLDESWSPKFTVIVAQKNHHTKFFQLRSAENVPPGTVVDNGVCHPQSNDFYMCAHAGMIGTTRPTHYHVLLDEIGFSADDLQELIHSLSYVYQRSTSAVSVVAPVRYAHLAATQIRLFMKFEDMSETSSSHGGLTTSGPTPVPELPVLHQKVRSSMFFC

SEQ ID NO: 11644 - DNA, 2766 bp, Ricinus communis
  CDS (1)..(2766)
atggattcatttgaacctgatggaaatgggttgcgtgaaggaaatgggatccacgagggaaatggatcacaggaaggcttaccgcctcccccacctgttgttccaccagatgtggttccaatgcgagcagaacctgaaccagtcaagaaaaaggttgtcagggttccaatagctaggcgtggccttggatctaaaggccagaagatatctctactaactaatcactttaaagttaatgttaacaaagttgatgactatttcttccattactgtgtgtccctttcctatgaggatggccgcccggttgatggtaagggtgttggaagaaaggtcattgatcgagtgcatgaaacttatgactctgaaatgggtggaaagaaatttgcttacgatggagagaaaagcttattcactgttggtgctcttccacgcaacaaacttgagttcactgtcgtgcttgaggatgtcacctctaacagaaataacggaaatgcaagccctgatgggcatggtagtcccaatgagggtgaccgaaagagaatgcggcgcccatatcagtccaaaacattcaaagtggagatcagttttgctgcaaaaattcccatgcaggccattgctaatgcactgcgtggacaggaatctgagaattctcaagaagccataagggtcctggatattatattgcgccagcatgcggctaaacagggctgccttcttgtacgccagaatttctttcacaatgatccaaagaattttgcagatgtcgggggtggtgttctaggttgtcgaggatttcattctagttttagaaccactcagggagggctgtctctgaatattgatgtatcaactaccatgataattcagcctggtcctgttgtggattttttgattgcaaaccaaaatgtgagagatccctttcagcttgactgggctaaggccaaacgaacattgaaaaacttgaggattaaggcaagtccctccaaccaagaatacaagataactggtttgagtgagatgccctgcaaagagcaaacttttcaattaaaccaaaagggaagggatgataatgacccgcttgaattaacagtttatgactactttgttaatcatcgccgtatagaattgcgctattctggtgatttaccatgcatcaatgtagggaaaccaaagcggcctacttttattcctattgagctttgttctttggtgtccttgcaacgttacacaaaagcactcaacacccttcaaagggcttctttggtggagaaatcaagacaaaagccacaagagaggatgagtactttatcaaatgctttgaagagcagcaattatgatgctgaacctatgctacgctcatgtggggtctcaatcagtactagttttgttcaagttgatggccgtcaattgcaggcgccaaagctaaaagtaggcaatggggaggatttctttccacgaaatgggcgctggaattttaataacaagaaacttgtggacccaagtaaaatagagcgatgggctgttgtgaacttctcagcacgttgtgatatacgtaaccttgtacgtgatttgacaaaatgtgcagagatgaaaggaattcctatagagcctccttttgatgtatttgaggagaacccgcagttcagacgtgccccgcctacagttcgagttgagaaaatgtttgattcgatacagtctaagcttcctggtgctccgaagttccttttatgtctacttcctgagagaaaaaactctgacctatatggtccttggaaaaagaaaaatctttctgattttggaattgtcacccagtgcattgctccccagagggtcaatgaccagtatttgacaaatgttcttctgaagataaatgcaaagcttggtggtttaaactctatgctggcagttgaacattctccctctataccactggtttctaaggttcctaccattatcattggtatggatgtctcacatggctctcctgggcattctgatgtcccatcaattgctgcggtagtcagttccaggcagtggccattaatttctcgatatagggcatgtgtccgcactcagtctccgaaggttgaaatgatagactctctgtacaagcctgtgtctgacactgaggacgaaggcatgatgagggagcttttgttggacttctattctagttcaggaaaaaggaaacctgaacagatcatcatattcagggatggcgtcagtgaatcacaattcaatcaagtgttgaacattgaattgaatcagataatcgaggcatgtaagcatcttgatgaaaagtggaatcccaagtttgtggtgattattgcacaaaaaaaccaccacactaagttcttccagcctggacttcctgataatgttccacctggaactgtcattgataataaagtctgtcatccacggaacaatgatttctatctctgtgcacatgctgggatgattggaactacgaggcccacccattatcatgttttattagatgaggttggcttttcagcggatgaacttcaggaacttgtgcattcattgtcctacgtgtaccaaagaagcacaactgccatttctgtagttgcaccggtgtgttatgctcacctggctgccactcagatgggacaattcatgaagtttgaggatgcatctgagacatcctcaagtcatggtggtgtaacttctgctggagctgttcctgttcctcagatgcccaaattgtcagataaagtctccagttcaatgttcttttgttga

SEQ ID NO: 11645 - protein, 921 aa, Ricinus communis
MDSFEPDGNGLREGNGIHEGNGSQEGLPPPPPVVPPDVVPMRAEPEPVKKKVVRVPIARRGLGSKGQKISLLTNHFKVNVNKVDDYFFHYCVSLSYEDGRPVDGKGVGRKVIDRVHETYDSEMGGKKFAYDGEKSLFTVGALPRNKLEFTVVLEDVTSNRNNGNASPDGHGSPNEGDRKRMRRPYQSKTFKVEISFAAKIPMQAIANALRGQESENSQEAIRVLDIILRQHAAKQGCLLVRQNFFHNDPKNFADVGGGVLGCRGFHSSFRTTQGGLSLNIDVSTTMIIQPGPVVDFLIANQNVRDPFQLDWAKAKRTLKNLRIKASPSNQEYKITGLSEMPCKEQTFQLNQKGRDDNDPLELTVYDYFVNHRRIELRYSGDLPCINVGKPKRPTFIPIELCSLVSLQRYTKALNTLQRASLVEKSRQKPQERMSTLSNALKSSNYDAEPMLRSCGVSISTSFVQVDGRQLQAPKLKVGNGEDFFPRNGRWNFNNKKLVDPSKIERWAVVNFSARCDIRNLVRDLTKCAEMKGIPIEPPFDVFEENPQFRRAPPTVRVEKMFDSIQSKLPGAPKFLLCLLPERKNSDLYGPWKKKNLSDFGIVTQCIAPQRVNDQYLTNVLLKINAKLGGLNSMLAVEHSPSIPLVSKVPTIIIGMDVSHGSPGHSDVPSIAAVVSSRQWPLISRYRACVRTQSPKVEMIDSLYKPVSDTEDEGMMRELLLDFYSSSGKRKPEQIIIFRDGVSESQFNQVLNIELNQIIEACKHLDEKWNPKFVVIIAQKNHHTKFFQPGLPDNVPPGTVIDNKVCHPRNNDFYLCAHAGMIGTTRPTHYHVLLDEVGFSADELQELVHSLSYVYQRSTTAISVVAPVCYAHLAATQMGQFMKFEDASETSSSHGGVTSAGAVPVPQMPKLSDKVSSSMFFC

SEQ ID NO: 11646 - DNA, 2835 bp, Ricinus communis
  CDS (1)..(2835)
atgcctctcatgcaaatgaaggactttgaagaaagctatatggtggtatctatgcaatctcttcaaacttgcaaaaatcttgagattccctttagtaatggagatgataactcggaaactgcaaaagaaagcttaggtaggaaaagagctaatggaaggagatcaagaggaggcaaaggactcaaagttgagtccaagaaaatattatttcaagattataagcttgattcaagtgaagagtcttctccttcttcatgcaagagccttatgtttcatcgtaggcctggacatggacaattgggtaccaagtgcatagttaaagctaaccattttctagctcagatgcctgattcagacttgagccactatagtgttgaaataaaaccagaagtaacatctcgcaaattaagcaaagccatcatgacacagttggttaaaatgcatagggaaactgatttaggaacgagactgcctgtttatgatggaggcagaaacctttacacagcaagatcacttccttttacctcaaaagactttactataaccttggttcatgaagatgaggcaacaggcaatatcaagaagagagattttgaagtgacaataaaatttgaagcacttgctggtatgctgcaattacgtgagcttctttctggaaaaccagttgatacccctcaagaagcaattactgttattgacattgtgctgagagaacttgcagctcaaagatatgtatcaattggaaggtcattctattctcctgatatcaagaaaccgcagcagctcgaaggaggattagaatcatggagaggtttctaccaaagtataagaccgactcagatgggactgtcactaaatattgacatgtcagcaacggctttcattgaacctctccttgtcatcgaatttgttgctcaaattttgaataaagatgtgtattcgaggccattgtcagacgcagatcgtgtcaaggtaaagaaagcactcaggggtgtaaaagttgaagtcactcacagaagaaatgtacggagaaagtatagaatttcaggattgacgacacagcctacaagagagctaatcttcccgcttgatgagcatatgaacatgaaatcagttgttgagtactttcaagaaatgtatgactataccattcaatatccccatctaccttgcctgcaagttggaaaccagaggaaggttaactatttgccgatggaggcttgcaagatagtcagggggcaaagatataccaaaggcctcaatgagaagcaaataacttctttgctaaaagtttcatgtcaaaggccgcgtgatcaagaaatggacattttgcagacaattcaccaaaatggttatgaacatgatccctatgcaaaggagttcggcatcagcatagacagcaagcttgcatcgattgatgctcgtgttttgcctgctccgtggctgaagtacagcgatactggcaaagtgaaagaatatctgcctcaagttggtcagtggaatatgatgaataagaaagtgataaatggaagcattgtaagatattgggcttgcatcaacttctcacgaagcgttcaagaaaccactgctcgcagtttttgccaacagctggtccagatgtgccgaatttctggcatggattttaacggtgaacctgtaattccaatatatgcagcaagacctgatcaggtaaagaaggccttgaaatatgtataccacgctgctgcaaagaaacttgaaggaaaagaattagagttactcattgccattcttccagacagcaatggttcattgtatggtgatttaaaacgcatttgtgaaactgatctcgggttaatttctcaatgctgccttaccaagcatgtcttcaagattaacagacagtatttggcaaatgtgtcgttaaaaatcaatgttaagatgggaggaagaaatactgtgcttttagatgctataagttggaggattcccttggttagtgacattccaaccataatttttggagctgatgtaacacatccagagtctggagaggacatcagtccgtctatagctgctgttgtagcctcccaagactggccagaagttacaaaatatgctgggttggtttgcgctcagcctcatcggcaagagcttattcaagatttattcaaaacctggcaagaccctcagcaggggacagttgctggtgggatgatcagggagctcctactttcattcaagaaggctaccgggcaaaagccattgaggatcatattttacagggatggtgtcagtgaaggtcaattctatcaggttctactgtatgaactggatgcaattcgaaaggcttgcgcatcacttgaacctagttaccaacctccggtaacatttgttattgtccaaaagcggcatcatactagacttttcgcaagcaatcacaatgatagaagtagcattgacaggagtggaaatattttacctggtactgttgtggacactaaaatatgccatccgactgaatttgacttctatttatgtagtcatgcaggaattcaggggactagccgacctgcacattaccacgtgctgtgggatgaaaacaacttcaccgccgatgagattcaatctctgacgaacaacctttgctatacgtatgctaggtgtacgcggtcggtttctgtagttcctcctgcgtattatgctcatctggcagcttatcgagctcgattttacatggaacctgacgcatcagaaaatcctaaaatttgccgcacgctcacagctaatggatcgtgtgtccgcccgctgcctgcattgaaagagaaggtgaagaatgtgatgttttattgctag

SEQ ID NO: 11647 - protein, 944 aa, Ricinus communis
MPLMQMKDFEESYMVVSMQSLQTCKNLEIPFSNGDDNSETAKESLGRKRANGRRSRGGKGLKVESKKILFQDYKLDSSEESSPSSCKSLMFHRRPGHGQLGTKCIVKANHFLAQMPDSDLSHYSVEIKPEVTSRKLSKAIMTQLVKMHRETDLGTRLPVYDGGRNLYTARSLPFTSKDFTITLVHEDEATGNIKKRDFEVTIKFEALAGMLQLRELLSGKPVDTPQEAITVIDIVLRELAAQRYVSIGRSFYSPDIKKPQQLEGGLESWRGFYQSIRPTQMGLSLNIDMSATAFIEPLLVIEFVAQILNKDVYSRPLSDADRVKVKKALRGVKVEVTHRRNVRRKYRISGLTTQPTRELIFPLDEHMNMKSVVEYFQEMYDYTIQYPHLPCLQVGNQRKVNYLPMEACKIVRGQRYTKGLNEKQITSLLKVSCQRPRDQEMDILQTIHQNGYEHDPYAKEFGISIDSKLASIDARVLPAPWLKYSDTGKVKEYLPQVGQWNMMNKKVINGSIVRYWACINFSRSVQETTARSFCQQLVQMCRISGMDFNGEPVIPIYAARPDQVKKALKYVYHAAAKKLEGKELELLIAILPDSNGSLYGDLKRICETDLGLISQCCLTKHVFKINRQYLANVSLKINVKMGGRNTVLLDAISWRIPLVSDIPTIIFGADVTHPESGEDISPSIAAVVASQDWPEVTKYAGLVCAQPHRQELIQDLFKTWQDPQQGTVAGGMIRELLLSFKKATGQKPLRIIFYRDGVSEGQFYQVLLYELDAIRKACASLEPSYQPPVTFVIVQKRHHTRLFASNHNDRSSIDRSGNILPGTVVDTKICHPTEFDFYLCSHAGIQGTSRPAHYHVLWDENNFTADEIQSLTNNLCYTYARCTRSVSVVPPAYYAHLAAYRARFYMEPDASENPKICRTLTANGSCVRPLPALKEKVKNVMFYC

SEQ ID NO: 11648 - DNA, 2439 bp, Branchiostoma floridae
  CDS (1)..(2439)
atgccgaaaggcgacctccaccattatgacatcagtattatcccagacaaatgccctcgcagagtcaacagagagatcattgaaaagatggcccaagcatacgccaaccggatcttcggggacctccgtcctgtgttcgacggacgcaagaacttgtacaccagggatcctcttcccgtgggaacagaaaaggtggagcttgacgtgacgttaccgggggatggcgggaaggaccgccacttcaaagtgtcgatgaagtgggtggggaaggtgagcctgtacgcgctggaacaggcgctggagggacggctggccaccgtcccgttcgaggctatccaggcactggacgtggtcatgagacatcttccatccatgacgtatactcccgtggggagatccttcttctcgtcccccgagggctacagccaccccctgggtggggggcgcgaggtatggttcggcttccatcagagcgtcagaccctcccagtggaaaatgatgctcaacattgatgtttctgccactgcgttctacaaggcccagccagtgatagagttcatgtgtgaggtgctggatgtgagagacatccacgaccaacggcgacccctcaccgactcacaaagggtcaagttcaccaaggagatcaaagggctgaaagtggagatcacacactgcggacagatgaagcgaaagtaccgcgtatgtaacgtgacacgcagaccagcgcagacacagacgtttcctcttcagttggaggatgggagaactgtggagtgcactgtcgcaaaatacttcttggagaggcacaagaggaggctggagtttcctcacctgccgtgtctacaggtgggacaagaacagaaacacacttacctgccactcgaggtgtgcaacatcgtcgctggccagcgctgcatcaagaagctgacggacatgcagacgtccaccatgatcaaggccactgccaggtcagctccggacagggaacgagagattatcagactgatgcagcgcgccaacttcaacgcggacccctacgtccgagacttcggaatcagcatctctaacgacatggcggaagtggaaggccgcgtactcgaccctcccatgcttcagtatggaggacggacacgtgccaccgtggtgccaaaccaaggtgtgtgggacatgagaggaaagcagttccacacgggcatagagatccgcgtctgggccatggcctgcttcgcactgcagaggcaatgtagcgagcaggctctcagaaatttcacccaacagctccagaggatctccaacgacgccggcatgccgatcgtgggccagccgtgcttctgtaagtacgcgacgggcgcggaccaggtggagaaaatgttccagtatctcaagaacacctttcaggggctgcagctcatcttggtggtcctgccgggcaaaacacctgtctatgcggaggtaaagcgcgtgggagacaccatgttgggtgtggccacgcagtgcgtacaggtaaagaacgtgatcaagacgtcgccccaaaccctgtccaacctgtgcctgaagatcaacgtcaaactgggaggggtcaacaacatcctggtcccacacatacgcccgcgcgtattcctggagcccgtcattttcattggagcggacgtgacgcacccgccggcgggagacgggagaaagccgtccatcgctgctgtcgtgggtagcatggacgcccatcccagtcgctacgcggcgaccgtacgcgtgcagactcaccgtcaggagatcatcgctgacctggcctccatggtgcgggaactcctgatacagttctacaagtcaacacgcttcaaacccacccggatcatcatgtaccgggatggcgtcagcgagggccagtttcaacaggtgttgtggcacgagctgcgagcgatccgagaggcgtgcgtgaagctggaggtcgggtacgagccgggcgtgaccttcatcgtggtgcagaagcgccaccacaccaggctgttctgctccgacaggaaggaacagattgggaagagtggtaacatccctgctggtactactgttgatgttggtatcacccatcccacggagttcgacttctacttatgcagccacgccggcatacagggtaccagccgcccatcgcactaccacgttctgtgggacgacaacaacttcatggcggacgacctccagatgctgacctatcagctgtgtcacacctacgtccgctgtacgcgcagcgtctccatccccgcccccgcgtactacgcacatctggtggccttccgagcacgctaccatctcgtggagaaagatcacgacagcggggaaggatcattccgttccggggacagcagcgagcgtacgcacatggacatggcgcgtgccgtccaggtccatccggacaccctgcgggtcatgtacttcgcatga

SEQ ID NO: 11649 - protein, 812 aa, Branchiostoma floridae
MPKGDLHHYDISIIPDKCPRRVNREIIEKMAQAYANRIFGDLRPVFDGRKNLYTRDPLPVGTEKVELDVTLPGDGGKDRHFKVSMKWVGKVSLYALEQALEGRLATVPFEAIQALDVVMRHLPSMTYTPVGRSFFSSPEGYSHPLGGGREVWFGFHQSVRPSQWKMMLNIDVSATAFYKAQPVIEFMCEVLDVRDIHDQRRPLTDSQRVKFTKEIKGLKVEITHCGQMKRKYRVCNVTRRPAQTQTFPLQLEDGRTVECTVAKYFLERHKRRLEFPHLPCLQVGQEQKHTYLPLEVCNIVAGQRCIKKLTDMQTSTMIKATARSAPDREREIIRLMQRANFNADPYVRDFGISISNDMAEVEGRVLDPPMLQYGGRTRATVVPNQGVWDMRGKQFHTGIEIRVWAMACFALQRQCSEQALRNFTQQLQRISNDAGMPIVGQPCFCKYATGADQVEKMFQYLKNTFQGLQLILVVLPGKTPVYAEVKRVGDTMLGVATQCVQVKNVIKTSPQTLSNLCLKINVKLGGVNNILVPHIRPRVFLEPVIFIGADVTHPPAGDGRKPSIAAVVGSMDAHPSRYAATVRVQTHRQEIIADLASMVRELLIQFYKSTRFKPTRIIMYRDGVSEGQFQQVLWHELRAIREACVKLEVGYEPGVTFIVVQKRHHTRLFCSDRKEQIGKSGNIPAGTTVDVGITHPTEFDFYLCSHAGIQGTSRPSHYHVLWDDNNFMADDLQMLTYQLCHTYVRCTRSVSIPAPAYYAHLVAFRARYHLVEKDHDSGEGSFRSGDSSERTHMDMARAVQVHPDTLRVMYFA

SEQ ID NO: 11650 - DNA, 3075 bp, Caenorhabditis briggsae
  CDS (1)..(3075)
atggcggccgaactgaacaacaccaacaccgatgaggcaccgaccgtcggctcaaacgactcaatgtccggcgggccgcaatatttgccaggggtaatgagtactacactccgaccaacgtcaccatccaatggatcctcgtcgtcgtcgttcctcggaacgtcgccaacgagcacctcgcaagtagtaccaacatctggagcatcaacgcagccgcttaacccgtcggcagcggctgcgtcatccgcgctccagaacgatttagaggaaatattcaactctcctcctactgcgcaaactgcgtcaacatttggaggcgacagtcctcctcaacgtcaagccggaagcttggctcctggaccacctctcggctcatccggagtctccatcggagaaccatcaagcacgattgccggagccatgcaagctggaggagctggtgctgttggcggaaaccaaagtggagttcaattccaatgtccacggagaccaaaccatggaatcgaaggaagatccattcttcttcgggccaatcactttgctgtgagaatcccaggaggaaccatccaacactaccaagttgatgtctctccggataagtgtccaagaagagtgaaccgtgagattatcagctgcttgatcagctcgttctccaagtatttcaccaatatccgtcctgtctacgatggaaaacggaacatgtacacccgagagccacttccaattggaagagagcgaatggactttgatgtcactcttccaggagattctgctgtcgaacgtcaattctctgtttctttgaaatgggttggtcaggtttccctgtcaactttggaagatgctatggaaggacgagttcgtcaagttccattcgaggctgttcaagctatggatgtgatccttcgtcacttgccaagcttgaagtacaccccagttggccgctccttcttttctcccccagtcatcagtgcttccggagttccaggaactgctccaccaccacaagcagccccatccatctcatccggatcccattccgctggacaatatcatgctgagagcaaactaggaggaggtcgcgaagtctggttcggattccatcaatctgtccgtccatctcaatggaagatgatgctcaacatcgatgtgtctgcaactgccttctaccgctctatgccagtcatcgagttcatcgctgaagttttagagcttccagtccaagctcttgctgagagacgtgctctttctgatgctcaacgtgtcaagttcaccaaggagattcgtggtctgaagatcgagatcactcactgtggacaaatgcgcagaaagtaccgtgtctgcaatgtgactcgacgtccagctcagactcaaaccttcccgcttcaactcgaaaccggacaaaccatcgagtgcactgtggccaagtatttctacgacaaataccgtcttcaattgaaataccctcacttgccatgtcttcaagtcggacaggagcaaaaacacacctacttgccaccagaggtctgcaacattgttccaggacaacgttgcatcaagaagctcaccgatgtgcagacttccaccatgatcaaggctacagcaagatctgccccagagcgtgagcgtgagatttccaacttggtccgcaaggccgagttctccgccgatccatttgctcatgagtttggaatcaccatcaatccagccatgactgaagtcaagggacgtgttctctcggcaccaaagcttttgtacggaggacgcactcgtgcgaccgctcttcctaaccaaggagtctgggacatgcgtggaaaacaattccacactggaatcgacgttcgtgtctgggcaatcgcctgcttcgctcaacaacaacatgtcaaggagaatgacttgcgcatgttcaccaaccaacttcaacgcatctctaacgatgctggtatgccaatcatcggcaatccatgcttctgcaagtatgccgtcggagttgagcaggtcgagccaatgttcaagtacttgaagcagaactactctggaatccaattggttgttgttgtcctcccaggaaagactccagtttatgctgaggttaaacgtgttggagataccgtattgggaattgcaacccagtgcgtgcaagccaagaacgccatccgtaccacaccacagaccttgtccaacttgtgcttgaagatgaacgtcaagcttggtggagttaacagcattctccttccaaacgtgcgtccacgtatcttcaacgaaccggttatcttcttcggttgcgacatcactcatccaccagctggagactctagaaaaccatctatcgccgctgtcgtaggatccatggatgcccatccaagtagatacgcagcaactgttcgtgtccaacaacatcgccaggagatcatttcggatttgacctacatggtccgcgaacttctcgtccaattctaccgcaacactcgcttcaagccagctcgtatcgttgtctaccgtgatggagtttcggaaggacagttcttcaacgttctccaatacgaacttcgtgccatccgcgaggcttgcatgatgctcgagagaggataccaaccaggaatcaccttcatcgctgtccaaaagagacatcacactcgtctcttcgccgttgagaagaaggatcaggtcggaaaagcctacaacatcccgccaggaaccaccgtcgatgttggtatcactcacccaaccgagtttgatttctacctctgctctcatgctggtatccaaggaacttcccgcccatctcactaccatgttctctgggatgacaataacctgactgccgacgaacttcaacaactgacctaccaaatgtgccacacctatgtcagatgcaccagatctgtgtcaatcccggcgccagcctactacgctcatttggtcgctttccgtgcccgttaccatcttgtcgaccgtgagcatgactctggggagggatcccaaccatctggaacctcagaagatacgaccttatccaacatggcccgtgctgttcaagtacatccggacgccaacaatgtcatgtatttcgcttaa

SEQ ID NO: 11651 - protein, 1024 aa, Caenorhabditis briggsae
MAAELNNTNTDEAPTVGSNDSMSGGPQYLPGVMSTTLRPTSPSNGSSSSSFLGTSPTSTSQVVPTSGASTQPLNPSAAAASSALQNDLEEIFNSPPTAQTASTFGGDSPPQRQAGSLAPGPPLGSSGVSIGEPSSTIAGAMQAGGAGAVGGNQSGVQFQCPRRPNHGIEGRSILLRANHFAVRIPGGTIQHYQVDVSPDKCPRRVNREIISCLISSFSKYFTNIRPVYDGKRNMYTREPLPIGRERMDFDVTLPGDSAVERQFSVSLKWVGQVSLSTLEDAMEGRVRQVPFEAVQAMDVILRHLPSLKYTPVGRSFFSPPVISASGVPGTAPPPQAAPSISSGSHSAGQYHAESKLGGGREVWFGFHQSVRPSQWKMMLNIDVSATAFYRSMPVIEFIAEVLELPVQALAERRALSDAQRVKFTKEIRGLKIEITHCGQMRRKYRVCNVTRRPAQTQTFPLQLETGQTIECTVAKYFYDKYRLQLKYPHLPCLQVGQEQKHTYLPPEVCNIVPGQRCIKKLTDVQTSTMIKATARSAPEREREISNLVRKAEFSADPFAHEFGITINPAMTEVKGRVLSAPKLLYGGRTRATALPNQGVWDMRGKQFHTGIDVRVWAIACFAQQQHVKENDLRMFTNQLQRISNDAGMPIIGNPCFCKYAVGVEQVEPMFKYLKQNYSGIQLVVVVLPGKTPVYAEVKRVGDTVLGIATQCVQAKNAIRTTPQTLSNLCLKMNVKLGGVNSILLPNVRPRIFNEPVIFFGCDITHPPAGDSRKPSIAAVVGSMDAHPSRYAATVRVQQHRQEIISDLTYMVRELLVQFYRNTRFKPARIVVYRDGVSEGQFFNVLQYELRAIREACMMLERGYQPGITFIAVQKRHHTRLFAVEKKDQVGKAYNIPPGTTVDVGITHPTEFDFYLCSHAGIQGTSRPSHYHVLWDDNNLTADELQQLTYQMCHTYVRCTRSVSIPAPAYYAHLVAFRARYHLVDREHDSGEGSQPSGTSEDTTLSNMARAVQVHPDANNVMYFA

SEQ ID NO: 11652 - DNA, 2700 bp, Caenorhabditis briggsae
  CDS (1)..(2700)
atggagcagacgactgcccctgtcaccaccgattcgaaggatctcaatgaccctctcaaccttctctccgccataggtggactccgtgtcgatggtggatcgccatccgaagctgaagcaaccagtctagagtcccaaggtcgctccggtgtccaattccgttgtccacgtcgtccgaatcatggtgtcgacggacgtgcgattcttcttcgtgccaatcatttttcggtccgcattccgggtggaaacattcaacactatcatgtcgaagtgatgcccgacaagtgtccgagacgtgtcaatcgcgacatcatctcctgcctcatccaatccttctccggctacttcaccaacgttcgcccagtctacgatggcaagaacagcatgtacactcgcgagatgcttgcattcggtcgtgaacgtaccgacttcaatgtggtccttcccggcgagtctgccgtcgaacgtcaattctccgtctccctaaaatgggccggcgaaatctccctaaccagtctagaagacgccatggaaggccgcatccatacagtaccctatgagactgtgaaggctgtggacgtcatccttcgtcacttgccaagtctgaagtatagtccagtcggccggagcttcttctccccgccagcgagattcgagcacgctcaacagcagaacttcccggagagcaagttgggcggagggcgagaggtctggtttggattccatcagagtatcagaccatcccaatggaagatgatgctgaatattgacgtgtcggcgacagcgttctatcgggagatgccagttattgaattcctcgccgaggtccttgagctacccatccaggcactggctgagagaagagtgctttccgattctcaacgtgtcaagttcaccaaggagattcgtggactcaaggtggagatcaatcattgtggaccgatgagacgcaagtatcgtgtctgtaatgtgacgagacgtcccgcccagacccagacgttcccgttgcaattggaaaatgggcaaactatcgagaagacggtgctcaagtatttccatgataagtacaatctgcagttgaagtatccacacttgccgtgtcttcaggtcggccaagagcaaaagcacacctacctcccaatcgaagtgtgcaacgtggtatccggtcaacgatgcatcaagaagctcaccgactcccaaacctctacaatgattaaagccaccgcccgtaccgcaccagaacgcgagcgcgacattgccaatctcgtccgcaaagccgaattctccgccgaccccttcgctcatgagttcggaatcactatcaatccagccatgactgaagtcaaaggacgggtgctgtcggcaccaaagctgctctacggaggacgtcaaaactcgacggctgtcccgaatcaaggagtctgggacctgcgtggaaaacaattccatacgggaatcgaggtccgcgtctgggccattgtctgctttgccgatcagcatcatgtcaaggagaacgacctacgcgctttcacatcccatcttcaacggatctcgcacgacgctggaatgccaatcattggaagtccatgcttctgcaagtatgctgttggtgtggagcaagtggagccaatgttcaagtatttgaaacagaactatccggaattgcagttggtggttattgtgttgcccgggaagacgccggtttatgccgaaatcaagcgtgttggagacacggtcctcggaatcgccactcaatgcattcagtccaagaatgtgactcgtaccacaccccaaacgctttccaatatttgcatgaagatgaacatgaagctgggaggtgtcaattgtgttctcgcgccgaacgttcgtccgaagatcttctccgaatcggtgatcttcctcggatgcgatattacacatccaccggcaggggattctagaaaaccctctgtcgccgccatcgtcggctcaatggacgcccacccgagcaagtacgccgccacagtccgtgtccaaccaaatcgccaggaaatcattaccgaaatggcatcgatggtcaaagagctcctccaacaattctacatcaacactcgtttcaagccagccagaattgtagtctaccgagatggagtctcagagggacaattcttcaatgtccttcaatatgagcttcgagcgatccgcgaggcttgtatgatgctagagactggataccaacccggaatcacctttatcgctgttcaaaaacgtcatcacacccgtttgttctcggttgataagaatgatagagtcggaaaggcgttcaacatcccgcccggaacaattgtggatgttgggatcactcatccaacggaatttgatttctacctatgctcgcatgccggaatccagggaacatctcggccatctcactatcacgtcctctgggatgataacgatatgactgcggaccaacttcagcagctgacgtaccagatgtgtcacacctacgcccggtgcacaagatcggtgtcgatcccggcgccggcgtactatgcgcatttggtggcgatgcgcgccagattccacctggttgacagagatcatgaatccggagaaggatcacaaccgtcgggaacgtcggaggatagtacgttctcgagtatggcgcgtgctgttcaggtccatccgaaagccaacaaggtcatgtactttgcctaa

SEQ ID NO: 11653 - protein, 899 aa, Caenorhabditis briggsae
MEQTTAPVTTDSKDLNDPLNLLSAIGGLRVDGGSPSEAEATSLESQGRSGVQFRCPRRPNHGVDGRAILLRANHFSVRIPGGNIQHYHVEVMPDKCPRRVNRDIISCLIQSFSGYFTNVRPVYDGKNSMYTREMLAFGRERTDFNVVLPGESAVERQFSVSLKWAGEISLTSLEDAMEGRIHTVPYETVKAVDVILRHLPSLKYSPVGRSFFSPPARFEHAQQQNFPESKLGGGREVWFGFHQSIRPSQWKMMLNIDVSATAFYREMPVIEFLAEVLELPIQALAERRVLSDSQRVKFTKEIRGLKVEINHCGPMRRKYRVCNVTRRPAQTQTFPLQLENGQTIEKTVLKYFHDKYNLQLKYPHLPCLQVGQEQKHTYLPIEVCNVVSGQRCIKKLTDSQTSTMIKATARTAPERERDIANLVRKAEFSADPFAHEFGITINPAMTEVKGRVLSAPKLLYGGRQNSTAVPNQGVWDLRGKQFHTGIEVRVWAIVCFADQHHVKENDLRAFTSHLQRISHDAGMPIIGSPCFCKYAVGVEQVEPMFKYLKQNYPELQLVVIVLPGKTPVYAEIKRVGDTVLGIATQCIQSKNVTRTTPQTLSNICMKMNMKLGGVNCVLAPNVRPKIFSESVIFLGCDITHPPAGDSRKPSVAAIVGSMDAHPSKYAATVRVQPNRQEIITEMASMVKELLQQFYINTRFKPARIVVYRDGVSEGQFFNVLQYELRAIREACMMLETGYQPGITFIAVQKRHHTRLFSVDKNDRVGKAFNIPPGTIVDVGITHPTEFDFYLCSHAGIQGTSRPSHYHVLWDDNDMTADQLQQLTYQMCHTYARCTRSVSIPAPAYYAHLVAMRARFHLVDRDHESGEGSQPSGTSEDSTFSSMARAVQVHPKANKVMYFA

SEQ ID NO: 11654 - DNA, 2946 bp, Anopheles gambiae str. PEST
  CDS (1)..(2946)
atgtccaccgaacgggaactgactcccggaacaacgcagcagctgcacccactgtcctactcggatatggccacacacattcaactgaacggagtaataatgggcaaatcattcaatgaatcaccatggacttcttcgccgccaaggcctccaagtccgtctcagtcgcagaccagcttcgatacactctcacgtaaactacctgctttatcttcttgtctcccgacagcaattaagaacgggagcgcagcactttcgctcccacgtttttcacctccggctggggcgacggtcaacccgaccacggtggcgacgacgacgggtacgcagggtgcgcaggcactcggtgtcgtgccggccacaccgccggcaccgccggatctaccggtcttcacatgcccgcgccggcccaacctgggccgggagggccgcccgatcgtgctgcgggccaaccacttccagatcacgatgccgcgcgggttcgtgcaccactacgacattaacatccagccggacaagtgcccgcgcaaggtgaatcgcgaaatcatcgaaacgatggtgcacgcgtacagcaagatgttcggcgcgctgaagcccgtgttcgacgggcgcaacaatctgtacacgcgcgatctgctcccgatcgggaacgatcgcgtcgagctggaggtaacgctgccgggcgagggcaaggatcgggtgttccgcgtcacgatcaagtgggtcgcgcaggtgtccctgttcaacctggaggaggcgctcgagggccgcacccgccagataccgtacgatgcgatactggcgctggatgtggtgatgcgccatctgcccagcatgacctacacaccggtcggacgcagcttcttcagctcgccggatgggtactatcatcctctgggcggtggtcgtgaggtgtggttcggtttccaccagagtgtcagaccctcacagtggaagatgatgcttaatattgacgtatcggctaccgcgttctacaaggcgcagccggtgattgagttcatgtgtgaggtgctggacatcagagacatcaacgagcagcgcaaaccgctgaccgattcgcagcgcgtcaagttcaccaaggaaatcaaggggctcaagatcgaaatcacccactgcggtacgatgcggcgcaagtatcgcgtctgcaatgtgacgcgacgacccgcacaaatgcaatccttcccgttgcagctagagaacggccaaacggtcgagtgtacggtggccaaatacttcctcgacaagtacaagatgaagctgcgctatccgcacctgccctgcctgcaggtgggccaggagcacaaacacacctacctgccgctggaggtgtgcaacatcgtggccggccagcgctgcatcaagaagctgaccgacatgcaaacatcgaccatgatcaaagcgactgcccgttcggcacccgatcgggagcgagaaatcaacaatctggtacggcgagccgatttcaacaacgacgcgtacgtgcaggagttcggcctgaccatctcgaacaacatgatggaggtgcggggccgtgtgctgccccctccgaagctacagtacggtgggcgcgtttccagcatgagcggacaattactctccggtccacagaacaaggtgagcttagcattaccaaaccaaggggtttgggatatgcgaggcaaacaattttttaccggcgtcgagatacgcgtgtgggcgatcgcctgcttcgcgccccagcgcaccgtgcgggaggacgcgctgcgcaactttacccagcagctgcagaagatttcgaacgacgcgggcatgccgatcatcgggcagccgtgcttctgcaagtacgcgaccgggccggaccaggtggagccgatgtttagatatctgaagagcacgttcagccacctgcagctcgtcgtggtggtgctgcccggcaaaacgcccgtctacgcggaagtaaagcgcgtcggcgacacggtgctcggcatggcgacgcagtgtgtgcaggcgaagaacgtgaacaaaacgtcgccccaaacgctgtccaatctctgcctgaagatcaacgtgaagcttggtggaatcaactcgattctggtgccatcgatcagaccaaaggtattcgacgagccggtcatcttcctcggcgctgacgtgacgcacccgccggccggcgacaacaagaaaccgtcgattgcggccgtcgtcggctcgatggatgcgcatccgtcccggtacgcggcgacggtgcgcgtccagcagcaccggcaggagatcatccaggagctgagcagcatggtgcgcgagctgctgatcatgttctacaaatcgaccggcgggttcaagccgcaccgcatcatcctctaccgggacggagtgtccgagggccagttcccgcacgtgctgcagcacgagctgacggcgatccgcgaggcgtgcatcaagctggaggccgactacaagccgggcattacgttcatcgtggtgcagaagcggcaccacacgcggctgttctgcgcggacaagaaggagcagagcggcaaatcgggcaacattccagccggcacgaccgtggacgtgggcattacgcatccgaccgagtttgacttctacctgtgcagccaccagggcattcagggtacgagtcgcccgtcccactaccacgtgctctgggacgacaatcacttcgagtcggacgagctgcagtgcctaacgtatcagctgtgccacacgtacgtccggtgtacccgatccgtttccattccagctcctgcctactacgcacatttggtcgcatttagggcgaggtaccacttggtcgagaaggagcacgattcgggcgaaggatcgcaccagagcggttgctccgaggacagaacgccgggcgcgatggcccgcgccattactgtacacgccgacaccaaaaaggttatgtactttgcctaa

SEQ ID NO: 11655 - protein, 981 aa, Anopheles gambiae str. PEST
MSTERELTPGTTQQLHPLSYSDMATHIQLNGVIMGKSFNESPWTSSPPRPPSPSQSQTSFDTLSRKLPALSSCLPTAIKNGSAALSLPRFSPPAGATVNPTTVATTTGTQGAQALGVVPATPPAPPDLPVFTCPRRPNLGREGRPIVLRANHFQITMPRGFVHHYDINIQPDKCPRKVNREIIETMVHAYSKMFGALKPVFDGRNNLYTRDLLPIGNDRVELEVTLPGEGKDRVFRVTIKWVAQVSLFNLEEALEGRTRQIPYDAILALDVVMRHLPSMTYTPVGRSFFSSPDGYYHPLGGGREVWFGFHQSVRPSQWKMMLNIDVSATAFYKAQPVIEFMCEVLDIRDINEQRKPLTDSQRVKFTKEIKGLKIEITHCGTMRRKYRVCNVTRRPAQMQSFPLQLENGQTVECTVAKYFLDKYKMKLRYPHLPCLQVGQEHKHTYLPLEVCNIVAGQRCIKKLTDMQTSTMIKATARSAPDREREINNLVRRADFNNDAYVQEFGLTISNNMMEVRGRVLPPPKLQYGGRVSSMSGQLLSGPQNKVSLALPNQGVWDMRGKQFFTGVEIRVWAIACFAPQRTVREDALRNFTQQLQKISNDAGMPIIGQPCFCKYATGPDQVEPMFRYLKSTFSHLQLVVVVLPGKTPVYAEVKRVGDTVLGMATQCVQAKNVNKTSPQTLSNLCLKINVKLGGINSILVPSIRPKVFDEPVIFLGADVTHPPAGDNKKPSIAAVVGSMDAHPSRYAATVRVQQHRQEIIQELSSMVRELLIMFYKSTGGFKPHRIILYRDGVSEGQFPHVLQHELTAIREACIKLEADYKPGITFIVVQKRHHTRLFCADKKEQSGKSGNIPAGTTVDVGITHPTEFDFYLCSHQGIQGTSRPSHYHVLWDDNHFESDELQCLTYQLCHTYVRCTRSVSIPAPAYYAHLVAFRARYHLVEKEHDSGEGSHQSGCSEDRTPGAMARAITVHADTKKVMYFA

SEQ ID NO: 11656 - DNA, 2760 bp, Apis mellifera
  CDS (1)..(2760)
atgtatcctgtagggcagcctcccccacctggacccacaacaagttcttctgttggagcagctggagcaactggaagcagtgttgtagcttctagttctttagggcttgtttccacacaacaaacacacactcctcctcaacctcctgaactgccaagtaagattttaaaaattagtttaacagaaaaaaacttagttgattttaatcagtatattaaagtggatatcaaaaatatgtcaaaaatgttttcatgtcctcggagaccaaatataggacgtgaaggcaggccaattgtcttaagagctaatcacttccaaataacaatgccacgtggttatgtgcaccattatgatattaatattcaacctgataaatgtcctcgtaaagttaatagagaaataatagaaacaatggttcatgcatataccaaaatatttggaactcttaaacctgtatttgatggaagaaataatttatatacaagggaccccttgcctattggtactgataaaatagaattagaagtaacactgcctggtgagggtaaagatagagttttcagagttgtgataaagtggttggctcaagtttcactatttgcattagaagaagctttagaaggacgaacaagacaaattccatatgatgctatacttgctttagatgttgtaatgaggcatttaccatctatgacatatactccagtaggtagatcattctttagtacaccagatggatattatcatccattaggtggtggaagagaagtttggtttggttttcatcaatcagttaggccatctcaatggaaaatgatgttaaatattgatgtatctgcaactgcattttataaagcacaacctgtcatagaatttatgtgtgaagtattagacattcgagatataggagaccaaaaaagacctttaacagattctcaacgagttaaatttaccaaagaaattaaaggacttaaaattgaaatcacacattgtggaacaatgagacgaaaatacagagtgtgtaatgttacacgtaaacctgctcaaatgcaatcattcccgttacaattagaaaatggacaaacagttgaatgtacagttgcaaaatatttcttagataagtataaaatgaagttacgtcatccatatcttccatgtcttcaagttggacaggaacataaacatacatatttgccacttgaggtctgcaatattgttgctgggcaacgttgtatcaaaaaattgactgatatgcagacttctactatgataaaagctacagctcgttctgctccagatcgcgaaagagaaataaataatttagttagaagagctgattttaataatgattcatacgttcaagaatttggtttgacaatatcaaataatatgatggaagttagaggtcgtgttctacctccacccaaacttcagtacggagggcgcacaaaacaacaagctatacctaatggtggtgtttgggacatgcgtggaaaacaatttttcacgggtgtggaaattagagtttgggcaattgcctgctttgctccacaaagaactgtgcgagatgacgcaatacgtaattttatagcacaattacaaagaataagcaatgatgctggaatgccaattattgggcaaccatgtttttgtaaatatgctactggcccagatcaagtagagcccatgtttagatatttaaaagcaacattttcatcattgcaacttgtttgtgttatattacctggaaaaacgcctgtatatgctgaagttaaaagagtaggagatacattattgggtatggcaacgcaatgtgtacaagcaaaaaatgttaataaaacatcaccacaaacgctatcaaatttatgtttgaaaattaacgtaaaattaggtggtattaatagtattctagtacccactattagaccaaaagtatttgatgaacctgttatattttttggagctgatgtgactcatccacctgctggagataataaaaaacctagcatagctgcagtagttgccagtatggatgctcatccatctcgatatgcagctactgttagagttcaacaacatagacaagaaattattcaggaacttagttcaatggtgagggaacttcttcttatgttttacaaaagtactggaggatataaaccgcttaggataattctttatcgtgatggtgtctcagagggtcaatttcttcatgttctgcaacacgagctaactgccattcgcgaagcttgtattaaacttgaagctgaatatagacctggtataacatttgttgtcgtccaaaagagacatcacactcgcttattttgttcagaaaaaagagatcaaagcggtaaaagcggaaatataccagcgggtacgacagttgatgtttgtataacgcatccaactgaatttgatttttatttatgtagtcatcaaggtatccagggcacatcacgaccatcacattatcatgttttatgggatgataatcgttttgaaagtgatgaattacaatctctaacctatcaattatgtcacacatatgtcagatgtacgagatctgttagtatacctgcacctgcatattatgctcatcttgtagcattccgagccagatatcatttggtagaaaaagagcatgatagtggagaaggatctcaccaatctggctgcagtgaagacagaacaccaggtgcaatggcaagagctatcacagttcatgcaaatacaaaacgggttatgtattttgcataa

SEQ ID NO: 11657 - protein, 919 aa, Apis mellifera
MYPVGQPPPPGPTTSSSVGAAGATGSSVVASSSLGLVSTQQTHTPPQPPELPSKILKISLTEKNLVDFNQYIKVDIKNMSKMFSCPRRPNIGREGRPIVLRANHFQITMPRGYVHHYDINIQPDKCPRKVNREIIETMVHAYTKIFGTLKPVFDGRNNLYTRDPLPIGTDKIELEVTLPGEGKDRVFRVVIKWLAQVSLFALEEALEGRTRQIPYDAILALDVVMRHLPSMTYTPVGRSFFSTPDGYYHPLGGGREVWFGFHQSVRPSQWKMMLNIDVSATAFYKAQPVIEFMCEVLDIRDIGDQKRPLTDSQRVKFTKEIKGLKIEITHCGTMRRKYRVCNVTRKPAQMQSFPLQLENGQTVECTVAKYFLDKYKMKLRHPYLPCLQVGQEHKHTYLPLEVCNIVAGQRCIKKLTDMQTSTMIKATARSAPDREREINNLVRRADFNNDSYVQEFGLTISNNMMEVRGRVLPPPKLQYGGRTKQQAIPNGGVWDMRGKQFFTGVEIRVWAIACFAPQRTVRDDAIRNFIAQLQRISNDAGMPIIGQPCFCKYATGPDQVEPMFRYLKATFSSLQLVCVILPGKTPVYAEVKRVGDTLLGMATQCVQAKNVNKTSPQTLSNLCLKINVKLGGINSILVPTIRPKVFDEPVIFFGADVTHPPAGDNKKPSIAAVVASMDAHPSRYAATVRVQQHRQEIIQELSSMVRELLLMFYKSTGGYKPLRIILYRDGVSEGQFLHVLQHELTAIREACIKLEAEYRPGITFVVVQKRHHTRLFCSEKRDQSGKSGNIPAGTTVDVCITHPTEFDFYLCSHQGIQGTSRPSHYHVLWDDNRFESDELQSLTYQLCHTYVRCTRSVSIPAPAYYAHLVAFRARYHLVEKEHDSGEGSHQSGCSEDRTPGAMARAITVHANTKRVMYFA

SEQ ID NO: 11658 - DNA, 2799 bp, Strongylocentrotus purpuratus
  CDS (1)..(2799)
atgtaccagccaccaccgcatccgaatttgccatatggagcgccaccattcccccaggcacctatccagcgcccgcaagccggtcagccccctcgccagcaggccatccccggccccgctcctatacagcagcagactgccaccaccctccaggggcagactaccctcccgcccatcaccgcaggcgggccacccggtccacctgcccctgctgctcctccaggggggccagggggccctcagcctccccggtctgacctggtggccctgccgtccaggccggggttcggagaggacggtcgtcccatcgtgctgagggctaatcacttccaggtcaagataccgtcgattgaaatctttcattatgacgtcaccatcactcctgataaatgccctcgtagggtgaatagggatgtgattgacacattggtgaatgcatacaaggccagatacttccagaacaatcttccagtgtttgacgggaggaggaacatgtacaccaaggagcagctacctcttgaaaatgaaagggttgaacttgaagctacattgcctggcgaggggaaggacagggttttcaagactcagatccgatacgtcgggaaagtgagtctgtccctgctggagtctgcgctgaagggagaggtcgagcacatgccatacgatgcaatacaagcgttggatgttatcatgagacatctcccatcaatgaggtatactccggtagggcgatctttcttctcgcccccagaggaatacttccatcccctcggtggcggtagagaggtgtggtttggattccatcagagtgtcaggccctccatgtggaaaatgatgctcaacatagatgtatcggcgactgcattttacaatgctcagtccgtcatagacttcctgtgtgaggtcttggatatccagaacatctcagaacaacggcgccctctatcggactcgcagagggtaaagttcaccaaagagatcaaaggcctaaaaattgaaataacgcactgtggaaacatgaggcggaaatatagagtgtgcaatgtgaccaagagacctgctcaaacccaaacattcccttggcagcttgagaatgggcagactgtggagtgtacagtggccaaatacttcaaagaaaggcataacagaatcttgcaataccctcatctcccctgtctgcaggttggacaggagcagcgccacacctacctacctctggaggtttgcaacatcgttgctgggcagcgctgtatcaagaaactgacggatatgcagacctccacaatgatcaaggccactgcaaggtctgcccctgatcgagaaaaggagatcaagaatttggtgcataaagccaacttcaacaatgaccgctacgtccgacagtttggtctgagtatcagtaatgacatggtcaccatagagggcagagttctacccgctccgaagatccagtacggcggaaagcaaaacaagactcaggcaatccctgcccaaggggtatgggacatgagaggcaagcagttccatactggtgtcgagatccgagtctgggccatcgcctgcttcgcaccacagcaccagtgtagggaagaagctctcaggacgttcacagcacagctccagaagatctccaacgatgcggggatgcccatcatgggacagccgtgcttctgcaagtacgccgtgggcgccgatcaggtggaacccatgttcaggcacctcaagtcaacgtacaaaggactgcagctgatcgtggtggtgctgcctggtaaaacccctgtctatgctgaagtgaagcgagttggtgacactctgctgggtatagccacacagtgtgtacaagtcaagaatgtgaacagaaccacggcacaaaccctctccaatctctgcctcaagatcaacgtcaaactgggtggtatcaacaatatcctggttcccaatataagacctcgtgtctttgctgagccggtcatcttccttggagcagatgtcactcacccgccggccggagatgacaagaaaccttccattgctgccgttgtgggtagtatggacggccatccaagccgttattgtgccagtgtgcgagtccagaatcaccgggtggagatcatccaggacctgatgggaatggtcagggaactcctgatggaattctatcggtcaaccagatttaaaccggccaggatcatcatgtacagggatggggtcagcgaaggacaattcttacaggtgctagctcaagagatgaccgcaatccgtaatgcctgccgctccttggaagacttctatgagcctggtatcacgttcattgtggttcagaagagacatcataccagactcttctgtgctgagagaagagaacagattggaaggagtggtaacatcccagcaggtactacagtagacagcggcatcacccatcctcttgagtttgatttcttcctctgcagtcacgccggtatacagggcaccagtcgaccctctcactaccacgtcctctgggacgacaaccgcttcaaggctgacgaactccagtgtctaacctaccagctgtgccacacctacgtacgctgcacccgtagcgtgtccatccccgcccccgcctactacgcccacctggtggccttccgtgccagataccatctggtagagaaggaccacgatagatacgaccatgacagtggtggtgatggtagcagccaccacggggccagcagctacgggcggagctttgaggacatgatacgggccgtcaaagtgcacgatgacaccctcaaggtcatgtactttgcatga

SEQ ID NO: 11659 - protein, 932 aa, Strongylocentrotus purpuratus
MYQPPPHPNLPYGAPPFPQAPIQRPQAGQPPRQQAIPGPAPIQQQTATTLQGQTTLPPITAGGPPGPPAPAAPPGGPGGPQPPRSDLVALPSRPGFGEDGRPIVLRANHFQVKIPSIEIFHYDVTITPDKCPRRVNRDVIDTLVNAYKARYFQNNLPVFDGRRNMYTKEQLPLENERVELEATLPGEGKDRVFKTQIRYVGKVSLSLLESALKGEVEHMPYDAIQALDVIMRHLPSMRYTPVGRSFFSPPEEYFHPLGGGREVWFGFHQSVRPSMWKMMLNIDVSATAFYNAQSVIDFLCEVLDIQNISEQRRPLSDSQRVKFTKEIKGLKIEITHCGNMRRKYRVCNVTKRPAQTQTFPWQLENGQTVECTVAKYFKERHNRILQYPHLPCLQVGQEQRHTYLPLEVCNIVAGQRCIKKLTDMQTSTMIKATARSAPDREKEIKNLVHKANFNNDRYVRQFGLSISNDMVTIEGRVLPAPKIQYGGKQNKTQAIPAQGVWDMRGKQFHTGVEIRVWAIACFAPQHQCREEALRTFTAQLQKISNDAGMPIMGQPCFCKYAVGADQVEPMFRHLKSTYKGLQLIVVVLPGKTPVYAEVKRVGDTLLGIATQCVQVKNVNRTTAQTLSNLCLKINVKLGGINNILVPNIRPRVFAEPVIFLGADVTHPPAGDDKKPSIAAVVGSMDGHPSRYCASVRVQNHRVEIIQDLMGMVRELLMEFYRSTRFKPARIIMYRDGVSEGQFLQVLAQEMTAIRNACRSLEDFYEPGITFIVVQKRHHTRLFCAERREQIGRSGNIPAGTTVDSGITHPLEFDFFLCSHAGIQGTSRPSHYHVLWDDNRFKADELQCLTYQLCHTYVRCTRSVSIPAPAYYAHLVAFRARYHLVEKDHDRYDHDSGGDGSSHHGASSYGRSFEDMIRAVKVHDDTLKVMYFA

SEQ ID NO: 11660 - DNA, 2739 bp, Tribolium castaneum
  CDS (1)..(2739)
atgagtttacctcttcccgacatcatccagagcgtgttgaaggtgttcgacgagctcgacactccggttaagatttcagccccacgtattggtctgaaagatgggtttgttgttccagcaaccgcccctggaaccgctagcaccgccgtggccgtcgtgggggcgacgagcacggccctcgccaccgtgccacccacgacagatccgccggtcttccaatgtccccgtcggccaaatctcggccgcgaaggccgtcccattggcttgaaagccaaccatttccaagtgacgatgccgcgtggcttcgtccatcactacgacgtgagcatacagcccgataaatgccccagaaaggtcaatcgggaaattatcgagactatggtacacgcctatggtaaaattttcggcaacttgaagccggtcttcgacggtagaaacaatctctacacgcgtgatcctctaccgattggtaattcacgcgaggagttggaagtgacgttgcctggcgaaggcaaggataggttgtttagggtgacaataaaatgggtggcgcaagtgtcgctttacggactcgaggaagcgctagaagggagaacacgacaaataccgtatgaggcaattctagcgcttgatgtcgtaatgagacacttaccgtcgatgagttacacgccagttggtcgaagcttcttcagcagtccggaagggtattatcatccgttgggtggtgggcgagaggtttggtttgggtttcaccagtcggtcaggcctagccaatggaaaatgatgttgaatattgatgtttctgcaactgctttttacaaagcacagccggttatcgaatttatgtgcgaagttttggatattcgagatatcaacgaacagagaaaaccgctaactgatagtcaacgtgtcaaatttacgaaagaaatcaaaggtttgaaaatcgaaataacacattgtgggaccatgaggcggaagtatagggtgtgcaatgtgacacgaagaccggctcagatgcaatctttccccctccaactggacaacggacagaccgtagagtgtaccgtagcaaagtatttcctcgacaagtacaaaatgaaattaagatacccccatttaccgtgcctccaggttggccaggaacacaaacacacctatttgccgttagaagtctgtaacattgtagctggccaacgatgcatcaagaaactaacggatatgcaaacatccactatgataaaagctacagcaagatcagcaccggacagagaacgtgaaatcaacaacttggtaaggagggctgattttaacaacgacccctacgtgcaagaattcggcttgacaatcagcaacaacatgatggaagttcgcggtagggttctcccacctcctaaactacagtacggtggtcgggtggcttccctcagcggacagcaagcgatgcctaatcaaggcgtgtgggacatgcgaggcaaacaattctttacgggtgtggaaatcagagtttgggccatcgcttgttttgctccacagcgtaccgtgagggaagacgctttaaggaatttcacacagcagctacaaaaaatctcaaacgatgcaggcatgccaataatcggacaaccatgtttttgtaaatatgcgacaggtccggaccaagtcgagccaatgttccggtacctgaaatcgactttccagtcattgcaactcgttgtcgttgtcttgcctggaaagacacctgtctatgctgaagttaaaagggtaggcgacacagtattagggatggccacccaatgtgttcaagcaaaaaatgtaaacaaaacatcaccacagacactgtcaaatctatgcctcaaaataaacgttaagctaggaggtatcaacagcattcttgtgccatcgatcagaccaaagatatttaacgaacctgtcatatttctgggtgctgatgtcactcatcctccagccggcgacaataaaaaaccttcaatagcagccgtcgtcggttcaatggacgctcatccctcacgttatgccgccactgttcgcgtccagcaacaccgacaagagatcatccaagagttgagctcaatggttcgggaacttttgataatgttttacaaatcgaccggcggctacaaaccccatcgtatcattttgtacagagatggcgtgtcagaaggacaatttctccaattattacagcatgaattaacagcgattcgagaagcttgcatcaaattggagagcgattataagccgggtattacgtttattgtggtgcagaagaggcaccacaccagattgttttgcgctgacaagaaggaacaaagtgggaagagtgggaatattccagcgggaaccacagtcgatgttgggatcacacatccgacagaatttgatttttatttgtgcagtcatcagggtatacagggtacatcaaggccgtcacactaccatgtcctatgggatgattcccatttggattcggatgaacttcagtgtttgacgtatcaattgtgtcacacttatgtgcgctgtactcggtctgtttctataccggcaccggcttattacgcccatttggtagcttttcgagcaagatatcacttagtagaaaaggagcatgacagtggcgaaggttcgcaccagtcgggttcttccgaagaccgaacacccggagccatggcaagggctataacagtgcatgcagacaccaagaaggtgatgtatttcgcttag

SEQ ID NO: 11661 - protein, 912 aa, Tribolium castaneum
MSLPLPDIIQSVLKVFDELDTPVKISAPRIGLKDGFVVPATAPGTASTAVAVVGATSTALATVPPTTDPPVFQCPRRPNLGREGRPIGLKANHFQVTMPRGFVHHYDVSIQPDKCPRKVNREIIETMVHAYGKIFGNLKPVFDGRNNLYTRDPLPIGNSREELEVTLPGEGKDRLFRVTIKWVAQVSLYGLEEALEGRTRQIPYEAILALDVVMRHLPSMSYTPVGRSFFSSPEGYYHPLGGGREVWFGFHQSVRPSQWKMMLNIDVSATAFYKAQPVIEFMCEVLDIRDINEQRKPLTDSQRVKFTKEIKGLKIEITHCGTMRRKYRVCNVTRRPAQMQSFPLQLDNGQTVECTVAKYFLDKYKMKLRYPHLPCLQVGQEHKHTYLPLEVCNIVAGQRCIKKLTDMQTSTMIKATARSAPDREREINNLVRRADFNNDPYVQEFGLTISNNMMEVRGRVLPPPKLQYGGRVASLSGQQAMPNQGVWDMRGKQFFTGVEIRVWAIACFAPQRTVREDALRNFTQQLQKISNDAGMPIIGQPCFCKYATGPDQVEPMFRYLKSTFQSLQLVVVVLPGKTPVYAEVKRVGDTVLGMATQCVQAKNVNKTSPQTLSNLCLKINVKLGGINSILVPSIRPKIFNEPVIFLGADVTHPPAGDNKKPSIAAVVGSMDAHPSRYAATVRVQQHRQEIIQELSSMVRELLIMFYKSTGGYKPHRIILYRDGVSEGQFLQLLQHELTAIREACIKLESDYKPGITFIVVQKRHHTRLFCADKKEQSGKSGNIPAGTTVDVGITHPTEFDFYLCSHQGIQGTSRPSHYHVLWDDSHLDSDELQCLTYQLCHTYVRCTRSVSIPAPAYYAHLVAFRARYHLVEKEHDSGEGSHQSGSSEDRTPGAMARAITVHADTKKVMYFA

SEQ ID NO: 11662 - DNA, 3213 bp, Pisum sativum
  CDS (1)..(3213)
atggttaggaagaggagaaccgacggacctggtggtgaaagctctggcggtcaacaccctgccgagaggagtgttccccctcaacaacaggctgctgtgtctggaggcggaggaccccaaggagggcgaggccggggtccccaaggtggacgtgggggttatggaggtcgtgggatgccccaacaacaacatggtgcccctcctgagtaccaaggaagaggtaggggaggacagtatggtgccccctctgattatcaaggaagaggtaggggaggacagtatggtgccccctccgattatcaaggaaggggtagaggaggacctccccagccccaacagcagtatggtggcccacctgagtatcaaggcagaggcaggggagggccttctcagcaaggaggtcgtggatatggcgatggccgaggtggatatggtggtggccatgatacagctccttcttatggaggccccgtcaggccaccagcacccgaactgcaccaagctacctcagttccttctgtgccgtatccagttgcggtgtctcctccacctgcaccgagtgaggcaagttcatcttcgcatccacaagtgtctgaagtggaacagggtctgggacaggtgacaattcattctgaagagactcccgctcctccgcctgcaagtaaatcatcactgaggtttccccttcgacctggaaaagggaagattggcaagaagtgtgttgttaaggcgaaccacttctttgctgagttgccaaagaaagacctgcatcagtatgatgtgacaattactccggaagtgacttctagaggtgtgaaccgagctgttatggcgcagcttgtgaaattgtatcgggattctcacctgggaaagagacttccggcttatgatggccgtaagagtctctatacagcagggccacttccttttatttcaaaggactttagaatcaccctggttgatgaagatgacgacggatcaagagggaagaggagggacagggagtttaaagttgttattaaatttgcttcacgtgctgaccttcaccacctgggtctctttttggaggggaggcaaactgatgcacctcaggaagctctgcagggtcttgacattgttctccgggagcttcctacaagcaggtattgtccagtgggaagatcattttattcccctcttctaggtataaggcagcctttaggtgaggggttggaaagttggcgaggattttatcaaagtattcgtcctactcaaaatggactgtctctgaacattgatatgtcttcaactgcatttattgagccactgcctgtgatagagttcgttgccaagttgctgaatagggaagtctcacccaggcctctggctgatgctgatcgggtgaagataaaaaaagcactccgtggtatcaaagttgaagtaacacatcgtggcaacatgaggagaagatatcgtatttctggtttgacttcacaaactaccagagagctgacattccctgtggatgagagtgggactatgaagtctgttgttgagtatttctctgagacatatggttttgtcattcaacatactcagtggccttgtttgcaagtgggcaaccctcagagaccaaactaccttccaatggaggtctgcaaaattgtcgaggggcaaaggtactcgagacgattgaatgagcgacaaattaccgccctgctcaaagtcacatgccaacgtccaccagatagggaaaatgacatcacacagacagtacgtcataatgcctatcatgaagatccttatgcgaaagagtttggaatcaaaatcagtgataagcttgcccaagttgggcaatggaataagaaaatggtcaatgggggaacagttaacaactggttctgcgtaaacttttctaggagtgtgccagacaaatctgcacatgccttttgttgtgagcttgcaaatatgtgtcacatatctggcatggcatttaatcctgaaccagtacttcctccacttagtgctcgtcctgaccaagtagagaaggttctcagaaggcgctatcatgatgccaagaccaagctgcagggaaaggagcctgacttgctcattgtcattttgcctgataataatggttctctttatggtgacctcaagcgtatttgtgagactgacctgggggttgtttcccagtgttgtttgactaaacatgtttttaagatgaacaagcagtaccttgcaaatgtttcattgaaaattaatgttaaagttgggggtaggaatactgtgcttgttgacgcactttcacgacgcattcctatagtcagtgacagacctactatcatttttggagctgatgtgactcatcctcaccctggggaggattcaagtccatcaatagcagctgttgttgcttctcaagattggccagaaatcaccaagtatgcaggtttggtttgtgcccaagcacatcggcaagaattgattcaagaccttttcaaacaatggcaagatccagtcagaggaacactgactggtggaatgatcaaggaacttcttatatcattccggagagcaactggtcaaaaacctcagcgcatcatattttacagagatggagttagcgaagggcaattttaccaagtcctgctatttgagcttgatgcaatccggaaggcttgtgcttcacttgaacccaactatcagcctactgtgacttttgtggtggttcagaaacgtcatcatactaggctctttgccagtgaccaccgtgacaagagatctgttgatcgcagtggcaatatattacctggaactgttgtggattctaatatctgccatccgactgagtttgacttttatctttgcagtcatgccggaatacagggtactagccgtccagctcattatcatgttttgtgggatgaaaataaattttctgctgatgaattgcaaagtttaagtaataacttgtgctacacatatgcgagatgcacccgttctgtttcaattgtgccccctgcttattatgctcatttggctgcattccgggcaaggttctatatggaacctgagacttctgatagcggatctattgcaagcggagcagtttctcgtggcggaatggcagctgccgctgggcgtagttcacgtgcgccgggggcaactgctgctgttagacccctgcctgaattgaaggagaatgtcaagagggtcatgttttattgctga

SEQ ID NO: 11663 - protein, 1070 aa, Pisum sativum
MVRKRRTDGPGGESSGGQHPAERSVPPQQQAAVSGGGGPQGGRGRGPQGGRGGYGGRGMPQQQHGAPPEYQGRGRGGQYGAPSDYQGRGRGGQYGAPSDYQGRGRGGPPQPQQQYGGPPEYQGRGRGGPSQQGGRGYGDGRGGYGGGHDTAPSYGGPVRPPAPELHQATSVPSVPYPVAVSPPPAPSEASSSSHPQVSEVEQGLGQVTIHSEETPAPPPASKSSLRFPLRPGKGKIGKKCVVKANHFFAELPKKDLHQYDVTITPEVTSRGVNRAVMAQLVKLYRDSHLGKRLPAYDGRKSLYTAGPLPFISKDFRITLVDEDDDGSRGKRRDREFKVVIKFASRADLHHLGLFLEGRQTDAPQEALQGLDIVLRELPTSRYCPVGRSFYSPLLGIRQPLGEGLESWRGFYQSIRPTQNGLSLNIDMSSTAFIEPLPVIEFVAKLLNREVSPRPLADADRVKIKKALRGIKVEVTHRGNMRRRYRISGLTSQTTRELTFPVDESGTMKSVVEYFSETYGFVIQHTQWPCLQVGNPQRPNYLPMEVCKIVEGQRYSRRLNERQITALLKVTCQRPPDRENDITQTVRHNAYHEDPYAKEFGIKISDKLAQVGQWNKKMVNGGTVNNWFCVNFSRSVPDKSAHAFCCELANMCHISGMAFNPEPVLPPLSARPDQVEKVLRRRYHDAKTKLQGKEPDLLIVILPDNNGSLYGDLKRICETDLGVVSQCCLTKHVFKMNKQYLANVSLKINVKVGGRNTVLVDALSRRIPIVSDRPTIIFGADVTHPHPGEDSSPSIAAVVASQDWPEITKYAGLVCAQAHRQELIQDLFKQWQDPVRGTLTGGMIKELLISFRRATGQKPQRIIFYRDGVSEGQFYQVLLFELDAIRKACASLEPNYQPTVTFVVVQKRHHTRLFASDHRDKRSVDRSGNILPGTVVDSNICHPTEFDFYLCSHAGIQGTSRPAHYHVLWDENKFSADELQSLSNNLCYTYARCTRSVSIVPPAYYAHLAAFRARFYMEPETSDSGSIASGAVSRGGMAAAAGRSSRAPGATAAVRPLPELKENVKRVMFYC

SEQ ID NO: 11664 - DNA, 3303 bp, Pisum sativum
  CDS (1)..(3303)
  misc_feature (1050)..(1050): n is a, g, c or t
atggttaggaagaggagaactgagggacctggtggtgaaagctccgatggccaacaccctgctgagaggagtgtgccgcctcaacaacaggctgctgtatctggaggtgcaggtccccagggagggggaggaccccaaggagggcgaggctgggctccccagggtggacgtgggggttatggaggtggacgcggtggtcgtgggatgccccaacagcaatatggtggtgcaccccctgagtatcaaggaagaggtaggggaggacatcatcagccccaacagcaatatggtgctccctctgattatcaaggaaggggtaggggaggacctacgcgggatcaacagcagtatggtggtccacctgagtatcaaggcagaggcaggggagggccttctcagcaaggaggtcgtggatatggcggtggccgaggtggatatggtggcggtgtgggccctggtggtggccatgacacagttccttcttatggaggcccacctaggccaccagcacccgagctgcaccaagctacctcagttccttccgtgccatatccagttgcggtgtctcctccacctgcaccaagtgaggcaagttcatcttctcatccaccagaagtgtctgaagtggaacaggatctgggacagatgacaattcattctgaagagactcccgcgcctcctcctgctagtaaatcatcactgaggtttccccttcgacctggaaaagggagctatggcaagaaatgtgttgttaaggcaaaccacttctttgctgagttgccaaagaaagacctgcatcagtatgatgtgacaattactccagaagtgacttctagaggtgtgaaccgtgctgttatggagcagcttgtgagactgtatcgtgattctcacctgggaaagagacttccggcttatatggcggcaaaggcctttatttccgggccctccttttattacgagggctttagatccccggttgatgaaatgatggtcagggggcagagagggccagggagtttaagtgttattaacctgctgcccgggctgccnttcccccctgggactctttttggggggaggcagactgatgcacctcaggaagctctgcaggttcttgacattgttctccgggagcttcctactaccaggtattgtccagtgggaagatcattttattcacctgatctaggtagaaggcagcctttgggtgaggggttggaaagttggcggggattttatcaaagtattcgtcctactcaaatgggactgtctctgaacattgatatgtcttcaactgcatttattgagccactgcctgtgatagatttcgttacccagttgttgaatagggatgtctcatccaggcctctgtctgatgctgaccgagttaagataaaaaaagcgctccgtggaatcaaagttgaagtaacacatcgtggcaacatgaggagaaaatatcgtatttccggtttgacttcacaagctactagagagctgactttccctgtggatgagagggggactatgaagtctgttgttgagtatttctttgagacctatggtttcgtcattcaacatactcagtggccttgtttgcaagtgggcaatactcagagaccaaactaccttccaatggaggtctgcaagattgtcgaggggcaaaggtactctaaacgattgaatgagcgacaaattaccgccctgctcaaagtcacatgccaacgtccactagatagggaacgtgacatcatgcagactgtacatcataatgcctatcatgaggatccttatgctaaagaatttggaatcaaaatcagtgaaaaacttgctcaagtcgaagctcgcatccttcctgcgccttggctcaaatatcatgatactggtagagaaaaggattgtctaccccaagttggccaatggaatatgatgaacaagaaaatggtcaatgggggaacagttaacaattggttctgcgtaaacttttctaggaatgtgcaagacagtgttgcacgtggattttgtgatgaacttgcccatatgtgttacgtatctggcatggcatttaatcctgaaccagtagttcctccagtaagtgcccgtcctgaccaagttgagaaggttctgaaaacgcgtcatcatgatgccaagaccaaactgcagggaaaggatcttgatctgctcattgtcattttgcctgataataatggttctctttatggtgacctcaagcgaatatgtgagactgacctgggggttgtttcacagtgttgtttgactaaacatgtttttaagatgagcaagcagtaccttgcaaatgtttccttgaaaataaatgtaaaggttgggggtaggaatactgttctggttgatgcactttcacgacgcataccactagtcagtgacagacctactattatatttggagctgatgtgactcatccacaccctggtgaagattcaagtccatcaatagcagctgttgttgcttctcaagattggccagaaatcaccaagtatgctggtttggtttgtgcccaagcacataggcaggagttgattcaagaccttttcaaacaatggcaagatccagtcagaggaacattgactggtggaatgatcaaggaacttcttatatcattccggagagcaactggtcaaaaaccacagcgcatcatattttacagagatggagttagcgaagggcaattttaccaagtgctgctgtttgagcttgatgcaatccggaaggcctgtgcttcacttgaacccaactatcagcctcctgtgacttttgtggtggttcaaaaacgtcatcatactaggctctttgccagtaaccaccatgacaagagctctgttgatcgcagtggcaacatattacctggaactgttgtggattctaagatctgccatccgactgagtttgacttttatctatgcagtcatgccggaatacagggtacaagccgtccagctcattatcatgttttgtgggatgaaaataattttactgccgatgctttgcaaagtctaactaacaacttgtgctacacatatgccagatgtacccgttctgtttcaattgtgccccctgcttattatgctcatttggctgcattccgagcaaggttctatatggaacccgagacttctgatagtggatctatgacaagcggtgcagttccacgcggtggaatggcagctgctgcagggcgtagttcacgtgccccgggtgcaaatgctgctgttagacccttgcctgcgttgaaggagaatgtcaagagggtcatgttttattgctga

SEQ ID NO: 11665 - protein, 1100 aa, Pisum sativum
MVRKRRTEGPGGESSDGQHPAERSVPPQQQAAVSGGAGPQGGGGPQGGRGWAPQGGRGGYGGGRGGRGMPQQQYGGAPPEYQGRGRGGHHQPQQQYGAPSDYQGRGRGGPTRDQQQYGGPPEYQGRGRGGPSQQGGRGYGGGRGGYGGGVGPGGGHDTVPSYGGPPRPPAPELHQATSVPSVPYPVAVSPPPAPSEASSSSHPPEVSEVEQDLGQMTIHSEETPAPPPASKSSLRFPLRPGKGSYGKKCVVKANHFFAELPKKDLHQYDVTITPEVTSRGVNRAVMEQLVRLYRDSHLGKRLPAYMAAKAFISGPSFYYEGFRSPVDEMMVRGQRGPGSLSVINLLPGLPFPPGTLFGGRQTDAPQEALQVLDIVLRELPTTRYCPVGRSFYSPDLGRRQPLGEGLESWRGFYQSIRPTQMGLSLNIDMSSTAFIEPLPVIDFVTQLLNRDVSSRPLSDADRVKIKKALRGIKVEVTHRGNMRRKYRISGLTSQATRELTFPVDERGTMKSVVEYFFETYGFVIQHTQWPCLQVGNTQRPNYLPMEVCKIVEGQRYSKRLNERQITALLKVTCQRPLDRERDIMQTVHHNAYHEDPYAKEFGIKISEKLAQVEARILPAPWLKYHDTGREKDCLPQVGQWNMMNKKMVNGGTVNNWFCVNFSRNVQDSVARGFCDELAHMCYVSGMAFNPEPVVPPVSARPDQVEKVLKTRHHDAKTKLQGKDLDLLIVILPDNNGSLYGDLKRICETDLGVVSQCCLTKHVFKMSKQYLANVSLKINVKVGGRNTVLVDALSRRIPLVSDRPTIIFGADVTHPHPGEDSSPSIAAVVASQDWPEITKYAGLVCAQAHRQELIQDLFKQWQDPVRGTLTGGMIKELLISFRRATGQKPQRIIFYRDGVSEGQFYQVLLFELDAIRKACASLEPNYQPPVTFVVVQKRHHTRLFASNHHDKSSVDRSGNILPGTVVDSKICHPTEFDFYLCSHAGIQGTSRPAHYHVLWDENNFTADALQSLTNNLCYTYARCTRSVSIVPPAYYAHLAAFRARFYMEPETSDSGSMTSGAVPRGGMAAAAGRSSRAPGANAAVRPLPALKENVKRVMFYC

SEQ ID NO: 11666 - DNA, 3030 bp, Oryza sativa subsp. indica
  CDS (1)..(3030)
atgtcttcgcgcggcggcggcggcggaggccgccgcggtgggcgaggcggcggtggtgggcgggaaggaggcggaggtggaggtggcgggaggggtggccagggtaggggcgatctcggcgtcgtcggcgagcggcaaggcggtggtcgaggggcgggtgagcgcggaggccgtcacgacgcgccgcgcggccgtggtggcgtcgctgtgggcgccggggctgggcggcagcagcagcagccattccacgcccaggccccgccatctggcggcggcggacgaggcggcgtgcaggtgcagcccgatgcggcggcgcgtcgacccgtaggcggcgggcgcggcggcgtcggagtgccggcgcctgcgccggcggttgcggtgggggctctgtgcggcgagatgaaggggaagatggttgtgtcgggtggagcgccgccagcaggccagggttcgtcgttggcggcggcgcagggcacggacaatgtcaagagagagccatctcaggtcgccgcaccggcgcccgcgcccccgcccgcgacgctgccgccgtcgtcgagcaaggcggtgaccttcccggcgcgtccggacgtcggcacgatcgggaggcggtgccgcgtccgcgccaaccatttcctggtgcaagtcgcggacaaggacatctaccactacgacgtggtgatcactccagaatcaacttctcgtgagagaaatagatcaataatcaacaaacttgttgcgttgcacaaacaattcttggatggtaggttacctgtctatgatggaagaaagagcatatatactgcaggtccactacctttcaaaaccaaagactttgttgtcaagcacattaatcctttgaggggtaaccaacgggaggaggaatacaaggtgaccataaagcaagcctccaaaacagatctgtacagccttaagcagtttttggttggaaggcagagggagttgccacaggacactattcaagctcttgacattgctcttagggaatgccctacctcaaagtatgtatctatctcaaggtcatttttctcccaatcatttgggcatggtggcgagattggtagtggtacagagtgttggagggggtattaccaaagtctgcgccccacgcagatgggactgtcgctaaatatcgatatttctgcaacagcattttacaaggcccagccagtgatggactttgcagttcagtatttgaacatccgagatgtttcaaggcgcttgtctgatcaagatcgtattaaactgaaaaaggccctaaaaggagtccaaattgtggcaactcactggaaagagaaatccatacgttacaagatcactggaataccctcagctccaatgaatgaattgatgtttgatctagatggaaacaggatatcagtcgtccaatactttaagaagcagtacaattactccttaaaacatgttaattggccatgccttcaagctggcagtgatagcagaccaaaatatttgcctatggaggtctgcagtatacttgaaggacaacggtattcgaagaagctaaatgagcatcaagttacaaacattctaaggatgacatgtgaacgacccgcacaaagggagagcagtatcatagagataaaaacattttacttgtattctcagattgttaatacgaactcttatggcaatgatgattgtgcaaaagaatttggcatcaaagtcgctaaccaacttgccgtggttgatgcccgtgtactgcctacccctaggcttaaatatcatgactctggaagagaaaaagtatgtaatccttccgttggacaatggaacatgattaacaagcaaatgaatacgagaccatgtgtggatatcatacaaggacagcaacgcaacatcgagggtgcaatcagaaatatccataggcaatcttcagaaaagcttgaccagcaaggcctgacagggcagcaacttcagttattaattgtaatattgcctgaaattagtggttcttatggaaggataaaacgaatttgtgaaacagaggttggtgtgataactcaatgctgtgcacccaagagtcttcagaaaggtgggaaacagtatcttgaaaatctggccctaaaaatgaatgttaaggtcggggggcgaaatacagtacttgaagatgcgttgcacaagaaaataccaattctgacagatcgtcctacgatagtgtttggagcggatgttacacatccatctcctggggaggatgcttctccatccattgcagcggttgttgcatccatggattggccagaagttacaaagtacaaatgcttggtatctacacaaagtcatagggaagaaatcatatctaatctttacacagaagtgaaagatccattgaagggaattattagaggtggaatgattagggagttgctcaggtctttctaccaagaaactggacagaaacctagccggattatattttatcgagatggtgtcagcgagggacagtttagccaagtgttgctttatgaaatggatgcaattcgcaaggcatgtgctagtttgcaggagggctaccttcctccagttacatttattgttgtccagaaaaggcatcacacccgcctatttccagaaaatcgtcgagatatgatggatagaagcggaaatatccttcctggaactgttgttgacacaatgatctgccatccgagtgagtttgacttttacctctgtagccattctggtatcaaggggacgagccgtccaacacattatcatgttcttttagatgaaaatgggttcaaggctgatacgctgcaaaccttaacctacaatctttgctacacctatgcccgatgcacccgagcagtctccatagttcctccagcatactatgcgcatctgggagccttccgagcacgctactacatggaggacgagcattctgatcagggctcttcttcctccgtaacgacgcgaacggatcgatcgacgaagccgcttcctgaaatcaaggagaatgttaagcggttcatgttctactgctga

SEQ ID NO: 11667 - protein, 1009 aa, Oryza sativa subsp. indica
MSSRGGGGGGRRGGRGGGGGREGGGGGGGGRGGQGRGDLGVVGERQGGGRGAGERGGRHDAPRGRGGVAVGAGAGRQQQQPFHAQAPPSGGGGRGGVQVQPDAAARRPVGGGRGGVGVPAPAPAVAVGALCGEMKGKMVVSGGAPPAGQGSSLAAAQGTDNVKREPSQVAAPAPAPPPATLPPSSSKAVTFPARPDVGTIGRRCRVRANHFLVQVADKDIYHYDVVITPESTSRERNRSIINKLVALHKQFLDGRLPVYDGRKSIYTAGPLPFKTKDFVVKHINPLRGNQREEEYKVTIKQASKTDLYSLKQFLVGRQRELPQDTIQALDIALRECPTSKYVSISRSFFSQSFGHGGEIGSGTECWRGYYQSLRPTQMGLSLNIDISATAFYKAQPVMDFAVQYLNIRDVSRRLSDQDRIKLKKALKGVQIVATHWKEKSIRYKITGIPSAPMNELMFDLDGNRISVVQYFKKQYNYSLKHVNWPCLQAGSDSRPKYLPMEVCSILEGQRYSKKLNEHQVTNILRMTCERPAQRESSIIEIKTFYLYSQIVNTNSYGNDDCAKEFGIKVANQLAVVDARVLPTPRLKYHDSGREKVCNPSVGQWNMINKQMNTRPCVDIIQGQQRNIEGAIRNIHRQSSEKLDQQGLTGQQLQLLIVILPEISGSYGRIKRICETEVGVITQCCAPKSLQKGGKQYLENLALKMNVKVGGRNTVLEDALHKKIPILTDRPTIVFGADVTHPSPGEDASPSIAAVVASMDWPEVTKYKCLVSTQSHREEIISNLYTEVKDPLKGIIRGGMIRELLRSFYQETGQKPSRIIFYRDGVSEGQFSQVLLYEMDAIRKACASLQEGYLPPVTFIVVQKRHHTRLFPENRRDMMDRSGNILPGTVVDTMICHPSEFDFYLCSHSGIKGTSRPTHYHVLLDENGFKADTLQTLTYNLCYTYARCTRAVSIVPPAYYAHLGAFRARYYMEDEHSDQGSSSSVTTRTDRSTKPLPEIKENVKRFMFYC

SEQ ID NO: 11668 - DNA, 3180 bp, Vitis vinifera
  CDS (1)..(3180)
  misc_feature (2046)..(2046): r is g or a
  misc_feature (3132)..(3132): r is g or a
atggaagatcgctggagaggcggcggcggctatagaggaagagatggcggtctccataggggaagaagcggcggtgatcacccgcgccatcgccacggaggaggctttagaggaggtcgaaggcctgggtacagcagagggtacgaggaagacgcaccgccgccaccagtgcaccggtggagagggcctcccgaaatgggtcacgaccgagactactaccactatggcggaagcagtgataggtatggtggcaatggtggcggggggtggcggagctctggcctcagccctagaaattctccggcgtggcgccctcttcctccgtcgccgccgcggcgcccgcttcctccgccgtcgcccccccggcgccctcttcctccgctctcgcccccgcggcgccatcctcctccgctctcgcccccgcggcgccatcttcctccgtcgtcgcccccccggcgcccacttcctccgccgtcgccgcctcggcgcccgttgccttccatgcccgcttttgtcgagtcccggaggtctcctgatactgttccagaaatggagccatcaaaacttttaggtagcttgacaccaacatcctccttggaacgcatggacagagttctccctataaggcgacctgacaaaggtggcacaaatgcaatccaatctaccatggttcgtgtcaatcatttccctgtgaaattcaactctgagaaaatcattctgcactatgatgttgatattaaaccagaggtgctacccaagcatggtcgtaccttgaagttatcaaagtctaatcgctgcatgataaaagagaagttgttctctgatgatccctcacgatttcccttgtcaagaacggcttttgatggtgagaagaatatttttagtgttgttgagctgcccactggaaaatttaaggtggagttctctgagagcgaagacatgaagatctgttcgtatatattcaccataaagcttgtgaatcaactagagcttcgcaagttgaaggattatttaagtgggaaacttttttccatacctcgtgagatattgcaagggatggatgtggtgatgaaggagaatcctgcaaggcatatgatctctgttggacggagcttttacccaactctgttctctctagatgatgatcttggacatggcattgtagcttctagaggatttttacatagcctcaagcccacggcccagggtttaaccttatgtttggactactcagtcttagcatttcgaaagccaattccggttatagatttccttgaggagcatgttaatggatttaagttgaatgatttaagaagagtaaggaaagaagttgaggttgctctaaaaggattaaaagttagagtcattcatcgtctttgcaaacaaaaatacactatctcaggattaagtggtgaggacacaaggtatctttcatttatcgctgaagacctagagggcaaatctccagcaaagaaagttgggattattgattatttcagggaaaaatatgggaaggatattaagtacaaggatattccgtgcttagatttggggaaaaacaataggaagaactatgtacccatggagttctgcatcttgactgagggacagaggtttctcaaagagaacttggatagaaatggggctcagaagttgaaaaatttgtcactggttgcccctaaagtcagagagaacaacatatgtgaaatggtgcgatcaaagactggaccatgtggtggagatatgatcaataactttgggattgaagtcaacatgaggatgactacagttgcaggacgtgtgattatggcacctgaattaaagctaggaggggctcataatggaaggatgagcaagattactgtggacaggaacaggtgtcactggaattttgtaggaaaatctgtggtggagggcaaacacattgatcggtgggctgtacttgatttcagtgcatatgaaggattcaacagactgaatcctgaccactttattcccaaatttatcaggcgctgtgcaagtcttggaattagaatggatgagccrcttttgtatcagtcgtctcgaatgaatgccttctccaatgttgccatgcttcgtgaactgctcttaggagtagctggcagagctcatgatagtacaaaaaaccagttgcaaattcttgtatgtgtgatggctaggaaggatcctggctacaactatctcaagtggttctgtgaaaccaacattgggatagttactcaatgttgtttgtccagccctgcaaataaagcaaatgaccagtatcttgcaaacttggctctcaagatgaatgccaagcttggaggcagcaacgtggagctcattgaccggcttcctcattttgagaatgaaggttatgtaatgtttgtaggtgctgatgtcaatcatcctggtgcttggaactcagctagcccttccatagctgctgttgttgccactgtaaattggcctgctgtaaatcgttatgctgctcgtgtacgcccccagctccatcgaactgagaagattctaaattttggggacatgtgcctggagcttattgagacctatgctcgggtgaatagagccaagccggataagattgtggtgtttagggatggggtgagcgagggccaatttgacatggtgcttaatgaagaattagtagatctgaagggggctatccagaggggaaattacaacccaacaatcacacttattataacccagaagagacatcagactcgactgtttccagaaagcaagagggaaaggggtcaggacaggagcttcaatgagaatgtgtctccaggcacggttgtagacacaactgtggttcaccccttcgagtttgatttttatctttgtagccattatggtggtattgggacgagcaagccaacacactaccatgtcctctatgacgagcacaggttctcttctgaccaactccagaagcttatctacaacttgtgtttcacctttgtgcggtgtaccaaacctgtctcccttgttcctcctgtatactatgccgaccttgctgcatacagaggacggctctaccatgacgccctggagttggagcgcccagcttcagcttctgcagcctctgcagcttcatttgatgagagrttttaccgcttgcacggggatctggaaaatacgatgttttttgtttga

SEQ ID NO: 11669 - protein, 1059 aa, Vitis vinifera
MEDRWRGGGGYRGRDGGLHRGRSGGDHPRHRHGGGFRGGRRPGYSRGYEEDAPPPPVHRWRGPPEMGHDRDYYHYGGSSDRYGGNGGGGWRSSGLSPRNSPAWRPLPPSPPRRPLPPPSPPRRPLPPLSPPRRHPPPLSPPRRHLPPSSPPRRPLPPPSPPRRPLPSMPAFVESRRSPDTVPEMEPSKLLGSLTPTSSLERMDRVLPIRRPDKGGTNAIQSTMVRVNHFPVKFNSEKIILHYDVDIKPEVLPKHGRTLKLSKSNRCMIKEKLFSDDPSRFPLSRTAFDGEKNIFSVVELPTGKFKVEFSESEDMKICSYIFTIKLVNQLELRKLKDYLSGKLFSIPREILQGMDVVMKENPARHMISVGRSFYPTLFSLDDDLGHGIVASRGFLHSLKPTAQGLTLCLDYSVLAFRKPIPVIDFLEEHVNGFKLNDLRRVRKEVEVALKGLKVRVIHRLCKQKYTISGLSGEDTRYLSFIAEDLEGKSPAKKVGIIDYFREKYGKDIKYKDIPCLDLGKNNRKNYVPMEFCILTEGQRFLKENLDRNGAQKLKNLSLVAPKVRENNICEMVRSKTGPCGGDMINNFGIEVNMRMTTVAGRVIMAPELKLGGAHNGRMSKITVDRNRCHWNFVGKSVVEGKHIDRWAVLDFSAYEGFNRLNPDHFIPKFIRRCASLGIRMDEPLLYQSSRMNAFSNVAMLRELLLGVAGRAHDSTKNQLQILVCVMARKDPGYNYLKWFCETNIGIVTQCCLSSPANKANDQYLANLALKMNAKLGGSNVELIDRLPHFENEGYVMFVGADVNHPGAWNSASPSIAAVVATVNWPAVNRYAARVRPQLHRTEKILNFGDMCLELIETYARVNRAKPDKIVVFRDGVSEGQFDMVLNEELVDLKGAIQRGNYNPTITLIITQKRHQTRLFPESKRERGQDRSFNENVSPGTVVDTTVVHPFEFDFYLCSHYGGIGTSKPTHYHVLYDEHRFSSDQLQKLIYNLCFTFVRCTKPVSLVPPVYYADLAAYRGRLYHDALELERPASASAASAASFDERFYRLHGDLENTMFFV

SEQ ID NO: 11670 - DNA, 2820 bp, Penaeus monodon
  CDS (1)..(2820)
atgtaccctgttgggcagccacctggtcctcctggcccacccggtccctcgggtccgggtggacccccaggaccagctggccccccagtgccccgacccttgaccttgccgccgggacccacgccggtccctggcccaatcactaccattgtaccgcaggcccctggtacgccggctgtggcaacggggacaggcatgactgccctcttaccgccagaactacctacttttgtagcaccaagaagaccgaatctcgggcgagaaggtcgacctatcacgttgcgggacagtcacttccaaatctctttgcacaaaggttactgtcttcactataattttagtattacccctgacagacgtccacgcaaggataatcttaaaattattaaatccacggttcatggtttccgtaaaattgtaggtagtcgtaaccctgtcttcgaagggacaagccatttatgctccagaaatccacagctgattggcactgataaatcgaaactcgttgtaacattccctggagaaagacatgacaagctgttcatagtatccattacatgcttaacacgtctatatctatctactgtcgaccatgaattgcacggacggacgagagtcattccttatgatgcaatacaggcactagatgtcgttatgcgtcacctgccatccatggcgtacacaccagtgggcaggtcctttttctccgctccagatggctattatcaccccttgggaggtggaagggaagtgtggtttggcttccatcaaagtgtaagaccttcacagtggaagatgatgcttaacattgacgtgtcagctacagcattctacaaggcccaggcagtaatagagtttatgtgtgaagtgttagatattcgagaaataggtgagcagaggaaacctctaacggattcgcagcgtgtcaagttcacaaaagaaattaagggtctgaagattgagatcacacactgtggtgcgatgcgaagaaagtacagggtgtgtaatgtcacaagaaggccagcacagatgcagtcgttcccattgcagctagagaatggtcagactgtggaatgtactgttgcaaaatatttccttgacaaatacaaaatgaaactcaggttcccccatctaccttgccttcaggtgggacaagaacacaaacacacataccttcctctggaagtatgcaacattgtacctggacaacgatgcatcaagaaactaacagacatgcagacatctaccatgatcaaggcgacagctagatctgcacctgatagggagagagagatcaacaatctggtccgaaaggcggactttaacaatgacccgtacatgcaagaatttggtctgacgatcagtacagctatgatggaggtccgaggtcgcgtactcccacccccaaagctccaatatggagggcgaacaaagcagcaagctctgcccaaccagggggtgtgggacatgagggggaaacagttcttcacaggggtggaaatccgcgtgtgggccgttgcgtgcttcgccccacagcgcacagtgagagaagatgcgctgcgcaattttacacagcaactacaaaagattagtaatgatgctggcatgcccatcattggccagccgtgcttctgcaagtatgccaacggtcctgaccaggtagagcccatgttccgttacctgaagagcacattcaccggtctgcagcttgtatgtgttgttctaccaggcaaaactcctgtctatgctgaagtgaagcgtgtgggtgacactgtcttaggaatggctacccaatgtgtccaggccaagaatgtgaacaaaacctcacctcaaacactgtccaacctctgtctcaaaataaatgtgaagttgggaggcatcaactccattcttgttccaggcatcagaccaaaagtgttcaatgagcctgtgatcttcctgggtgctgatgtaactcatccaccagcgggtgataataagaagccgtccattgcagccgtagtaggatctatggatgctcatccatcacgctatgctgcaactgtccgggtccagcagcacagacagaatggatcaacaacacaaggccaaagtgccagtgacggctcgcgacccagacaactgactttcgcgaggacggcacatgacgaagtgatccaggagctctcttctatggtgaaggagctgctcatccagttctacaagtctacgcggttcaagcccaacaggatcatcctttatcgggatggtgtgagcgagggacaattccaaaccgtgctccagcatgagctgactgccatgagagaggcttgcataaagttggaagcggactacaagcctggcatcacgtacattgctgtgcagaagagacatcatacaagattgttctgttctgacaagaaagaacagagtggcaagagtggtaatattcctgctggtacaactgttgatgtgggcatcacgcatccaactgagtttgactcctacctctgctctcatcagggtatccagggcacaagtcgtcccagtcactaccacgtactgtgggatgataaccactttgacagtgatgagctgcagtgcctgacttaccagttgtgtcatacctatgtaagatgtacacgatcagtctccatacctgctccagcctattatgctcacttggtagccttcagggctcgttatcatctcgtcgaaaaggagcatgacagtggagaggggtcacaccaatctggcaacagtgaggatcgcacaccatctgccatggcaagggcagttacagtgcatgtcgacacaaacagagtcatgtactttgcttaa

SEQ ID NO: 11671 - protein, 939 aa, Penaeus monodon
MYPVGQPPGPPGPPGPSGPGGPPGPAGPPVPRPLTLPPGPTPVPGPITTIVPQAPGTPAVATGTGMTALLPPELPTFVAPRRPNLGREGRPITLRDSHFQISLHKGYCLHYNFSITPDRRPRKDNLKIIKSTVHGFRKIVGSRNPVFEGTSHLCSRNPQLIGTDKSKLVVTFPGERHDKLFIVSITCLTRLYLSTVDHELHGRTRVIPYDAIQALDVVMRHLPSMAYTPVGRSFFSAPDGYYHPLGGGREVWFGFHQSVRPSQWKMMLNIDVSATAFYKAQAVIEFMCEVLDIREIGEQRKPLTDSQRVKFTKEIKGLKIEITHCGAMRRKYRVCNVTRRPAQMQSFPLQLENGQTVECTVAKYFLDKYKMKLRFPHLPCLQVGQEHKHTYLPLEVCNIVPGQRCIKKLTDMQTSTMIKATARSAPDREREINNLVRKADFNNDPYMQEFGLTISTAMMEVRGRVLPPPKLQYGGRTKQQALPNQGVWDMRGKQFFTGVEIRVWAVACFAPQRTVREDALRNFTQQLQKISNDAGMPIIGQPCFCKYANGPDQVEPMFRYLKSTFTGLQLVCVVLPGKTPVYAEVKRVGDTVLGMATQCVQAKNVNKTSPQTLSNLCLKINVKLGGINSILVPGIRPKVFNEPVIFLGADVTHPPAGDNKKPSIAAVVGSMDAHPSRYAATVRVQQHRQNGSTTQGQSASDGSRPRQLTFARTAHDEVIQELSSMVKELLIQFYKSTRFKPNRIILYRDGVSEGQFQTVLQHELTAMREACIKLEADYKPGITYIAVQKRHHTRLFCSDKKEQSGKSGNIPAGTTVDVGITHPTEFDSYLCSHQGIQGTSRPSHYHVLWDDNHFDSDELQCLTYQLCHTYVRCTRSVSIPAPAYYAHLVAFRARYHLVEKEHDSGEGSHQSGNSEDRTPSAMARAVTVHVDTNRVMYFA

SEQ ID NO: 11672 - DNA, 3114 bp, Caenorhabditis briggsae
  CDS (1)..(3114)
atggcggccgaactgaacaacaccaacaccgatggtccctccggcaccgccgccgccgctaaggcaccgaccgtcggctcaaacgactcaatgtccggcgggccgcaatatttgccaggggtaatgagtactacactccgaccaacgtcaccatccaatggatcctcgtcgtcgtcgttcctcggaacgtcgccaacgagcacctcgcaagtagtaccaacatctggagcatcaacgcagccgcttaacccgtcggcagcggctgcgtcatccgcgctccagaacgatttagaggaaatattcaactctcctcctactgcgcaaactgcgtcaacatttggaggcgacagtcctcctcaacgtcaagccggaagcttggctcctggaccacctctcggctcatccggagtctccatcggagaaccatcaagcacgattgccggagccatgcaagctggaggagctggtgctgttggcggaaaccaaagtggagttcaattccaatgtccacggagaccaaaccatggaatcgaaggaagatccattcttcttcgggccaatcactttgctgtgagaatcccaggaggaaccatccaacactaccaagttgatgtctctccggataagtgtccaagaagagtgaaccgtgagattatcagctgcttgatcagctcgttctccaagtatttcaccaatatccgtcctgtctacgatggaaaacggaacatgtacacccgagagccacttccaattggaagagagcgaatggactttgatgtcactcttccaggagattctgctgtcgaacgtcaattctctgtttctttgaaatgggttggtcaggtttccctgtcaactttggaagatgctatggaaggacgagttcgtcaagttccattcgaggctgttcaagctatggatgtgatccttcgtcacttgccaagcttgaagtacaccccagttggccgctccttcttttctcccccagtcatcagtgcttccggagttccaggaactgctccaccaccacaagcagccccatccatctcatccggatcccattccgctggacaatatcatgctgagagcaaactaggaggaggtcgcgaagtctggttcggattccatcaatctgtccgtccatctcaatggaagatgatgctcaacatcgatgtgtctgcaactgccttctaccgctctatgccagtcatcgagttcatcgctgaagttttagagcttccagtccaagctcttgctgagagacgtgctctttctgatgctcaacgtgtcaagttcaccaaggagattcgtggtctgaagatcgagatcactcactgtggacaaatgcgcagaaagtaccgtgtctgcaatgtgactcgacgtccagctcagactcaaaccttcccgcttcaactcgaaaccggacaaaccatcgagtgcactgtggccaagtatttctacgacaaataccgtcttcaattgaaataccctcacttgccatgtcttcaagtcggacaggagcaaaaacacacctacttgccaccagaggtctgcaacattgttccaggacaacgttgcatcaagaagctcaccgatgtgcagacttccaccatgatcaaggctacagcaagatctgccccagagcgtgagcgtgagatttccaacttggtccgcaaggccgagttctccgccgatccatttgctcatgagtttggaatcaccatcaatccagccatgactgaagtcaagggacgtgttctctcggcaccaaagcttttgtacggaggacgcactcgtgcgaccgctcttcctaaccaaggagtctgggacatgcgtggaaaacaattccacactggaatcgacgttcgtgtctgggcaatcgcctgcttcgctcaacaacaacatgtcaaggagaatgacttgcgcatgttcaccaaccaacttcaacgcatctctaacgatgctggtatgccaatcatcggcaatccatgcttctgcaagtatgccgtcggagttgagcaggtcgagccaatgttcaagtacttgaagcagaactactctggaatccaattggttgttgttgtcctcccaggaaagactccagtttatgctgaggttaaacgtgttggagataccgtattgggaattgcaacccagtgcgtgcaagccaagaacgccatccgtaccacaccacagaccttgtccaacttgtgcttgaagatgaacgtcaagcttggtggagttaacagcattctccttccaaacgtgcgtccacgtatcttcaacgaaccggttatcttcttcggttgcgacatcactcatccaccagctggagactctagaaaaccatctatcgccgctgtcgtaggatccatggatgcccatccaagtagatacgcagcaactgttcgtgtccaacaacatcgccaggagatcatttcggatttgacctacatggtccgcgaacttctcgtccaattctaccgcaacactcgcttcaagccagctcgtatcgttgtctaccgtgatggagtttcggaaggacagttcttcaacgttctccaatacgaacttcgtgccatccgcgaggcttgcatgatgctcgagagaggataccaaccaggaatcaccttcatcgctgtccaaaagagacatcacactcgtctcttcgccgttgagaagaaggatcaggtcggaaaagcctacaacatcccgccaggaaccaccgtcgatgttggtatcactcacccaaccgagtttgatttctacctctgctctcatgctggtatccaaggaacttcccgcccatctcactaccatgttctctgggatgacaataacctgactgccgacgaacttcaacaactgacctaccaaatgtgccacacctatgtcagatgcaccagatctgtgtcaatcccggcgccagcctactacgctcatttggtcgctttccgtgcccgttaccatcttgtcgaccgtgagcatgactctggggagggatcccaaccatctggaacctcagaagatacgaccttatccaacatggcccgtgctgttcaagtaagattattagtacatccggacgccaacaatgtcatgtatttcgcttaa

SEQ ID NO: 11673 - protein, 1037 aa, Caenorhabditis briggsae
MAAELNNTNTDGPSGTAAAAKAPTVGSNDSMSGGPQYLPGVMSTTLRPTSPSNGSSSSSFLGTSPTSTSQVVPTSGASTQPLNPSAAAASSALQNDLEEIFNSPPTAQTASTFGGDSPPQRQAGSLAPGPPLGSSGVSIGEPSSTIAGAMQAGGAGAVGGNQSGVQFQCPRRPNHGIEGRSILLRANHFAVRIPGGTIQHYQVDVSPDKCPRRVNREIISCLISSFSKYFTNIRPVYDGKRNMYTREPLPIGRERMDFDVTLPGDSAVERQFSVSLKWVGQVSLSTLEDAMEGRVRQVPFEAVQAMDVILRHLPSLKYTPVGRSFFSPPVISASGVPGTAPPPQAAPSISSGSHSAGQYHAESKLGGGREVWFGFHQSVRPSQWKMMLNIDVSATAFYRSMPVIEFIAEVLELPVQALAERRALSDAQRVKFTKEIRGLKIEITHCGQMRRKYRVCNVTRRPAQTQTFPLQLETGQTIECTVAKYFYDKYRLQLKYPHLPCLQVGQEQKHTYLPPEVCNIVPGQRCIKKLTDVQTSTMIKATARSAPEREREISNLVRKAEFSADPFAHEFGITINPAMTEVKGRVLSAPKLLYGGRTRATALPNQGVWDMRGKQFHTGIDVRVWAIACFAQQQHVKENDLRMFTNQLQRISNDAGMPIIGNPCFCKYAVGVEQVEPMFKYLKQNYSGIQLVVVVLPGKTPVYAEVKRVGDTVLGIATQCVQAKNAIRTTPQTLSNLCLKMNVKLGGVNSILLPNVRPRIFNEPVIFFGCDITHPPAGDSRKPSIAAVVGSMDAHPSRYAATVRVQQHRQEIISDLTYMVRELLVQFYRNTRFKPARIVVYRDGVSEGQFFNVLQYELRAIREACMMLERGYQPGITFIAVQKRHHTRLFAVEKKDQVGKAYNIPPGTTVDVGITHPTEFDFYLCSHAGIQGTSRPSHYHVLWDDNNLTADELQQLTYQMCHTYVRCTRSVSIPAPAYYAHLVAFRARYHLVDREHDSGEGSQPSGTSEDTTLSNMARAVQVRLLVHPDANNVMYFA

SEQ ID NO: 11674 - DNA, 2949 bp, Brassica napus
  CDS (1)..(2949)
atgccgattaggcaaatgaaagatagctccgagactcacttactcatcaaacccaagcatctccccaaagccgtgcaaaacggtaaatcccctcctactccggcgacgacgacggcggcagctcagagccaagcttcttcaccttctccgccgtccaagaaccgtagccggaggagaaaccgcggtggtcgaaaatcagaccaaggagatgtctgtatgagacctagctcccgtcctcgtaaaccgccgcctcagaacgctcccgtcgccgccgtctcgggcacagagatagtcgccgtgaaccatcagatgcaaatgggtgttcgtgggtcgagtaaaaactccaactttgcgccgagacctgggttcggacagcttagaactaaatgcatcgtcaaagctaaccatttcctcgctgacttaccgaccaaagatctgaatcactacgatgtaacaataactcctgaagtgtcatcaaaaagtgtcaacagagctatcattgctgagttagtgagactatacaaagagtctgatctcgggtcgagacttcctgcttacgacggccggaaaagtctttacaccgccggagagcttcctttcacttggaaagagttcactgttaagatcttcgatgaagacgatggtatcatcaatggccctaggagggagagatcgtataaggtggctatcaagtttgctgcacgggccagtatgcatcacttaggcgagttcctagctggtaaacgcgcggatggaccgcaagaggcgttgcagattctcgacattgtactcagggagctgtcagttaagaggttctgtcctgtcggaagatcgttcttctcgcctgatattagaccaccgcagcgacttggtgaagggttacagtcatggtgtgggttttaccagagtattcgacctacacaaatgggtttatctcttaacatcgacatggcttcagctgcttttaccgagcctcttcctgtgatagagtttgtaccacagcttctccgggaagatgtcttgccaaagccattgtctgactctgatcgtattaagatcaagaagggtctcaggggagtgaaagtagaggtcactcatagagcaaacgtgagaaggaaataccgtgttgccggtttaacagctcaaccaacaagggagcttatgtttcctgttgatgagaacgctacgatgaagtcggttattgagtatttccaagagatgtatgggttcacgatccagcacacgcatttgccgtgtcttcaagttggaaaccagaagaaggcgagctatttgccaatggaggcatgcaaaatagtggagggacaacggtacacaaaaaggttgaacgagaagcagattactgctcttttaaaagttacatgccagaggccaagggacagagaaaacgacattttaaagacggtgcaacacaacgcgtatgatcaagatccatatgctaaggagtttggtatgaatataagcgaaaagctagcttctgttgaagctaggatccttccagctccatggcttaagtatcatgagaatgggaaagaaaaggattgccttccgcaagtgggtcaatggaatatgatgaataagaagatgatcaatgggatgacggtgagcagatgggcctgtgttaacttctcacgcagtgttcaagaaaatgttgctcgtgggttttgtaatgagcttggtcagatgtgtgaagtctctggcatggagtttaatccggagcctgtgataccaatatacagcgcgaggcctgatcaagttgagaaagctctaaagcatgtttatcacactgctatggacaaaaccaaaggcaaagagttagagcttctcttggccattttacctgataacaacggttcactctacggggatcttaagagaatctgtgaaaccgagcttggtttgatatctcagtgttgtctcacaaaacatgtgttcaagattagcaaacagtatctggctaatgtatcccttaaaatcaatgttaagatgggaggaaggaacacagttctgttagatgccataagctgtaggattccactggttagcgacataccgacaattatatttggcgcagacgtgactcacccagagaacggggaagagtcaagcccttcaatcggtgctgttgttgcttcgcaagactggcctgaagtgacaaagtatgctggtttggtttgtgcacaagctcacaggcaagaacttatacaagatttgtataaaacatggcaggatcctgtacgtggcactgttagtggcggcatgatcagggaccttctgatctcattcaggaaagcaacagggcagaaaccgcttcgaatcatcttttaccgtgatggagtaagtgaaggacaattctaccaagttttactctacgagttggatgcaattcgtaaggcatgtgcgtcgcttgaaccgaattatcagccacctgtgacattcatcgtggtacagaagaggcaccacacccgtttgtttgctaataatcaccgagacaaaagcagtactgaccgaagcggaaacatcttacctggtacggtagttgacactaagatatgtcatccaactgaattcgacttctacctttgtagccacgctggtatacagggaacaagcaggcctgctcattaccatgttctttgggatgagaacaatttcacagcggatggtattcaatctctgactaataatctctgttatacctatgctcgatgcactcgatcggtctctgtagttcctccggcgtattatgcacatcttgcagcattccgagcacgtttctacatggaaccggagatcatgcaagataacggatcgccgggtaaaaagaatacgaagacaacaactgtaggagatcatggtgttgttggtggcggtgtgaagccgttacctgctttgaaggagaatgtgaagagagtcatgttttactgctaa

SEQ ID NO: 11675 - protein, 982 aa, Brassica napus
MPIRQMKDSSETHLLIKPKHLPKAVQNGKSPPTPATTTAAAQSQASSPSPPSKNRSRRRNRGGRKSDQGDVCMRPSSRPRKPPPQNAPVAAVSGTEIVAVNHQMQMGVRGSSKNSNFAPRPGFGQLRTKCIVKANHFLADLPTKDLNHYDVTITPEVSSKSVNRAIIAELVRLYKESDLGSRLPAYDGRKSLYTAGELPFTWKEFTVKIFDEDDGIINGPRRERSYKVAIKFAARASMHHLGEFLAGKRADGPQEALQILDIVLRELSVKRFCPVGRSFFSPDIRPPQRLGEGLQSWCGFYQSIRPTQMGLSLNIDMASAAFTEPLPVIEFVPQLLREDVLPKPLSDSDRIKIKKGLRGVKVEVTHRANVRRKYRVAGLTAQPTRELMFPVDENATMKSVIEYFQEMYGFTIQHTHLPCLQVGNQKKASYLPMEACKIVEGQRYTKRLNEKQITALLKVTCQRPRDRENDILKTVQHNAYDQDPYAKEFGMNISEKLASVEARILPAPWLKYHENGKEKDCLPQVGQWNMMNKKMINGMTVSRWACVNFSRSVQENVARGFCNELGQMCEVSGMEFNPEPVIPIYSARPDQVEKALKHVYHTAMDKTKGKELELLLAILPDNNGSLYGDLKRICETELGLISQCCLTKHVFKISKQYLANVSLKINVKMGGRNTVLLDAISCRIPLVSDIPTIIFGADVTHPENGEESSPSIGAVVASQDWPEVTKYAGLVCAQAHRQELIQDLYKTWQDPVRGTVSGGMIRDLLISFRKATGQKPLRIIFYRDGVSEGQFYQVLLYELDAIRKACASLEPNYQPPVTFIVVQKRHHTRLFANNHRDKSSTDRSGNILPGTVVDTKICHPTEFDFYLCSHAGIQGTSRPAHYHVLWDENNFTADGIQSLTNNLCYTYARCTRSVSVVPPAYYAHLAAFRARFYMEPEIMQDNGSPGKKNTKTTTVGDHGVVGGGVKPLPALKENVKRVMFYC

SEQ ID NO: 11676 - DNA, 3324 bp, Daucus carota
  CDS (1)..(3324)
atgaggaaggcaacagggggaagagattcttatgaacaccaggaagggagtggaggccgtggtggtggcggccgtggaggagctcaccagcagcaacagggtggaggtagaggttgggctcctcagcagcagcagggtggtggtagaggttgggctcctcagcaacaacagggtggtggctaccaaggtcgtggaggtggccgtggcagccagcgtggggggatggctcctcagcaatactatggaggtgcacctgagcaaatgtatcagcagggcaggggagcaccccaacagcagcagcagcagcggtatggaggtccttctgagtacaatcagatgcaaggcaggggagcgcagcaacagccgcagtaccagcagcaacagcagcagcaccatcaacactatccacaaggaagaggaacaccaccacaacgccgaggtggtggccaaggagggtttgttccatctactggtggaccttctaggccatctggccccgacctacaccaagcggtccaggctccacatcaagcagggatgctgactcagcccatgccatatgcaacatcaactgtgactgaatcggaggcaagttcttcatcatctgttcctgagcccactcctttgcaagtgacccagcaatttcaagagctttctgtccagcaagaaggctcttcgagtgagattgttgggccaccagcttcaagcaaagcactcacttttcctcttcggcccgggaggggtactactggtaaccgttgtattgtgaaggccaatcacttttttgcagaattgccaaacaaggacctgcaccattatgatgtatccatcactccagaggtaacatctcgtggtgtcaaccgcgcagtgataaaagagctggtgaggttataccaagcatctcttctggacaaccgtcttcctgcatatgatggtaggaagagcttatacactgcagggcctctgccttttgtatcaaaagagttcaaaattactctcactgatgatgatgatggaactgggagtgcaagaaggcaaagagacttcaagattgtgattaaattagcttcacgtgctaatttgcaccacctggacatgtttttgaaggggaagcagactgattcaccccaagaagcacttcaagtactggatattgtgcttcgagaaatgcctacatctaggttctgtccggttggtcgatcattttatgatcctgctattggaagtaagtacccattgggcgatggactggagagctggcggggattctaccagagcattcgcccaactcagatgggactgtcattgaacatagatatgtcatcaactgcatttattgaaccactgcctgtaatcgatttcgtctcacaacttttgaacagggatgtttggtctcgtgctttgtccgatgcagatcgtgtaaagatcaagaaagccttacgaggcgttaaagttgaagttacgcataggggaaacatgcggcggaagtatcggataattggcttaacatcacaggcaacacgcgagctgactttccctgttgaagaaggagggtgtgtaaagtcagtagtggagtatttcagagagacctacgggttcagcattcaatatgctcaattgccttccctgcaagttgggaatccacaaagaccaaactacttgccaatggaggtttgcaagatttcggagggacaaaggtataccaagcgattgaacgagaatcaaattactgccctgttgaaggttacttgtcagcggcctatggatagggagaaggatattttaaagactgttcagtataatagttatggtcaagatccttatgcaaaggagttcggcataaaaattagtgacaggctggcttctgttgaagctagaattctgcctcctcctcggctgaaatatcacgagacaggtcgtgagcaggattgtcttccacaagttggccagtggaatatgatgaacaagaaaatggtcgggggggctgcagtcaactattggatatgtgtcaactttgcaagaaatgtgcaagagagagctgctggtgggttttgttacgagcttgcaaacatgtgcaatgtgtcgggcatgcaattcaagcctgagcctgtcctccctgcgtacaatgcccgttcagaccaagttgaaagaatgttaaaatctcggattaaggaggcgatgaccacagccaaacaggggattgatctattaattgcaattcttcctgacaacaatggctccctctatggtgatttgaagagaatttgtgaaacagatcttggtgttatttcccagtgttgcttggcaaagcacgtatttagaatgagcaagcaatatcttgcaaatgtggcgttgaaaattaatgtaaaagtaggtggaagaaatacagtccttgttgatgcactttcatggcgcattcctcttgttagtgataggcccaccataatttttggtgctgatgtaacacatccccaccccggggaagattctagtccctcaatagccgcggttgttgcctcccaagactggccggaggtcactaaatattctggtctagtttgtgcccaagcacatcggcaggagattattcaagatctttacacgacctggcaggatcctaataaagggcctgtgcatggaggaatgataaaggagctactcatgtcattccgtagagcaactgggcaaaaaccgcagcgcattattttctacagggacggtgtcagtgaagggcagttctatcaagttttgctgtacgagcttgatgcaattcgcaaggcatgtgctgctttggagccaaattatcagcctccggtaacatttgttgttgttcagaagcgtcatcacacaagattgtttgccaacaaccatcgggaccgtaatcaagttgacaggagtggaaatatattgcctgggactgtggtagactccaaaatctgccaccccacagagtttgatttctacctttgcagccacgcaggaatccaagggaccagcaggcctgcacattatcatgttctttgggatgaaaacaagttttcagcagatggtttgcagtctcttacaaacaacttgtgttacacatatgcccggtgcacgcgatctgtgtcgattgtcccacctgcatactatgctcacctcgctgcatttcgtgcacgtttctatatggagccggatacatctgatacgggttcgacggcaactggggcacctgctggaagaggaatgggtgctggacgtagcacacgtgctccagtgaatgctgctgtgaggcccctacctgcattgaaagagaatgtgaagagggtgatgttttattgttaa

SEQ ID NO: 11677 - protein, 1107 aa, Daucus carota
MRKATGGRDSYEHQEGSGGRGGGGRGGAHQQQQGGGRGWAPQQQQGGGRGWAPQQQQGGGYQGRGGGRGSQRGGMAPQQYYGGAPEQMYQQGRGAPQQQQQQRYGGPSEYNQMQGRGAQQQPQYQQQQQQHHQHYPQGRGTPPQRRGGGQGGFVPSTGGPSRPSGPDLHQAVQAPHQAGMLTQPMPYATSTVTESEASSSSSVPEPTPLQVTQQFQELSVQQEGSSSEIVGPPASSKALTFPLRPGRGTTGNRCIVKANHFFAELPNKDLHHYDVSITPEVTSRGVNRAVIKELVRLYQASLLDNRLPAYDGRKSLYTAGPLPFVSKEFKITLTDDDDGTGSARRQRDFKIVIKLASRANLHHLDMFLKGKQTDSPQEALQVLDIVLREMPTSRFCPVGRSFYDPAIGSKYPLGDGLESWRGFYQSIRPTQMGLSLNIDMSSTAFIEPLPVIDFVSQLLNRDVWSRALSDADRVKIKKALRGVKVEVTHRGNMRRKYRIIGLTSQATRELTFPVEEGGCVKSVVEYFRETYGFSIQYAQLPSLQVGNPQRPNYLPMEVCKISEGQRYTKRLNENQITALLKVTCQRPMDREKDILKTVQYNSYGQDPYAKEFGIKISDRLASVEARILPPPRLKYHETGREQDCLPQVGQWNMMNKKMVGGAAVNYWICVNFARNVQERAAGGFCYELANMCNVSGMQFKPEPVLPAYNARSDQVERMLKSRIKEAMTTAKQGIDLLIAILPDNNGSLYGDLKRICETDLGVISQCCLAKHVFRMSKQYLANVALKINVKVGGRNTVLVDALSWRIPLVSDRPTIIFGADVTHPHPGEDSSPSIAAVVASQDWPEVTKYSGLVCAQAHRQEIIQDLYTTWQDPNKGPVHGGMIKELLMSFRRATGQKPQRIIFYRDGVSEGQFYQVLLYELDAIRKACAALEPNYQPPVTFVVVQKRHHTRLFANNHRDRNQVDRSGNILPGTVVDSKICHPTEFDFYLCSHAGIQGTSRPAHYHVLWDENKFSADGLQSLTNNLCYTYARCTRSVSIVPPAYYAHLAAFRARFYMEPDTSDTGSTATGAPAGRGMGAGRSTRAPVNAAVRPLPALKENVKRVMFYC

SEQ ID NO: 11678 - DNA, 3354 bp, Oikopleura dioica
  CDS (1)..(3354)
atgttcagtcctcatgactaccttaagacttacggacgtgagaagtgggattcactactacaaaccatgtcgtttccacaagggggacccaccagtcaaggactggggtcacaaatcccacctccttcacagccagcacaactaacaccgcctaattcgcaagctccatcacacgcgccatctacgttaactagcacgccaagtccgcaacaaagtccattagcatcttcaatcgcaatggggacctcttcgctctcgctttcaagttctctccaatcacacaatagcatgagtcaacaatctcaaatgtctgctcctccaatgctgacgccatcaatgatgagcagcaactcgcagccaaataataatctcatcgcccctctctctgcaaaccagccaaaccaattcgaaatgcccccatctaacttccagccacctcagcagcctttacagcctccgcctagtatgcacaatcctttaagtccctctcaagcaccaatgcattcacagcccaacctcggcgtactaggtggctctttgcctctctcttccgagcggccaatgagtcttggctcatcaagcttgggatcagcgagcatcggtcctccagggtcaagcatcagtggaatgtcaatgggtgcaccaagctccatgggaccacatagctcaatgggaccaccgagctcaatgggaccgcaaagttctatggggacaggtccaatgaacccaggattcccctcgaacccatcgcccactatgtctgtcgagcgattccccacagcagctcagccacgtcaaggagccattgatggctttagcgcaccgcagagaccgggaatgggcagcagcggcaagcaaatcgtactcaaagcgaactacttcaaagtcaacattcccaacactgatcttcaccactacgatgttgacattagacctgacaaatgccctcgacgcgtcaacagggaaatcattgagaacatggtcgagaacttcagaaaccagatcttccaggtaccgacgcctgtatttgacggaagaagaaatatgtacaccgcacatcctcttcctattgatcgacaacgagttgagctcgatgtcactcttcccggtgaaggccgcgatcgaacgttccgagttgccatcaagtgggtagcaagagtctccctgtattcgttaaaactagcacttgacggacgtctccacggaattccatttgaaacaattcaagctcttgatgtcgttatgcgccacttgccctcgatgagatacgccccagttggaagatcgttcttttcggctcctgtgggacaaacacctccgctcggaggaggacgggaagtttggtttggattccatcaaagcatgcgaccaagccagtggaagatgatgctcaacattgatgtttctgctactgcgttttacagagcgcagtctgtaattgatttcatgtgcgaagttctggacacgccaagagacgagctccgtcaatcacgaggactaactgattcacagcgagtgaaattcacaaaagagatcaagggcctcaaagttgaaataacccattgtggtcaaatgagaagaaagtacagagtgtgcaatgtgactagacggcctgcaagccaccagacatttccactcatgctagattctggccaaacgattgaatgcaccgtcgcgcgatacttccaagagagacacaaccgggttctcgaataccccttcctgccatgccttcaagtgggacaagaacaaaagcacacatacctgcctattgaagtatgcaacattgtagctggccagcgatgcatcaagaaattgacggactcccagacttctacaatgatcaaagctaccgcgagatctgcccctgatcgagagcgtgaaatttgcgatcttgtttccaacgctggattcaacaacgatccgtatgtccgcgagttcggtatcgaagtaatcgatgtgatgacagaagttcgaggtcgtgtccttcctgctccccgacttcagtatggaggtgtcaaccgcacgcaacttcaagttcaagccattcctaaccaaggtgtgtgggatatgcgaggcaagcaattccacactggtatcgaaatcaacgtctgggccatcgcttgctttgctcatcaaagacaatgtccagaaaatagcatccgaaatttcactcgctcattgcagcgcatttcagaagatgcaggcatgccaattcgatcgggtcctgtattctgtagatatgcccaaggatcggaccaggtcgagcctatgttcaagtatctgatgcaagaattccgaaacctccagcttatcgtcgttgttctgcccggcaaaacgccggtctacgccgaggtcaaacgcgtcggagacacgtgcctcggcattgccacccagtgcgttcaagtcaagaacgtcaacaagacctcgcctcagacgctatcaaacctttgcctgaaaattaacgtcaaacttggcggaatcaacaatattctggtgccaaatatgcgccccaaaatcttccaagagccagtcattttcataggagctgatgttactcatcccccagccggagataagcgcaagccatcgattgcagcagtagttgcctcaatggatggccatccttctcgttactgtgcggcagtccgagtacaaaagcacagacaagaagtcatcgatgacctttcaaatatggtcaaggaactcatgattcagttctacaagaacacgcgatataaaccagtcagaattattatctatcgggatggtgtctctgaaggtcagtttcaaacggtccttgctcacgagttgcgggctatccgagaagcttgcgtcaagctggagccttcttatcagcccggtatcaccttcgtagtcgttcaaaaacgacatcatacgagattgttctgcaagaacaaggacgacaagattggaaagtctggcaatattccagctggtacaactgtcgatgttggaatttgccatccaactgagttcgacttctatctttgctcgcatgctggtattcagggaacatcgcgaccatctcactatcacgttctctgggatgacaacaacttcaccgccgatgagctccaagtgcttacctatcagttatgccatacatatgtgcgttgcacccgatcagtttctattcccgcgccagcatattacgctcacttggtggccttccgcgcgcgttaccacctcgtcgatagagaccaggactctggcgagggatcaatgttgtcaagcgtcaactcgctcaacgaccaaggctcgcactatcaagctatggcctcagctgtgctcgtccacaacaatacgaaaggcaccatgtacttcgcctaa

SEQ ID NO: 11679 - protein, 1117 aa, Oikopleura dioica
MFSPHDYLKTYGREKWDSLLQTMSFPQGGPTSQGLGSQIPPPSQPAQLTPPNSQAPSHAPSTLTSTPSPQQSPLASSIAMGTSSLSLSSSLQSHNSMSQQSQMSAPPMLTPSMMSSNSQPNNNLIAPLSANQPNQFEMPPSNFQPPQQPLQPPPSMHNPLSPSQAPMHSQPNLGVLGGSLPLSSERPMSLGSSSLGSASIGPPGSSISGMSMGAPSSMGPHSSMGPPSSMGPQSSMGTGPMNPGFPSNPSPTMSVERFPTAAQPRQGAIDGFSAPQRPGMGSSGKQIVLKANYFKVNIPNTDLHHYDVDIRPDKCPRRVNREIIENMVENFRNQIFQVPTPVFDGRRNMYTAHPLPIDRQRVELDVTLPGEGRDRTFRVAIKWVARVSLYSLKLALDGRLHGIPFETIQALDVVMRHLPSMRYAPVGRSFFSAPVGQTPPLGGGREVWFGFHQSMRPSQWKMMLNIDVSATAFYRAQSVIDFMCEVLDTPRDELRQSRGLTDSQRVKFTKEIKGLKVEITHCGQMRRKYRVCNVTRRPASHQTFPLMLDSGQTIECTVARYFQERHNRVLEYPFLPCLQVGQEQKHTYLPIEVCNIVAGQRCIKKLTDSQTSTMIKATARSAPDREREICDLVSNAGFNNDPYVREFGIEVIDVMTEVRGRVLPAPRLQYGGVNRTQLQVQAIPNQGVWDMRGKQFHTGIEINVWAIACFAHQRQCPENSIRNFTRSLQRISEDAGMPIRSGPVFCRYAQGSDQVEPMFKYLMQEFRNLQLIVVVLPGKTPVYAEVKRVGDTCLGIATQCVQVKNVNKTSPQTLSNLCLKINVKLGGINNILVPNMRPKIFQEPVIFIGADVTHPPAGDKRKPSIAAVVASMDGHPSRYCAAVRVQKHRQEVIDDLSNMVKELMIQFYKNTRYKPVRIIIYRDGVSEGQFQTVLAHELRAIREACVKLEPSYQPGITFVVVQKRHHTRLFCKNKDDKIGKSGNIPAGTTVDVGICHPTEFDFYLCSHAGIQGTSRPSHYHVLWDDNNFTADELQVLTYQLCHTYVRCTRSVSIPAPAYYAHLVAFRARYHLVDRDQDSGEGSMLSSVNSLNDQGSHYQAMASAVLVHNNTKGTMYFA

SEQ ID NO: 11680 - DNA, 3072 bp, Caenorhabditis elegans
  CDS (1)..(3072)
atggctgccgaactgaacaacaccaacacaaatgagtcgtctaacgtcgcctcaaacgacccaatgtccggcgggccgcaatatttgccaggagtcatgaattctaccattcaacagcaaccacagagcgcaacatcgtcgtttctgccaagtggaccgattagttcgacgtccacctcctcgcaagttgttccaacatctggagccacccagcagccgcctttcccgtcggcacaagcggctgcgtcaacagcgctccaaaatgatctagaagaaatatttaattctccgcctactcagccacaaacatttagcgatgttcctcaaagacaagccggaagcctggctccaggagttcccattggtaatacaagtgtctcaattggagaaccagcaaatacacttggaggcggtttaccaggcggagcaccgggacaattacctggcggcaaccagagtggtattcaattccaatgtcctcgacgcccaaaccacggagttgagggtcgctcaattcttcttcgcgccaaccactttgcagtgagaattcctggaggaactattcaacactaccaggtcgatgttactccagacaagtgcccaagaagagttaatcgcgagattatcagctgcttgataagcgcattctccaagtacttcactaatattcgccctgtttacgatggaaagcgcaatatgtacacccgcgagccccttccaattggaagagaacgtatggatttcgatgtcacacttcctggagactccgccgttgagcgtcaattttcggtttctttgaaatgggtcggacaagtttctctctccactctggaggatgccatggaaggaagagttcgccaggttccattcgaagccgttcaagctatggatgtcattcttcgtcatcttccaagcttgaaatacactcctgtcggacgttcattcttctcgccaccagttcctaatgcttctggagtcatggcaggatcatgccctccccaggcttctggagctgtcgcaggaggtgcccactccgctggacaatatcacgccgagagcaaactcgggggtggccgtgaagtctggtttggattccatcagtcggttcgcccatctcagtggaaaatgatgcttaacattgatgtctctgcgactgctttctatcgttccatgccagtcattgagttcatcgccgaagttttggagcttccagttcaagctcttgctgagcgtcgtgctctatctgatgctcaacgtgtcaagttcaccaaggaaattcgtggtctcaaaattgaaatcacccactgtggacaaatgcgcagaaagtatcgtgtctgcaacgtcactcgtcgtccagctcaaactcaaactttcccacttcaattggagactggtcaaactattgagtgcactgtcgccaagtatttctatgacaagtacagaattcaactcaaatacccacacttgccatgcctccaagttggacaggaacaaaagcacacctacctgccaccagaggtgtgcaacattgttccaggacaacgttgcatcaagaagcttacggatgtgcagacatcgacaatgattaaggctacagctcgttctgctccagaacgtgagcgtgagatttccaacttggtccgcaaggccgagttctcagctgatccatttgctcacgaattcggaatcaccatcaacccagcaatgactgaagtcaagggacgcgttctttctgctccaaaacttctctacggtggacgcactcgagccaccgctctcccgaatcaaggagtttgggatatgcgtggaaaacagttccacactggaatcgatgttcgtgtctgggcgatcgcttgttttgctcaacaacagcatgtcaaggagaacgatctccgcatgttcaccaaccagcttcagcggatttccaacgacgctggtatgccaatcgtcggaaatccatgcttctgcaagtacgctgttggagtcgagcaggttgagccaatgttcaagtacttgaaacaaaactactctggaattcaacttgtagtggttgttctccctggaaaaactccagtttatgctgaagttaaacgtgttggagacacagttttgggtatcgccacccagtgcgtgcaagccaagaacgcaatccgaacaactccacaaactctttctaatttatgcttgaagatgaacgtaaagcttggaggagtcaacagtattctgcttccaaacgtacgcccaagaatcttcaacgaaccagtcattttctttggatgtgacatcactcatccaccagcaggagactctcgcaaaccatccatcgcagcagttgtcggctcaatggatgctcatcctagcagatatgctgcaaccgtccgtgtccaacaacatcgtcaagagatcatctcagatttaacctacatggtccgcgagcttcttgttcaattctaccgcaacactcgcttcaagccagccagaatcgttgtctaccgtgatggagtttctgaggggcaattcttcaacgttcttcaatatgagcttcgcgcgattcgcgaggcttgcatgatgcttgaaagaggatatcaaccaggaatcactttcatcgccgtccaaaagagacatcacactcgtctctttgctgttgataagaaggatcaagtcggaaaagcatacaatattccgccaggaactactgtcgatgtaggaattacccacccaaccgagtttgacttctacttgtgctctcatgctggtattcaaggaacatctcgtccatcccattaccatgttctttgggatgacaacaatctgacagccgacgaacttcaacagctcacatatcaaatgtgccatacctacgtcagatgcacacgatccgtttcaattccagcgccagcatattatgctcatttggtagcgttccgcgctcgttatcatcttgtcgatcgcgagcatgactctggagaaggttctcagccatctggaacttccgaggataccaccttgtcgaacatggctagagctgtgcaggttcatccggatgccaacaacgtcatgtactttgcttaa

SEQ ID NO: 11681 - protein, 1023 aa, Caenorhabditis elegans
MAAELNNTNTNESSNVASNDPMSGGPQYLPGVMNSTIQQQPQSATSSFLPSGPISSTSTSSQVVPTSGATQQPPFPSAQAAASTALQNDLEEIFNSPPTQPQTFSDVPQRQAGSLAPGVPIGNTSVSIGEPANTLGGGLPGGAPGQLPGGNQSGIQFQCPRRPNHGVEGRSILLRANHFAVRIPGGTIQHYQVDVTPDKCPRRVNREIISCLISAFSKYFTNIRPVYDGKRNMYTREPLPIGRERMDFDVTLPGDSAVERQFSVSLKWVGQVSLSTLEDAMEGRVRQVPFEAVQAMDVILRHLPSLKYTPVGRSFFSPPVPNASGVMAGSCPPQASGAVAGGAHSAGQYHAESKLGGGREVWFGFHQSVRPSQWKMMLNIDVSATAFYRSMPVIEFIAEVLELPVQALAERRALSDAQRVKFTKEIRGLKIEITHCGQMRRKYRVCNVTRRPAQTQTFPLQLETGQTIECTVAKYFYDKYRIQLKYPHLPCLQVGQEQKHTYLPPEVCNIVPGQRCIKKLTDVQTSTMIKATARSAPEREREISNLVRKAEFSADPFAHEFGITINPAMTEVKGRVLSAPKLLYGGRTRATALPNQGVWDMRGKQFHTGIDVRVWAIACFAQQQHVKENDLRMFTNQLQRISNDAGMPIVGNPCFCKYAVGVEQVEPMFKYLKQNYSGIQLVVVVLPGKTPVYAEVKRVGDTVLGIATQCVQAKNAIRTTPQTLSNLCLKMNVKLGGVNSILLPNVRPRIFNEPVIFFGCDITHPPAGDSRKPSIAAVVGSMDAHPSRYAATVRVQQHRQEIISDLTYMVRELLVQFYRNTRFKPARIVVYRDGVSEGQFFNVLQYELRAIREACMMLERGYQPGITFIAVQKRHHTRLFAVDKKDQVGKAYNIPPGTTVDVGITHPTEFDFYLCSHAGIQGTSRPSHYHVLWDDNNLTADELQQLTYQMCHTYVRCTRSVSIPAPAYYAHLVAFRARYHLVDREHDSGEGSQPSGTSEDTTLSNMARAVQVHPDANNVMYFA

SEQ ID NO: 11682 - DNA, 3033 bp, Oryza sativa subsp. indica
  CDS (1)..(3033)
atggcctcacggaggccaacgcaccgccaccataccgaggctccagatcctggtggaagagggagagggagaggccgtgccgcccgatatgctcagcctcagcctcagcagcagcagcagcagcagcaaggacgaggatgccgtgctagaggtgcctcgccgccgccgccgcagcagcagcagcagcagcaacagccaaggtctactcctactcgtgctaccactgtcaccgtggcttcctcttcatctaccacggccaccgcatcatcaagccctctagctcccgagctgcgccaagcaataatggaagctccccgtcccagtgagctcgctcaaccctcacccactccgcctcaggaacaacctgtggatgccgctaccacgacgccgcaccatattccatcctcaagcaagtcaattaggtttcctttgcgcccggggaagggtaccattggcaccaggtgcatggtcaaggccaatcatttcttcgctcacctgcccaacaaggatcttcatcactacgatgtctccatcactccagaagttacatcacgcattgttaaccgagctgtgatcaaggagctggtaaatctgtacaaggcatcttatctgggtgggaggctgcctgcatatgatggtagaaagagcttatacacggctggcccattgccgtttacttcacaggagtttcagatcactttacttgacgacgatgatggttctggttctgagaggcgacagaggactttccgagtagtaatcaagttcgccgcacgggccgaccttcaccggcttgagttgtttttagctgggaggcacgcagaagctccacaggaggcactgcaagttcttgatattgtgctgcgagagctaccatcagcaagatatgcgccatttggacgttccttcttttcgccttacttgggtaggaggcaaccccttggtgagggattggaaagctggcgtggattttaccagagcattcggcctactcagatgggcttatcactgaatattgatatgtcagctacagctttcattgagccgttacctgttattgattttgttgcacaactattgaattctgacatccattcaaggccgctttctgatgccgaacgtgttaagatcaagaaagccttgagaggagtaaaggtggaagttacccaccgtggcaacatgaggcggaagtaccggatatctggtttgacaattcagccaactcgtgagctaacttttcctgttgatgaaggaggcacagtgaagtcagttgtacagtactttcaagagacatatggctttgccatccaacacacctaccttccatgccttacagttcagcgattaaattacctgcctatggaggtctgcaaaatagtggaaggacagagatactccaagagattaaatcagaatcagataagagctcttttggaggagacatgccaacacccacgtgatcgggagcgtgatattattaagatggttaaacataacgcttatcaggatgatccttacgcaaaagagtttggcattaagataagtgatcgtttggcatcagtagaggcacgaattttaccggctccacggcttaagtacaatgagactggtcgagagaaggattgcttaccaagagttggtcaatggaatatgatgaacaagaaaatggtaaatggtggtaaagtcagaagctggatgtgcgtcaattttgcccgtaatgtgcaggaaagtgttgttcgtgggttctgccatgaacttgctctgatgtgtcaagcctcaggaatggatttcgctccagaacctattcttccaccactaaatgcacatccagatcaagtggagcgtgctctaaaagctaggtatcatgatgcaatgaacgttcttggaccccagcgcagggaacttgatttgcttattgggatactacctgataacaatggctcgctttatggtgatttgaagcgcgtgtgtgaaatagatcttggaatagtttcacaatgctgttgcacgaagcaggtgttcaaaatgaacaaacaaattcttgcaaatcttgctctgaagataaatgtcaaggttgggggcaggaacactgtgctggtggatgctgtgtcaaggcgtattcctctggtaaccgacagacctacaattatatttggtgctgatgttacccatcctcatcctggagaggacagcagtccctcaattgctgctgttgtagcctcccaagattggcctgaggtgacaaagtatgctgggttggtttctgctcaagcccaccgacaagagctgatagaagatctatataaaatctggcaggatccacagagaggaacagttagtggtggcatgatccgtgagctgcttatatccttcaaaagatcaactggtgagaagccccagcgaataatattttacagggatggcgttagtgaaggccagttttaccaagttctactttatgaattgaatgcaatccgaaaagcatgtgcctccctggaggcaaattaccaaccaaaggtgactttcattgtggttcagaaacgtcaccacacaagattatttgcacataatcacaacgatcagaactcagttgacaggagcgggaacatactccctggtacggttgtagattcaaagatctgtcatccaactgagtttgacttctacctgtgtagccatgctggcattaagggtactagtcgtccagctcattatcatgtcttgtgggatgaaaacaacttcacagctgatgcattgcagattcttaccaacaacctttgctacacctatgcaaggtgcactcgctctgtatcaattgttccacctgcttattatgctcatctggctgccttccgtgctcgtttctatatggaaccagatacatctgacagcagctctgtcgttagtgggcctggtgtacgtgggccactttctggctcatcaacatcacgtactcgggcccctggtggtgcagctgttaagccacttcctgctctgaaggatagtgtgaagagggtcatgttctactgctga

SEQ ID NO: 11683 - protein, 1010 aa, Oryza sativa subsp. indica
MASRRPTHRHHTEAPDPGGRGRGRGRAARYAQPQPQQQQQQQQGRGCRARGASPPPPQQQQQQQQPRSTPTRATTVTVASSSSTTATASSSPLAPELRQAIMEAPRPSELAQPSPTPPQEQPVDAATTTPHHIPSSSKSIRFPLRPGKGTIGTRCMVKANHFFAHLPNKDLHHYDVSITPEVTSRIVNRAVIKELVNLYKASYLGGRLPAYDGRKSLYTAGPLPFTSQEFQITLLDDDDGSGSERRQRTFRVVIKFAARADLHRLELFLAGRHAEAPQEALQVLDIVLRELPSARYAPFGRSFFSPYLGRRQPLGEGLESWRGFYQSIRPTQMGLSLNIDMSATAFIEPLPVIDFVAQLLNSDIHSRPLSDAERVKIKKALRGVKVEVTHRGNMRRKYRISGLTIQPTRELTFPVDEGGTVKSVVQYFQETYGFAIQHTYLPCLTVQRLNYLPMEVCKIVEGQRYSKRLNQNQIRALLEETCQHPRDRERDIIKMVKHNAYQDDPYAKEFGIKISDRLASVEARILPAPRLKYNETGREKDCLPRVGQWNMMNKKMVNGGKVRSWMCVNFARNVQESVVRGFCHELALMCQASGMDFAPEPILPPLNAHPDQVERALKARYHDAMNVLGPQRRELDLLIGILPDNNGSLYGDLKRVCEIDLGIVSQCCCTKQVFKMNKQILANLALKINVKVGGRNTVLVDAVSRRIPLVTDRPTIIFGADVTHPHPGEDSSPSIAAVVASQDWPEVTKYAGLVSAQAHRQELIEDLYKIWQDPQRGTVSGGMIRELLISFKRSTGEKPQRIIFYRDGVSEGQFYQVLLYELNAIRKACASLEANYQPKVTFIVVQKRHHTRLFAHNHNDQNSVDRSGNILPGTVVDSKICHPTEFDFYLCSHAGIKGTSRPAHYHVLWDENNFTADALQILTNNLCYTYARCTRSVSIVPPAYYAHLAAFRARFYMEPDTSDSSSVVSGPGVRGPLSGSSTSRTRAPGGAAVKPLPALKDSVKRVMFYC

SEQ ID NO: 11684 - DNA, 3201 bp, Oryza sativa subsp. indica
  CDS (1)..(3201)
atgatgagaaagaaaaaaactgaaccccgtaatgctggggaaagttctggaactcaacaagccactggagctcctggacggggtccttcacagcgacctgagagagctcaacagcatggaggtggtggttggcaacctgccaatcctcaatatgctcaacaagctggtcgcggtggtggacaacaccagggacgtggtggacgttaccagggtcgtggagggccaacatcacatcaaccaggtggtggtccggttgaatatcaagcacatgagtactatggccgtggtgtccaacggcaaggaggaatgccacaacacaggagtggcagtggtggacatggagttcctgccagtccatcaagaacagttcccgagctgcaccaagcctcacaagaccagtaccaagctacggtggttgcaccatcaccatcaagaactggcccatcttcgctgcctgttgaggccagcagcgaagaagtccaacatcagtttcaggaacttgccatccagggtcaaagccccactagccaggccattcaactagcaacaccatcgagcaaatcagtgagatttccaatgcgccctggcaagggtacatttggtgataggtgcatcgtgaaagccaaccatttctttgctgaattgcctgacaaagaccttcaccagtatgatgtgtctataactcctgaggttccttcacgtggtgtcaatcgtgctgtcattggagaaattgtaacacaatataggcagtctcatttgggtggccgtcttccagtctatgatggaaggaagagcttatacacagctggtccattaccatttacttctaggacctttgacgttattctgcaggatgaggaagagagccttgctgttgggcaaggtgcacagaggcgtgagagaccatttaaggtcgtgatcaaatttgctgcacgcgctgatctccaccatttagccatgtttttagctggaaggcaagcggatgctcctcaagaagctcttcaagttcttgacattgttctacgtgaattgcctactgcaaggtactctccagttgcaaggtcattttattcgcctaacttaggaaggcgccaacaacttggcgagggcctggaaagttggcgtggtttttaccaaagcatacgacccacgcagatgggactttctctgaatattgatatgtcatcgacagcattcattgagcctctacctgtgattgactttgttgcacagcttttgaacagagacatctcagttagaccattatctgatgctgatcgtgtgaagatcaagaaggccctaaggggtgtaaaggttgaggtcacacatagaggcaatatgcgcaggaagtatcgcatttctggccttacctcacaagcaacacgagagttgtcttttcccattgataatcatggtactgtgaagacagtggtgcaatacttccaggagacatatggatttaacattaagcacacaactttgccttgcttgcaagtgggcaatcaacaaaggccaaattatctaccaatggaggtctgtaagattgtggagggacagcgttactcaaaaagactaaatgagaagcagataactgctcttcttaaagtgacctgccagcgccctcaagagcgtgagctggacattttgcagactgtgcatcacaatgcataccatcaggatccatatgcacaggagtttggcataaggatcgatgagcgacttgcatctgttgaagctcgtgttctaccacccccctggcttaagtaccacgatagtggcagagagaaggatgtcttgccaagaattggccaatggaatatgatgaataagaaaatggtcaatggtggtagagttaacaactggacatgcatcaatttttctcgtcatgtccaagataatgctgctaggagtttctgtcgcgagcttgctattatgtgccaaatatctgggatggacttctcaattgatcctgtggttcctctagtgactgcaagacctgaacatgtggaaagagcgctcaaggcacgctatcaagaggccatgaatatactgaaaccacagggcggggagcttgacctgctgattgcaatattgcctgacaataatggttctctttatggcgatctcaaaaggatatgtgagactgatcttggattggtctcgcaatgctgtcttacgaagcatgtttttaagatgagcaaacagtatttagcaaacgttgcccttaaaatcaatgttaaggtgggaggaagaaatacagtacttgttgatgctttgacaaggaggattccccttgtgagtgataggccaacgatcatttttggtgctgatgttacacatccccatcctggagaagattctagcccttccattgcagctgttgttgcttctcaagactggcctgaggtcaccaaatatgccggattagtgagtgcacaggcccatcgtcaggaattgatacaggatctttttaaagtatggaaagatcctcaaagaggaactgtaagtggtggaatgatcagagagcttctcatttctttcaagagggcaactggacagaaaccccagaggattatattttacagggatggtgtcagtgaaggacagttttatcaggttctgttttatgagcttgatgccattagaaaggcatgtgcatctttggaagccgattatcagccacccgttacctttgtggtggtccagaagcgtcatcacacaaggctgtttgctaataaccacaaggaccagcgcactgttgacagaagtggaaatatactaccaggcaccgtggttgattcaaagatatgccatcctactgagtttgatttctacctgtgtagccatgcgggcattcagggaacaagtcgccctgcacattatcatgttctgtgggatgagaacaagttcactgctgatggtttgcaaactctgacaaacaacttgtgctacacctatgcaaggtgcacccgttccgtatcaatcgttcctcctgcatattatgcccatctcgcggcatttcgagctcgattttacatggagccggatacttcagatagtgggtcgatggcgagcggtgcccatacccgtggcggtggcccccttcctggtgcacgcagcactaagcctgctgggaatgttgctgtaaggccgcttcctgatctgaaggaaaatgtcaaacgtgtcatgttctactgctaa

SEQ ID NO: 11685 - protein, 1066 aa, Oryza sativa subsp. indica
MMRKKKTEPRNAGESSGTQQATGAPGRGPSQRPERAQQHGGGGWQPANPQYAQQAGRGGGQHQGRGGRYQGRGGPTSHQPGGGPVEYQAHEYYGRGVQRQGGMPQHRSGSGGHGVPASPSRTVPELHQASQDQYQATVVAPSPSRTGPSSLPVEASSEEVQHQFQELAIQGQSPTSQAIQLATPSSKSVRFPMRPGKGTFGDRCIVKANHFFAELPDKDLHQYDVSITPEVPSRGVNRAVIGEIVTQYRQSHLGGRLPVYDGRKSLYTAGPLPFTSRTFDVILQDEEESLAVGQGAQRRERPFKVVIKFAARADLHHLAMFLAGRQADAPQEALQVLDIVLRELPTARYSPVARSFYSPNLGRRQQLGEGLESWRGFYQSIRPTQMGLSLNIDMSSTAFIEPLPVIDFVAQLLNRDISVRPLSDADRVKIKKALRGVKVEVTHRGNMRRKYRISGLTSQATRELSFPIDNHGTVKTVVQYFQETYGFNIKHTTLPCLQVGNQQRPNYLPMEVCKIVEGQRYSKRLNEKQITALLKVTCQRPQERELDILQTVHHNAYHQDPYAQEFGIRIDERLASVEARVLPPPWLKYHDSGREKDVLPRIGQWNMMNKKMVNGGRVNNWTCINFSRHVQDNAARSFCRELAIMCQISGMDFSIDPVVPLVTARPEHVERALKARYQEAMNILKPQGGELDLLIAILPDNNGSLYGDLKRICETDLGLVSQCCLTKHVFKMSKQYLANVALKINVKVGGRNTVLVDALTRRIPLVSDRPTIIFGADVTHPHPGEDSSPSIAAVVASQDWPEVTKYAGLVSAQAHRQELIQDLFKVWKDPQRGTVSGGMIRELLISFKRATGQKPQRIIFYRDGVSEGQFYQVLFYELDAIRKACASLEADYQPPVTFVVVQKRHHTRLFANNHKDQRTVDRSGNILPGTVVDSKICHPTEFDFYLCSHAGIQGTSRPAHYHVLWDENKFTADGLQTLTNNLCYTYARCTRSVSIVPPAYYAHLAAFRARFYMEPDTSDSGSMASGAHTRGGGPLPGARSTKPAGNVAVRPLPDLKENVKRVMFYC

SEQ ID NO: 11686 - DNA, 3306 bp, Oryza sativa subsp. indica
  CDS (1)..(3306)
atggtgaagaagaaaagaactgggtctggcaacaccggtgagagttctggagaggctccaggagctcctggccatggttcttcacagcgagctgagagaggtcctcaacagcatgggggaggacgtggttgggtgcctcaacagggtggccgtggtggtgggcaatatcagggccgtggtggacattatcagggccgtggagggcaaggttcacaccatccaggcggagggcctcctgagtatcagggtcgtggagggccaggttcacatcatccaggtggtgggcctcctgactatcagggccgtggaggatcaggttcacatcacccaggtggtgggcctcccgagtatcaaccgcgtgactatcaaggacgtggtggtccacgccccagaggtggaatgccacagccatactatggcggacctagggggagtggcggacgtagtgttccttcaggttcatcaagaacagttcccgagctgcaccaagccccacatgtccaataccaagccccgatggtttcaccaaccccatcgggagctggctcatcctctcagcctgcggcggaggtgagcagtggacaagtccaacaacagtttcagcaacttgccacccgtgatcaaagttcgaccagccaagccattcaaatagcaccaccgtcaagcaaatcagttagattcccgttgcgccctggcaagggtacatatggggacaggtgcattgtgaaggcgaaccatttctttgctgaacttcctgataaagaccttcaccaatacgacgtatctattactcctgaggttacttcacgtggcgtgaatcgtgctgttatgtttgagttagtaacgctgtatagatattcccatttgggcgggcgtctacctgcctatgatggaaggaagagtctttacacagctggaccattgccttttgcttctaggacatttgaaattactcttcaagatgaggaagatagtcttggtggtggccaaggcacccaaaggcgtgagagactatttagggtggtgatcaagtttgctgcccgtgctgatcttcaccatttggctatgtttctagctggaaggcaagcagatgctcctcaagaagcccttcaagtccttgacattgtgttacgtgaattgcctaccacaaggtactcaccagttggtcggtcattttattctcccaatttagggagacgccagcaacttggtgagggtttggaaagttggcgtggtttttaccaaagcataaggcctacccagatgggtctctcactgaatattgatatgtcatcaactgcatttattgagcctctacctgtgattgactttgttgctcagcttctgaacagagacatctcagttagaccattatctgattctgatcgtgtgaagataaagaaagctctaagaggtgtgaaggttgaggtgacgcatagaggaaacatgcgtagaaaatatcgtatatctggactcacttcacaggcaacaagggagttatcattccctgtcgatgatcgtggtactgtgaagactgtggtgcaatattttctggagacatatggttttagtattcagcacaccactttaccttgccttcaagtgggcaatcagcaaaggcccaattatctgcctatggaggtttgtaagatcgttgagggacagcgttactcgaagcggcttaacgagaaacagattaccgcgctactgaaagtgacttgccagcgacctcaagagcgtgaactggatattttgcggactgtatctcacaatgcataccatgaagatcagtatgcgcaggaatttggcataaaaattgatgagcgtcttgcatctgttgaagctcgtgttctgcctcccccaaggcttaaataccatgatagtgggagagaaaaggatgtattgccgagagttggccagtggaacatgatgaataagaaaatggtcaatggtgggagagtcaacaactgggcatgtattaacttctctagaaatgtgcaagatagtgctgccaggggcttctgtcatgagctggctatcatgtgccaaatatctggaatggattttgcactggaacctgtgctgcccccacttactgctagacctgaacatgtggaaagagcactgaaggcacgctatcaagatgcaatgaacatgctcagaccgcagggcagggaacttgatttactgattgtaatactgcctgacaataatggttctctttatggggatctcaaaagaatctgtgagactgatcttggattggtctcccaatgttgtttgacaaaacatgtttttaaaatgagcaagcagtatcttgcaaatgttgcccttaaaataaacgttaaggtggggggaaggaatactgtacttgtggatgctttgacaaggaggattccccttgtcagtgacagaccaactatcatatttggtgcggatgttactcatcctcatcctggagaagattccagtccttccattgcagctgtggttgcttctcaagactggcctgaagtcactaagtatgctggattggtgagtgcccaagcccatcgtcaagaattgatacaagatcttttcaaagtatggcaagacccgcatagaggaactgttactggtggcatgatcaaggagcttctcatttctttcaagagggctactggacagaaacctcagaggataatattttacagggatggtgtcagcgaggggcagttttatcaagttttgttgtatgagcttgatgccattagaaaggcttgtgcatccctggaacccaactatcagcctccagttacctttgtggtggtccagaagcggcatcacacaaggttgtttgctaataatcacaacgaccagcgtactgttgatagaagtggaaacattctgcctggaactgttgttgactcaaagatttgccatccaaccgagtttgatttctacctgtgtagccatgctggcatacagggaacaagccgtcctgctcattatcatgttctgtgggatgagaacaaatttactgcagacgagttgcaaaccctcacgaacaacttgtgctacacgtatgcaaggtgcactcgctctgtatcaattgtgcctcctgcgtactatgctcatctggcagccttccgagctcgcttttacatggagccagagacatctgacagtggatcaatggcgagtggagctgcaacgagccgtggccttccaccaggtgtgcgcagcgccagggttgctggaaatgtagccgtcaggcctctacctgctctcaaggaaaacgtgaagcgtgtcatgttttactgctaa

SEQ ID NO: 11687 - protein, 1101 aa, Oryza sativa subsp. indica
MVKKKRTGSGNTGESSGEAPGAPGHGSSQRAERGPQQHGGGRGWVPQQGGRGGGQYQGRGGHYQGRGGQGSHHPGGGPPEYQGRGGPGSHHPGGGPPDYQGRGGSGSHHPGGGPPEYQPRDYQGRGGPRPRGGMPQPYYGGPRGSGGRSVPSGSSRTVPELHQAPHVQYQAPMVSPTPSGAGSSSQPAAEVSSGQVQQQFQQLATRDQSSTSQAIQIAPPSSKSVRFPLRPGKGTYGDRCIVKANHFFAELPDKDLHQYDVSITPEVTSRGVNRAVMFELVTLYRYSHLGGRLPAYDGRKSLYTAGPLPFASRTFEITLQDEEDSLGGGQGTQRRERLFRVVIKFAARADLHHLAMFLAGRQADAPQEALQVLDIVLRELPTTRYSPVGRSFYSPNLGRRQQLGEGLESWRGFYQSIRPTQMGLSLNIDMSSTAFIEPLPVIDFVAQLLNRDISVRPLSDSDRVKIKKALRGVKVEVTHRGNMRRKYRISGLTSQATRELSFPVDDRGTVKTVVQYFLETYGFSIQHTTLPCLQVGNQQRPNYLPMEVCKIVEGQRYSKRLNEKQITALLKVTCQRPQERELDILRTVSHNAYHEDQYAQEFGIKIDERLASVEARVLPPPRLKYHDSGREKDVLPRVGQWNMMNKKMVNGGRVNNWACINFSRNVQDSAARGFCHELAIMCQISGMDFALEPVLPPLTARPEHVERALKARYQDAMNMLRPQGRELDLLIVILPDNNGSLYGDLKRICETDLGLVSQCCLTKHVFKMSKQYLANVALKINVKVGGRNTVLVDALTRRIPLVSDRPTIIFGADVTHPHPGEDSSPSIAAVVASQDWPEVTKYAGLVSAQAHRQELIQDLFKVWQDPHRGTVTGGMIKELLISFKRATGQKPQRIIFYRDGVSEGQFYQVLLYELDAIRKACASLEPNYQPPVTFVVVQKRHHTRLFANNHNDQRTVDRSGNILPGTVVDSKICHPTEFDFYLCSHAGIQGTSRPAHYHVLWDENKFTADELQTLTNNLCYTYARCTRSVSIVPPAYYAHLAAFRARFYMEPETSDSGSMASGAATSRGLPPGVRSARVAGNVAVRPLPALKENVKRVMFYC

SEQ ID NO: 11688 - DNA, 3249 bp, Oryza sativa subsp. japonica; identical to SEQ ID NO: 11506
  CDS (49)..(3249)

SEQ ID NO: 11689 - protein, 1066 aa, Oryza sativa subsp. japonica
MMRKKKTEPRNAGESSGTQQATGAPGRGPSQRPERAQQHGGGGWQPANPQYAQQAGRGGGQHQGRGGRYQGRGGPTSHQPGGGPVEYQAHEYYGRGVQRQGGMPQHRSGSGGHGVPASPSRTVPELHQASQDQYQATVVAPSPSRTGPSSLPVEASSEEVQHQFQELAIQGQSPTSQAIQPAPPSSKSVRFPMRPGKGTFGDRCIVKANHFFAELPDKDLHQYDVSITPEVPSRGVNRAVIGEIVTQYRQSHLGGRLPVYDGRKSLYTAGPLPFTSRTFDVILQDEEESLAVGQGAQRRERPFKVVIKFAARADLHHLAMFLAGRQADAPQEALQVLDIVLRELPTARYSPVARSFYSPNLGRRQQLGEGLESWRGFYQSIRPTQMGLSLNIDMSSTAFIEPLPVIDFVAQLLNRDISVRPLSDADRVKIKKALRGVKVEVTHRGNMRRKYRISGLTSQATRELSFPIDNHGTVKTVVQYFQETYGFNIKHTTLPCLQVGNQQRPNYLPMEVCKIVEGQRYSKRLNEKQITALLKVTCQRPQERELDILQTVHHNAYHQDPYAQEFGIRIDERLASVEARVLPPPWLKYHDSGREKDVLPRIGQWNMMNKKMVNGGRVNNWTCINFSRHVQDNAARSFCRELAIMCQISGMDFSIDPVVPLVTARPEHVERALKARYQEAMNILKPQGGELDLLIAILPDNNGSLYGDLKRICETDLGLVSQCCLTKHVFKMSKQYLANVALKINVKVGGRNTVLVDALTRRIPLVSDRPTIIFGADVTHPHPGEDSSPSIAAVVASQDWPEVTKYAGLVSAQAHRQELIQDLFKVWKDPQRGTVSGGMIRELLISFKRATGQKPQRIIFYRDGVSEGQFYQVLFYELDAIRKACASLEADYQPPVTFVVVQKRHHTRLFANNHKDQRTVDRSGNILPGTVVDSKICHPTEFDFYLCSHAGIQGTSRPAHYHVLWDENKFTADGLQTLTNNLCYTYARCTRSVSIVPPAYYAHLAAFRARFYMEPDTSDSGSMASGAHTRGGGPLPGARSTKPAGNVAVRPLPDLKENVKRVMFYC

SEQ ID NO: 11690 - DNA, 2697 bp, Zea mays
  CDS (1)..(2697)
atggagtctcacaatggcgaggctgatgatttgcctccaccaccccctttggctgctggtgttgaaccacttaaagccgatgaaacaaagatgccattgaaacctaggagtctggtccagaggaatggctttggcagaaaggggcagcagataaagctgataacaaaccacttcaaagtttctctcatgaaggctgaagattttttctatcattactatgtcaatttgaagtatgaagatgatacaccggttgatcggaaagggtcgggaagaaaagtgatcgaaaaactgcagcaaacttatgctgctgaacttgcaaataaagattttgcatatgatggtgagaagagcctgtttacaattggtgcccttcctcaagttaaaatggaattcactgttgtggatgaagacgtttcaactggaaagactcctgcaaatggcagtccaggcaatgatagtcctcctggaagtgacaggaaaagggtccgaaggccttacaatacaaagacatataaggttgaactatcttttgcggcaaaaatccctatgagtgcaatctcacaggctttgaggggtcaggagtcagagcacactcaggaagcaattcgagtgattgacattattctgaggcagcactcagctaagcagggttgcctattagtaaggcaatcgttcttccacaataatccttccaattttgttgacctgggtggtggtgtagtgggatgtagagggttccattctagttttcgtgcaacccagagtggactttcactcaatatcgatgtgtccaccacaatgatagtgaaacctggtcctgtcattgactttctgattgccaatcagaaagttaatgatccaagcatgattgattgggcaaaggccaagcgctcactgaagaacttaaggataaaaacaagtccggcgaaccaagaacagaagattgttggtctcagcgacaggccttgccgtgagcaattattcacactgaaacataaaaatggtgaatctgaagagatcactgtttttgattactttgtaaagaaccgtggcataaagctggaatattctggtgatcttccttgtatcaatgtgggaaaaccaaagcgtccaacttattttccagttgagttatgcagtcttcttcctttgcaacggtacactaaagcattgagcacacttcaaagatcatcactcgttgagaaatctaggcagaaaccacaagaaaggatgtctgttttgtctgatgtgctgcaaagaagcaactatgatgcagaacccatgctgaaggcttgtgggattacaattgctagaaatttcatagaagttgatggtagggtactgcagccccctaagcttaaagctgggaacggagaagacatttttacgcgcaatggcagatggaatttcaataataagaagctcattagagctagcagtgtcgagaaatgggcagtagtaaacttttctgcacgatgcaatgtccgggatcttgtccgtgatctcatcaagtgtggaggcatgaagggcattatggttgatgcaccatttgctgtatttgatgagaatccttcaatgagacggtcacctgctgtaagaagggttgaagacatgtttgaacaagtgaaaactaagcttcctggagcacccaagtttcttttgtgtgttctagcggaaagaaagaattccgatatttatgggccttggaagaagaaatgccttgctgaatttgggatcgttacacagtgtgtggcaccaactagagtcaatgatcagtatcttacaaatgtcttgttaaagattaacgcaaagttgggtggcttgaattcgttgctccaaattgaaacatccccagcaattcctctcgtatccaaggtcccaactataatcttgggtatggacgtatcacacggatctcctggacattctgatataccgtctgttgctgctgttgttagttctcgtgaatggcctcttatctcaaaatacagagcatctgtccgcacccaatcaccaaaaatggaaatgattgactcgttgtttaagccacgggaaactgatgacgatggtctgattcgggagtgtctgattgacttctacaccagttcagggaagagaaagcccgaccaagtcatcatcttcagggacggtgttagtgaaagtcagtttaatcaggtgctgaacattgagttgcaacaaatcattgaggcttgcaaatttcttgatgagaaatggaatcccaagttcacattgatcattgcccagaagaatcaccacactaaatttttcattcctggaaagccagataatgttccagctggcactgttgttgacaacaaagtctgtcatccaaggaacttcgatttctacatgtgttcacatgctggaatgattggaactaccaggccaactcactatcacatcctgcatgacgagataggcttcaatcctgatgacctgcaggagctggtgcactcgctctcttatgtgtaccaaaggagcacaacagccatatcagttgttgctcccatctgctacgcccaccttgcagccgcccaggttgggcagttcataaagttcgacgagatgtcggagacttcatctagccatggggggcatacctcggcgggcagcgtccctgtacaggagctgccccgtctgcatgagaaagtgaggagctccatgttcttctgctga

SEQ ID NO: 11691 - protein, 898 aa, Zea mays
MESHNGEADDLPPPPPLAAGVEPLKADETKMPLKPRSLVQRNGFGRKGQQIKLITNHFKVSLMKAEDFFYHYYVNLKYEDDTPVDRKGSGRKVIEKLQQTYAAELANKDFAYDGEKSLFTIGALPQVKMEFTVVDEDVSTGKTPANGSPGNDSPPGSDRKRVRRPYNTKTYKVELSFAAKIPMSAISQALRGQESEHTQEAIRVIDIILRQHSAKQGCLLVRQSFFHNNPSNFVDLGGGVVGCRGFHSSFRATQSGLSLNIDVSTTMIVKPGPVIDFLIANQKVNDPSMIDWAKAKRSLKNLRIKTSPANQEQKIVGLSDRPCREQLFTLKHKNGESEEITVFDYFVKNRGIKLEYSGDLPCINVGKPKRPTYFPVELCSLLPLQRYTKALSTLQRSSLVEKSRQKPQERMSVLSDVLQRSNYDAEPMLKACGITIARNFIEVDGRVLQPPKLKAGNGEDIFTRNGRWNFNNKKLIRASSVEKWAVVNFSARCNVRDLVRDLIKCGGMKGIMVDAPFAVFDENPSMRRSPAVRRVEDMFEQVKTKLPGAPKFLLCVLAERKNSDIYGPWKKKCLAEFGIVTQCVAPTRVNDQYLTNVLLKINAKLGGLNSLLQIETSPAIPLVSKVPTIILGMDVSHGSPGHSDIPSVAAVVSSREWPLISKYRASVRTQSPKMEMIDSLFKPRETDDDGLIRECLIDFYTSSGKRKPDQVIIFRDGVSESQFNQVLNIELQQIIEACKFLDEKWNPKFTLIIAQKNHHTKFFIPGKPDNVPAGTVVDNKVCHPRNFDFYMCSHAGMIGTTRPTHYHILHDEIGFNPDDLQELVHSLSYVYQRSTTAISVVAPICYAHLAAAQVGQFIKFDEMSETSSSHGGHTSAGSVPVQELPRLHEKVRSSMFFC

SEQ ID NO: 11692 - DNA, 2766 bp, Oikopleura dioica
  CDS (1)..(2766)
atgcacaactcaaaattcgacttcaataataatggatcgtcgtccaatgatgagtccccaccggcctctactcgcttcaataacggttccccagacctgaagctccttccgtctttctatcctggagatcatccggtgtctcctccaaatcatccggcacttttgtctggcaatcacggtcgactctctggaggtgcagcaaaaactcgcaatgaacagtttccgcctcctctacgccctgctcaaggaactgccggtcgagcgatcttactgaagtcaaactttttcaaagtcgatattccaaatgcagatcttcaccactacgacattgacatcaagcccgacaaatgcccaagacgagtcaatcgagaaattgtcgaaatgatggtggagaactatcgtaaccagatttttcaagatcgacggccagttttcgatggacgaagaaacatgtatactgcgcagcctttgcctattgacaatcaaaaggttgagctggacattactcttccgggcgatggaagagagcgtgttttcaaagtagcaatcaaatgggtagcgagggtttcgcttttctcgctgcagcttgccctcggtggacagattcacggaataccatttgaaactgtccaagcactggatgtagtcatgcggcatctgccttccatgcgctactctcctgtcggtcgctcgttcttctccgcgcctgcaaatgggattggcagaagtctcggcggcggccgagaagtatggtttggttttcatcagagcatgcgccctagtcagtggaaaatgatgctcaatatcgatgtatcggccactgccttttatcgttcgcaaggagtcgtagattttctctgcgaggtacttgagatctccaaaaatgagctttatcacgcaggagggctttcggactctcatcgggtgaaattcatgaaagaaatcaagggactcaaagttgagatcacccactgtggctcaatgcgcagaaaataccgagtttgcaacgtcacgcgtcggcctgccagtcatcaaactttccctctcgtgcttccagagaacgagcagacaattgaatgcaccgtgttgcggtatttccaggaacgtcacaacttatctctcaaatttccttttctcccatgcctccaagtcgggcaggagcagaaacacacgtatcttccactggaagtgtgcaacattgttcaaggccagcgctgcataaaaaagctcacggattctcaaacatccacaatgattaaagaaacggcaagaacagcaccagagcgtgagcgagagatttccaatcttgtgaaaaaggctggcttcaacaatgacccttatgtaagagagtttggaattcaagttattgacgagatgactgaaattcgtggacgcgttctccctcctccacggctccagtatggaggatccaatcgaagtaacttattggcgactccaaacggtggagtttgggacatgagagggaaacagttccacactgggatagaagtcaatgtatgggccattgcctgctttgctcatcagaagcaatgtgctgatcaaaatctgcgaatgttcatcaaaaagctgcaacaaatctcggaagacgctggtatgcccattcgatctggaccagtgttttgccagtttgcgcagggctcggatcaagtcgaacccatcatgaaattcttgatgaacagatatcccaaacttcagctgattatggttatactccctggccgcactcctgtgtatgctgaggtcaaacgagttggcgatactctcctcggagttgctacgcagtgcgtacaagtaaaaaatgtcacaaaagttacaacgcagactttgtcaaatctgtgtctcaagataaatgtcaagctcggcggaatcaacaacattttgcttcctaacgcgcgtcctcgtgtgttcaacgaacccgtcatttttatcggagctgatgtcacccacccgcctgctggagaccgtcgcaagccatcgattgctgctgtggtcgcgtcaattgacgctcatccaagtcgctactgcgcatctgttagagttcaacgccaccgtcaagaggcaatagaagatttgacaaacatggtcaaagatttaatgctcgagttttacaaggcgacgacatacaagcccgtacgaatcattgtctatcgtggcggcatttcagaggggcagtttcagccagtcctcactcgcgagttaaaggcgatcagagaagcgtgtgtcaagttggaagataattatcagcccggcatctcttatgttgttgtgcaaaagcgacatcacacgaggttgttctgtcgacagtcaggcgataaatgcgggaaaagtggcaatattccagctggaaccacagtagatatgggtatttgccatccaactgaattcgacttttacctctgttctcacgcaggaatccaggggacctcgcgcccttctcattaccatgtgctctgggatgataatgaatttaccgccgacgagcttcaaaatcttacatatcagctttgccatacatacgtgcgatgtacgcgctcagtgtcgatccccgctccagcttactatgctcatctggtcgcctatcgcgcgcgttatcaccttgtcgacaaggattacgattccggtgaaggttcgcttatttccggcacttcttcttctcgagacgtgaccgacatcagtcaataccaatcgatggccaaagcaattcaagtacaccagaacacctttggctccatgtatttcacctaa

SEQ ID NO: 11693 - protein, 921 aa, Oikopleura dioica
MHNSKFDFNNNGSSSNDESPPASTRFNNGSPDLKLLPSFYPGDHPVSPPNHPALLSGNHGRLSGGAAKTRNEQFPPPLRPAQGTAGRAILLKSNFFKVDIPNADLHHYDIDIKPDKCPRRVNREIVEMMVENYRNQIFQDRRPVFDGRRNMYTAQPLPIDNQKVELDITLPGDGRERVFKVAIKWVARVSLFSLQLALGGQIHGIPFETVQALDVVMRHLPSMRYSPVGRSFFSAPANGIGRSLGGGREVWFGFHQSMRPSQWKMMLNIDVSATAFYRSQGVVDFLCEVLEISKNELYHAGGLSDSHRVKFMKEIKGLKVEITHCGSMRRKYRVCNVTRRPASHQTFPLVLPENEQTIECTVLRYFQERHNLSLKFPFLPCLQVGQEQKHTYLPLEVCNIVQGQRCIKKLTDSQTSTMIKETARTAPEREREISNLVKKAGFNNDPYVREFGIQVIDEMTEIRGRVLPPPRLQYGGSNRSNLLATPNGGVWDMRGKQFHTGIEVNVWAIACFAHQKQCADQNLRMFIKKLQQISEDAGMPIRSGPVFCQFAQGSDQVEPIMKFLMNRYPKLQLIMVILPGRTPVYAEVKRVGDTLLGVATQCVQVKNVTKVTTQTLSNLCLKINVKLGGINNILLPNARPRVFNEPVIFIGADVTHPPAGDRRKPSIAAVVASIDAHPSRYCASVRVQRHRQEAIEDLTNMVKDLMLEFYKATTYKPVRIIVYRGGISEGQFQPVLTRELKAIREACVKLEDNYQPGISYVVVQKRHHTRLFCRQSGDKCGKSGNIPAGTTVDMGICHPTEFDFYLCSHAGIQGTSRPSHYHVLWDDNEFTADELQNLTYQLCHTYVRCTRSVSIPAPAYYAHLVAYRARYHLVDKDYDSGEGSLISGTSSSRDVTDISQYQSMAKAIQVHQNTFGSMYFT

SEQ ID NO: 11694 - DNA, 3099 bp, Zea mays
  CDS (1)..(3099)
atggagggggaagcggtgcccaagaacgagaggaaggccggcggcggcggcggcggaggcgttagcaatgacggtggcgcgagcgcgaatgcgaggaggaggtggaagggcggaggcggcaggcatcacccgatcatccaggcctacccggcgctcctgccgttgccgctacacgcgcgtcgcaacggcatcatcgcgctgccgctgccgccgcccgtgctggtctacttgcaccagccgccgccgccgccgctgctgttccccaaggtgccggcgtgctacgggaagcccaccggccccccgctgcttagggggccgccgtggagatcgaggaagccgccgccgccgccgcacgccgtcaccgccgcgctgctgccgctaccgcacgataccgagctgattcagcacaagtgcttcattcacgagaaccaaacatcagaaacgaagccaaatcatctgagcacccatcacaactcatccaccaccgtgcatggagttaccgttgcgaccagaccagacagtggcggtgttggggggactgcaattcctctctacgcaaaccatttcctcgtgcgtttcgatcccgggcagaagatctttcattacgatgtcgacatatccccgcacccgtcaaaagaaacggcgagaatgatcaagaacaagctagttgaggaaaactcaaatgtcctctcgggcgcccttccggccttcgatggccgcaagaatctatttagtcccattgagtttcaacaggacaggcttgaattcttcgttagccttccagcagctgcatcaacaaggtttatagcagctaaagagaatgcccacatggttgacaggcacaaccataaggttttcagggtgaaccttcggttggtttcgaagctgagcggcgaggacttgaacaagtatttgaatgaagagaaggatggcattcctcttcctcaagactaccttcatgcactggatgtcatcctgagggaaggcgctatggagaaatctattcccataggccggtctttgtattcgcgttccatgggagaggcgaaggagattggtggtggagctgtcgtgttacgaggtttcttccagagcttgaggccaacgaagcaaggtcttgccctcaatgttgacctctcgcttacagcgttccatgaaaatacgggcataatcgcatacttgcagaagcgctgtgactttatgaaggacctttcgcaggtgaagactagggcattggcggtagatgagaggagggaggtggagaaagcattgaagaacatccgagttttcgtgtgccaccgtgaaactgaccaaaggtaccatgtgcatggcctgaccgaggagacaacggagaacctcaagttccgagaccgcagcggcaaggattatacggtggtagattacttcaaagagcactacaaccatgatattaaattcaggaacctgccctgcctgcagattggtaagagcaagccatgctatgtgccaatggagctttgcgtggtttgcgagggccagaagtttcttggcaagctctcagatgaacagacctccaaaatgctcagaatgggctgccaaaggccaagcgaaagaaagggaatcataaagggtgttgttgaaggagcatttgctacaagaagcaattcgtatgcggatcagttcaaccttgaagtgtccaaggacatgactcagctattggggagggtcctcttgccaccgaaactgaagctcggcaagggggggcgcatcaaggatctaacaccggacaggtttgatcggcaatggaatttgatggacagccatgtcgccgagggttccaagatcaagagctgggctttgataagctttggtggcagcccagagcatcagtctttcattccaaagtttatcaaccatctagcaagccgctgtgagcagcttgggatcttactcagcaagaaaacagtcgtcagcccattgttcgagcggatccaaatcctgaacaacgtgggcgttctggagagcaggctgaagaaaatccaggaagctgcctccggcaatttacagctgctaatctgcgtcatggagcggaggcaccggggctatgctgatctgaagcgtatcgcagaaacgtccattggcgtcttgacgcagtgctgcctgtattccaacttgagcaagctaagcttccagttcttggccaacttagcgctgaagataaacgcgaagcttggcggatgcaacgtcgccctctacaacagcttgccgtgccagattcctagggtgttttcggacgaggagccagcgatgttcatgggtgccgacgtgacacacccgcaccccctagacgactcgagcccgtccgtggtcgccgtggtcgcgagcatgaactggccttcggcgaacaagtacatctccaggatgaggtcgcagacgcaccgcaaagagatcatcgagcgcctggacgtgatgaccggcgagctgctcgacgagttcgtgaaggaagtcggcaagctccccagcagaatcatattcttcagggacggcgtcagcgagacgctgttctacaaggtgctgacggaggagctgcaggcggtgcggctggcgtgctcgaggcacccgggctacaagccggcgatcacgttcgtggtggtccagaagaggcagcacaccaggctgttccacagggagaagaatggcggcggtggcggcggctccacgcactacgccgaccagaatgtgccgccggggacggtggtggacaccgtgatcacgcatccgagggagttcgacttctacctgtgcagccactggggcaccaaggggacgaccaggccgacgcactaccgcgtgctgtgggacgagaacggcttcgggtccgacgagatgcagcagctgatacacagcctttgctacacgttcgcccggtgcaccaagcccgtgtccctcgtcccgccggcgtactacgcgcacctggccgcgtacagaggacggctgtaccttgagaggtcggactcggcggcgaccggccggacgactctgtacagggcggcgccattgcagactgcgccgctccctaagctcagagatagcgtgaaggggctcatgttctactgctga

SEQ ID NO: 11695 - protein, 1032 aa, Zea mays
MEGEAVPKNERKAGGGGGGGVSNDGGASANARRRWKGGGGRHHPIIQAYPALLPLPLHARRNGIIALPLPPPVLVYLHQPPPPPLLFPKVPACYGKPTGPPLLRGPPWRSRKPPPPPHAVTAALLPLPHDTELIQHKCFIHENQTSETKPNHLSTHHNSSTTVHGVTVATRPDSGGVGGTAIPLYANHFLVRFDPGQKIFHYDVDISPHPSKETARMIKNKLVEENSNVLSGALPAFDGRKNLFSPIEFQQDRLEFFVSLPAAASTRFIAAKENAHMVDRHNHKVFRVNLRLVSKLSGEDLNKYLNEEKDGIPLPQDYLHALDVILREGAMEKSIPIGRSLYSRSMGEAKEIGGGAVVLRGFFQSLRPTKQGLALNVDLSLTAFHENTGIIAYLQKRCDFMKDLSQVKTRALAVDERREVEKALKNIRVFVCHRETDQRYHVHGLTEETTENLKFRDRSGKDYTVVDYFKEHYNHDIKFRNLPCLQIGKSKPCYVPMELCVVCEGQKFLGKLSDEQTSKMLRMGCQRPSERKGIIKGVVEGAFATRSNSYADQFNLEVSKDMTQLLGRVLLPPKLKLGKGGRIKDLTPDRFDRQWNLMDSHVAEGSKIKSWALISFGGSPEHQSFIPKFINHLASRCEQLGILLSKKTVVSPLFERIQILNNVGVLESRLKKIQEAASGNLQLLICVMERRHRGYADLKRIAETSIGVLTQCCLYSNLSKLSFQFLANLALKINAKLGGCNVALYNSLPCQIPRVFSDEEPAMFMGADVTHPHPLDDSSPSVVAVVASMNWPSANKYISRMRSQTHRKEIIERLDVMTGELLDEFVKEVGKLPSRIIFFRDGVSETLFYKVLTEELQAVRLACSRHPGYKPAITFVVVQKRQHTRLFHREKNGGGGGGSTHYADQNVPPGTVVDTVITHPREFDFYLCSHWGTKGTTRPTHYRVLWDENGFGSDEMQQLIHSLCYTFARCTKPVSLVPPAYYAHLAAYRGRLYLERSDSAATGRTTLYRAAPLQTAPLPKLRDSVKGLMFYC

SEQ ID NO: 11696 - DNA, 2862 bp, Vitis vinifera
  CDS (1)..(2862)
atgcctatgaggcagatgaaagagagctcagagcaacacctagtgatcaaaacccacttgcagaactccatgaacccagttcaaaagccccccaaaactgctcaaaatgggaaaggccccccatcccatgaacctcagaacgccaaacctcacagccaaacttcgccttcatcaaaaaacagagggaggagaagaggaagaggtggcagaaaatctgatcaaagcgatgttttcatgcgccccagttcaaggccctgcactgtagcagataagccagttttggcgcaccaggctggacctcttatgggttttccttcttcaagtaagtctttgacctttgcacctaggcccgggtatggtcaacttggaacaaaatgtattgtgaaggccaaccatttctttactgagttaccagagaaggacttgaatcagtatgatgtgacaattactcctgaagtgtcctcaagaacggttaacagagctatcatgaatgagctggtgaaactgtacaaagaatctgacttgggaatgagattgcctgcttatgatggtagaaagagtctatacactgctggtgagcttccgtttgcttggaaggagttcaaggttaagctagttgatgaagaggatggaatcaatggtcccaaaagagagagggagtataaagtggtcatcaagtttgtagcacgggcaagcttgcatcatttgggccagtttctggctggtaagcgagcagatgctccacaggaagctcttcaaattcttgacattgtattgagagagctctctactagaaggtactgtcctgttgggagatccttcttttctcctgatattagagcacctcaacgtcttggagaaggtttggagtcatggtgtggattctaccagagtataagacctactcagatgggtttgtcactgaatattgatatgtcttcggctgcattcattgaagctctccctgtaatagagtttgttggtcagctattaggcaaagatgtgttatctaggccattgtctgattctgaccgtgtgaagatcaaaaaggcccttagaggagtaaaagttgaagtaacacacagagggaatgtacgaagaaagtatcgtgtatcaggactaacatcccaacctacaagagaactagtttttcctgttgatgataattcaaccatgaagtcagttgtggaatacttccaagaaatgtatggctttacaattcaacatgcacaccttccttgccttcaagtaggaaaccagaagaaggctaactatttacctttggaggcctgcaaaattgtagaggggcagcggtataccaaaaggttgaatgagaggcaaattactgctctattaaaagttacatgccaaagacccagggatcaggaaaatgatattctgcagacggttcaacataatgcttatgatcaagatccatatgcaaaggagtttgggatcaaaatcagtgaaaaattagcttctgttgaggctcggattcttcctgctccttggctgaaatatcatgaaactgggaaggaaaaggattgtttgcctcaagtcggtcagtggaatatgatgaacaaaaaaatgatcaatggaatgactgttagccggtgggcatgtatcaacttctctcggagtgtgcaagagagtgttgctcgtgggttttgtaatgaattggctcaaatgtgtcaagtgtctggcatggaatttaaccccgaacctgttattccaatctacatggccagacctgatcaagtagagaaagctctgaagcatgtgtatcatgcatctatgaacaaactcaaaggaaaagaattggagcttctattagctattttacctgacaacaatgggtctttatatggtgatcttaagagaatatgtgaaaccgaccttggtctaatatcacaatgctgtctcacaaaacatgtcttcaagattagcaagcagtacttagccaatgtgtctctgaagattaatgttaagatgggtggtagaaacactgtccttttggatgctatcagttgcaggataccattagttagtgacataccaaccataatatttggagcagatgtgacgcatccagagaatggagaagactccagcccttcaattgctgctgtagtagcttctcaggactggcctgaagtcacaaaatatgcaggattggtttgtgctcaggctcacagacaggaactgatacaagatttatacaagacatggcatgatcctgttcgtggcacagttagtggtggcatgattcgggatcttttggtttcctttcggaaggcgacagggcagaagccactaaggattatattttacagggatggtgttagtgaagggcaattttatcaagtgctactttatgaactagatgcaatccggaaagcttgtgcttctctagaaccaaactatcaaccaccagttacttttattgtggttcaaaaacgacatcatacccgattgttcgctaacaaccacagggaccggaacagcactgacagaagcgggaatattttgcctggcacagtggttgattctaaaatttgccatccgactgaatttgatttttatctctgcagccatgctggtattcaggggacaagtaggcctgctcattaccatgttttatgggatgagaacaatttcacagcagatggaattcaatccttgacgaacaatctttgctacacatatgcaaggtgcacacgatcggtgtctgttgttcctccagcatattatgcacatttagcagcatttcgagcccgattctacatggagcctgacatgcaggagaatggttcaaatggaggtggcagtgaaaatgtgaaaagagtaatgttttattgttag

SEQ ID NO: 11697 - protein, 953 aa, Vitis vinifera
MPMRQMKESSEQHLVIKTHLQNSMNPVQKPPKTAQNGKGPPSHEPQNAKPHSQTSPSSKNRGRRRGRGGRKSDQSDVFMRPSSRPCTVADKPVLAHQAGPLMGFPSSSKSLTFAPRPGYGQLGTKCIVKANHFFTELPEKDLNQYDVTITPEVSSRTVNRAIMNELVKLYKESDLGMRLPAYDGRKSLYTAGELPFAWKEFKVKLVDEEDGINGPKREREYKVVIKFVARASLHHLGQFLAGKRADAPQEALQILDIVLRELSTRRYCPVGRSFFSPDIRAPQRLGEGLESWCGFYQSIRPTQMGLSLNIDMSSAAFIEALPVIEFVGQLLGKDVLSRPLSDSDRVKIKKALRGVKVEVTHRGNVRRKYRVSGLTSQPTRELVFPVDDNSTMKSVVEYFQEMYGFTIQHAHLPCLQVGNQKKANYLPLEACKIVEGQRYTKRLNERQITALLKVTCQRPRDQENDILQTVQHNAYDQDPYAKEFGIKISEKLASVEARILPAPWLKYHETGKEKDCLPQVGQWNMMNKKMINGMTVSRWACINFSRSVQESVARGFCNELAQMCQVSGMEFNPEPVIPIYMARPDQVEKALKHVYHASMNKLKGKELELLLAILPDNNGSLYGDLKRICETDLGLISQCCLTKHVFKISKQYLANVSLKINVKMGGRNTVLLDAISCRIPLVSDIPTIIFGADVTHPENGEDSSPSIAAVVASQDWPEVTKYAGLVCAQAHRQELIQDLYKTWHDPVRGTVSGGMIRDLLVSFRKATGQKPLRIIFYRDGVSEGQFYQVLLYELDAIRKACASLEPNYQPPVTFIVVQKRHHTRLFANNHRDRNSTDRSGNILPGTVVDSKICHPTEFDFYLCSHAGIQGTSRPAHYHVLWDENNFTADGIQSLTNNLCYTYARCTRSVSVVPPAYYAHLAAFRARFYMEPDMQENGSNGGGSENVKRVMFYC

SEQ ID NO: 11698 - DNA, 3117 bp, Vitis vinifera
  CDS (1)..(3117)
atggttaggaagaggagaactgaacttcccactgccagcagtggggagagctcggagtccactcaggaagctagtggagctagtggagggggtagaggttgggctcctcaatcacaacaaagcgggcgcggtgggtatgcaggtggccggggtcctcagcgtggtggaatggctccacaacagcaatacactgtcccgactgaatatcaaggtcggggtcgtggaggaggagcaccacctcagcaacctcctgcagcagctgctgcttatgagtctggaagcagaagccgagctcgtgtgggtggtggccgtggggtagagccagtgtcttctggtggccctccttctaagccgttaagttccgatctgcaccaagctacgcaggcgagttatgcagccgggggaactcctcatcgcgttccctctgaagccagttcatcacgtcaggctgctgagtctttgacacagcagctacagaaggtttctatccagcaggaggtgcctcccagccaggcaattcagcctgtcgctccctccagcaaatcaatgaggtttcctcttcgaccaggcaagggagttactggtaagaagtgtatagtcaaggctaatcacttctttgctgaacttccagataaagatttacaccagtatgatgtgtcaattaatccggaggttacatcaaggggggtgaaccgtgctgtgatggaacagctggtgaaattgtaccgggagtcacatcttggaaagcgactccctgcctacgatggaaggaaaagtctgtatactgctgggccgcttcctttcatttcaaaagagtttatgataactctcatagatgaagatgatggaacaggcgcccccaggagagagagggaattcaaagttgtgatcaaactggctgcacgtgctgatctacaccatttaggactgttcttacaggggaggcaagctgatgctccccaagaagctcttcaggttcttgacattgttttgcgcgagttgcctacaactaggtactgtcccgtggggcgatcattttattctcctgatctagggagaaggcagccattgggtgagggtttggaaagttggcgtggtttctatcagagtattcggccaactcagatgggactgtcactgaatattgatatgtcctcgactgcttttattgagccattgcctgtcattgattttgtgacacagcttctgaatcgggatgtttcttcccgaccattatctgatgctgatcgtgtaaagattaagaaggctctcagaggagtcaaagttgaagttactcatcggggaaatatgcgcagaaaatatcgtatatctggcttaacatcacaagcaacacgtgaattgacttttcctgttgatgatagaggaaccatgaaatctgtcgttgagtacttctatgaaacatatgggtttgtcattcagcattctcaatggccttgtctgcaagtgggaaatcaacagaggccaaattatttgcctatggaggtttgcaagattgttgaaggccaaagatattccaagaggttgaatgagaggcagattactgctttactgaaggtgacttgtcagcgtcctcaagaaagggagcatgacataatgcagacggttcaccataatgcttatcatgaggatccttatgctaaggagtttggtatcaaaatcagtgagaagctcgcttcagttgaagctcgcattttacctgctccatggcttaaataccatgatacgggaagggaaaaggattgtctgcctcaagttggccagtggaatatgatgaataagaaaatggtcaatggtggaactgtcaacaattggatttgcataaatttttcacgtggagtacaagagagtgtggctcgtgggttctgtcaggagcttgcacaaatgtgttatatttctggcatggcatttaatccggaaccagtacttccaccaattactgcacgtcctgatcaggtggagagagttttgaaggcaaggtttcatgaagccatgaccaaactccagccacagggcaaggagcttgatttgcttattgttattttgccagataataatggttcactctatggtgatttgaaacgaatctgtgagacagatcttgggcttgtttcacagtgttgcttacataaacatgtgtatagaatgagtaagcaatatctggcaaatgtggcattgaagattaatgtaaaggttggagggagaaatacggtgcttgttgatgcaatatcaaggcgcatacctctggtcagtgatcggcctactatcatttttggggctgatgttacccatcctcacccaggagaggattcaagcccatctattgctgctgttgtcgcctctcaagattggcccgagattacaaaatatgctggtttggtttgtgctcaggcccatcgacaggagctcatccaagatctttataagacttggcaggatcctgtaagaggaactgtgtctggtggaatgatcaaagaactgcttatatctttccgtagagcaactgggcagaaacctcagcgcataatattctatagggatggggtcagtgaagggcagttctatcaagtcttactatatgaacttgatgctattcgtaaggcatgtgcatctttggagccaaactatcagcctcctgtgacatttgttgtggttcagaaacgccatcatactagattgtttgcgaacaaccataatgaccggaatgcagttgacaagagtgggaatatattacctggtactgttgtagattctaagatctgccatcctactgagtttgacttttacctgtgcagccatgctggcattcagggcacaagccgacctgcccattaccatgtgttgtgggatgaaaacaagttcacagctgatgggctgcagtccctcacaaacaacctctgctacacatatgctaggtgcacacgctctgtttccatcgtgccccctgcatactatgctcatctggctgctttccgagcacgcttctatatggagccagagacatcagatagtgggtcaatgacaagcggtgctgctgctgccgttagacccctcccggccctcaaggagaatgtcaagagggtcatgttttactgttag

SEQ ID NO: 11699 - protein, 1038 aa, Vitis vinifera
MVRKRRTELPTASSGESSESTQEASGASGGGRGWAPQSQQSGRGGYAGGRGPQRGGMAPQQQYTVPTEYQGRGRGGGAPPQQPPAAAAAYESGSRSRARVGGGRGVEPVSSGGPPSKPLSSDLHQATQASYAAGGTPHRVPSEASSSRQAAESLTQQLQKVSIQQEVPPSQAIQPVAPSSKSMRFPLRPGKGVTGKKCIVKANHFFAELPDKDLHQYDVSINPEVTSRGVNRAVMEQLVKLYRESHLGKRLPAYDGRKSLYTAGPLPFISKEFMITLIDEDDGTGAPRREREFKVVIKLAARADLHHLGLFLQGRQADAPQEALQVLDIVLRELPTTRYCPVGRSFYSPDLGRRQPLGEGLESWRGFYQSIRPTQMGLSLNIDMSSTAFIEPLPVIDFVTQLLNRDVSSRPLSDADRVKIKKALRGVKVEVTHRGNMRRKYRISGLTSQATRELTFPVDDRGTMKSVVEYFYETYGFVIQHSQWPCLQVGNQQRPNYLPMEVCKIVEGQRYSKRLNERQITALLKVTCQRPQEREHDIMQTVHHNAYHEDPYAKEFGIKISEKLASVEARILPAPWLKYHDTGREKDCLPQVGQWNMMNKKMVNGGTVNNWICINFSRGVQESVARGFCQELAQMCYISGMAFNPEPVLPPITARPDQVERVLKARFHEAMTKLQPQGKELDLLIVILPDNNGSLYGDLKRICETDLGLVSQCCLHKHVYRMSKQYLANVALKINVKVGGRNTVLVDAISRRIPLVSDRPTIIFGADVTHPHPGEDSSPSIAAVVASQDWPEITKYAGLVCAQAHRQELIQDLYKTWQDPVRGTVSGGMIKELLISFRRATGQKPQRIIFYRDGVSEGQFYQVLLYELDAIRKACASLEPNYQPPVTFVVVQKRHHTRLFANNHNDRNAVDKSGNILPGTVVDSKICHPTEFDFYLCSHAGIQGTSRPAHYHVLWDENKFTADGLQSLTNNLCYTYARCTRSVSIVPPAYYAHLAAFRARFYMEPETSDSGSMTSGAAAAVRPLPALKENVKRVMFYC

SEQ ID NO: 11700 - DNA, 2646 bp, Vitis vinifera
  CDS (1)..(2646)
atggaatcccagaagccgccaaatgctgaacctgctaagagatcatcatcaattccaaatcgactcccaatggcaagacgtggacttgggagaaccggcgaaactatacaacttgtaaccaaccatttcaaagtttccatgcactccaatgcgaacactggtgcccacttctaccaatataatgtatctctggctcatgaagatgggcacccggctgatgccaaagatattggcagaaaagttatggacaaagttcatgagacttatcacactgagatggctggtatgagctttgcctatgatggcgagaagagtttgtttacaattggctctcttccaagcaaaaagctccgattcacggttgtcttggaggatgcatcatcaaataggtataaatgcacattccctgatgatgggagtgaccgaaaaagatcaaggcgtccctaccattccaaaacattcaatgtggagattagttttgcagccaaattcccaatggattccattgtaagggcatcatacggccagccatcaaagcacctccaggacgccgctcgggttttagacatcatactaaggcagcatgcagcaaagaagggctgccttgttgtccgacagtcattttttgacaatctacctaggaatttcacacctttgggaggtggtgttcttggatgtcgaggtttcaattcaagcttcagagctactcaagggggtctattcttgaatatggatgtctctaccacactggtcatacagcctgatccagtgagagattttctcgtctctaatcaaaatgttaaagacatgtatcacattgactggagcaaggccaaaaggatgctaaaaaatctgagggtcaaaactttacactccaatgcagagtggaaaatcagtggattgagtgagaggacctgcagaaatcaaaccttcttaatgaaacaaagaaatgaagggccggatggggatgaagtccgaagtgttgaagtaacagtttatgactattttgtcaaacatcgaaaaataagtttacagtattctggggattttccatgcatcaacgttgggagatcaaagcaccccgtctatattcctctcgagctttgcacattggtttccttgcaacgctataccaagccattgtctactcagcagagatcttcacttgtggagaaatcacgacaaaagcctcaagaacggatgcgagcattaaaaagcaacaagtatgatgcaaacccaatgctccgttcttctggaatttcaattagtactcaatttacacaagttgaaggccgtatcttgccgactccaagtttgaaatcaggcaatgggcaggacttgtcacctcgaaacggaaggtggaacttcaacaataaggtgctgtctcaaccaacaaagattgacccttggcttattgcaagcttctcatcacgctgtaatatgaaaacactgattcaggatctcattaagtgtgcaaaaatgaaaggaatttccatgggatatccggctgaaatttttacagagaatcctcaatatatgcgacaaccagctcctgttagagtggacaagatgattggcactatgatgtcacaattcagacgtttgccccagtttattctttgtattcttccacagaagaagaactgcgacatctatggtccatggaaacggcaatgcctttcaggttgtggagttcccatacagtgcattgcaccatctacaccagtagtgaatgatcaatacctcactaatgtgttgttaaaaatcaatgccaagcttgggggtttgaattctttgttaactatgggatattgtccatcccttcatttgatttcaacgatacccactttaatccttggaatggatgtgtcccatggctctcctggtcggcctgatgtgccgtctattgctgcggtggtaagttccaggcattggccatcgatttctcaatatagagctacagtccgtacacagtctcccaaacttgagatgatagattctctattcgagcctctgcctaattccaaagatagtggcataatcaggggcaccctgttggacttctataaaacttcagcaaaaaggaagcctgaacacataatcattttcagggatggagtcggtgaatcgcaattcaaccaagtcttgaacattgaactggaacaaataattgaggcctgcaaactcctggatgagcaatggcatccaaagttcatggtgattattgcacagaagaatcaccatataagattcttccagaatggatccccgtctaatgttcctcccgggacaatcgtggacaacacaatatgtcatccaagaaacaatgatttctatttgtgtgcacatgctgggatgattgggacaagccggcctacgcattaccatgtattgctggatgagcttggcttttcagcagatgacttgcagcaacttgtgcattccttgtgttacgtatatcagaggagcaccacggctgtatctctagtggccccagtatgctatgctcacctggctgcagcccaagttgcccagtttatcaagtttgaggacttgccggagtcatcctctggtcatgctgctgctccagtaccacagttgccctccttccatgagaaggtcgctgatactatgttcttttgctaa

SEQ ID NO: 11701 - protein, 881 aa, Vitis vinifera
MESQKPPNAEPAKRSSSIPNRLPMARRGLGRTGETIQLVTNHFKVSMHSNANTGAHFYQYNVSLAHEDGHPADAKDIGRKVMDKVHETYHTEMAGMSFAYDGEKSLFTIGSLPSKKLRFTVVLEDASSNRYKCTFPDDGSDRKRSRRPYHSKTFNVEISFAAKFPMDSIVRASYGQPSKHLQDAARVLDIILRQHAAKKGCLVVRQSFFDNLPRNFTPLGGGVLGCRGFNSSFRATQGGLFLNMDVSTTLVIQPDPVRDFLVSNQNVKDMYHIDWSKAKRMLKNLRVKTLHSNAEWKISGLSERTCRNQTFLMKQRNEGPDGDEVRSVEVTVYDYFVKHRKISLQYSGDFPCINVGRSKHPVYIPLELCTLVSLQRYTKPLSTQQRSSLVEKSRQKPQERMRALKSNKYDANPMLRSSGISISTQFTQVEGRILPTPSLKSGNGQDLSPRNGRWNFNNKVLSQPTKIDPWLIASFSSRCNMKTLIQDLIKCAKMKGISMGYPAEIFTENPQYMRQPAPVRVDKMIGTMMSQFRRLPQFILCILPQKKNCDIYGPWKRQCLSGCGVPIQCIAPSTPVVNDQYLTNVLLKINAKLGGLNSLLTMGYCPSLHLISTIPTLILGMDVSHGSPGRPDVPSIAAVVSSRHWPSISQYRATVRTQSPKLEMIDSLFEPLPNSKDSGIIRGTLLDFYKTSAKRKPEHIIIFRDGVGESQFNQVLNIELEQIIEACKLLDEQWHPKFMVIIAQKNHHIRFFQNGSPSNVPPGTIVDNTICHPRNNDFYLCAHAGMIGTSRPTHYHVLLDELGFSADDLQQLVHSLCYVYQRSTTAVSLVAPVCYAHLAAAQVAQFIKFEDLPESSSGHAAAPVPQLPSFHEKVADTMFFC

SEQ ID NO: 11702 - DNA, 2829 bp, Penaeus japonicus
  CDS (1)..(2829)
atgtaccctgttgggcagccacctggtcctcctggcccacccggtccctcgggtccgggtggacccccaggaccagctggccccccagtgccccgacccttaactctaccgccaggacccacgccggtccccggcccaatcactaccattgtaccacaggcccctggtacgccagctgtggcaactgggacaggcatgactgccctcttaccgccagaactacctaacacaccagcttttgtagcaccaagaagaccgaatctcgggcgagaaggtcgacccatcacgttgcgggctaatcacttccagatctctatgccaagaggttacattcatcactatgatattagtattaccccagacaaatgcccgcgcaaagtcaaccgggaaattattgagacgatggttcatgctttcccaagaatttttggcactctaaagcctgtctttgatgggagaagcaatttatacaccagagatcccctgcccattggtaatgaaaaaatggagcttgaggtgacgttaccaggggaaggacgtgacagggtgtttaaggtagcgatgaaatggttagcacaagtaaatctatatacgttagaagaagcactagaaggacgaacgcgaaccattccgtatgacgcaatacaggcactagatgttgtgatgcgtcatctgccatccatgacatacacaccagtgggcaggtcctttttctcggctccagatggctattatcaccccctgggaggtggaagagaagtgtggtttggcttccatcaaagtgtaaggccttcacaatggaagatgatgcttaacattgacgtgtcagctacagcgttttacaaggcccaggcagtaatagagtttatgtgtgaagtattagatattcgagaaataggtgagcaacggaagcctctaacggattcccaacgtgtcaagttcacaaaggaaatcaaaggtctgaagattgagatcacacactgtggtgcgatgcgaagaaagtacagggtgtgtaatgtcaccagaagaccagcacagatgcagtcgttcccattgcagctagagaatggtcagactgtggaatgtactgttgcaaaatatttccttgacaaatacaaaatgaaactcaggttcccccatctaccttgccttcaggtgggacaagaacacaaacacacataccttcctctggaagtatgcaacattgtacctggacagcgatgcatcaagaaactaacagacatgcagacatctaccatgatcaaggcaacagctcgatctgcacctgacagggagagagagatcaacaatctggtccgaaaggcggacttcaacaatgacccatacatgcaagaatttggtctgacgatcagtacagctatgatggaggtccgtggccgtgtcctcccacccccaaagctccaatatggagggcgaacaaagcagcaagcattgcccaaccagggggtttgggacatgagggggaaacagttcttcacaggggtagaaatccgcgtgtgggccgttgcatgcttcgccccacagcgcacagtgagagaagatgcgctgcgcaattttacacagcaactgcaaaagattagtaatgatgctggcatgcccatcattggccagccgtgcttctgcaagtatgccaacggtcctgaccaggtagagcccatgttccgttacctgaagagcacattcaccggtctgcagcttgtatgtgttgttctaccaggcaaaactcctgtctatgctgaagtgaagcgcgtgggtgacactgtcttaggaatggccacacagtgtgtccaggccaagaatgtgaacaaaacctcaccgcaaacattgtccaacctctgtctcaaaataaatgtgaagttgggaggcatcaactccattcttgttccaggcatcagaccaaaagtgttcaatgagcctgtgatcttcctgggtgctgatgtaactcatccaccagcgggtgataataagaagccgtccattgcagccgtagtaggatctatggatgctcatccatcacgctatgctgcaactgtccgggtccagcagcacagacagaatggatcaacaacacaaggccaaagtgccagtgacggctcgcgacccagacaactgactttcgcgaggacggcacatgacgaggtgatccaggagctgtcgtctatggtgaaggagttgctgatccagttctacaagtcaacaaggttcaagcccaacaggatcattctgtatcgggatggtgtcagcgaaggacagttccagaccgtgctccagcatgagttgactgccatgagagaggcttgcataaagttggaagcggactacaagcctggtatcacttacattgctgtgcagaagagacatcataccagattgttctgctctgacaagaaagagcagagtggcaagagtggtaatattcctgcaggtacaactgttgatgtgggtatcacacatccaactgagtttgacttctacctctgctctcatcagggcatccagggaacaagtcgtcccagtcactaccatgtactgtgggatgataaccacttcgacagtgatgagctgcagtgcctgacttaccagttgtgtcatacctatgtaagatgtacacgatcagtctccatacctgctccagcctattatgctcacttggtagcctttagggctcgttatcatctcgtcgaaaaggagcacgacagtggagaggggtcacaccaatctggcaacagtgaggatcgcacaccatctgccatggcaagggcagttacggtgcatgtggacacgaacagagtcatgtactttgcttaa

SEQ ID NO: 11703 - protein, 942 aa, Penaeus japonicus
MYPVGQPPGPPGPPGPSGPGGPPGPAGPPVPRPLTLPPGPTPVPGPITTIVPQAPGTPAVATGTGMTALLPPELPNTPAFVAPRRPNLGREGRPITLRANHFQISMPRGYIHHYDISITPDKCPRKVNREIIETMVHAFPRIFGTLKPVFDGRSNLYTRDPLPIGNEKMELEVTLPGEGRDRVFKVAMKWLAQVNLYTLEEALEGRTRTIPYDAIQALDVVMRHLPSMTYTPVGRSFFSAPDGYYHPLGGGREVWFGFHQSVRPSQWKMMLNIDVSATAFYKAQAVIEFMCEVLDIREIGEQRKPLTDSQRVKFTKEIKGLKIEITHCGAMRRKYRVCNVTRRPAQMQSFPLQLENGQTVECTVAKYFLDKYKMKLRFPHLPCLQVGQEHKHTYLPLEVCNIVPGQRCIKKLTDMQTSTMIKATARSAPDREREINNLVRKADFNNDPYMQEFGLTISTAMMEVRGRVLPPPKLQYGGRTKQQALPNQGVWDMRGKQFFTGVEIRVWAVACFAPQRTVREDALRNFTQQLQKISNDAGMPIIGQPCFCKYANGPDQVEPMFRYLKSTFTGLQLVCVVLPGKTPVYAEVKRVGDTVLGMATQCVQAKNVNKTSPQTLSNLCLKINVKLGGINSILVPGIRPKVFNEPVIFLGADVTHPPAGDNKKPSIAAVVGSMDAHPSRYAATVRVQQHRQNGSTTQGQSASDGSRPRQLTFARTAHDEVIQELSSMVKELLIQFYKSTRFKPNRIILYRDGVSEGQFQTVLQHELTAMREACIKLEADYKPGITYIAVQKRHHTRLFCSDKKEQSGKSGNIPAGTTVDVGITHPTEFDFYLCSHQGIQGTSRPSHYHVLWDDNHFDSDELQCLTYQLCHTYVRCTRSVSIPAPAYYAHLVAFRARYHLVEKEHDSGEGSHQSGNSEDRTPSAMARAVTVHVDTNRVMYFA

SEQ ID NO: 11704 - DNA, 2820 bp, Penaeus japonicus
  CDS (1)..(2820)
atgtaccctgttgggcagccacctggtcctcctggcccacccggtccctcgggtccgggtggacccccaggaccagctggccccccagtgccccgacccttaactctaccgccaggacccacgccggtccccggcccaatcactaccattgtaccacaggcccctggtacgccagctgtggcaactgggacaggcatgactgccctcttaccgccagaactacctacttttgtagcaccaagaagaccgaatctcgggcgagaaggtcgacccatcacgttgcgggctaatcacttccagatctctatgccaagaggttacattcatcactatgatattagtattaccccagacaaatgcccgcgcaaagtcaaccgggaaattattgagacgatggttcatgctttcccaagaatttttggcactctaaagcctgtctttgatgggagaagcaatttatacaccagagatcccctgcccattggtaatgaaaaaatggagcttgaggtgacgttaccaggggaaggacgtgacagggtgtttaaggtagcgatgaaatggttagcacaagtaaatctatatacgttagaagaagcactagaaggacgaacgcgaaccattccgtatgacgcaatacaggcactagatgttgtgatgcgtcatctgccatccatgacatacacaccagtgggcaggtcctttttctcggctccagatggctattatcaccccctgggaggtggaagagaagtgtggtttggcttccatcaaagtgtaaggccttcacaatggaagatgatgcttaacattgacgtgtcagctacagcgttttacaaggcccaggcagtaatagagtttatgtgtgaagtattagatattcgagaaataggtgagcaacggaagcctctaacggattcccaacgtgtcaagttcacaaaggaaatcaaaggtctgaagattgagatcacacactgtggtgcgatgcgaagaaagtacagggtgtgtaatgtcaccagaagaccagcacagatgcagtcgttcccattgcagctagagaatggtcagactgtggaatgtactgttgcaaaatatttccttgacaaatacaaaatgaaactcaggttcccccatctaccttgccttcaggtgggacaagaacacaaacacacataccttcctctggaagtatgcaacattgtacctggacagcgatgcatcaagaaactaacagacatgcagacatctaccatgatcaaggcaacagctcgatctgcacctgacagggagagagagatcaacaatctggtccgaaaggcggacttcaacaatgacccatacatgcaagaatttggtctgacgatcagtacagctatgatggaggtccgtggccgtgtcctcccacccccaaagctccaatatggagggcgaacaaagcagcaagcattgcccaaccagggggtttgggacatgagggggaaacagttcttcacaggggtagaaatccgcgtgtgggccgttgcatgcttcgccccacagcgcacagtgagagaagatgcgctgcgcaattttacacagcaactgcaaaagattagtaatgatgctggcatgcccatcattggccagccgtgcttctgcaagtatgccaacggtcctgaccaggtagagcccatgttccgttacctgaagagcacattcaccggtctgcagcttgtatgtgttgttctaccaggcaaaactcctgtctatgctgaagtgaagcgcgtgggtgacactgtcttaggaatggccacacagtgtgtccaggccaagaatgtgaacaaaacctcaccgcaaacattgtccaacctctgtctcaaaataaatgtgaagttgggaggcatcaactccattcttgttccaggcatcagaccaaaagtgttcaatgagcctgtgatcttcctgggtgctgatgtaactcatccaccagcgggtgataataagaagccgtccattgcagccgtagtaggatctatggatgctcatccatcacgctatgctgcaactgtccgggtccagcagcacagacagaatggatcaacaacacaaggccaaagtgccagtgacggctcgcgacccagacaactgactttcgcgaggacggcacatgacgaggtgatccaggagctgtcgtctatggtgaaggagttgctgatccagttctacaagtcaacaaggttcaagcccaacaggatcattctgtatcgggatggtgtcagcgaaggacagttccagaccgtgctccagcatgagttgactgccatgagagaggcttgcataaagttggaagcggactacaagcctggtatcacttacattgctgtgcagaagagacatcataccagattgttctgctctgacaagaaagagcagagtggcaagagtggtaatattcctgcaggtacaactgttgatgtgggtatcacacatccaactgagtttgacttctacctctgctctcatcagggcatccagggaacaagtcgtcccagtcactaccatgtactgtgggatgataaccacttcgacagtgatgagctgcagtgcctgacttaccagttgtgtcatacctatgtaagatgtacacgatcagtctccatacctgctccagcctattatgctcacttggtagcctttagggctcgttatcatctcgtcgaaaaggagcacgacagtggagaggggtcacaccaatctggcaacagtgaggatcgcacaccatctgccatggcaagggcagttacggtgcatgtggacacgaacagagtcatgtactttgcttaa

SEQ ID NO: 11705 - protein, 939 aa, Penaeus japonicus
MYPVGQPPGPPGPPGPSGPGGPPGPAGPPVPRPLTLPPGPTPVPGPITTIVPQAPGTPAVATGTGMTALLPPELPTFVAPRRPNLGREGRPITLRANHFQISMPRGYIHHYDISITPDKCPRKVNREIIETMVHAFPRIFGTLKPVFDGRSNLYTRDPLPIGNEKMELEVTLPGEGRDRVFKVAMKWLAQVNLYTLEEALEGRTRTIPYDAIQALDVVMRHLPSMTYTPVGRSFFSAPDGYYHPLGGGREVWFGFHQSVRPSQWKMMLNIDVSATAFYKAQAVIEFMCEVLDIREIGEQRKPLTDSQRVKFTKEIKGLKIEITHCGAMRRKYRVCNVTRRPAQMQSFPLQLENGQTVECTVAKYFLDKYKMKLRFPHLPCLQVGQEHKHTYLPLEVCNIVPGQRCIKKLTDMQTSTMIKATARSAPDREREINNLVRKADFNNDPYMQEFGLTISTAMMEVRGRVLPPPKLQYGGRTKQQALPNQGVWDMRGKQFFTGVEIRVWAVACFAPQRTVREDALRNFTQQLQKISNDAGMPIIGQPCFCKYANGPDQVEPMFRYLKSTFTGLQLVCVVLPGKTPVYAEVKRVGDTVLGMATQCVQAKNVNKTSPQTLSNLCLKINVKLGGINSILVPGIRPKVFNEPVIFLGADVTHPPAGDNKKPSIAAVVGSMDAHPSRYAATVRVQQHRQNGSTTQGQSASDGSRPRQLTFARTAHDEVIQELSSMVKELLIQFYKSTRFKPNRIILYRDGVSEGQFQTVLQHELTAMREACIKLEADYKPGITYIAVQKRHHTRLFCSDKKEQSGKSGNIPAGTTVDVGITHPTEFDFYLCSHQGIQGTSRPSHYHVLWDDNHFDSDELQCLTYQLCHTYVRCTRSVSIPAPAYYAHLVAFRARYHLVEKEHDSGEGSHQSGNSEDRTPSAMARAVTVHVDTNRVMYFA

SEQ ID NO: 11706 - DNA, 2829 bp, Penaeus japonicus
  CDS (1)..(2829)
atgtaccctgtcgggcagccacctggtcctcctggcccacccggtccctcgggtccgggtggacccccaggaccagctggccccccagtgccccgacccttaactctaccgccaggacccacgccggtccccggcccaatcactaccattgtaccacaggcccctggtacgccagctgtggcaactgggacaggcatgactgccctcttaccgccagaactacctaacacaccagcttttgtagcaccaagaagaccgaatctcgggcgagaaggtcgacccatcacgttgcgggctaatcacttccagatctctatgccaagaggttacattcatcactatgatattagtattaccccagacaaatgcccgcgcaaagtcaaccgggaaattattgagacgatggttcatgctttcccaagaatttttggcactctaaagcctgtctttgatgggagaagcaatttatacaccagagatcccctgcccattggtaatgaaaaaatggagcttgaggtgacgttaccaggggaaggacgtgacagggtgtttaaggtagcgatgaaatggttagcacaagtaaatctatatacgttagaagaagcactagaaggacgaacgcgaaccattccgtatgacgcaatacaggcactagatgttgtgatgcgtcatctgccatccatgacatacacaccagtgggcaggtcctttttctcggctccagatggctattatcaccccttgggaggtggaagagaagtgtggtttggcttccatcaaagtgtaaggccttcacaatggaagatgatgcttaacattgacgtgtcagctacagcgttttacaaggcccaggcagtaatagagtttatgtgtgaagtattagatattcgagaaataggtgagcaacggaagcctctaacggattcccaacgtgtcaagttcacaaaggaaatcaaaggtctgaagattgagatcacacactgtggtgcgatgcgaagaaagtacagggtgtgtaatgtcaccagaagaccagcacagatgcagtcgttcccattgcagctagagaatggtcagactgtggaatgtactgttgcaaaatatttccttgacaaatacaaaatgaaactcaggttcccccatctaccttgccttcaggtgggacaagaacacaaacacacataccttcctctggaagtatgcaacattgtacctggacagcgatgcatcaagaaactaacagacatgcagacatctaccatgatcaaggcaacagctcgatctgcacctgacagggagagagagatcaacaatctggtccgaaaggcggacttcaacaatgacccatacatgcaagaatttggtctgacgatcagtacagctatgatggaggtccgtggccgtgtcctcccacccccaaagctccaatatggagggcgaacaaagcagcaagcattgcccaaccagggggtttgggacatgagggggaaacagttcttcacaggggtggaggtccgcgtgtgggccgttgcgtgcttcgccccacagcgcacagtgagagaagatgcgctgcgcaattttacacagcaactgcaaaagattagtaatgatgctggcatgcccatcattggccagccgtgcttctgcaagtatgccaacggtcctgaccaggtagagcccatgttccgttacctgaagagcacattcaccggtctgcagcttgtatgtgttgttctaccaggcaaaactcctgtctatgctgaagtgaagcgcgtgggtgacactgtcttaggaatggccacacagtgtgtccaggccaagaatgtgaacaaaacctcaccgcaaacattgtccaacctctgtctcaaaataaatgtgaagttgggaggcatcaactccattcttgttccaggcatcagaccaaaagtgttcaatgagcctgtgatcttcctgggtgctgatgtaactcatccaccagcgggtgataataagaagccgtccattgcagccgtagtaggatctatggatgctcatccatcacgctatgctgcaactgtccgggtccagcagcacagacagaatggatcaacaacacaaggccaaagtgccagtgacggctcgcgacccagacaactgactttcgcgaggacggcacatgacgaggtgatccaggagctgtcgtctatggtgaaggagttgctgatccagttctacaagtcaacaaggttcaagcccaacaggatcattctgtatcgggatggtgtgagcgagggacagttccagaccgtgctccagcatgagttgactgccatgagagaggcttgcataaagttggaagcggactacaagcctggtatcacttacattgctgtgcagaagagacatcataccagattgttctgctctgacaagaaagagcagagtggcaagagtggtaatattcctgcaggtacaactgttgatgtgggtatcacacatccaactgagtttgacttctacctctgctctcatcagggcatccagggaacaagtcgtcccagtcactaccatgtactgtgggatgataaccacttcgacagtgatgagctgcagtgcctgacttaccagttgtgtcatacctatgtaagatgtacacgatcagtctccatacctgctccagcctattatgctcacttggtagcctttagggctcgttatcatctcgtcgaaaaggagcacgacagtggagaggggtcacaccaatctggcaacagtgaggatcgcacaccatctgccatggcaagggcagttacggtgcatgtggacacgaacagagtcatgtactttgcttaa

SEQ ID NO: 11707 - protein, 942 aa, Penaeus japonicus
MYPVGQPPGPPGPPGPSGPGGPPGPAGPPVPRPLTLPPGPTPVPGPITTIVPQAPGTPAVATGTGMTALLPPELPNTPAFVAPRRPNLGREGRPITLRANHFQISMPRGYIHHYDISITPDKCPRKVNREIIETMVHAFPRIFGTLKPVFDGRSNLYTRDPLPIGNEKMELEVTLPGEGRDRVFKVAMKWLAQVNLYTLEEALEGRTRTIPYDAIQALDVVMRHLPSMTYTPVGRSFFSAPDGYYHPLGGGREVWFGFHQSVRPSQWKMMLNIDVSATAFYKAQAVIEFMCEVLDIREIGEQRKPLTDSQRVKFTKEIKGLKIEITHCGAMRRKYRVCNVTRRPAQMQSFPLQLENGQTVECTVAKYFLDKYKMKLRFPHLPCLQVGQEHKHTYLPLEVCNIVPGQRCIKKLTDMQTSTMIKATARSAPDREREINNLVRKADFNNDPYMQEFGLTISTAMMEVRGRVLPPPKLQYGGRTKQQALPNQGVWDMRGKQFFTGVEVRVWAVACFAPQRTVREDALRNFTQQLQKISNDAGMPIIGQPCFCKYANGPDQVEPMFRYLKSTFTGLQLVCVVLPGKTPVYAEVKRVGDTVLGMATQCVQAKNVNKTSPQTLSNLCLKINVKLGGINSILVPGIRPKVFNEPVIFLGADVTHPPAGDNKKPSIAAVVGSMDAHPSRYAATVRVQQHRQNGSTTQGQSASDGSRPRQLTFARTAHDEVIQELSSMVKELLIQFYKSTRFKPNRIILYRDGVSEGQFQTVLQHELTAMREACIKLEADYKPGITYIAVQKRHHTRLFCSDKKEQSGKSGNIPAGTTVDVGITHPTEFDFYLCSHQGIQGTSRPSHYHVLWDDNHFDSDELQCLTYQLCHTYVRCTRSVSIPAPAYYAHLVAFRARYHLVEKEHDSGEGSHQSGNSEDRTPSAMARAVTVHVDTNRVMYFA

SEQ ID NO: 11708 - DNA, 3063 bp, Lotus japonicus
  CDS (1)..(3063)
atggaagagacagaggattccaccaatgctacccagaaactcaccacaaaaacaagaagcttcatcaatggagccaactctcatgagcatcaccactatcatcagcatcatcatctgctacagtactcagctcaggttggcttctgcaacaacaacaaccagaacaagtatcagaggtactacccagcacttcttcctctaccttctcttatacctcttcaacaactacctctgattccacccttccctcaaaaccagagcatcaattcaaaaacccatttgcagaaacctccatgcaaactcaattgttctccttcttcggattacaagctctctgaaccagctcttgctcctgattcagccccaaaggaacttcagcggcaaactaaggaatcctttaaaggagatgatgggaggaaactcattccaacaaggaagcaacaggacttaattgttgcaaggaggccagactcaggtggaaaagaaggttctgtgatctctctccttgccaaccactttttggtgcagtttgatccatcccaaaaaatttatcattacaatgttgaaattactcctcatccctccaaggatgtggcaagggaaatcaaacagaaattggtaaataacaattctgctatgctctcgggtgctctgccggcatatgatgggagacagaatctttacagttcaattgaattccaaaacgataagcttgagttctacattagcctcctaatcccaacaagcaaactgacttcaccttatggagaaatgtatgacttgaaggagaagaaagaacagcataaactgttccggataaatatcaaactagtctcaaagattgatgggaaggagttaactaactacttgagcaaagagggtgatgaatggattccacttccacaggattatctacatgctttggatgtagttctgagggaaagcccgactgagaaatgcatacctgtagggagatcattctactcaaattcaatgggaagaagcaaagacattgggggaggagctgtgggattgaggggattctttcagagtcttcgaccgacccaacaaggacttgctctcaatctcgatttctcagtaactgcattccatgagagtataggagtgatttcatacttgcagaaacgcctcgagtttcttcgagacctttctcaaaggaagacaactcaattaacttgtgaagaaaggaaggaagtggagaaggcactgaagaacatcagggtctttgtttgccacagagaaacagttcagagataccgtgtctacggcttaactgaggaggctactgaaaatctttggtttgctgacagggatggacagaatctgaggcttgtgaattacttcaaagatcactataactacgacatacaattccgaaaattgccatgcttgcagattagtaggagtaaaccttgttatcttcctatggagctttgtgtgatctgcgaaggccagaaattcctcgggaaactgtcggatgatcagacagcaagaatactcaagatgggctgccaaagaccaggagaacgaaaaaccatcatcgaaggagtcatgagaggaaatgttgggtctaccagtggtgagcaggaaagagaattcaaactccaagtctcaagagaaatgacaaagttgactgggagaattcttcaccctcccaaactaaagcttggagatggaggtcatgtgagaaaccttactccttcacgccatgaccgtcagtggaaccttctagatggcaatgtctttgaaggaactacaattgaaaggtgggcacttgtaagctttgggggcacccctgagcagaagtctaatatccctagattcataaaccaattatgtcaaaggtgtgaacaactgggcatttttcttaataagaacacagttatgagtccccagtttgaatcaagccaggttcttaacaatgtcacacttttggaatctaagctcaagagaatccagaggactgcctcaaacaatctccagcttcttatttgtgtaatggagagaaaacacaaagggtatgcagacttgaaacggattgctgagacaagtatcggtctcataagccaatgctgcctgtacccaaatctgtgcaagttaagttcacagttcttggcaaatttggccctcaaaatcaatgccaaagttggtggatgcacagttgccctctacaactcactgccttctcaattaccacgcctctttcacatcgatgagcccgtgatattcatgggagccgatgtgactcatcctcatcctcttgatgattccagtccatctgttgctgctgttgttggtagcatgaattggccaacagcaaacaagtacatttcaagaataaggtcccaaacacacagacaagaaattatccaggatcttggtccaatggtgggggaattgcttgatgatttttatcaggaggtagagaaactccccaaccgaatagttttctttagagacggagttagcgaaacacaatttcacaaagtgatgcaagaggaactgcaatccataagacacgcatgtgaaaggtttcctgattataaacctctcattacctttgcagttgtgcagaagaggcatcacacaaggttgtttccctttcccggtgaaactgatccgtcttcccctcagaataactttttatacgaaaacattcctcccgggaccgtggtcgattcagtgattactcatccgaaggaatttgatttctatctctgtagtcattggggtgtgaaaggaacaagcagaccaactcattaccatgtcttgtgggatgaaaaccagtttacttctgatgagcttcagaagctggtttacaatttgtgctacacttttgttaggtgtacaaagccaatttctttggtgcctcctgcatattatgcacatttagctgcatacagaggaagactttaccttgagcgatcagagtccttaggtttgttcagaaacacatctacattatcaagagctgctcctccaaagacagcaccacttcctaaacttagtgaaaacatcaagaagctcatgttctactgctag

SEQ ID NO: 11709 - protein, 1020 aa, Lotus japonicus
MEETEDSTNATQKLTTKTRSFINGANSHEHHHYHQHHHLLQYSAQVGFCNNNNQNKYQRYYPALLPLPSLIPLQQLPLIPPFPQNQSINSKTHLQKPPCKLNCSPSSDYKLSEPALAPDSAPKELQRQTKESFKGDDGRKLIPTRKQQDLIVARRPDSGGKEGSVISLLANHFLVQFDPSQKIYHYNVEITPHPSKDVAREIKQKLVNNNSAMLSGALPAYDGRQNLYSSIEFQNDKLEFYISLLIPTSKLTSPYGEMYDLKEKKEQHKLFRINIKLVSKIDGKELTNYLSKEGDEWIPLPQDYLHALDVVLRESPTEKCIPVGRSFYSNSMGRSKDIGGGAVGLRGFFQSLRPTQQGLALNLDFSVTAFHESIGVISYLQKRLEFLRDLSQRKTTQLTCEERKEVEKALKNIRVFVCHRETVQRYRVYGLTEEATENLWFADRDGQNLRLVNYFKDHYNYDIQFRKLPCLQISRSKPCYLPMELCVICEGQKFLGKLSDDQTARILKMGCQRPGERKTIIEGVMRGNVGSTSGEQEREFKLQVSREMTKLTGRILHPPKLKLGDGGHVRNLTPSRHDRQWNLLDGNVFEGTTIERWALVSFGGTPEQKSNIPRFINQLCQRCEQLGIFLNKNTVMSPQFESSQVLNNVTLLESKLKRIQRTASNNLQLLICVMERKHKGYADLKRIAETSIGLISQCCLYPNLCKLSSQFLANLALKINAKVGGCTVALYNSLPSQLPRLFHIDEPVIFMGADVTHPHPLDDSSPSVAAVVGSMNWPTANKYISRIRSQTHRQEIIQDLGPMVGELLDDFYQEVEKLPNRIVFFRDGVSETQFHKVMQEELQSIRHACERFPDYKPLITFAVVQKRHHTRLFPFPGETDPSSPQNNFLYENIPPGTVVDSVITHPKEFDFYLCSHWGVKGTSRPTHYHVLWDENQFTSDELQKLVYNLCYTFVRCTKPISLVPPAYYAHLAAYRGRLYLERSESLGLFRNTSTLSRAAPPKTAPLPKLSENIKKLMFYC

SEQ ID NO: 11710 - DNA, 2802 bp, Pelargonium hortorum
  CDS (1)..(2802)
  misc_feature (2019)..(2019): y is t or c
atggaatcagcactagtgccagatgttgtaaatggaaacggggaatcatcgctagagccagatgttgtaaatggaaacggaaacggggctcaggatgctttgccgcctcccccacctattattccacctgatgttgtaccggttcgtgcggatacagagcttcccctggaaccagttaagaagaaggtcttgcgagttccaattgctaggcgtggccttgcttctaagggacagaagatacctctgctcaccaatcacttcaaagtgaatgttactaatgtagaaggccattttttccactacagtgtggctttattttatgaggatggccgtccagttgatggtaagggggttggaggaaaggttattgacagggtgcaagaaacgtatgatactgaactggctggtaaagactttgcgtatgacggtgaaaagagcttatttacagtcggccccctcccacgtaataaacatgaatttattgttgtcttggaggatgtctcctccaacagggttaatgggaatgccagtccagatgcaggggatggaaatgaccgtaagagaatgcggcgtccatttcattcaaaaacatttaaagtggagattagctttgctgctaaaattcccatgcaggcaattgctaatgcactacgtggtcaggagtctgagaactctcaagaagcactaagagttctggatatcatactgaggcagcatgctgctaaacaagggtgcctccttgtacgtcaatcattcttccacaatgatgcaaaaaattttgcggatttgggtggaggtgttgttgggtgcagggggtttcattcaagtttcaggaccactcagggtggcctttctctgaacgttgatgtttcaacaaccatgatagtacaacctgggccagttgttgattttctaatagcgaatcaaaatgcacgggaccccttttcgctcgactgggccaaggccaagaggacgctgaaaaatctgaggatcaagacaagtcccgcaaataccgagtacaagataactggtctcagtgagaaaccttgcaaggagcaaatgttttccctgaagcaaaaaagtgggaacgagaatggtgaagccgagactcttgaagtgacggtgtatgattactttgttaattatcggaaaatagagcttcggtattctggagatttgccatgcattaatgtggggaagcccaagcggccaacttatttcccacttgagctctgttctttggtgtccttgcaacgttacacaaaagctctatctacttttcaaagagcttcgcttgtggagaagtcaaggcaaaagcctcaagaaaggatgcgggttttgtctgatgctttgaaaaccagcaattatgatgcagagcgcatgctacgctcatctggcatatcaatcagttctaactttactcaagttgagggccgtgtgcttcaagctccaaagttgaaagtaggcaatggggaagacttttttccacgaaacggacggtggaatttcaacaacaagaaacttgtggatcctacaaagattgaaaaatgggcagttgtgaatttttctgcacggtgtgacatacgcggacttgtacgcgatttgattaaatgcggagaaatgaaaggaattcgtgtagaggctccgtttgatgtttttgaggagtctccgcagtgcagacgtgctccaccaatggtccgtgtggagaaaatgtttgaagatatacagtctaagctgcccggagctccacagtttctactttgcctacttccggagagaaaaaattctgaactctatggtccttggaagcgaaagaacctttctgaatacgggattgttactcaatgcattgctcctactagggtcaatgatcagtatctgaccaatgttctgctgaagatcaatgcaaagcttggtggtctgaattccatgttagctattgagcattccccttctattcctatggtttcaaaggttcccaccatcattgtcgggatggatgtgtcacatggttctccyggccaatctgatgtcccatcaattgctgcggttgtcagctcaaggcagtggccatcaatatctcgctatagggcatctgtccgcacacagtcccccaaggttgagatgattgattcactatttaagaaaacatctgacacagaagatgatggcataatgagggagcttctgctggacttttacgttagttctcagaaaagaaaacctgaccagatcatcatatttagggacggtgtcagcgagtcccaattcaatcaagttctgaatattgaactagatcaaattattgaggcttgcaaatttttggatgagaagtggaaccccaagtttgtggtaattgttgctcagaagaaccaccacacaaaatttttccagccaggatcacctgataatgttccacccggaacggtcattgacaacaaagtttgtcatcctcggaacaatgatttctatctctgtgcgcaagcaggaatgattggaactacaaggcccacgcattatcatgttctgttggatgaaatgggtttctcggctgatgaccttcaagagtttgtgcattcactctcttatgtgtatcagagaagcactactgctatttctgttgttgctcccatatgctatgctcatttggcagccacacaaatgggacaatttatgaaatttgaagatacctcggagacctcgtcgagccatggcggaggagtgacaacagctggacccgtccctgtggctcaactgccccgactccaggagaaagttgctcattccatgttcttctgttga

SEQ ID NO: 11711 - protein, 933 aa, Pelargonium hortorum
MESALVPDVVNGNGESSLEPDVVNGNGNGAQDALPPPPPIIPPDVVPVRADTELPLEPVKKKVLRVPIARRGLASKGQKIPLLTNHFKVNVTNVEGHFFHYSVALFYEDGRPVDGKGVGGKVIDRVQETYDTELAGKDFAYDGEKSLFTVGPLPRNKHEFIVVLEDVSSNRVNGNASPDAGDGNDRKRMRRPFHSKTFKVEISFAAKIPMQAIANALRGQESENSQEALRVLDIILRQHAAKQGCLLVRQSFFHNDAKNFADLGGGVVGCRGFHSSFRTTQGGLSLNVDVSTTMIVQPGPVVDFLIANQNARDPFSLDWAKAKRTLKNLRIKTSPANTEYKITGLSEKPCKEQMFSLKQKSGNENGEAETLEVTVYDYFVNYRKIELRYSGDLPCINVGKPKRPTYFPLELCSLVSLQRYTKALSTFQRASLVEKSRQKPQERMRVLSDALKTSNYDAERMLRSSGISISSNFTQVEGRVLQAPKLKVGNGEDFFPRNGRWNFNNKKLVDPTKIEKWAVVNFSARCDIRGLVRDLIKCGEMKGIRVEAPFDVFEESPQCRRAPPMVRVEKMFEDIQSKLPGAPQFLLCLLPERKNSELYGPWKRKNLSEYGIVTQCIAPTRVNDQYLTNVLLKINAKLGGLNSMLAIEHSPSIPMVSKVPTIIVGMDVSHGSPGQSDVPSIAAVVSSRQWPSISRYRASVRTQSPKVEMIDSLFKKTSDTEDDGIMRELLLDFYVSSQKRKPDQIIIFRDGVSESQFNQVLNIELDQIIEACKFLDEKWNPKFVVIVAQKNHHTKFFQPGSPDNVPPGTVIDNKVCHPRNNDFYLCAQAGMIGTTRPTHYHVLLDEMGFSADDLQEFVHSLSYVYQRSTTAISVVAPICYAHLAATQMGQFMKFEDTSETSSSHGGGVTTAGPVPVAQLPRLQEKVAHSMFFC

SEQ ID NO: 11712 - DNA, 2928 bp, Brassica napus
  CDS (1)..(2928)
atgccgattaggcaaatgaaagatagctcagagactcatttactcaccaaacccaagcatctccccaaagccgtgcaaaacgctaaagcccctcctactccgagccaagcttcttcaccttctcctccgtccaagaaccgtagccggaggagaaaccgcggtggtcgaaaatcagaccaaggagatgtctgtatgaggcctagctcccgtcctcgcaaaccgccgccacagaacgctgctcctgtcgccgccgtctccggcaccgagatagtcgccgtgaaccatcagatgcaaatgggtgttcgtgggtcgagtaaaaactcaaactttgcgccgagacctgggttcggacagcttggaactaaatgcatcgtcaaagctaaccatttcctcgctgacttaccgaccaaagatctgagtcactacgatgttacaataactcctgaagtgtcatcaaaaagtgtgaacagagccatcattgctgagttagtgagactatacaaagagtctgaactcgggtcgagacttcctgcttacgacggccggaaaagtctttacaccgccggagagcttcctttcacttggaaagagttcgctgttaagatcttcgatgaagacgatggtatcatcaatggccctagaagggagagatcgtataaggtggctatcaagtttgtggcacgggccaatatgcatcacttaggcgagttcctagctggtaaacgcgcggatggaccgcaagaggcgttgcagattctcgacattgtactcagggagctgtcagttaagaggttctgtcctgtcggaagatcgttcttctcgcctgatattagaccaccgcagcgacttggtgaagggttacagtcatggtgtgggttttaccagagtattcgacctacacaaatgggtttatctcttaacatcgacatggcttcagctgcttttaccgagcctcttcctgtgatagagtttgtaccacagcttctccgggaagatgtcttgccaaagccattatctgactctgatcgtattaagatcaaaaagggtctcaggggagtgaaagtagaggtcactcatagagcaaacgtgagaaggaaataccgtgttgcgggtttaacgactcaaccgacaagggagctcatgtttccagtcgatgagaacgctacgatgaagtcggttattgagtattttcaagagatgtatgggttcacgatccagcacacgcatttgccgtgtcttcaagtgggaaaccagaagaaggcgagctatttgccaatggaggcatgcaaaatcgtggagggacaacggtacacaaaaaggttgaacgagaagcagattactgctcttttgaaagttacatgccagaggccaagggacagagaaaacgacattttaaagacggtgcaacacaacgcgtatgatcaagatccatatgctaaggagtttggtatgaatataagcgaaaagctagcttctgttgaagctaggatccttccagctccatggcttaagtatcatgagaatgggaaagaaaaggattgccttccgcaagtgggtcaatggaatatgatgaataagaagatgatcaatgggatgacggtgagcagatgggcctgtgttaacttctcacgcagtgttcaagaaaatgttgctcgtgggttttgtaatgagcttggtcagatgtgtgaagtctctggcatggagtttaatccggagcctgtgataccaatatacagcgcgaggcctgatcaagttgagaaagctctaaagcatgtttatcacactgctatggacaaaaccaaaggcaaagagttagagcttctcttggccattttacctgataacaacggttcactctacggggatcttaagagaatctgtgaaaccgagcttggtttgatatctcagtgttgtctcacaaaacatgtgttcaagattagcaaacagtatctggctaatgtatcccttaaaatcaatgttaagatgggaggaaggaacacagttctgttagatgccataagctgtaggattccactggttagcgacataccgacaattatatttggcgcagacgtgactcacccagagaacggggaagagtcaagcccttcaatcggtgctgttgttgcttcgcaagactggcctgaagtgacaaagtatgctggtttggtttgtgcacaagctcacaggcaagaacttatacaagatttgtataaaacatggcaggatcctgtacgtggcactgttagtggcggcatgatcagggaccttctgatctcattcaggaaagcaacagggcagaaaccgcttcgaatcatcttttaccgtgatggagtaagtgaaggacaattctaccaagttttactctacgagttggatgcaattcgtaaggcatgtgcgtcgcttgaaccgaattatcagccacctgtgacattcatcgtggtacagaagaggcaccacacccgtttgtttgctaataatcaccgagacaaaagcagtactgaccgaagcggaaacatcttacctggtacggtagttgacactaagatatgtcatccaactgaattcgacttctacctttgtagccacgctggtatacagggaacaagcaggcctgctcattaccatgttctttgggatgagaacaatttcacagcggatggtattcaatctctgactaataatctctgttatacctatgctcgatgcactcgatcggtctctgtagttcctccggcgtattatgcacatcttgcagcattccgagcacgtttctacatggaaccggagatcatgcaagataacggatcgccgggtaaaaagaatacgaagacaacaactgtaggagatcatggtgttgttggtggcggtgtgaagccgttacctgctttgaaggagaatgtgaagagagtcatgttttactgctaa

SEQ ID NO: 11713 - protein, 975 aa, Brassica napus
MPIRQMKDSSETHLLTKPKHLPKAVQNAKAPPTPSQASSPSPPSKNRSRRRNRGGRKSDQGDVCMRPSSRPRKPPPQNAAPVAAVSGTEIVAVNHQMQMGVRGSSKNSNFAPRPGFGQLGTKCIVKANHFLADLPTKDLSHYDVTITPEVSSKSVNRAIIAELVRLYKESELGSRLPAYDGRKSLYTAGELPFTWKEFAVKIFDEDDGIINGPRRERSYKVAIKFVARANMHHLGEFLAGKRADGPQEALQILDIVLRELSVKRFCPVGRSFFSPDIRPPQRLGEGLQSWCGFYQSIRPTQMGLSLNIDMASAAFTEPLPVIEFVPQLLREDVLPKPLSDSDRIKIKKGLRGVKVEVTHRANVRRKYRVAGLTTQPTRELMFPVDENATMKSVIEYFQEMYGFTIQHTHLPCLQVGNQKKASYLPMEACKIVEGQRYTKRLNEKQITALLKVTCQRPRDRENDILKTVQHNAYDQDPYAKEFGMNISEKLASVEARILPAPWLKYHENGKEKDCLPQVGQWNMMNKKMINGMTVSRWACVNFSRSVQENVARGFCNELGQMCEVSGMEFNPEPVIPIYSARPDQVEKALKHVYHTAMDKTKGKELELLLAILPDNNGSLYGDLKRICETELGLISQCCLTKHVFKISKQYLANVSLKINVKMGGRNTVLLDAISCRIPLVSDIPTIIFGADVTHPENGEESSPSIGAVVASQDWPEVTKYAGLVCAQAHRQELIQDLYKTWQDPVRGTVSGGMIRDLLISFRKATGQKPLRIIFYRDGVSEGQFYQVLLYELDAIRKACASLEPNYQPPVTFIVVQKRHHTRLFANNHRDKSSTDRSGNILPGTVVDTKICHPTEFDFYLCSHAGIQGTSRPAHYHVLWDENNFTADGIQSLTNNLCYTYARCTRSVSVVPPAYYAHLAAFRARFYMEPEIMQDNGSPGKKNTKTTTVGDHGVVGGGVKPLPALKENVKRVMFYC

SEQ ID NO: 11714 - DNA, 3123 bp, Oryza sativa
  CDS (1)..(3123)
atggagcacgagcgcggtggcggtggccgcggccgcgggaggggtcgcggtggcgggcgtggcggcggtggcggcgatggtcgcggaggcggttatggtggtgctggtggtggtggtgtcggcgggcgcggtgggcgtgggcctcctggtggtggtggtggacgcgggtacgagcccggcggcgggcgtgggtacggtggcggcggcggcggtggtggacgtgggtatggcggcggaggcggcggtggtgggtacgagtccggcggtgggcgtgggtatggcggcggtggacgtgggtatgaatccggcggtgggcgtggacctggcggcggcggccgtgggcacgagtccggcggtggcggtggccgcggcgggaacgtgtgggcgcagccggggagagggcgcggaggagcccccgcccccgccccggcgccggcgccggctcaggcgccagcaccagcagcgaggaggatccaggacgttggcgccgcgaggtcgtcgggttccgttgagcgcattgcttctactgaggttgtaagagtacaaccacctgcacccccagttgctgtgtctcgtagtggcacgcgtgtgccaatgcgaagacctgatggtggaggctcagtatcgaaagccaaggtcaaattgttggtgaaccattttatagttaagtaccgacaggcatcaactgtttttcactatgacatagacatcaagcttgatataagttcccccaaggcttcagacaaggagctctccaagggagattttcttactgtcaaggacgagctcttcaaggatgagagctttcggcggctttcatcagctgttgcttatgatggaaaaagaaatttatttacttgtgctgagctaccagatggtttgtttcgtgtcaaagtccgttcacggacttacattgtatctgtggagttcaagaagaagcttcctttgagccaactctcggaactgcctgtgcccagagaggtcttgcaggggcttgatgtcattgtgcgtgaggcctctagctggcgcaagattatcattggtcagggattttactcgcagggccgcagtgtgcccattgggccggatgttgtagctctcaaaggaacccagcagaccctgaaatgcactcagaaaggactgatcctttgtgtggactattcggttatgccgtttcgcaaagctggacctgtgttggatcttgttcagaagtctgtgagataccttgactacaggacaacactaaacaaacaccaattggacactttgaagaatgaactcaaaggccagcgtgtcactgtaaatcataggaggacaaagcagaagtacattgttaaaggtttgactgataaacctgcaagtcagataacttttatagattctgaatcaggacagaccaagaagcttcttgattactattcgcagcagtatggcaaggttattgagtatcaaatgcttccatgcttggatttgagcaagagcaaggacaagcaaaactatgtgccgattgaattgtgtgatcttcttgaagggcagagatacccaaaagcaagcttaaataggaattctgataaaacactgaaagaaatggctttgatccctgcctcaaggaggaaggaggagattctggagttggtgaatgctgacgatgggccttgcaggggtgaaattgctcagcagtttgggatttctttggatgtacaaatgatggaagtcactggtaggacccttcctcctcccagcctaaaacttggcacctccagtggccaaccctgcaaattcaatattgatcagcctaactgccagtggaaccttatggcgaaaagactagcagagggccgggtgcttcagtgctggggcgtcgtggacttcagtgcaaattctgggcagcatgccctgaatgggaacatgtttattgacaagattgtcaggaagtgctgcgaccttggcgtacagatgaaccgtaacccatgctatgtgcaactgttagatatggaggtgctatccgatccacatcagctcttcgaggagcttaacaaagctaagcaggcggcagccagtaagaaacagaagctgcagctcctcttctgcccaatgtctgatcagcatcctgggtacaagacgctgaagcttatctgcgagacgcagctggggatccagacccagtgcttcttgagcttcctcgcgaacaagcaacagggacaggaccagtacatgtccaaccttgctctgaagatcaacggcaagattggaggaagcaacatccaactgtttggtgaatcgctcccgcggatctccggcgcgccatacatgttcatcggcgccgacgtgaatcacccatcgccggggaacgtcgagagcccgtcgattgcagcagtggtggcctcggtggatcaaggcgccagcaagtacgtgccaagaatccgcgctcagcctcaccgctgcgaggtgatccagcacctcggcgacatgtgcaaggagctcatcggcgtgttcgagaagcggaaccgcgtgaagccccggaggatcatctacttccgcgacggcgtcagcgacgggcagttcgacatggtgctgaacgaggagctggcggacatggagaaggcgatcaagaccaaggactactccccgacgatcaccgtgatcgtggccaagaagcggcaccacaccaggctgttccccaaggacctgaaccagcagcagaccaagaacggcaacgtgctccccggcacggtggtggacaccggcgtggtcgacccggcggcgtacgacttctacctgtgcagccacaacgggctgatcgggacgagccggccgacgcactactacagccttctggacgagcacggcttcgcctccaacgacctgcagatgctggtgtacaacctctgcttcgtcttcgcccgctgcaccaagccggtgtcgctggccacgcccgtctactacgccgacctcgccgcctaccgcggcaggctctactacgagggcatgatgatgtcgcagccgccaccgtcttccgcggcgtcgtcgtcgtcggcatcctcctccggcgccggcgcttccgacttcaggagcttcccggcgctgcacgaggatctggtggacaacatgttcttcatctga

SEQ ID NO: 11715 - protein, 1040 aa, Oryza sativa
MEHERGGGGRGRGRGRGGGRGGGGGDGRGGGYGGAGGGGVGGRGGRGPPGGGGGRGYEPGGGRGYGGGGGGGGRGYGGGGGGGGYESGGGRGYGGGGRGYESGGGRGPGGGGRGHESGGGGGRGGNVWAQPGRGRGGAPAPAPAPAPAQAPAPAARRIQDVGAARSSGSVERIASTEVVRVQPPAPPVAVSRSGTRVPMRRPDGGGSVSKAKVKLLVNHFIVKYRQASTVFHYDIDIKLDISSPKASDKELSKGDFLTVKDELFKDESFRRLSSAVAYDGKRNLFTCAELPDGLFRVKVRSRTYIVSVEFKKKLPLSQLSELPVPREVLQGLDVIVREASSWRKIIIGQGFYSQGRSVPIGPDVVALKGTQQTLKCTQKGLILCVDYSVMPFRKAGPVLDLVQKSVRYLDYRTTLNKHQLDTLKNELKGQRVTVNHRRTKQKYIVKGLTDKPASQITFIDSESGQTKKLLDYYSQQYGKVIEYQMLPCLDLSKSKDKQNYVPIELCDLLEGQRYPKASLNRNSDKTLKEMALIPASRRKEEILELVNADDGPCRGEIAQQFGISLDVQMMEVTGRTLPPPSLKLGTSSGQPCKFNIDQPNCQWNLMAKRLAEGRVLQCWGVVDFSANSGQHALNGNMFIDKIVRKCCDLGVQMNRNPCYVQLLDMEVLSDPHQLFEELNKAKQAAASKKQKLQLLFCPMSDQHPGYKTLKLICETQLGIQTQCFLSFLANKQQGQDQYMSNLALKINGKIGGSNIQLFGESLPRISGAPYMFIGADVNHPSPGNVESPSIAAVVASVDQGASKYVPRIRAQPHRCEVIQHLGDMCKELIGVFEKRNRVKPRRIIYFRDGVSDGQFDMVLNEELADMEKAIKTKDYSPTITVIVAKKRHHTRLFPKDLNQQQTKNGNVLPGTVVDTGVVDPAAYDFYLCSHNGLIGTSRPTHYYSLLDEHGFASNDLQMLVYNLCFVFARCTKPVSLATPVYYADLAAYRGRLYYEGMMMSQPPPSSAASSSSASSSGAGASDFRSFPALHEDLVDNMFFI

SEQ ID NO: 11716 - DNA, 2736 bp, Oryza sativa
  CDS (1)..(2736)
atggacgctcatgatggtgaggccgatgagttgccgccgcctcctcctgtacctgcaaatgtggtgcctattaaagctgatgacgttgagagcgaggtgccagcaaacaaaccagcaaaacctaagcggtttccaatggccaggcctggtttagggagaaaaggacagccaatccagctcttggcgaatcattacaaagtttctgtgaagagtagtgaagaatatttcttccactacaatgttattctgaagtatgaggatgatcgaccggttgatgggaaaggggtaggtcgaaaggtgattgataaactgcagcaaacctaccgttctgagctttcaagcaaggactttgcctatgatggtgaaaagagcctgtttacaattggtgctcttccacaagtaactaatgagttcacagtggtgttggaggatgtttcaactggaaagactgctgccaatggaagccctggaggtaatgacagccctggaggtagtgacaggaagagagttaggagaccataccagaccaagactttcaaagtggagctgtgctttgcagcaaagatccctatgaatgcaattgctcaggccataaaaggtcaagaatcagagaactcccaagaagctctcagagttcttgatataatattaaggcagcactctgctaaacagggctgccttttagtacgccagtcatttttccacaacaatcctaataactttgttgacctgggtggtggtgtgatgggctgtcgaggattccattcaagtttccgtggcacacagagtggactttctctgaatatcgatgtttcgacaactatgattgttaaacctggtcctgttatcgattttcttcttgccaaccagaaagttgatcaccctgacagaattgattggcaaaaggccaagcgtgctctcaagaacttgaggataagaaccacccctgtgaattcagaattcaagatcattggtttgagtgacagaaattgcaacgaacagatgttttcgttgaggcagaggaatgggaacaatggggatgttgatgaagttgaagttacagtctatgattactttgtgaaaaacaaaggcatagagctgcgctattctggcaatcttccttgcataaatgtggggaaaccaaagcgtccaacttattttccaatagagctatgctctcttattccactacaaagatacaccaaagctttgtcaacactgcaaaggtcctcccttgttgagaaatccagacagaagccccaggaaagaatgtcagtccttaatgatgcacttcgacgtagtaactatgattctgatcccatgttgagggtatctggcatttcaattgcccaaaattttactcaagttgaaggaagggtcctgcaacccccaaagctgaaagctggcaatggtgaagatatattcccacgcaatggtcggtggaacttcaacaataagaaactgattcagacctgttctgtcgataagtgggcagtagttaatttctctgcacgctgtgatgtgcgaaatcttatccgggacctcataagaaatgcatctgcgaaggggattcaaatggccgaaccttttgatgtgtttgaagagagcccctcattgaggcgagcacctgtatcaagaagagtagatgatatgtttgaacagataaaatcaaaacttcctggagctccgaaattcctcttgtgccttcttcctgagaggaaaaattgtgaagtttatggtccttggaagaggaagtgtcttgctgaattcggtattgtcacacaatgccttgctccacaaagagtcaatgatcagtacctactcaatttgctattgaagataaatgccaagcttggtggaataaactcattgctgcaaattgaagcatccccttcaatacctcttgtatcgaagacacctaccatcatcttaggtatggatgtgtcacacggtcaaccaggacaatctgatagaccttccattgctgcggtggttagctctcgccaatggcctctcatctctaaatacagagcatcggtgcacactcagtcacctaagctagaaatgatgtcttccttgtttaagccacgaggaactgaagatgatggcctcattcgggaatcgctgattgacttctacactagttctggaaaacggaaaccggatcatgttatcgttttcagggatggagttagtgaaagccagtttactcaggtcattaacattgagcttgatcagatcattgaggcatgcaaatttctcgatgagaagtggtcaccaaagttcacagtgattgttgctcagaagaatcatcataccaaattttttcagtctggatctccagataatgttccgccaggtactgttgtggacaaacaagtgtgccatccaaggaattatgacttctacatgtgtgctcatgctggaatgattggaacgacgaggccaacacattatcatgttctgcacgatgagataggtttctcccctgatgatctgcaggagctagtgcactcactctcttatgtgtatcagagaagcacaacagccatatcagttgttgctccgatttgctatgcccatcttgctgctgctcaggtgggcacattcctcaagttcgaagatatgtcggacgcgtcgtccagccaaggaggtcatacgtctgtcggaagtgtaccggtgcctgagctgcctcgcctccatgagaaagtgaggagctccatgtttttctgctga

SEQ ID NO: 11717 - protein, 911 aa, Oryza sativa
MDAHDGEADELPPPPPVPANVVPIKADDVESEVPANKPAKPKRFPMARPGLGRKGQPIQLLANHYKVSVKSSEEYFFHYNVILKYEDDRPVDGKGVGRKVIDKLQQTYRSELSSKDFAYDGEKSLFTIGALPQVTNEFTVVLEDVSTGKTAANGSPGGNDSPGGSDRKRVRRPYQTKTFKVELCFAAKIPMNAIAQAIKGQESENSQEALRVLDIILRQHSAKQGCLLVRQSFFHNNPNNFVDLGGGVMGCRGFHSSFRGTQSGLSLNIDVSTTMIVKPGPVIDFLLANQKVDHPDRIDWQKAKRALKNLRIRTTPVNSEFKIIGLSDRNCNEQMFSLRQRNGNNGDVDEVEVTVYDYFVKNKGIELRYSGNLPCINVGKPKRPTYFPIELCSLIPLQRYTKALSTLQRSSLVEKSRQKPQERMSVLNDALRRSNYDSDPMLRVSGISIAQNFTQVEGRVLQPPKLKAGNGEDIFPRNGRWNFNNKKLIQTCSVDKWAVVNFSARCDVRNLIRDLIRNASAKGIQMAEPFDVFEESPSLRRAPVSRRVDDMFEQIKSKLPGAPKFLLCLLPERKNCEVYGPWKRKCLAEFGIVTQCLAPQRVNDQYLLNLLLKINAKLGGINSLLQIEASPSIPLVSKTPTIILGMDVSHGQPGQSDRPSIAAVVSSRQWPLISKYRASVHTQSPKLEMMSSLFKPRGTEDDGLIRESLIDFYTSSGKRKPDHVIVFRDGVSESQFTQVINIELDQIIEACKFLDEKWSPKFTVIVAQKNHHTKFFQSGSPDNVPPGTVVDKQVCHPRNYDFYMCAHAGMIGTTRPTHYHVLHDEIGFSPDDLQELVHSLSYVYQRSTTAISVVAPICYAHLAAAQVGTFLKFEDMSDASSSQGGHTSVGSVPVPELPRLHEKVRSSMFFC

SEQ ID NO: 11718 - DNA, 2820 bp, Penaeus monodon
  CDS (1)..(2820)
atgtaccctgtcgggcagccacctggtcctcctggcccacccggtccctcgggtccgggtggacccccaggaccagctggccccccagtgccccgacccttgaccttgccgccgggacccacgccggtccctggcccaatcactaccattgtaccgcaggcccctggtacgccggctgtggcaacggggacaggcatgactgccctcttaccgccagaactacctacttttgtagcaccaagaagaccgaatctcgggcgagaaggtcgacctatcacgttgcgggccaatcacttccagatctctatgccgagaggttacattcaccactatgatattagtattacccctgataaatgcccgcgcaaggttaatcgggaaattattgagacgatggttcatgctttccctagaatttttggcactctaaagcctgtcttcgaagggagaagcaatttatacaccagagatcccctgcccattggtaatgaaaaaatggagcttgaggtaacgttaccaggggaaggacgtgacagggtgttcaaggtagcgatgaaatggttagcacaagtaaatctatatacgttagaagaagcattggagggacggacgagaaccattccttatgatgcaatacaggcactagatgtcgttatgcgtcacctgccatccatgacttacacaccagtgggcaggtcccttttctccgctccagatggctattatcaccccttgggaggtggaagggaagtgtggtttggcttccatcaaagtgtaagaccttcacagtggaagatgatgcttaacattgacgtgtcagctacagcattctacaaggcccaggcagtaatagagtttatgtgtgaagtgttagatattcgagaaataggtgagcagaggaaacctctaacggattcgcagcgtgtcaagttcacaaaagaaattaagggtctgaagattgagatcacacactgtggtgcgatgcgaagaaagtacagggtgtgtaatgtcacaagaaggccagcacagatgcagtcgttcccattgcagctagagaatggtcagactgtggaatgtactgttgcaaaatatttccttgacaaatacaaaatgaaactcaggttcccccatctaccttgccttcaggtgggacaagaacacaaacacacataccttcctctggaagtatgcaacattgtacctggacaacgatgcatcaagaaactaacagacatgcagacatctaccatgatcaaggcaacagctagatctgcacctgatagggagagagagatcaacaatctggtccgaaaggcggactttaacaatgacccgtacatgcaagaatttggtctgacgatcagtacagctatgatggaggtccgaggtcgcgtactcccacccccaaagctccaatatggagggcgaacaaagcagcaagctctgcccaaccagggggtgtgggacatgagggggaaacagttcttcacaggggtagaaatccgcgtgtgggccgttgcatgcttcgccccacagcgcacagtgagagaagatgcgctgcgcaattttacacagcaactacaaaagattagtaatgatgctggcatgcccatcattggccagccgtgcttctgcaagtatgccaacggtcctgaccaggtagagcccatgttccgttacctgaagagcacattcaccggtctgcagcttgtatgtgttgttctaccaggcaaaactcctgtctatgctgaagtgaagcgtgtgggtgacactgtcttaggaatggctacccaatgtgtccaggccaagaatgtgaacaaaacctcacctcaaacactgtccaacctctgtctcaaaataaatgtgaagttgggaggcatcaactccattcttgttccaggcatcagaccaaaagtgttcaatgagcctgtgatcttcctgggtgctgatgtaactcatccaccagcgggtgataataagaagccgtccattgcagccgtagtaggatctatggatgctcatccatcacgctatgctgcaactgtccgggtccagcagcacagacagaatggatcaacaacacaaggccaaagtgccagtgacggctcgcgacccagacagctgactttcgcgaggacggcacatgacgaggtgatccaggagctctcttctatggtgaaggagctgctcatccagttctacaagtctacgcggttcaagcccaacaggatcatcctttatcgggatggtgtgagcgagggacaattccaaaccgtgctccagcatgagctgactgccatgagagaggcttgcataaagttggaagcggactacaagcctggcatcacgtacattgctgtgcagaagagacatcatacaagattgttctgttctgacaagaaagaacagagtggcaagagtggtaatattcctgctggtacaactgttgatgtgggcatcacgcatccaactgagtttgacttctacctctgctctcatcagggtatccagggcacaagtcgtccctgtcactaccacgtactgtgggatgataaccactttgacagtgatgagctgcagtgcctgacttaccagttgagtcatacctatgtaagatgtacgcgatcagtctccatacctgctccagcctattatgctcacttggtagccttcagggctcgttatcatctcgtcgaaaaggagcatgacagtggagaggggtcacaccaatctggcaacagtgaggatcgcacaccatctgccatggcaagggcagttacagtgcatgtcgacacaaacagagtcatgtactttgcttaa

SEQ ID NO: 11719 - protein, 939 aa, Penaeus monodon
MYPVGQPPGPPGPPGPSGPGGPPGPAGPPVPRPLTLPPGPTPVPGPITTIVPQAPGTPAVATGTGMTALLPPELPTFVAPRRPNLGREGRPITLRANHFQISMPRGYIHHYDISITPDKCPRKVNREIIETMVHAFPRIFGTLKPVFEGRSNLYTRDPLPIGNEKMELEVTLPGEGRDRVFKVAMKWLAQVNLYTLEEALEGRTRTIPYDAIQALDVVMRHLPSMTYTPVGRSLFSAPDGYYHPLGGGREVWFGFHQSVRPSQWKMMLNIDVSATAFYKAQAVIEFMCEVLDIREIGEQRKPLTDSQRVKFTKEIKGLKIEITHCGAMRRKYRVCNVTRRPAQMQSFPLQLENGQTVECTVAKYFLDKYKMKLRFPHLPCLQVGQEHKHTYLPLEVCNIVPGQRCIKKLTDMQTSTMIKATARSAPDREREINNLVRKADFNNDPYMQEFGLTISTAMMEVRGRVLPPPKLQYGGRTKQQALPNQGVWDMRGKQFFTGVEIRVWAVACFAPQRTVREDALRNFTQQLQKISNDAGMPIIGQPCFCKYANGPDQVEPMFRYLKSTFTGLQLVCVVLPGKTPVYAEVKRVGDTVLGMATQCVQAKNVNKTSPQTLSNLCLKINVKLGGINSILVPGIRPKVFNEPVIFLGADVTHPPAGDNKKPSIAAVVGSMDAHPSRYAATVRVQQHRQNGSTTQGQSASDGSRPRQLTFARTAHDEVIQELSSMVKELLIQFYKSTRFKPNRIILYRDGVSEGQFQTVLQHELTAMREACIKLEADYKPGITYIAVQKRHHTRLFCSDKKEQSGKSGNIPAGTTVDVGITHPTEFDFYLCSHQGIQGTSRPCHYHVLWDDNHFDSDELQCLTYQLSHTYVRCTRSVSIPAPAYYAHLVAFRARYHLVEKEHDSGEGSHQSGNSEDRTPSAMARAVTVHVDTNRVMYFA

SEQ ID NO: 11720 - DNA, 2880 bp, Picea glauca
  CDS (1)..(2880)
  misc_feature (962)..(962): r is g or a
  misc_feature (1321)..(1321): y is t or c
atggagtccaaggatatttcaggcccgggtgatggagcagggccttcttttagtcagtccgttgaagttctgccatcctctcccccaaatcctcctcaaatggaaacacagctcgggccttcttccagtgaggctgttgaagttctgccacccccaccccccctgcctcctcaaatggcacagaaactactagaggttcctcgtgttgttctaactaaacgacctggacacggtcgagctggtagacctgttaagttactctgtaatcacttcagagtaagcttttcaaatctccaggattcatttcactacgatgtcaaaatcactgcttctgaacgtgttgaacgtgggggtaaagcacaagatgttgttagtaagatattgtgcaggaaagttatggataaagtcaaagaagtatatggtgccactggactggatggcaaagattttgcttacgatggagagaacagtttgtttaccgttgggcctctcagaaacaacaacattgaatgcattattgttattgatgacgaaaggagctcaagaaggcctattaaagatgaaagccccagccagattgagcagtcaaaaaagagaagagaagatagaggggagaaattcaaggtagaaattacatttgctgcaaagatctcaatgaaagctctgcaggctgttattcaaggggaggtttctgataaagcccaagatgcattgagggttttagatatagttctgagacaacatgcctctaggaagggctatttgttggtgaggcaaagtttctttcattggagttttgctcctttggttgaactaggaggaggtgttaccggatgcaggggctatcatatcagcttcaggcctacacagagtgggctttctcttaatatggatgtgtcaacaacgatgctcatcaaagaaagtgctgtcattgattttttgttggcaaatcaaagtgtcgrcaatccatggaagattaattggtccaaggcaaagcaagtgctgaaaggagtacgcattacaacagtacacactaatatggagtttaagatctttggtttaagtgaaaaaccgtgcaaagaacaactcttttcaatgagagtaagaagccaaggcagccaagaagagcctcctcaaacagtggatgtgacggtgcatgattactttgtaaatacaaaacaaactcctttgcagttttcagcggatcttccatgcttggatgtagggagaaaaaaacgacccaattatcttccgatagagctttgcaaaatcctcccgggacagagatatactaaggctctttctactcaacaacgcacaycacttgtggagcaatccagacaaaagccagatgaacgaatgcaagtgttactgaaggcaatggatgtgaataattacaattctgacccattattgaaggcctgcaatatcaatgttgataaacagttggtacgtttagatggtcgagttcttgacccacccacgcttaagtttgggaagatggaagaggctccaaggaatggtcgttggaattttaacaacaagactatggttcgggcgtctaaaattggagactgggcaattgcatgtttcaattcaagaattcgttcaaatgaaataacgaacatggcacgtgagcttcagcaatgttgtggcagaagaggattggtaatggccgactgtttgggggttttggaagaaagtccgcaagacagaaatagaaaccctattgacagggttgaaaggatgctaagtcagatgaagtctagacttccaaagccgcctcaatttctgctctgcatcttaccagagaggaagaacagtgatctttatgggccttggaagaggaagttcctggcagacttgggggtcattaatcaatgtattgcccctccgaatatgaggaaagtcaatgatcaatatttaacaaatgtggctttgaaaataaatgcgaaggttggtggcctcaactctgttttatctgtggaatttgcgcataagatacctaagatatccacgaaaccaacaattattattgggatggatgtttcacacggttctccaggacatgcagattcaccttcaatttcagcggtcgtctcatcgagagaatggcccttgatttcaagatatagagcttcagtgagaactcaatcacccaaggttgagatgattgaagctttgtacaaaccgttgccctcaggaaaggatgcgggcatgatcagtgagctacttgtggacttctaccaatcatgcaatccgccacctaatgtagaaagaaaaccgcagcaaatgattgtcttcagagatggagtcagtgaatcacaatttgaccaggtcctgaatgttgagttacaagctatatataaggcatgcaatcacatagaggctggttataagcctaaagtcacactgattattgcacagaagaatcatcacacaaagctattccctagtggtggtccaggcaatgtgcagccagggactattgtagatgcccagatttgtcatcctagaaattttgatttttacttgtgtcctcaggccggcccaataggaacatcacggcctactcattatcatgtcttactggatgagaatgattttagtgtggatgatcttcagattcttgtccacgctctatcttatgtgtatcaaagaagtacgaccgcaatctcttcagttgcaccaataaactatgcgcatctagctgcgagccagatgcaacaattcctcaaggcagaggatctttcagaaacagcttcgcgatctggaaaaggggaagggtcagttgcatctggaggaggaggatacactgcccctgtacctgaactccctgtgctgcaccgaaatgtttgcaacaccatgtttttctgctga

SEQ ID NO: 11721 - protein, 959 aa, Picea glauca
  misc_feature (321)..(321): The Xaa at location 321 stands for Asp, or Gly.
  misc_feature (441)..(441): The Xaa at location 441 stands for Pro, or Ser.
MESKDISGPGDGAGPSFSQSVEVLPSSPPNPPQMETQLGPSSSEAVEVLPPPPPLPPQMAQKLLEVPRVVLTKRPGHGRAGRPVKLLCNHFRVSFSNLQDSFHYDVKITASERVERGGKAQDVVSKILCRKVMDKVKEVYGATGLDGKDFAYDGENSLFTVGPLRNNNIECIIVIDDERSSRRPIKDESPSQIEQSKKRREDRGEKFKVEITFAAKISMKALQAVIQGEVSDKAQDALRVLDIVLRQHASRKGYLLVRQSFFHWSFAPLVELGGGVTGCRGYHISFRPTQSGLSLNMDVSTTMLIKESAVIDFLLANQSVXNPWKINWSKAKQVLKGVRITTVHTNMEFKIFGLSEKPCKEQLFSMRVRSQGSQEEPPQTVDVTVHDYFVNTKQTPLQFSADLPCLDVGRKKRPNYLPIELCKILPGQRYTKALSTQQRTXLVEQSRQKPDERMQVLLKAMDVNNYNSDPLLKACNINVDKQLVRLDGRVLDPPTLKFGKMEEAPRNGRWNFNNKTMVRASKIGDWAIACFNSRIRSNEITNMARELQQCCGRRGLVMADCLGVLEESPQDRNRNPIDRVERMLSQMKSRLPKPPQFLLCILPERKNSDLYGPWKRKFLADLGVINQCIAPPNMRKVNDQYLTNVALKINAKVGGLNSVLSVEFAHKIPKISTKPTIIIGMDVSHGSPGHADSPSISAVVSSREWPLISRYRASVRTQSPKVEMIEALYKPLPSGKDAGMISELLVDFYQSCNPPPNVERKPQQMIVFRDGVSESQFDQVLNVELQAIYKACNHIEAGYKPKVTLIIAQKNHHTKLFPSGGPGNVQPGTIVDAQICHPRNFDFYLCPQAGPIGTSRPTHYHVLLDENDFSVDDLQILVHALSYVYQRSTTAISSVAPINYAHLAASQMQQFLKAEDLSETASRSGKGEGSVASGGGGYTAPVPELPVLHRNVCNTMFFC

SEQ ID NO: 11722 - DNA, 2679 bp, Arabidopsis thaliana
  CDS (1)..(2679)
atggattctgatgaaccgaatgggagtggattaccacctccaccacctttcgttccagcaaatcttgtccctgaagtggagcctgtaaaaaagaacattcttctcccaatggctcggcctcgaggcagcggctccaaaggacagaagattcctcttcttactaatcactttggagtcaagttcaacaaaccaagcggttacttctttcattacagtgttgctatcaattatgaagatggccgtccagtggaggctaaaggtatcggccgaaagattcttgacaaagttcaggagacctatcaaagtgatttgggtgccaaatactttgcttatgatggcgagaagactctcttcactgttggtgctcttcccagcaacaaacttgacttctctgttgttcttgaagaaataccttctagcagaaatcacgctggaaatgatacaaatgatgctgatagaaaaagatcaaggcgtcccaaccaaactaagaaattcatggttgagataagttatgctgcaaagatccccatgcaggctattgcaagcgctcttcaagggaaggagacagagaatcttcaagacgctctgagagtgctggatattattttgcgccagagtgcagctaggcaaggttgcctccttgttcgccagtcctttttccacaatgacgtaaagaactttgtacctattggtggaggtgtcagtggttgcagagggttccattcaagtttcagaactactcagggaggcttatccctgaatattgacacttcaactacgatgatagtacaacctggacctgtagttgatttcctgcttgctaaccagaacaagaaagatccatacggaatggactggaacaaggctcgacgtgtcctcaagaatctgagagttcaaattactctttccaatagagaatacaagataagtggactaagtgaacacagctgcaaagatcaactgaaacctaacgacaagggagaatttgaggaggttgagatcacagtgctcaattactataaagagcgtaacattgaagtgcgttattcaggtgacttcccttgcatcaatgttggtaagccgaagcgtcccacttacttccccattgagttctgtaatcttgtgtctctacagcgatacacaaaatcgcttaccaattttcagagggctgccctagttgaaaagtctaggcagaagccacctgaaaggatggcctcgctaaccaaaggtctgaaggacagcaattacaatgccgacccggtattgcaagatagtggtgttagcattatcaccaattttacccaagttgaaggccgtatcttaccaacaccaatgctgaaagtgggcaagggagaaaacctttccccaatcaaaggaaaatggaactttatgcgtaagacactcgctgagccaacgacggttactagatgggctgttgtgaacttctctgctcgctgtgatacaaatacacttattcgtgacttgattaaatgtggacgggagaaaggaattaatgtagagcctccattcaaggatgtcatcaacgagaatcctcagtttaggaatgcaccagctactgtgagagtagagaatatgtttgagcagataaaatccaaactcccaaagccgcctctgttccttctttgcatactcgctgaaaggaaaaactctgatgtttatggcccttggaaaaaaaagaatcttgttgatcttggaattgtgactcagtgcattgctcccaccagactgaacgatcagtatctcaccaatgttctcctgaagataaatgccaagcttggtggattgaattcgttgttagctatggagcgctcaccagcaatgccaaaagtaacgcaagttcctaccatcattgttgggatggatgtatcccatggttcccctggccagtctgatataccatcaattgctgctgttgtgagctcaagacaatggccactcatctcaaaatataaggcatgtgtacgcacacaatcacgcaaaatggaaatgattgataatctcttcaaacccgtcaatggcaaagacgaaggaatgttcagggaactcttgttagacttttactacagttcagagaataggaaaccagagcacatcattattttcagggatggtgtaagcgagtctcagttcaatcaagttcttaatattgaattggatcagatgatgcaggcatgcaagtttcttgatgatacgtggcatccgaagtttacagtgatagttgcccagaagaaccaccacacaaagttcttccagtctcgaggccctgataatgttcctccaggaacaatcattgacagccagatctgtcacccacgcaactttgatttctatctctgcgcccatgctggcatgattggaactacaaggccaacacattaccatgttctgtatgacgagattgggtttgccacagacgacctccaagaacttgtgcattctctgtcctatgtctaccagaggagcaccactgcgatctcagtcgttgcacctgtatgttacgctcatttggcagctgcacagatgggaactgtgatgaagtatgaagagttgtctgagacttcttcgagccatggaggaatcaccacacctggagcagtccctgtgccacctatgccgcagctgcacaataatgtttcaacctccatgttcttctgttga

SEQ ID NO: 11723 - protein, 892 aa, Arabidopsis thaliana
MDSDEPNGSGLPPPPPFVPANLVPEVEPVKKNILLPMARPRGSGSKGQKIPLLTNHFGVKFNKPSGYFFHYSVAINYEDGRPVEAKGIGRKILDKVQETYQSDLGAKYFAYDGEKTLFTVGALPSNKLDFSVVLEEIPSSRNHAGNDTNDADRKRSRRPNQTKKFMVEISYAAKIPMQAIASALQGKETENLQDALRVLDIILRQSAARQGCLLVRQSFFHNDVKNFVPIGGGVSGCRGFHSSFRTTQGGLSLNIDTSTTMIVQPGPVVDFLLANQNKKDPYGMDWNKARRVLKNLRVQITLSNREYKISGLSEHSCKDQLKPNDKGEFEEVEITVLNYYKERNIEVRYSGDFPCINVGKPKRPTYFPIEFCNLVSLQRYTKSLTNFQRAALVEKSRQKPPERMASLTKGLKDSNYNADPVLQDSGVSIITNFTQVEGRILPTPMLKVGKGENLSPIKGKWNFMRKTLAEPTTVTRWAVVNFSARCDTNTLIRDLIKCGREKGINVEPPFKDVINENPQFRNAPATVRVENMFEQIKSKLPKPPLFLLCILAERKNSDVYGPWKKKNLVDLGIVTQCIAPTRLNDQYLTNVLLKINAKLGGLNSLLAMERSPAMPKVTQVPTIIVGMDVSHGSPGQSDIPSIAAVVSSRQWPLISKYKACVRTQSRKMEMIDNLFKPVNGKDEGMFRELLLDFYYSSENRKPEHIIIFRDGVSESQFNQVLNIELDQMMQACKFLDDTWHPKFTVIVAQKNHHTKFFQSRGPDNVPPGTIIDSQICHPRNFDFYLCAHAGMIGTTRPTHYHVLYDEIGFATDDLQELVHSLSYVYQRSTTAISVVAPVCYAHLAAAQMGTVMKYEELSETSSSHGGITTPGAVPVPPMPQLHNNVSTSMFFC

SEQ ID NO: 11724 - DNA, 2691 bp, Arabidopsis thaliana
  CDS (1)..(2691)
atggattctgatgaaccgaatgggagtggattaccacctccaccacctttcgttccagcaaatcttgtacctgaagtggagcctgtaaaaaagaacattcttctcccaatggctcggcctcgaggcagcggctccaaaggacagaagattcctcttcttactaatcactttggagtcaagttcaacaaaccaagcggttacttctttcattacagtgttgctatcaattatgaagatggccgtccagtggaggctaaaggtatcggccgaaagattcttgacaaagttcaggagacctatcaaagtgatttgggtgccaaatactttgcttatgatggcgagaagactctcttcactgttggcgctcttcccagcaacaaacttgacttctctgttgttcttgaagaaataccttctagcagaaatcacgctggaaatgatacaaatgatgctgatagaaaaagatcaaggcgtcccaaccaaactaagaaattcatggttgagataagttatgctgcaaagatccccatgcaggctattgcaagcgctcttcaagggaaggagacagagaatcttcaagacgctctgagagtgctggatattattttgcgccagagtgcagctaggcaaggttgcctccttgttcgccagtcctttttccacaatgacgtaaagaactttgtacctattggtggaggtgtcagtggttgcagagggttccattcaagtttcagaactactcagggaggcttatccctgaatattgacacttcaactacgatgatagtacaacctggacctatagttgatttcctgcttgctaaccagaacaagaaagatccatacggaatggactggaacaaggctcgacgtgtcctcaagaatctgagagttcaaattactctttccaatagagaatacaagataagtggactaagtgaacacagctgcaaagatcaactatttacatggaggaaacctaacgacaagggagaatttgaggaggttgagatcacagtgctcaattactataaagagcgtaacattgaagtgcgttattcaggtgacttcccttgcatcaatgttggtaagccgaagcgtcccacttacttccccattgagttctgtaatcttgtgtctctacagcgatacacaaaatcgcttaccaattttcagagggctgccctagttgaaaagtctaggcagaagccacctgaaaggatggcctcgctaaccaaaggtctgaaggacagcaattacaatgccgacccggtattgcaagatagtggtgttagcattatcaccaattttacccaagttgaaggccgtatcttaccaacaccaatgctgaaagtgggcaagggagaaaacctttccccaatcaaaggaaaatggaactttatgcgtaagacactcgctgagccaacgacggttactagatgggctgttgtgaacttctctgctcgctgtgatacaaatacacttattcgtgacttgattaaatgtggacgggagaaaggaattaatgtagagcctccattcaaggatgtcatcaacgagaatcctcagtttaggaatgcaccagctactgtgagagtagagaatatgtttgagcagataaaatccaaactcccaaagccgcctttgttccttctttgcatactcgctgaaaggaaaaactctgatgtttatggcccttggaaaaaaaaagatcttgttgatcttggaattgtgactcagtgcatcgctcccaccagactgaacgatcagtatctcaccaatgttctcctgaagataaatgccaagcttggtggattgaattcgttgttagctatggagcgctcaccagcaatgccaaaagtaacgcaagttcctaccatcattgttgggatggatgtatcccatggttcccctggccagtctgatataccatcaattgctgctgttgtgagctcaagacaatggccactcatctcaaaatataaggcatgtgtacgcacacaatcacgcaaaatggaaatgattgataatctcttcaaacccgtcaatggcaaagacgaaggaatgttcagggaactcttgttagacttttactacagttcagagaataggaaaccagagcacatcattattttcagggatggtgtaagcgagtctcagttcaatcaagttcttaatattgaattggatcagatgatgcaggcatgcaagtttcttgatgatacgtggcatccgaagtttacagtgatagttgcccagaagaaccaccacacaaagttcttccagtctcgaggccctgataatgttcctccaggaacaatcattgacagccagatctgtcacccacgcaactttgatttctatctctgcgcccatgctggcatgattggaactacaaggccaacacattaccatgttctgtatgacgagattgggtttgccacagacgacctccaagaacttgtgcattctctgtcccatgtctaccagaggagcaccactgcgatctcagtcgttgcacctgtatgttacgctcatttggcagctgcacagatgggaactgtgatgaagtatgaagagttgtctgagacttcttcgagccatggagggatcaccacacctggaacagtccctgtgccacctatgccgcagctgcacaataatgtttcaacctccatgttcttctgttga

SEQ ID NO: 11725 - protein, 896 aa, Arabidopsis thaliana
MDSDEPNGSGLPPPPPFVPANLVPEVEPVKKNILLPMARPRGSGSKGQKIPLLTNHFGVKFNKPSGYFFHYSVAINYEDGRPVEAKGIGRKILDKVQETYQSDLGAKYFAYDGEKTLFTVGALPSNKLDFSVVLEEIPSSRNHAGNDTNDADRKRSRRPNQTKKFMVEISYAAKIPMQAIASALQGKETENLQDALRVLDIILRQSAARQGCLLVRQSFFHNDVKNFVPIGGGVSGCRGFHSSFRTTQGGLSLNIDTSTTMIVQPGPIVDFLLANQNKKDPYGMDWNKARRVLKNLRVQITLSNREYKISGLSEHSCKDQLFTWRKPNDKGEFEEVEITVLNYYKERNIEVRYSGDFPCINVGKPKRPTYFPIEFCNLVSLQRYTKSLTNFQRAALVEKSRQKPPERMASLTKGLKDSNYNADPVLQDSGVSIITNFTQVEGRILPTPMLKVGKGENLSPIKGKWNFMRKTLAEPTTVTRWAVVNFSARCDTNTLIRDLIKCGREKGINVEPPFKDVINENPQFRNAPATVRVENMFEQIKSKLPKPPLFLLCILAERKNSDVYGPWKKKDLVDLGIVTQCIAPTRLNDQYLTNVLLKINAKLGGLNSLLAMERSPAMPKVTQVPTIIVGMDVSHGSPGQSDIPSIAAVVSSRQWPLISKYKACVRTQSRKMEMIDNLFKPVNGKDEGMFRELLLDFYYSSENRKPEHIIIFRDGVSESQFNQVLNIELDQMMQACKFLDDTWHPKFTVIVAQKNHHTKFFQSRGPDNVPPGTIIDSQICHPRNFDFYLCAHAGMIGTTRPTHYHVLYDEIGFATDDLQELVHSLSHVYQRSTTAISVVAPVCYAHLAAAQMGTVMKYEELSETSSSHGGITTPGTVPVPPMPQLHNNVSTSMFFC

SEQ ID NO: 11726 - DNA, 2994 bp, Arabidopsis thaliana
  CDS (1)..(2994)
atgtcaaatcgtggtggtggtggtcacggcggcgctagtcgtggtcgaggaggtggacgaaggtctgaccagagacaagatcagtcttctggtcaagttgcttggccgggtttacaacaaagctacggtggtcgtggtggttctgtttccgccggtagaggtcgtggaaacgtcggaagaggtgaaaatactggagatctgacggcgacgcaagttccggttgcttctgctgtttctggcgggagaggtcgtggtaacatcggagatccgacgttttctgttgcgtcttcgtctaagacggtgtctgttgcttcttcatctaaagaggaaagtaagaatacggaggtttctgagaccatgtcgaaccttcagattacttcgacggagacgaaacctgaaatgacgtcacttcctccggcgtcatctaaagcggttacgtttccggtacggccaggacgtggtactttggggaagaaagtcatggttcgtgcgaatcatttccttgttcaagttgctgatcgtgatctctaccattacgatgtttcgatcaatcctgaggttatatcaaagacagtgaacagaaacgtgatgaaacttctggttaagaattataaagactctcacttgggagggaagtcaccagcgtatgatggaaggaaaagcctctatactgctggtccattaccttttgactcgaaagagtttgttgtgaatctggcggagaaaagagctgacggttcctctgggaaggacagaccgtttaaagttgctgtaaagaatgtgacaagcactgatctttatcagttgcaacagttccttgatcgtaagcaaagagaggctccatatgatactatccaagtgcttgatgttgttcttagggataagccctctaatgattatgtctctgttgggaggtcttttttccacactagtttgggaaaggacgcaagagatggtaggggtgagcttggagatggtattgagtactggagaggttatttccaaagtctaaggctgactcagatgggtttgtctctgaacattgacgtttcagcaagatcattttatgaaccgattgttgtcactgactttattagcaagtttctgaatataagggacttaaacaggccacttagagactcagatcgacttaaggtgaagaaagttttgaggacactgaaagttaagttgcttcactggaactgcacaaaaagtgccaaaattagtgggatttctagtctacccatcagggagctaaggttcactctggaggacaaatcagagaagacggttgttcaatattttgctgaaaaatataattatagagtgaaataccaggctctacctgctattcaaacagggagtgacacaagacccgtctacctaccaatggagctctgccaaattgacgaagggcaaagatacaccaaaaggctcaatgagaagcaagtgactgcattgctaaaagctacctgccaacgaccccctgatagagagaactcgatcaaaaacttggttgtgaaaaataattacaatgatgatctgagcaaggagtttgggatgtcagtgactacccaactagcctcgattgaagctcgtgtacttcccccaccgatgttgaagtaccatgacagtggtaaagagaaaatggtaaatccaaggctaggacagtggaacatgattgacaagaaaatggttaatggagcaaaagtcacttcttggacttgcgtaagtttctctactcggattgaccgtggtttaccccaagagttctgcaaacagttgattgggatgtgtgtcagcaaaggaatggaatttaagcctcaacctgctattccgttcatctcttgtccccctgaacatattgaggaagctcttctcgatatccacaaaagggcacctggtctccaactgttgattgtaatattgcctgatgtgactggatcatatggaaaaataaaaaggatctgtgaaacagaattggggattgtctctcagtgttgccaacctagacaagttaataaactcaacaagcagtacatggaaaatgttgccttgaagatcaatgtcaagactgggggaaggaacactgttcttaatgatgctattagaagaaacatacctcttattactgatcgtccaaccatcatcatgggtgctgatgtgactcacccacagcctggagaggactcaagtccttctattgctgctgttgtggcctctatggactggcctgagataaacaaataccgaggattggtttctgctcaagctcatagggaagaaattattcaggacctgtataagctggttcaggatccacaacgtgggctagtccactctggtttgataagggaacatttcatagcattcaggagagctacaggccagatacctcaaaggatcatcttctatcgtgacggagtaagcgaagggcagtttagtcaggttctgctacatgagatgactgctatccgcaaggcttgtaactctctccaagagaattatgttcctcgtgttactttcgtgattgtccagaaacgtcaccacacacgtttgttccctgagcaacacgggaatcgtgatatgactgataagagtggcaatattcaaccaggtactgtcgtggacactaaaatctgtcaccctaatgaattcgacttctatttgaacagccatgctggtattcagggaacaagcaggccggcacattaccatgtacttctcgatgagaacggtttcaccgctgatcagttgcaaatgctcacaaacaacctctgctacacgtatgcgaggtgtacaaaatctgtgtcaattgtgccaccagcctactacgctcacttggctgcattccgtgcccgctactacatggagagtgagatgtctgatggaggttcgagcaggtccaggagctcaacaacaggtgtgggtcaagtcatttcgcagctcccagcaataaaagataacgtcaaggaggttatgttttattgctaa

SEQ ID NO: 11727 - protein, 997 aa, Arabidopsis thaliana
MSNRGGGGHGGASRGRGGGRRSDQRQDQSSGQVAWPGLQQSYGGRGGSVSAGRGRGNVGRGENTGDLTATQVPVASAVSGGRGRGNIGDPTFSVASSSKTVSVASSSKEESKNTEVSETMSNLQITSTETKPEMTSLPPASSKAVTFPVRPGRGTLGKKVMVRANHFLVQVADRDLYHYDVSINPEVISKTVNRNVMKLLVKNYKDSHLGGKSPAYDGRKSLYTAGPLPFDSKEFVVNLAEKRADGSSGKDRPFKVAVKNVTSTDLYQLQQFLDRKQREAPYDTIQVLDVVLRDKPSNDYVSVGRSFFHTSLGKDARDGRGELGDGIEYWRGYFQSLRLTQMGLSLNIDVSARSFYEPIVVTDFISKFLNIRDLNRPLRDSDRLKVKKVLRTLKVKLLHWNCTKSAKISGISSLPIRELRFTLEDKSEKTVVQYFAEKYNYRVKYQALPAIQTGSDTRPVYLPMELCQIDEGQRYTKRLNEKQVTALLKATCQRPPDRENSIKNLVVKNNYNDDLSKEFGMSVTTQLASIEARVLPPPMLKYHDSGKEKMVNPRLGQWNMIDKKMVNGAKVTSWTCVSFSTRIDRGLPQEFCKQLIGMCVSKGMEFKPQPAIPFISCPPEHIEEALLDIHKRAPGLQLLIVILPDVTGSYGKIKRICETELGIVSQCCQPRQVNKLNKQYMENVALKINVKTGGRNTVLNDAIRRNIPLITDRPTIIMGADVTHPQPGEDSSPSIAAVVASMDWPEINKYRGLVSAQAHREEIIQDLYKLVQDPQRGLVHSGLIREHFIAFRRATGQIPQRIIFYRDGVSEGQFSQVLLHEMTAIRKACNSLQENYVPRVTFVIVQKRHHTRLFPEQHGNRDMTDKSGNIQPGTVVDTKICHPNEFDFYLNSHAGIQGTSRPAHYHVLLDENGFTADQLQMLTNNLCYTYARCTKSVSIVPPAYYAHLAAFRARYYMESEMSDGGSSRSRSSTTGVGQVISQLPAIKDNVKEVMFYC

SEQ ID NO: 11728 - DNA, 3177 bp, Oryza sativa subsp. japonica
  CDS (1)..(3177)
atggcctaccgcggcggaggccgaggtggccgcggcggcgagcagcggccgccctactccggccgcggcgacgtccctggccgtggtggcggtggtggtgggggtggagccccgccgtaccgtcccgcctcgggcttcgtgtggccgccgccggggatgacgccgcggccggggcctcctcagccgcagtacccgcggccggggccgccggccgtcgtctacggcgcgccgatgccggcggcgcaccaccagggcgcgtaccagcccgggggcgtgtaccgtgcgccctccccgggggttccggtgatcggtggctacgcgcgcagcacgcccgtcaccatccgggcgcctccgccgtcgcactcgtcggctccggctccgtaccagccggcggcggccgcgccggctccctcgtcgtcctccacggcgccgtccgctacggctctggccaaggagttcgagcagaagctgttcgtgtcggagaccgcgctggcgccacccgcggcggtggcgtcggccgcggccgcgccggctggcgaggcgtcggtggagtcggacaaggatctggcaccggtgtcgaagaaggggctcgcccaccctgcgcggccggggttcggagcggccgggaagaaggtgatgatccgcgcgaaccacttcctcgtcaatgtcgccgacaacaacctcttccactacgatgtttcaatcaatcctgagtcaaaatcaagagcaacaaatagggaagtactcaatgagctcatcaagttgcacgggaagacatctcttggtggcaaattgcctgcctatgatggaagaaagagtctctatactgctggttcactcccttttgaatcggaggagtttgtggttaagctaattgatcccgaaaagaaggataaagaaagggcggagagggagtacaagatcacaattcggattgctggcagaacagacttgtaccacctccagcagtttttgcttggaagacagagggatatgccccaagaaaccattcaagttcttgatgttgtccttagggagtcaccatcttggaattatgtcacagtgtccagatccttcttctctacccagtttggtcaccggggtgacattggtgagggacttgagtgttggagaggttactatcagagcctgcgcccaacacagatgggcctttcgctgaatatagatatatctgcaacgtccttttttaagcctgtgacagtgatccaatttgtggaggagttcctgaacatacgtgacacctcaagacctttgtcagaccgggatcgtgtgaagataaagaaagcattacgtggggttcgcattgaaacaaaccaccaagaggaccaaatcagaagatacaagataacagggattacccccattcctatgagccagctgatatttcctgttgatgataatgggacaaggaagactgttgttcagtacttctgggataggtacaattacagactgaagtacgcttcttggccctgcctacagtctggcagtgattctcgccctgtatacttacctatggaggtgtgcaagattgtagaagggcagaggtactccaagaagcttaatgacaaacaagtgaccaacatccttagagcaacctgtcaacgcccccagcagagggaacagagcattcatgagatggttctccacaacaagtatacagaggataggtttgctcaggagttcggtatcaaggtctgcaatgacctagtctctgttccagcccgtgtgctgcctccacccatgttgaagtatcatgattctggaagggagaaaacttgtgcacccagtgttggacagtggaacatgattaacaagaaaatgatcaatggaggaactgtggataactggacatgtctgagtttttcacgaatgcgtcctgaggaggtacaaaggttctgtggtgacctgattcagatgtgcaatgccactggaatgtctttcaatccaagaccagtcgtggatgtccggtcaacaaatcctaacaatatagagaatgctctgagggatgttcacaggagaacatcagaactgctagccagagagggaaagggaggcctgcagcttttaattgtaattctgcctgaagttagtggttcttatgggaaaattaaaagggtctgtgagactgaccttggcattgtatctcaatgttgtttgccaaggcatgccagcaggccgaacaagcaatatttggaaaatgttgcactcaaaatcaatgtcaaggtcggagggcgcaacactgttcttgagcgagcctttatccgcaatggcataccatttgtgtcagaagtcccaacaatcatctttggcgctgatgtcacacaccctccacctggagaggactctgcatcatctattgctgcggttgtggcatctatggattggcctgaaatcaccaaataccgaggtctggtctctgctcaaccacatagacaggagataatagaagatctctttagtgttggtaaagatccagtgaaggttgtaaatggtgggatgatcagggagttgcttatcgcattccgcaagaagactggcagaaggcctgagaggataatcttctatagagatggtgtaagtgaaggtcagttcagccatgtgcttcttcatgaaatggatgccatcagaaaggcttgtgcatctttggaggagggatatctaccacctgtcacatttgtagtagttcagaaaaggcatcacacaaggcttttcccagaggttcatgggaggcgagacatgactgacaagagcggaaacatccttcctggaactgtcgtggaccgtcagatttgccatcctacagagttcgatttctacctgtgtagccatgctggcatacagggtactagcaggccaactcattaccatgtcctttacgatgagaaccattttacagccgatgcacttcagtccctgaccaacaatctttgctatacctatgcgcgatgcacccgggcagtgtctgtggtcccaccggcctactatgctcatcttgctgcattccgcgctcgctactacgtggaaggagagagttcggatggtggctcgacccctggcagcagcgggcaggctgtggcgcgagagggccctgtggaggtgcgccagcttcccaagatcaaggagaacgtcaaggacgtcatgttctactgctga

SEQ ID NO: 11729 - protein, 1058 aa, Oryza sativa subsp. japonica
MAYRGGGRGGRGGEQRPPYSGRGDVPGRGGGGGGGGAPPYRPASGFVWPPPGMTPRPGPPQPQYPRPGPPAVVYGAPMPAAHHQGAYQPGGVYRAPSPGVPVIGGYARSTPVTIRAPPPSHSSAPAPYQPAAAAPAPSSSSTAPSATALAKEFEQKLFVSETALAPPAAVASAAAAPAGEASVESDKDLAPVSKKGLAHPARPGFGAAGKKVMIRANHFLVNVADNNLFHYDVSINPESKSRATNREVLNELIKLHGKTSLGGKLPAYDGRKSLYTAGSLPFESEEFVVKLIDPEKKDKERAEREYKITIRIAGRTDLYHLQQFLLGRQRDMPQETIQVLDVVLRESPSWNYVTVSRSFFSTQFGHRGDIGEGLECWRGYYQSLRPTQMGLSLNIDISATSFFKPVTVIQFVEEFLNIRDTSRPLSDRDRVKIKKALRGVRIETNHQEDQIRRYKITGITPIPMSQLIFPVDDNGTRKTVVQYFWDRYNYRLKYASWPCLQSGSDSRPVYLPMEVCKIVEGQRYSKKLNDKQVTNILRATCQRPQQREQSIHEMVLHNKYTEDRFAQEFGIKVCNDLVSVPARVLPPPMLKYHDSGREKTCAPSVGQWNMINKKMINGGTVDNWTCLSFSRMRPEEVQRFCGDLIQMCNATGMSFNPRPVVDVRSTNPNNIENALRDVHRRTSELLAREGKGGLQLLIVILPEVSGSYGKIKRVCETDLGIVSQCCLPRHASRPNKQYLENVALKINVKVGGRNTVLERAFIRNGIPFVSEVPTIIFGADVTHPPPGEDSASSIAAVVASMDWPEITKYRGLVSAQPHRQEIIEDLFSVGKDPVKVVNGGMIRELLIAFRKKTGRRPERIIFYRDGVSEGQFSHVLLHEMDAIRKACASLEEGYLPPVTFVVVQKRHHTRLFPEVHGRRDMTDKSGNILPGTVVDRQICHPTEFDFYLCSHAGIQGTSRPTHYHVLYDENHFTADALQSLTNNLCYTYARCTRAVSVVPPAYYAHLAAFRARYYVEGESSDGGSTPGSSGQAVAREGPVEVRQLPKIKENVKDVMFYC

SEQ ID NO: 11730 - DNA, 2940 bp, Oryza sativa subsp. japonica
  CDS (1)..(2940)
atgctcgaggtgctggacatggcgccgccccggcaccagccggcagctgggaaggcgggcggcgggcgcgggcatgggcatgggcatgggcatggtggtggtggtggtgggccggcggcgaggaagcagccgttgcagagtagcatggcgcagcccaaggcggagacggcggcggcgacggcggcggtcgcgccgccggagggagggaagaagtgcggcggcggtggcgggaggcggcgcggcgggcgcgggcgcggcggcagggcgggtgcggggccggggccggggctggcggcggcgccggccgtggtggtggcgcccgcggcgcgcgccgtcattgggccgccggtggcgagcaaggggctgtcgttctgccggcggccggggttcgggacggtgggcgcccggtgcgtcgtgaaggcgaaccacttcctcgccgagctccccgacaaggatctcacccagtacgacgtgaagatcacgccggaggtgagctcccggagcgtgaaccgggcaatcatgtcggagctggtccgcctctaccacgactccgatctcggaggtcgcctcccggcctacgacggccgcaagaacctctataccgccgggacgctcccgttcgacgcgcgcgagttcgtcgtccgcctcaccgacgacgacgacggcaccggcgtcccgccacgggagagggagtacagggtcgccatcaagttcgccgcgcgcgccgacctccaccacctccggcagttcatcgccgggcgccaggccgacgcgccgcaggaggctctccaggtgctcgacatcgtgctccgtgagcttgccaaccgcaggtatgtctcgatagggcggtcgttctactcgccggacataaggaagccgcagcggctcggcgatggcctacagtcatggtgtgggttctaccagagcatccggccgactcagatggggttgtcgcttaacattgatatgtcatctaccgcgttcatcgagccgctaccagtgatcgaattcgtggcccaaatactagggaaggatgtcatatcgaggccattgtcggatgcaaacagaatcaagatcaagaaagccttgcggggcgtgaaagttgaagtcactcaccggggaaatgtgaggcggaagtatcgcatttcagggctgacaacacaaccaactcatgaactgattttcccaatcgatgaccaaatgaacatgaaatctgtcgtagagtatttcaaggaaatgtatggcttcaccattcagcatccccatcttccctgccttcaggtgggaaaccaaaagaaggcaaactatctaccaatggaggcctgtaagattgttgagggtcagagatatacaaagaggttgaatgaaaagcagatcacatcattactcaaggttacttgccgtaggcctagagaacaggagatggatattctacagacagttcaacaaaatggatatgagcaagacccttatgcaaaagaatttggaatcaacattagtgagaagctaacctcagttgaagctcgggtccttcctgcaccttggctgaaatatcatgatactgggaaggaaaaggagtgcttgccacaagttggtcagtggaacatggtgaacaagaaagtgataaatgggtgcaaggtgaatcattgggcttgtataaatttctcaaggagtgtgcaagaaactactgctcggggattctgccaggagttggcacaaatgtgtcagatatccggcatggaattcaacagtgagcctgtgataccaatatactcagctagaccagatcaagtagagaaggcgcttaagcatgtgtataatatgtcattaaacaagctcaagggaaaagagcttgagcttcttttggccatcctccctgacaacaatggttctttatatggtgatataaaacgtatatgtgaaactgacttggggttgatatcacaatgttgcttaaccaaacatgttttcaagatcagcaagcagtacctggcaaatgtctcacttaaaatcaatgttaagatgggaggaagaaacaccgtgctgctggatgcaataagttggaggattcctttggtcagtgacataccaactattatatttggtgcagatgtcacgcatcctgaaaccggggaggactctagcccatccattgctgctgttgttgcatctcaagactggccagaagttacaaagtatgctggattggtgtgtgctcaggctcatcggcaagagctcattcaagatctttacaagacatggcatgatcctcaaagaggcaccgtaacaggaggcatgatcagggagctcttaatatccttcaggaaggccactgggcaaaagccattgagaataattttctacagggatggtgtcagtgaaggccaattctaccaagttctcctctatgagttggatgctatccgcaaggcatgtgcatctctagaaccaaattatcagcctcctgtaacattcgtggttgtccaaaagcgtcaccatacaagactcttcgcaaacaatcacaaagacagaagtagcacggacaaaagtggaaacattttgcctggaactgttgttgattcaaagatctgccacccatcagagtttgatttctacctctgtagccatgctggaattcagggaacaagtaggccagctcactaccacgtcctttgggatgagaacaatttcactgcagacgaaatgcagacattgacaaacaacctttgctacacttatgcacggtgcacacgctctgtttctgttgttccacctgcatactatgcgcatctggctgcgtttcgagcgcggttctacatggagccagagatgtcggagaaccagacgacgtcgaagagctccactgggacgaacggaacctcggtgaagccattgcctgcggtgaaggagaaggtgaagagggtgatgttctactgttga

SEQ ID NO: 11731 - protein, 979 aa, Oryza sativa subsp. japonica
MLEVLDMAPPRHQPAAGKAGGGRGHGHGHGHGGGGGGPAARKQPLQSSMAQPKAETAAATAAVAPPEGGKKCGGGGGRRRGGRGRGGRAGAGPGPGLAAAPAVVVAPAARAVIGPPVASKGLSFCRRPGFGTVGARCVVKANHFLAELPDKDLTQYDVKITPEVSSRSVNRAIMSELVRLYHDSDLGGRLPAYDGRKNLYTAGTLPFDAREFVVRLTDDDDGTGVPPREREYRVAIKFAARADLHHLRQFIAGRQADAPQEALQVLDIVLRELANRRYVSIGRSFYSPDIRKPQRLGDGLQSWCGFYQSIRPTQMGLSLNIDMSSTAFIEPLPVIEFVAQILGKDVISRPLSDANRIKIKKALRGVKVEVTHRGNVRRKYRISGLTTQPTHELIFPIDDQMNMKSVVEYFKEMYGFTIQHPHLPCLQVGNQKKANYLPMEACKIVEGQRYTKRLNEKQITSLLKVTCRRPREQEMDILQTVQQNGYEQDPYAKEFGINISEKLTSVEARVLPAPWLKYHDTGKEKECLPQVGQWNMVNKKVINGCKVNHWACINFSRSVQETTARGFCQELAQMCQISGMEFNSEPVIPIYSARPDQVEKALKHVYNMSLNKLKGKELELLLAILPDNNGSLYGDIKRICETDLGLISQCCLTKHVFKISKQYLANVSLKINVKMGGRNTVLLDAISWRIPLVSDIPTIIFGADVTHPETGEDSSPSIAAVVASQDWPEVTKYAGLVCAQAHRQELIQDLYKTWHDPQRGTVTGGMIRELLISFRKATGQKPLRIIFYRDGVSEGQFYQVLLYELDAIRKACASLEPNYQPPVTFVVVQKRHHTRLFANNHKDRSSTDKSGNILPGTVVDSKICHPSEFDFYLCSHAGIQGTSRPAHYHVLWDENNFTADEMQTLTNNLCYTYARCTRSVSVVPPAYYAHLAAFRARFYMEPEMSENQTTSKSSTGTNGTSVKPLPAVKEKVKRVMFYC

SEQ ID NO: 11732 - DNA, 3210 bp, Brassica napus
  CDS (1)..(3210)
atggtgaggaagaagagaactgatggtccatctgaaggaggtgaagcatctggttcccgtgatgctgctccagcctcaggtggtggatatcagcaggggagaggaggaggaggagcaggacagcagcaaggtggaagaggttatagtcctcagtctcaaccgggaggtcgtggtggtggtcgtggatatggccaaccacaacagcagcagtacggtggtcctagagaaggccatacaccacaacagcagcaacagcagtacggtggaccaagaggtggatcaagagaaggccagccaccacaacagcagcaccaacagtacggtggaccaagaggaggacctcctcgtggtggtggccgtggaggtgcatcctctgctggactgccgcagagacaatcagttcccgagctgcatcaagctaccttaccaacttatcaagcggtgtcttctcagcctacaccgtctgaggtgaggcctactcagatgccggatcctcctgctccggtacaagaatttgaacagctctctattgagcaaggagctcccagccaagcaatccagcccattccatcttccagcaaagcttgtaagtttccactgaggcctggtaaaggacagattggcaagcgatgcattgtaaaggccaaccacttctttgccgagttacctgataaagatttgcaccagtatgacgtaaccattactccagaagttacatcaaggggtgtcaatcgtgctgtgatgaaacagttggttgacttgtatcgtgaaacacaccttggaagacgtcttcctgcatatgatgggcgaaaaagtctctacactgctggaccgcttccatttgtttccaaagaattcagaatcttacttcaggacgaggaagaaggggcggggggacaaagacgagaaagggagttcaaagttgtgatcaagctagctgcacgtgctgatctacatcacctaggaatgtttctacaagggaaacaagctgatgccccgcaggaggctctgcaggttcttgacattgttcttcgtgagctgccaacttcaaaagagaggtatactcctgtggcccggtcattttattctccggacataggaagaaagcaatcattgggggatggcctggagagctggcgtggattctaccaaagcattcgtcccacacagatgggcttatcactcaacatagatatgtcatcgacagcattcatagaggcacttcctgtgaccgaatttgtctgccagttgctgaatagggatattagatcccggcctttatccgatgctgatcgtgtcaagataaaaaaggcgcttagaggtgtgaaggttgaagtgacccatagaggaaacatgcgccgaaagtaccgcatttcgggcctgaccgctgtggccactcgagaactgacatttcctgtcgatgaaagaaacacccagaaatctgttgttgaatacttctacgaaacatatggctttcgcattcagcacacacagctaccatgcttgcaagttgggaattctaacaggccaaattatttaccaatggaggtctgcaagattgttgagggacagaggtactcaaaaaggttgaacgagagacagatcactgctcttctgaaggtgacttgtcagcgcccccaagaacgtgaaaaggatatcttgcggacggtagggctcaatgattatgatcacgatccctatgctaaggagtttggaatcaagataagcgcatcccttgcttctgttgaggctcgaattctgcctcctccatggctcaagtatcatgattctgggagggaagggacttgtctgccacaagttggacagtggaatatgatgaaaaaaaaaatgatcaatggcggaacagtgagcaactggatctgcattaacttctctaggcaagtgccagacaatatggcacgttctttctgtcaggaacttgctcagatgtgccacatatctggcatggcctttaatccggaaccagtcctcccacccgttagtgctcgccctgagcatgtggagaaagtcctgaaaactcgatatcatgatgccatggccaagctatctcaaggaaaagagattgatctccttattgtcattctcccagacaataatggatcattatatggtgatctgaagcgcatctgtgagaccgaactcggcattgtgtctcagtgctgcctgactaagcatgtcttcaagatgagcaaacagtatatggctaacgtggctttgaaaattaatgtcaaagctggaggaaggaatactgtacttgttgatgccttatctaggcgaattcctctggtcagtgatcgccccaccataatctttggtgctgatgtaacacatcctcatcctggagaggactcaagcccgtccattgctgccgtcgtcgcttcccaagactggcctgaaattacgaaatatgctggcttggtttgtgctcaagcgcacagacaggagctcattcaggatctcttcaaagaatggaaggacccgcagaaaggggtggtgactggtggcatgataaaggagttacttatagccttccgtagatcaactgggcataagccgttaaggatcatattctacagggacggagtcagtgaaggacaattctatcaggttttgctctacgagcttgatgccatccgcaaggcatgtgcctcgctggaagcaggttatcagccaccagtgacgtttgtggtggtgcagaagcgccatcacacaagactatttgctcataatcacaatgaccgcaattcagtggacagaagtggaaacatattaccaggaaccgtcgtggattccaaaatctgtcaccccactgagttcgacttttacctctgtagccatgctggtattcagggtacttcccgacctgctcattaccacgttctttgggatgagaacaacttctctgcagatggactccagtctctgacaaataacttatgttacacgtatgcgagatgtactcgttctgtatccattgtgccgcccgcttactatgctcatctagcagcgttcagggctcggttctacatggagccagagacgtcagacagtggttcgatggctagcgggagcatggcacgtggaggtggtatgggtggtagaaacatgcgtgggcctcacgtgaacgctgctgtgagaccactcccacctttgaaagataacgtgaagcgagttatgttctactgctga

SEQ ID NO: 11733 - protein, 1069 aa, Brassica napus
MVRKKRTDGPSEGGEASGSRDAAPASGGGYQQGRGGGGAGQQQGGRGYSPQSQPGGRGGGRGYGQPQQQQYGGPREGHTPQQQQQQYGGPRGGSREGQPPQQQHQQYGGPRGGPPRGGGRGGASSAGLPQRQSVPELHQATLPTYQAVSSQPTPSEVRPTQMPDPPAPVQEFEQLSIEQGAPSQAIQPIPSSSKACKFPLRPGKGQIGKRCIVKANHFFAELPDKDLHQYDVTITPEVTSRGVNRAVMKQLVDLYRETHLGRRLPAYDGRKSLYTAGPLPFVSKEFRILLQDEEEGAGGQRREREFKVVIKLAARADLHHLGMFLQGKQADAPQEALQVLDIVLRELPTSKERYTPVARSFYSPDIGRKQSLGDGLESWRGFYQSIRPTQMGLSLNIDMSSTAFIEALPVTEFVCQLLNRDIRSRPLSDADRVKIKKALRGVKVEVTHRGNMRRKYRISGLTAVATRELTFPVDERNTQKSVVEYFYETYGFRIQHTQLPCLQVGNSNRPNYLPMEVCKIVEGQRYSKRLNERQITALLKVTCQRPQEREKDILRTVGLNDYDHDPYAKEFGIKISASLASVEARILPPPWLKYHDSGREGTCLPQVGQWNMMKKKMINGGTVSNWICINFSRQVPDNMARSFCQELAQMCHISGMAFNPEPVLPPVSARPEHVEKVLKTRYHDAMAKLSQGKEIDLLIVILPDNNGSLYGDLKRICETELGIVSQCCLTKHVFKMSKQYMANVALKINVKAGGRNTVLVDALSRRIPLVSDRPTIIFGADVTHPHPGEDSSPSIAAVVASQDWPEITKYAGLVCAQAHRQELIQDLFKEWKDPQKGVVTGGMIKELLIAFRRSTGHKPLRIIFYRDGVSEGQFYQVLLYELDAIRKACASLEAGYQPPVTFVVVQKRHHTRLFAHNHNDRNSVDRSGNILPGTVVDSKICHPTEFDFYLCSHAGIQGTSRPAHYHVLWDENNFSADGLQSLTNNLCYTYARCTRSVSIVPPAYYAHLAAFRARFYMEPETSDSGSMASGSMARGGGMGGRNMRGPHVNAAVRPLPPLKDNVKRVMFYC

SEQ ID NO: 11734 - DNA, 2925 bp, Glycine max
  CDS (1)..(2925)
atgccagtgaggcagatgaaagaaagttcggagcaacaccttgtgatcaaaccacatttgcagaatcctatgaatcaagccaagaagacaaccaaagctgcacaaaatggcaaaggtccaccgccacaagaaaaccataaccaaacttcgccacactcaaagaacaagggaaggagaagagggagaggtggcagaaaacctgatcaaggagatgttatgatgaggcctagttgcaggccatgcactgcaacactaacaagtactgcaaatgagaatgctgaaaatggttgcatctctgatatgggttttcccacttcaagcaagtctttgacctttgctcctaggcctggatatggacaagttgggacaaaatgcattgtgaaggctaaccacttctttgcagagttaccagacaaggacttgaaccaatatgatgttactattaccccagaagtgtcttctagaacagtaaacaggtctatcatagcagaactagtgaggctgtataaagagtctgacttggggatgagacttccagcatatgatggcagaaaaagtttgtacactgcagggcagcttccctttgcttggagagagtttaagattaagcttatagatgaagaggatggagttaatggccctaaaagggaaagagagtacagggtggtgatcaagttcgttgctcgggctaacttgtatcacttgggacagtttctagctggtaggcgtgctgatgcaccgcaagaggcacttcaaattcttgacattgtattaagagagctgtcaactaagaggtattgccctattgggaggtccttcttttcacctgatattagaacaccgcaacggcttggagagggattagaatcatggtgtggattttaccagagtataaggcctacacaaatgggcctttcccttaatattgatatggcgtctgctgcgtttattgagcctcttccagtagtggaatttgttggccagctattagcaaaagatgtgctgtcaaggccattgtcagatgctgatcgcattaagattaagaaagcccttagaggagttaaagttgaagtaacacacagaggaagtgtgagaagaaaatatcgtgtttctggattgacttctcaaccaaccagagaacttgtgtttcctgttgatgagaactcaactatgaaatcagtagttgaatacttccaagagatgtatggtttcactattcaatatactcaccttccttgccttcaagtaggaaaccaaaagaaggctaactatttacctatggaggcctgcaaaattgttgaggggcaacgttatacaaaaagattgaatgagaagcaaattacagctctgttgaaagttacttgccagagacctcgcgatcgggaaaatgacattttacggaccgttcaacataatgcttatgatcaagatccttatgcaaaggaatttggaattaaaatcagtgaaaagctagcttctgttgaagcacgaattcttcctgccccttggcttaaatatcacgaaagtgggaaagaaaagaactgtttaccccaagttggtcagtggaatatgatgaacaagaaaatgattaatggaatgactgttagccggtgggcatgcataaatttttcaagaagcgtgcaagacagtgttgctcgcactttttgtaatgaactagctcaaatgtgccaagtatctggcatggaatttaatccagagcctgttatccccatctacaatgccaaacctgaacaggtggaaaaagctttgaaacatgtttaccatgtgtcaacaaacaaaactaaaggaaaggaattggagcttttgttagcaatattgccagacaacaacgggtctctctatggtgatctcaagcgaatttgtgaaactgaccttggtttaatttcacaatgctgtctgacaaagcatgtcttcaaaatcactaaacagtacttggctaatgtgtctctgaagatcaatgtgaagatgggaggtagaaacactgtacttcttgatgctgtaagcagcagaataccattggttagtgacatgccaaccataattttcggagcagatgtaacccaccctgaaaatggagaagaattgagcccttcaatagcagctgtagtcgcatcccaggactggcccgaagtgacaaaatatgccggtttagtatgtgctcaagctcataggcaggaacttatacaagatttgtacaaaacttggcaagaccctgttcgtggcacagttagtggtggcatgatccgagatttactggtttccttcagaaaggcaacaggacaaaagccactacgaattatattttacagggatggtgtaagtgaaggacaattttaccaagttttactttatgagttagatgcaattcggaaggcatgtgcttccttagaaccaaactaccagcctccagtaactttcatagttgtgcaaaaaagacatcatacccggttatttgcaaacaactacagggacagaagcagtacagatcggagtgggaatatattgcctgggactgttgttgataccaaaatctgccatccaacagaatttgatttttatctctgcagccatgctggcatccagggtactagtcggccagctcattatcatgtcctgtgggatgaaaacaacttcacacctgatggaattcagtctctgacaaacaacctttgttatacatatgccaggtgtacacgctcagtatcagttgttcctccagcatattatgcacatttagcagcgtttcgagcacgtttctatatggaaccagatatgcaagacaatggctctgcaggtgacggtaatggtcatggtgccaaagcaacacgagcagctggtgattatagtgtcaagccattgccagacttgaaagaaaatgtgaagagagtcatgttttactgttag

SEQ ID NO: 11735 - protein, 974 aa, Glycine max
MPVRQMKESSEQHLVIKPHLQNPMNQAKKTTKAAQNGKGPPPQENHNQTSPHSKNKGRRRGRGGRKPDQGDVMMRPSCRPCTATLTSTANENAENGCISDMGFPTSSKSLTFAPRPGYGQVGTKCIVKANHFFAELPDKDLNQYDVTITPEVSSRTVNRSIIAELVRLYKESDLGMRLPAYDGRKSLYTAGQLPFAWREFKIKLIDEEDGVNGPKREREYRVVIKFVARANLYHLGQFLAGRRADAPQEALQILDIVLRELSTKRYCPIGRSFFSPDIRTPQRLGEGLESWCGFYQSIRPTQMGLSLNIDMASAAFIEPLPVVEFVGQLLAKDVLSRPLSDADRIKIKKALRGVKVEVTHRGSVRRKYRVSGLTSQPTRELVFPVDENSTMKSVVEYFQEMYGFTIQYTHLPCLQVGNQKKANYLPMEACKIVEGQRYTKRLNEKQITALLKVTCQRPRDRENDILRTVQHNAYDQDPYAKEFGIKISEKLASVEARILPAPWLKYHESGKEKNCLPQVGQWNMMNKKMINGMTVSRWACINFSRSVQDSVARTFCNELAQMCQVSGMEFNPEPVIPIYNAKPEQVEKALKHVYHVSTNKTKGKELELLLAILPDNNGSLYGDLKRICETDLGLISQCCLTKHVFKITKQYLANVSLKINVKMGGRNTVLLDAVSSRIPLVSDMPTIIFGADVTHPENGEELSPSIAAVVASQDWPEVTKYAGLVCAQAHRQELIQDLYKTWQDPVRGTVSGGMIRDLLVSFRKATGQKPLRIIFYRDGVSEGQFYQVLLYELDAIRKACASLEPNYQPPVTFIVVQKRHHTRLFANNYRDRSSTDRSGNILPGTVVDTKICHPTEFDFYLCSHAGIQGTSRPAHYHVLWDENNFTPDGIQSLTNNLCYTYARCTRSVSVVPPAYYAHLAAFRARFYMEPDMQDNGSAGDGNGHGAKATRAAGDYSVKPLPDLKENVKRVMFYC

SEQ ID NO: 11736 - DNA, 3309 bp, Hordeum vulgare
  CDS (1)..(3309)
atggttaggaagaaaagaactggtcctggcagccctggtgagagttctggggaagcttcgggagcttctggacagggttcctcgcagcgagctgagagagctcctcaacagcatggtggaggacgtggtttggcaccgcaacacggtagccgtggtggggggcaacatcagggccgtggtgggcactatcaggggtatggaggatcagcttcacaccatccaggtggtggcccacctgaatatcaacagcgtgactatcaggggcgtggacatcccggtggcggtccacctgaatatcaacatcgtgactatcaggggcgtggacatccggggggtggcccacctgaatatcaaccacgtgactatcagggacgtggtggtgcacgccccagaggtggtggagtgccgcagccatactatggtgggcataggggaggaagtgcaggacacaatgttcctccaggtcaatcaagaacagttcccgagctgcaccaagcaccacatgtccaatatcaagccccgatggtttcaccatccgcatcgggagctggctcatcctctcagcccgtggcagaggtgagcagtggacaagtccagcaacagtttcagaaacttgacatcagcgatcaaagttcaacaagccaagccagtcaaccggcaccagcatcaagcaaatcagttagattcccattgcgccctggaaagggtaaacatggggataggtgtgtggtgaaagcaaaccatttcttcgcggagctccctgataaagaccttcaccaatacgacgtgaccataacgccagagattacatcacgcggtgtcaatcgtgctgtgatggcagaacttgtaaagctgtatagacaatctcatatgaatggacggctacctgcctatgatggaaggaagagcctatatacagctgggccattaccatttactacaaggacatttgaaatcactctgcaagatgaagaagaaagcctcggtagtgggcaagccacaccaaggcgtgagagacaattcagagtggtcatcaagtatgctgcccgtgctgatctccaccatttggctatgtttctagccggaaggcaaccagatgcaccccaagaagctcttcaggtgcttgacattgtgctacgggaactgcctactgccaggtattccccagttagcagatcattttattctcccaacctaggaagacgtcagaaacttggggacggactggaaagctggcgtggattttaccaaagtataagacctacgcagatggggctttcgctgaatattgatatgtcttctacagcatttatcgagcctctccctgtgattgagtttgttgctcagcttctgagcagagacatctcagttagacccctaactgattcagatcgtgtgaagattaaaaaagccctacgaggtgtaaaggttgaggttacacatagaggaaacatgcgtaggaaataccgtatatctggcctcacatcacaagcaacgcgagagctatcattccctgttgatgatcgcggtactgtgaagactgtggtgcaatacttcctggagacgtatggtttcaatattcagcacaccactttaccatgcttgcaagtcggtaatcagcaaaggccaaattatctccccatggaggtttgtaaaattgttgaaggacaacgctactcaaaacgactgaatgaaaaacaaataactgctctactgaaagtgacttgccagcgccctcaagagcgtgagaaggacatcttgcagactgtgcatcacaatgcgtactacgaagatccatatgcacaggaatttggcataaaaattgatgagcaacttgcatcggttgaagctcgtgttctgcctccgccaaggcttaagtaccatgatagtggcagagagaaggatgtcttacccagggtcggccagtggaacatgatgaacaagaaaatggtcaatggtggtagagtcagccactgggcatgtataaacttctctcggaatgtgcaagataatgctgccaagggtttctgtcatgagctggctataatgtgccaaatatctggaatgaactttgcacctgaacctgtgctgcccccacttactgcgagacctgaacacgtagaaagagcactaaaggcacgttatcaagatgccatgaacacaagcaaaccccaaggaaaagaacttgacctgctaattgtaatactgccggacaataatggttctctttatggggatctcaaaaggatttgtgagactgatcttggattggtatctcagtgttgtctgacgaaacatgtttttaagatgagcaagcagtatcttgcaaatgtagctcttaaaatcaatgttaaggtcggaggaaggaatactgtacttgtggatgctttgacaaggaggattccccttgttagtgacagaccgaccataatatttggtgctgatgttacacatcctcatcctggagaagattccagcccttccattgcagctgtggttgcttcccaagactggcctgagataactaagtacgcaggattagtgagcgcccaagcccataggcaagaactgatacaggatctttttaaagtatggcaagatccccaaagaggaactgtgactggtggcatgatcaaggagcttctcatttctttcaagagggcaaccggacagaaaccccagagaatcatattttacagggatggtgtcagcgagggccagttctatcaagttcttctgtatgaacttgatgccattagaaaggcatgtgcgtccttggagcccaattaccagcccccagttacttttgtagttgtccagaagcggcaccacaccaggctttttgctaacaaccacaatgatcaacgtactgtcgatagaagcgggaacatactgcctggcaccgttgttgattcgaagatctgccatccgacagaattcgatttctacttgtgtagccatgctggcattcagggaacaagccggcctgcccactatcatgttctctgggacgagaacaaatttactgctgatgagttgcaaactctcacaaacaacctgtgctacacgtatgctcgatgcacccgctctgtatcgattgttcctcctgcatactatgcccatctggcagccttccgggctcggttctacatggagccggacacctccgacagcgggtccgtggcgagcggtgcacgtggcggtcctccacagggcggtccacgcagcagcaccaggtttgggaacgttgctgtcaggcctctccccgccctcaaggaaaacgtcaagcgcgtcatgttttactgctaa

SEQ ID NO: 11737 - protein, 1102 aa, Hordeum vulgare
MVRKKRTGPGSPGESSGEASGASGQGSSQRAERAPQQHGGGRGLAPQHGSRGGGQHQGRGGHYQGYGGSASHHPGGGPPEYQQRDYQGRGHPGGGPPEYQHRDYQGRGHPGGGPPEYQPRDYQGRGGARPRGGGVPQPYYGGHRGGSAGHNVPPGQSRTVPELHQAPHVQYQAPMVSPSASGAGSSSQPVAEVSSGQVQQQFQKLDISDQSSTSQASQPAPASSKSVRFPLRPGKGKHGDRCVVKANHFFAELPDKDLHQYDVTITPEITSRGVNRAVMAELVKLYRQSHMNGRLPAYDGRKSLYTAGPLPFTTRTFEITLQDEEESLGSGQATPRRERQFRVVIKYAARADLHHLAMFLAGRQPDAPQEALQVLDIVLRELPTARYSPVSRSFYSPNLGRRQKLGDGLESWRGFYQSIRPTQMGLSLNIDMSSTAFIEPLPVIEFVAQLLSRDISVRPLTDSDRVKIKKALRGVKVEVTHRGNMRRKYRISGLTSQATRELSFPVDDRGTVKTVVQYFLETYGFNIQHTTLPCLQVGNQQRPNYLPMEVCKIVEGQRYSKRLNEKQITALLKVTCQRPQEREKDILQTVHHNAYYEDPYAQEFGIKIDEQLASVEARVLPPPRLKYHDSGREKDVLPRVGQWNMMNKKMVNGGRVSHWACINFSRNVQDNAAKGFCHELAIMCQISGMNFAPEPVLPPLTARPEHVERALKARYQDAMNTSKPQGKELDLLIVILPDNNGSLYGDLKRICETDLGLVSQCCLTKHVFKMSKQYLANVALKINVKVGGRNTVLVDALTRRIPLVSDRPTIIFGADVTHPHPGEDSSPSIAAVVASQDWPEITKYAGLVSAQAHRQELIQDLFKVWQDPQRGTVTGGMIKELLISFKRATGQKPQRIIFYRDGVSEGQFYQVLLYELDAIRKACASLEPNYQPPVTFVVVQKRHHTRLFANNHNDQRTVDRSGNILPGTVVDSKICHPTEFDFYLCSHAGIQGTSRPAHYHVLWDENKFTADELQTLTNNLCYTYARCTRSVSIVPPAYYAHLAAFRARFYMEPDTSDSGSVASGARGGPPQGGPRSSTRFGNVAVRPLPALKENVKRVMFYC

SEQ ID NO: 11738 - DNA, 3258 bp, Zea mays
  CDS (1)..(3258)
atggtgaggaagaagagaactggccctggtagctctggagaaacttctggagagtcttcaggagcctctggacaaggttcctcacagcagcctgagcgaactcaacaacctgggggaggacgtggctgggtgcctcaacagggtggccatagtggtgggcaacaccagggccgtgatcgacattatcagggacgtggaggaccagggccacatcaccttggtagtggggcacctgagtatcacccgcgtgaataccagggacgtggtggtgaatatcagggacatggtggtgagtaccagggacggggtggtgactaccagggacgtggtggtggccgctccagaggtggaatgccacagccatactatggtgggcataggggaggtaatgttggacacaatgttcctccaggtccatccaggacagttcccgagctgcaccaagccccatatgtccagtatccagccccggtggtttcaccctccccatcgggacctggctcatcctcacagcctatggcagaggtgagctctggacaagtccagcaacagtttcagcaacttgccgatcgtggtcagagttccacgagccaagaaattcaagtggcaccagcatcaagcaaatcggttcgattcccgttacggcccggcaagggcacttatggggacaggtgcattgtgaaggcaaatcatttttttgctgagcttcctgacaaagaccttcaccaatatgatgtatctataacacctgaggttacttcacgtggcgtcaatcgtgctgtcatgggtgagcttgtaacaatatatagacaatcccatttgggtgggcgtctacctgcatacgatggaagaaagagcctgtatactgctggaccattgccatttacttctatggcatttgaaattaccttgcaagatgaggaagatagtcttggcggtcgccaaggtggacataggcgtgagagagtatttagggtggtgatcaaatttgcagcccgtgctgatctccaccatctggctatgtttctagctggaaggcaagcagatgcccctcaggaagctcttcaagtgcttgacattgtactacgtgaattgcctaccgcgaggtattctcctgtcggtaggtcattttactctcccaacttagggagacgtcaaaaacttggtgagggattggaaagttggcgtggtttttaccaaagcataaggccgacacagatgggcctttcactgaatattgatatgtcctctactgcatttatcgagcctctccctgtgatcgattttgttgctcagcttcttaacagagatatctcagttaggccattgtctgattctgatcgcgtgaagattaaaaaagccctaagaggtgtgaaggttgaggtgactcacaggggaaacatgcgcagaaaatatcgcatttctggcctcacctcacaagcaacaagagagctatcattccctgttgatgatcgtggtactgtgaagactgtggtgcaatacttcatggagacttatggttttagtatccagcacaccactttaccatgcttgcaagtgggtaatcaacaaagaccaaattatctgcctatggaggtttgcaagatagttgaaggacagcgttactcaaagcgactcaatgagaaacaaatcactgctctactgaaagtgacctgccagcgccctcaagagcgcgagctggacatcttacagactgtgcatcacaatgcatactatgaagacccctatgcactggaatttggtataagaattgatgaacgtcttgctgcagttgaagctcgtgttctgccaccaccaagacttaaataccatgatagtggccgagagaaggatgttttgcccagagttggccaatggaacatgatgaataagaaaatggttaatggtggcagagtgagcaactgggcatgtattaacttctctcggaatgtgcaagatagtgccgctaggggtttctctcatgagttggcagtcatgtgccaaatatcaggaatggattttgctcttgagcctgtgctgcctccagtgactgcaaggccagaacatgttgagagagcgttaaaggcacgttatcaagatgcaatgaacatactgaggccacagggaagggaacttgatctgctgatcgtaatactgcctgacaacaatggttctctttatggggatctcaaaaggatctgtgagactgaactcggattggtctcccagtgttgtctgactaaacatgtttttaagatgagcaagcagtaccttgcaaatgttgcactcaaaataaatgttaaggttgggggaaggaatactgtacttttagatgctttgtcaaggagaatcccccttgtcagtgacagaccgaccataatatttggtgctgatgttacccatccacatcctggagaagattccagtccttccattgcagccgttgttgcttcgcaagactggcccgaggtcacgaaatacgctggactagtgagtgcgcaagcccatcgccaggagctgatacaggatcttttcaaagtatggcaggacccgcagagaaggacggtaactggcggcatgataaaggaacttctcatttctttcaagagggcaactggacagaagccccagaggatcatattctacagggatggtgtcagtgagggacagttctatcaagtattgctgtacgaacttgatgccattagaaaggcctgtgcgtccctggagcccaactaccagcctccagttacttttgtcgtggtacagaagcgccatcacactaggctgtttgcgaacaaccacagtgatcagcgcacagtcgatagaagcggaaacatactgcctggcaccgtggtcgattcgaagatttgccatcctactgagtttgacttctacctgtgtagccatgctggcattcagggaacgagccgccctgctcactaccatgtcctgtgggacgagaacaagttcacagctgacgagctgcagaccctgacgaacaacctgtgctacacgtacgctaggtgcacccgctccgtgtccatcgtgcccccggcgtactacgctcatctggcagccttccgagctcgcttctacatggagccagacacctctgacagcgggtcactggccagcggtgcccgtggccccccacccggtgcggcacgcagcagcacgagaggggccgggagtgtcgaggtcaggcccctacctgctctcaaggagaacgtgaagcgtgtcatgttttactgctga

SEQ ID NO: 11739 - protein, 1085 aa, Zea mays
MVRKKRTGPGSSGETSGESSGASGQGSSQQPERTQQPGGGRGWVPQQGGHSGGQHQGRDRHYQGRGGPGPHHLGSGAPEYHPREYQGRGGEYQGHGGEYQGRGGDYQGRGGGRSRGGMPQPYYGGHRGGNVGHNVPPGPSRTVPELHQAPYVQYPAPVVSPSPSGPGSSSQPMAEVSSGQVQQQFQQLADRGQSSTSQEIQVAPASSKSVRFPLRPGKGTYGDRCIVKANHFFAELPDKDLHQYDVSITPEVTSRGVNRAVMGELVTIYRQSHLGGRLPAYDGRKSLYTAGPLPFTSMAFEITLQDEEDSLGGRQGGHRRERVFRVVIKFAARADLHHLAMFLAGRQADAPQEALQVLDIVLRELPTARYSPVGRSFYSPNLGRRQKLGEGLESWRGFYQSIRPTQMGLSLNIDMSSTAFIEPLPVIDFVAQLLNRDISVRPLSDSDRVKIKKALRGVKVEVTHRGNMRRKYRISGLTSQATRELSFPVDDRGTVKTVVQYFMETYGFSIQHTTLPCLQVGNQQRPNYLPMEVCKIVEGQRYSKRLNEKQITALLKVTCQRPQERELDILQTVHHNAYYEDPYALEFGIRIDERLAAVEARVLPPPRLKYHDSGREKDVLPRVGQWNMMNKKMVNGGRVSNWACINFSRNVQDSAARGFSHELAVMCQISGMDFALEPVLPPVTARPEHVERALKARYQDAMNILRPQGRELDLLIVILPDNNGSLYGDLKRICETELGLVSQCCLTKHVFKMSKQYLANVALKINVKVGGRNTVLLDALSRRIPLVSDRPTIIFGADVTHPHPGEDSSPSIAAVVASQDWPEVTKYAGLVSAQAHRQELIQDLFKVWQDPQRRTVTGGMIKELLISFKRATGQKPQRIIFYRDGVSEGQFYQVLLYELDAIRKACASLEPNYQPPVTFVVVQKRHHTRLFANNHSDQRTVDRSGNILPGTVVDSKICHPTEFDFYLCSHAGIQGTSRPAHYHVLWDENKFTADELQTLTNNLCYTYARCTRSVSIVPPAYYAHLAAFRARFYMEPDTSDSGSLASGARGPPPGAARSSTRGAGSVEVRPLPALKENVKRVMFYC

SEQ ID NO: 11740 - DNA, 21 bp, Artificial sequence
  primer
atggattcaacaaatggtaac

SEQ ID NO: 11741 - DNA, 22 bp, Artificial sequence
  primer
ttaacagaagaacatggagttg

SEQ ID NO: 11742 - protein, 1161 aa, Artificial sequence
  consensus sequence
  Variant (2)..(3): Xaa in position 2 to 3 is any amino acid
  Variant (5)..(8): Xaa in position 5 to 8 is any amino acid
  Variant (9)..(11): Xaa in position 9 to 11 is any or no amino acid
  Variant (15)..(22): Xaa in position 15 to 22 is any amino acid
  Variant (23)..(30): Xaa in position 23 to 30 is any or no amino acid
  Variant (32)..(32): Xaa in position 32 is any amino acid
  Variant (34)..(40): Xaa in position 34 to 40 is any amino acid
  Variant (41)..(56): Xaa in position 41 to 56 is any or no amino acid
  Variant (58)..(77): Xaa in position 58 to 77 is any amino acid
  Variant (78)..(79): Xaa in position 78 to 79 is any or no amino acid
  Variant (82)..(84): Xaa in position 82 to 84 is any amino acid
  Variant (86)..(86): Xaa in position 86 is any amino acid
  Variant (88)..(88): Xaa in position 88 is any amino acid
  Variant (89)..(90): Xaa in position 89 to 90 is any or no amino acid
  Variant (93)..(100): Xaa in position 93 to 100 is any amino acid
  Variant (101)..(108): Xaa in position 101 to 108 is any or no amino acid
  Variant (110)..(113): Xaa in position 110 to 113 is any amino acid
  Variant (114)..(155): Xaa in position 114 to 155 is any or no amino acid
  Variant (157)..(172): Xaa in position 157 to 172 is any amino acid
  Variant (173)..(174): Xaa in position 173 to 174 is any or no amino acid
  Variant (176)..(179): Xaa in position 176 to 179 is any amino acid
  Variant (180)..(186): Xaa in position 180 to 186 is any or no amino acid
  Variant (188)..(190): Xaa in position 188 to 190 is any amino acid
  Variant (193)..(195): Xaa in position 193 to 195 is any amino acid
  Variant (197)..(205): Xaa in position 197 to 205 is any amino acid
  Variant (206)..(210): Xaa in position 206 to 210 is any or no amino acid
  Variant (212)..(213): Xaa in position 212 to 213 is any amino acid
  Variant (216)..(223): Xaa in position 216 to 223 is any amino acid
  Variant (224)..(254): Xaa in position 224 to 254 is any or no amino acid
  Variant (257)..(257): Xaa in position 257 is any amino acid
  Variant (259)..(263): Xaa in position 259 to 263 is any amino acid
  Variant (266)..(267): Xaa in position 266 to 267 is any amino acid
  Variant (269)..(269): Xaa in position 269 is any amino acid
  Variant (271)..(272): Xaa in position 271 to 272 is any amino acid
  Variant (274)..(276): Xaa in position 274 to 276 is any amino acid
  Variant (277)..(277): Xaa in position 277 is any or no amino acid
  Variant (282)..(282): Xaa in position 282 is any amino acid
  Variant (284)..(284): Xaa in position 284 is any amino acid
  Variant (286)..(291): Xaa in position 286 to 291 is any amino acid
  Variant (294)..(295): Xaa in position 294 to 295 is any amino acid
  Variant (297)..(304): Xaa in position 297 to 304 is any amino acid
  Variant (305)..(315): Xaa in position 305 to 315 is any or no amino acid
  Variant (317)..(320): Xaa in position 317 to 320 is any amino acid
  Variant (321)..(329): Xaa in position 321 to 329 is any or no amino acid
  Variant (331)..(335): Xaa in position 331 to 335 is any amino acid
  Variant (337)..(342): Xaa in position 337 to 342 is any amino acid
  Variant (343)..(348): Xaa in position 343 to 348 is any or no amino acid
  Variant (350)..(372): Xaa in position 350 to 372 is any amino acid
  Variant (373)..(384): Xaa in position 373 to 384 is any or no amino acid
  Variant (386)..(387): Xaa in position 386 to 387 is any amino acid
  Variant (390)..(400): Xaa in position 390 to 400 is any amino acid
  Variant (401)..(402): Xaa in position 401 to 402 is any or no amino acid
  Variant (406)..(407): Xaa in position 406 to 407 is any amino acid
  Variant (410)..(413): Xaa in position 410 to 413 is any amino acid
  Variant (414)..(416): Xaa in position 414 to 416 is any or no amino acid
  Variant (418)..(418): Xaa in position 418 is any amino acid
  Variant (420)..(420): Xaa in position 420 is any amino acid
  Variant (422)..(422): Xaa in position 422 is any amino acid
  Variant (423)..(428): Xaa in position 423 to 428 is any or no amino acid
  Variant (430)..(431): Xaa in position 430 to 431 is any amino acid
  Variant (433)..(434): Xaa in position 433 to 434 is any amino acid
  Variant (437)..(438): Xaa in position 437 to 438 is any amino acid
  Variant (440)..(440): Xaa in position 440 is any amino acid
  Variant (441)..(441): Xaa in position 441 is any or no amino acid
  Variant (443)..(445): Xaa in position 443 to 445 is any amino acid
  Variant (447)..(460): Xaa in position 447 to 460 is any amino acid
  Variant (462)..(467): Xaa in position 462 to 467 is any amino acid
  Variant (468)..(485): Xaa in position 468 to 485 is any or no amino acid
  Variant (487)..(491): Xaa in position 487 to 491 is any amino acid
  Variant (492)..(511): Xaa in position 492 to 511 is any or no amino acid
  Variant (513)..(520): Xaa in position 513 to 520 is any amino acid
  Variant (521)..(521): Xaa in position 521 is any or no amino acid
  Variant (523)..(524): Xaa in position 523 to 524 is any amino acid
  Variant (526)..(526): Xaa in position 526 is any amino acid
  Variant (528)..(529): Xaa in position 528 to 529 is any amino acid
  Variant (531)..(531): Xaa in position 531 is any amino acid
  Variant (533)..(540): Xaa in position 533 to 540 is any amino acid
  Variant (541)..(577): Xaa in position 541 to 577 is any or no amino acid
  Variant (579)..(580): Xaa in position 579 to 580 is any amino acid
  Variant (582)..(582): Xaa in position 582 is any amino acid
  Variant (584)..(584): Xaa in position 584 is any amino acid
  Variant (585)..(587): Xaa in position 585 to 587 is any or no amino acid
  Variant (589)..(592): Xaa in position 589 to 592 is any amino acid
  Variant (593)..(600): Xaa in position 593 to 600 is any or no amino acid
  Variant (602)..(605): Xaa in position 602 to 605 is any amino acid
  Variant (607)..(618): Xaa in position 607 to 618 is any amino acid
  Variant (619)..(637): Xaa in position 619 to 637 is any or no amino acid
  Variant (639)..(645): Xaa in position 639 to 645 is any amino acid
  Variant (647)..(683): Xaa in position 647 to 683 is any amino acid
  Variant (684)..(695): Xaa in position 684 to 695 is any or no amino acid
  Variant (698)..(702): Xaa in position 698 to 702 is any amino acid
  Variant (703)..(704): Xaa in position 703 to 704 is any or no amino acid
  Variant (706)..(708): Xaa in position 706 to 708 is any amino acid
  Variant (711)..(716): Xaa in position 711 to 716 is any amino acid
  Variant (718)..(720): Xaa in position 718 to 720 is any amino acid
  Variant (723)..(730): Xaa in position 723 to 730 is any amino acid
  Variant (731)..(735): Xaa in position 731 to 735 is any or no amino acid
  Variant (737)..(737): Xaa in position 737 is any amino acid
  Variant (739)..(739): Xaa in position 739 is any amino acid
  Variant (741)..(742): Xaa in position 741 to 742 is any amino acid
  Variant (747)..(747): Xaa in position 747 is any amino acid
  Variant (749)..(749): Xaa in position 749 is any amino acid
  Variant (750)..(759): Xaa in position 750 to 759 is any or no amino acid
  Variant (762)..(762): Xaa in position 762 is any amino acid
  Variant (764)..(765): Xaa in position 764 to 765 is any amino acid
  Variant (767)..(775): Xaa in position 767 to 775 is any amino acid
  Variant (776)..(782): Xaa in position 776 to 782 is any or no amino acid
  Variant (784)..(784): Xaa in position 784 is any amino acid
  Variant (786)..(787): Xaa in position 786 to 787 is any amino acid
  Variant (789)..(789): Xaa in position 789 is any amino acid
  Variant (792)..(792): Xaa in position 792 is any amino acid
  Variant (794)..(795): Xaa in position 794 to 795 is any amino acid
  Variant (796)..(796): Xaa in position 796 is any or no amino acid
  Variant (798)..(800): Xaa in position 798 to 800 is any amino acid
  Variant (801)..(801): Xaa in position 801 is any or no amino acid
  Variant (809)..(809): Xaa in position 809 is any amino acid
  Variant (811)..(817): Xaa in position 811 to 817 is any amino acid
  Variant (818)..(818): Xaa in position 818 is any or no amino acid
  Variant (820)..(822): Xaa in position 820 to 822 is any amino acid
  Variant (824)..(825): Xaa in position 824 to 825 is any amino acid
  Variant (827)..(830): Xaa in position 827 to 830 is any amino acid
  Variant (831)..(857): Xaa in position 831 to 857 is any or no amino acid
  Variant (859)..(859): Xaa in position 859 is any amino acid
  Variant (861)..(862): Xaa in position 861 to 862 is any amino acid
  Variant (864)..(868): Xaa in position 864 to 868 is any amino acid
  Variant (869)..(908): Xaa in position 869 to 908 is any or no amino acid
  Variant (912)..(912): Xaa in position 912 is any amino acid
  Variant (913)..(913): Xaa in position 913 is any or no amino acid
  Variant (915)..(920): Xaa in position 915 to 920 is any amino acid
  Variant (921)..(926): Xaa in position 921 to 926 is any or no amino acid
  Variant (929)..(930): Xaa in position 929 to 930 is any amino acid
  Variant (933)..(934): Xaa in position 933 to 934 is any amino acid
  Variant (941)..(941): Xaa in position 941 is any amino acid
  Variant (944)..(945): Xaa in position 944 to 945 is any amino acid
  Variant (946)..(946): Xaa in position 946 is any or no amino acid
  Variant (949)..(950): Xaa in position 949 to 950 is any amino acid
  Variant (953)..(954): Xaa in position 953 to 954 is any amino acid
  Variant (956)..(957): Xaa in position 956 to 957 is any amino acid
  Variant (960)..(961): Xaa in position 960 to 961 is any amino acid
  Variant (963)..(965): Xaa in position 963 to 965 is any amino acid
  Variant (966)..(969): Xaa in position 966 to 969 is any or no amino acid
  Variant (971)..(972): Xaa in position 971 to 972 is any amino acid
  Variant (974)..(975): Xaa in position 974 to 975 is any amino acid
  Variant (977)..(977): Xaa in position 977 is any amino acid
  Variant (980)..(980): Xaa in position 980 is any amino acid
  Variant (984)..(985): Xaa in position 984 to 985 is any amino acid
  Variant (987)..(992): Xaa in position 987 to 992 is any amino acid
  Variant (993)..(1004): Xaa in position 993 to 1004 is any or no amino acid
  Variant (1006)..(1008): Xaa in position 1006 to 1008 is any amino acid
  Variant (1011)..(1011): Xaa in position 1011 is any amino acid
  Variant (1014)..(1015): Xaa in position 1014 to 1015 is any amino acid
  Variant (1017)..(1017): Xaa in position 1017 is any amino acid
  Variant (1020)..(1022): Xaa in position 1020 to 1022 is any amino acid
  Variant (1028)..(1028): Xaa in position 1028 is any amino acid
  Variant (1030)..(1030): Xaa in position 1030 is any amino acid
  Variant (1032)..(1033): Xaa in position 1032 to 1033 is any amino acid
  Variant (1039)..(1039): Xaa in position 1039 is any amino acid
  Variant (1045)..(1045): Xaa in position 1045 is any amino acid
  Variant (1047)..(1049): Xaa in position 1047 to 1049 is any amino acid
  Variant (1051)..(1052): Xaa in position 1051 to 1052 is any amino acid
  Variant (1054)..(1054): Xaa in position 1054 is any amino acid
  Variant (1057)..(1057): Xaa in position 1057 is any amino acid
  Variant (1059)..(1061): Xaa in position 1059 to 1061 is any amino acid
  Variant (1063)..(1065): Xaa in position 1063 to 1065 is any amino acid
  Variant (1067)..(1067): Xaa in position 1067 is any amino acid
  Variant (1069)..(1069): Xaa in position 1069 is any amino acid
  Variant (1071)..(1073): Xaa in position 1071 to 1073 is any amino acid
  Variant (1075)..(1077): Xaa in position 1075 to 1077 is any amino acid
  Variant (1079)..(1080): Xaa in position 1079 to 1080 is any amino acid
  Variant (1085)..(1085): Xaa in position 1085 is any amino acid
  Variant (1087)..(1099): Xaa in position 1087 to 1099 is any amino acid
  Variant (1100)..(1117): Xaa in position 1100 to 1117 is any or no amino acid
  Variant (1119)..(1127): Xaa in position 1119 to 1127 is any amino acid
  Variant (1128)..(1160): Xaa in position 1128 to 1160 is any or no amino acid
GXXGXXXXXXXNHFXXXXXXXXXXXXXXXXYXVXXXXXXXXXXXXXXXXXXXXXXXRXXXXXXXXXXXXXXXXXXXXXXDGXXXLXTXXXLPXXXXXXXXXXXXXXXXLXXXXXXXXXXXXXXXXXXXXXXXXXXXXXXXXXXXXXXXXXXXXXXVXXXXXXXXXXXXXXXXXXGXXXXXXXXXXXAXXXLDXXXRXXXXXXXXXXXXXXVXXSFXXXXXXXXXXXXXXXXXXXXXXXXXXXXXXXXXXXXXXXLGXGXXXXXGFXXSXRXXQXXXXLNIDXSXTXXXXXXPVXXFXXXXXXXXXXXXXXXXXXXDXXXXXXXXXXXXXKXXXXXKXXXXXXXXXXXXYXXXXXXXXXXXXXXXXXXXXXXXXXXXXXXXXXXXVXXYFXXXXXXXXXXXXXLPCXXVGXXXXXXXYXPXEXXXXXXXCXXVXXQRXXKXXLXXXQXXXXXXXXXXXXXXRXXXXXXXXXXXXXXXXXXXXXXXXDXXXXXXXXXXXXXXXXXXXXXXXXXGXXXXXXXXXVXXRXLXXPXLXXXXXXXXXXXXXXXXXXXXXXXXXXXXXXXXXXXXXXXXXXXXXPXXGXWXXXXKXXXXXXXXXXXXWXXXXFXXXXXXXXXXXXXXXXXXXXXXXXXXXXXXXLXXXXXXXGXXXXXXXXXXXXXXXXXXXXXXXXXXXXXXXXXXXXXXXXXXXXXXXXXLPXXXXXXXYXXXKRXXXXXXGXXXQCXXXXXXXXXXXXXQXLXNXXLKINXKXXXXXXXXXXXGGXNXXLXXXXXXXXXXXXXXXXPXIXXGXDVXHXXXGXXXXPSIAAVVXSXXXXXXXXYXXXVXXQXXXXXXXXXXXXXXXXXXXXXXXXXXXXXXXEXIXXLXXXXXXXXXXXXXXXXXXXXXXXXXXXXXXXXXXXXXXXXXXXXXELLXXFXXXXXXXXXXXXKPXXIIXXRDGVSEXQFXXXVLXXELXXIXXACXXLXXXXXXXPXXTXXVXQKXHHTXXFXXXXXXXXXXXXXXXXXXNXXXGTXVDXXIXHPXXXDFYLCXHXGXXGTSRPXHYHVLXDXXXFXXDXLQXLXXXLXXXYXRXTXXXSXXXPXXYAHLXAXXXXXXXXXXXXXXXXXXXXXXXXXXXXXXXSXXXXXXXXXXXXXXXXXXXXXXXXXXXXXXXXXXXXXXXXXXM

SEQ ID NO: 11743 - protein, 59 aa, Artificial sequence
  protein pattern
  Variant (3)..(5): Xaa in position 3 to 5 is any amino acid
  Variant (9)..(9): Xaa in position 9 is Leu or Met
  Variant (11)..(11): Xaa in position 11 is Ala or Ser
  Variant (13)..(13): Xaa in position 13 is Ala, Gln or Ser
  Variant (15)..(15): Xaa in position 15 is any or no amino acid
  Variant (17)..(17): Xaa in position 17 is any or no amino acid
  Variant (20)..(20): Xaa in position 20 is Ser or Thr
  Variant (23)..(23): Xaa in position 23 is any amino acid
  Variant (27)..(27): Xaa in position 27 is Ile or Val
  Variant (29)..(29): Xaa in position 29 is any amino acid
  Variant (31)..(31): Xaa in position 31 is Asp, Glu or Gln
  Variant (32)..(33): Xaa in position 32 to 33 is any amino acid
  Variant (34)..(34): Xaa in position 34 is Phe, Leu or Met
  Variant (35)..(35): Xaa in position 35 is any amino acid
  Variant (36)..(36): Xaa in position 36 is Ala, Gly, Pro, Ser or Thr
  Variant (38)..(38): Xaa in position 38 is Ala, Asp, Glu, Gly, Gln, Ser or Thr
  Variant (39)..(39): Xaa in position 39 is Ile, Leu or Met
  Variant (41)..(41): Xaa in position 41 is any amino acid
  Variant (42)..(42): Xaa in position 42 is Phe or Leu
  Variant (43)..(45): Xaa in position 43 to 45 is any amino acid
  Variant (46)..(46): Xaa in position 46 is Leu or Met
  Variant (47)..(47): Xaa in position 47 is Cys or Ser
  Variant (48)..(48): Xaa in position 48 is His or Tyr
  Variant (49)..(49): Xaa in position 49 is Thr or Val
  Variant (51)..(51): Xaa in position 51 is any amino acid
  Variant (53)..(53): Xaa in position 53 is Cys or Ser
  Variant (55)..(55): Xaa in position 55 is any amino acid
  Variant (56)..(56): Xaa in position 56 is Ala or Ser
  Variant (57)..(57): Xaa in position 57 is Ile or Val
  Variant (59)..(59): Xaa in position 59 is Ile, Leu or Val
HPXXXDFYXCXHXGXIXGTXRPXHYHXLXDXXXXXXDXXQXXXXXXXXXYXRXTXXXSX

SEQ ID NO: 11744 - protein, 20 aa, Artificial sequence
  protein pattern
  Variant (3)..(4): Xaa in position 3 to 4 is any amino acid
  Variant (5)..(5): Xaa in position 5 is Phe, Ile, Met or Val
  Variant (7)..(7): Xaa in position 7 is Phe, Ile, Leu, Met or Val
  Variant (8)..(8): Xaa in position 8 is Phe or Tyr
  Variant (15)..(15): Xaa in position 15 is Gly or Ser
  Variant (18)..(19): Xaa in position 18 to 19 is any amino acid
  Variant (20)..(20): Xaa in position 20 is Leu or Val
KPXXXIXXRDGVSEXQFXXX

SEQ ID NO: 11745 - protein, 28 aa, Artificial sequence
  protein pattern
  Variant (2)..(2): Xaa in position 2 is any amino acid
  Variant (3)..(3): Xaa in position 3 is Ile, Leu, Met or Val
  Variant (5)..(5): Xaa in position 5 is any amino acid
  Variant (6)..(6): Xaa in position 6 is Gly or Leu
  Variant (9)..(10): Xaa in position 9 to 10 is any amino acid
  Variant (11)..(11): Xaa in position 11 is any or no amino acid
  Variant (13)..(13): Xaa in position 13 is any or no amino acid
  Variant (15)..(15): Xaa in position 15 is Asn, Ser or Thr
  Variant (16)..(17): Xaa in position 16 to 17 is any amino acid
  Variant (19)..(21): Xaa in position 19 to 21 is any amino acid
  Variant (22)..(22): Xaa in position 22 is Ile, Leu or Met
  Variant (23)..(23): Xaa in position 23 is Ile, Leu or Val
  Variant (24)..(25): Xaa in position 24 to 25 is any amino acid
  Variant (26)..(26): Xaa in position 26 is Ala, Ser or Thr
  Variant (27)..(27): Xaa in position 27 is any amino acid
  Variant (28)..(28): Xaa in position 28 is Gln or Arg
CXXVXXQRXXXKXLXXXQXXXXXXXXXX

SEQ ID NO: 11746 - protein, 21 aa, Artificial sequence
  protein pattern
  Variant (2)..(2): Xaa in position 2 is any amino acid
  Variant (4)..(4): Xaa in position 4 is any amino acid
  Variant (6)..(6): Xaa in position 6 is Leu or Val
  Variant (7)..(7): Xaa in position 7 is any amino acid
  Variant (10)..(10): Xaa in position 10 is Ile or Met
  Variant (12)..(12): Xaa in position 12 is Ala, Ser, Thr or Val
  Variant (14)..(14): Xaa in position 14 is any amino acid
  Variant (17)..(17): Xaa in position 17 is any amino acid
  Variant (18)..(18): Xaa in position 18 is Asn or Thr
  Variant (19)..(19): Xaa in position 19 is Asn, Ser, Thr or Val
  Variant (20)..(20): Xaa in position 20 is any amino acid
QXLXNXXLKXNXKXGGXXXXL

SEQ ID NO: 11747 - protein, 20 aa, Artificial sequence
  protein pattern
  Variant (2)..(6): Xaa in position 2 to 6 is any amino acid
  Variant (7)..(7): Xaa in position 7 is any or no amino acid
  Variant (10)..(10): Xaa in position 10 is His or Tyr
  Variant (11)..(11): Xaa in position 11 is Gln or Ser
  Variant (13)..(13): Xaa in position 13 is Phe, Ile, Met or Val
  Variant (15)..(15): Xaa in position 15 is Ala, Gly, Pro, Thr or Val
  Variant (16)..(16): Xaa in position 16 is any amino acid
  Variant (18)..(19): Xaa in position 18 to 19 is any amino acid
  Variant (20)..(20): Xaa in position 20 is Leu or Met
GXXXXXXGFXXSXRXXQXXX

SEQ ID NO: 11748 - protein, 17 aa, Artificial sequence
  protein pattern
  Variant (2)..(2): Xaa in position 2 is any amino acid
  Variant (3)..(3): Xaa in position 3 is any or no amino acid
  Variant (5)..(5): Xaa in position 5 is any or no amino acid
  Variant (9)..(9): Xaa in position 9 is any or no amino acid
  Variant (11)..(11): Xaa in position 11 is any amino acid
  Variant (12)..(12): Xaa in position 12 is Gln or Arg
  Variant (13)..(13): Xaa in position 13 is Ala, Leu or Val
  Variant (14)..(15): Xaa in position 14 to 15 is any amino acid
  Variant (16)..(16): Xaa in position 16 is Phe, His or Tyr
  Variant (17)..(17): Xaa in position 17 is Ile, Leu, Met or Val
PXXYXAHLXAXXXXXXX

SEQ ID NO: 11749 - protein, 14 aa, Artificial sequence
  protein pattern
  Variant (8)..(8): Xaa in position 8 is Ala, Gly or Ser
  Variant (10)..(12): Xaa in position 10 to 12 is any amino acid
  Variant (13)..(13): Xaa in position 13 is any or no amino acid
PSIAAVVXSXXXXP

SEQ ID NO: 11750 - protein, 13 aa, Artificial sequence
  protein pattern
  Variant (3)..(3): Xaa in position 3 is Glu, Lys or Arg
  Variant (4)..(4): Xaa in position 4 is any amino acid
  Variant (5)..(5): Xaa in position 5 is Asn, Ser or Thr
  Variant (6)..(6): Xaa in position 6 is Leu or Met
  Variant (7)..(7): Xaa in position 7 is Phe or Tyr
  Variant (9)..(9): Xaa in position 9 is any amino acid
  Variant (10)..(10): Xaa in position 10 is Ala, Asp, Glu or Gly
  Variant (11)..(11): Xaa in position 11 is any amino acid
DGXXXXXTXXXLP

SEQ ID NO: 11751 - protein, 16 aa, Artificial sequence
  protein pattern
  Variant (2)..(2): Xaa in position 2 is any or no amino acid
  Variant (4)..(4): Xaa in position 4 is any amino acid
  Variant (5)..(5): Xaa in position 5 is any or no amino acid
  Variant (7)..(7): Xaa in position 7 is any amino acid
  Variant (8)..(8): Xaa in position 8 is Ala, Ser, Thr or Val
  Variant (10)..(11): Xaa in position 10 to 11 is any amino acid
  Variant (12)..(12): Xaa in position 12 is Lys or Arg
  Variant (13)..(13): Xaa in position 13 is any amino acid
  Variant (15)..(15): Xaa in position 15 is Ile, Leu, Met or Val
  Variant (16)..(16): Xaa in position 16 is Ile, Met or Val
YXAXXVXXQXXXXEXX

SEQ ID NO: 11752 - DNA, 675 bp, Arabidopsis thaliana
  CDS (1)..(675)
atggcggagaaagaagagagtgtgaagcttctagggttttgggcaagcccttttagtcgtcgagtcgagatggctctcaaactcaaaggcgtgccatacgaatacttggaagaagatttgcccaacaagacccctttgcttctggagctaaacccgcttcacaagaaagttccggttcttgtccacaatgacaaaatattactcgagtcacatctgattctcgaatacatcgatcagacgtggaagaacagtccaattcttcctcaagatccttacgagaaggccatggctcgattttgggccaagttcatcgatgaccagatcctaacactagggtttaggtcccttgtaaaagcagagaaaggaagagaggttgctattgaagagactcgggaactgcttatgtttcttgagaaagaagtcactggaaaagatttcttcggtggcaagacaatcggattcttggacatgatcgcaggaagtatgatcccattttgtctagctagactttggaaaggtattggaattgatatgattccagaggagaagtttccggaattaaatagatggatcaagaatttggaagaagttgaggcagtgaggggatgtattcctccaagagagaaacaaattgagcgcatgaccaaaattgcagagacaattaagtctgcctaa

SEQ ID NO: 11753 - protein, 224 aa, Arabidopsis thaliana
MAEKEESVKLLGFWASPFSRRVEMALKLKGVPYEYLEEDLPNKTPLLLELNPLHKKVPVLVHNDKILLESHLILEYIDQTWKNSPILPQDPYEKAMARFWAKFIDDQILTLGFRSLVKAEKGREVAIEETRELLMFLEKEVTGKDFFGGKTIGFLDMIAGSMIPFCLARLWKGIGIDMIPEEKFPELNRWIKNLEEVEAVRGCIPPREKQIERMTKIAETIKSA

SEQ ID NO: 11754 - DNA, 1016 bp, Triticum aestivum
  CDS (44)..(751)
atactgaatcacacggaaccttgaggcacacccacgggagaaaatggcagacacaggagacgagctgaagctgctgggcatgtgggcgagcccgtacgtggtcagggtgcagctcgcactccgcctcaagggcgtgagctacgagtacgtcgaggaggacctcgccaacaagagcgagctcttcctccgctccaacccggttcacaagacggtcccgatcctcatccacaacggcaagcccgtctgcgagtcccaggtcatcctccagtacatcgacgaggccttcgccggcgtcggcccgcccctcctccccgccgacccctacgagcgcgccgtcgcgcgcttctgggccgcctacgtcgaggacaagctgctggcgccgtgggggaaggtgttcagggtgaccaccgacgaggagagggccgagtggacgcggcagacggcggcggccctgggtcctctggaggatggcctcagggagtgctccaaggggaaggggttcttcggcggcgactgcgtcgggtacgtcgacgtcctgctcggcagcatggtgccgtgggtgcgcgccaccgagaggctctccggcgacaagttagtcgacgccggcaaggccccgctgctggcggcatggatggaccgcattagcgagctcgacgccgccaaggcggtcttccaggacgtcgacagggtggttgagtacgccgggggaatacagacccggctttccgccgcggctgcaagcacccaataaagcggcatggcgacatggtgcgtggctgatgcaaggagaaaatagccaagtgtgcaattagctgaaattattaaactggccacgtttctgtttcctttttcccgaataatggcgtcgtttctcaggaacacataacatacaagcatgtgatattaccagtttaaaaacttgtgtggtcatcgtgacagctcctcctctgtttttaagggatatttacatttttgtccttggctttgtcacattagtggggtttgtcttttgtttt

SEQ ID NO: 11755 - protein, 235 aa, Triticum aestivum
MADTGDELKLLGMWASPYVVRVQLALRLKGVSYEYVEEDLANKSELFLRSNPVHKTVPILIHNGKPVCESQVILQYIDEAFAGVGPPLLPADPYERAVARFWAAYVEDKLLAPWGKVFRVTTDEERAEWTRQTAAALGPLEDGLRECSKGKGFFGGDCVGYVDVLLGSMVPWVRATERLSGDKLVDAGKAPLLAAWMDRISELDAAKAVFQDVDRVVEYAGGIQTRLSAAAASTQ

SEQ ID NO: 11756 - DNA, 678 bp, Glycine max
  CDS (1)..(678)
atggcagctggtcaggaagatgtgaagcttttgggagttgtgggaagcccatttgtgtgtagggtccagattgccctcaagttgaagggaattgaatacaaatttgtggaagaaaatttggccaacaagagtgatttgcttcttaaatccaacccagttcacaagaaagttccagtttttattcacaatgagaagcccatagcagagtctcttgtgattgttgagtacattgatgagacatggaagaacaaccccatcttgccttctgatccttaccatagagccttggctcgtttctggtccaaattcattgatgacaaggttgttggtgctgcatggaaatctgttttcacggttgatgagaaagagcgtgagaagaatgttgtagaaacatatgaggctctgcagtttcttgagaatgagatcaaggacaagaaattctttggaggagaagaggttgggttggtagatatagctggtgtctacatagcattttgggtccctttgattcaagaaattgcagggttggagctattaagcagtgagaaatttcctaagctttacaagtggagccaagaatttgtgaaccatccaattgtcaaagaaggtcttccccctagagacccagtttttgcctttttcaaaggacgctatgaaagcctttctgcttcaagatag

SEQ ID NO: 11757 - protein, 225 aa, Glycine max
MAAGQEDVKLLGVVGSPFVCRVQIALKLKGIEYKFVEENLANKSDLLLKSNPVHKKVPVFIHNEKPIAESLVIVEYIDETWKNNPILPSDPYHRALARFWSKFIDDKVVGAAWKSVFTVDEKEREKNVVETYEALQFLENEIKDKKFFGGEEVGLVDIAGVYIAFWVPLIQEIAGLELLSSEKFPKLYKWSQEFVNHPIVKEGLPPRDPVFAFFKGRYESLSASR

SEQ ID NO: 11758 - DNA, 630 bp, Glycine max
  CDS (1)..(630)
atggcttcaagtcaggaagaggtgactcttttgggagtaattggaagcccatttgcttgcagggtgaagattgcccttaagttgaagggagttgaatacaaatatgtggaagaaaatttggccaacaagagtgatttgcttctcaaatccaacccagttcacaagaaagttccagtttttattcacaatgagaagcccatagcagagtctcttgtgattgttgagtacattgatgagacatggaagaacaaccccatcttgccttctgatccttaccaaagagccttggctcgtttctggtccaaattcattgatgacaagattgtgggtgctgcatggaatgctgttttcacggttgatgagaaagagcgtgagaagaatgttgtagaaacatatgaggctctgcagtttcttgagaatgagatcaaggacaagaaattctttggaggagaagaggttgggttggtagatatagctggtgtctacatagcattttgggtccctttgattcaagaaattgcagggttggagctattaagcagtgagaaatttcctaagctctacaagtggagccaagaatttgtgaaccatccaatagtcaaagaaagccttccccctagagacccatga

SEQ ID NO: 11759 - protein, 209 aa, Glycine max
MASSQEEVTLLGVIGSPFACRVKIALKLKGVEYKYVEENLANKSDLLLKSNPVHKKVPVFIHNEKPIAESLVIVEYIDETWKNNPILPSDPYQRALARFWSKFIDDKIVGAAWNAVFTVDEKEREKNVVETYEALQFLENEIKDKKFFGGEEVGLVDIAGVYIAFWVPLIQEIAGLELLSSEKFPKLYKWSQEFVNHPIVKESLPPRDP

SEQ ID NO: 11760 - DNA, 717 bp, Zea mays
  CDS (1)..(717)
atggccggaggagatgacctgaagctgctgggcctgtgggcgagcccgtacgtgctgcgggtgaagctcgcgctcagcctcaagggcctgagctacgagaacgtggaggaggatctgagggacaagagcgagctcctgctcaagtccaaccccgtgcaccagaaggtccccgtgctgatccacggcggcaagcccatctgcgagtcgcaggtcatcctgcagtacatcgacgaggccttcgccggcaccggcccgtccctcctccccgccgacccctacgagcgcgccgtcgctcgcttctgggccgcctacatcgacgacaagatgctgcccgcctggaaccagtcgacgatgggcaagacggaggaggagagggccgaggggaagaagcagtcggtcgtgacggtggagacgctggagggcgcgctgagggactgcggcggccaagggaagcccttcttcggtggggacagcgtcgggtacgtcgacgtcgtgctcggcggcctgctcgggtgggtgcgcgcgtcggaggagctgcacggcgtcaggcccttcgaccccgagcggactccgctgctggcggcgtggtcggagcgcttcggcgcgctggatgccgtccagacggtgatgcccgacgtcggcaggctgctcgagttcggcaaggcgttgatggcacgtctggcggctgcggccgccgccggtgcaagcaataactga

SEQ ID NO: 11761 - protein, 238 aa, Zea mays
MAGGDDLKLLGLWASPYVLRVKLALSLKGLSYENVEEDLRDKSELLLKSNPVHQKVPVLIHGGKPICESQVILQYIDEAFAGTGPSLLPADPYERAVARFWAAYIDDKMLPAWNQSTMGKTEEERAEGKKQSVVTVETLEGALRDCGGQGKPFFGGDSVGYVDVVLGGLLGWVRASEELHGVRPFDPERTPLLAAWSERFGALDAVQTVMPDVGRLLEFGKALMARLAAAAAAGASNN

SEQ ID NO: 11762 - DNA, 708 bp, Zea mays
  CDS (1)..(708)
atggcggccggaggcgagctgcagctgctgagctcatggtacagcccctacgtgatccgcgccaaggtggcgctggggctgaaggggctcatctacgagttcatcgaggaggacctcttcagcaagagcgacctgctgctgaagctcaacccggtgcacaagaaggtgcccgtcctggtccacggcggccgccccgtgtgcgagtcgctcgtcatcgtgcagtacgtcgacgagacctgggcagcaggcaccgggacccctctccttcctgccgacgcccacgaccgcgccacggctcgcttctgggcagcctacgtcgacgacaagttctgcaaggagtggatcaaactgtacaggtcgacgacggcggagaaggcggcggaggcgctcggcggcgtggtccccgtggtggagacgctggagcaggcgttcagggagtgctccagggggaaacccttcttcggcggcgacgccgtcgggctcgtggacatcgcgctcgggagcttcgtggtgtggatcagggtggtggacgaggcggccggcgtaaagcttctggacgaggccaagttcccggccttgacggcgtgggcggagcgcttcttggcggtggacgccgtgagggaggtgatgccggacgctggaaggctgttggagcactacaaggggtttctggctaaacgggctccaccttcacctgctggttactga

SEQ ID NO: 11763 - protein, 235 aa, Zea mays
MAAGGELQLLSSWYSPYVIRAKVALGLKGLIYEFIEEDLFSKSDLLLKLNPVHKKVPVLVHGGRPVCESLVIVQYVDETWAAGTGTPLLPADAHDRATARFWAAYVDDKFCKEWIKLYRSTTAEKAAEALGGVVPVVETLEQAFRECSRGKPFFGGDAVGLVDIALGSFVVWIRVVDEAAGVKLLDEAKFPALTAWAERFLAVDAVREVMPDAGRLLEHYKGFLAKRAPPSPAGY

SEQ ID NO: 11764 - DNA, 762 bp, Zea mays
  CDS (1)..(762)
atgatagaacaaagcaaacatctgcaaactgtaatggcggctccagtaggtgccaatgccataggagcgggcgacgagctgctcctgctgggcacatggtcgagcccatgggtgatccgagcgagggtggcgatggggctcaagggcctgagctacgagtacctcgaggaggacctcggcaacaagagcggcctcctgctccggtccaacccggtgcacaagaaggtgcccgtcctcatccacggcggccgcccattgtgcgagtcgctcgtgatcctgcagtacctcgacgaggcatggccgacggccggtcctccgctcctcccggccgacccctacgaccgcgccacggcacggttctgggcggcctacatcaacgacacgtttttcccggcgttcagggcgctgttcagatcgctgacggacgagcagagagcggaggcgctgcggaacgccctgcctgcggtggagacgttggagcgaacgctcgcggagtgctccgcggggaaggcgttcttcggcggcgacgccgtcgggatcgtggacgtcgcgctcgggagccacctggtctggatccgagtggtggatgaggttggaggcaccagccttctggacgcggccaaggtccccggcctggcggcgtgggcggagcggttcttggccgtggacgccgtgaagaaggtgatgccggacgcaacgaaggtcctggagcagtacaaggggtttcgggctaaatggattgcgggcgccggttgtacctga

SEQ ID NO: 11765 - protein, 253 aa, Zea mays
MIEQSKHLQTVMAAPVGANAIGAGDELLLLGTWSSPWVIRARVAMGLKGLSYEYLEEDLGNKSGLLLRSNPVHKKVPVLIHGGRPLCESLVILQYLDEAWPTAGPPLLPADPYDRATARFWAAYINDTFFPAFRALFRSLTDEQRAEALRNALPAVETLERTLAECSAGKAFFGGDAVGIVDVALGSHLVWIRVVDEVGGTSLLDAAKVPGLAAWAERFLAVDAVKKVMPDATKVLEQYKGFRAKWIAGAGCT

SEQ ID NO: 11766 - DNA, 792 bp, Zea mays
  CDS (1)..(792)
atgcataaactacagttccatcagtccctcgctctccctgatgcggagcccaaaagcaggaaattaatggctggggatggggagctgaagctgctgggcatgtgggcgagcccgttcgtccttcgtgcgagactcgcgctcagcttcaagggcctcaagtatgagtacgtcgaggaggagatctttggaaacaagagcgagctcctcctcgagtccaacccggtgcacaagaaggtacccgtgctcatccacaacggcaaggctatctgcgagtcacagatcatcgtgcagtacatcagtgaggtctacgacggcacaggcccttctctcctccccgtcggcgcctacgaccgtgctgtggctcgcttttgggctgcctacgttgacgacaaggtcttcagctcgttcatgatgatgataatgggcaagacggacgacgagaaggcagaggggcggaagcagttgtttgccgcggcggagaccctggagggagcactgaaggagtgctcgtgctccaaggggagacccagacccttcttcggcggcgacagcgtcggctacgtggacatagcgctcggaggcttcgtcgcgtgggtgcagacgagggacctgctgtctggcttggagcatttcgacgccgacaagaccccgctcctcgcgacgtggctggagcgcttctgcgcattgaacgaaaccaaggctgtcatgccggacgtgatgaagctgctcgagttctccaagaagaggcaagcacaagctgatgcggctgccgctgcagtggtcttgaggtag

SEQ ID NO: 11767 - protein, 263 aa, Zea mays
MHKLQFHQSLALPDAEPKSRKLMAGDGELKLLGMWASPFVLRARLALSFKGLKYEYVEEEIFGNKSELLLESNPVHKKVPVLIHNGKAICESQIIVQYISEVYDGTGPSLLPVGAYDRAVARFWAAYVDDKVFSSFMMMIMGKTDDEKAEGRKQLFAAAETLEGALKECSCSKGRPRPFFGGDSVGYVDIALGGFVAWVQTRDLLSGLEHFDADKTPLLATWLERFCALNETKAVMPDVMKLLEFSKKRQAQADAAAAAVVLR

SEQ ID NO: 11768 - DNA, 705 bp, Zea mays
  CDS (1)..(705)
atggcaggacgagaagcggacaaagacccagagctgaaggtgctcggcgtgtggtcgagcccgttcgttatcagggcccgcgtcgcgctaaacctcaagggcctcgcctaccgatacgtggaggacaacctggacagcaagagcgagctcctcctcgcctccaaccacgtgcacgggaaggtgccggtgctcctccacgacggcaggcccgtctgcgagtcccgggtcatcgtggagtatatcgacgaggccttcccggccagcggcccctgcctcctccccgccgacccgtaccgccgcgcggtcgaccgcttctgggcctcctacgtcgacgacaagctctttcccacctggatacccgtctacaacggcaggacgagcgaggacagggtcgcggcggcgaggcaggtagtggccgtgctggagaagtttgagcgggcgttcgatgagtgctccggaggcaaggcgttcttcggcggggacgctgctggcctcgtggacgtcgtgctaggcggcttcctcgggtggctgcgcgcgtctgaggtgatgtgtggcgtgagggtcatcgaccccgccaagacgccgctgctggcggcgtgggcggaccggttcgccgcgctcgacggcgtcagggaggtgatacctgacgtgcagaggctgctggagtataacaagattaggcgagctcgtcgtgggctgccgtag

SEQ ID NO: 11769 - protein, 234 aa, Zea mays
MAGREADKDPELKVLGVWSSPFVIRARVALNLKGLAYRYVEDNLDSKSELLLASNHVHGKVPVLLHDGRPVCESRVIVEYIDEAFPASGPCLLPADPYRRAVDRFWASYVDDKLFPTWIPVYNGRTSEDRVAAARQVVAVLEKFERAFDECSGGKAFFGGDAAGLVDVVLGGFLGWLRASEVMCGVRVIDPAKTPLLAAWADRFAALDGVREVIPDVQRLLEYNKIRRARRGLP

SEQ ID NO: 11770 - DNA, 699 bp, Zea mays
  CDS (1)..(699)
atggccgggaaagagcttacgctgctggggttatgggcgagcccgttcgtgctccgggcgcgcatcgcgctcagcctcaaaggcctcacctacgcttactccgaggagaacctcgacgacaagagcgagcttctcctcagctccaaccccgtgctcaagaaggtgcccgtgctcatccaccacggcaagcccgtctgcgagtcccagatcatcgtgcagtacgtcgacgaggctttccccgccgccgcacctaatttccttccatccgacccctacgaccgcgccattgctcgcttctgggcctcctacgtcgacgacaagttctacagcgcgtggatacccgtgttcaggggcaggacggcggaggagatggcggaggcggcgaggcaggccgtcgcggcgctggagacgctggagcaggcgttcagggagtgctccaaggggaaggccttcttcggaggggacagcgtggggctcgtcgacgtcgtgctcggcggccttgttgggtggctgtacgccaccgaggccatctgcggggtgaaggccctcgacgccggcaggacgccgctgctggcggcgtgggcggagcggttctgcgcgctggagggtgtcaaggggctgatcccggacgtggacaggcttctggagtataccaaggccaggcgggccgtatttggcctgccgccgctccgtccttag

SEQ ID NO: 11771 - protein, 232 aa, Zea mays
MAGKELTLLGLWASPFVLRARIALSLKGLTYAYSEENLDDKSELLLSSNPVLKKVPVLIHHGKPVCESQIIVQYVDEAFPAAAPNFLPSDPYDRAIARFWASYVDDKFYSAWIPVFRGRTAEEMAEAARQAVAALETLEQAFRECSKGKAFFGGDSVGLVDVVLGGLVGWLYATEAICGVKALDAGRTPLLAAWAERFCALEGVKGLIPDVDRLLEYTKARRAVFGLPPLRP

SEQ ID NO: 11772 - DNA, 708 bp, Oryza sativa
  CDS (1)..(708)
atggcggccggagccggaggagacggcggcggcgagctgaagcttctggggacgtgggcgagcccgttcgtgcagcgggtgcgcctcgcgctgaacctcaagggcctcgcgtacgagttcatcgaggaggagatcggcggcggcaagagcgagctcctcctcgcctccaaccccgtccacaagaaggtccccgtcctcctccaccgcagcaaccccatctgcgagtcccaggtcatcgtccagtacctcgacgacgccttccccggcggcgccgccggcggcgacctcctcccctccgacccccacgcccgcgccgtcgcccgattctgggcggcgtacatcgacgccgagttcttcgcgccgtggaacaggtcgttctacacggcgtcggaggaggagaagacggcggagatggggagggcggcggcggcgctggcgacgatcgagcgcgcgttcgcggagctgtcgagggggaaggggttcttctccggcgaggacaggccggggttcgtcgacgtggtgctcggcgggttcgtgggctcgatgcgcgcgtacggcacggcggtcggcgtggaggtgctcgacgccgggcgcaccccgctgctggtggcgtgggcggagcgcgtcgcggcgctcgacgccgccaggggcgtcatccccgacgtcgaacgcgtcgtcgagctctcgcgctacgcgaggaagaagtag

SEQ ID NO: 11773 - protein, 235 aa, Oryza sativa
MAAGAGGDGGGELKLLGTWASPFVQRVRLALNLKGLAYEFIEEEIGGGKSELLLASNPVHKKVPVLLHRSNPICESQVIVQYLDDAFPGGAAGGDLLPSDPHARAVARFWAAYIDAEFFAPWNRSFYTASEEEKTAEMGRAAAALATIERAFAELSRGKGFFSGEDRPGFVDVVLGGFVGSMRAYGTAVGVEVLDAGRTPLLVAWAERVAALDAARGVIPDVERVVELSRYARKK

SEQ ID NO: 11774 - DNA, 699 bp, Oryza sativa
  CDS (1)..(699)
atggcggggggcgagcttgtgctgctggacttctgggcgagcccgttcgggcagcggtgccgcatcgcgctggcggagaagaagctcccctacgactactccgagcaggagctcctcggcgccaagagcgacctcctcctccgctccaaccccatccacgccaaggtccccgtcctcctccacggcgacggagacggccgcgccgtctgcgagtccctcgccatcctcgagtacctcgacgacgccttcccggacgccacccctcgcctcctcccctccgccgccgacgacccgtacgcgcgcgcccgggccaggttctgggccgactacgtcgacaagaaggtgtacccggtggggacgcggctgtggaaggtcaagggggaggagggcgtacgcgcggcggcgggggcgcgcggcgagctggtggaggcgctgcggacgctcgacggcgagctcggggagaaggaattcttcggcggcgagtttgggtttgtggacgtggcgctggtgccgatgatgccgtgggtgtacagcttcgcgaggtacggcgggttcagcgtggaggaggagtgcccgcgggtggcggcgtgggcgcggcggtgcatggagcgggacagcgtcgccggcagcctccgctcgccggaggagatctacgacttcatcggcctcctcaggaagcactacggcatcgacgactag

SEQ ID NO: 11775 - protein, 232 aa, Oryza sativa
MAGGELVLLDFWASPFGQRCRIALAEKKLPYDYSEQELLGAKSDLLLRSNPIHAKVPVLLHGDGDGRAVCESLAILEYLDDAFPDATPRLLPSAADDPYARARARFWADYVDKKVYPVGTRLWKVKGEEGVRAAAGARGELVEALRTLDGELGEKEFFGGEFGFVDVALVPMMPWVYSFARYGGFSVEEECPRVAAWARRCMERDSVAGSLRSPEEIYDFIGLLRKHYGIDD

SEQ ID NO: 11776 - DNA, 702 bp, Oryza sativa
  CDS (1)..(702)
atggccggaggaggagacgagctgaagctgctgggcatgtgggcgagcccgtacgttctgcgagtgaagctcgcgctcagtctcaagggcctcgactacgagtacgtcgaggaggatctcaagaacaagagcgagctcctcctcagctccaacccggtgaacaagaaggtgcccgtcctcatccacaatggcaagccagtctgcgagtcgcagatcatcctgcagtacctcgacgaggcgttccccgatgccggcgccaccctgctccccgccgacccccacgaacgcgccgtcgctcgcttctgggccgcattctgcgacgacacgatcgcgaaggcgtcgcagcaggcgtcgtcgggaaagacggaggaggagaaggcggaaggggagaagaaggtggtggaggcgctggagaagatggaggtcgggctgagcgagtgctccaaggggaagcccttcttcggtggcgacaccgtcggctacgtcgacatcgtgctcggcagcttcctggcgtgggttcgcgccggcgacgcgatgaagggcgtcaagaggttcgacccggccaccaccccgctgctggcggcgtgggccgagcgcttcgtcgagctggacgtcgccaaggccgccatgccggaggtggacaagctgatcgagctcgccatggcgaggatggctggcgccgctgctgctgccaccaactga

SEQ ID NO: 11777 - protein, 233 aa, Oryza sativa
MAGGGDELKLLGMWASPYVLRVKLALSLKGLDYEYVEEDLKNKSELLLSSNPVNKKVPVLIHNGKPVCESQIILQYLDEAFPDAGATLLPADPHERAVARFWAAFCDDTIAKASQQASSGKTEEEKAEGEKKVVEALEKMEVGLSECSKGKPFFGGDTVGYVDIVLGSFLAWVRAGDAMKGVKRFDPATTPLLAAWAERFVELDVAKAAMPEVDKLIELAMARMAGAAAAATN

SEQ ID NO: 11778 - DNA, 696 bp, Oryza sativa
  CDS (1)..(696)
atggctggagaaggagatgatcaactgaagcttctcggattgtgggtgagcccatacactcaccgagtgaagcttgcactcagcttcaagggcctgagctacgagtacgtcgaggaggacctcagcaacaagagcgagctgcttctcagcaccaacccggtgcacaagaaggtgcccgtgctcatccacaacggcaagcccatctgcgagtcgcaggtcatcgtgcagtacctcgacgaggagttccccaactccggcgtctcgctcctcccatctgactcctacgatcgcgccattgctcgtttctgggctgcctacatcaacgacaagctgatgccgtcgtggctgcagtcgtcgatgggcaagacggaggaggagagggcggaggcgctgaagcagacgttggaggcggtggcgaacctggagacggcgttcaaggagtgttccaaggggaagcccttcttcggcggcgacaccgtcgggtacctggacgtgtcgctcggcgccatgatcggatggatgcgcgccggcgaggctctgcacgggaggaggaccttcgatgccactagaagccctctcctgaacgcgtggatggagcgcttcgccgcgctggacgccgccaaggccgccatgccggacaacaacaagctggtcgagttcgtcagggtgaggcgggctgccgctgcgaacaactga

SEQ ID NO: 11779 - protein, 231 aa, Oryza sativa
MAGEGDDQLKLLGLWVSPYTHRVKLALSFKGLSYEYVEEDLSNKSELLLSTNPVHKKVPVLIHNGKPICESQVIVQYLDEEFPNSGVSLLPSDSYDRAIARFWAAYINDKLMPSWLQSSMGKTEEERAEALKQTLEAVANLETAFKECSKGKPFFGGDTVGYLDVSLGAMIGWMRAGEALHGRRTFDATRSPLLNAWMERFAALDAAKAAMPDNNKLVEFVRVRRAAAANN

SEQ ID NO: 11780 - DNA, 732 bp, Oryza sativa
  CDS (1)..(732)
atggccgccggaggaggaggaggagacgagctgaagctgctcggattgtgggcgagcccgtacgtcctgcgagcgaaattcgcgctcagcttcaagggcctgagctacgagaacgtcgaggaggacctccacaacaagagtgagctgctcctgagctccaacccggtgcacaagaaggtgcccgtgctcatccacaacggcaagcccatctgcgagtcgcagatcatcgtggagtacgtcgacgaggcgttccctgacgccggcgagtcccttctcccctccgacccttacgaccgcgccgtcgctcgcttctgggccgcctacatcaatgacaagttcatgccggcgtggcagaaggcgtcgttgggcctcacggaggaggagaaggcggaggcggtgaagcagatgctcgccgcgatcgagaacctggagacggcgttcaaggagttgtccaaggggaagcccttcttcggcggcgacaccgccgggtacctcgacgtcacgctcggcgccgtggtcggctgggcgcgcgccggcgaggtcctgttcgggaggaagctcttcgacgccactaggagccctctcctggcggcgtggatggagcggttcgtcgcgctggacgctgtcaaggcggtgttgccggacaatgccgagctgatcgagtatggcaagatgaggatggcgcactacgccaagcttgctgccgccttggctgctgcgaacaagaagtga

SEQ ID NO: 11781 - protein, 243 aa, Oryza sativa
MAAGGGGGDELKLLGLWASPYVLRAKFALSFKGLSYENVEEDLHNKSELLLSSNPVHKKVPVLIHNGKPICESQIIVEYVDEAFPDAGESLLPSDPYDRAVARFWAAYINDKFMPAWQKASLGLTEEEKAEAVKQMLAAIENLETAFKELSKGKPFFGGDTAGYLDVTLGAVVGWARAGEVLFGRKLFDATRSPLLAAWMERFVALDAVKAVLPDNAELIEYGKMRMAHYAKLAAALAAANKK

SEQ ID NO: 11782 - DNA, 705 bp, Oryza sativa
  CDS (1)..(705)
atggccggacacgacgagctgaagctgctcggccactggtcgagcgcctacgtcaccagagtgaagctcgcgctccacctcaagggcgtgagctacgagtacgtcgaggaggatctccgcaacaagagcgacctcttgctcgcctccaacccggtgcacaagacggtgcccgtgctcatccacaacgggaaccccatccgcgagtcgcagatcatcgtgcagtacatcgacgaggtcttctccggcgccggcgactccatcctccccgccgacccatatgaacgcgccgttgctcgcttctgggccgcatacatcgacgacaagctactggcgccatggaagaaggtattcagggccaagacggaggaggagagggccgcgtggatgaagcagatgttcgtcgcggtggacgttctggagggaggcctgaaggagtgctccaaggggaagggatgcttcttcggcggcgacagcgtcgggtacgtcgacgtcgtgctggggggtgccgtctccttcgtgcacgccaacgacatgatcaccggtggaaagctcttcgacgctgcgaggacgccgctgctggcggcgtggttggagcgcttcggcgagctcgacgccgccaaggcggtgctgcaggacgtcgacagggcggtggagcacaccaaggtgcggtacgcacggaatgccgccaccgccgcaaacgactga

SEQ ID NO: 11783 - protein, 234 aa, Oryza sativa
MAGHDELKLLGHWSSAYVTRVKLALHLKGVSYEYVEEDLRNKSDLLLASNPVHKTVPVLIHNGNPIRESQIIVQYIDEVFSGAGDSILPADPYERAVARFWAAYIDDKLLAPWKKVFRAKTEEERAAWMKQMFVAVDVLEGGLKECSKGKGCFFGGDSVGYVDVVLGGAVSFVHANDMITGGKLFDAARTPLLAAWLERFGELDAAKAVLQDVDRAVEHTKVRYARNAATAAND

SEQ ID NO: 11784 - DNA, 723 bp, Oryza sativa
  CDS (1)..(723)
atggccgcagaaggtgagctgaagctgctgggaacatgggcgagcccctacgtctccagagtgaagctcgccctccacctcaagggcctgagctacgagtacgtcgtcgaggaggatcacttcaacaacaagagcgagctcctcctcagctccaacccggtgcacaagaaggtccccgtgatgatccacaacggcaagcccatctgcgagtcgctgatcatcatggagtacctcgacgaggctttccccgacaccgccgcacctctcctccccgccgacctgcacgaccgcgccgtcgctcgcttctgggccgcctacattgacgacaagctagtgccctcgtggaagcaggcgttcagcggaaagacgggtgaggagaaggcagaggggatgcgtcatatgctcgcggcggtggatgcgctggaggcggcgatggagtggtcctacaaggggaagcccttcttcggcggcgacgccgtcgggttcctggacgtcgcgctggggggcttgctctcctggttgcacgggacagaggagctgtgtggcgccaagatcttggacgccgccaagaccccgctcctgtcggcgtgggcgcggcgcttcggcgagatggacgccgccaaggtggctttgccggacgtctgcaagctggtcgagtttgccaagatgaagcgtgttcagctggaggctgcaatggcagctacaacagtttcccgcaactga

SEQ ID NO: 11785 - protein, 240 aa, Oryza sativa
MAAEGELKLLGTWASPYVSRVKLALHLKGLSYEYVVEEDHFNNKSELLLSSNPVHKKVPVMIHNGKPICESLIIMEYLDEAFPDTAAPLLPADLHDRAVARFWAAYIDDKLVPSWKQAFSGKTGEEKAEGMRHMLAAVDALEAAMEWSYKGKPFFGGDAVGFLDVALGGLLSWLHGTEELCGAKILDAAKTPLLSAWARRFGEMDAAKVALPDVCKLVEFAKMKRVQLEAAMAATTVSRN

SEQ ID NO: 11786 - DNA, 714 bp, Oryza sativa
  CDS (1)..(714)
atggctgcagaagatgagctgaagctcctgggattttgggcgagcccctacgtttgcagagtgaagctcgcactccacctcaaaggcctgatctacgactatgtcaaggaggatgtcttcaccaacaagagcgagctcctcctcagctgcaacccggtgcacgcgaaggtccccgtgctcatccacaacggcaagcccatctgcgagtcgcaggtcatcgtacaatacatcgacgaggtcttccccgacgccggcgtcaccctcctccccgccgacccccacgatcgcgccgccgctcgcttctgggccgcctacatcgacgacaagctactgcccccgtgggtgcacgcgtacaggggaaagacggacgaggagaaggccgagaggatgaagcagacgcttgcggtggtcgacgcgctggagacggcgatggaggagtgctccaaggggaacgccttcttcggcggcgacaccgtcgggtacgtcgacgtcgcgctggggggcttgctctcctggttgcacgggaccgaggagctgtgtggcgccaagatcttggacgccgccaagaccccgctcctgtcggcgtgggcgcggcgcttcggcgagctggatgcagccaacgcggcgctgccggacgtcggcaggttggtcgagttttgcaagatgaggcatgtcgagctggaggctgcagaggcagcagctgcgcgcaactga

SEQ ID NO: 11787 - protein, 237 aa, Oryza sativa
MAAEDELKLLGFWASPYVCRVKLALHLKGLIYDYVKEDVFTNKSELLLSCNPVHAKVPVLIHNGKPICESQVIVQYIDEVFPDAGVTLLPADPHDRAAARFWAAYIDDKLLPPWVHAYRGKTDEEKAERMKQTLAVVDALETAMEECSKGNAFFGGDTVGYVDVALGGLLSWLHGTEELCGAKILDAAKTPLLSAWARRFGELDAANAALPDVGRLVEFCKMRHVELEAAEAAAARN

SEQ ID NO: 11788 - DNA, 693 bp, Oryza sativa
  CDS (1)..(693)
atggcagggcgaaacaaccacgagctcaagctgctgggcacatggccgagcccgttcgtcgtcagggtgaggctcgcgctcggcctcaagggcctgagctacgagtacgtcgagcaggacatcagggacaagagcgagctcctcgtcgtctccaacccggtgcacaagaaggtgcccgtgctcatccacggcggcaagcccgtctgcgagtcgcagatcatcgtgcagtacatcgacgaggcgttccccggcgccggcgcctccctcctcccctccgatccccacgaacgcgctgtcgcccgcttctgggccacctacatcgatgacgagtttgctacgaagttccgagcaatgggagaagcgaaggaggaggaggagaaggacgaggcggcggcgcaggtgttcgccgcgctggagaccttggaggaagccatgaaggggaaggtcttcttcggcggcgacagcgcggggtacgtggacgtggcgctcggtgggttcctggggtggatcaaggcggcggaggcgttggccggcgtcgcgttcctcgacggggcccggacgccgctcctggccgcttgggcggcgcggttctccgcgctggaggccgccaaggaggcgatacccagcgtcgagcggctgcgcgagtttcacggggcgatgcacgccgccgccgccacggtcgccggaaattga

SEQ ID NO: 11789 - protein, 230 aa, Oryza sativa
MAGRNNHELKLLGTWPSPFVVRVRLALGLKGLSYEYVEQDIRDKSELLVVSNPVHKKVPVLIHGGKPVCESQIIVQYIDEAFPGAGASLLPSDPHERAVARFWATYIDDEFATKFRAMGEAKEEEEKDEAAAQVFAALETLEEAMKGKVFFGGDSAGYVDVALGGFLGWIKAAEALAGVAFLDGARTPLLAAWAARFSALEAAKEAIPSVERLREFHGAMHAAAATVAGN

SEQ ID NO: 11790 - DNA, 675 bp, Glycine max
  CDS (1)..(675)
atgggaagcgaagaagtgaagctgttgagcttttgggtgagtccatttggtaaaaggattgagtgggctttgaaactgaagggtgtagagtatgagtatatagaagaagatatcttcaacaagagtagtctccttctggagttgaacccggttcacaagaaggttccggttcttgttcatgcagaaaaatccatcatcgctgaatcattcatcatccttgaatacatagatgaaaaatggaagcaatattcattgttacctcatcatccttatcaaagagcacttgctcgcttttgggctgctactgctgaagaaatgttcaggaaggtagtatggattgctttgcgcagccctaccagcggggatgaacgcgagaaggctcttaaggaatcgagagaagtaatggagagaatagaagaagagattagggggaagaaatatttcggaggggacaatattgggtaccttgacattgcacttggatggatctcttactggcttcctgttttggaggaagttggatcaatgcagataatagatccattgaaatttccagccaccactgcatggatgactaattttctcagcaatccagtgatcaaggacaacttgcccccaagagataagatgcttgtttacctcaaagatctaagaagcaaatatatagtcttataa

SEQ ID NO: 11791 - protein, 224 aa, Glycine max
MGSEEVKLLSFWVSPFGKRIEWALKLKGVEYEYIEEDIFNKSSLLLELNPVHKKVPVLVHAEKSIIAESFIILEYIDEKWKQYSLLPHHPYQRALARFWAATAEEMFRKVVWIALRSPTSGDEREKALKESREVMERIEEEIRGKKYFGGDNIGYLDIALGWISYWLPVLEEVGSMQIIDPLKFPATTAWMTNFLSNPVIKDNLPPRDKMLVYLKDLRSKYIVL

SEQ ID NO: 11792 - DNA, 654 bp, Glycine max
  CDS (1)..(654)
atgggaagtgaagatcgtgtgaagctggtgaacttttgggcgagtccatttggcaaaagggttgaatgggccttgaaactgaagggtgtaaagtatgagtatattgaagaagatgtctacaacatgagcagtctagttatggagttgaacccggttcacaagaaggttccgattcttgttcatgcccagaaaccaatcgctgagtcattcaccattcttgaatacattgatgaaacatggaagcagtatccactattacctcaagatccttatcaaagagcacttgctcgcttttgggccaatttcggtgagcaaaagcttatgagagcagcacgaaaagcaatgacaaccagccgggatgaacgcgcaaaggctcttaaggaaacgagagaactaatggagagaatagaagaagagattaagggaaagaaatatttcggaggggacaatatagggttccttgacattgcactcggatggatctcttactggcttcctgttgtggaggaagttggatcgatgcacataatagacccattgaaatttccagccatcacttcatggatgaccaattttctcagccaccgtgtgatcaaagacaatttgcccccaagagataagatgcttgtttactaccgcaactttgttaattaa

SEQ ID NO: 11793 - protein, 217 aa, Glycine max
MGSEDRVKLVNFWASPFGKRVEWALKLKGVKYEYIEEDVYNMSSLVMELNPVHKKVPILVHAQKPIAESFTILEYIDETWKQYPLLPQDPYQRALARFWANFGEQKLMRAARKAMTTSRDERAKALKETRELMERIEEEIKGKKYFGGDNIGFLDIALGWISYWLPVVEEVGSMHIIDPLKFPAITSWMTNFLSHRVIKDNLPPRDKMLVYYRNFVN

SEQ ID NO: 11794 - DNA, 681 bp, Glycine max
  CDS (1)..(681)
atggccaaagactacggagaagttgagttgtttggtgtggggggaagcccttttgccagaagggtgcagattgccctggaactgaagggagtccaatacacttactttgaagaagatcttaggaacaagagtgatcttcttatcaaatacaaccctattcacaagaaggtacctgtgcttgtccacaatggaagaccattggctgagtcccttgtgatccttgaatacattgatgagacatgggagaaccaccaccccatcttgcctcaacaaccttatgatagagccttggctcgattctggtcaaggttcattgatgacaaatgcatgcctgcaatatcaaaggcagcatttactgcagacaaggaggaacgtgacaagggcactgaggaatcactcgagtctcttcaaattcttgagaatgtactcaaacacaagttctttggaggtgagactactataggcatagtggacatagccgctggcttcatagctttctggctccctgcgattgaagaggctgtggggttgaaattgctgaccaatgagaagtttccaaaactctacaaatggggtgaagactacaccaaccaccctgttgtgaaaaagaatcttccccaaagagatagggttgtggggttcttcaaagctcgatatgcatccatcactgcttccaaatag

SEQ ID NO: 11795 - protein, 226 aa, Glycine max
MAKDYGEVELFGVGGSPFARRVQIALELKGVQYTYFEEDLRNKSDLLIKYNPIHKKVPVLVHNGRPLAESLVILEYIDETWENHHPILPQQPYDRALARFWSRFIDDKCMPAISKAAFTADKEERDKGTEESLESLQILENVLKHKFFGGETTIGIVDIAAGFIAFWLPAIEEAVGLKLLTNEKFPKLYKWGEDYTNHPVVKKNLPQRDRVVGFFKARYASITASK

SEQ ID NO: 11796 - DNA, 666 bp, Glycine max
  CDS (1)..(666)
atgtcaaagggtgacaaggttgaggttttggacttttgggctagcccattttgtgcaagagtgaaagttgctttggaagagaagggggtgaattatgtagccagtgaagaggatttgtttggaggcaagagtgagcttctccttaagtcaaatcctattcatcaaaaagttcctgtgctcttgcacaatgacaagcctctagccgagtcttctatcattgttagctacattgatgaagtctggtcttccaacccactgcttccaactcttgcttatgatcgtgcacaagccagattctggactgattacattgacaaaaaggtatttgaaaccgggaggagtatctggggaagcaatggagaagagagagaagtgggcactagggacttcattgaagttttaaagcatcttgaggaagctctaggggagaaggactactttggaggtgatgcctttggttatgttgacatcatagccattggtcattcagcttggtttttggcctatgagaagcttggtggcttcaaagttgaagaccactcgccaaaaatctcagcttggattaagaggagcttgcaaagggaatctgttgccaaagttctgccagaccctgagaaggtctaccagtttgtccttcatttcaggaagatgttaggacttgaataa

SEQ ID NO: 11797 - protein, 221 aa, Glycine max
MSKGDKVEVLDFWASPFCARVKVALEEKGVNYVASEEDLFGGKSELLLKSNPIHQKVPVLLHNDKPLAESSIIVSYIDEVWSSNPLLPTLAYDRAQARFWTDYIDKKVFETGRSIWGSNGEEREVGTRDFIEVLKHLEEALGEKDYFGGDAFGYVDIIAIGHSAWFLAYEKLGGFKVEDHSPKISAWIKRSLQRESVAKVLPDPEKVYQFVLHFRKMLGLE

SEQ ID NO: 11798 - DNA, 678 bp, Glycine max
  CDS (1)..(678)
atggcttcaagtcaggaggaggtgacccttttgggagctactggaagcccatttgtgtgcagggttcatattgccctcaagttgaagggagttgaatacaaatatgtcgaagaaaatttgaggaacaagagtgaactgcttctcaaatccaacccagttcacaagaagattccagtgtttattcacaatgggaagtccatagcagagtctcttgtgattgttgaatacattgatgagacatggaagaacaatcccatcttgccttctgatccttaccaaagagccttggctcgtttctggtccaaattcattgatgacaaggtttttggtgcttcatggaaagctgttttcacagctgatgagaaagagcgtgagaagaatgttgaggaagcaattgatgctctgcagtttcttgagaatgagataaaggacaagaagttctttggaggtgaggagattgggttggtagatattgctgctgtctacatagcattttgggtccctatggttcaagaaattgcagggttggagttattcacaagtgacaaatttcctaagctccacaattggagccaagaatttttgaaccatccaattgtcaaagaaagtctgccccctagagatcctgtttttgcctttttcaagggtcgctatgaaatcctttttacttcaaaatag

SEQ ID NO: 11799 - protein, 225 aa, Glycine max
MASSQEEVTLLGATGSPFVCRVHIALKLKGVEYKYVEENLRNKSELLLKSNPVHKKIPVFIHNGKSIAESLVIVEYIDETWKNNPILPSDPYQRALARFWSKFIDDKVFGASWKAVFTADEKEREKNVEEAIDALQFLENEIKDKKFFGGEEIGLVDIAAVYIAFWVPMVQEIAGLELFTSDKFPKLHNWSQEFLNHPIVKESLPPRDPVFAFFKGRYEILFTSK

SEQ ID NO: 11800 - DNA, 678 bp, Glycine max
  CDS (1)..(678)
atggcttcaagtcaggaggaggtgacccttttgggagctactggaagcccatttgtgtgcagggttcatattgccctcaagttgaagggagttgaatacaaatatgtcgaagaaaatttgaggaacaagagtgaactgcttctcaaatccaacccagttcacaagaaggttccagtgtttattcacaatgagaagcccatagcagagtctcttgtgattgttgaatacattgatgagacatggaagaacaaccccatcttgccttctgatccttaccaaagagccttggctcgtttctggtccaaattcattgatgataaggtttttggtgctgcatggaaatccgttttcacagctgatgagaaagagcgtgagaagaatgttgaggaagcaattgaggctctgcagtttcttgagaatgagataaaggacaagaagttctttggaggagaggagattgggttggtagatattgctgctgtctacatagcattttgggtccctatggttcaagaaattgcagggttggagttattcacaagtgagaaatttcctaagctccacaattggagccaagaatttttgaaccatccaattgtcaaagaaagtctgccccctagagatcctgttttctcctttttcaagggtctctatgaaagcctttttggttcaaaatag

SEQ ID NO: 11801 - protein, 225 aa, Glycine max
MASSQEEVTLLGATGSPFVCRVHIALKLKGVEYKYVEENLRNKSELLLKSNPVHKKVPVFIHNEKPIAESLVIVEYIDETWKNNPILPSDPYQRALARFWSKFIDDKVFGAAWKSVFTADEKEREKNVEEAIEALQFLENEIKDKKFFGGEEIGLVDIAAVYIAFWVPMVQEIAGLELFTSEKFPKLHNWSQEFLNHPIVKESLPPRDPVFSFFKGLYESLFGSK

SEQ ID NO: 11802 - DNA, 678 bp, Glycine max
  CDS (1)..(678)
atggcagctaatcaggaagatgtgacgcttttgggagttgttggaagcccgtttgtgtgcagggtccagattgccctcaaattgaagggaattgaatgcaaatttttggaagaaaatttggcaaacaagagtgatctacttctcaaatccaaccccgtttacaagaaggttccagtgtttattcacaatgagaagcccatagcagagtctcttgtgattgttgagtacattgatgagacatggaagaacaaccccatcttgccttctgatccttaccaaagatcctttgctcggttttggtccaagttcatagatgacaagattgtgggtgcttcatggaaatctgttttcacggttgatgagaaagagcgtgagaagaatgttgaagaatcgttggaggctctgcagtttcttgagaatgaactacaagacaaaaggttctttggaggagatgaatttggatttgtagatattgctggtgtcttcattgcattttcaatcccaattttccaagaagtagcagggttgcaattattcaccagtgagaaatttcctaagctcttcaaatggagccaagagttgatcaaccaccctgttgtcaaagatgtccttcctcctagagaaccactttttgccttcttcaaatccctctatgaaagcctttctgcttcaaaatag

SEQ ID NO: 11803 - protein, 225 aa, Glycine max
MAANQEDVTLLGVVGSPFVCRVQIALKLKGIECKFLEENLANKSDLLLKSNPVYKKVPVFIHNEKPIAESLVIVEYIDETWKNNPILPSDPYQRSFARFWSKFIDDKIVGASWKSVFTVDEKEREKNVEESLEALQFLENELQDKRFFGGDEFGFVDIAGVFIAFSIPIFQEVAGLQLFTSEKFPKLFKWSQELINHPVVKDVLPPREPLFAFFKSLYESLSASK

SEQ ID NO: 11804 - DNA, 678 bp, Glycine max
  CDS (1)..(678)
atggcagctactcaggaagatgtgaagcttttgggtattgtgggaagcccatttgtgtgcagggtgaagattgccctcaagttgaagggagttcaatacaaatttttggaacaaaatttgaggaacaagagtgaactgcttctcaaatccaacccagttcacaagaaggttccagtgtttattcacaatgagaagcccatagcagaatcccttgtgattgttgagtacattgatgagacatggaagaacaaccccatcttaccttctgatccttaccaaagaaccttggctcgtttctggtccaaattcattgatgacaagattgtgggtgctgtattgaaatctgttttcacggttgatgagaaagagcgtgagaagaatgttgaagaaacatatgaggctcttcagtttcttgagaatgagctgaaggacaagaagttttttggaggagaggaatttgggttggtagatattgctgctgtcttcatagcattttggatcccaatttttcaggaaatagcagggttgcagttattcactagtgagaaatttcctatactctacaaatggagccaagaattccttaaccaccctcttgtgcaagaagtccttcctcctagagacccactttttaccttcttcaaagcccgctatgaaagtctttctgcttcaaaatag

SEQ ID NO: 11805 - protein, 225 aa, Glycine max
MAATQEDVKLLGIVGSPFVCRVKIALKLKGVQYKFLEQNLRNKSELLLKSNPVHKKVPVFIHNEKPIAESLVIVEYIDETWKNNPILPSDPYQRTLARFWSKFIDDKIVGAVLKSVFTVDEKEREKNVEETYEALQFLENELKDKKFFGGEEFGLVDIAAVFIAFWIPIFQEIAGLQLFTSEKFPILYKWSQEFLNHPLVQEVLPPRDPLFTFFKARYESLSASK

SEQ ID NO: 11806 - DNA, 678 bp, Glycine max
  CDS (1)..(678)
atggcagctactcaggaagatgtgaagcttttgggtattgtgggaagcccatttgtgtgcagggtccagattgcccttaagttgaagggagttgaatacaaatttttggaagaaaatttgggcaacaagagtgatttgcttctcaaatacaaccctgttcacaagaaggttccagtgtttgttcacaatgagcagcccatagcagagtctcttgtgattgttgaatacattgatgagacatggaagaacaaccccatcttaccttctgatccttaccaaagagccttggctcgtttctggtccaaattcattgatgataagattgtgggtgcagtatggaaatctgttttcacggttgatgagaaagagcgtgagaagaatgttgaagaaacatatgaggctcttcagtttcttgagaatgaactgaaggacaagaagttttttggaggagaggaatttgggttggtagatattgctgctgtcttcatagcattttggatcccaatttttcaggaaatagcagggttgcagttattcaccagtgagaaatttcctatactctacaaatggagcgaagaatcccttaaccaccctttagtgcaagaagtccttcctcctagagacccactttttaccttcttcaaagcccgctatgaaagtctttctgcttcaaaatag

SEQ ID NO: 11807 - protein, 225 aa, Glycine max
MAATQEDVKLLGIVGSPFVCRVQIALKLKGVEYKFLEENLGNKSDLLLKYNPVHKKVPVFVHNEQPIAESLVIVEYIDETWKNNPILPSDPYQRALARFWSKFIDDKIVGAVWKSVFTVDEKEREKNVEETYEALQFLENELKDKKFFGGEEFGLVDIAAVFIAFWIPIFQEIAGLQLFTSEKFPILYKWSEESLNHPLVQEVLPPRDPLFTFFKARYESLSASK

SEQ ID NO: 11808 - DNA, 678 bp, Glycine max
  CDS (1)..(678)
atggcagctactcaggaagatgtgaagcttttgggtattgtgggaagcccatttgtgtgcagggtccagattgcccttaagttgaagggagttgaatacaaatttttggaagaaaatttgggcaacaagagtgatttgcttctcaaatacaaccctgttcacaagaaggttccagtgtttgttcacaatgagcagcccatagcagagtctcttgtgattgttgaatacattgatgagacatggaagaacaaccccatcttaccttctgatccttaccaaagagccttggctcgtttctggtccaaattcattgatgataagattgtgggtgctgtatcgaaatctgttttcacggttgatgagaaagagcgtgagaagaatgttgaagaaacatatgaggctcttcagtttcttgagaatgagctgaaggacaagaagttttttggaggagaggaatttgggttggtagatattgctgctgtcttcatagcattttggatcccaatttttcaggaaatagcagggttgcagttattcaccagtgagaaatttcctatactctacaaatggagccaagaattccttaaccacccttttgtgcacgaagtccttcctcctagagacccactttttgcctacttcaaagcccgctatgaaagtctttctgcttcaaaatag

SEQ ID NO: 11809 - protein, 225 aa, Glycine max
MAATQEDVKLLGIVGSPFVCRVQIALKLKGVEYKFLEENLGNKSDLLLKYNPVHKKVPVFVHNEQPIAESLVIVEYIDETWKNNPILPSDPYQRALARFWSKFIDDKIVGAVSKSVFTVDEKEREKNVEETYEALQFLENELKDKKFFGGEEFGLVDIAAVFIAFWIPIFQEIAGLQLFTSEKFPILYKWSQEFLNHPFVHEVLPPRDPLFAYFKARYESLSASK

SEQ ID NO: 11810 - DNA, 666 bp, Glycine max
  CDS (1)..(666)
atgtcaaagggtgacaaggttgaggttttggacttctgggctagcccattttgtgcaagagtgaaagttgctttggaagagaagggggtgaactatgtagccagtgaagaggatttgtttggaggcaagagtgagcttctcctgaagtcaaatcctatccatcaaagggttcctgtgctcttgcacaatgacaaacctctagccgagtcttctatcattgttagctacattgatgaagtctggtcttccaacccactgcttccaactcttgcttatgatcgtgcccaagccagattctggactgattacattgacaaaaaagtatttgaaaccgggaggagtatctggggaagcaatggagaagagagagaagtgggcactagggacttcattgaagttttaaagcatcttgaggaagccctaggggagaagaactattttggtggtgatgcctttgggtatgtggacatcatagccattggtcactcggcttggtttttggcttatgagaagcttgggggcttcaaagttgaagaccattcaccaaaaatctcagcttggattaagaggtgtttgcaaagggaatctgttgccaaagttctgccagaccctgagaaggtctaccagtttgtccttcatttcaggaagatgttaggacttgaataa

SEQ ID NO: 11811 - protein, 221 aa, Glycine max
MSKGDKVEVLDFWASPFCARVKVALEEKGVNYVASEEDLFGGKSELLLKSNPIHQRVPVLLHNDKPLAESSIIVSYIDEVWSSNPLLPTLAYDRAQARFWTDYIDKKVFETGRSIWGSNGEEREVGTRDFIEVLKHLEEALGEKNYFGGDAFGYVDIIAIGHSAWFLAYEKLGGFKVEDHSPKISAWIKRCLQRESVAKVLPDPEKVYQFVLHFRKMLGLE

SEQ ID NO: 11812 - DNA, 666 bp, Glycine max
  CDS (1)..(666)
atggcagaggctaatgtagtgctgttggatttctggccaagctcttatggaatgagagtgaaaatcgctttggcagagaagggaatctcatatgagtgcaagcaagaagacttggaagctagaagctctctgcttttagagatgaacccggttcacaaaatgataccagttttgattcataatggaaaacccatctgcgaatcactcaacattgttcagtacattgatgagacatggaaccacaaaccttcttctctccttccatctgatccttacaaacgatcccaagccaggttttggggcgattacattgacaaaaatgtatacaatgctgtgaagagggtatggacagggaagggtaaagaacaagaagagttcaagaaacaatttatacaatgcttgaagaccttggaatatgaacttggagacaagccatattttggtggtgaggactttgggtatgtggatgtggctcttgttcccttcactagctggttttacacggttgagacttgtgggaaactaagcattgagaaagagtgtcccaaactcatggcttgggccaagaggtgcatggaaaaagagagtgtggccacgccactccctcaccctcaccagatctatgcctttgcaatgcaatataaacagagacatggacttgagtag

SEQ ID NO: 11813 - protein, 221 aa, Glycine max
MAEANVVLLDFWPSSYGMRVKIALAEKGISYECKQEDLEARSSLLLEMNPVHKMIPVLIHNGKPICESLNIVQYIDETWNHKPSSLLPSDPYKRSQARFWGDYIDKNVYNAVKRVWTGKGKEQEEFKKQFIQCLKTLEYELGDKPYFGGEDFGYVDVALVPFTSWFYTVETCGKLSIEKECPKLMAWAKRCMEKESVATPLPHPHQIYAFAMQYKQRHGLE

SEQ ID NO: 11814 - DNA, 663 bp, Glycine max
  CDS (1)..(663)
atgggagacgaggtgattctgttgaatttctggttaagcctttatgggatgagggtctggattgcactagaggaaaagggcatcaagtatgagaatagacaagagaatattagtaacaagagccagttactcttgcaaatgaacccagttcacaagaaaataccagttctcttccacaatagcagacacatctgtgattcactcattgctgttgagtatattgatgaggtttggaatgatcaatctcccttgttgccttctgatccttaccagagatcacaggctagattctggtctaactatgttgacaccaagatatatgagattgccgtgaggttttggaatactaaaggacaagagaaagaagctgccagggaagaatttttggagtgcatgaagttattggaagaacaactggtggatgagccatattttggtggaaagaactttggctttgtggatgttgcacttgtttctttgttcagttatttttataccttcactagtatatatggaaatttaatcaatgaggaacggtttcccaaaatcattgcttgggccaataggtgtattcaaaaagagtgtgtgttcaagtgttttcccgaggagctgaaggtcaaagagcatgtttcacagaagagaaaggattcgaacagtgaatag

SEQ ID NO: 11815 - protein, 220 aa, Glycine max
MGDEVILLNFWLSLYGMRVWIALEEKGIKYENRQENISNKSQLLLQMNPVHKKIPVLFHNSRHICDSLIAVEYIDEVWNDQSPLLPSDPYQRSQARFWSNYVDTKIYEIAVRFWNTKGQEKEAAREEFLECMKLLEEQLVDEPYFGGKNFGFVDVALVSLFSYFYTFTSIYGNLINEERFPKIIAWANRCIQKECVFKCFPEELKVKEHVSQKRKDSNSE

SEQ ID NO: 11816 - DNA, 660 bp, Glycine max
  CDS (1)..(660)
atggcagatgaggtggttctgctagatttctggccaagtccatttgggatgagggtcaggattgcacttgctgaaaagggtatcaaatatgagtacaaagaagaggacttgaggaacaagagtcctcttctcctccaaatgaacccggttcacaagaagattccggttctcatccacaatggcaaacccatttgtgaatccctcattgctgttcagtacattgaggaggtttggaatgacagaaatcccttgttgccttctgacccttaccagagagctcaggctagattctgggctgattatgttgataagaagatatatgatcttggaaggaagatttggacatcaaaaggagaagaaaaagaagctgccaagaaggagttcatagaagcccttaaattgttggaggaacagctgggagacaagacttattttggaggagacaatctaggttttgtggatatagcgcttgttccattctacacttggttcaaagcctatgagacttttggcaccctcaacatagagagtgagtgccccaagtttattgcttgggccaagaggtgccttcagaaagaaagcgttgccaagtctcttcctgatcagcaaaaggtttatgagttcattatggatctaagaaagaagttaggcattgagtag

SEQ ID NO: 11817 - protein, 219 aa, Glycine max
MADEVVLLDFWPSPFGMRVRIALAEKGIKYEYKEEDLRNKSPLLLQMNPVHKKIPVLIHNGKPICESLIAVQYIEEVWNDRNPLLPSDPYQRAQARFWADYVDKKIYDLGRKIWTSKGEEKEAAKKEFIEALKLLEEQLGDKTYFGGDNLGFVDIALVPFYTWFKAYETFGTLNIESECPKFIAWAKRCLQKESVAKSLPDQQKVYEFIMDLRKKLGIE

SEQ ID NO: 11818 - DNA, 651 bp, Glycine max
  CDS (1)..(651)
atggcagatgaggtggttctgctagatttctggccaagtccatttgggatgagggtcaggattgcacttgctgaaaagggtatcaaatatgagtccaaagaagaggacttgcagaacaagagccctttgctcctcaaaatgaacccggttcacaagaaaatcccggttctcatccacaatggcaaacccatttgtgaatctctcgttgctgttcagtacattgaggaggtctggaatgacagaaatcccttgttgccttctgacccttaccagagagctcaggctagattctgggctgactttgttgacaataagatatttgatcttggaagaaagatttggacatcaaagggagaagaaaaagaagctgccaaaaaggagttcatagaggcccttaaattattggaggaacagctgggagacaagacttattttggaggagacgatctaggttttgtggatatagcacttattccattcgacacttggttcaagacttttggcagcctcaacatagagagtgagtgccccaagtttgttgcttgggccaagaggtgcctgcagaaagacagtgttgccaagtctcttcctgatcaacacaaggtctatgagttcattatggacataagaaagaagttcgacattgagtag

SEQ ID NO: 11819 - protein, 216 aa, Glycine max
MADEVVLLDFWPSPFGMRVRIALAEKGIKYESKEEDLQNKSPLLLKMNPVHKKIPVLIHNGKPICESLVAVQYIEEVWNDRNPLLPSDPYQRAQARFWADFVDNKIFDLGRKIWTSKGEEKEAAKKEFIEALKLLEEQLGDKTYFGGDDLGFVDIALIPFDTWFKTFGSLNIESECPKFVAWAKRCLQKDSVAKSLPDQHKVYEFIMDIRKKFDIE

SEQ ID NO: 11820 - DNA, 660 bp, Glycine max
  CDS (1)..(660)
atggccaaagactatggagaagttgagttgtttggtgtaggtggaagcccttttgccagaagggtgcagattgccctagaactgaagggagttcaatacacttactttgaagaagatcttaggaacaagagtgctcttcttctcaaatacaaccctgttcacaagaaggtgcctgtgcttgtccacaatggaagacccttggctgagtcccttgtgatccttgaatacattgatgagacatgggagaaccaccaccccatcttgcctcaacaaccttatgatagagccttggctcgattctggtcaaggtacattgatgacaaagcagcatttactgtagacaaggaggaacgtgacaagggcactgaggaatcactcgagtctcttcaaattcttgagaatgagctcaaacacaagttctttggaggagagactatagacatagtggacatagccgctggtttcatagctttctggctccctgcaattgaagaggctgttgggttgaaattgctgaccaatgagaagtttccaaaactctacaaatggggtgaagactacaccaaccaccctattgtgaaaaagaatcttccccaaagagataggcttgtggggttcttcaaagctcgatatgcatcatccaacactgcttccaaatag

SEQ ID NO: 11821 - protein, 219 aa, Glycine max
MAKDYGEVELFGVGGSPFARRVQIALELKGVQYTYFEEDLRNKSALLLKYNPVHKKVPVLVHNGRPLAESLVILEYIDETWENHHPILPQQPYDRALARFWSRYIDDKAAFTVDKEERDKGTEESLESLQILENELKHKFFGGETIDIVDIAAGFIAFWLPAIEEAVGLKLLTNEKFPKLYKWGEDYTNHPIVKKNLPQRDRLVGFFKARYASSNTASK

SEQ ID NO: 11822 - DNA, 678 bp, Glycine max
  CDS (1)..(678)
atggcagctggtcaggaagatgtgaagcttttgggagttgtgggaagcccatttgtgtgtagggtccagattgccctcaagttgaagggaattgaatacaaatttgtggaagaaaatttggccaacaagagtgatttgcttcttaaatccaacccagttcacaagaaagttccagtttttattcacaatgagaagcccatagcagagtctcttgtgattgttgagtacattgatgagacatggaagaacaaccccatcttgccttctgatccttaccatagagccttggctcgtttctggtccaaattcattgatgacaaggtttttggtgctgcatggaaatctgttttcactcttgatgagaaagagcgtgagaagaatgttgaagaatcattggaggctcttcagtttcttgagaatgagttgaaggacaataagttttttggaggagaggaatttgggttggtagatattgcagctattttcatagcattttggattccaatttttcaggaaatagcagggttgcagatattcacaagtgagaaattccctaagctctacaaatggagccaagagttcatgagccaccctgttgtgaaagaagtccttcctcctagagacccactttttgccttcttcaaggcccgctatgaaagtctttctgcttcaaaatag

SEQ ID NO: 11823 - protein, 225 aa, Glycine max
MAAGQEDVKLLGVVGSPFVCRVQIALKLKGIEYKFVEENLANKSDLLLKSNPVHKKVPVFIHNEKPIAESLVIVEYIDETWKNNPILPSDPYHRALARFWSKFIDDKVFGAAWKSVFTLDEKEREKNVEESLEALQFLENELKDNKFFGGEEFGLVDIAAIFIAFWIPIFQEIAGLQIFTSEKFPKLYKWSQEFMSHPVVKEVLPPRDPLFAFFKARYESLSASK

SEQ ID NO: 11824 - DNA, 678 bp, Glycine max
  CDS (1)..(678)
atggcttcaagtcaggaagaggtgactcttttgggagtaattggaagcccatttgcttgcagggtgaagattgcccttaagttgaagggagttgaatacaaatatgtggaagaaaatttggccaacaagagtgatttgcttctcaaatccaacccagttcacaagaaagttccagtttttattcacaatgagaagcccatagcagagtctcttgtgattgttgagtacattgatgagacatggaagaacaaccccatcttgccttctgatccttaccaaagagccttggctcgtttctggtccaaattcattgatgacaagattgtgggtgctgcatggaatgctgttttcacggttgatgagaaagagcgtgagaagaatgttgtagaaacatatgaggctctgcagtttcttgagaatgagatcaaggacaagaaattctttggaggagaagaggttgggttggtagatatagctggtgtctacatagcattttgggtccctttgattcaagaaattgcagggttggagctattaagcagtgagaaatttcctaagctttacaagtggagccaagaatttgtgaaccatccaattgtcaaagaaggtcttccccctagagacccagtttttgcctttttcaaaggacgctatgaaagcctttctgcttcaagatag

SEQ ID NO: 11825 - protein, 225 aa, Glycine max
MASSQEEVTLLGVIGSPFACRVKIALKLKGVEYKYVEENLANKSDLLLKSNPVHKKVPVFIHNEKPIAESLVIVEYIDETWKNNPILPSDPYQRALARFWSKFIDDKIVGAAWNAVFTVDEKEREKNVVETYEALQFLENEIKDKKFFGGEEVGLVDIAGVYIAFWVPLIQEIAGLELLSSEKFPKLYKWSQEFVNHPIVKEGLPPRDPVFAFFKGRYESLSASR

SEQ ID NO: 11826 - DNA, 711 bp, Glycine max
  CDS (1)..(711)
atggctcaaagggacttgaggcttttgggtgcttggttcagtccatttgtcctgagggtgcagattgcccttaacctcaagggtttggattatgaggttgttgaagagactttgaatcccaaaagtgaattgcttcttaagtccaaccctgtgcacaagaaaatcccagttttcttccatggagataaagtcatatgtgaatctgcaatcatagttgagtacatagatgaggtttggtccaacaatgctctctccatccttccacaaaatgcatatgatcgagctaatgcccgattttgggtttcttacatcgatgacaagtgggttacgtccttgaaaagtgttctactggctggagatgacgacgaggcaaagaaatcacactttgtggaaatggaagaagcacttgagaggatggaagaagtgttcaacaagtgcagtgaaggaaagacatactttggaggggatacaattggaattgttgacattgtttttgggagcctttggagttggatgagagtgatagaagagatgaatggaagaaaagtgtttgatgaagcaaagaacccttctttggctaaatgggctgaaacgttttctgctgatgctgctgtgaagggtgttcttccagagactcacaagcttgttgagtatgccgagagtcttaagaaaagatgggctgctgcagctgcaaagctatctttgttctaa

SEQ ID NO: 11827 - protein, 236 aa, Glycine max
MAQRDLRLLGAWFSPFVLRVQIALNLKGLDYEVVEETLNPKSELLLKSNPVHKKIPVFFHGDKVICESAIIVEYIDEVWSNNALSILPQNAYDRANARFWVSYIDDKWVTSLKSVLLAGDDDEAKKSHFVEMEEALERMEEVFNKCSEGKTYFGGDTIGIVDIVFGSLWSWMRVIEEMNGRKVFDEAKNPSLAKWAETFSADAAVKGVLPETHKLVEYAESLKKRWAAAAAKLSLF

SEQ ID NO: 11828 - DNA, 699 bp, Glycine max
  CDS (1)..(699)
atggctgaaagggacttgaggcttttgggtgcttggttcagtccatttgccctgagggtgcagattgcccttaacctcaagggtttggattatgaggttgttgaagagactttgaatcccaaaagtgaattgcttcttaagtccaaccctgtgcacaagaaaatcccagttttcttccatggagataaagtcatatgtgaatctgcaatcatagttgagtacatagatgaggtttggtccaacaatgctctctccatccttccacaaaatgcatatgatcgagctaatgcccgattttgggtttcttacatcgatgacaagtggcttacgtccttgaaaagtgttctagcgactgaagatgatgaggcaaagaagctacactttgagcaagcggaagaagtgcttgagaaggtggaagaagtgttcaacaagtgcagtgaagggaaggcctatttcggaggagatacgattggatttgttgacattggttttggaagctttttgagtttcattagagtctcagagaatatgaatgaaagaaaattgcttgatgaaacgaagcaccctggtttgaccctatgggctgaaacttttgctgctgatcctgctgtgaagggccttctgccagagactgaaaagcttgttgagtttgcaaagattcttcagctaaaatgggctgctgcagctgctgcaaagtaa

SEQ ID NO: 11829 - protein, 232 aa, Glycine max
MAERDLRLLGAWFSPFALRVQIALNLKGLDYEVVEETLNPKSELLLKSNPVHKKIPVFFHGDKVICESAIIVEYIDEVWSNNALSILPQNAYDRANARFWVSYIDDKWLTSLKSVLATEDDEAKKLHFEQAEEVLEKVEEVFNKCSEGKAYFGGDTIGFVDIGFGSFLSFIRVSENMNERKLLDETKHPGLTLWAETFAADPAVKGLLPETEKLVEFAKILQLKWAAAAAAK

SEQ ID NO: 11830 - DNA, 708 bp, Glycine max
  CDS (1)..(708)
atggctaaaaacgagttgaggcttttgggtgcttggttcagtccatatgccctgagggtgcagattgcccttaacctcaagggtctagattatgaggttgttgaagagaccttgaatcccaaaagtgatctgcttcttaagtccaaccctgtgcacaagaaaatcccagttctactccatggagataaagtcatatgtgaatctgcaatcatagtagagtacatagatgaggtttggtccaacaatgctctctccatccttccacaaaatgcttatgaccgagctaatgcccgattttgggtttcttacatcgatgacaagtggtatacgtccataaggaatactattttggctgaagcggctgatcaagatgatgaggcaaagaagccacactttgtgagaatggaagaagctcttgagaggatggaagaagtgttcaacaagtgcagtgaaggaagggcttattttggaggagatacaattggaattattgacattgcttttgggagcctttggggttgggtgagagtgatagaggagatgaatggaagaaaagtgtttgatgaagcaaaaaaccctgctttggctaaatgggctgataagttttctgctgatcctgctgtgaagggtgttcttccagagactcaaaagcttattgagtttgccaaaattcgtaagcaaaaatgggctgctgcagctgcaaagtaa

SEQ ID NO: 11831 - protein, 235 aa, Glycine max
MAKNELRLLGAWFSPYALRVQIALNLKGLDYEVVEETLNPKSDLLLKSNPVHKKIPVLLHGDKVICESAIIVEYIDEVWSNNALSILPQNAYDRANARFWVSYIDDKWYTSIRNTILAEAADQDDEAKKPHFVRMEEALERMEEVFNKCSEGRAYFGGDTIGIIDIAFGSLWGWVRVIEEMNGRKVFDEAKNPALAKWADKFSADPAVKGVLPETQKLIEFAKIRKQKWAAAAAK

SEQ ID NO: 11832 - DNA, 705 bp, Glycine max
  CDS (1)..(705)
atgtctaaaagcgaagacttgaagcttttgggaggctggttcagcccatttgccctgagggtgcagattgcccttaacctcaagggtctagaatatgaggttgttgaagagaccttgaatcccaaaagtgacctgcttcttaagtccaaccctgtgcacaagaaaatcccagttttcttccatggagataaagtcatttgtgaatctgcaatcatagttgagtacattgatgaggcttggactaatgttccctccatccttccacaaaatgcttatgatcgtgctaatgctcgattttggtttgcctacattgatgagaagtggtttacgtccttgagaagtgttctagtggctgaagatgatgaggcaaagaagccacactttgagcaagcagaagaagggcttgagaggttggaagaagtgttcaacaagtacagtgaagggaaggcctatttcggaggagatagcattggattcattgacattggttttgggagcttcttgagttggatgagagtcatagaggagatgagtggaagaaaattgcttgatgaaaagaagcaccctggtttgacccaatgggctgaaacgtttgctgctgatcctgctgtgaagggcattcttccagagactgataagcttgttgagtttgccaagattcttcagctaaaatggactgctgcagcagctgcagctgcaaagtaa

SEQ ID NO: 11833 - protein, 234 aa, Glycine max
MSKSEDLKLLGGWFSPFALRVQIALNLKGLEYEVVEETLNPKSDLLLKSNPVHKKIPVFFHGDKVICESAIIVEYIDEAWTNVPSILPQNAYDRANARFWFAYIDEKWFTSLRSVLVAEDDEAKKPHFEQAEEGLERLEEVFNKYSEGKAYFGGDSIGFIDIGFGSFLSWMRVIEEMSGRKLLDEKKHPGLTQWAETFAADPAVKGILPETDKLVEFAKILQLKWTAAAAAAAK

SEQ ID NO: 11834 - DNA, 669 bp, Glycine max
  CDS (1)..(669)
atgtcgcacgacgaggtggttctgttggatgcatggggaagcatgtttgggatgagggcatggattgcattggaagaaaagggtgttaagtatgaacacaagatggaggatctcaacaacaagagctctttgcttatgcagatgaaccctatttacaagcaaattccagttctcatccataatggcaaaccaatttctgaatctgcaattatagtgcagtacatttatgaggtctggaatgacaacaaagctccaatcttgccctctgatccttatgagagagctcaagccagattctgggtagattacattgacaaaaaggtgtatcctgcttggaataaaatgtggctttctaaaggagaagaagagcatgaggcagggaagaaggagttaatctccgtctttaagcaactagaagagacattgggtgacaaaactttttatggaggtgacacgtttgggtttgttgatattgctctgatcactttctatagttggttttatacttttgagacatatggcaactttgaaatggaaggagagtgtcctaaactcgtggcttgggctaagagatgcatccagagagagactgtgtccaaagttcttcctgatgagaaggagttgtatgatgcagttgtggaaatgaagaaggaacttgattcgaaatag

SEQ ID NO: 11835 - protein, 222 aa, Glycine max
MSHDEVVLLDAWGSMFGMRAWIALEEKGVKYEHKMEDLNNKSSLLMQMNPIYKQIPVLIHNGKPISESAIIVQYIYEVWNDNKAPILPSDPYERAQARFWVDYIDKKVYPAWNKMWLSKGEEEHEAGKKELISVFKQLEETLGDKTFYGGDTFGFVDIALITFYSWFYTFETYGNFEMEGECPKLVAWAKRCIQRETVSKVLPDEKELYDAVVEMKKELDSK

SEQ ID NO: 11836 - DNA, 699 bp, Linum usitatissimum
  CDS (1)..(699)
atggcagccaacaagagcgacgtgaagttgatcggagcctggccgagccccttcgtgatgcgtccccgaatcgcactcaacctcaaatcggtcgagtacgatttcctagaggagcaattcggctccaagagcgagctcctgctgaaatcgaaccctgtccacaagaagatcccggtccttctccacaaggacagacctatctgcgagtccagcatcatcgtcgagtacattgatgaggtctggtctacgtctggcccttcgattttaccgtccgatccttacgatcgcgccatcgcacggttctgggctgcctacatcgatgaaaagtggttcccaaacataagggcagcacccctagcaccaaccgaggaggccaaaactacggcggtggaccaattgctcgaaggactcgctctgctcgaacaagcttacaaggacatcagcaagggcaaagacttcttcggaggcgacaggatcgggttcctcgacattgccctcgggagcatgctgagctggatgagaggtttgcaggtgatgattggagtgaagctacttgacgaggagaaaacacctggtctggtgaagtggtcggaaaagtttgcggcggatcctgctgttaaggatgtcctgcctgagactgagaagatcgtcgggtttgccaaggttcttgtcgccaaactcaaaggtgcctcagcttaa

SEQ ID NO: 11837 - protein, 232 aa, Linum usitatissimum
MAANKSDVKLIGAWPSPFVMRPRIALNLKSVEYDFLEEQFGSKSELLLKSNPVHKKIPVLLHKDRPICESSIIVEYIDEVWSTSGPSILPSDPYDRAIARFWAAYIDEKWFPNIRAAPLAPTEEAKTTAVDQLLEGLALLEQAYKDISKGKDFFGGDRIGFLDIALGSMLSWMRGLQVMIGVKLLDEEKTPGLVKWSEKFAADPAVKDVLPETEKIVGFAKVLVAKLKGASA

SEQ ID NO: 11838 - DNA, 729 bp, Zea mays
  CDS (1)..(729)
atggcggctccagtaggtgccaatgccataggagcgggcgacgagctgctcctgctgggcacatggtcgagcccatgggtgatccgagcgagggtggcgatggggctcaagggcctgagctacgagtacctcgaggaggacctcggcaacaagagcggcctcctgctccggtccaacccggtgcacaagaaggtgcccgtcctcatccacggcggccgcccattgtgcgagtcgctcgtgatcctgcagtacctcgacgaggcatggccgacggccggtcctccgctcctcccggccgacccctacgaccgcgccacggcacggttctgggcggcctacatcaacgacacgtttttcccggcgttcagggcgctgttcagatcgctgacggacgagcagagagcggaggcgctgcggaacgccctgcctgcggtggagacgttggagcgaacgctcgcggagtgctccgcggggaaggcgttcttcggcggcgacgccgtcgggatcgtggacgtcgcgctcgggagccacctggtctggatccgagtggtggatgaggttggaggcaccagccttctggacgcggccaaggtccccggcctggcggcgtgggcggagcggttcttggccgtggacgccgtgaagaaggtgatgccggacgcaacgaaggtcctggagcagtacaaggggtttcgggctaaatggattgcgggcgccggttgtacctga

SEQ ID NO: 11839 - protein, 242 aa, Zea mays
MAAPVGANAIGAGDELLLLGTWSSPWVIRARVAMGLKGLSYEYLEEDLGNKSGLLLRSNPVHKKVPVLIHGGRPLCESLVILQYLDEAWPTAGPPLLPADPYDRATARFWAAYINDTFFPAFRALFRSLTDEQRAEALRNALPAVETLERTLAECSAGKAFFGGDAVGIVDVALGSHLVWIRVVDEVGGTSLLDAAKVPGLAAWAERFLAVDAVKKVMPDATKVLEQYKGFRAKWIAGAGCT

SEQ ID NO: 11840 - DNA, 705 bp, Zea mays
  CDS (1)..(705)
atggcaggacgagtagcggacaaagacccagagctgaaggtgctcggcgtgtggtcgagcccgttcgttatcagggcccgcgtcgcgctaaacctcaagggcctggcctaccgatacgtggaggacaacctggacagcaagagcgagctcctcctcgcctccaaccccgtgcacgggaaggtgccggtgctcctccacgacggcaggcccgtctgcgagtcccgggtcatcgtggagtatatcgacgaggccttcccggccagcggcccctgcctcctccccgccgacccgtaccgccgcgcggtcgaccgcttctgggcctcctacgtcgacgacaagctctttcccacctggatacccgtctacaacggcaggacgagcgaggacagggtcgcggcggcgaggcaggtcgtggccgtgctggagaagtttgagcgggcgttcgatgagtgctccgggggcaaggcgttcttcggcggggacgctgctggcctcgtggacgtcgtgctaggcggcttcctcgggtggctgcgcgcgtctgaggtgatgtgtggcgtgagggtcatcgaccccgccaagacgccgctgctggcggcgtgggcggaccggttcgccgcgctcgacggcgtcagggaggtgatacctgacgtgcagaggctgctggagtataacaagattaggcgagctcgtcgtgggctgccgtag

SEQ ID NO: 11841 - protein, 234 aa, Zea mays
MAGRVADKDPELKVLGVWSSPFVIRARVALNLKGLAYRYVEDNLDSKSELLLASNPVHGKVPVLLHDGRPVCESRVIVEYIDEAFPASGPCLLPADPYRRAVDRFWASYVDDKLFPTWIPVYNGRTSEDRVAAARQVVAVLEKFERAFDECSGGKAFFGGDAAGLVDVVLGGFLGWLRASEVMCGVRVIDPAKTPLLAAWADRFAALDGVREVIPDVQRLLEYNKIRRARRGLP

SEQ ID NO: 11842 - DNA, 684 bp, Arabidopsis thaliana
  CDS (1)..(684)
atggcaagcagcgacgtgaagctgatcggtgcatgggcgagtccctttgtgatgaggccgaggattgctctaaacctcaagtctgtcccctacgagttcctccaagagacgtttgggtctaagagcgagttgcttcttaaatcaaacccggttcacaagaagatcccggttctgcttcatgctgataaaccggtgagtgagtccaacatcatcgttgagtatatcgatgacacttggagctcatctggaccgtccattctcccttccgatccttacgatcgggccatggctcggttctgggctgcttacatcgacgaaaagtggtttgtcgctctaagaggtttcctaaaagccggaggagaagaagagaagaaagctgtgatagctcaactagaagaagggaatgcgtttctggagaaggcgttcattgattgcagcaaaggaaaaccgttcttcaacggtgacaacatcggttacctcgacattgctctcgggtgcttcttggcttggttgagagtcaccgagttagcagtcagctataaaattcttgatgaggccaagacaccttctttgtccaaatgggctgagaatttctgtaatgatcccgctgtaaaacctgtcatgcccgagactgcaaagcttgctgaattcgcaaagaagatctttcctaagccgcaggcctaa

SEQ ID NO: 11843 - protein, 227 aa, Arabidopsis thaliana
MASSDVKLIGAWASPFVMRPRIALNLKSVPYEFLQETFGSKSELLLKSNPVHKKIPVLLHADKPVSESNIIVEYIDDTWSSSGPSILPSDPYDRAMARFWAAYIDEKWFVALRGFLKAGGEEEKKAVIAQLEEGNAFLEKAFIDCSKGKPFFNGDNIGYLDIALGCFLAWLRVTELAVSYKILDEAKTPSLSKWAENFCNDPAVKPVMPETAKLAEFAKKIFPKPQA

SEQ ID NO: 11844 - DNA, 657 bp, Arabidopsis thaliana
  CDS (1)..(657)
atggcagatgaggtgattcttctggatttctgggcgagtatgtttgggatgaggacaagaattgctctggcggagaaaagagttaagtacgatcacagagaagaagatctatggaataagagctccttgctcctcgagatgaacccggttcataagaaaattccggttctcatccacaatggtaaaccggtatgtgaatctctcattcagatcgagtacatagacgagacttggcccgacaataaccctctccttccctccgatccttacaagagagctcatgccaaattctgggccgacttcatcgacaaaaaggtgaatgttacggcgagaaggatttgggcggtcaaaggtgaggagcaagaagcagccaaggagttaatcgaaatactcaagacgctagagtctgagcttggagacaaaaagtactttggagacgaaacttttgggtatgtagatatagctctcattggattccatagctggtttgcagtgtacgagaagtttggaaatgtcagtatcgaatctgagtgttcgaaattggttgcgtgggccaaaaggtgtttggagagagagagcgtcgctaaagccctgcctgagtcagagaaggtcattacattcatttccgaacgtaggaagaaacttgggttggagtaa

SEQ ID NO: 11845 - protein, 218 aa, Arabidopsis thaliana
MADEVILLDFWASMFGMRTRIALAEKRVKYDHREEDLWNKSSLLLEMNPVHKKIPVLIHNGKPVCESLIQIEYIDETWPDNNPLLPSDPYKRAHAKFWADFIDKKVNVTARRIWAVKGEEQEAAKELIEILKTLESELGDKKYFGDETFGYVDIALIGFHSWFAVYEKFGNVSIESECSKLVAWAKRCLERESVAKALPESEKVITFISERRKKLGLE

SEQ ID NO: 11846 - DNA, 684 bp, Arabidopsis thaliana
  CDS (1)..(684)
atggctcagaacgatacagtgaagctgataggttcttggtctagcccttattcccttagggcacgtgtggctctacacttgaaatctgtcaagtacgagtacttagacgaacctgatgttcttaaagaaaagagtgaactccttctcaaatctaaccccatccacaagaaagtccctgtcctcctccatggtgacctctccatctctgagtccctcaacgttgttcaatacgtcgacgaggcttggccctccgttccttcaatccttccttctgatgcctatgatcgcgcatctgctcggttttgggctcagtacatcgatgacaagtgttttgcggcggtggatgcggtggtcggagcaaaagacgacgaagggaaaatggcggcggtgggaaagctgatggagtgtttggcgatacttgaagaaacgtttcagaagagcagcaaaggattagggttctttggaggagagaccatcggctaccttgacattgcttgttcggctcttttaggtccgatctctgtgatcgaggcgttttccggcgtcaagtttctccggcaagagacaacacctgggttgatcaaatgggccgagaggtttagggcccatgaagctgttaagccctacatgccaaccgtcgaagaggtcgttgcattcgcaaagcaaaagttcaatgttcagtga

SEQ ID NO: 11847 - protein, 227 aa, Arabidopsis thaliana
MAQNDTVKLIGSWSSPYSLRARVALHLKSVKYEYLDEPDVLKEKSELLLKSNPIHKKVPVLLHGDLSISESLNVVQYVDEAWPSVPSILPSDAYDRASARFWAQYIDDKCFAAVDAVVGAKDDEGKMAAVGKLMECLAILEETFQKSSKGLGFFGGETIGYLDIACSALLGPISVIEAFSGVKFLRQETTPGLIKWAERFRAHEAVKPYMPTVEEVVAFAKQKFNVQ

SEQ ID NO: 11848 - DNA, 705 bp, Arabidopsis thaliana
  CDS (1)..(705)
atgggagagaaagaggaagtgaaactattaggagtatggtacagtccatacgccataagacctaagatcgctcttcgtctcaaatcagtggattatgattacgttgaggaaaatctgtttggatccaagagtgagcttcttctcaaatcaaacccggttcacaagaaagtccctgttctcctccacaacaacaaaccgattgtcgagtctctcaacatcgttgaatacattgatgagacgtggaactcatctgcaccgtccattcttccttcacatccttatgatcgtgctcttgctcgcttttggtctgacttcgttgataacaagtggtttccggcgttgagaatggcggcgatcactaaatcggaagacgcaaaagcgaaagccatggaagaagtggaagaagggttgttgcaactcgaggatgcgtttgtttctataagcaaagggaaaccctttttcggcggtgaagcaatcgggtttatggatatttgctttggaagctttgtggttctcttgaaagctagagaaaagtttaaagcagaaaagcttttagacgaatcaaaaactccttctctttgtaaatgggccgaccggttcttgtccgatgaaacggtgaagaatgtggcaccggagatcgaaaaagtagctgagtttctacaagaacttgaggttagagctcaatccgcagcttcaagatcttga

SEQ ID NO: 11849 - protein, 234 aa, Arabidopsis thaliana
MGEKEEVKLLGVWYSPYAIRPKIALRLKSVDYDYVEENLFGSKSELLLKSNPVHKKVPVLLHNNKPIVESLNIVEYIDETWNSSAPSILPSHPYDRALARFWSDFVDNKWFPALRMAAITKSEDAKAKAMEEVEEGLLQLEDAFVSISKGKPFFGGEAIGFMDICFGSFVVLLKAREKFKAEKLLDESKTPSLCKWADRFLSDETVKNVAPEIEKVAEFLQELEVRAQSAASRS

SEQ ID NO: 11850 - DNA, 705 bp, Arabidopsis thaliana
  CDS (1)..(705)
atgggtctaatgaatcggtcaaagaatgatgagtacgtaaagctactaggagcatggcctagcccttttgtgctgagaactcggatcgcacttaacctaaagaacgtagcatacgagtatctagaagaagaagatactttgagttcggagagcgttttaaactataaccccgtccataaacagatccctatcctcattcatggcaacaaaccaatccgtgaatctctcaacatcgtcatgtatgttgatgagacttggctctccggtcctcccatccttccctctgatccatttgatcgcgctgtggctcgattttgggacgtctatatcgatgaacactgtttcacatcaatcaatggagtggcagtagcaaaaggtgaggagaacataaatgcggcgatagctaagctagagcagtgtatggctctattggaagaaacgtttcaagaatgcagcaaaggaagaggcttctttggaggagaaaacatcgggttcatcgacattggtttcggctcgatgttgggtcctcttacggttcttgagaaatttaccggcgtcaagttcatacatcctgaaaacacaccaggtcttttccattgggctgacagattctacgcccatgaagcggtcaagcctgtcatgcccgatatcgaaaaactggtccagttcgctaggctcaagttcaatacttcaatctttaaatga

SEQ ID NO: 11851 - protein, 234 aa, Arabidopsis thaliana
MGLMNRSKNDEYVKLLGAWPSPFVLRTRIALNLKNVAYEYLEEEDTLSSESVLNYNPVHKQIPILIHGNKPIRESLNIVMYVDETWLSGPPILPSDPFDRAVARFWDVYIDEHCFTSINGVAVAKGEENINAAIAKLEQCMALLEETFQECSKGRGFFGGENIGFIDIGFGSMLGPLTVLEKFTGVKFIHPENTPGLFHWADRFYAHEAVKPVMPDIEKLVQFARLKFNTSIFK

SEQ ID NO: 11852 - DNA, 663 bp, Arabidopsis thaliana
  CDS (1)..(663)
atggaggaagagattatcctattggattattgggcgagtatgtacgggatgaggacaaggattgctttggaggagaaaaaagtgaaatatgagtatagagaagaagatctgagtaacaaaagccctttacttcttcagatgaaccctattcacaagaagattccggttttaattcatgaaggtaaaccgatctgcgaatcgataatccaagttcagtatatcgacgagctttggcctgacacaaacccgattcttccttcagatccttaccagagagctcaagctagattttgggcagattacatcgacaagaagacatacgtgccatgcaaggcattatggtcagaatcaggggagaaacaagaggcagcgaagatagagtttatagaagtactcaagacacttgattcagagcttggagacaaatattattttggaggaaacgaatttggactcgttgacattgcctttatcggattctatagttggtttcgtacgtacgaggaggtagcgaatctcagcatcgtgttagagtttcctaagctaatggcgtgggcacagaggtgtttgaagagagagagtgtggctaaggccttgcctgactctgataaggttcttaagtcagtctctgatcatcggaagattattttaggaatcgattaa

SEQ ID NO: 11853 - protein, 220 aa, Arabidopsis thaliana
MEEEIILLDYWASMYGMRTRIALEEKKVKYEYREEDLSNKSPLLLQMNPIHKKIPVLIHEGKPICESIIQVQYIDELWPDTNPILPSDPYQRAQARFWADYIDKKTYVPCKALWSESGEKQEAAKIEFIEVLKTLDSELGDKYYFGGNEFGLVDIAFIGFYSWFRTYEEVANLSIVLEFPKLMAWAQRCLKRESVAKALPDSDKVLKSVSDHRKIILGID

SEQ ID NO: 11854 - DNA, 675 bp, Arabidopsis thaliana
  CDS (1)..(675)
atggcggagaaagaagaggatgtgaagcttctaggtttttgggcaagcccttttactcgtagagttgagatggctttcaagctcaaaggcgtgccttacgagtacttggagcaagatatagtgaacaagagccctttgcttctccagataaatccggtttacaagaaggttccggttcttgtctacaaagggaaaatattatccgagtcacatgtgatcctcgaatacatcgaccaaatatggaagaacaatccaattcttcctcaagatccttacgagaaagccatggctttattctgggccaagttcgttgatgaacaggttggaccagtagcttttatgtctgtggcaaaagcagagaagggagtagaggttgcaatcaaggaggctcaagaactctttatgtttcttgagaaggaagtcactggaaaagatttcttcggtggcaaaacaattggatttttggacttggtcgcaggaagtatgatcccgttttgtcttgctcgaggttgggaaggtatgggaattgatatgattccagaggaaaagtttccagagctaaacagatggatcaaaaatttgaaagaaattgagatcgtgagagaatgtattcctcctagagaggaacaaattgagcatatgaagaaagttgtagaaagaatcaaatcagcctaa

SEQ ID NO: 11855 - protein, 224 aa, Arabidopsis thaliana
MAEKEEDVKLLGFWASPFTRRVEMAFKLKGVPYEYLEQDIVNKSPLLLQINPVYKKVPVLVYKGKILSESHVILEYIDQIWKNNPILPQDPYEKAMALFWAKFVDEQVGPVAFMSVAKAEKGVEVAIKEAQELFMFLEKEVTGKDFFGGKTIGFLDLVAGSMIPFCLARGWEGMGIDMIPEEKFPELNRWIKNLKEIEIVRECIPPREEQIEHMKKVVERIKSA

SEQ ID NO: 11856 - DNA, 678 bp, Arabidopsis thaliana
  CDS (1)..(678)
atggcgaagaaagaagagagtgtgaagcttctagggttttggataagcccttttagtcgtagagtcgagatggctctcaaacttaaaggcgtaccatacgagtacttggaagaagacttacccaaaaagagcactttacttcttgaactaaatccggttcacaagaaggttccggttcttgttcacaatgataaattattatccgagtcacatgtgatcctcgaatacatcgaccaaacttggaataacaatccaattctacctcacgatccctacgagaaggccatggttcggttctgggccaagttcgttgatgagcagatcctaccagttggcttcatgcccctagtaaaagcagagaagggaatagatgttgctattgaggagattcgagaaatgcttatgtttcttgagaaggaagtcactggaaaagatttctttggtggcaagacgatcggattcttggacatggttgcgggaagtatgatcccgttttgtcttgctcgggcttgggaatgtttggggattgatatgactccagaggatacgtttccagaattaaacagatggatcaagaacttgaatgaagttgagatcgtgagggaatgtatacctccaaaagagaaacatattgagcgtatgaagaaaattatagagagagctaagtctacgttctaa

SEQ ID NO: 11857 - protein, 225 aa, Arabidopsis thaliana
MAKKEESVKLLGFWISPFSRRVEMALKLKGVPYEYLEEDLPKKSTLLLELNPVHKKVPVLVHNDKLLSESHVILEYIDQTWNNNPILPHDPYEKAMVRFWAKFVDEQILPVGFMPLVKAEKGIDVAIEEIREMLMFLEKEVTGKDFFGGKTIGFLDMVAGSMIPFCLARAWECLGIDMTPEDTFPELNRWIKNLNEVEIVRECIPPKEKHIERMKKIIERAKSTF

SEQ ID NO: 11858 - DNA, 675 bp, Arabidopsis thaliana
  CDS (1)..(675)
atgaaccaagaagagcacgtaaagcttctgggcttatggggaagtccttttagcaaaagagtagagatggtcctaaaacttaagggcataccttatgagtacattgaagaagatgtttatggaaacaggagccctatgcttctcaagtacaaccctatacacaagaaggtccctgtcctcatccacaatggtagatcgatagccgaatcattggtgattgtcgaatacatcgaagatacgtggaagacaactcacacgatcttgcctcaagatccttatgaacgtgccatggcccggttttgggctaagtatgtggatgaaaaggtaatgttagcagtgaagaaagcttgttggggaccggagagtgaaagagaaaaagaagtgaaagaggcttatgagggtttgaaatgtttagaaaaggagcttggagataaactttttttcggaggagagacaattggatttgtcgatatagcagctgatttcataggatattggttagggattttccaagaagcttcaggcgtcacgatcatgaccgcggaggagtttccaaaacttcaacgttggtcggaagatttcgtgggaaataactttattaaggaagtcttgccccctaaggagaagctcgtggctgttttgaaggccatgtttggaagtgttacatctaattaa

SEQ ID NO: 11859 - protein, 224 aa, Arabidopsis thaliana
MNQEEHVKLLGLWGSPFSKRVEMVLKLKGIPYEYIEEDVYGNRSPMLLKYNPIHKKVPVLIHNGRSIAESLVIVEYIEDTWKTTHTILPQDPYERAMARFWAKYVDEKVMLAVKKACWGPESEREKEVKEAYEGLKCLEKELGDKLFFGGETIGFVDIAADFIGYWLGIFQEASGVTIMTAEEFPKLQRWSEDFVGNNFIKEVLPPKEKLVAVLKAMFGSVTSN

SEQ ID NO: 11860 - DNA, 684 bp, Arabidopsis thaliana
  CDS (1)..(684)
atgtcagaagaagaagtggtggtgttgaacttctggccaagcatgttcggagcaagagtgatcatggcattagaggagaaagagatcaagttcgagtacaaggaagaagatgtgtttggtcagaagaccgatctattgctccaaagcaacccggttaacaagaaaattccggttctcatccacaacggtaaaccggtatgcgagtccaatatcatagtcgaatacatcgatgaggtctggaaagacgataagactctccgtctactaccttctgatccttatcagaagtcacagtgtagattttgggctgatttgattgacaaaaaggtttttgacgctggaagaagaacgtggacaaagaggggcaaagaacaagaagaagcgaaacaagagttcatagagatattgaaagtgttagaaagagagcttggagataaggtctacttcggaggaaacgacaacgtttcgatggtggacttggttctcatctcctactacccttggttccacacatgggagactattggtggttttagtgtcgaggaccacactcccaagctaatggactggatccgtaaatgcttaacccgacccgctatctcgaaatctttacctgacccgctgaagatatttgatcgagtcactcagatcataaaggtccatgagtttttctatggttattga

SEQ ID NO: 11861 - protein, 227 aa, Arabidopsis thaliana
MSEEEVVVLNFWPSMFGARVIMALEEKEIKFEYKEEDVFGQKTDLLLQSNPVNKKIPVLIHNGKPVCESNIIVEYIDEVWKDDKTLRLLPSDPYQKSQCRFWADLIDKKVFDAGRRTWTKRGKEQEEAKQEFIEILKVLERELGDKVYFGGNDNVSMVDLVLISYYPWFHTWETIGGFSVEDHTPKLMDWIRKCLTRPAISKSLPDPLKIFDRVTQIIKVHEFFYGY

SEQ ID NO: 11862 - DNA, 660 bp, Arabidopsis thaliana
  CDS (1)..(660)
atggcgaacgaggtgattcttcttgatttctggccgagtatgttcgggatgaggacaaggatcgcattgagggagaaaggtgttgaatttgagtacagagaagaagatctaaggaacaagagtcctttgcttctccagatgaatccgattcacaagaagattcctgttctcatccacaatggtaaaccggttaacgaatctatcatccaggttcagtacattgacgaggtctggtctcacaagaaccctatccttccttctgatccttacctgagagctcaagctaggttctgggctgatttcattgacaagaagctgtatgatgctcagaggaaggtgtgggcgacaaagggtgaggaacaagaggcagggaagaaggatttcattgagatactcaagactcttgaatctgagcttggagacaaaccttactttagtggcgatgactttggctatgtagacattgcgttgattggattctacacatggtttccagcatacgagaagtttgctaacttcagtatcgaatctgaggttccgaaactgattgcttgggttaagaagtgtttgcagagggagagcgtggctaagtccttgcctgatcctgagaaggttactgaattcgtctctgagctcaggaagaaatttgtacctgagtaa

SEQ ID NO: 11863 - protein, 219 aa, Arabidopsis thaliana
MANEVILLDFWPSMFGMRTRIALREKGVEFEYREEDLRNKSPLLLQMNPIHKKIPVLIHNGKPVNESIIQVQYIDEVWSHKNPILPSDPYLRAQARFWADFIDKKLYDAQRKVWATKGEEQEAGKKDFIEILKTLESELGDKPYFSGDDFGYVDIALIGFYTWFPAYEKFANFSIESEVPKLIAWVKKCLQRESVAKSLPDPEKVTEFVSELRKKFVPE

SEQ ID NO: 11864 - DNA, 660 bp, Vitis vinifera
  CDS (1)..(660)
atggcggatgagattatcttgttggatttctgggctagcatctttggtatgagggtcagagttgccctggcagagaagggccttaagtatgaaaaacgagaggaggacttgtggaacaaaagccctctgcttcttgaagtgaacccagttcacaagaaaatcccagttctgatccacaacggaaagcccatttgtgagtctatgatattagttcagtatattgatgaggtttggaaccataaatctccgctgttgcctactgatccataccagagagctcaggccaggttctgggcggactacatagacaagaagctctatgaccttggaaagaagatattgttaaccaagggagaagagcaggagacagccaagaaggaattcatagagtgccttaagcttttggaaggagagctgggagagaagccttactttggtggtgaaaactttgggcttgtggatgtggctctggtgaccttctcttcccggttttatgcatatgagagcattggtaacttcagcatagaggcggagtgccccaagttgatagcttggaccaagaggtgcatgcaaaaggagagcgtgtcgtcttctcttgcagatccacacaaggtccatgcctttgtcatggggctgagaaagaagactggaatcgagtag

SEQ ID NO: 11865 - protein, 219 aa, Vitis vinifera
MADEIILLDFWASIFGMRVRVALAEKGLKYEKREEDLWNKSPLLLEVNPVHKKIPVLIHNGKPICESMILVQYIDEVWNHKSPLLPTDPYQRAQARFWADYIDKKLYDLGKKILLTKGEEQETAKKEFIECLKLLEGELGEKPYFGGENFGLVDVALVTFSSRFYAYESIGNFSIEAECPKLIAWTKRCMQKESVSSSLADPHKVHAFVMGLRKKTGIE

SEQ ID NO: 11866 - DNA, 660 bp, Vitis vinifera
  CDS (1)..(660)
atggcagacgagattatcttgttggatttctggcctagcatgtttggtatgagggtcagacttgccctgtcagagaagggcctcaagtatgaatataaagaggaggaccttaggaacaagagccctctgcttcttgagatgaatccagttcataagaaaatcccggttctgatccacaatggaaagcccatttgtgagtctctgttaatagttcagtatattgatgaggtttggcacgataaatctccgcttttgcctagtgacccataccagagagcccaggccaggttctgggcggactacgtagacaagaagctctatgaacttggaaggaagatatggtcaaccaaaggagaagagcaggaaacagccaagaaggaattcatagagtgcctcaagcttctggaaggagagcttggagagaagccttacttcggcggtgaaaaaattgggtttgtggatgtggctctggtgaccttctcttgctggtttcatgcatatgagagctttggaaacttcagcatagaggcggagtgtcccaagttgatagcttggaccaagaggtgcatggaaaaggagagcgtgtcgtcttctctggaagacccacacaaggtccatggctttgttatggggatgagaaagaagcttggcatagaataa

SEQ ID NO: 11867 - protein, 219 aa, Vitis vinifera
MADEIILLDFWPSMFGMRVRLALSEKGLKYEYKEEDLRNKSPLLLEMNPVHKKIPVLIHNGKPICESLLIVQYIDEVWHDKSPLLPSDPYQRAQARFWADYVDKKLYELGRKIWSTKGEEQETAKKEFIECLKLLEGELGEKPYFGGEKIGFVDVALVTFSCWFHAYESFGNFSIEAECPKLIAWTKRCMEKESVSSSLEDPHKVHGFVMGMRKKLGIE

SEQ ID NO: 11868 - DNA, 690 bp, Vitis vinifera
  CDS (1)..(690)
atggcggaagaagtgaaacttttcagaacatggtcaagtccttttgctctgaggattgtttgggctctcaaaatcaaaggcgtagagtatgaaaccatatttgaagatctctccaacaagagcccttcacttctccagtataatcctacccacaaaaaggttccagttcttgtacacaatggaaaaccgatcgctgaatcgtatgtcattcttgaatacattgatgagacatggaaggaaactcccttgttgcctgaagacccttacgagaaagccatggcccgcttctgggccaaatttggtgatgataaaggttgttccttggtttttacatcaattttttggggtgtcttcgttaaggaaggtaaagagcaggaggaagctatggttgaagccatggagaacctccagttcttggaagaagaactcaggggaaagaagttctttggtggagaaaggattgggtttgttgatcttgcattgggttggcttgctaacttgatcagcatattggaagatgtagctggcctgaaaattgtgggtgaagacaagtttccattgttgtcgacgtggatgaaagactttgcggattctccaataatcaaggacaactggccacctcgagacaagatgattgccaagttccaggcccttcgtgatgccaaacttgcagcagcagcatctaaatga

SEQ ID NO: 11869 - protein, 229 aa, Vitis vinifera
MAEEVKLFRTWSSPFALRIVWALKIKGVEYETIFEDLSNKSPSLLQYNPTHKKVPVLVHNGKPIAESYVILEYIDETWKETPLLPEDPYEKAMARFWAKFGDDKGCSLVFTSIFWGVFVKEGKEQEEAMVEAMENLQFLEEELRGKKFFGGERIGFVDLALGWLANLISILEDVAGLKIVGEDKFPLLSTWMKDFADSPIIKDNWPPRDKMIAKFQALRDAKLAAAASK

SEQ ID NO: 11870 - DNA, 678 bp, Vitis vinifera
  CDS (1)..(678)
atggcggaagaagtgaaacttttcagaacatggtcaagtccttttgctctgaggattgtttgggctctcaaaatcaaaggcgtagagtatgaaaccatatttgaagatctctccaacaagagcccttcacttctccagtataatcctacccacaaaaaggttccagttcttgtacacaatggaaaaccgatcgctgaatcgtatgtcattcttgaatacattgatgagacatggaaggaaactcccttgttgcctgaagacccttacgagaaagccatggcccgcttctgggccaaatttggtgatgagcaggtttttacatcaattttttggggtgtcttcgttaaggaaggtaaagagcaggaggaagctatggttgaagccatggagaacctccagttcttggaagaagaactcaggggaaagaagttctttggtggagaaaggattgggtttgttgatcttgcattgggttggcttgctaacttgatcagcatattggaagatgtagctggcctgaaaattgtgggtgaagacaagtttccattgttgtcgacgtggatgaaagactttgcggattctccaataatcaaggacaactggccacctcgagacaagatgattgccaagttccaggcccttcgtgatgccaaacttgcagcagcagcatctaaatga

SEQ ID NO: 11871 - protein, 225 aa, Vitis vinifera
MAEEVKLFRTWSSPFALRIVWALKIKGVEYETIFEDLSNKSPSLLQYNPTHKKVPVLVHNGKPIAESYVILEYIDETWKETPLLPEDPYEKAMARFWAKFGDEQVFTSIFWGVFVKEGKEQEEAMVEAMENLQFLEEELRGKKFFGGERIGFVDLALGWLANLISILEDVAGLKIVGEDKFPLLSTWMKDFADSPIIKDNWPPRDKMIAKFQALRDAKLAAAASK

SEQ ID NO: 11872 - DNA, 660 bp, Vitis vinifera
  CDS (1)..(660)
atggcagacgagattatcttgttggatttctggcctagcccgtttggtatgagggtcagagttgccctggcagagaagggtctcaagtatgaatatagagaggaggacccgaggaacaagaaccctctgcttcttgagatgaaccccgttcataagaaaatcccagttctgatccacaatggaaagcccatttgtgagtctatgataatagttcagtatattgatgaggtttggaacaaaaaatctccgttgttgcctagtgacccataccagagagctcaggccaggttctgggcggactacatagacaagaagctctatgaacttggaaggaggatatggtcaaccaaaggagaagagcaggaaacagccaagaatgaattcatagagtaccttaagattttggaaggagagcttggagagaagccttacttcggtggtgagaaatttgggtttgtggatgtggctctggtgactttctcaaccttgttttatgcgtatgagagctttggtaacttcagcatagaggtggagtgccccaagttgatcgcttggaccaagaggtgcatggaaaaggagagtgtgtcgtcttctctgaaagacccacagaaggtccatggctttgtcatggagatgaggaagaagcttggtatagagtaa

SEQ ID NO: 11873 - protein, 219 aa, Vitis vinifera
MADEIILLDFWPSPFGMRVRVALAEKGLKYEYREEDPRNKNPLLLEMNPVHKKIPVLIHNGKPICESMIIVQYIDEVWNKKSPLLPSDPYQRAQARFWADYIDKKLYELGRRIWSTKGEEQETAKNEFIEYLKILEGELGEKPYFGGEKFGFVDVALVTFSTLFYAYESFGNFSIEVECPKLIAWTKRCMEKESVSSSLKDPQKVHGFVMEMRKKLGIE

SEQ ID NO: 11874 - DNA, 660 bp, Vitis vinifera
  CDS (1)..(660)
atgggagacgagattatcctgttggatttctggcctagcatgtttggtatgagggtcagacttgccctggcagagaagggcctcaagtatgaatataaagaggaggacctgaggaacaagagccctctgcttcttgagatgaatccagttcataagcaaatcccggttctgatccacaatggaaagcccatttgtgaatctctgataatagttcagtatattgatgaggtttggcacgataaatctccgcttttgcgtagtgacccataccagagagctcaggccaggttctgggcggactacgtagacaagaagctctatggacttggaaggaaggtatggtctaccaaaggagaagagcaggaaacagccaagaaggaattcatagagtgccttcagcttttggaaggcgagcttggagagaagccttacttcggtggtgaaaaaattgggtttgtggatgtggctctcgtgaccttctcttgctggttttatgcatatgagagctttggtaacttcagcatagaggcggagtgccccaagttgatcgcttggaccaagaggtgcaaggaaaaggagagtgtgtcgtcttctctcgaagacccacacaaggtccatggctttgtcatggggatgagaaagaggtttggtatagagtaa

SEQ ID NO: 11875 - protein, 219 aa, Vitis vinifera
MGDEIILLDFWPSMFGMRVRLALAEKGLKYEYKEEDLRNKSPLLLEMNPVHKQIPVLIHNGKPICESLIIVQYIDEVWHDKSPLLRSDPYQRAQARFWADYVDKKLYGLGRKVWSTKGEEQETAKKEFIECLQLLEGELGEKPYFGGEKIGFVDVALVTFSCWFYAYESFGNFSIEAECPKLIAWTKRCKEKESVSSSLEDPHKVHGFVMGMRKRFGIE

SEQ ID NO: 11876 - DNA, 660 bp, Vitis vinifera
  CDS (1)..(660)
atggcagacgagattattttgctggacttctggccgagcatgtttggtatgaaggtcagaattgcactagcagagaagggtctcaaatatgaatacagagatgaggacttgttcaacaagggccctctacttctagagatgaacccaattcataagaaaatcccagtgctgatccataatggtaaacccatttgtgagtctcagataatagttcagtatattgatgaggtttggaaggataaatctccattattgccctcggatccataccatagagctcaagccaggttctgggctgactacatagacaagaagctacaccttcttgggaaaaggttatggagaaccaaaggagaagagcaggaggcaaacaagaaggagtacattgaatgccttaagctattggaaggagagctaggagataagccatattttggtggtgaaaattttggttttgtggatgtgaatcttatgccatattttagttggctttatgtatttgagatcgctgctaacttcagtatagaagctgagtgcccaaagttgattacatgggctaaaaggtgcatggaaaaggagagtgtgtccacttctcttcctgatcgtcagaagctttatgacttctttttacaattgaagaagtggcatggtatagagtag

SEQ ID NO: 11877 - protein, 219 aa, Vitis vinifera
MADEIILLDFWPSMFGMKVRIALAEKGLKYEYRDEDLFNKGPLLLEMNPIHKKIPVLIHNGKPICESQIIVQYIDEVWKDKSPLLPSDPYHRAQARFWADYIDKKLHLLGKRLWRTKGEEQEANKKEYIECLKLLEGELGDKPYFGGENFGFVDVNLMPYFSWLYVFEIAANFSIEAECPKLITWAKRCMEKESVSTSLPDRQKLYDFFLQLKKWHGIE

SEQ ID NO: 11878 - DNA, 687 bp, Vitis vinifera
  CDS (1)..(687)
atggcagaagaagtgaaacttttcagaacatggtcaagtccttttgctctcagggctgtctgggctctcaaaatcaaaggcatagattatgaaaccatatttgaagatctctccaacaagagcccttcacttctccaatataatcctgtctacaaaaaggttccagtgcttgtacacaaaggaaaacccatcgctgaatcgcttgtcattctggaatacattgatgagacatggaagcaggctcccttattgcctgaagaccctcatgagagagccacggcacgtttctgggcaaaatttggcgaagataaggttttgacatcaatttggagcgtctttatcaagcaagggaaagagcaggaggaagctatggttccagccctggagaacctcaagttcctggaagaagagttgaagggaaagaagttctttggcggagagaccattgggtttgttgatcttgccttgggttggcttggtaacttgatcagcatattggaagagattgttgggctgaaagttgtggatggggagaagtttccattgttgtccgcatggatgcaagattttgcagatgctccaatcattaaagacaactggccacctcgagacagaatgattgtcaaattccaagcccttcgtgatgccaccattgcagcagcggcagcagcagcaacatcaaaatga

SEQ ID NO: 11879 - protein, 228 aa, Vitis vinifera
MAEEVKLFRTWSSPFALRAVWALKIKGIDYETIFEDLSNKSPSLLQYNPVYKKVPVLVHKGKPIAESLVILEYIDETWKQAPLLPEDPHERATARFWAKFGEDKVLTSIWSVFIKQGKEQEEAMVPALENLKFLEEELKGKKFFGGETIGFVDLALGWLGNLISILEEIVGLKVVDGEKFPLLSAWMQDFADAPIIKDNWPPRDRMIVKFQALRDATIAAAAAAATSK

SEQ ID NO: 11880 - DNA, 702 bp, Vitis vinifera
  CDS (1)..(702)
atggcggaagaagtgaaacttttcagaacatggtcaactccttttgctctgaggattgtttgggctctcaaaatcaaaggcgttgagtatgaaaccatatttgaagatctctacaacaagagcccttcacttctccagtataatcctgcccacaaaaaggttccagttcttgtacacaatggaaaaccgatctctgaatcgtatgtcattcttgaatacattgatgagacatggaaggaaactcccttgttgcctgaagacccttacgagagagccatggcccgcttctgggccaaatttggtgatgataaggttgttccttggttgaaacggaatgtttttacatcaatttttgggggtgtcttcgtcaaggaaggtaaagagcaggaggaagctatggttgaagccatggagaacctccagttcttggaagaagaactcaggggaaagaagttctttggtggagaaaggattgggtttgttgatcttgcattgggttggcttgctaacttgatcagcatattggaagatgtagctggcctgaaaattgtgggtgaagacaagtttccattgttgtcggcgtggatgaaagactttgcggattctccaataatcaaggacaactggccacctcgagacaagatgattgccaagttccaggcccttcgtgatgccaaacttgcagcagcagcatctaaatga

SEQ ID NO: 11881 - protein, 233 aa, Vitis vinifera
MAEEVKLFRTWSTPFALRIVWALKIKGVEYETIFEDLYNKSPSLLQYNPAHKKVPVLVHNGKPISESYVILEYIDETWKETPLLPEDPYERAMARFWAKFGDDKVVPWLKRNVFTSIFGGVFVKEGKEQEEAMVEAMENLQFLEEELRGKKFFGGERIGFVDLALGWLANLISILEDVAGLKIVGEDKFPLLSAWMKDFADSPIIKDNWPPRDKMIAKFQALRDAKLAAAASK

SEQ ID NO: 11882 - DNA, 678 bp, Vitis vinifera
  CDS (1)..(678)
atggcagaagaattgaaacttttcagaacatggtcaagtgtttttgctctgaggattgtttgggctctcaaaatcaaaggcgtagagtatgaaaccatatttgaagatctctccaacaagagcccttcacttctccagtataatcctgtccacaaaaaggttccagttcttgtacacaatggcaaacccatcgctgaatcgcttgtcattcttgaatacatcgatgagacatggagggaaactcccttgttgcctgaagacccttacgagagagccatggctcgcttctgggccaaatttggtgacgataaggttttgacatcaatagtttggggtgtcttcttcaaggaagggaaagagcaggaggaagctatgcttgaagccatggagcatctccagttcttggaagacgagctgaaggggaagaggttctttgggggagagaggatcgggtttgttgatcttgccttgggatggcttgctaacatgatcagcatatttgaagaggtagctggcctgaaaatggtggatgaggataagtttccattgctggcggcgtggatgcaagagtttgcagattctcccataatcaaagacaactggccacctcgagacaagatgattgccaagttccaggcccttcgtgatgccaaacttgcagcagcagcatctaaatga

SEQ ID NO: 11883 - protein, 225 aa, Vitis vinifera
MAEELKLFRTWSSVFALRIVWALKIKGVEYETIFEDLSNKSPSLLQYNPVHKKVPVLVHNGKPIAESLVILEYIDETWRETPLLPEDPYERAMARFWAKFGDDKVLTSIVWGVFFKEGKEQEEAMLEAMEHLQFLEDELKGKRFFGGERIGFVDLALGWLANMISIFEEVAGLKMVDEDKFPLLAAWMQEFADSPIIKDNWPPRDKMIAKFQALRDAKLAAAASK

SEQ ID NO: 11884 - DNA, 660 bp, Vitis vinifera
  CDS (1)..(660)
atggcggacgagattatcttgttggatttctggcctagcatgtttggtatgagggtcaaagttgccctggcagagaagggcctcgagtatgaatttagagaggaggacttgaggaacaagagccccttgctccttgagatgaacccagttcataagaaaatcccagttctgatccacaatgggaaacccatttgtgagtctctgataattgttcagtatatagatgaggtttggaaggataaatccccattgttgcctagtgacccataccagagagctcaggccaggttctgggcggactacatagacaagaagatctttgaacttggaaggaagatatggacaaccaaaggagaagatcaggaggcagccaagaaagaattcatagagtgccttaagcttttggaaggagagcttggggaaaagccctactttggtggtgaaaattttgggtttgtggatgtggctctggtgaccttttcttgctggttttatgcatacgagacctttggcaacttcagcatagaggcggagtgccccaagttgatcgcttggaccaagaggtgcatggaaagggagagtgtgtcgtcttctcttgcagacccccacaaggtccatggcttcgttgtggtgttgagaaagaagtttggtatagagtag

SEQ ID NO: 11885 - protein, 219 aa, Vitis vinifera
MADEIILLDFWPSMFGMRVKVALAEKGLEYEFREEDLRNKSPLLLEMNPVHKKIPVLIHNGKPICESLIIVQYIDEVWKDKSPLLPSDPYQRAQARFWADYIDKKIFELGRKIWTTKGEDQEAAKKEFIECLKLLEGELGEKPYFGGENFGFVDVALVTFSCWFYAYETFGNFSIEAECPKLIAWTKRCMERESVSSSLADPHKVHGFVVVLRKKFGIE

SEQ ID NO: 11886 - DNA, 666 bp, Vitis vinifera
  CDS (1)..(666)
atggcaaacagtgaccacatagttcttttagattactccgcaagcccttttgcaatgagggtgcgactggctttggcagccaaagggatcgagtatctgattaaggaagaagacttgacccaaagtaaaagctctctactcttgaaagtgaatccagttcatcagaaaattccagttctaattcacaatgggaagcccgtatgcgagtccttgataatagtggaatacattgatgaggtttggaaggatagatgtcgtcttctgccggctgacccttaccaaagagcaaaagccaagttctgggccgacttcattgacaaaatggtatacccatcctgttataacgtgtgggcagcaaacggagaagtgcaagaggctggcaagaaggaattcatagacaggattaagatgttagaaggagagcttaagtcgaacccttactttgggggtgagactttgggttttctggacattgtttttctcccatcgtactactggttccatacattcgaaacttttgggaagttcagcatagaagcggagtgtccaaagctggtggcatggggtaagaggtgcatggaggaggagttcgtgtacacctctctccctcacccacataaggtctatgacttggtggtggattacaggaagaaaatggggatatag

SEQ ID NO: 11887 - protein, 221 aa, Vitis vinifera
MANSDHIVLLDYSASPFAMRVRLALAAKGIEYLIKEEDLTQSKSSLLLKVNPVHQKIPVLIHNGKPVCESLIIVEYIDEVWKDRCRLLPADPYQRAKAKFWADFIDKMVYPSCYNVWAANGEVQEAGKKEFIDRIKMLEGELKSNPYFGGETLGFLDIVFLPSYYWFHTFETFGKFSIEAECPKLVAWGKRCMEEEFVYTSLPHPHKVYDLVVDYRKKMGI

SEQ ID NO: 11888 - DNA, 660 bp, Vitis vinifera
  CDS (1)..(660)
atggcagacgagattatcttgttggatttctggcctagcatgtttggtatgagggtcagagttgccctggcagagaagggcctcaagtatgaatatagacaggaggacttgaggaacaagagccctctgctgcttgagatgaacccagttcataagaaaatcccggttctgatccacaatggaaagcccatttgtgagtctctgataatagttcagtatattgatgaggtttggaaggataaatctccattgttgcctagtgacccataccagagagctcaggccaggttctgggcggactacgtagacaagaagctctatgaacttggagggaagatatggtcaaccaaaggagaagagcaggaaacaggcaagaaggaattcatagagtgcctcaagcttttggaaggagagcttggagagaagccttacttcgggggtgaaaaaattgggtttgtggatgtggccctggtgaccttctcttgctggttttatgcatacgagacctttggcaacttcagcatagaggcggagtgccccaagttgatcgcttggaccaagaggtgcatggaaaaggagagcgtgtcgtcttctctggaagacccacacaaggtccatggctttatcatggggatgagaaagaggtttggtatagagtag

SEQ ID NO: 11889 - protein, 219 aa, Vitis vinifera
MADEIILLDFWPSMFGMRVRVALAEKGLKYEYRQEDLRNKSPLLLEMNPVHKKIPVLIHNGKPICESLIIVQYIDEVWKDKSPLLPSDPYQRAQARFWADYVDKKLYELGGKIWSTKGEEQETGKKEFIECLKLLEGELGEKPYFGGEKIGFVDVALVTFSCWFYAYETFGNFSIEAECPKLIAWTKRCMEKESVSSSLEDPHKVHGFIMGMRKRFGIE

SEQ ID NO: 11890 - DNA, 660 bp, Vitis vinifera
  CDS (1)..(660)
atggcagatgagattatcttgttggatttctggcctagcatgtttggtatgagggtcagacttgccctggcagagaagggcctcaagtatgaatataaagaggaggaccttaggaacaagagccctctgcttcttgagatgaatccagttcataagaaaatcccggttctgatccacaatggaaagcccatttgtgagtctctgataatagttcagtatattgatgaggtttggcacgataaatctccgcttttgcctagtgacccataccagagagctcaggccaggttctgggtggactacgtagacaagaagctctatgaacttggaaggaagatatggtcaaccaaaggagaagagcaggaaacagccaagaaggaattcatagagtgcctcaagcttctggaaggagagcttggagagaagccttacttcggcggtgaaaaaattgggtttgtggatgtggctctggtgaccttctcttgctggtttcatgcatatgagagctttggaaacttcagcatagaggcggagtgtcccaagttgatagcttggaccaagaggtgcatggaaaaggagagcgtgtcgtcttctctggaagacccacacaaggtccatggctttgttatggggatgagaaagaagcttggcatagaataa

SEQ ID NO: 11891 - protein, 219 aa, Vitis vinifera
MADEIILLDFWPSMFGMRVRLALAEKGLKYEYKEEDLRNKSPLLLEMNPVHKKIPVLIHNGKPICESLIIVQYIDEVWHDKSPLLPSDPYQRAQARFWVDYVDKKLYELGRKIWSTKGEEQETAKKEFIECLKLLEGELGEKPYFGGEKIGFVDVALVTFSCWFHAYESFGNFSIEAECPKLIAWTKRCMEKESVSSSLEDPHKVHGFVMGMRKKLGIE

SEQ ID NO: 11892 - DNA, 660 bp, Vitis vinifera
  CDS (1)..(660)
atggcagacgagattatcttgttggatttctggcctagctcgtttggtatgagggtcagagttgccctggcagagaagggtctcaagtatgaatatagagaggaggacacgagcaacaagagtcctctgcttcttgagatgaacccgattcataagaaaatcccagttctgatccacaatggaaagcccatttgtgagtctatgataatagttcagtatattgatgaggtttggaacgaaaaatctcccttgttgcctagtgacccataccagagagctcaggccaggttctgggcggactacatagacaagaagctctatgaacttggaaggaggatatggtcaaccaaaggagaagagcaggaaacagccaagaatgaattcatagagtaccttaagattttggaaggagagcttggagagaagccttactttggtggtgagaaatttgggtttgtggatgtggctctggtgactttctcaaccttgttttatgcgtatgagagctttggtaacttcagcatagaggtggagtgccccaagttgatcgcttggaccaagaggtgcaaggaaaaggagagtgtgtcgtcttctctgaaagacccacagaaggtccatggctttgtcatggagatgaggaagaagcttggtatagagtaa

SEQ ID NO: 11893 - protein, 219 aa, Vitis vinifera
MADEIILLDFWPSSFGMRVRVALAEKGLKYEYREEDTSNKSPLLLEMNPIHKKIPVLIHNGKPICESMIIVQYIDEVWNEKSPLLPSDPYQRAQARFWADYIDKKLYELGRRIWSTKGEEQETAKNEFIEYLKILEGELGEKPYFGGEKFGFVDVALVTFSTLFYAYESFGNFSIEVECPKLIAWTKRCKEKESVSSSLKDPQKVHGFVMEMRKKLGIE

SEQ ID NO: 11894 - DNA, 660 bp, Vitis vinifera
  CDS (1)..(660)
atggcagacgagattatcttgttggatttctggcctagcatgtttggtatgagggtcagacttgccctggcagagaagggtctcaagtatgaatatagagaggaggacctgtggaagaagagccctttgcttcttgagatgaacccagttcataagaaaatcccagttctgatccacaatggaaagcccatttgtgagtctctgataatagttcagtatattgatgaggtttggtgcgataaatctccgcttttgcctagtgacccataccagagagctcaggccaggttctgggcggactacatagacaagaagctctatgaacttggaaggaggatatggtcaaccaaaggagaagagcaggaaacagccaagaatgaattcatagagtaccttaagattttggaaggagagcttggagagaagccttactttggtggtgagaaatttgggtttgtggatgtggctctggtgactttctcaaccttgttttatgcgtatgagagctttggtaacttcagcatagaggtggagtgccccaagttgatcgcttggaccaagaggtgcaaggaaaaggagagtgtgtcgtcttctctgaaagacccacagaaggtccatggctttgtcatggagatgaggaagaagcttggtatagagtaa

SEQ ID NO: 11895 - protein, 219 aa, Vitis vinifera
MADEIILLDFWPSMFGMRVRLALAEKGLKYEYREEDLWKKSPLLLEMNPVHKKIPVLIHNGKPICESLIIVQYIDEVWCDKSPLLPSDPYQRAQARFWADYIDKKLYELGRRIWSTKGEEQETAKNEFIEYLKILEGELGEKPYFGGEKFGFVDVALVTFSTLFYAYESFGNFSIEVECPKLIAWTKRCKEKESVSSSLKDPQKVHGFVMEMRKKLGIE

SEQ ID NO: 11896 - DNA, 708 bp, Vitis vinifera
  CDS (1)..(708)
atggatggagatggcaacaataaagtgaaacttttcagaacatggtccagtccttttgccctgaggattgtttgggctctcaaaatcaaaggcgtagagtatgaaaccatatttgaagatctctccgacaagagcccttcacttctccagtataatcctgcccacaaaaagattccagttcttgtacacagtggaaaacccatcgctgaatcgtatgtcattcttgaatacattgatgagacatggaaggaaactcccttgttgcctgaagacccttacgagagagccatggcccgcttctgggccaaatttggtgacgataaggttttgacatcaattgtttggggtgtcttcatcaaggaagggaacgaacaggaggaagctatggttgaagccatgaagaatctctggctcttggaagaagagctgagaggaaagaagttctttggtggagaaagaattgggtttgttgatcttgcattgggttggcttgctaacttgatcagcatattggaagatgtagctggcctgaaaatcgtggatgaggacaagtttccattgctgtcggcatggatgaaagactttgcggattctccaataatcaaagacaactggccacctcgagacaagatgattgccaagttccaggcccttcgcgatgccaaacttgcagcagcagcatcatcaaccacctcacaatgcctataa

SEQ ID NO: 11897 - protein, 235 aa, Vitis vinifera
MDGDGNNKVKLFRTWSSPFALRIVWALKIKGVEYETIFEDLSDKSPSLLQYNPAHKKIPVLVHSGKPIAESYVILEYIDETWKETPLLPEDPYERAMARFWAKFGDDKVLTSIVWGVFIKEGNEQEEAMVEAMKNLWLLEEELRGKKFFGGERIGFVDLALGWLANLISILEDVAGLKIVDEDKFPLLSAWMKDFADSPIIKDNWPPRDKMIAKFQALRDAKLAAAASSTTSQCL

SEQ ID NO: 11898 - DNA, 660 bp, Vitis vinifera
  CDS (1)..(660)
atggcagacgagattattttgctggacttctggccgagcatgtttggtatgaaggtcagaattgcactagcagagaagggtctcaaatatgaatacagagatgaggacttgttcaacaagggccctctacttctagagatgaacccaattcataagaaaatcccagtgctgatccataatggtaaacccatttgtgagtctcagataatagttcagtatattgatgaggtttggaaggataaatctccattattgccctcggatccataccatagagctcaagccaggttctgggctgactacatagacaagaagctacaccttcttggggcaaggttatggagaaccaaaggagaagagcaggaggcaaacaagaaggagtacattgaatgccttaagctattggaaggagagctaggagataagccatattttggtggtgaaaattttggttttgtggatgtgaatcttatgccatattttagttggctttatgtatttgagatcgctgctaacttcagtatagaagctgagtgcccaaagttgattacatgggctaaaaggtgcatggaaaaggagagtgtgtccacttctcttcctgatcgtcagaagctttatgacttctttttacaattgaagaagtggcatggtatagagtag

SEQ ID NO: 11899 - protein, 219 aa, Vitis vinifera
MADEIILLDFWPSMFGMKVRIALAEKGLKYEYRDEDLFNKGPLLLEMNPIHKKIPVLIHNGKPICESQIIVQYIDEVWKDKSPLLPSDPYHRAQARFWADYIDKKLHLLGARLWRTKGEEQEANKKEYIECLKLLEGELGDKPYFGGENFGFVDVNLMPYFSWLYVFEIAANFSIEAECPKLITWAKRCMEKESVSTSLPDRQKLYDFFLQLKKWHGIE

SEQ ID NO: 11900 - DNA, 660 bp, Vitis vinifera
  CDS (1)..(660)
atggcagacgagattatcttgttggatttctggcctagcatgtttggtatgagggtcagagttgccctggcagagaagggtctcaagtatgaatatagagaggaggacctgtggaacaagagccctttgcttcttgagatgaacccagttcataagaaaatcccagttctgatccacaatggaaagcccatttgtgagtctctgataatagttcagtatattgatgaggtttggtgcgataaatctccgcttttgcctagtgacccataccagagagctcaggccaggttctgggcggactacatagacaagaagctctatgaacttggaaggaagatatggtcaaccaaaggagaagagcaggaaacagccaagaaggaattcatagagtgccttaagcttttggaaggagagcttggagagaagccttacttcggtggtgaaaaaattgggtttgtagatgtggctctggtgaccttctcttgctggttttatgcatacgagacctttggcaacttcagcatggaggcggagtgccccaagttgatcgcttggaccaagaggtgcatggaaaaggagagcgtgtcgtcttctctggaagacccacacaaggtccatggctttatcatggggatgagaaagaggtttggtatagagtag

SEQ ID NO: 11901 - protein, 219 aa, Vitis vinifera
MADEIILLDFWPSMFGMRVRVALAEKGLKYEYREEDLWNKSPLLLEMNPVHKKIPVLIHNGKPICESLIIVQYIDEVWCDKSPLLPSDPYQRAQARFWADYIDKKLYELGRKIWSTKGEEQETAKKEFIECLKLLEGELGEKPYFGGEKIGFVDVALVTFSCWFYAYETFGNFSMEAECPKLIAWTKRCMEKESVSSSLEDPHKVHGFIMGMRKRFGIE

SEQ ID NO: 11902 - DNA, 663 bp, Vitis vinifera
  CDS (1)..(663)
atgtcaaaagaagaggttgttcttttagacttctgggctagccccttctgtggtagggtaaagattgcactggctgagaaaggtgtggaatatgaaaatagagaagaggatgtgttgggtagcaagagtgagttgttgctcaattcaaaccctatccacaaaaaggttcctgtgttgttacataatggaaagcctgtgtgtgagtccactgtcatagttaattatattgatgaggcctggccttctccaccattgctcccaacttgtccatatgagcgagctcgagcccggttctggggggacttcattgacaagaagatatttgaaggaggcgccaagatatggggaagcaaaggagaggcactagaggtcggtaagaaggatttcatagagattttgaagcagctagagggaactttgggggagaaggatttcttttgtggtgacaactttggatttgttgacattctattgatccctttgaccacctggttctacgcttatgagaaatttgggggttttaaggttgaggatgagtgtcccaagttctcagtttgggtgaaaagatgcatgcaaagagagagcgtggcaaaagctcttccagagccagagaaggtctatgaggctgtcgttatgttgagaaagatgaatggcattgagtag

SEQ ID NO: 11903 - protein, 220 aa, Vitis vinifera
MSKEEVVLLDFWASPFCGRVKIALAEKGVEYENREEDVLGSKSELLLNSNPIHKKVPVLLHNGKPVCESTVIVNYIDEAWPSPPLLPTCPYERARARFWGDFIDKKIFEGGAKIWGSKGEALEVGKKDFIEILKQLEGTLGEKDFFCGDNFGFVDILLIPLTTWFYAYEKFGGFKVEDECPKFSVWVKRCMQRESVAKALPEPEKVYEAVVMLRKMNGIE

SEQ ID NO: 11904 - DNA, 687 bp, Vitis vinifera
  CDS (1)..(687)
atggagaagcaaagtgaagtgaagttgtttgggacatggtctagtggctactgcaccagaattaagttagctctcaaactcaagggcataccctacgagtacgtagaagaagacctatctaacaagagcgacttgctgattcaccacaatcctgtccacaagaaggtgcccgtactcgtccacaatgggaaagccattgcagaatcgcttgtcatccttgaatacattgatgagcactggaaccacactcccaaattgttgccggaggatccatatgagaaagccaaagttagattctgggccaacttttatgatcagaagtttaagccaagtatctacaacatcatgacttccaaaggcaaagagcaagaaaaagccatagaggactcccgtgaggtgcttaaggtgtttgaagaaggcagagagagagatttcccagcaaaatctccattcttgaatggaggccccttgggattcctcgatattgtggtgggatcaagtgcttgcaattacaaagctatgaatgaggtagttggtgtggttgtcgaccccaaaaagaaccctgcattttgctattggatgactgcgatgaaagactgcccactgatgaaggagaccctcccacctcatgatcgcctggttgccaagatgagatccaaattctctctgcagccacctaaaacttga

SEQ ID NO: 11905 - protein, 228 aa, Vitis vinifera
MEKQSEVKLFGTWSSGYCTRIKLALKLKGIPYEYVEEDLSNKSDLLIHHNPVHKKVPVLVHNGKAIAESLVILEYIDEHWNHTPKLLPEDPYEKAKVRFWANFYDQKFKPSIYNIMTSKGKEQEKAIEDSREVLKVFEEGRERDFPAKSPFLNGGPLGFLDIVVGSSACNYKAMNEVVGVVVDPKKNPAFCYWMTAMKDCPLMKETLPPHDRLVAKMRSKFSLQPPKT

SEQ ID NO: 11906 - DNA, 660 bp, Vitis vinifera
  CDS (1)..(660)
atggcagacgagattattttgctggacttctggccgagcatgtttggtatgaaggtcagaattgcactagcagagaagggtctcaaatatgaatacagagatgaggacttgttcaacaagggccctctacttctagagatgaacccaattcataagaaaatcccagtgctgatccataatggtaaacccatttgtgagtctcagataatagttcagtatattgatgaggtttggaaggataaatctccgttattgccctcggatcaataccatagagctcaagcaaggttctgggctgactacatagacaagaagctacaccttcttggggcaaggttatggagaaccaaaggagaagagcaggaggcaaacaagaaggagtacattgaatgccttaagctattggaaggagagctaggagataagccatattttggtggtgaaaattttggttttgtggatgtgaatcttatgccatattttagttggctttatgtatttgagatcgctgctaacttcagtatagaagctgagtgcccaaagttgattacatgggctaaaaggtgcatggaaaaggagagtgtgtctacttctcttcctgatcgtcagaagctttatgacttctttttacaattgaagaagtggcatggtatagagtag

SEQ ID NO: 11907 - protein, 219 aa, Vitis vinifera
MADEIILLDFWPSMFGMKVRIALAEKGLKYEYRDEDLFNKGPLLLEMNPIHKKIPVLIHNGKPICESQIIVQYIDEVWKDKSPLLPSDQYHRAQARFWADYIDKKLHLLGARLWRTKGEEQEANKKEYIECLKLLEGELGDKPYFGGENFGFVDVNLMPYFSWLYVFEIAANFSIEAECPKLITWAKRCMEKESVSTSLPDRQKLYDFFLQLKKWHGIE

SEQ ID NO: 11908 - DNA, 660 bp, Vitis vinifera
  CDS (1)..(660)
atggcagacgagattatcttgttggatttctggcctagcatgtttggtatgagggtcagagttgccctggcagagaagggtctcaagtatgaatatagagaggaggacctgtggaacaagagccctttgcttcttgagatgaacccagttcataagaaaatcccagttctgatccacaatggaaagcccatttgtgagtctctgataatagttcagtatattgatgaggtttggtgcgataaatctccgcttttgcctagtgacccataccagagagctcaggccaggttctgggcggactacatagacaagaaggtatggaacttgggaaggaagatatggtcaaccaaaggagaagagcaggaaacagccaagaaggaattcatagagtgccttaagcttttggaaggagagcttggagagaagccttacttcggtggtgaaaaaattgggtttgtagatgtggctctggtgaccttctcttgctggttttatgcatacgagacctttggcaacttcagcatagaggcggagtgccccaagttgatcgcttggaccaagaggtgcatggaaaaggagagcgtgtcgtcttctctggaagacccacacaaggtccatggctttatcatggggatgagaaagaggtttggtatagagtag

SEQ ID NO: 11909 - protein, 219 aa, Vitis vinifera
MADEIILLDFWPSMFGMRVRVALAEKGLKYEYREEDLWNKSPLLLEMNPVHKKIPVLIHNGKPICESLIIVQYIDEVWCDKSPLLPSDPYQRAQARFWADYIDKKVWNLGRKIWSTKGEEQETAKKEFIECLKLLEGELGEKPYFGGEKIGFVDVALVTFSCWFYAYETFGNFSIEAECPKLIAWTKRCMEKESVSSSLEDPHKVHGFIMGMRKRFGIE

SEQ ID NO: 11910 - DNA, 699 bp, Vitis vinifera
  CDS (1)..(699)
atggctaagaacgatgtgaagcttttgggtgcatggccaagcccatttgtgatgcgagcacgcatcgccctcaacatcaaatccgtcgactatgagttactcgaagagaaactgggatccaagacccaactcctccttcaatctaacccagtttataagaaagtgcccgttctcatccatgagcacaaacccatatgcgagtccctcatcattgtccagtacatcgacgaggcttggtcctctggaccctccatcctcccttcagacccttatgaccgcgctattgcccgcttctggggtgtctacattgacgataagtggtttccgttgctgggtgggatcgggaaggctcaaggagaggaggcgaaaaaggcggcagtagatcaagtgcatgaagggcttatgctgttagaggaggcgttcgggaagtgcagcaaagggaaggatttctttagcggggatcgaattggttaccttgatatcgctttagggtgcttcttggggtgggtgagggtgtcggagaagatgaatggcgtgaagctgcttgatgaagccaagatgcctggtctggctagctgggtggagaagttctgtgcggacagtgctgtgaaggatgtgatgccggataccgataaactttcggagtttgctaggatgctaatccagttcaaggccaacgctcatccgccggcttcttaa

SEQ ID NO: 11911 - protein, 232 aa, Vitis vinifera
MAKNDVKLLGAWPSPFVMRARIALNIKSVDYELLEEKLGSKTQLLLQSNPVYKKVPVLIHEHKPICESLIIVQYIDEAWSSGPSILPSDPYDRAIARFWGVYIDDKWFPLLGGIGKAQGEEAKKAAVDQVHEGLMLLEEAFGKCSKGKDFFSGDRIGYLDIALGCFLGWVRVSEKMNGVKLLDEAKMPGLASWVEKFCADSAVKDVMPDTDKLSEFARMLIQFKANAHPPAS

SEQ ID NO: 11912 - DNA, 699 bp, Vitis vinifera
  CDS (1)..(699)
atggctgagagtgaaatcaagcttctgggtgcatggccaagcccatttgtgatgcgagctcggatcgcccttaacatcaagtccgtagactacgagttccatcaagagaaactgggatccaagagtcagctcctcctcgagtccaacccagtttacaagaaaatcccagttctcatccacgatcagaagcccatatgcgagtccctcatcatcgttcagtacgtcgacgaggcttggtcttccggaccctccatcctcccttccgacccttatgaccgcgctattgcccgcttctgggctgcctatattgacgacaagtggtttccatcgctgagtggattagcgaaggctcaaggagaggaggcaaagaaggcggcgatggatcaagtgcttgaagggttcctgttgttggaggaggcgtttgggaagtgtagcaaagggaaggatttctttggcggggatcgaattgggtaccttgatattgctttgggttgcttcttggggtggctgagggtgtcggagaagatgaatggtgtgaaactgcttgatgcagccaagacgcctggtctggttggatgggcggacaagttttgcggggacgatgccgtgaaggatgtgatgccggagactgataagcttgcggagttcgctaagattcttttccaggccaaggccaatgctcctccgccggctaattaa

SEQ ID NO: 11913 - protein, 232 aa, Vitis vinifera
MAESEIKLLGAWPSPFVMRARIALNIKSVDYEFHQEKLGSKSQLLLESNPVYKKIPVLIHDQKPICESLIIVQYVDEAWSSGPSILPSDPYDRAIARFWAAYIDDKWFPSLSGLAKAQGEEAKKAAMDQVLEGFLLLEEAFGKCSKGKDFFGGDRIGYLDIALGCFLGWLRVSEKMNGVKLLDAAKTPGLVGWADKFCGDDAVKDVMPETDKLAEFAKILFQAKANAPPPAN

SEQ ID NO: 11914 - DNA, 702 bp, Vitis vinifera
  CDS (1)..(702)
atggctacgagcgacgtgaagctattgggtgcgtggccaagcccattcgccttgcgagtccacatcgcccttaacatcaaatccattgactacgagtgtctcgaagagaacctgctagccaagagccagctcctcctccaatccaacccagtacacaagaaagtcccagttctcatccaccatgacaaacccatatgcgagtccctcgccattgttcagtacatcgacgaggcttggtcctccgctccctccatcctcccctcagacccttacgaccgcgctgttgcccgcttctgggctgcttatattgacgacaagtggtttccatggctgaatggggtagcgaatgctcaaggagcggaggcaaaaaaggcggcgttggatcaagtacgtgaagggttagtggtactggaggaggcgtttgggaagtgcagcaaaggtaaggatttcttcagcggggatcgaattggatacgttgatattgctctagggtgcttcttggggtgggtgtatgtggcggagaagaggaacgacgtaaagctgcttgttgaagacaagatgcctggtctggctgcatgggcaaacaagttttgtgaggatggtactgtgaaggatgtgatgccagacaaagatgagctattggagtttgctaacatgatcctcgaagccagggccaaactcaatgcctcttctaataattaa

SEQ ID NO: 11915 - protein, 233 aa, Vitis vinifera
MATSDVKLLGAWPSPFALRVHIALNIKSIDYECLEENLLAKSQLLLQSNPVHKKVPVLIHHDKPICESLAIVQYIDEAWSSAPSILPSDPYDRAVARFWAAYIDDKWFPWLNGVANAQGAEAKKAALDQVREGLVVLEEAFGKCSKGKDFFSGDRIGYVDIALGCFLGWVYVAEKRNDVKLLVEDKMPGLAAWANKFCEDGTVKDVMPDKDELLEFANMILEARAKLNASSNN

SEQ ID NO: 11916 - DNA, 660 bp, Vitis vinifera
  CDS (1)..(660)
atggcagacgagattatcttgttggatttctggcctagcatgtttggtatgagggtcagagttgccctggcagagaagggcctcaagtatgaatatagacaggaggacttgaggaacaagagccctctgctgcttgagatgaacccagttcataagaaaatcccggttctgatccacaatggaaagcccatttgtgagtctctgataatagttcagtatattgatgaggtttggaaggataaatctccattgttgcctagtgacccataccagagagctcaggccaggttctgggcggactacgtagacaagaagctctatgaacttggagggaagatatggtcaaccaaaggagaagagcaggaaacaggcaagaaggaattcatagagtgcctcaagcttttggaaggagagcttggagagaagccttacttcgggggtgaaaaaattgggtttgtggatgtggccctggtgaccttctcttgctggttttatgcatacgagacctttggcaacttcagcatagaggcggagtgccccaagttggtagcttggaccaagaggtgcatggaaaaggagagcgtgtcgtcttctctggaagacccacacaaggtccatggctttatcatggggatgagaaagaggtttggtatagagtag

SEQ ID NO: 11917 - protein, 219 aa, Vitis vinifera
MADEIILLDFWPSMFGMRVRVALAEKGLKYEYRQEDLRNKSPLLLEMNPVHKKIPVLIHNGKPICESLIIVQYIDEVWKDKSPLLPSDPYQRAQARFWADYVDKKLYELGGKIWSTKGEEQETGKKEFIECLKLLEGELGEKPYFGGEKIGFVDVALVTFSCWFYAYETFGNFSIEAECPKLVAWTKRCMEKESVSSSLEDPHKVHGFIMGMRKRFGIE

SEQ ID NO: 11918 - DNA, 687 bp, Vitis vinifera
  CDS (1)..(687)
atggagaagcaaagtgaagtgaagttgtttgggacatgggctagtgtctactgcaccagaattgagttggctctcaaactcaagggcataccctacgagtatgtagaggaagacttacctaacaagagcgacttgctaattcaccacaatcctgtgcacaagaaggtccctgtgctcgtccacaacgggaaagccattgcagaatcgcttgtcatccttgaatacattgatgagcactggaaccacactcccaaattgttgccagcggatccatatgagagagccaaagttagattctgggccaacttttatgatcagaaggtgtttggtccaagtatttacaacatcatgacttccaaaggcaaagagcaagaaaaagccatagaggactcccttgaggtgcttaaggtgtttgaagaaggcatagagagagacttcccagcaaaatctccattcttgaatggaggcaccttgggatttctcgatattgtagtgggatcaagttcttgcaatttcaaagcttttaatgaggtatttgctgtggttttcgacccagagaagaaccctgcattctgctcttgggtgaccgctatgaaagaatgcccactgatgaaggagaccctcccacctcatgaccgtctggttgccaagatatccaaattatttctgcagccacctaaagcttga

SEQ ID NO: 11919 - protein, 228 aa, Vitis vinifera
MEKQSEVKLFGTWASVYCTRIELALKLKGIPYEYVEEDLPNKSDLLIHHNPVHKKVPVLVHNGKAIAESLVILEYIDEHWNHTPKLLPADPYERAKVRFWANFYDQKVFGPSIYNIMTSKGKEQEKAIEDSLEVLKVFEEGIERDFPAKSPFLNGGTLGFLDIVVGSSSCNFKAFNEVFAVVFDPEKNPAFCSWVTAMKECPLMKETLPPHDRLVAKISKLFLQPPKA

SEQ ID NO: 11920 - DNA, 663 bp, Vitis vinifera
  CDS (1)..(663)
atggctgaagaagtgaagctgtttggtgcatggggaagcccctatagccgcagaattgaattggccctgaagctgaaaggacttcaatttgaatacatagaagagaacttgtacaataagagtcctgcgcttctcaagtataatccagttcacaagaaagtccctgtgctcgtacacaatggaaagccggttgcagagtcacttgtcatcctggagtacattgatgagacctggaaacacaaccccttcttgcctacagacccttacgaaaaggccaaggcacggttctgggctaggttcatagatgagaagttctggccggcagcaaaaaaggctatggcgagtaggggaagggagcgagaggaagcgattgaagaagctcagcagcatctgaaaacccttgagagtgagctgaaagagaagaaaatctttggaagggagagtttgggatttgtagacatagctgcgcatcttttgttttggcttgttgttgcccaagaagcctttggagtggagatcctaactgaggagaagtttcccgccgtgcatgaattgtatcaaaggctcgcagatgaggctgttttcaaggaatgtatgccaccaaaggagcaactcattgcctatcttaaagttcggttgggagcctggactgcttccaaatga

SEQ ID NO: 11921 - protein, 220 aa, Vitis vinifera
MAEEVKLFGAWGSPYSRRIELALKLKGLQFEYIEENLYNKSPALLKYNPVHKKVPVLVHNGKPVAESLVILEYIDETWKHNPFLPTDPYEKAKARFWARFIDEKFWPAAKKAMASRGREREEAIEEAQQHLKTLESELKEKKIFGRESLGFVDIAAHLLFWLVVAQEAFGVEILTEEKFPAVHELYQRLADEAVFKECMPPKEQLIAYLKVRLGAWTASK

SEQ ID NO: 11922 - DNA, 666 bp, Vitis vinifera
  CDS (1)..(666)
atggctgaagaagtaaagctttttggcacatgggcaagcccctttagccgcagaattgaagtggccctcaagctgaaaggagttcaatttgagtacatagaagagaacttgtccaataagagtcctgcgcttctcaagtataatccagttcacaagaaaatccctgtgcttgtacacaatggaaagccggttgcagagtcacttgtcatcctggagtacattgatgagacctggaaacataatcccatcttgcctacagacccttatgagaaggccatggcacggttctgggctaagtacatggatgacaagctctggccggcagcaacaaaggtcgtggtgagtaagggagaggagcaaaaggcagtgattgaagaaatccaggagcagctgaaaactctagagagtgaactgaaagagaagaaattctttggaggggagagtttgggatttgtagacatagctgcaaacattatagtttttcttcttgttgcccaagaagctctgggattaatggagatcctgaccgaagagaagtttcctgttttgcatgaatggtatcaaaggcttgtcgatgatgctgttttcaaggaatgtgtgccaccaagggagcgacatcttggcttcttcaaagctcggtttggatcctcgacggcttccaaatga

SEQ ID NO: 11923 - protein, 221 aa, Vitis vinifera
MAEEVKLFGTWASPFSRRIEVALKLKGVQFEYIEENLSNKSPALLKYNPVHKKIPVLVHNGKPVAESLVILEYIDETWKHNPILPTDPYEKAMARFWAKYMDDKLWPAATKVVVSKGEEQKAVIEEIQEQLKTLESELKEKKFFGGESLGFVDIAANIIVFLLVAQEALGLMEILTEEKFPVLHEWYQRLVDDAVFKECVPPRERHLGFFKARFGSSTASK

SEQ ID NO: 11924 - DNA, 663 bp, Vitis vinifera
  CDS (1)..(663)
atggctgaagaagtaaagctttttggcacatgggcaagcgtctttagccgcagaattgaagtggccctcaagctgaaaggagttcagtttgaatacatagaagagaatttgtccaataagagtcctgcgcttctcaagtataatccgcttcacaagaaaatcccagtgcttgtacacaacggaaagccagttgcagagtcacttgtcatcctggagtacatcgatgagacctggaaacacaaccccatcttgcctacagacccttatgagaaggccatggcacggttctgggctaagtacatggatgacaagctcttgccggcagcaataaaggttgcgatgagtaagggagaggagcaaaagggagtgattgaagaaatccagaagcagcttaaaactctagagagtgagctgaaagagaagaaattctttggaggggagagtttaggattcgtggacatagctgcaaacactatagtttggcttgttgttgcccaagaagctctgggaatggagatcctgaccgaagagaagtttcctgttttgcatggatggtatcaaaggcttgttgacgatgctgttttcaaggaatgtatgccgccaagggagcaacatcttagctttgtcaaagttcggtttggatcctcgaccccctccaaatga

SEQ ID NO: 11925 - protein, 220 aa, Vitis vinifera
MAEEVKLFGTWASVFSRRIEVALKLKGVQFEYIEENLSNKSPALLKYNPLHKKIPVLVHNGKPVAESLVILEYIDETWKHNPILPTDPYEKAMARFWAKYMDDKLLPAAIKVAMSKGEEQKGVIEEIQKQLKTLESELKEKKFFGGESLGFVDIAANTIVWLVVAQEALGMEILTEEKFPVLHGWYQRLVDDAVFKECMPPREQHLSFVKVRFGSSTPSK

SEQ ID NO: 11926 - DNA, 693 bp, Vitis vinifera
  CDS (1)..(693)
atggctgaagaagtaaagctttttggcacatgggcaagcgtctttagccgcagaattgaagtggccctcaagctgaaaggagttcagtttgaatacatagaagagaatttgtccaataagagtcctgcgcttctcaagtataatccgcttcacaagaaaatcccagtgcttgtacacaacggaaagccagttgcagagtcacttgtcatcctggagtacatcgatgagacctggaaacacaaccccatcttgcctacagacccttatgagaaggccatggcacggttctgggctaagtacatggatgacaaggtaaacccaatcctatattcctttttaaaaaaaaatcatttggcaataaaggttgcgatgagtaagggagaggagcaaaagggagtgattgaagaaatccagaagcagcttaaaactctagagagtgagctgaaagagaagaaattctttggaggggagagtttaggattcgtggacatagctgcaaacactatagtttggcttgttgttgcccaagaagctctgggaatggagatcctgaccgaagagaagtttcctgttttgcatggatggtatcaaaggcttgttgacgatgctgttttcaaggaatgtatgccgccaagggagcaacatcttagctttgtcaaagttcggtttggatcctcgaccccctccaaatga

SEQ ID NO: 11927 - protein, 230 aa, Vitis vinifera
MAEEVKLFGTWASVFSRRIEVALKLKGVQFEYIEENLSNKSPALLKYNPLHKKIPVLVHNGKPVAESLVILEYIDETWKHNPILPTDPYEKAMARFWAKYMDDKVNPILYSFLKKNHLAIKVAMSKGEEQKGVIEEIQKQLKTLESELKEKKFFGGESLGFVDIAANTIVWLVVAQEALGMEILTEEKFPVLHGWYQRLVDDAVFKECMPPREQHLSFVKVRFGSSTPSK

SEQ ID NO: 11928 - DNA, 681 bp, Vitis vinifera
  CDS (1)..(681)
atggctgaccaagtacagctgtttggcgtttggggaagcttctttggccgcagagtcgaagtggccctaaggctgaaaggagttcagtttgaatacgtagaagaggacttgtacaataagagtccttcgcttctcaagtataatccagttcacaaaaaaattcctgtgctgctatgcgacaacatgctacacaacggaaacccacttgcagagtcgcttgtgatcttagagtacattgatgagacctggaaacacaaccccatcttccctaaagacccttacgaaagggctagggcaaggttctgggctaagttcatagacgagaagctgtggccggtggtgagaaaggctctggggagtaaggaagagaaggagcaaagggaagccattggagaaactcatgagcacctggaaaccctagagagtgagctgaaagagaagaagttctttggaggggagagttggggatatttggacatagctgcaatggttataatttggcttggaatcgcccaagaagctctgggagtggagttcataccaaaagagaagtttcccaggttgcataaatggcagcaaaggcttgttgaggatgctgtcttcaaggaatgtgtgccaccaagggagaagcttggtgccttcttcaaagcccggtttggatcctccgctgcctccaaatga

SEQ ID NO: 11929 - protein, 226 aa, Vitis vinifera
MADQVQLFGVWGSFFGRRVEVALRLKGVQFEYVEEDLYNKSPSLLKYNPVHKKIPVLLCDNMLHNGNPLAESLVILEYIDETWKHNPIFPKDPYERARARFWAKFIDEKLWPVVRKALGSKEEKEQREAIGETHEHLETLESELKEKKFFGGESWGYLDIAAMVIIWLGIAQEALGVEFIPKEKFPRLHKWQQRLVEDAVFKECVPPREKLGAFFKARFGSSAASK

SEQ ID NO: 11930 - DNA, 693 bp, Populus trichocarpa
  CDS (1)..(693)
atggctaagagtgatgtgaagcttataggggcatggccgagcccttttgtgatgagggcaagaattgcccttaatattaaatctctggggtatgagtttcttgaggaaaaactgggatccaaaagccagcttcttcttgaatcaaaccctgtccataagaaaattccagttctgattcatgatggcaagcccatttgtgaatctcttgtgatagtggagtacattgatgaggtttggtcttctggacctaccatcctcccctctgatccttatgatcgtgcccttgctcggttttgggctgcctatctcgatgagaagtggtttccttcgatgagaagcattgcaacagctaaagaagaggaggctcgaaaggcgttgatagagcaagcaggagaaggggtgatgatgctggaggatgcatttagcaggtgtagcaaagggaagggtttctttggaggagatcagatcgggtaccttgacattgcatttggttcctttttggggtggttgagaaccacagagaagatgaatggagtgaagctgattgatgaaactaagactcctagcttgttgaaatgggcgactagtttttcttcacatcctgctgtgaaggatgttcttccagagacagagaagcttgttgagtttgccaaggttcttgccaaattcaaagcagccagctcgaactcctaa

SEQ ID NO: 11931 - protein, 230 aa, Populus trichocarpa
MAKSDVKLIGAWPSPFVMRARIALNIKSLGYEFLEEKLGSKSQLLLESNPVHKKIPVLIHDGKPICESLVIVEYIDEVWSSGPTILPSDPYDRALARFWAAYLDEKWFPSMRSIATAKEEEARKALIEQAGEGVMMLEDAFSRCSKGKGFFGGDQIGYLDIAFGSFLGWLRTTEKMNGVKLIDETKTPSLLKWATSFSSHPAVKDVLPETEKLVEFAKVLAKFKAASSNS

SEQ ID NO: 11932 - DNA, 678 bp, Populus trichocarpa
  CDS (1)..(678)
atggaaaagggagtgaaactttttaagacatggtcaagtccatttggtatccggattgtttgggcattgaaggtcaagggcgtccagtttgaacaaatagacgaagatctcgtcaacaagagccctctacttctcctatacaatccagttcacaaaaagattccagtcctcgtacacgacggaaaaccagttgttgaatcacttataatccttgaatatattgaagggacatggaagcaaaatcccttgtttccagaggatccactggagagggctgctgctcgcttctgggcaaaatttggtgatgacaaggttatgccatcaatatgggaagcatttatcaagggcagagaagaggaagagtgtgcttttgcaccagcttttgagaacctgaaattcttggaggaagaactcaagggaaaacaattcttcggtggagagaggatcggaattgtggatattgcattcggttggcttgctaacttggtccctgtattcgaagagatacatgcaataaaaatgatagacgaggaaagatttccattgctgcacgcgtggatgcaggagttttccaaggctccagtaattgcagattgccggccgccacatgaaaaactagtcaacaaattccgtgccattcgtgatcagtccctccttgcagcagcacctcatgcctga

SEQ ID NO: 11933 - protein, 225 aa, Populus trichocarpa
MEKGVKLFKTWSSPFGIRIVWALKVKGVQFEQIDEDLVNKSPLLLLYNPVHKKIPVLVHDGKPVVESLIILEYIEGTWKQNPLFPEDPLERAAARFWAKFGDDKVMPSIWEAFIKGREEEECAFAPAFENLKFLEEELKGKQFFGGERIGIVDIAFGWLANLVPVFEEIHAIKMIDEERFPLLHAWMQEFSKAPVIADCRPPHEKLVNKFRAIRDQSLLAAAPHA

SEQ ID NO: 11934 - DNA, 693 bp, Populus trichocarpa
  CDS (1)..(693)
atggctaagagtgatgtgaagcttataggggcatggccgagcccttttgtgatgaggccaagaattgcccttaatattaaatctgcggggtatgagtttcttgaggaaacactgggatccaaaagccagcttcttcttgaatcaaaccctgtccataagaaaatcccagttctgattcatgatggcaagcccatttgtgaatctcttgtgatagtggagtacattgatgaggtttggtcttctggacctaccatcctcccctccgatccttatgatcgtgcccttgctcggttttgggctgcctatctcgatgagaagtggtttcctacgatgagaagcattgcaacagctaaagaagaggaggctcgaaaggcgttgatagagcaagcaggagaaggggtgatgatgctggaggatgcatttagcaggtgtagcaaagggaagggtttctttggaggagatcagatcgggtaccttgacattgcatttggttcctttttggggtggttgagagccatagagaagatgaatggagtgaagctgattgatgaaactaagactcctagcctgttgaaatgggcaactagtttttcttcacatcctgctgtgaaggatgtccttccagagacacagaagcttgttgagtttgccaaggttctggccaaattcaaagcacccagctcgaactcctaa

SEQ ID NO: 11935 - protein, 230 aa, Populus trichocarpa
MAKSDVKLIGAWPSPFVMRPRIALNIKSAGYEFLEETLGSKSQLLLESNPVHKKIPVLIHDGKPICESLVIVEYIDEVWSSGPTILPSDPYDRALARFWAAYLDEKWFPTMRSIATAKEEEARKALIEQAGEGVMMLEDAFSRCSKGKGFFGGDQIGYLDIAFGSFLGWLRAIEKMNGVKLIDETKTPSLLKWATSFSSHPAVKDVLPETQKLVEFAKVLAKFKAPSSNS

SEQ ID NO: 11936 - DNA, 681 bp, Sorghum bicolor
  CDS (1)..(681)
atgtctccgcctgttaaggtcctcggccatctcaccagcgcattcgcgcaccgcgttgaggccgctctgcggctcaagggcgtgccatacgagctgatccgggaagacctgagcaacaagagcgagctgctgctcgccaataaccctgtccacaagacggtgcctgtgctcctccatggcgaccaggccatctgtgagtccctcgtcatcgtcgagtacatcgacgaggtcttcgacgggccgccgctcctcccggccgacccctacgaccgtgccatggtccgcttctgggcagacttcatggacaagctcttcgtgccgttctggatggcacactgggtagagggcgaggcgcagaagactctagtggaggaggtcaagcagaagctggcgcttctggaggcgcagctcaaggggaagaggttctttgggggcgacaccatcggctacatcgacatagctgcctgtgtgttgggtccttggctcagcatggtagaggaggtgaccggagtggtcgtgcttgacgaagacgagtaccctgctctacgccggtggtccaaggagtacagttcctacgaagctctgaagcagtgcatcccggacagagaccagctcgtcgccttctatactgaacgcaaggagaattacaaaatgatggctaaagcatggttgaagcagtaa

SEQ ID NO: 11937 - protein, 226 aa, Sorghum bicolor
MSPPVKVLGHLTSAFAHRVEAALRLKGVPYELIREDLSNKSELLLANNPVHKTVPVLLHGDQAICESLVIVEYIDEVFDGPPLLPADPYDRAMVRFWADFMDKLFVPFWMAHWVEGEAQKTLVEEVKQKLALLEAQLKGKRFFGGDTIGYIDIAACVLGPWLSMVEEVTGVVVLDEDEYPALRRWSKEYSSYEALKQCIPDRDQLVAFYTERKENYKMMAKAWLKQ

SEQ ID NO: 11938 - DNA, 711 bp, Sorghum bicolor
  CDS (1)..(711)
atgtcgtctccgccgccgccgccggtgaagctgatcggcttcttcggcagcccgtacgcgttccgcgcggaggcggcgctgtgcctcaagggcgtgccgtacgagctcattctggaggacctcttcggcaccaagagcgacctcctactccaccacaaccccgtccacaagaaggtccccgtgctcctccacggcgacgacagggccatctccgaatccctcgtcattgccgagtacgtcgacgaggtcttcgacgggccgccgctcctccccgccgacccctacgaccgcgccaccgccaggttctgggctgacttcatcgagaacaagcttaccaagccgttcttcatggcgatctgggtggaggagagcgaagcgcggctgcggttcgagaaggaggccaaggagctggtggcgctgctggaggcgcagctcgacggcaagaagttcttcgccggcgacagggcgggatacctcgacgtcgccgcgtcctcgctcggcccctggcgcagcgtcatcgaggagctcaacggagtgaccgtgctcagcgaggacgagcaccccaacctgtgccggtggagcagggactactgcgcctgcgaggatctgaagccgtgcatgccggatcgggagaagctgctcgcctacttcaccaagaacttcgacaggtacaaggcggccgtcaatgcgacgttatcgcagtcgcagtag

SEQ ID NO: 11939 - protein, 236 aa, Sorghum bicolor
MSSPPPPPVKLIGFFGSPYAFRAEAALCLKGVPYELILEDLFGTKSDLLLHHNPVHKKVPVLLHGDDRAISESLVIAEYVDEVFDGPPLLPADPYDRATARFWADFIENKLTKPFFMAIWVEESEARLRFEKEAKELVALLEAQLDGKKFFAGDRAGYLDVAASSLGPWRSVIEELNGVTVLSEDEHPNLCRWSRDYCACEDLKPCMPDREKLLAYFTKNFDRYKAAVNATLSQSQ

SEQ ID NO: 11940 - DNA, 669 bp, Sorghum bicolor
  CDS (1)..(669)
atggctacctccgaagacgccgatcatcaggtgacggtcgtcgacttctgggcgaacggcttcgggatgcgtgcccggatcgcgctgcgggagctcggtgtcgccttccgctacgtcgaggaggacctccgcgtccgcgagcggagcgagctggttcgccgcatgaaccccgtccaccgctccgtccccatcctcatccacggcggacgtccggtctgcggctccgtcaacattctccagtacgtcgacgaggtctgggggcccaccttgttcccgcgcgacccactccagagggcccacgcccgcttctgggctgactttgttgaccaaaaggtgtttagcacacagacgaggttcctgaagagcaaaggcgatgaaaaggaggcagcaaagggagagctcctggagcaactcaagcgcctggaggaggtgctaggggacaagaccttcttcgccggcgacgagttcgggttcctcgacgccgtcctcatcccgttctcgagcatgttccatgggtacgagcagcatggaggatttgatcttgacgtggagtgcccgagcttgatgagttgggtgaggagatgcaaggaaaggaagagcgtcaagggagtcctgcctgacgaggataagatgtatgagctacacaagaagtggtatggcattgagtga

SEQ ID NO: 11941 - protein, 222 aa, Sorghum bicolor
MATSEDADHQVTVVDFWANGFGMRARIALRELGVAFRYVEEDLRVRERSELVRRMNPVHRSVPILIHGGRPVCGSVNILQYVDEVWGPTLFPRDPLQRAHARFWADFVDQKVFSTQTRFLKSKGDEKEAAKGELLEQLKRLEEVLGDKTFFAGDEFGFLDAVLIPFSSMFHGYEQHGGFDLDVECPSLMSWVRRCKERKSVKGVLPDEDKMYELHKKWYGIE

SEQ ID NO: 11942 - DNA, 711 bp, Sorghum bicolor
  CDS (1)..(711)
atggccggaggagacgacctgaagctgctgggtatgtgggcgagcccgtacgtgctgcgggtgaaactcgctctcagcctcaagggcctgagctacgagtacgtcgaggaggatctcagggacaagagcgagctcctcctcaaatccaaccccgtccacagcaaggttcccgtgctcatccacaacggaaaacccgtctgtgagtcgcaggtcatcctgcagtacatcgacgaagctttcgccggcaccggcccgtccctcctccctgctgacccctacgaacgcgccatcgctcgcttctgggccgcctacatcgatgacaagatgacgcccgcttggaacaagtcgacgatgggcaagacggaggaggagaaggctgagggaaaaaagcagtcgctcgtcgcgctggagaccttggagggggcgctgagggactgcggcaaagggaagcccttcttcggcggcgacagcgtcgggttcgtggacgtcgtgctcggcggcatgctcgggtgggtgcgcgcggcagatgagatgcacggcgtcaagcccttcgaccctgaacggactccgcagctggcggcgtggtcggagcgctttggcgcgctggaagccgtggagccggtgatgccagacgtgagcaggctggttgagttcggcaagatgttgatggcacgtctagcggctgcggccgccggtgatgcaagcaactga

SEQ ID NO: 11943 - protein, 236 aa, Sorghum bicolor
MAGGDDLKLLGMWASPYVLRVKLALSLKGLSYEYVEEDLRDKSELLLKSNPVHSKVPVLIHNGKPVCESQVILQYIDEAFAGTGPSLLPADPYERAIARFWAAYIDDKMTPAWNKSTMGKTEEEKAEGKKQSLVALETLEGALRDCGKGKPFFGGDSVGFVDVVLGGMLGWVRAADEMHGVKPFDPERTPQLAAWSERFGALEAVEPVMPDVSRLVEFGKMLMARLAAAAAGDASN

SEQ ID NO: 11944 - DNA, 705 bp, Sorghum bicolor
  CDS (1)..(705)
atggcaggaggaggtgatgagctgaagctgctgggcatgtgggcgagcccgttcgtcctccgtgtgaagctcgcgctcagtttcaagggcctgagctacgagtatgtcgaggaggacctccgcaacaagagcgacctcctgcttagctcaaacccagtgcacaagaaggtgcccgtccttatccacaacggcaagccggtctgtgagtcccagatcatcgtgcagtacctcgacgaagtctacagcgctgcaggcccttccttcctccccgtcgacccttacgaacgcgccatggcgcgcttctgggcctcctttattgacgaaaagttcttggcgtcgtggataaaggcaggcaggggcaagacagacgaggagaaggcagaagggttgaaactgacgttcgcggccatagaaaccttggaaggggcgttcaaggagtgctccaagggaaagcccttcttcggaggcgacagcgtcggctacctggacatcgcgctcggcgccctggtagcgtggatgcacaccgccgaggtgcgtcatggtctcaggctcttcgatgcctccagaagcccgctgctggagaagtgggtggagcgcttcggcaagctggatgaggtcgtggcggtcctgccggacattgaccggctagtggagcacgccaaggtcagggaggctgaggttgcagcagctgctgccggaaactga

SEQ ID NO: 11945 - protein, 234 aa, Sorghum bicolor
MAGGGDELKLLGMWASPFVLRVKLALSFKGLSYEYVEEDLRNKSDLLLSSNPVHKKVPVLIHNGKPVCESQIIVQYLDEVYSAAGPSFLPVDPYERAMARFWASFIDEKFLASWIKAGRGKTDEEKAEGLKLTFAAIETLEGAFKECSKGKPFFGGDSVGYLDIALGALVAWMHTAEVRHGLRLFDASRSPLLEKWVERFGKLDEVVAVLPDIDRLVEHAKVREAEVAAAAAGN

SEQ ID NO: 11946 - DNA, 720 bp, Sorghum bicolor
  CDS (1)..(720)
atggccggaggagacgagctgaagctgctgggcatgtgggcgagcccgttcgtcctgcgggtgaagctcgcgctcagcatcaagggcctgagctacgagtatgtagaggaggacatcttcggcggcaagagcgagctgctcctcaagtccaaccctgtgcacaacaaggtacccgtgctcatccacaacgggaagcccgtctgtgaatcgctgatcatcctgcaatacatcgacgaggcctttgccggcaccggcccgaccctcctccctgctgacccctacgaacgcgccgttgctcgcttctgggccgcctacatcgatgacaaggtgctggccgcttggatgcaggcgtccaggggcaagacggaggaggacaaggctgaggggagaaagcagtggttcgtcgcggttgagacgctagagggagcgctgagggactgcggcaaagggaagcccttcttcggcggcgacagcgtcgggttcgtggacgtcgtgctcggcggactacttgggtgggtgcaggcaaacgaggaggcgttcggcatcgagtccttggatccgcaacggactccgctcctggtggcgtggtcggagcgcttcggcgcactggaaaccgtggagcctgtgatgcccgaggtgagcaggctggtcgagttgggcaagatggtgctggcccgtggccgtgaagcggcggctgtggcagctggtgcaagcaactga

SEQ ID NO: 11947 - protein, 239 aa, Sorghum bicolor
MAGGDELKLLGMWASPFVLRVKLALSIKGLSYEYVEEDIFGGKSELLLKSNPVHNKVPVLIHNGKPVCESLIILQYIDEAFAGTGPTLLPADPYERAVARFWAAYIDDKVLAAWMQASRGKTEEDKAEGRKQWFVAVETLEGALRDCGKGKPFFGGDSVGFVDVVLGGLLGWVQANEEAFGIESLDPQRTPLLVAWSERFGALETVEPVMPEVSRLVELGKMVLARGREAAAVAAGASN

SEQ ID NO: 11948 - DNA, 732 bp, Sorghum bicolor
  CDS (1)..(732)
atggccggcggaggagacgacctgaagctgatcggcttgtggtctagcccgttcgtgctccgggtgcaactcgctctcagcctcaagggcctgcgctacgagtacatcgaggaggaggctctcgtgaacaagagcgagctcctcctcaagtccaaccccgtgcacaaaaaggtacccgtgctcatccacaacgggaagcccgtctgcgagtcgcgggtcatcctgcaatacatcgacgaggcctttgccggcaccggcccgtccctcctccctgccgacccctaccaacgcgccgttgctcgcttctgggccgcctacatcgatgacacgatgcttccgatttggaacaagtcgtcgatggggaagacggaggaggaaatggctgagggaaagaagcagtcgctcgccgcgacggaggtcctagagggggcgcttagggaaagcttcaaagggaagcccttcttcggtggcgacagcaccgggtacgtggacgtcgtgctcggcggcgtgctcgcgtgggcgcgcgcgtcggaggagctctacggcaacaaccccttcgaccccgagcagactccgctcctggcggcgtggtcggagcgcttcggcgcactggaagccgtcgagccggtggtgccggaggtgagcagggtggttgagttcggcaagatgttgcaggcgcgtctagcggttgcggccgccctcggcgccggtgcacaaaaaaattggcaataa

SEQ ID NO: 11949 - protein, 243 aa, Sorghum bicolor
MAGGGDDLKLIGLWSSPFVLRVQLALSLKGLRYEYIEEEALVNKSELLLKSNPVHKKVPVLIHNGKPVCESRVILQYIDEAFAGTGPSLLPADPYQRAVARFWAAYIDDTMLPIWNKSSMGKTEEEMAEGKKQSLAATEVLEGALRESFKGKPFFGGDSTGYVDVVLGGVLAWARASEELYGNNPFDPEQTPLLAAWSERFGALEAVEPVVPEVSRVVEFGKMLQARLAVAAALGAGAQKNWQ

SEQ ID NO: 11950 - DNA, 717 bp, Sorghum bicolor
  CDS (1)..(717)
atggctggcgaagatgagctgaagctgctgggcatgtgggcgagcccgttcgtcctccgtgcgagacttgcgctcagcttcaagggcctcaagtacgagtacgtcgaggaggagatctttggaaacaagggcgagcttcttgtcaagtccaatccggtgcacaagaaggtacccgtcctcatccacaacggcaagcccatctgcgagtcacaggtcatcgtgcagtacatcgatgagatctacggcggcgccgctccttctctcctccccgtcgacccctacgaccgtgctgtggctcgcttttgggcagcctacattgacgacaagttgttcagctcgttcatggtgatgataatgggcaagacggaggaagagaaggcagaggggaggaagcagttgtttgccgcggcagagaccttggagggagcactcaaggagtgctctaatgggagacccttcttcggcggcgacagcgtcgggtacgtggacatcgcgctcggaggcttcgtcgcgtggttgcagacgagggacatcttgtctggcttgaagcatttcgacgccgacaagaccccgctcctggcggcgtggctggagcgattctgcgcgttgaacgaaacccaggcagtcatgccggacgtgatgaagctggtcgagctctccaagaagaggcaggcccaggctgctgctgcagctgccgccgcggtccaaggtaattga

SEQ ID NO: 11951 - protein, 238 aa, Sorghum bicolor
MAGEDELKLLGMWASPFVLRARLALSFKGLKYEYVEEEIFGNKGELLVKSNPVHKKVPVLIHNGKPICESQVIVQYIDEIYGGAAPSLLPVDPYDRAVARFWAAYIDDKLFSSFMVMIMGKTEEEKAEGRKQLFAAAETLEGALKECSNGRPFFGGDSVGYVDIALGGFVAWLQTRDILSGLKHFDADKTPLLAAWLERFCALNETQAVMPDVMKLVELSKKRQAQAAAAAAAAVQGN

SEQ ID NO: 11952 - DNA, 699 bp, Ricinus communis
  CDS (1)..(699)
atggctaagagtgaggtgaagcttcttggagcatggccaagtccatttgttatgaggccaagaattgcccttaacataaagtctgtcgattatgagtttcttgaggaaacttttggatcaaaaagccaactccttctcgaatctaatcctgttcacaagaaaatcccagtacttattcatgacggtaaacctatttgtgagtctcttatcattgttgagtatattgatgaagcttggtctaatcctgctccttctattcttccctctgatccttacgaccgcgccattgcaagattttggggcgcctatgttgatgagaagtggtttccaaatttgaaactcatttcaacagcggaaggagaggaaaaagagaaggcaatagggcaaatagtagaagggctaaagctgctagaggatgcatatgtgaaaagtagcaaagggaaggctttctttggaggagatgaaattgggtgccttgacattgcatttggttgctacttgggttggttgagagcgacagagaaattgagtgaagtgaaactgctagatgaagcaaagactcctggtcttgtgaaatgggcagagaccttctcttctcatcctgctgtgaaggatgtcctgccggagactgacaaacttgttgagtttggaaagtctcttttcgctagacttagagccgcaaaatccggatcctcataa

SEQ ID NO: 11953 - protein, 232 aa, Ricinus communis
MAKSEVKLLGAWPSPFVMRPRIALNIKSVDYEFLEETFGSKSQLLLESNPVHKKIPVLIHDGKPICESLIIVEYIDEAWSNPAPSILPSDPYDRAIARFWGAYVDEKWFPNLKLISTAEGEEKEKAIGQIVEGLKLLEDAYVKSSKGKAFFGGDEIGCLDIAFGCYLGWLRATEKLSEVKLLDEAKTPGLVKWAETFSSHPAVKDVLPETDKLVEFGKSLFARLRAAKSGSS

SEQ ID NO: 11954 - DNA, 711 bp, Ricinus communis
  CDS (1)..(711)
atggctgcaggccaagaagaagtgaagctgtttggaggttggtacagtccatttgtttacagggtggaggtagcattgaagattaaaggaattccatatgaagttgtggaagaagatgtgaccaacaagagcaagcttcttctcaaggtcaatcctgtgtacaagaagatacctgtgctgttccataatggaaaatccatttgtgaatccctcctcatccttgagtacattgatgagacttggaagcacaaccctatattacctcaggatccttatgagaaggccatggcacgcttttgggctcacttcttcaacgacaagtttactcgagctataatggtaattctgactggtaccatagaagagcgaaaacagaaggaagtagagaaggcaatggcagcactgacagtacttgaagggcagctcaaggccaagggtaagacattttttgggggtgacagaattggatatgttgatatagtgctgggttggatccccagatgggtaggagctgttgaggaaattgctagtgtcaaaatacatgaccctgaaaaattccctctgatagataaatggatgctgaattttgtccagatccctgtcatcaaagaaaccttgcctcaacatgacaagctggtaaaattccttggaaaaattcgcagcactaaaatagcttttgcttcagctgtagctgtttctagtaagttatga

SEQ ID NO: 11955 - protein, 236 aa, Ricinus communis
MAAGQEEVKLFGGWYSPFVYRVEVALKIKGIPYEVVEEDVTNKSKLLLKVNPVYKKIPVLFHNGKSICESLLILEYIDETWKHNPILPQDPYEKAMARFWAHFFNDKFTRAIMVILTGTIEERKQKEVEKAMAALTVLEGQLKAKGKTFFGGDRIGYVDIVLGWIPRWVGAVEEIASVKIHDPEKFPLIDKWMLNFVQIPVIKETLPQHDKLVKFLGKIRSTKIAFASAVAVSSKL

SEQ ID NO: 11956 - DNA, 651 bp, Ricinus communis
  CDS (1)..(651)
atgggagaagaagtgaagctcttcaacacaagtccaagcccttttggtttgagggtggtttgggcactgaagcttaagggcattcgatatgagtcaattgaagaagatctctctaacaagagccctttactccttcaatataatcccatttacaagaaagttccagtgctcgtgcatgatggaaaacctgttgtagaatcactcatcattcttgaatacattgaagaaacatggcagcagagtcctttattgcctgctcatccttatcagagagccatggcacacttttgggcaaaattcggtgatgataaggttcttccgtcaatatggtatgtatttatcaagaaaggtaaagagcaagaggatgctattcctgaagccctggaaaacttgaaaatcttagaggaagaattgagaggaaagaagttctttgggggagaaaaaattggattcgtagatcttgcatttggttggctagctaacactctaagtgtattggaggaagttgttgggctcaaactaattgatgaaatgaagttcccattgttggcagggtggatgatagaattctcagactcacctgtgatcaaagagagctggccacccagagatgtactcatctccttatacagtgcttatcttaagaattag

SEQ ID NO: 11957 - protein, 216 aa, Ricinus communis
MGEEVKLFNTSPSPFGLRVVWALKLKGIRYESIEEDLSNKSPLLLQYNPIYKKVPVLVHDGKPVVESLIILEYIEETWQQSPLLPAHPYQRAMAHFWAKFGDDKVLPSIWYVFIKKGKEQEDAIPEALENLKILEEELRGKKFFGGEKIGFVDLAFGWLANTLSVLEEVVGLKLIDEMKFPLLAGWMIEFSDSPVIKESWPPRDVLISLYSAYLKN

SEQ ID NO: 11958 - DNA, 690 bp, Ricinus communis
  CDS (1)..(690)
atggcagggcaagaggaagtgaaggtgttgggaggatggttcagtccatttgctttcagagcagaagtggcactgaagctaaagggaatttcttatgaagctgtagcggaaaatttggccaacaaaagccctgagcttctcaaatataatcctatttacaagaaaatccctgttcttgttcacaacggaaaacccattactgaatcactcatcatcattgaatacattgatgaagtttggaaacacaaccctgttttgcctgaggatccttatgagagggccatggcacgcttctgggcttactttgtagataacaagctaatggaagcagtgaggagagttattaatactactgaagaagaggcaaagcagaaggaagtggagaaagcaaaagaagctctgcaggtaattgaaaaagagctcaaggcaaaaggcaacaagttttttgggggtgacacagttggatatgttgatgtagccatgggttggatccctaactgggtaggagctattgaggctgcttttagtgtcaaaattcatgatcctgaaaattttcctttgcttgatgaatggatgcacaattttacacaggtacccattatccaagaagctttgcctcaacaagacaagttgattgcatactttaagcaacttctcacctataaattagcttcagcagctggaaaataa

SEQ ID NO: 11959 - protein, 229 aa, Ricinus communis
MAGQEEVKVLGGWFSPFAFRAEVALKLKGISYEAVAENLANKSPELLKYNPIYKKIPVLVHNGKPITESLIIIEYIDEVWKHNPVLPEDPYERAMARFWAYFVDNKLMEAVRRVINTTEEEAKQKEVEKAKEALQVIEKELKAKGNKFFGGDTVGYVDVAMGWIPNWVGAIEAAFSVKIHDPENFPLLDEWMHNFTQVPIIQEALPQQDKLIAYFKQLLTYKLASAAGK

SEQ ID NO: 11960 - DNA, 690 bp, Ricinus communis
  CDS (1)..(690)
atggcagggcaagaggaagtgaaagtattgggaggttggttcagtccatttgttttcagggtagaagtggcactgacgctaaagggaattccatatgaagctgtagtagagagtttaaccaacaagagccctgagcttctcaagtataatcctgtctataagaaaatccctgttcttgttcataatggaaaacccatttctgaatctcttatcatcgttgaatacattgatgaaacttggaaacacaaccctattttacctgaggatccttatgagagggccatggcacgcttctgggcttactttgtagacaacaagcttacggaagcattaaggggagttctccgcagtactgaagaagaggaaaagcagaggggagttgagaaggcaaaagaagctctacaagtgattgaaggagagctcaaggcaaggggcaataaattttttatgggggacacagttgggttcgttgatgtagccatggggtatatccccagatgggtagcagctgttaagggaagtgttgatgtcgaaatttatgatcctgaagaatttcctctacttgaaaaatggatacagaattttacagaggtacctgtcatcagagaagctttgcctgaacatgacaagttggtggagttctttaagcaatttcgcagcgacatattagcttcagcagccggaaaataa

SEQ ID NO: 11961 - protein, 229 aa, Ricinus communis
MAGQEEVKVLGGWFSPFVFRVEVALTLKGIPYEAVVESLTNKSPELLKYNPVYKKIPVLVHNGKPISESLIIVEYIDETWKHNPILPEDPYERAMARFWAYFVDNKLTEALRGVLRSTEEEEKQRGVEKAKEALQVIEGELKARGNKFFMGDTVGFVDVAMGYIPRWVAAVKGSVDVEIYDPEEFPLLEKWIQNFTEVPVIREALPEHDKLVEFFKQFRSDILASAAGK

SEQ ID NO: 11962 - DNA, 660 bp, Ricinus communis
  CDS (1)..(660)
atggctgatgaggtgatacttttggatttctgggcaagtccttttgggatgagagttagaatagcactagcagagaaaggagtaaagtatgagtatagagaagagaatttaaggaacaaaagccctcttcttttggagatgaatccagttcataaaaagattcctgttctcatccataatggaaaacccatttgtgaatcacttattgctgttcaatatattgatgaggtttggcatgatgagtctcctcttttgccttctgattcttacccaagagcacatgctagattctgggctgattttgttgacaagaagatttatgaacttgggaggaagatatggactacaaaaggagaggatcaggaggcgggcaagaaagaattcatcgacgccattaagttgttggaaggtgagcttggagacaagccgtactttggtggtgagagctttgggtatgttgatgttgcacttatcccattctattcctggttttatgcctatgaaacctgtgggaacttcagcatagaggctgagtgtcccaagttcatggcatggattaagaggtgcctgcagaaagagtctgtctccaaggcccttcctgaccagcagaaggtctatgaatttgttttggagctgaagaaggtatttggtattgagtaa

SEQ ID NO: 11963 - protein, 219 aa, Ricinus communis
MADEVILLDFWASPFGMRVRIALAEKGVKYEYREENLRNKSPLLLEMNPVHKKIPVLIHNGKPICESLIAVQYIDEVWHDESPLLPSDSYPRAHARFWADFVDKKIYELGRKIWTTKGEDQEAGKKEFIDAIKLLEGELGDKPYFGGESFGYVDVALIPFYSWFYAYETCGNFSIEAECPKFMAWIKRCLQKESVSKALPDQQKVYEFVLELKKVFGIE

SEQ ID NO: 11964 - DNA, 660 bp, Vitis vinifera
  CDS (1)..(660)
atggcagacgagattatcttgttggatttctggcctagcatgtttggtatgagggtcagacttgccctggcagagaagggtctcaagtatgaatatagagaggaggacctgtggaacaagagccctttgcttcttgagatgaacccagttcataagaaaatcccagctctgatccacaatggaaagcccatttgtgagtctctgataatagttcagtatattgatgaggtttggtgcgataaatctccgcttttgcctagtgacccataccagagagctcaggccaggttctgggcggactacatagacaagaagctctatgaacttggaaggaagatatggtcaaccaaaggagaagagcaggaaacagccaagaaggaattcatagagtgccttaagcttttggaaggagagcttggagagaagccttacttcggtggtgaaaaaattgggtttgtagatgtggctctggtgaccttctcttgctggttttatgcatacgagacctttggcaacttcagcatagaggcggagtgccccaagttgatcgcttggaccaagaggtgcatggaaaaggagagcgtgtcgtcctctctggaagacccacacaaggtccatggctttatcatggggatgagaaagaggtttggtatagagtag

SEQ ID NO: 11965 - protein, 219 aa, Vitis vinifera
MADEIILLDFWPSMFGMRVRLALAEKGLKYEYREEDLWNKSPLLLEMNPVHKKIPALIHNGKPICESLIIVQYIDEVWCDKSPLLPSDPYQRAQARFWADYIDKKLYELGRKIWSTKGEEQETAKKEFIECLKLLEGELGEKPYFGGEKIGFVDVALVTFSCWFYAYETFGNFSIEAECPKLIAWTKRCMEKESVSSSLEDPHKVHGFIMGMRKRFGIE

SEQ ID NO: 11966 - DNA, 825 bp, Oryza sativa subsp. indica
  CDS (1)..(825)
atggagaagcaggagaacggaggggaggcgccggagctgaagctgttcgggtcgtgggcgagctcgtacacgcaccgggtgcagctggcgctgcggctcaaggcgctggagttcgtgtacgccgaggaggacctcggcaacaagagcgaggcgctgctgcgcctcaacccggtgcacaagaaggtccccgtgctcgtccaccgcggccgcccgctcgccgagtccgtcatcatcctccagtacctcgacgacgcctggccggagagccgccccctcctcccctccgaccccttcgaccgcgccctcgctcgcttctggtgccacttcgccgacgataagcttgggccggcggtgggggcggtgttcgcgtcgacggggaaggagcaggaggcggcggtgcagcaggtgcacgacaacctggcgctgctggaggcggagctccgggagggggcgttcaaggggcggaggttcttcggcggcgaccaggtgggcctcctcgacgtcgtgctcgggtgcggctcctactggctggccgtgttcgaggaggtcaccggcgtgcgcctcgtggacgccgacgcgttcccgctcttccacgcgtggctccgcgacttcgaggcccaggaggaggtcaaggagaccatcccctccgtcgaccgcctgctcgagtacgcccgcggcctccgccagatgctgctcgccctcgccgccggcgccggcgccggcgccgccgcagcagctggcagctcccccgtcaccgccgccgtcgacgctccggcgccggcagctccaccagcggccccgcaggccgcggccgtggatatataa

SEQ ID NO: 11967 - protein, 274 aa, Oryza sativa subsp. indica
MEKQENGGEAPELKLFGSWASSYTHRVQLALRLKALEFVYAEEDLGNKSEALLRLNPVHKKVPVLVHRGRPLAESVIILQYLDDAWPESRPLLPSDPFDRALARFWCHFADDKLGPAVGAVFASTGKEQEAAVQQVHDNLALLEAELREGAFKGRRFFGGDQVGLLDVVLGCGSYWLAVFEEVTGVRLVDADAFPLFHAWLRDFEAQEEVKETIPSVDRLLEYARGLRQMLLALAAGAGAGAAAAAGSSPVTAAVDAPAPAAPPAAPQAAAVDI

SEQ ID NO: 11968 - DNA, 711 bp, Oryza sativa subsp. indica
  CDS (1)..(711)
atggccggaggaggagacgagctgaagctgctgggcatgtgggcgagcccgtacgttctgcgagtgaagatcgcgctcagcctcaagggcctgagctacaagtacgtcgaggaggacttcaagaacaagagcgagctgctgctcagctccaacccggtgcacaagaaggtgcccgtgctcatccacaacggcaagcccatctgcgagtcgcaggtcatccttcagtacctcgacgaggcgttccccgacgccggcgccaccctcctccccgccgacccccacgaacgcgccgtcgctcgcttctgggccgcattctgcgacgacacgatcgcgaaggcgtcgcagcaggcgtcgtcgggaaagacggaggaggagaaggcggaaggggagaagaaggtggtggaggcgctggagaagatggaggtcgggctgagcgagtgctccaaggggaagcccttcttcggcggcgacaccgtcggctacgtcgacgtcgtgctcggcggcttcctggcgtgggttcgcgccggcgacgcgatgaagggcgtcaagaggttcgacccggccaccaccccgctgctggcggcgtgggccgagcgcttcgtcgagcttgacgtcgccaaggccgccatgccggaggtggacaagctgatcgagctcgccatggcgaggatggctggcgccgccgctgctgccgccgccgccaccaactga

SEQ ID NO: 11969 - protein, 236 aa, Oryza sativa subsp. indica
MAGGGDELKLLGMWASPYVLRVKIALSLKGLSYKYVEEDFKNKSELLLSSNPVHKKVPVLIHNGKPICESQVILQYLDEAFPDAGATLLPADPHERAVARFWAAFCDDTIAKASQQASSGKTEEEKAEGEKKVVEALEKMEVGLSECSKGKPFFGGDTVGYVDVVLGGFLAWVRAGDAMKGVKRFDPATTPLLAAWAERFVELDVAKAAMPEVDKLIELAMARMAGAAAAAAAATN

SEQ ID NO: 11970 - DNA, 696 bp, Oryza sativa subsp. indica
  CDS (1)..(696)
atggccggaggaggagacgagctgaagctgctgggcatgtgggcgagcccgtacgttctgcgagtgaagctcgcgctcagtctcaagggcctcagctacgactacgtcgaggaggatctcatgaacaagagcgacctcctcctcagctccaacccggtgaacaagaaggtgcccgtgctcatccacaacggcaagcccatctgcgagtcgcagatcatcctgcagtacctcgacgaggcgttccccggcgccggcgccaccctcctccccgccgacccccacgaacgcgccgtcgctcgcttctgggccgccttcaacgacgacacgctgttggcggcgtcgcaggcggcgtcgtgggggaagacggaggaggagagggcggagggggagaagaaggtggtggaggcgctggagaggatggaggtcgggctgagggagtgctccaaggggaagcccttcttcggcggcgacaccgtcggctacctcgacgtcgtgctcggcggcttcctcgcgtgggtgcgcgccaccgacgtgatgcgtggcgtcaagcggttcgacccggccaccaccccgctgctggcggcgtgggccgagcgcttcgtcgagctggacgccgccaaggccgtcatgccggacatggacaagatgatcgagttcggcaaggtgctgcaggctcgcgccgccgccaccaactga

SEQ ID NO: 11971 - protein, 231 aa, Oryza sativa subsp. indica
MAGGGDELKLLGMWASPYVLRVKLALSLKGLSYDYVEEDLMNKSDLLLSSNPVNKKVPVLIHNGKPICESQIILQYLDEAFPGAGATLLPADPHERAVARFWAAFNDDTLLAASQAASWGKTEEERAEGEKKVVEALERMEVGLRECSKGKPFFGGDTVGYLDVVLGGFLAWVRATDVMRGVKRFDPATTPLLAAWAERFVELDAAKAVMPDMDKMIEFGKVLQARAAATN

SEQ ID NO: 11972 - DNA, 696 bp, Oryza sativa subsp. indica
  CDS (1)..(696)
atggctggagaaggagatgatcaactgaagcttctcggattgtgggtgagcccatacactcaccgagtgaagcttgcactcagcttcaagggcctgagctacgagtacgtcgaggaggacctcagcaacaagagcgagctgcttctcagcaccaacccggtgcacaagaaggtgcccgtgctcatccacaacggcaagcccatctgcgagtcgcaggtcatcgtgcagtacctcgacgaggagttccccaactccggcgtctcgctcctcccatctgactcctacgatcgcgccattgctcgtttctgggctgcctacatcaacgacaagctgatgccgtcgtggctgcagtcgtcgatgggcaagacggaggaggagagggcagaggcgctgaagcagacgttggaggcggtggcgaacctggagacggcgttcaaagagtgctccaaggggaagcccttcttcggcggcgacaccgtcgggtacctggacgtgtcgctcagcgccatgatcggatggatgcgcgccggcgaggctctgcacgggaggaggaccttcgatgccactagaagccctctcctgaacgcgtggatggagcgctttgccgcgctggacgccgccaaggccgccatgccggacaacaacaagctggtcgagttcgtcagggtgaggcgggctgccgctgcgaacaactga

SEQ ID NO: 11973 - protein, 231 aa, Oryza sativa subsp. indica
MAGEGDDQLKLLGLWVSPYTHRVKLALSFKGLSYEYVEEDLSNKSELLLSTNPVHKKVPVLIHNGKPICESQVIVQYLDEEFPNSGVSLLPSDSYDRAIARFWAAYINDKLMPSWLQSSMGKTEEERAEALKQTLEAVANLETAFKECSKGKPFFGGDTVGYLDVSLSAMIGWMRAGEALHGRRTFDATRSPLLNAWMERFAALDAAKAAMPDNNKLVEFVRVRRAAAANN

SEQ ID NO: 11974 - DNA, 714 bp, Oryza sativa subsp. indica
  CDS (1)..(714)
atggctgcagaagatgagctgaagctcctgggattttgggcgagcccctacgtttgcagagtgaagctcgcactccacctcaaaggcctgatctacgactatgtcgaggaggatgtcttcaccaacaagagcgagctcctcctcagctgcaacccggtgcacgcgaaggtccccgtgctcatccacaacggcaagcccatctgcgagtcgcaggtcatcgtacaatacatcgacgaggtcttccccgacgccggcgtcaccctcctccccgccgacccccatgatcgcgccgccgctcgcttctgggccgcctacatcgacgacaagctactgcccccgtgggtgcacgcgtacaggggaaagacggacgaggagaaggccgagaggatgaagcagacgcttgcggtggtcgacgcgctggagacggcgatggaggagtgctccaaggggaacgccttcttcggcggcgacaccgtcgggtacgtcgacgtcgcgctggggggcttgctctcctggttgcacgggaccgaggagctgtgtggcaccaagatcttggacgccgccaagaccccgctcctgtcggcgtgggcgcggcgcttcggcgagctggatgcagccaacgcggcgctgccggacgtcggcaggttggtcgagttttgcaagatgaggcatgtcgagctggaggctgcagaggcagcagctgcgcgcaactga

SEQ ID NO: 11975 - protein, 237 aa, Oryza sativa subsp. indica
MAAEDELKLLGFWASPYVCRVKLALHLKGLIYDYVEEDVFTNKSELLLSCNPVHAKVPVLIHNGKPICESQVIVQYIDEVFPDAGVTLLPADPHDRAAARFWAAYIDDKLLPPWVHAYRGKTDEEKAERMKQTLAVVDALETAMEECSKGNAFFGGDTVGYVDVALGGLLSWLHGTEELCGTKILDAAKTPLLSAWARRFGELDAANAALPDVGRLVEFCKMRHVELEAAEAAAARN

SEQ ID NO: 11976 - DNA, 693 bp, Oryza sativa subsp. indica
  CDS (1)..(693)
atggcagggcgaaacaaccacgagctcaagctgctgggcacatggccgagcccgttcgtcgtcagggtgaggctcgcgctcggcctcaagggcctgagctacgagtacgtcgagcaggacatcagggacaagagcgagctcctcgtcgtctccaacccggtgcacaagaaggtgcccgtgctcatccacggcggcaagcccgtctgcgagtcgcagatcatcgtgcagtacatcgacgaggcgttccccggcgccggcgcctccctcctcccctccgatccccacgaacgcgctgtcgcccgcttctgggccacctacatcgatgacgagtttgctacgaagttccgagcaatgggagaagcgaaggaggaggaggagaaggacgaggcggcggcgcaggtgttcgccgcgctggagaccttggaggaagccatgaaggggaaggtcttcttcggcggcgacagcgcggggtacgtggacgtggcgctcggtgggttcctggggtggatcaaggcggcggaggcgttggccggcgtcgcgttcctcgacggggcccggacgccactcctggccgcttgggcggcgcggttctccgctctggaggccgccaaggaggcgatacccagcgtcgagcggctgcgcgagtttcacgtggcgatgcacgccgccgccgccacggtcgccggaaattga

SEQ ID NO: 11977 - protein, 230 aa, Oryza sativa subsp. indica
MAGRNNHELKLLGTWPSPFVVRVRLALGLKGLSYEYVEQDIRDKSELLVVSNPVHKKVPVLIHGGKPVCESQIIVQYIDEAFPGAGASLLPSDPHERAVARFWATYIDDEFATKFRAMGEAKEEEEKDEAAAQVFAALETLEEAMKGKVFFGGDSAGYVDVALGGFLGWIKAAEALAGVAFLDGARTPLLAAWAARFSALEAAKEAIPSVERLREFHVAMHAAAATVAGN

SEQ ID NO: 11978 - DNA, 693 bp, Salicornia brachiata
  CDS (1)..(693)
atggggaaagaggtgaaagttctaggagcatggccaagcccgtttgtgatgaggccaagaatcgcacttcacatgaaatcagtagattatgaattcattgaagaaacaatgcaacctaaaagcgagcttctgttgaaatcaaaccctgttcataaaaaaatccctgttcttcttcacaatgataagcctgtttgtgaatctctcatcattgttcagtacattgatgaagccttttcttcatctgagctcccctctattctcccttctgatccttatgatcgcgccattcaacgcttctgggctgcttaccttgatgacaagtggttcccagcatttcaagctgtagccagggcaccaaccgaggaagcaagagccgcggggctggagccagtgaaagaaggattgttactgctggaggatgcctttgacaaatgcagcaaagggaagcccttctttaatggcgataagatcggatttcttgacattgccttggggagcttcttggggtgggtgcgtgtctctgagaagatgaacaacgtggagttgattagcgaggggaagacgcctaacctccatgcttggtcccagaggttctgtgctgatgatgctgtcaaggattatatgcctgatactgagaagcttatggggtttgccaagatgcttatggctaagtaccaagcagctgcttcctaa

SEQ ID NO: 11979 - protein, 230 aa, Salicornia brachiata
MGKEVKVLGAWPSPFVMRPRIALHMKSVDYEFIEETMQPKSELLLKSNPVHKKIPVLLHNDKPVCESLIIVQYIDEAFSSSELPSILPSDPYDRAIQRFWAAYLDDKWFPAFQAVARAPTEEARAAGLEPVKEGLLLLEDAFDKCSKGKPFFNGDKIGFLDIALGSFLGWVRVSEKMNNVELISEGKTPNLHAWSQRFCADDAVKDYMPDTEKLMGFAKMLMAKYQAAAS

SEQ ID NO: 11980 - DNA, 666 bp, Vitis vinifera
  CDS (1)..(666)
  misc_feature (112)..(112): y is t or c
  misc_feature (562)..(562): s is g or c
atggctgaagaagtaaagctttttggcacatgggcaagcccctttagccgcagaattgaagtggccctcaagctgaaaggagttcaatttgagtacatagaagagaacttgyccaataagagtcctgcgcttctcaagtataatccagttcacaagaaaatccctgtgcttgtacacaatggaaagccggttgcagagtcacttgtcatcctggagtacattgatgagacctggaaacataatcccatcttgcctacagacccttatgagaaggccatggcacggttctgggctaagtacatggatgacaagctctggccggcagcaacaaaggtcgtggtgagtaagggagaggagcaaaaggcagtgattgaagaaatccaggagcagctgaaaactctagagagtgaactgaaagagaagaaattctttggaggggagagtttgggatttgtagacatagctgcaaacattatagtttttcttcttgttgcccaagaagctctgggattaatggagatcctgaccgaagagaagtttcctgttttgcatgaatggtatsaaaggcttgtcgatgatgctgttttcaaggaatgtgtgccaccaagggagcgacatcttggcttcttcaaagctcggtttggatcctcgacggcttccaaatga

SEQ ID NO: 11981 - protein, 221 aa, Vitis vinifera
  misc_feature (38)..(38): The Xaa at location 38 stands for Pro, or Ser.
MAEEVKLFGTWASPFSRRIEVALKLKGVQFEYIEENLXNKSPALLKYNPVHKKIPVLVHNGKPVAESLVILEYIDETWKHNPILPTDPYEKAMARFWAKYMDDKLWPAATKVVVSKGEEQKAVIEEIQEQLKTLESELKEKKFFGGESLGFVDIAANIIVFLLVAQEALGLMEILTEEKFPVLHEWYZRLVDDAVFKECVPPRERHLGFFKARFGSSTASK

SEQ ID NO: 11982 - DNA, 663 bp, Vitis vinifera
  CDS (1)..(663)
  misc_feature (331)..(331): r is g or a
  misc_feature (362)..(362): r is g or a
  misc_feature (381)..(381): y is t or c
  misc_feature (417)..(417): r is g or a
  misc_feature (447)..(447): r is g or a
  misc_feature (525)..(525): w is a or t
atggctgaagaagtaaagctttttggcacatgggcaagcgtctttagccgcagaattgaagtggccctcaagctgaaaggagttcagtttgaatacatagaagagaatttgtccaataagagtcctgcgcttctcaagtataatccgcttcacaagaaaatcccagtgcttgtacacaacggaaagccagttgcagagtcacttgtcatcctggagtacatcgatgagacctggaaacacaaccccatcttgcctacagacccttatgagaaggccatggcacggttctgggctaagtacatggatgacaagctcttgccggcagcaataraggttgcgatgagtaagggagaggagcaaargggagtgattgaagaaatycagaagcagcttaaaactctagagagtgagctgaargagaagaaattctttggaggggagagtttrggattcgtggacatagctgcaaacactatagtttggcttgttgttgcccaagaagctctgggaatggagatcctgacwgaagagaagtttcctgttttgcatggatggtatcaaaggcttgttgacgatgctgttttcaaggaatgtatgccgccaagggagcaacatcttagctttgtcaaagttcggtttggatcctcgaccccctccaaatga

SEQ ID NO: 11983 - protein, 220 aa, Vitis vinifera
  misc_feature (111)..(111): The Xaa at location 111 stands for Glu, or Lys.
  misc_feature (121)..(121): The Xaa at location 121 stands for Arg, or Lys.
MAEEVKLFGTWASVFSRRIEVALKLKGVQFEYIEENLSNKSPALLKYNPLHKKIPVLVHNGKPVAESLVILEYIDETWKHNPILPTDPYEKAMARFWAKYMDDKLLPAAIXVAMSKGEEQXGVIEEIQKQLKTLESELKEKKFFGGESLGFVDIAANTIVWLVVAQEALGMEILTEEKFPVLHGWYQRLVDDAVFKECMPPREQHLSFVKVRFGSSTPSK

SEQ ID NO: 11984 - DNA, 666 bp, Vitis vinifera
  CDS (1)..(666)
atggcaaacagtgaccacatagttcttttagattactccgcaagcccttttgcaatgagggtgcgactggctttggcagccaaaggggtcgagtatctgattaaggaagaagacttgacccaaagtaaaagctctctactcttgaaagtgaatccagttcatcagaaaattccagttctaattcacaatgggaagcccgtatgcgagtccttgataatagtggaatacattgatgaggtttggaaggatagatgtcgtcttctgccggctgacccttaccaaagagcaaaagccaagttctgggccgacttcattgacaaaatggtatacccatcctgttataatgtgtgggcagcaaacggagaagtgcaagaggctggcaagaaggaattcatagacaggattaagatgttagaaggagagcttaagtcgaacccttactttgggggtgagactttgggttttctggacattgtttttctcccatcgtactactggttccatacattcgaaacttttgggaagttcagcatagaagcggagtgtccaaagctggtggcatggggtaagaggtgcatggaggaggagttcgtgtacacctctctccctcacccacataaggtctatgacttggtggtggattacaggaagaaaatggggatatag

SEQ ID NO: 11985 - protein, 221 aa, Vitis vinifera
MANSDHIVLLDYSASPFAMRVRLALAAKGVEYLIKEEDLTQSKSSLLLKVNPVHQKIPVLIHNGKPVCESLIIVEYIDEVWKDRCRLLPADPYQRAKAKFWADFIDKMVYPSCYNVWAANGEVQEAGKKEFIDRIKMLEGELKSNPYFGGETLGFLDIVFLPSYYWFHTFETFGKFSIEAECPKLVAWGKRCMEEEFVYTSLPHPHKVYDLVVDYRKKMGI

SEQ ID NO: 11986 - DNA, 687 bp, Vitis vinifera
  CDS (1)..(687)
atggcagaagaagtgaaacttttcagaacatggtcaagtccttttgctctcagggctgtctgggctctcaaaatcaaaggcatagattatgaaaccatatttgaagatctctccaacaagagccctttacttctccaatataatcctgtcttcaaaaaggttccagtgcttgtacacaatggaaaacccatcgctgaatcgcttgtcattctggaatacattgatgagacatggaagcatgctcccttattgcctgaagaccctcatgagagagccacggcacgtttctgggcaaaatttggcgaagataaggttttgacatcaatttggagcgtctttatcaagcaagggaaagagcaggaggaagctatggttccagccctggagaacctcaagttcctggaagaagagttgaagggaaagaagttctttggcggagagaccatcgggtttgttgaccttgccttgggttggcttggtaacttgatcagcatattggaagagattgttgggctgaaagttgtggatggggagaagtttccattgttgtccgcatggatgcaagattttgcagatgctccaatcattaaagacaactggccacctcgagacagaatgattgtcaaattccaagcccttcgtgatgccaccattgcagcagcggcagcagcagcagcatcaaaatga

SEQ ID NO: 11987 - protein, 228 aa, Vitis vinifera
MAEEVKLFRTWSSPFALRAVWALKIKGIDYETIFEDLSNKSPLLLQYNPVFKKVPVLVHNGKPIAESLVILEYIDETWKHAPLLPEDPHERATARFWAKFGEDKVLTSIWSVFIKQGKEQEEAMVPALENLKFLEEELKGKKFFGGETIGFVDLALGWLGNLISILEEIVGLKVVDGEKFPLLSAWMQDFADAPIIKDNWPPRDRMIVKFQALRDATIAAAAAAAASK

SEQ ID NO: 11988 - DNA, 702 bp, Vitis vinifera
  CDS (1)..(702)
  misc_feature (604)..(604): r is g or a
atggctacgagcgacgtgaagctattgggtgcgtggccaagcccattcgccttgcgagtccacatcgcccttaacatcaaatccattgactacgagtgtctcgaagagaacctgctagccaagagccagctcctcctccaatccaacccagtacacaagaaagtcccagttctcatccaccatgacaaacccatatgcgagtccctcgccattgttcagtacatcgacgaggcttggtcctccgctccctccatcctcccctcagacccttacgaccgcgctgttgcccgcttctgggctgcttatattgacgacaagtggtttccatggctgaatggggtagcgaatgctcaaggagcggaggcaaaaaaggcggcgttggatcaagtacgtgaagggttagtggtactggaggaggcgtttgggaagtgcagcaaaggtaaggatttcttcagcggggatcgaattggatacgttgatattgctctagggtgcttcttggggtgggtgtatgtggcggagaagaggaacgacgtaaagctgcttgttgaagacaagatgcctggtctggctgcatgggcaaacaagttttgtgaggatggtrctgtgaaggatgtgatgccagacaaagatgagctattggagtttgctaacatgatcctcgaagccagggccaaactcaatgcctcttctaataattaa

SEQ ID NO: 11989 - protein, 233 aa, Vitis vinifera
  misc_feature (202)..(202): The Xaa at location 202 stands for Ala, or Thr.
MATSDVKLLGAWPSPFALRVHIALNIKSIDYECLEENLLAKSQLLLQSNPVHKKVPVLIHHDKPICESLAIVQYIDEAWSSAPSILPSDPYDRAVARFWAAYIDDKWFPWLNGVANAQGAEAKKAALDQVREGLVVLEEAFGKCSKGKDFFSGDRIGYVDIALGCFLGWVYVAEKRNDVKLLVEDKMPGLAAWANKFCEDGXVKDVMPDKDELLEFANMILEARAKLNASSNN

SEQ ID NO: 11990 - DNA, 660 bp, Vitis vinifera
  CDS (1)..(660)
atggcagacgagattatcttgttggatttctggcctagcatgtttggtatgagggtcagacttgccctggcagagaagggcctcaagtatgaatataaagaggaggaccttaggaacaagagccctctgctccttgagatgaatccagttcataagaaaatcccggttctgatccacaatggaaagcccatttgtgagtctctgataatagttcagtatattgatgaggtttggcacgataaatctccgcttttgcctagtgacccataccagagagctcaggccaggttctgggcggactacgtagacaagaagctctatgaacttggaaggaagatatggtcaaccaaaggagaagagcaggaaacagccaagaaggaattcatagagtgcctcaagcttctggaaggagagcttggagagaagccttacttcggcggtgaaaaaattgggtttgtggatgtggctctggtgaccttctcttgctggtttcaagcatatgagagctttggaaacttcagcatagaggcggagtgtcccaagttgatagcttggaccaagaggtgcatggaaaaggagagcgtgtcgtcttctctggaagacccacacaaggtccatggctttgttatggggatgagaaagaagcttggcatagaataa

SEQ ID NO: 11991 - protein, 219 aa, Vitis vinifera
MADEIILLDFWPSMFGMRVRLALAEKGLKYEYKEEDLRNKSPLLLEMNPVHKKIPVLIHNGKPICESLIIVQYIDEVWHDKSPLLPSDPYQRAQARFWADYVDKKLYELGRKIWSTKGEEQETAKKEFIECLKLLEGELGEKPYFGGEKIGFVDVALVTFSCWFQAYESFGNFSIEAECPKLIAWTKRCMEKESVSSSLEDPHKVHGFVMGMRKKLGIE

SEQ ID NO: 11992 - DNA, 678 bp, Vitis vinifera
  CDS (1)..(678)
  misc_feature (625)..(625): k is g or t
atggcagaagaattgaaacttttcagaacatggtcaagtgtttttgctctgaggattgtttgggctctcaaaatcaaaggcgtagagtatgaaaccatatttgaagatctctccaacaagagcccttcacttctccagtataatcctgtccacaaaaaggttccagttcttgtacacaatggcaaacccatcgctgaatcgcttgtcattcttgaatacatcgatgagacatggagggaaactcccttgttgcctgaagacccttacgagagagccatggctcgcttctgggccaaatttggtgacgataaggttttgacatcaatagtttggggtgtcttcttcaaggaagggaaagagcaggaggaagctatgcttgaagccatggagcatctccagttcttggaagacgagctgaaggggaagaggttctttgggggagagaggatcgggtttgttgatcttgccttgggatggcttgctaacatgatcagcatatttgaagaggtagctggcctgaaaatggtggatgaggataagtttccattgctggcggcgtggatgcaagagtttgcagattctcccataatcaaagacaactggccacctcgagacaagatgattkccaagttccaggcccttcgtgatgccaaacttgcagcagcagcatctaaatga

SEQ ID NO: 11993 - protein, 225 aa, Vitis vinifera
  misc_feature (209)..(209): The Xaa at location 209 stands for Ala, or Ser.
MAEELKLFRTWSSVFALRIVWALKIKGVEYETIFEDLSNKSPSLLQYNPVHKKVPVLVHNGKPIAESLVILEYIDETWRETPLLPEDPYERAMARFWAKFGDDKVLTSIVWGVFFKEGKEQEEAMLEAMEHLQFLEDELKGKRFFGGERIGFVDLALGWLANMISIFEEVAGLKMVDEDKFPLLAAWMQEFADSPIIKDNWPPRDKMIXKFQALRDAKLAAAASK

SEQ ID NO: 11994 - DNA, 684 bp, Vitis vinifera
  CDS (1)..(684)
  misc_feature (558)..(558): k is g or t
atggagaagcaaagtgaagtgaagttgtttgggacatgggctagtggctactgcaccagaattgagttggctctcaaactcaagggcataccctacgagtatgtagaggaagacttacctaacaagagcgacttgctaattcaccacaatcctgtgcacaagaaggtccctgtgctcgtccacaatgggaaagccattgcagaatcgcttgtcatccttgaatacattgatgagcactggaaccacactcccaaattgttgccagcggatccatatgagagagccaaagttagattctgggccaacttttatgatcagaagtttggtccaagtatttacaacatcatgacttccaaaggcaaagagcaagaaaaagccatagaggactcccttgaggtgcttaaggtgtttgaagaaggcatagagagagatttcccagcaaaatctccattcttgaatggaggcaccttgggatttctcgatattgtggtgggatcaagttcttgcaatttcaaagcttttaatgaggtatttgctgtggttttcgacccagagaakaaccctgcattctgctcttgggtgaccgctatgaaagaatgcccactgatgaaggagaccctcccacctcatgaccgtctggttgccaagatatccaaattatttctgcagccacctaaagcttga

SEQ ID NO: 11995 - protein, 227 aa, Vitis vinifera
  misc_feature (186)..(186): The Xaa at location 186 stands for Asn, or Lys.
MEKQSEVKLFGTWASGYCTRIELALKLKGIPYEYVEEDLPNKSDLLIHHNPVHKKVPVLVHNGKAIAESLVILEYIDEHWNHTPKLLPADPYERAKVRFWANFYDQKFGPSIYNIMTSKGKEQEKAIEDSLEVLKVFEEGIERDFPAKSPFLNGGTLGFLDIVVGSSSCNFKAFNEVFAVVFDPEXNPAFCSWVTAMKECPLMKETLPPHDRLVAKISKLFLQPPKA

SEQ ID NO: 11996 - DNA, 699 bp, Vitis vinifera
  CDS (1)..(699)
atggctgagagtgaaatcaagcttctgggtgcatggccaagcccatttgtgatgcgagctcggatcgcccttaacatcaagtccgtagactacgagttccatcaagagaaactgggatccaagagtcagctcctcctcgagtccaacccagtttacaagaaaatcccagttctcatccacgatcagaagcccatatgcgagtccctcatcatcgttcagtacgtcgacgaggcttggtcttccggaccctccatcctcccttccgacccttatgaccgcgctattgcccgcttctgggctgcctatattgacgacaagtggtttccatcgctgagtggattagcgaaggctcaaggagaggaggcaaagaaggcggcgatggatcaagtgcttgaagggttcctgttgttggaggaggcgtttgggaagtgtagcaaagggaaggatttctttggcggggatcgaattgggtaccttgatattgcttggggttgcttcttggggtggctgaggctgtcggagaagatgaatggtgtgaaactgcttgatgcagccaagacgcctggtctggttggatgggcggacaagttttgcggggacgatgccgtgaaggatgtgatgccggagactgataagcttgcggagttcgctaagattcttttccaggccaaggccaatgctcctccgccggctaattaa

SEQ ID NO: 11997 - protein, 232 aa, Vitis vinifera
MAESEIKLLGAWPSPFVMRARIALNIKSVDYEFHQEKLGSKSQLLLESNPVYKKIPVLIHDQKPICESLIIVQYVDEAWSSGPSILPSDPYDRAIARFWAAYIDDKWFPSLSGLAKAQGEEAKKAAMDQVLEGFLLLEEAFGKCSKGKDFFGGDRIGYLDIAWGCFLGWLRLSEKMNGVKLLDAAKTPGLVGWADKFCGDDAVKDVMPETDKLAEFAKILFQAKANAPPPAN

SEQ ID NO: 11998 - DNA, 666 bp, Vitis vinifera
  CDS (1)..(666)
atggctgaccaagtacagctgtttggcgtttggggaagcttctttggccgcagagtcgaagtggccctgaggctgaaaggagttcagtttgaatacgttgaagaggacttgtacaataagagtccttcgcttctcaagtataatccagttcacaagaaaattcctgtgctgctacacaacggaaacccacttgcagagtcgcttgtgatcttagagtacattgatgagacctggaaacacaaccccatcttccctaaagacccttacgaaagggccagggcaaggttctgggctaagttcatagacgagaagctgtggccggtggtgagaaaggctctggggagtaaggaagagaaggagcaaagggaagccattggagaaactcatgagcacctggaaaccctagagagtgagctgaaagagaagaagttctttggaggggagagtaggggatatttggacatagctgcaatggttataatttggcttggaatcgcccaagaagctctgggagtggagttcataccaaaagagaagtttcccaggttgcatgaatggcagcaaaggcttgttgaggatgctgtcttcaaggaatgtgtgccaccaagggagaagcttggtgccttcttcaaagcccggtttggatcctccgctgcctccaaatga

SEQ ID NO: 11999 - protein, 221 aa, Vitis vinifera
MADQVQLFGVWGSFFGRRVEVALRLKGVQFEYVEEDLYNKSPSLLKYNPVHKKIPVLLHNGNPLAESLVILEYIDETWKHNPIFPKDPYERARARFWAKFIDEKLWPVVRKALGSKEEKEQREAIGETHEHLETLESELKEKKFFGGESRGYLDIAAMVIIWLGIAQEALGVEFIPKEKFPRLHEWQQRLVEDAVFKECVPPREKLGAFFKARFGSSAASK

SEQ ID NO: 12000 - DNA, 651 bp, Citrus sinensis
  CDS (1)..(651)
atggcggacgaagtggttctgttggatttctggcccagcatgttcgggatgagggtcaggattgctctggcggagaaaggcgtcaagtatgaatacaaggaagaggacttgaagaacaagagccccctgcttctgcagatgaacccggttcacaagaagatcccggttctcatccacaacggcagaccggtctgtgagtcatccatcattgttcagtacattgatgaagtgtggaaggacaaggctccattgcttccctctgatcgctaccagagagctcaagctaggttctgggtagatttcattgacaagaagatgtatgatgcttcgacgaagacatggaccacagagggagaagagcaggaggctgctaagaaggagttctttgaagctctgaagaccttggaagggcagcttggagacaagcctttcttcggaggagacaattttgggtatttggatttgagtttgatcccattctattacacatatgagacatttggaaagtccagcattgaggctgagtgccccaagttcaaagcttgggtgaagagatgcttgcagagggagactattgccaaggcacttcctgatgagaagaaagtgcttgaacatgcttcagggatgaggaaaaatttagtattggagtag

SEQ ID NO: 12001 - protein, 216 aa, Citrus sinensis
MADEVVLLDFWPSMFGMRVRIALAEKGVKYEYKEEDLKNKSPLLLQMNPVHKKIPVLIHNGRPVCESSIIVQYIDEVWKDKAPLLPSDRYQRAQARFWVDFIDKKMYDASTKTWTTEGEEQEAAKKEFFEALKTLEGQLGDKPFFGGDNFGYLDLSLIPFYYTYETFGKSSIEAECPKFKAWVKRCLQRETIAKALPDEKKVLEHASGMRKNLVLE

SEQ ID NO: 12002 - DNA, 654 bp, Solanum lycopersicum
  CDS (1)..(654)
atggctgatgttaagttgattggtttatggtatagtccttttagtagaagagttgaatgggctctaaagattaagggtgtggaatatgaatatatagaagatgatctacataataaaagccttttacttcttcaatctaatccaattcacaaggcagttcctgtgctcattcacaatggcaagcccctttgtgaatcaagtgtcattctcgaatacatcgacgagacatttgaaggcccttccatcttgcctaaagaaccttacgatcgatctttagctcgtttctgggctaaattcttcgatgataaggggctagcaataaggaaaagtatatttttcaaaggagaggagcaagagaaagctaaagaggaagtttatgatatgttgaaagttcttgataatgagctgaaaaacaagaagatttttgttggtgaaaaatttggatttgttgatattgttgcaaatgctgcagccctttggctaggagttcttgaagaagcatctggagttgttttggtgacaagagaaaaatatccaaatttttgtgattggagagacgaatattgtacgcaaaacaagaaatatttacctcctagagatgaattgcttgcccattatcaagtttacattcaacgtgttactacttcaaaatga

SEQ ID NO: 12003 - protein, 217 aa, Solanum lycopersicum
MADVKLIGLWYSPFSRRVEWALKIKGVEYEYIEDDLHNKSLLLLQSNPIHKAVPVLIHNGKPLCESSVILEYIDETFEGPSILPKEPYDRSLARFWAKFFDDKGLAIRKSIFFKGEEQEKAKEEVYDMLKVLDNELKNKKIFVGEKFGFVDIVANAAALWLGVLEEASGVVLVTREKYPNFCDWRDEYCTQNKKYLPPRDELLAHYQVYIQRVTTSK

SEQ ID NO: 12004 - DNA, 669 bp, Hordeum vulgare
  CDS (1)..(669)
atggcgggcgagaagggcctggtgctgctggacttttgggtgagcccgttcgggcagcgcgtccgcatcgcgctggccgagaagggcctgccctacgagtacgtggaggaggatctcatcgccggcaagagcgaccgcctcttccgctccaacccggtccacaagaagatcccagtgctcctccacgacggccgccccgtcaacgagtcactcatcatcctcaactacctcgacgacgccttcccggacgccccggccctcctcccctccgacccctacgcgcgcgcgcaggcccgcttctgggccgactacgtcgacaagaaggtctacgactgcggcacccggctctggaaggtcaagggagagccgcaggcgcaggcgcgcgccgagatgctggaggtcctcaagaccctcgacggcgcgctcggggacaagcccttcttcggcggcgacaagttcgggttcgtcgacgccgccttcgcgcccttcaccgcatggttccacagctacgagaggtacggcgagttcagcctggcggaggtggcgcccaagatcgcggcgtgggccaagcggtgcggcgagcgggagagcgtcgccaagagcctctactcgcccgagaaggtctacgacttcatcggcctgcttaagaagaggtacggcatcgagtag

SEQ ID NO: 12005 - protein, 222 aa, Hordeum vulgare
MAGEKGLVLLDFWVSPFGQRVRIALAEKGLPYEYVEEDLIAGKSDRLFRSNPVHKKIPVLLHDGRPVNESLIILNYLDDAFPDAPALLPSDPYARAQARFWADYVDKKVYDCGTRLWKVKGEPQAQARAEMLEVLKTLDGALGDKPFFGGDKFGFVDAAFAPFTAWFHSYERYGEFSLAEVAPKIAAWAKRCGERESVAKSLYSPEKVYDFIGLLKKRYGIE

SEQ ID NO: 12006 - DNA, 675 bp, Arabidopsis lyrata subsp. lyrata
  CDS (1)..(675)
atggcggagaaagaccaagtgaagcttttgggaatatgggcgagcccttttagccgtcgggtcgagatggctctcaaactcaaaggcataccgtacgaatacgtggaagaaatattggagaacaaaagccctttgcttcttgctcttaaccctattcacaagaaaatccctgttcttgtccacaatggtaaaaccattcttgagtctcatgtgattcttgaatacatcgatgagacttggccacacaatccaattctccctcaagatccttacgaaagatccaaagctagattctttgctaaactcgtcgatgaacagattatgaatgtggggtttgtatcaatggcaagagcagacgagaaaggaagagaagttttagccgagcaggcacgagaactgattatgtatcttgagaaagaacttgtcggaaaagattacttcggtggcaagactgtcggattcttggactttgtcgccggaagtttgattccgttttgtttggagagaggttgggaaggaataggtttggaagtgattacagaggagaagtttccagaattcaagagatgggttaagaatttggagaaggttgagattgtgaaagattgtgttccaccaagagagaaacatgtagaacacatgaactatatggcagagagagtgagatcttcttaa

SEQ ID NO: 12007 - protein, 224 aa, Arabidopsis lyrata subsp. lyrata
MAEKDQVKLLGIWASPFSRRVEMALKLKGIPYEYVEEILENKSPLLLALNPIHKKIPVLVHNGKTILESHVILEYIDETWPHNPILPQDPYERSKARFFAKLVDEQIMNVGFVSMARADEKGREVLAEQARELIMYLEKELVGKDYFGGKTVGFLDFVAGSLIPFCLERGWEGIGLEVITEEKFPEFKRWVKNLEKVEIVKDCVPPREKHVEHMNYMAERVRSS

SEQ ID NO: 12008 - DNA, 675 bp, Cleome spinosa
  CDS (1)..(675)
atggcggaggaggtgaagctgctggggatgtgggcgagccttttcagccgtcggatcgatatggccctcagaatcaaaggcgttccgtacgagtacttggagcaagacttgaccaacaagagcccccttcttctgcagatgaatccggttcacaagaaagttccggttctcgtccacaacggtaaatccattgcagagtcacttgtcattcttgaatacatcgaccaaacatggagtcacaatcccattcttccccaagacccgtacgaaagagcaatggctcggttctgggccagattcatcgacgaaaagattgtgcctacaggaatcgagatcgcgattgagaaagacgaagaagcgagagaagctgcaatagagaaggcgagggagttgatgaagtatttggagaaagaactcaaagggaaagacttttttggaggaaaaacattgggattggtagatatagcggcgatcttgatacccttttggctgatgaggttcgacgccattgtcggaatcggagtcgatattcttgcggaagataagttcccggagatccacaggtgggtgaagaggttgtcggaaacggatgtcgtgaaggaatgcatccctcccaaagacgagcacgtcgcttacttgaaggcgcttgtggaccgaatcaaatcggctcgttga

SEQ ID NO: 12009 - protein, 224 aa, Cleome spinosa
MAEEVKLLGMWASLFSRRIDMALRIKGVPYEYLEQDLTNKSPLLLQMNPVHKKVPVLVHNGKSIAESLVILEYIDQTWSHNPILPQDPYERAMARFWARFIDEKIVPTGIEIAIEKDEEAREAAIEKARELMKYLEKELKGKDFFGGKTLGLVDIAAILIPFWLMRFDAIVGIGVDILAEDKFPEIHRWVKRLSETDVVKECIPPKDEHVAYLKALVDRIKSAR

SEQ ID NO: 12010 - DNA, 666 bp, Cleome spinosa
  CDS (1)..(666)
atggcggagaaggaagaagtgaagctgctgagtttgtgggcgctcccgttcggacatcgggtcgagatcgctctcaaactcaaaggagttccgtacgattacttggaacaagatttgagaaacaagagccctctgcttctgcaaatgaatcctgttcacaagcaggttcccgtcttcgtccacaacggtcgacccatcgccgagtcgctcgtgatcctcgagtacatcgacgagacttggactcagtatccgatcctccctcgagatccctacgacagagccatggctcgattctgggccaagttcgtcgacgagaagatcgtatccgcggggcttaaatccgtggtgaaagcagagaagggcagagaagcagccattgaagaaacccagcagctgatgaagcttctcgagaaggaattggtcggaaaagacttcttcggaggcgagagggtcgggttcttggaccttgtagccggatccatgatcccaatgtctctgatgatgttgtgggaaggtatgggagttgatgtgattccaaaggagaagttcccagaattccatagatggatgaacaatctgcttgaggtcgaggccgtgaaggaatgtctcccgccgagagagaagcatattgaacatatgatggaatacgctgagagatacaaataa

SEQ ID NO: 12011 - protein, 221 aa, Cleome spinosa
MAEKEEVKLLSLWALPFGHRVEIALKLKGVPYDYLEQDLRNKSPLLLQMNPVHKQVPVFVHNGRPIAESLVILEYIDETWTQYPILPRDPYDRAMARFWAKFVDEKIVSAGLKSVVKAEKGREAAIEETQQLMKLLEKELVGKDFFGGERVGFLDLVAGSMIPMSLMMLWEGMGVDVIPKEKFPEFHRWMNNLLEVEAVKECLPPREKHIEHMMEYAERYK

SEQ ID NO: 12012 - DNA, 675 bp, Capsella rubella
  CDS (1)..(675)
atggagaagaaagaagagagtgtgaagcttttagggttttggataagcccttttagtcgtagggtcgagatggctctcaaacttaaaggcgtaccatacgagtacttggaggaagacttacccaaaaagagcactttgcttcttgagcttaatccagttcacaagaaggttccggttcttgtccacaatgataaaatcttgtccgagtcacatgtcatcctcgaatacatcgaccaaacatggactactaatccaattctacctcaagatccttacgagaaagccatggctcgattttgggccaagttcatcgatgaacagatcctaccagttgggttcatgcccctagtaaaagcagagaagaggattgatgttgctattgaagagatccgaggactgattacgtttcttgagaaggaagttactggaaaagatttcttcggcggcaagacaatcggattcttggacatggttgtaggaagtatgatcccgttttgtctggctcgggcttgggaatgtatgggaattgatatgattccaaaggagacatttccagagttaaacagatggatcaagaagttgaatgaagttgagattgtgaggcaatgtatacctccaaaagaaaaacatattgaacgcatgaacaaaattattgagagagttaagtcttcctaa

SEQ ID NO: 12013 - protein, 224 aa, Capsella rubella
MEKKEESVKLLGFWISPFSRRVEMALKLKGVPYEYLEEDLPKKSTLLLELNPVHKKVPVLVHNDKILSESHVILEYIDQTWTTNPILPQDPYEKAMARFWAKFIDEQILPVGFMPLVKAEKRIDVAIEEIRGLITFLEKEVTGKDFFGGKTIGFLDMVVGSMIPFCLARAWECMGIDMIPKETFPELNRWIKKLNEVEIVRQCIPPKEKHIERMNKIIERVKSS

SEQ ID NO: 12014 - DNA, 675 bp, Capsella rubella
  CDS (1)..(675)
atgcccgagaatgaagaagtgaagcttttggggctatgggcgagcccttttagccgtcggatcgagatggctctcaaactcaaaggtataaagtacgattacgtggaagagaacttggcgaacaaaagctctttgcttcttgctctaaaccctattcacaagaaggtgcctgttcttgttcataatggtaaaactattcttgagtctcatgtgattcttgaatacatcgatgagacttggccacataatccaattctccctcaagatccttacgaaagatccaaagctcggttctttgctaaactcattgatgaacagattatgaaagtgggttttatatcaatggcaagagcggatgagaaaggaagagaagttttggccgaggaggcaagagaactgattatgtatcttgagaaagaacttgtcggaaaagattacttcggaggcaagagtgtcggattcttggatttggtcgcgggaagtatgataccgttttgtttggagagaagttgggaaggaataggactggaagtgaccacagaagagaagtttccagaatacaagagatggattaagaatcttgaggaggttgagattgtgagagattgtattcctccaagagagaaacatgttgaacacatgaacaatgtgacacagagagtaagatcttcttaa

SEQ ID NO: 12015 - protein, 224 aa, Capsella rubella
MPENEEVKLLGLWASPFSRRIEMALKLKGIKYDYVEENLANKSSLLLALNPIHKKVPVLVHNGKTILESHVILEYIDETWPHNPILPQDPYERSKARFFAKLIDEQIMKVGFISMARADEKGREVLAEEARELIMYLEKELVGKDYFGGKSVGFLDLVAGSMIPFCLERSWEGIGLEVTTEEKFPEYKRWIKNLEEVEIVRDCIPPREKHVEHMNNVTQRVRSS

SEQ ID NO: 12016 - DNA, 675 bp, Capsella rubella
  CDS (1)..(675)
atggccgagaatgaagaagtgaagcttttggggatatgggcgagccctttcagccgacggatcgagatggctctcaaactcaaaggcataaagtacgattacgtggaagaaaagttggagaacaaaagctctttgcttcttgctctaaaccctattcacaagaaggtacctgttcttgttcataatggtaaaactattcttgagtctcatgtgattcttgaatacatcgatgagacttggccacacaatccaattctccctcaagatccttacgaaagatccaaagctcgcttctttgctaaactcattgatgaacagattatgagtgttggttttgtatcaatggcgaaagcggatgagaaaggaagagatgttttggctgagcaggcaagagaactgattatgtatcttgagaaagaacttgtcggaaaagattacttcggaggcaagagtgtcggattcttggacttggtcgccggaagtctgataccgttttgtttggagagaggttgggaaggaataggactggaagtgaccacagaagagaagtttccagaatacaagagatgggtcaagaatcttgagaaggttgagattgtgagagattgtattccaccgagaaaggaacatgttgaacacatgaactatatggcacagagagttaggtcttcttaa

SEQ ID NO: 12017 - protein, 224 aa, Capsella rubella
MAENEEVKLLGIWASPFSRRIEMALKLKGIKYDYVEEKLENKSSLLLALNPIHKKVPVLVHNGKTILESHVILEYIDETWPHNPILPQDPYERSKARFFAKLIDEQIMSVGFVSMAKADEKGRDVLAEQARELIMYLEKELVGKDYFGGKSVGFLDLVAGSLIPFCLERGWEGIGLEVTTEEKFPEYKRWVKNLEKVEIVRDCIPPRKEHVEHMNYMAQRVRSS

SEQ ID NO: 12018 - DNA, 675 bp, Arabidopsis cebennensis
  CDS (1)..(675)
atggcggagaaagaccaagtgaagcttttgggaatatgggcgagcccttttagccgtcgggtcgagatggctctcaaactcaaaggcataccgtacgattacgtagaagaaatattggagaacaaaagccctttgcttcttgctcttaaccctattcacaagaaagtccctgttcttgtccataatggtaaaaccattcttgagtctcatgtgattcttgaatacatcgatgagacttggccacacaatccaattctccctcaagatccttacgaaagatccaaagctcgtttctttgctaaactcgtcgatgaacagcttatgaatgtggggtttgtatcaatggcaagagcagacgagaaaggaagagaagttttggccgagcaggcaagaaaactgattatgtatcttgagaaagaacttgtcggaaaagattacttcggtggccagactgtcggattcttggactttgtggccggaagtttgattccgttttgtttggagagaggttgggaaggaataggattggaagtgattacagaggagaagtttccagaattcaagagatgggttaagaatttggagaaggttgagattgttaaagattgtgttccaccaagagagaaacatgtagaacacatgaactatatggcagagagagtgagatcttcttaa

SEQ ID NO: 12019 - protein, 224 aa, Arabidopsis cebennensis
MAEKDQVKLLGIWASPFSRRVEMALKLKGIPYDYVEEILENKSPLLLALNPIHKKVPVLVHNGKTILESHVILEYIDETWPHNPILPQDPYERSKARFFAKLVDEQLMNVGFVSMARADEKGREVLAEQARKLIMYLEKELVGKDYFGGQTVGFLDFVAGSLIPFCLERGWEGIGLEVITEEKFPEFKRWVKNLEKVEIVKDCVPPREKHVEHMNYMAERVRSS

SEQ ID NO: 12020 - DNA, 675 bp, Arabidopsis cebennensis
  CDS (1)..(675)
atggcggagaaagaagaggatttgaaacttctaggtttttgggcaagcccttttagtcgtagagtcgagatggctctcaaactcaaaggcgtgccttacgagtacttggagcaagatatagtgaacaagagccctttgcttctccagcttaatccagtttacaagaaggttccggttcttgtccacaaaggtaaagtattatccgagtcacatgtgatcctcgaatacatcgaccaagtatgggaaaacaatccaattcttcctcaagatccttacgagaaagccatggctttattctgggccaagttcgttgatgaacaggttggaccagtagcctttaggtctgtggcaaaagcagagaagggaaaagaggttgcaatcaaggaggctcaagaactctttatgtttcttgagaaggaaatcactggaaaagatttcttcggtggcaaaacaattggattcttggacttggtcgcaggaagtatgatcccgttttgtcttgctcgaggttgggaaggtatgggaattgatatgattccagaggaaaagtttccagaactaaacagatggatcaagaatttgaaagaaattgagatcgtgcgagaatgtagtcctcctagagagaaacaaattgagcacatgaagaaagttgtagaaagaatcaaatcggcctaa

SEQ ID NO: 12021 - protein, 224 aa, Arabidopsis cebennensis
MAEKEEDLKLLGFWASPFSRRVEMALKLKGVPYEYLEQDIVNKSPLLLQLNPVYKKVPVLVHKGKVLSESHVILEYIDQVWENNPILPQDPYEKAMALFWAKFVDEQVGPVAFRSVAKAEKGKEVAIKEAQELFMFLEKEITGKDFFGGKTIGFLDLVAGSMIPFCLARGWEGMGIDMIPEEKFPELNRWIKNLKEIEIVRECSPPREKQIEHMKKVVERIKSA

SEQ ID NO: 12022 - DNA, 705 bp, Elaeis guineensis var. tenera
  CDS (1)..(705)
atggcaggaggtcaggaattgaagttgttggggttgtgggagagcccctttgtagtgaggtcaggaattgctctaaacctaaaaaggctgggctacgagttcttagaggaggtgccggggactaagagcgagctcctcctcaagtccaaccctgtctacaagaagatgccagtattgattcataatggcaagcccatctgtgagtccatgatcatcgttcagtatatcgacaaggtctgggctgcagcgggaccttccatcctaccctcagatccccatgaccgtgccattgctcgcttttgggccgtatacatcgatgacaagtggttcccttctctgctgaaaatcgtaagagcaaaggctgatgaagaagaagagaaggccgaagcagcagagcaggtgattgccgggctccagttgttggaagaggctttcgagaaatgctccaaaggcaaggacttctttggcgggcagactgttgggtacatagacattgcgttggggtgctacttggggtggctcaaggcggcagaaaagatggccggcatcaaactgctagacaaggaaaagatacctcttttggtgggatgggcagaacgtttctgctcggccgatgctgtgaaggaggtgatgccggaggccgacaagctggtagagttcgccaagttgcttcggggcacgcagaatgttgcggcccccaactga

SEQ ID NO: 12023 - protein, 234 aa, Elaeis guineensis var. tenera
MAGGQELKLLGLWESPFVVRSGIALNLKRLGYEFLEEVPGTKSELLLKSNPVYKKMPVLIHNGKPICESMIIVQYIDKVWAAAGPSILPSDPHDRAIARFWAVYIDDKWFPSLLKIVRAKADEEEEKAEAAEQVIAGLQLLEEAFEKCSKGKDFFGGQTVGYIDIALGCYLGWLKAAEKMAGIKLLDKEKIPLLVGWAERFCSADAVKEVMPEADKLVEFAKLLRGTQNVAAPN

SEQ ID NO: 12024 - DNA, 741 bp, Elaeis guineensis var. tenera
  CDS (1)..(741)
atggcaggagatcaggaattgaagttgttggggttgtgggggagcccatttgtgatgagggcgagaattgctctgaacctcaagggggtgggctacgagttcttggaggaggtgctgggaactaagagcgagctccttctcaagtccaaccctgtgtacaagaagatccccgtcctcatccacaatggcaagcccatctgtgagtccatgatcatcgtccagtatatcgacgaagtctgggccacagcgggaccttccatcctgccctctgatccctatgaccgtgccattgctcgcttttgggccgtctacatcgatgacaagttgttcccttctctgcggaagatcgtactagcaaacgctgatgacgaagagacagccgaagcagcagatcaagtaattgccggactccagttgctggaagaggctttcgagaaattttccaaaggcaaggacttctttggcggagaaagcgttggctgcatagacattgcgttgggatgctacgtggggtggatcaaggcagcagaaaagatggccggcgtcaaactactggacaaggaaaagttacctctcttgatgggatgggcagaacgtttctgctcggccgatgccgtgaaggagtttgatgccagaggtcgacaagctggtagagctcggcaaggtgcttcgagccaggctgaatgctgctgccaccaaatgaaagtattcagcttcaagaaggcagttctggtggcataa

SEQ ID NO: 12025 - protein, 246 aa, Elaeis guineensis var. tenera
MAGDQELKLLGLWGSPFVMRARIALNLKGVGYEFLEEVLGTKSELLLKSNPVYKKIPVLIHNGKPICESMIIVQYIDEVWATAGPSILPSDPYDRAIARFWAVYIDDKLFPSLRKIVLANADDEETAEAADQVIAGLQLLEEAFEKFSKGKDFFGGESVGCIDIALGCYVGWIKAAEKMAGVKLLDKEKLPLLMGWAERFCSADAVKEFDARGRQAGRARQGASSQAECCCHQMKVFSFKKAVLVA

SEQ ID NO: 12026 - DNA, 651 bp, Citrus sinensis
  CDS (1)..(651)
atggcggacgaagtggttctgttggatttctggcccagcatgttcgggatgagggtcaggattgctctggcggagaaaggcgtcaagtatgaatacaaggaagaggacttgaagaacaagagccccctgcttctgcagatgaacccggttcacaagaagatcccggttctcatccacaacggcagaccggtctgtgagtcatccatcattgttcagtacattgatgaagtgtggaaggacaaggctccattgcttccctctgatccctaccagagagctcaagctaggttctgggtagatttcattgacaagaagatgtacgatgcttcgacgaagacatggaccacaaagggagaagagcaggaggcggctaagaaggagttctttgaagctctgaagaccttggaagggcagcttggagacaagcctttcttcggaggagacaattttgggtatttggatttgagtttgatcccattctattacacgtatgagacatttggaaagtccagcgttgaggctgagtgccccaagttcaaagcttgggtgaagagatgcttgcagagggagactattgccaaggcacttcctgatgagaagaaagtgcttgaacatgcttcagggatgaggaaaaatttagtattggagtag

SEQ ID NO: 12027 - protein, 216 aa, Citrus sinensis
MADEVVLLDFWPSMFGMRVRIALAEKGVKYEYKEEDLKNKSPLLLQMNPVHKKIPVLIHNGRPVCESSIIVQYIDEVWKDKAPLLPSDPYQRAQARFWVDFIDKKMYDASTKTWTTKGEEQEAAKKEFFEALKTLEGQLGDKPFFGGDNFGYLDLSLIPFYYTYETFGKSSVEAECPKFKAWVKRCLQRETIAKALPDEKKVLEHASGMRKNLVLE

SEQ ID NO: 12028 - DNA, 708 bp, Zea mays
  CDS (1)..(708)
atggcggccggaggcgagctgcagctgctgagctcatggtacagcccctacgtgatccgcgccaaggtggcgctggggctgaaggggctcagctacgagttcatcgaggaggacctcttcagcaagagcgacctgctgctggagctcaacccggtgcacaagaaggtgcccgtcctggtccacggcggccgccccgtgtgcgagtcgctcgtcatcgtgcagtacgtcgacgagacctgggcagcaggcaccgggacccctctccttcctgccgacgcccacgaccgcgccacggctcgcttctgggcagcctacgtcgacgacaagttctgcaaggagtggatcaaactgtacaggtcgacgacggcggagaaggcggcggaggcgctcggcggcgtggtccccgtggtggagacgctggagcaggcgttcagggagtgctccagggggaaacccttcttcggcggcgacgccgtcgggctcgtggacatcgcgctcgggagcttcgtggtgtggatcagggtggtggacgaggcggccggcgtaaagcttctggacgaggccaagttcccggccttgacggcgtgggcggagcgcttcttggcggtggacgccgtgagggaggtgatgccggacgctggaaggctgttggagcactacaaggggtttctggctaaacgggctccaccttcacctgctggttactga

SEQ ID NO: 12029 - protein, 235 aa, Zea mays
MAAGGELQLLSSWYSPYVIRAKVALGLKGLSYEFIEEDLFSKSDLLLELNPVHKKVPVLVHGGRPVCESLVIVQYVDETWAAGTGTPLLPADAHDRATARFWAAYVDDKFCKEWIKLYRSTTAEKAAEALGGVVPVVETLEQAFRECSRGKPFFGGDAVGLVDIALGSFVVWIRVVDEAAGVKLLDEAKFPALTAWAERFLAVDAVREVMPDAGRLLEHYKGFLAKRAPPSPAGY

SEQ ID NO: 12030 - DNA, 726 bp, Zea mays
  CDS (1)..(726)
atggggagagacggtggtgatggtgagctcaagctgctggggctgtgggcgagcccgttcgtagcgagagcgaagctcgcgctccagatcaagggcctaagctacgagtacgtcgaggaggatctcggcaacaagagcgagctgctgctcagctccaacccggtgcacaagacggtgccggtgctgatccacaacgggacgccggtctgcgagtcgacggtcatcgtccagtacatcgacgacgctttcgccggcactggcccgtccctcctccccgctgacccctaccagcgcgcccttgctcgcttctgggccgcctacctcgaagacaagattgtgacgccgtggcggcggtttttcatggtcaaggccgacgaggagaaggccgaggcgatgaggcagacggtcgcagccatggacgcgctggagggaggcctgaaggaatgctcttctgggggtgggggccagagccccttcttcggcggcgacagcgtcggctacgtggacgtccttctgggtggcatggtttcatgggtcaaggcatccgagccgctctccggcgccaagatcatcgacgcagccaggacgccgctcctggccgcgtggatggagcgcttctgcgagctggacgcggccaaggcggtcctgcaggacgtccatgaggttgtcgagtacgccaggacggtgcaggcacgggttgccgctgcgaccgcaagcaatcagtag

SEQ ID NO: 12031 - protein, 241 aa, Zea mays
MGRDGGDGELKLLGLWASPFVARAKLALQIKGLSYEYVEEDLGNKSELLLSSNPVHKTVPVLIHNGTPVCESTVIVQYIDDAFAGTGPSLLPADPYQRALARFWAAYLEDKIVTPWRRFFMVKADEEKAEAMRQTVAAMDALEGGLKECSSGGGGQSPFFGGDSVGYVDVLLGGMVSWVKASEPLSGAKIIDAARTPLLAAWMERFCELDAAKAVLQDVHEVVEYARTVQARVAAATASNQ

SEQ ID NO: 12032 - DNA, 666 bp, Medicago truncatula
  CDS (1)..(666)
atggctgcaattgatgaagaagttcagcttctgggttctgtgggaagtccatttgtgataagagttcaaattgctctaaaattgaagggaattgaacacaaatatgttgaagaaaaattgggtaatttgagtgaaacacttctcaaatataatccagtttataggatggttcctgttcttgttcataatgggaatcccatatcagaatctcgtgtgattattgagtatattgacgaggcttggaaacagaaccctatcttgccttctgatccttacaaaagagctttggatcggttttggtcaaagttcattgatgaaaagtgtacgattgctgcatggaaatctgtttttatgcctgatgagaaagagcgcgagaaggctcgtgaagaattattcgaggctctgcagtttcttgagaatgagctgaaggacaagttctttggaggagaagaaataggctttgtggatattgctgctctctttatccctttattccaagaagtagcagagaaacaattgttccctggtgacaaatttctcaagctacaaaaatggagtctagacttttacaaccatccagtcgtcaaagaagttatgccttcaaaagagcaacaatttggctatttcaaagctcgcgctgcaagccttgctgctccatcaaaatag

SEQ ID NO: 12033 - protein, 221 aa, Medicago truncatula
MAAIDEEVQLLGSVGSPFVIRVQIALKLKGIEHKYVEEKLGNLSETLLKYNPVYRMVPVLVHNGNPISESRVIIEYIDEAWKQNPILPSDPYKRALDRFWSKFIDEKCTIAAWKSVFMPDEKEREKAREELFEALQFLENELKDKFFGGEEIGFVDIAALFIPLFQEVAEKQLFPGDKFLKLQKWSLDFYNHPVVKEVMPSKEQQFGYFKARAASLAAPSK

SEQ ID NO: 12034 - DNA, 675 bp, Medicago truncatula
  CDS (1)..(675)
atggcatcaaataaggaagaggtgaaggtttttggattggttgaaagtccatttgtaacaagggtggagattgctctaaaattgaagggagttgaatatatatacgagaaagagaagtttgggaacttgagtgatacactcaaaaaatacaaccctgtttataagaaggttcctgtttttattcataatgataagcctatagcagagtcacttgtgattcttgaatatattgatgagacttggaaacaaaatccaatattgccttctgatccataccaaagagccttggttcgattttggtccaacctcatagatgacaagtgtttgagtggtgtacggaaagcttgtttcactcttgatgagaaagaacgtgagaagagtattgaggaaacaaaagaggctcttcaatttcttgagaatgagctcaaagacaaattctttggtggggaggagattggctttgttgacattgcagccgtactcatagctttttggattcctattatacaagaagcatttggactgaaattgttcacaagtgaagaatttccaaagctttacaattggagccaagaattcaacaatcacccaattgtcaaggaaaaactgcctcctagagagacccttttggccttctacaaagctcgttatgaaagtcattttggttcaaaatag

SEQ ID NO: 12035 - protein, 224 aa, Medicago truncatula
MASNKEEVKVFGLVESPFVTRVEIALKLKGVEYIYEKEKFGNLSDTLKKYNPVYKKVPVFIHNDKPIAESLVILEYIDETWKQNPILPSDPYQRALVRFWSNLIDDKCLSGVRKACFTLDEKEREKSIEETKEALQFLENELKDKFFGGEEIGFVDIAAVLIAFWIPIIQEAFGLKLFTSEEFPKLYNWSQEFNNHPIVKEKLPPRETLLAFYKARYESHFGSK

SEQ ID NO: 12036 - DNA, 699 bp, Glycine max
  CDS (1)..(699)
atggccaaagactacggagaagttgagttgtttggtgtggggggaagcccttttgccagaagggtgcagattgccctggaactgaagggagtccaatacacttactttgaagaagatcttaggaacaagagtgatcttcttatcaaatacaaccctattcacaagaaggtacctgtgcttgtccacaatggaagaccattggctgagtcccttgtgatccttgaatacattgatgagacatgggagaaccaccaccccatcttgcctcaacaaccttatgatagagccttggctcgattctggtcaaggttcattgatgacaaatgcatgcctgcaatatcaaaggcagcatttactgcagacaaggaggaacgtgacaagggcactgaggaatcactcgagtctcttcaaattcttgagaatgtactcaaacacaagttctttggaggtgagactactataggcatagtggacatagccgctggcttcatagctttctggctccctgcgattgaagaggctgtggggttgaaattgctgaccaatgagaagtttccaaaactctacaaatggggtgaagactacaccaaccaccctgttgtgaaaaagaatcttccccaaagagatagggttgtgggggttcttcaaagctcgatatgcatccatcactgcttccaaatagaccaattgtgggtgtga

SEQ ID NO: 12037 - protein, 232 aa, Glycine max
MAKDYGEVELFGVGGSPFARRVQIALELKGVQYTYFEEDLRNKSDLLIKYNPIHKKVPVLVHNGRPLAESLVILEYIDETWENHHPILPQQPYDRALARFWSRFIDDKCMPAISKAAFTADKEERDKGTEESLESLQILENVLKHKFFGGETTIGIVDIAAGFIAFWLPAIEEAVGLKLLTNEKFPKLYKWGEDYTNHPVVKKNLPQRDRVVGVLQSSICIHHCFQIDQLWV

SEQ ID NO: 12038 - DNA, 678 bp, Glycine max
  CDS (1)..(678)
atggcttcaagtcaggaagaggtgactcttttgggagtaattggaagcccatttgcttgcagggtgaagattgcccttaagttgaagggagttgaatacaaatatgtggaagaaaatttggccaacaagagtgatttgcttctcaaatccaacccagttcacaagaaagttccagtttttattcacaatgagaagcccatagcagagtctcttgtgattgttgagtacattgatgagacatggaagaacaaccccatcttgccttctgatccttaccaaagagccttggctcgtttctggtccaaattcattgatgacaagattgtgggcgctgcatggaatgctgttttcacggttgatgagaaagagcgtgagaagaatgttgtagaaacatatgaggctctgcagtttcttgagaatgagatcaaggacaagaaattctttggaggagaagaggttgggttggtagatatagctggtgtctacatagcattttgggtccctttgattcaagaaattgcagggttggagctattaagcagtgagaaatttcctaagctttacaagtggagccaagaatttgtgaaccatccaattgtcaaagaaagtcttccccctagagacccagtttttgcctttttcaaaggacgctatgaaagcctttctgcttcaagatag

SEQ ID NO: 12039 - protein, 225 aa, Glycine max
MASSQEEVTLLGVIGSPFACRVKIALKLKGVEYKYVEENLANKSDLLLKSNPVHKKVPVFIHNEKPIAESLVIVEYIDETWKNNPILPSDPYQRALARFWSKFIDDKIVGAAWNAVFTVDEKEREKNVVETYEALQFLENEIKDKKFFGGEEVGLVDIAGVYIAFWVPLIQEIAGLELLSSEKFPKLYKWSQEFVNHPIVKESLPPRDPVFAFFKGRYESLSASR

SEQ ID NO: 12040 - DNA, 669 bp, Glycine max
  CDS (1)..(669)
atgtctaagagcgaagacttgaagcttttgggaggctggttcagcccatttgccctgagggtgcagattgcccttaacctcaagggtctagaatatgaggttgttgaagagaccttgaatcccaaaagtgacctgcttcttaagtccaaccctgtgcacaagaaaatcccagttttcttccatggagataaagtcatttgtgaatctgcaatcatagttgagtacattgatgaggcttggactaatgttccctccatccttccacaaaatgcttatgatcgtgctaatgctcgattttggtttgcctacattgatgagaagtggtttacgtccttgagaagtgttctagtggctgaagatgatgaggcaaagaagccacactttgagcaagcagaagaagggcttgagaggttggaagaagtgttcaacaagtacagtgaagggaaggcctatttcggaggagatagcattggattcattgacattggttttgggagcttcttgagttggatgagagtcatagaggagatgagtggaagaaaattgcttgatgaaaagaagcaccctggtttgacccaatgggctgaaacgtttgctgctgatcctgctgtgaagggcattcttccagagactgataagcttgttgagttgccaagattcttcagctaa

SEQ ID NO: 12041 - protein, 222 aa, Glycine max
MSKSEDLKLLGGWFSPFALRVQIALNLKGLEYEVVEETLNPKSDLLLKSNPVHKKIPVFFHGDKVICESAIIVEYIDEAWTNVPSILPQNAYDRANARFWFAYIDEKWFTSLRSVLVAEDDEAKKPHFEQAEEGLERLEEVFNKYSEGKAYFGGDSIGFIDIGFGSFLSWMRVIEEMSGRKLLDEKKHPGLTQWAETFAADPAVKGILPETDKLVELPRFFS

SEQ ID NO: 12042 - DNA, 645 bp, Glycine max
  CDS (1)..(645)
atgtcgcacgacgaggtggttctgttggatgcatggggaagcatgtttgggatgagggcatggattgcattggaagaaaagggtgttaagtatgaacacaagatggaggatctcaacaacaagagctctttgcttatgcagatgaaccctatttacaagcaaattccagttctcatccataatggcaaaccaatttctgaatctgcaattatagtgcagtacatttatgaggtctggaatgacaacaaagctccaatcttgccctctgatccttatgagagagctcaagccagattctgggtagattacattgacaaaaaggtgtatcctgcttggaataaaatgtggctttctaaaggagaagaagagcatgaggcagggaagaaggagttaatctccgtctttaagcaactagaagagacattgggtgacaaaactttttatggaggtgacacgtttgggtttgttgatattgctctgatcactttctatagttggttttatatttttgagacatatggcaactttgaaatggaaggagagtgtcctaaactcgtggtttgggccaagagatgcatccagagagagactgtgtccaaagttcttcctgatgagaagagttgtatgatgcagttgtggaaatga

SEQ ID NO: 12043 - protein, 214 aa, Glycine max
MSHDEVVLLDAWGSMFGMRAWIALEEKGVKYEHKMEDLNNKSSLLMQMNPIYKQIPVLIHNGKPISESAIIVQYIYEVWNDNKAPILPSDPYERAQARFWVDYIDKKVYPAWNKMWLSKGEEEHEAGKKELISVFKQLEETLGDKTFYGGDTFGFVDIALITFYSWFYIFETYGNFEMEGECPKLVVWAKRCIQRETVSKVLPDEKSCMMQLWK

SEQ ID NO: 12044 - DNA, 687 bp, Glycine max
  CDS (1)..(687)
atggcagctactcaggaagatgtgaagcttttgggtattgtgggaagcccatttgtgtgcagggtccagattgcccttaagttgaagggagttgaatacaaatttttggaagaaaatttgggcaacaagagtgatttgcttctcaaatacaaccctgttcacaagaaggttccagtgtttgttcacaatgagaagcccatagcagagtctcttgtgattgttgaatacattgatgagacatggaagaacaaccccatcttaccttctgatccttaccaaagagccttggctcgtttctggtccaaattcattgatgataagattgtgggtgctgtatggaaatctgttttcacggttgatgagaaagagcgtgagaagaatgttgaagaaacatatgaggctcttcagtttcttgagaatgagctgaaggacaagaagttttttggaggagaggaatttgggttggtagatattgctgctgtcttcatagcattttggatcccaatttttcaggaaatagcagggttgcagttattcaccagtgagaaatttcctatactctacaaatggagtcaagaatcccttaaccacccttttgtgcaagaagtccttcctcctagagacccactttttaccttcttcaaagcccgctatgaaagtctttctgcttcaaatagacttatttaa

SEQ ID NO: 12045 - protein, 228 aa, Glycine max
MAATQEDVKLLGIVGSPFVCRVQIALKLKGVEYKFLEENLGNKSDLLLKYNPVHKKVPVFVHNEKPIAESLVIVEYIDETWKNNPILPSDPYQRALARFWSKFIDDKIVGAVWKSVFTVDEKEREKNVEETYEALQFLENELKDKKFFGGEEFGLVDIAAVFIAFWIPIFQEIAGLQLFTSEKFPILYKWSQESLNHPFVQEVLPPRDPLFTFFKARYESLSASNRLI

SEQ ID NO: 12046 - DNA, 678 bp, Glycine max
  CDS (1)..(678)
atggcagctggtcaggaagatgtgaagcttttgggagttgtgggaagcccatttgtgtgtagggtccagattgccctcaagttgaagggaattgaatacaaatttgtggaagaaaatttggccaacaagagtgatttgcttcttaaatccaacccagttcacaagaaagttccagtttttattcacaatgagaagcccatagcagagtctcttgtgattgttgagtacattgatgagacatggaagaacaaccccatcttgccttctgaaccttaccatagagccttggctcgtttctggtccaaattcattgatgacaaggtttttggtgctgcatggaaatctgttttcactcttgatgagaaagagcgtgagaagaatgttgaagaatcattggaggctcttcagtttcttgagaatgagttgaaggacaataagttttttggaggagaggaatttgggttggtagatattgcagctattttcatagcattttggattccaatttttcaggaaatagcagggttgcagatattcacaagtgagaaattccctaagctctacaaatggagccaagagttcatgagccaccctgttgtgaaagaagtccttcctcctagagacccacttttttgccttcttcaagcccgctatgaaagtctttctgcttcaaaatag

SEQ ID NO: 12047 - protein, 225 aa, Glycine max
MAAGQEDVKLLGVVGSPFVCRVQIALKLKGIEYKFVEENLANKSDLLLKSNPVHKKVPVFIHNEKPIAESLVIVEYIDETWKNNPILPSEPYHRALARFWSKFIDDKVFGAAWKSVFTLDEKEREKNVEESLEALQFLENELKDNKFFGGEEFGLVDIAAIFIAFWIPIFQEIAGLQIFTSEKFPKLYKWSQEFMSHPVVKEVLPPRDPLFCLLQARYESLSASK

SEQ ID NO: 12048 - DNA, 651 bp, Glycine max
  CDS (1)..(651)
atggcagatgaggtggttctgctagatttctggccaagtccatttgggatgagggtcaggattgcacttgctgaaaagggtatcaaatatgagtccaaagaagaggacttgcagaacaagagccctttgctcctcaaaatgaacccggttcacaagaaaatcccggttctcatccacaatggcaaacccatttgtgaatctctcgttgctgttcagtacattgaggaggtctggaatgacagaaatcccttgttgccttctgacccttaccagagagctcaggctagattctgggctgactttgttgacaataagatatttgatctcggaagaaagatttggacatcaaagggagaagaaaaagaagctgccaacaaggagttcatagaggcccttaaattattggaggaacagctgggagacaagacttattttgcaggagacgatctaggttttgtggatatagcacttattccattcgacacttggttcaagacttttggcagcctcaacatagagagtgagtgccccaagtttgttgcttgggccaagaggtgcctgcagaaagacagtgttgccaagtctcttcctgatcaacacaaagtctatgagttcattatggacataagaaagaagttcgacattgagtag

SEQ ID NO: 12049 - protein, 216 aa, Glycine max
MADEVVLLDFWPSPFGMRVRIALAEKGIKYESKEEDLQNKSPLLLKMNPVHKKIPVLIHNGKPICESLVAVQYIEEVWNDRNPLLPSDPYQRAQARFWADFVDNKIFDLGRKIWTSKGEEKEAANKEFIEALKLLEEQLGDKTYFAGDDLGFVDIALIPFDTWFKTFGSLNIESECPKFVAWAKRCLQKDSVAKSLPDQHKVYEFIMDIRKKFDIE

SEQ ID NO: 12050 - DNA, 672 bp, Glycine max
  CDS (1)..(672)
atggcagaggtgaagcttcatggattttggtatagtccctacactttgagggtggtatggaccttaaagttaaaggatataccatatcaaaacatagaagaagaccgctacaataagagtcttcaacttcttgaatacaacccagtatacaagaaaactccagtgcttgtccataatggaaaacccttatgtgagtccatgcttattgttgaatacattgatgagatttggtcacataattcattacttcctgctgatccctacgagagagctctggcaaggttttgggttaaatatgctgatgatgacatgttttttgcagttattgcatttttccttagcaataatgatgaagagcgagaaaagggcatagagaagatatgggagcatttcagggctgttgagaatcagtgttttggtgatcagaagaaattttttgggggagacattattaacattatggacatagcttttgggtccatattcaaaatttttgtggttgcagaagatatttttgacgcgaaggtcctggaagatgagaaattccctcacttgcattcatggtataataatttcaaggatgttgcagttattaaagaaaacctcccagaccatgagaaaatggtggcttttgctaagtttattagagaaaaacgtttggcatgtacctaa

SEQ ID NO: 12051 - protein, 223 aa, Glycine max
MAEVKLHGFWYSPYTLRVVWTLKLKDIPYQNIEEDRYNKSLQLLEYNPVYKKTPVLVHNGKPLCESMLIVEYIDEIWSHNSLLPADPYERALARFWVKYADDDMFFAVIAFFLSNNDEEREKGIEKIWEHFRAVENQCFGDQKKFFGGDIINIMDIAFGSIFKIFVVAEDIFDAKVLEDEKFPHLHSWYNNFKDVAVIKENLPDHEKMVAFAKFIREKRLACT

SEQ ID NO: 12052 - DNA, 699 bp, Glycine max
  CDS (1)..(699)
atggctcaaagggacttgaggcttttgggtgcttggttcagtccatttgtcctgagggtgcagattgcccttaacctcaagggtttggattatgaggttgttgaagagactttgaatcccaaaagtgaattgcttcttaagtccaaccctgtgcacaagaaaatcccagttttcttccatggagataaagtcatatgtgaatctgcaatcatagttgagtacatagatgaggtttggtccaacaatgctctctccatccttccacaaaatgcatatgatcgagctaatgcccgattttgggtttcttacatcgatgacaagtgggttgcgtccttgaaaagtgttctactggctggagatgacgacgaggcaaagaaatcacactttgtggaaatggaagaagcacttgagaggatggaagaagtgttcaacaagtgcagtgaaggaaagacatactttggaggggatacaattggaattgttgacattgtttttgggagcctttggagttggatgagagtgatagaagagatgaatggaagaaaagtgtttgatgaagcaaagaacccctctttggctaaatgggctgaaacgttttctgctgatgctgctgtgaagggtgttcttccagagactcacaagcttgttgagtatgccgagagtcttaagaaaagatgggctgctgcagctgcaaagtaa

SEQ ID NO: 12053 - protein, 232 aa, Glycine max
MAQRDLRLLGAWFSPFVLRVQIALNLKGLDYEVVEETLNPKSELLLKSNPVHKKIPVFFHGDKVICESAIIVEYIDEVWSNNALSILPQNAYDRANARFWVSYIDDKWVASLKSVLLAGDDDEAKKSHFVEMEEALERMEEVFNKCSEGKTYFGGDTIGIVDIVFGSLWSWMRVIEEMNGRKVFDEAKNPSLAKWAETFSADAAVKGVLPETHKLVEYAESLKKRWAAAAAK

SEQ ID NO: 12054 - DNA, 660 bp, Glycine max
  CDS (1)..(660)
atgggagatgaggtgattctgctgaatttctggttaagcccttatgggatgagggtccggattgcattagaagaaaagggcatcaagtatgaaagtagagaagaggacttaagcaacaagagctctttactcctccaaatgaacgcagttcataagaaaataccagttctcatccacaatggcaaacctgtctgtgagtcactcattattgttgagtatattgatgaggtttggaatgatcaatctcccttgttgccatctgatccttaccagagaaaccaagctagattctgggctaactatgttgacactaagatgtatgaaattgccttgaagttttggagaactgaaggggaagagaaagaagctgcgaaggaagaattttcggagtgtctggagttatttgaagaacaactgggggacaaaccttattttggtggagacaaccttggtcttgtggatgttgtacttgttccattgatctgttatttttacgtgtataatttatatggcaatttcatcaacgagaacaagtgcccgaaaatcattgcttgggctaagaggtgcactcaaaaagagagtgtttcaaagtgttttcctgaggtgcagagggtcaaagagtttatttcgcagaagaaaaagaatttgaacagtgagtag

SEQ ID NO: 12055 - protein, 219 aa, Glycine max
MGDEVILLNFWLSPYGMRVRIALEEKGIKYESREEDLSNKSSLLLQMNAVHKKIPVLIHNGKPVCESLIIVEYIDEVWNDQSPLLPSDPYQRNQARFWANYVDTKMYEIALKFWRTEGEEKEAAKEEFSECLELFEEQLGDKPYFGGDNLGLVDVVLVPLICYFYVYNLYGNFINENKCPKIIAWAKRCTQKESVSKCFPEVQRVKEFISQKKKNLNSE

SEQ ID NO: 12056 - DNA, 696 bp, Diospyros kaki
  CDS (1)..(696)
atggcaaagagcgacgtaaagcttctcggagcatggccaagcccgttcgtgaaccgggttcaaatagccctcaacttgaagtcggtcgactacgagttcctagaagagaaatttgacaacaagagcgagctgctgctcaaatccaacccggttcacaagaaagttccggttttgatccatgatgataagcctatttgtgagtctcttatcatagtccagtacctagatgaagtgtggacttctggtccctctattctcccgtctgatccatacgatcgggccactgcccgtttctgggccgcctatctcgatgataagtggtttcctctgctgagggagcttagaacgacagaaggagaggaagcaaaagccgaaataacgaagaaactgaatgaaggttcgattttgctagaggcggccttcattaagtgcagcaaaggaaagggtttctttggaggggaacgtattgggtacattgacatcgcattcgggtgcttcctgggctggctgaaggcggtggagaagatagcgggtctgaagctggtggatgaggcggtgacgccggggctggcggcgtgggccgagaggttccgttcgcatgaggccgtgaagggtgtgattccggagactgataggctcgttgagctggccaagatcattcaagccagacttaaagcccaatctgctcccaaatag

SEQ ID NO: 12057 - protein, 231 aa, Diospyros kaki
MAKSDVKLLGAWPSPFVNRVQIALNLKSVDYEFLEEKFDNKSELLLKSNPVHKKVPVLIHDDKPICESLIIVQYLDEVWTSGPSILPSDPYDRATARFWAAYLDDKWFPLLRELRTTEGEEAKAEITKKLNEGSILLEAAFIKCSKGKGFFGGERIGYIDIAFGCFLGWLKAVEKIAGLKLVDEAVTPGLAAWAERFRSHEAVKGVIPETDRLVELAKIIQARLKAQSAPK

SEQ ID NO: 12058 - DNA, 651 bp, Glycine max
  CDS (1)..(651)
atggcagatgaggtggttctgctagatttctggccaagtccatttgggatgagggtcaggattgcacttgctgaaaagggtatcaaatatgagtccaaagaagaggacttgcagaacaagagccctttgctcctcaaaatgaacccggttcacaagaaaatcccggttctcatccacaatggcaaacccatttgtgaatctctcgttgctgttcagtacattgaggaggtctggaatgacagaaatcccttgttgccttctgacccttaccagagagctcaggctagattctgggctgactttgttgacaataagatatttgatcttggaagaaagatttggacatcaaagggagaagaaaaagaagctgccaaaaaggagttcatagaggcccttaaattattggaggaacagctgggagacaagacttattttggaggagacgatctaggttttgtggatatagcacttattccattcgacacttggttcaagacttttggcagcctcaacatagagagtgagtgccccaagtttgttgcttgggccaagaggtgcatgcagaaagacagtgttgccaggtctcttcctgatcaacacaaggtctatgagttcattatgggcataagaaagaagttcgacattgagtag

SEQ ID NO: 12059 - protein, 216 aa, Glycine max
MADEVVLLDFWPSPFGMRVRIALAEKGIKYESKEEDLQNKSPLLLKMNPVHKKIPVLIHNGKPICESLVAVQYIEEVWNDRNPLLPSDPYQRAQARFWADFVDNKIFDLGRKIWTSKGEEKEAAKKEFIEALKLLEEQLGDKTYFGGDDLGFVDIALIPFDTWFKTFGSLNIESECPKFVAWAKRCMQKDSVARSLPDQHKVYEFIMGIRKKFDIE

SEQ ID NO: 12060 - DNA, 660 bp, Glycine max
  CDS (1)..(660)
atgagtgatgaggtagtgttattagatttctggccaagtccatttgggatgagggtcaggattgcacttgctgaaaagggtatcaaatatgagtacaaagaagaggacttgaggaacaagagtcctcttctcctccaaatgaacccggttcacaagaagattccggttctcatccacaatggcaaacccatttgtgaatccctcattgctgttcagtacattgaggaggtttggaatgacagaaatcccttgttgccttctgacccttaccagagagctcagactagattctgggctgattatgttgataagaagatatatgatcttggaaggaagatttggacatcaaaaggagaagaaaaagaagctgccaagaaggagttcatagaagcccttaaattgttggaggaacagctgggagacaagacttattttggaggagacaatctaggttttgtggatatagcgcttgttccattctacacttggttcaaagcctatgagacttttggcaccctcaacatagagagtgagtgccccaagtttattgcttgggccaagaggtgccttcagaaagaaagcgttgccaagtctcttcctgatcagcaaaaggtttatgagttcattatggatctaagaaagaagttaggcattgagtag

SEQ ID NO: 12061 - protein, 219 aa, Glycine max
MSDEVVLLDFWPSPFGMRVRIALAEKGIKYEYKEEDLRNKSPLLLQMNPVHKKIPVLIHNGKPICESLIAVQYIEEVWNDRNPLLPSDPYQRAQTRFWADYVDKKIYDLGRKIWTSKGEEKEAAKKEFIEALKLLEEQLGDKTYFGGDNLGFVDIALVPFYTWFKAYETFGTLNIESECPKFIAWAKRCLQKESVAKSLPDQQKVYEFIMDLRKKLGIE

SEQ ID NO: 12062 - DNA, 657 bp, Carica papaya
  CDS (1)..(657)
atggcggacgaggttgttctcttggatttctggccaagcccttttggaatgagaatcagaatcgctttagccgagaagggtattcactacgagtacaaggaagagaatctgagaaacaagagtcccttactcctgcagatgaacccggtacacaagaaaatcccggttctcatccacaatggtaaacccatctgtgagtctttgatccagattcagtacatagatgaggtatggagcgacaaggctcctctgcttccctctgatccttatcagagagctcaagccaggttctgggctgactatgttgacaagaagatgtatgaagctgggaggagagtttggacgactaaaggggaagaacaggagggggccaagaaagagttcatagaaatcttgaagactttggagggagaacttggggagaagccttattttggtggggaaagttttgggtatgtggatttgacttttatcccattctacacttggttcagtgtgtatgaaagttttgggaagatgagcatagaggcagaatgccccaagttgtttagttgggtgaaaaggtgtttggagaaggagagtgtttcaaaatctctgcctgatcaagataaggtatacggcttcgttttggaactcaggaaggctcttgggatttga

SEQ ID NO: 12063 - protein, 218 aa, Carica papaya
MADEVVLLDFWPSPFGMRIRIALAEKGIHYEYKEENLRNKSPLLLQMNPVHKKIPVLIHNGKPICESLIQIQYIDEVWSDKAPLLPSDPYQRAQARFWADYVDKKMYEAGRRVWTTKGEEQEGAKKEFIEILKTLEGELGEKPYFGGESFGYVDLTFIPFYTWFSVYESFGKMSIEAECPKLFSWVKRCLEKESVSKSLPDQDKVYGFVLELRKALGI

SEQ ID NO: 12064 - DNA, 714 bp, Picea mariana
  CDS (1)..(714)
atggaggcctgtggagaagaggcgcaagtgaagctgttgggtgggaatataagtccctttgtgctgcgggtccgtatagcacttgctcttaaagggatcgattacgagttcatcgaagagaacatgcaaaataagagccatctgctgctgcaatcgaaccctgttaacaagaagattccagtgctcatccacaatggaaagcctgtttgtgagtccatgattattgtgcagtacatagacgaggcatgggacacgaaggcgccagttctaatgcccaaagatccttatgaccgagccattgcccgcttctgggctgcctttgtagacgataagctgctgccatgccttcggggagttttcaagggccagggagagcagcaacagaaagcgttggaagaatcgggggcaagctttcttttactggaggaggctctgcgaacgagccactgcttctcgggaaaaccgtatttcggaggagatgagatcggctttcttgacatcgcattgggtggtatgttagcatttgtcaaagccctcgagaaggttactaatttagttttaatagaccaggagaagatgccgctgttaagcacatggatgaatcgattctgtgaggccgatggagtgaaagacgttatgccggatccggccaagttgcaggaatttatatccgccatcagagtcagatttacatcaccacctgctgccaattag

SEQ ID NO: 12065 - protein, 237 aa, Picea mariana
MEACGEEAQVKLLGGNISPFVLRVRIALALKGIDYEFIEENMQNKSHLLLQSNPVNKKIPVLIHNGKPVCESMIIVQYIDEAWDTKAPVLMPKDPYDRAIARFWAAFVDDKLLPCLRGVFKGQGEQQQKALEESGASFLLLEEALRTSHCFSGKPYFGGDEIGFLDIALGGMLAFVKALEKVTNLVLIDQEKMPLLSTWMNRFCEADGVKDVMPDPAKLQEFISAIRVRFTSPPAAN

SEQ ID NO: 12066 - DNA, 663 bp, Eucalyptus globulus
  CDS (1)..(663)
atggcagaggaagtgatattgctagacttctggccgagcccgttcgggatgagggcgaaaatcgccctgagagagaagggcgtgcactttgatttgagggaggaggaacttctgagcaacaagagccccctgctcctgcaaatgaacccagtccacaagaaaattcccgtcctcatccacaacggcaagccagtttgcgaatcccacatcatcgtccagtacatcgacgagacttggggtcccgagtcccctctcttgccttccgaacctcacgagcgcgcccgtgccagattctgggccgactacgtggacaagaagatatttcctgcgggacgggcggcatggagatcgacaggagaggcccaagaggcggcgaagaaggagtacatcgagggcttaaagatgctggagggagagcttggggacacgccttactttggaggcgagaggtttgggtttttagatgtgtcgctaataccgttctatagctggttctatgctgtggagacgttgactggttgtagcttcgaggaggagtgccccaagttggtgggatgggccaagcggtgcatgcagagggagagcgtggccaggtcgttgcccgaccagcacaaggtctatgacttcagtcggaggtcaggaagaaggttcaggcgcaaataa

SEQ ID NO: 12067 - protein, 220 aa, Eucalyptus globulus
MAEEVILLDFWPSPFGMRAKIALREKGVHFDLREEELLSNKSPLLLQMNPVHKKIPVLIHNGKPVCESHIIVQYIDETWGPESPLLPSEPHERARARFWADYVDKKIFPAGRAAWRSTGEAQEAAKKEYIEGLKMLEGELGDTPYFGGERFGFLDVSLIPFYSWFYAVETLTGCSFEEECPKLVGWAKRCMQRESVARSLPDQHKVYDFSRRSGRRFRRK

SEQ ID NO: 12068 - DNA, 660 bp, Caragana korshinskii
  CDS (1)..(660)
atggcaaatgaggtggttctgctagatttttggccaagtccttttgggatgaggctaaggatagcccttgctgaaaagggtatcaagtatgagtacaaagaggaagacctgaggaacaagagccccttgctgttacaaatgaacccggttcacaagaaaatcccggttctcatccacaatgggaaacccgtttgtgaatctctgatagctgttcagtacatcgatgaggtgtggagtgatagatctcccttgttgccttctgatccttatcagagagcacaggctagattctgggctgattatgttgacaaaaagatatatgaagttggaaggaatgtttggactaaaaaaggagaggaacaagaagctgccaagaaggaattcatagatgcactcaaattgttggaggaacagttgggagacaagacatattttggaggggaaaagcttggctatgtggatatagcattaatcccattctacacctggtttaaagcctatgaggtatttggcaaccttaatatagaaaaggaatgtcccaagttcattacttgggccaagagatgcatgcagattgagaacgtttccaggtctcttcctgaccagcataaggtctatgagttcattgtggagatcagaaagaggtttggcattgagtag

SEQ ID NO: 12069 - protein, 219 aa, Caragana korshinskii
MANEVVLLDFWPSPFGMRLRIALAEKGIKYEYKEEDLRNKSPLLLQMNPVHKKIPVLIHNGKPVCESLIAVQYIDEVWSDRSPLLPSDPYQRAQARFWADYVDKKIYEVGRNVWTKKGEEQEAAKKEFIDALKLLEEQLGDKTYFGGEKLGYVDIALIPFYTWFKAYEVFGNLNIEKECPKFITWAKRCMQIENVSRSLPDQHKVYEFIVEIRKRFGIE

SEQ ID NO: 12070 - DNA, 672 bp, Tamarix androssowii
  CDS (1)..(672)
atggcggctgagaaggaggaggtggtgttgctggatttctggccgagcccattcgggatgagatgcagaattgctttggcagagaaaggcgtggaatatgagtaccagggcgaggacttgtggaccaagagtgagctgttactgaagatgaatccgatacataagaagattccggttcttatccatggtggaaagccggtctgtgaatctaccaatattgttgagtatatagatgaggtttggaaggagaagggctcccttttaccttgtgatgcttatgagagagcccatgtcaggttctgggctgattttatcgataccaagatctatagcagcggggtaaaaatatggatgaataaaggagaggaacaagaggcgggtattaaagagttcaaggaatgcctcaaactgctggaggatcatgtattaggggacaatccttaccttggaggagagactttcaacttcctggatgtgatattcatcccattctacacatggtttcatagctatgagacttacggaaactttaagttggaggactcgtgtcctaaattattagcctgggctgagaggtgtatgcaaaaggaatatgtggccaagtccctccgtgatccacacaagatctttgaattccttgagaaagtgagaaagataagaggcgttgcatga

SEQ ID NO: 12071 - protein, 223 aa, Tamarix androssowii
MAAEKEEVVLLDFWPSPFGMRCRIALAEKGVEYEYQGEDLWTKSELLLKMNPIHKKIPVLIHGGKPVCESTNIVEYIDEVWKEKGSLLPCDAYERAHVRFWADFIDTKIYSSGVKIWMNKGEEQEAGIKEFKECLKLLEDHVLGDNPYLGGETFNFLDVIFIPFYTWFHSYETYGNFKLEDSCPKLLAWAERCMQKEYVAKSLRDPHKIFEFLEKVRKIRGVA

SEQ ID NO: 12072 - DNA, 660 bp, Castanea crenata
  CDS (1)..(660)
atggcgggcaaggtggttctgttggatttctggcctagcctgtttgggatgagggtcaggattgctctggctgagaagggtatcaagtatgagaacaaggaagaggacttgagcaagaagagccctctgcttttagagatgaaccccgttatcaagcagatcccagttctcatccacaatgggaagcctgtgtgtgagtccctcatcattgttcagtacatagacgaggtctggaatgataagtgtccattgttgccctctgatccttaccagagagctcaagccaggttctgggctgactttgttgataagaaggtttatgtagcttcaaggaagatatggcgcccaaaaaaagaagagcaagaggcaggcaagaaggaatttcttgaaaccttaaagacaatggagggggagcttggtggcaagccttactttgggggtgaaacatttgggtatgtggacctttctcttatccccttctacagctggttccatgcctacaaggtcttagacaatctcaatatagaggcggagtgccccaagattatcgcgtgggctaagaggtgcatgcagaaggaggctgtggccaagacttttcatgatccgaagaaggttcttgagtttgtagctcagacaaggaaaaagtatgttacggcttag

SEQ ID NO: 12073 - protein, 219 aa, Castanea crenata
MAGKVVLLDFWPSLFGMRVRIALAEKGIKYENKEEDLSKKSPLLLEMNPVIKQIPVLIHNGKPVCESLIIVQYIDEVWNDKCPLLPSDPYQRAQARFWADFVDKKVYVASRKIWRPKKEEQEAGKKEFLETLKTMEGELGGKPYFGGETFGYVDLSLIPFYSWFHAYKVLDNLNIEAECPKIIAWAKRCMQKEAVAKTFHDPKKVLEFVAQTRKKYVTA

SEQ ID NO: 12074 - DNA, 672 bp, Beta vulgaris
  CDS (1)..(672)
atggaagaagtgaaagtatatggggcatggggcagtccgcctagccatagagtagagatagcgctcaagttaaagggtgttaagtacgagttcatagaggaagatctgaagaacaaaagtgaggaactactcaagtacaatcctgttcataaaaagattccggtgcttgtccataacggaaggccaatcgccgagtctctagtgatcttggagtacatcgatgagatttggaagcaatgtccgctactgcctactgacccttatgacagagctcagactcgcttttgggctaagtttatcgctgagaagatcacgcctgcagtccgagatgctatgttgatcccaggagaagatgctgaaaagaagacagaagaactaatcgagctacttcacatactcgaaaaagagatcaaggagaagaagtttgtaggaggaaaccgtaataaatatatggatatagtcagtttgtatgtaatccactggatccccatattgcaagaatattctagcaagcatgtcctcacgagggagaaatttcccggaatatacgattggattgatcaagtactgctagattgtggtgacattatggaaaacttgcctgataagaacaagatgtttgacgtcttacgagtaattttcggacctcgcaacaattacaagcctacatag

SEQ ID NO: 12075 - protein, 223 aa, Beta vulgaris
MEEVKVYGAWGSPPSHRVEIALKLKGVKYEFIEEDLKNKSEELLKYNPVHKKIPVLVHNGRPIAESLVILEYIDEIWKQCPLLPTDPYDRAQTRFWAKFIAEKITPAVRDAMLIPGEDAEKKTEELIELLHILEKEIKEKKFVGGNRNKYMDIVSLYVIHWIPILQEYSSKHVLTREKFPGIYDWIDQVLLDCGDIMENLPDKNKMFDVLRVIFGPRNNYKPT

SEQ ID NO: 12076 - DNA, 651 bp, Glycine max
  CDS (1)..(651)
atggcagatgaggtggttctgctagatttctggccaagtccatttgggatgagggtcaggattgcacttgctgaaaagggtatcaaatatgagtccaaagaagaggacttgcagaacaagagccctttgctcctcaaaatgaacccggttcacaagaaaatcccggttctcatccacaatggcaaacccatttgtgaatctctcgttgctgttcagtacattgaggaggtctggaatgacagaaatcccttgttgccttctgacccttaccagagagctcaggctagattctgggctgactttgttgacaataagatatttgatcttggaagaaagatttggacatcaaagggagaagaaaaagaagctgccaaaaaggagttcatagaggcccttaaattattggaggaacagctgggagacaagacttattttggaggagacgatctaggttttgtggatatagcacttattccattcgacacttggttcaagacttttggcagcctcaacatagagagtgagtgccccaagtttgttgcttgggccaagaggtgcctgcagaaagacagtgttgccaggtctcttcctgatcaacacaaggtctatgagttcattatggacataagaaagaagttcgacattgagtag

SEQ ID NO: 12077 - protein, 216 aa, Glycine max
MADEVVLLDFWPSPFGMRVRIALAEKGIKYESKEEDLQNKSPLLLKMNPVHKKIPVLIHNGKPICESLVAVQYIEEVWNDRNPLLPSDPYQRAQARFWADFVDNKIFDLGRKIWTSKGEEKEAAKKEFIEALKLLEEQLGDKTYFGGDDLGFVDIALIPFDTWFKTFGSLNIESECPKFVAWAKRCLQKDSVARSLPDQHKVYEFIMDIRKKFDIE

SEQ ID NO: 12078 - DNA, 663 bp, Capsicum annuum
  CDS (1)..(663)
atgggagatgttaagttgcttggtctatggtatagccctttcgttcacagagttgagtgggctttaaaaattaagggtgtggaatatgaatttatagaagaaaatctacaaaataagagccctctgcttcttgaatccaatccaattcataagaaaattcctgttttctttcacaatgggaagcccatttgtgagtctatggtgattgttgaatacattgatgaagcatttgagggtccttccatcttgcctaaagatccttatgaccgagctattgctcgtttctgggctaagtttcttgacgataagttgcaagcaatagggaaaactttctttttcaaaggagaggaacaagagaaagctaaaggggaagcttatgagacattgaaagttcttgataatgaggtcaaggataagaagttttttgtggctgacaaatttggatttgctgatattgctgctaattttgtgggactttggctgggagtttttgaagaagcaactggaattgttttggttacaagagaaaaatttccaaatttttgtgcttggagagatgagtatattaattgcacccaaaacaaggaatatttacctccaagagatgaattgcttgcccatttccaagctcgtttccaagctgctgctgctgcttcaaagtga

SEQ ID NO: 12079 - protein, 220 aa, Capsicum annuum
MGDVKLLGLWYSPFVHRVEWALKIKGVEYEFIEENLQNKSPLLLESNPIHKKIPVFFHNGKPICESMVIVEYIDEAFEGPSILPKDPYDRAIARFWAKFLDDKLQAIGKTFFFKGEEQEKAKGEAYETLKVLDNEVKDKKFFVADKFGFADIAANFVGLWLGVFEEATGIVLVTREKFPNFCAWRDEYINCTQNKEYLPPRDELLAHFQARFQAAAAASK

SEQ ID NO: 12080 - DNA, 669 bp, Hordeum vulgare
  CDS (1)..(669)
atggcgggcgagaagggcctggtgctgctggacttctgggtgagcccgttcgggcagcgcgtccgcatcgcgctggccgagaagggcctgccctacgagtacgtggaggaggatctcatcgccggcaagagcgaccgcctcctccgctccaacccggtccacaagaagatcccagtgctcctccacgacggccgccccgtcaacgagtcactcatcatcctcaactacctcgacgacgccttcccggacgccccggccctcctcccctccgacccctacgcgcgcgcgcaggcccgcttctgggccgactacgtcgacaagaaggtctacgactgcggcacccggctctggaaggtcaagggagagccgcaggcgcaggcgcgcgccgagatgctggaggtcctcaagaccctcgacggcgcgctcggggacaagcccttcttcggcggcgacaagttcgggttcgtcgacgccgccttcgcgcccttcaccgcatggttccacagctacgagaggtacggcgagttcagcctggcggaggtggcgcccaagatcgcggcgtgggccaagcggtgcggcgagcgggagagcgtcgccaagagcctctactcgcccgagaaggtctacgacttcatcggcctgcttaagaagaggtacggcatcgagtag

SEQ ID NO: 12081 - protein, 222 aa, Hordeum vulgare
MAGEKGLVLLDFWVSPFGQRVRIALAEKGLPYEYVEEDLIAGKSDRLLRSNPVHKKIPVLLHDGRPVNESLIILNYLDDAFPDAPALLPSDPYARAQARFWADYVDKKVYDCGTRLWKVKGEPQAQARAEMLEVLKTLDGALGDKPFFGGDKFGFVDAAFAPFTAWFHSYERYGEFSLAEVAPKIAAWAKRCGERESVAKSLYSPEKVYDFIGLLKKRYGIE

SEQ ID NO: 12082 - DNA, 666 bp, Vitis vinifera
  CDS (1)..(666)
atggcaaacagtgaccacatagttcttttagattactccgcaagcccttttgcaatgagggtgcgactggctttggctgccaaagggatcgagtatctgattaaggaagaagacttgacccaaagtaaaagctctctactcttgaaagtgaatccagttcatcagaaaattccagttctaattcacaatgggaagcccgtatgcgagtccttgataatagtggaatacattgatgaggtttggaaggatagatgtcgtcttctgccggctgacccttaccaaagagcaaaagccaagttctgggccgacttcattgacaaaatggtatacccatcctgttataatgtgtgggcagcaaacggagaagtgcaagaggctggcaagaaggaattcatagacaggattaagatgttagaaggagagcttaagtcgaacccttactttgggggtgagactttgggttttctggacattggttttctcccatcgtactactggttccatacattcgaaacttttgggaagttcaacatagaagcggaatgtccaaagctggtggcatggggtaagaggtgcatggaggaggagttcgtgtacacctctctccctcacccacataaggtctatgacttggtggtggattacaggaagaaaatggggatatag

SEQ ID NO: 12083 - protein, 221 aa, Vitis vinifera
MANSDHIVLLDYSASPFAMRVRLALAAKGIEYLIKEEDLTQSKSSLLLKVNPVHQKIPVLIHNGKPVCESLIIVEYIDEVWKDRCRLLPADPYQRAKAKFWADFIDKMVYPSCYNVWAANGEVQEAGKKEFIDRIKMLEGELKSNPYFGGETLGFLDIGFLPSYYWFHTFETFGKFNIEAECPKLVAWGKRCMEEEFVYTSLPHPHKVYDLVVDYRKKMGI

SEQ ID NO: 12084 - DNA, 660 bp, Malva pusilla
  CDS (1)..(660)
atgacaggtgaagtagtattgttggatttctggccaagtccattcggcatgagatccaggattgctttggctgagaagggaataaactacgagtacaaggaagaagacttgaggaacaagagtcctttgcttcttcaaatgaaccctgttcataaaaaaatcccagttcttatccataacggtaaacctatatgcgagtcactcattcaggttcagtacatcgacgaggtgtggcatgataaatctcctttgctcccttctgatcctcaccaaagagctgttgctagattctgggctgattttgttgacaaaaagatgtatgaacaagggagcagagtatggaagacgaagggggaagaacaagcaacggcaaagaaggaatttatagagagcctgaagctgttggaaggagaacttggggcaagccttacttttggaggtgaaaatcttggatatgtggatggtgtgttggttccattctatagctgggtttatgcatatgagaagtgtgggaactttaacatcgaaccagagtgtcctaagctgatcgcatgggctaagaggtgcatggagaaggagagtgtagctaagtctcttcctgaccaagaaaaagtctatgattttgtcttgcagctgaagaaaatctacggcattgagtga

SEQ ID NO: 12085 - protein, 219 aa, Malva pusilla
MTGEVVLLDFWPSPFGMRSRIALAEKGINYEYKEEDLRNKSPLLLQMNPVHKKIPVLIHNGKPICESLIQVQYIDEVWHDKSPLLPSDPHQRAVARFWADFVDKKMYEQGSRVWKTKGEEQATAKKEFIESLKLLEGELGASLTFGGENLGYVDGVLVPFYSWVYAYEKCGNFNIEPECPKLIAWAKRCMEKESVAKSLPDQEKVYDFVLQLKKIYGIE

SEQ ID NO: 12086 - DNA, 675 bp, Cucurbita maxima
  CDS (1)..(675)
atgagttcatcacaagagctggttttgttggacttacgggctagcccttttgccacgagggtgagggtggctttggcagagaaggggctaaactgcgagacaaaacaggaagatttgagtaacaaaactcctctgcttctggagatgaaccctgtgcacaagcaaatccctgttttgattcacagaggcaagcccattctcgagtctatcataatcgttgaatacatcgacgagacatggagcagcgaggcaggctatgctaatttgcttccttctcatccttacgagagatcccacgctagattttgggctgactatgtggacaagaagatttacccaaatggagggaagctgtggaacaaaaaaggcctgacagaggaggagaaggaagcagcaatgaaggagctgctggggagcttcaagcagctggaggaagagcttggagacaagccctattttggaggccaatcatttgggtttatagatctgtcgctcattccattttacagcatgtttcttgccttcaaattgcttggaaatctggacttggaagctgagtgtcctaagatcttggaatgggctaagaggtgctgcctcagagagactgtcgccaaaaatatgcctactcaacaagaggtttacgacgtcgttttggatattatcaaacggcattaa

SEQ ID NO: 12087 - protein, 224 aa, Cucurbita maxima
MSSSQELVLLDLRASPFATRVRVALAEKGLNCETKQEDLSNKTPLLLEMNPVHKQIPVLIHRGKPILESIIIVEYIDETWSSEAGYANLLPSHPYERSHARFWADYVDKKIYPNGGKLWNKKGLTEEEKEAAMKELLGSFKQLEEELGDKPYFGGQSFGFIDLSLIPFYSMFLAFKLLGNLDLEAECPKILEWAKRCCLRETVAKNMPTQQEVYDVVLDIIKRH

SEQ ID NO: 12088 - DNA, 657 bp, Cucurbita maxima
  CDS (1)..(657)
atggcggacgaagtgaaactgctggatttctggccgagtatgttcgggatacgagttagaatagccctggccgagaagggcgtacgtattgaatacatggaacaagatctgaggaacaagagccctttgctgttgcagatgaacccagttcacaagaagatccctgttcttgtccataatggaagacccatttgtgaatcttccattatcgttcagtacatcgatgaagtttggaaggacaaagctcctctcctgccgtctgatccttatcagagggctcaggccagattctgggtggatttcatcgacaagaagctttatgatgctgggaggaaggtatggaccgggaagggagaagaggtggaggcagggaaggagctgattggagttttgaagcagctggaagaggttcttggggagaagggtttcttcggaggggagcgtttggggtttgtagacattgctttgattggattccacagttggttttatacctatgaggcgtttggtaagttgagcatcgaggctgagtgtcccaagataatgggttgggcgaagagatgcttggagaaggagagtgtttccaagtccttgcccgactccaagaaggtctatgactttgcggttcaaatgaagaaagcacttggccttgaatga

SEQ ID NO: 12089 - protein, 218 aa, Cucurbita maxima
MADEVKLLDFWPSMFGIRVRIALAEKGVRIEYMEQDLRNKSPLLLQMNPVHKKIPVLVHNGRPICESSIIVQYIDEVWKDKAPLLPSDPYQRAQARFWVDFIDKKLYDAGRKVWTGKGEEVEAGKELIGVLKQLEEVLGEKGFFGGERLGFVDIALIGFHSWFYTYEAFGKLSIEAECPKIMGWAKRCLEKESVSKSLPDSKKVYDFAVQMKKALGLE

SEQ ID NO: 12090 - DNA, 660 bp, Arabidopsis thaliana
  CDS (1)..(660)
atggcgaacgaggtgattcttcttgatttctggccgagtatgttcaggatgaggacaaggatcgcattgagggagaaaggtgttgaatttgagtacagagaagaagatctaaggaacaagagtcctttgcttctccagatgaatccgattcacaagaagattcctgttctcatccacaatggtaaaccggttaacgaatctatcatccaggttcagtacattgacgaggtctggtctcacaagaaccctatccttccttctgatccttacctgagagctcaagctaggttctgggctgatttcattgacaagaagctgtatgatgctcagaggaaggtgtgggctacaaagggtgaggaacaagaggcagggaagaaggatttcattgagatactcaagactcttgaatctgagcttggagacaaaccttactttagtggcgatgactttggctatgtagacattgcgttgattggattctacacatggtttccagcatacgagaagtttgctaacttcagtatcgaatctgaggttccgaaactgattgcttgggttaagaagtgtttgcagagggagagcgtggctaagtccttgcctgatcctgagaaggttactgaattcgtctctgagctcaggaagaaatttgtacctgagtaa

SEQ ID NO: 12091 - protein, 219 aa, Arabidopsis thaliana
MANEVILLDFWPSMFRMRTRIALREKGVEFEYREEDLRNKSPLLLQMNPIHKKIPVLIHNGKPVNESIIQVQYIDEVWSHKNPILPSDPYLRAQARFWADFIDKKLYDAQRKVWATKGEEQEAGKKDFIEILKTLESELGDKPYFSGDDFGYVDIALIGFYTWFPAYEKFANFSIESEVPKLIAWVKKCLQRESVAKSLPDPEKVTEFVSELRKKFVPE

SEQ ID NO: 12092 - DNA, 684 bp, Arabidopsis thaliana
  CDS (1)..(684)
atggctcagaaagatacagtgaagctgataggttcttggtctagcccttattcccttagggcacgtgtggctctgcacttgaaatctgtcaagtacgagtacttagacgaacctgatgttcttaaagaaaagagtgaactccttctcaaatctaaccccatccacaagaaagtccctgtcctcctccatggtgacctctccatctgtgagtccctcaacgttgttcaatacgtcgacgaggcttggccatccgttccttcaatccttccttctgatgcctatgatcgcgcatctgctcggttctgggctcagtacatcgatgacaagtgttttgcggcggtggatgcggtggtcggagcaaaagacgacgaagggaaaatggcggcggcgggaaagctgatggagtgtttggcgatactagaagacacgtttcagaagaccagcaaaggattagggttcttcggaggagagaccatcggctaccttgacattgcatgttcggctcttttaggtccgatctctgtgatcgaggcgttttccggcgtcaagtttctccggctagagacaacacctgggttgatcaaatgggccgagagttttagggcccatgaagctgttaagccttacatgcctagcgtcgaagaggtcgttgcattcgcaaagcaaaagttcaatgttcagtga

SEQ ID NO: 12093 - protein, 227 aa, Arabidopsis thaliana
MAQKDTVKLIGSWSSPYSLRARVALHLKSVKYEYLDEPDVLKEKSELLLKSNPIHKKVPVLLHGDLSICESLNVVQYVDEAWPSVPSILPSDAYDRASARFWAQYIDDKCFAAVDAVVGAKDDEGKMAAAGKLMECLAILEDTFQKTSKGLGFFGGETIGYLDIACSALLGPISVIEAFSGVKFLRLETTPGLIKWAESFRAHEAVKPYMPSVEEVVAFAKQKFNVQ

SEQ ID NO: 12094 - DNA, 684 bp, Arabidopsis thaliana
  CDS (1)..(684)
atgtcagaagaagaagtggtggtgttgaacttctggccaagcatgttcggagcaagagtgatcatggcattagaggagaaagagatcaagttcgagtacaaggaagaagatgtgtttggtcagaagaccgatctattgctccaaagcaacccggttaacaagaaaattccggttctcatccacaacggtaaaccggtatgcgagtccaatatcatagtcgaatacatcgatgaggtctggaaagacgataagactctccgtctactaccttctgatccttatcagaagtcacagtgtagattttgggctgatttgattgacaaaaaggtttttgacgctggaagaagaacgtggacaaagaggggcaaagaacaagaagaagcgaaacaagagttcatagagatattgaaagtgttagaaagagagcttggagataaggtctacttcggaggaaacgacaacgtttcgatggtggacttggttctcatctcctactacccttggttccacacatgggagactattggttgttttagtgtcgaggaccacactcccaagctaatggactggatccgtaaatgcttaacccgacccgctatctcgaaatctttacctgacccgctgaagatatttgatcgagtcactcagatcataaaggtccatgagtttttctatggttattga

SEQ ID NO: 12095 - protein, 227 aa, Arabidopsis thaliana
MSEEEVVVLNFWPSMFGARVIMALEEKEIKFEYKEEDVFGQKTDLLLQSNPVNKKIPVLIHNGKPVCESNIIVEYIDEVWKDDKTLRLLPSDPYQKSQCRFWADLIDKKVFDAGRRTWTKRGKEQEEAKQEFIEILKVLERELGDKVYFGGNDNVSMVDLVLISYYPWFHTWETIGCFSVEDHTPKLMDWIRKCLTRPAISKSLPDPLKIFDRVTQIIKVHEFFYGY

SEQ ID NO: 12096 - DNA, 732 bp, Oryza sativa subsp. japonica
  CDS (1)..(732)
atggccgccggaggaggaggaggagacgagctgaagctgctcggattgtgggcgagcccgtacgtcctgcgagcgaaattcgcgctcagcttcaagggcctgagctacgagaacgtcgaggaggacctccacaacaagagtgagctgctcctgagctccaacccggtgcacaagaaggtgcccgtgctcatccacaacggcaagcccatctgcgagtcgcagatcatcgtggagtacgtcgacgaggcgttccctgacgccggcgagtcccttctcccctccgacccttacgaccgcgccgtcgctcgcttctgggccgcctacatcaatgacaagttcatgccggcgtggcagaaggcgtcgttgggcctcacggagaagaagaaggcgaaggcggtaaagcagatgctcgccgcgatcgagaacctggagacggcgttcaaggagttgtccaaggggaagcccttcttcggcggcgacaccgccgggtacctcgacgtcacgctcggcgccgtggtcggctgggcgcgcgccggcgaggtcctgttcgggaggaagctcttcgacgccactaggagccctctcctggcggcgtggatggagcggttcgtcgcgctggacgctgtcaaggcggtgttgccggacaatgccgagctgatcgagtatggcaagatgaggatggcgcactacgccaagcttgctgccgccttggctgctgcgaacaagaagtga

SEQ ID NO: 12097 - protein, 243 aa, Oryza sativa subsp. japonica
MAAGGGGGDELKLLGLWASPYVLRAKFALSFKGLSYENVEEDLHNKSELLLSSNPVHKKVPVLIHNGKPICESQIIVEYVDEAFPDAGESLLPSDPYDRAVARFWAAYINDKFMPAWQKASLGLTEKKKAKAVKQMLAAIENLETAFKELSKGKPFFGGDTAGYLDVTLGAVVGWARAGEVLFGRKLFDATRSPLLAAWMERFVALDAVKAVLPDNAELIEYGKMRMAHYAKLAAALAAANKK

SEQ ID NO: 12098 - DNA, 675 bp, Arabidopsis thaliana
  CDS (1)..(675)
atggcggagaaagaagaggatgtgaagcttctaggtttttgggcaagcccttttactcgtagagttgagatggctttcaagctcaaaggcgtgccttacgagtacttggagcaagatatagtgaacaagagccctttgcttctccagataaatccggtttacaagaaggttccggttcttgtctacaaagggaaaatattatccgagtcacatgtgatcctcgaatacatcgaccaaatatggaagaacaatccaattcttcctcaagatccttacgaaaaagccatggctttattctgggccaagttcgttgatgaacaggttggaccagtagcttttatgtctgtggcaaaagcagagaagggagtagaggttgcaatcaaggaggctcaagaactctttatgtttcttgagaaggaagtcactggaaaagatttcttcggtggcaaaacaattggatttttggacttggtcgcaggaagtatgatcccgttttgtcttgctcgaggttgggaagatatgggaattgatatgattccagaggaaaagtttccagagctaaacagatggatcaaaaatttgaaagaaattgagatcgtgagagaatgtattcctcctagagaggaacaaattgagcatatgaagaaagttgtagaaagaatcaaatcagcctaa

SEQ ID NO: 12099 - protein, 224 aa, Arabidopsis thaliana
MAEKEEDVKLLGFWASPFTRRVEMAFKLKGVPYEYLEQDIVNKSPLLLQINPVYKKVPVLVYKGKILSESHVILEYIDQIWKNNPILPQDPYEKAMALFWAKFVDEQVGPVAFMSVAKAEKGVEVAIKEAQELFMFLEKEVTGKDFFGGKTIGFLDLVAGSMIPFCLARGWEDMGIDMIPEEKFPELNRWIKNLKEIEIVRECIPPREEQIEHMKKVVERIKSA

SEQ ID NO: 12100 - DNA, 684 bp, Arabidopsis thaliana
  CDS (1)..(684)
atggcaagcagcgacgtgaagctgatcggtgcatgggcgagtccctttgtgatgaggccgaggattgctctaaacctcaagtctgtcccctacgagttcctccaagagacgtttgggtctaagagcgagttgcttcttaaatcaaacccggttcacaagaagatcccggttctgcttcatgctgataaaccggtgagtgagtccaacatcatcgttgagtatatcgatgacacttggagctcatctggaccgtccattctcccttccgatccttacgatcgggccatggctcggttctgggctgcttacatcgacgaaaagtggtttgtcgctctaagaggtttcctaaaagccggaggagaagaagagaagaaagctgtgatagctcaactagaagaagggaatgcgtttctggagaaggcgttcattgattgcagcaaaggaaaaccgtccttcaacggtgacaacatcggttacctcaacattgctctcgggtgcttcttggcttggttgagagtcaccgagttagcagtcagctataaaattcttgatgaggccaagacaccttctttgtccaaatgggctgagaatttctgtaatgatcccgctgtaaaacctgtcatgcccgagactgcaaagcttgctgaattcgcaaagaagatctttcctaagccgcaggcctaa

SEQ ID NO: 12101 - protein, 227 aa, Arabidopsis thaliana
MASSDVKLIGAWASPFVMRPRIALNLKSVPYEFLQETFGSKSELLLKSNPVHKKIPVLLHADKPVSESNIIVEYIDDTWSSSGPSILPSDPYDRAMARFWAAYIDEKWFVALRGFLKAGGEEEKKAVIAQLEEGNAFLEKAFIDCSKGKPSFNGDNIGYLNIALGCFLAWLRVTELAVSYKILDEAKTPSLSKWAENFCNDPAVKPVMPETAKLAEFAKKIFPKPQA

SEQ ID NO: 12102 - DNA, 705 bp, Arabidopsis thaliana
  CDS (1)..(705)
atgggagagaaagaggaagtgaaactattaggagtatggtacagtccatacgccataagacctaagatcgctcttcgtctcaaatcagtggattatgattacgttgaggaaaatctgtttggatccaagagtgagcttcttctcaaatcaaacccggttcacaagaaagtccctgttctcctccacaacaacaaaccgattgtcgagtctctcaacatcgttgaatacattgatgagacgtggaactcatctgcaccgtccattcttccttcacatccttatgatcgtgctcttgctcgcttttggtctgacttcgttgataacaagtggtttccggcgttgagaatggcggcgatcactaaatcggaagacgcaaaagcgaaagccatggaagaagtggaagaagggttgttgcaactcgaggatgcgtttgtttctataagcaaagggaaaccctttttcggcggtgaagcaatcgggtttatggatatttgctttggaagctttgtggttctcttgaaagctagagaaaagtttaaagcagaaaagcttttagtcgaatcaaaaactccttctctttgtaaatgggccgaccggttcttgtccgatgaaacggtgaagaatgtggcaccggagatcgaaaaagtagctgagtttctacaagaacttgaggttagagctcaatccgcagcttcaagatcttga

SEQ ID NO: 12103 - protein, 234 aa, Arabidopsis thaliana
MGEKEEVKLLGVWYSPYAIRPKIALRLKSVDYDYVEENLFGSKSELLLKSNPVHKKVPVLLHNNKPIVESLNIVEYIDETWNSSAPSILPSHPYDRALARFWSDFVDNKWFPALRMAAITKSEDAKAKAMEEVEEGLLQLEDAFVSISKGKPFFGGEAIGFMDICFGSFVVLLKAREKFKAEKLLVESKTPSLCKWADRFLSDETVKNVAPEIEKVAEFLQELEVRAQSAASRS

SEQ ID NO: 12104 - DNA, 660 bp, Glycine max
  CDS (1)..(660)
  misc_feature (336)..(336): r is g or a
atgacagatgaggtggttcttctggatttctggccaagtccatttgggatgagggtcaggattgcacttgctgaaaagggtatcgaatatgagtacaaagaagaggacttgaggaacaagagtcctcttctcttacaaatgaacccggttcacaagaagattccggttctcatccacaatggcaaacccatttccgaatccctcattgctgttcagtacattgaggaggtttggaatgacagaaatcccttgttgccttcagacccttaccagagagctcaggctagattctgggctgattatgttgacattaagatacatgatcttggaaagaaratttggacatcaaagggagaagaaaaagaagctgccaagaaggagttcatagaggcccttaaattgttggaggaacagctgggagataagacttattttggaggagacaatattggttttgtggatatagcacttgttccattctacacttggttcaaagtctatgagacttttggcagcctcaacattgagaatgagtgccccaggtttgttgcttgggccaagaggtgcctacagaaagagagtgttgcaaagtctcttcctgatcagcacaaggtctatgagttcgttgtggagataagaaagaagttagtcatcgagtag

SEQ ID NO: 12105 - protein, 219 aa, Glycine max
MTDEVVLLDFWPSPFGMRVRIALAEKGIEYEYKEEDLRNKSPLLLQMNPVHKKIPVLIHNGKPISESLIAVQYIEEVWNDRNPLLPSDPYQRAQARFWADYVDIKIHDLGKKIWTSKGEEKEAAKKEFIEALKLLEEQLGDKTYFGGDNIGFVDIALVPFYTWFKVYETFGSLNIENECPRFVAWAKRCLQKESVAKSLPDQHKVYEFVVEIRKKLVIE

SEQ ID NO: 12106 - DNA, 678 bp, Glycine max
  CDS (1)..(678)
  misc_feature (399)..(399): r is g or a
atggcttcaagtcaggaggaggtgacccttttgggagctactggaagcccatttgtgtgcagggttcatattgccctcaagttgaagggagttcaatacaaatatgtcgaagaaaatttgaggaacaagagtgaactgcttctcaaatccaacccagttcacaagaaggttccagtgtttattcacaatgagaagcccatagcagagtctcttgtgattgttgaatacattgatgagacatggaagaacaaccccatcttgccttctgatccttaccaaagagccttggctcgtttctggtccaaattcattgatgataaggtttttggtgctgcatggaaatccgttttcacagctgatgagaaagagcgtgagaagaatgttgaggaagcaattgargctctgcagtttcttgagaatgagataaaggacaagaagttctttggaggagaggagattgggttggtagatattgctgctgtctacatagcattttgggtccctatggttcaagaaattgcagggttggagttattcacaagtgagaaatttcctaagctccacaattggagccaagaatttttgaaccatccaattgtcaaagaaagtctgccccctagagatcctgttttctcctttttcaagggtctctatgaaagcctttttggttcaaaatag

SEQ ID NO: 12107 - protein, 225 aa, Glycine max
MASSQEEVTLLGATGSPFVCRVHIALKLKGVQYKYVEENLRNKSELLLKSNPVHKKVPVFIHNEKPIAESLVIVEYIDETWKNNPILPSDPYQRALARFWSKFIDDKVFGAAWKSVFTADEKEREKNVEEAIEALQFLENEIKDKKFFGGEEIGLVDIAAVYIAFWVPMVQEIAGLELFTSEKFPKLHNWSQEFLNHPIVKESLPPRDPVFSFFKGLYESLFGSK

SEQ ID NO: 12108 - DNA, 678 bp, Glycine max
  CDS (1)..(678)
atggcagctactcaggaagatgtgacgcttttgggagttgttggaagcccgtttgtgtgcagggtccagattgccctcaaattgaagggaattgaatgcaaatttttggaagaaaatttggcaaacaagagtgatctacttctcaaatccaaccccgtttacaagaaggttccagtgtttattcataatgagaagcccatagcagagtctcttgtgattgttgagtacattgatgagacatggaagaacaaccccatcttgccttctgatccttaccaaagatcctttgctcggttttggtccaagttcatagatgacaagattgtgggtgcttcatggaaatctgttttcacggttgatgagaaagagcgtgagaagaatgttgaagaatcgttggaggctctgcagtttcttgagaatgaactacaggacaaaaggttctttggaggagatgaatttggatttgtagatattgctggtgtcttcattgcattttcaatcccaattttccaagaagtagcagggttgcaattattcaccagtgagaaatttcctaagctcttcaaatggagccaagagttgatcaaccaccctgttgtcaaagatgtccttcctcctagagaaccactttttgccttcttcaaatccctctatgaaagcctttctgcttcaaaatag

SEQ ID NO: 12109 - protein, 225 aa, Glycine max
MAATQEDVTLLGVVGSPFVCRVQIALKLKGIECKFLEENLANKSDLLLKSNPVYKKVPVFIHNEKPIAESLVIVEYIDETWKNNPILPSDPYQRSFARFWSKFIDDKIVGASWKSVFTVDEKEREKNVEESLEALQFLENELQDKRFFGGDEFGFVDIAGVFIAFSIPIFQEVAGLQLFTSEKFPKLFKWSQELINHPVVKDVLPPREPLFAFFKSLYESLSASK

SEQ ID NO: 12110 - DNA, 702 bp, Papaver somniferum
  CDS (1)..(702)
atggcaggatcaggaagtgaagaggtgaagattttaggtggatggccaagtccatttgtgatgaggcctagaattgcactcaacattaaatcagtcaagtattatcttcttgaagagacatttggtagcaaaagtgaacttcttctgaaatcaaatcctatttacaagaagatgcctgtcttgattcacggtgataaacccatctgtgaatcaatgatcattgttcagtacattgatgatgtctgggcttctgctggtcattccatcatcccttctgatccttatgatgcttccattgctcgtttctgggcaacctacattgatgacaagttctttccgtctttaatggggattgcaaagagtaaggatgcagaagaaaaaaaagcagccattgaacaggcgattgcagcttttggtatacttgaagaagcttatcagaaaactagtaaaggaaaagattttttcggtggagaaaaaattgggtatgtcgatattgcatttgggtgttatgttggctggattagagttacagagaagatgaacggaatcaaactatttgatgaagaaaaagttccagggcttacaaaatgggctgagaaattttgtgctgatgagacagttaaatctgttatgcctgaaactgatgccctcatggagtttgctaagaagatctttggatctaagcctcctccttcaaactag

SEQ ID NO: 12111 - protein, 233 aa, Papaver somniferum
MAGSGSEEVKILGGWPSPFVMRPRIALNIKSVKYYLLEETFGSKSELLLKSNPIYKKMPVLIHGDKPICESMIIVQYIDDVWASAGHSIIPSDPYDASIARFWATYIDDKFFPSLMGIAKSKDAEEKKAAIEQAIAAFGILEEAYQKTSKGKDFFGGEKIGYVDIAFGCYVGWIRVTEKMNGIKLFDEEKVPGLTKWAEKFCADETVKSVMPETDALMEFAKKIFGSKPPPSN

SEQ ID NO: 12112 - DNA, 663 bp, Solanum lycopersicum
  CDS (1)..(663)
atggctaacgatgaagtgattctgttggatttttggcctagcatgtttggaatgaggctaaggattgcacttgctgagaaagagattaaatatgagtacagagacgaggatttgaggaacaaaagtcctctgcttttgcagatgaatcctattcacaagaaaatccctgttttgattcataatggcaaaccaatttgcgagtctattattggagttgagtatattgatgaagtgtggaaggataaagcccctttcctcccttctgatccttatgagagagcacaagctaggttttgggctgattacattgataagaagttgtatgattctgggaggaagctatggacaacaaagggaggagagcaagagacagctaaaaaagatttcatagaatgccttaaggtgttagagggagcacttggagagaagccttactttggaggaggtaattttggttgtgtggatattgcgttgattgggtactatagctggttttatgcttatgagagttatgctaacatcagtgtagaggctgagtgcccaaagtttgtggcttgggccaagaattgtatgctgagggacagtgtggctaagtctttgcctgatcaacataaggtctgtgaatttgtaaaagtgctaaggcaaaagtttggaattgaataa

SEQ ID NO: 12113 - protein, 220 aa, Solanum lycopersicum
MANDEVILLDFWPSMFGMRLRIALAEKEIKYEYRDEDLRNKSPLLLQMNPIHKKIPVLIHNGKPICESIIGVEYIDEVWKDKAPFLPSDPYERAQARFWADYIDKKLYDSGRKLWTTKGGEQETAKKDFIECLKVLEGALGEKPYFGGGNFGCVDIALIGYYSWFYAYESYANISVEAECPKFVAWAKNCMLRDSVAKSLPDQHKVCEFVKVLRQKFGIE

SEQ ID NO: 12114 - DNA, 702 bp, Papaver somniferum
  CDS (1)..(702)
atggcaggatcaggaagtgaggaggtaaagattttaggtggatggccaagtccatttgtgatgaggcctagaattgcactcaacattaaatcagtcaagtattatcttcttgaagagacatttggtagcaaaagtgaacttcttctgaaatcaaatcctatttacaagaaaattcctgttatgattcatggtgataaacccatctgtgaatcaatgatcattgttcagtacattgatgatgtttgggcttctgctggacattctatcatcccgtctgatccttatgatgcttccattgctcgtttctgggcaacctacattgatgacaagttctttccgtctttaatggggattgcaaagagtaaggatgcagaagaaaaaaaagcagccattgaacaggcgattgcagcttttggtatactggaagaagcttatcagaaaactagtaaaggaaaagactttttcggggaagaaaaaattggatacattgatattgcatttgggtgttatataggttggattagagttacagagaaaatgaatggaatcaaactatttgatgaaacaaaagttccagggcttacaaaatgggctgagaaattttgtgcagatgagacagttaaatctgttatgcctgaaactgatgctctcatggagtttgctaagaagatctttggatctaagcctcctccttcaaactag

SEQ ID NO: 12115 - protein, 233 aa, Papaver somniferum
MAGSGSEEVKILGGWPSPFVMRPRIALNIKSVKYYLLEETFGSKSELLLKSNPIYKKIPVMIHGDKPICESMIIVQYIDDVWASAGHSIIPSDPYDASIARFWATYIDDKFFPSLMGIAKSKDAEEKKAAIEQAIAAFGILEEAYQKTSKGKDFFGEEKIGYIDIAFGCYIGWIRVTEKMNGIKLFDETKVPGLTKWAEKFCADETVKSVMPETDALMEFAKKIFGSKPPPSN

SEQ ID NO: 12116 - DNA, 669 bp, Hordeum vulgare
  CDS (1)..(669)
atggcgggcgagaagggcctggtgctgctggacttctgggtgagcccgttcgggcagcgcgtccgcatcgcgctggccgagaagggcctgccctacgagtacgtggaggaggatctcatcgccggcaagagcgaccgcctcctccgctccaacccggtccacaagaagatcccagtgctcctccacgacggccgccccgtcaacgagtcactcatcatcctcaactacctcgacgacgccttcccggacgccccggccctcctcccctccgacccctacgcgcgcgcgcaggcccgcttctgggccgactacgtcgacaagaaggtctacgactgcggcacccggctctggaaggtcaagggagagccgcaggcgcaggcgcgcgccgagatgctggagatcctcaagaccctcgacggcgcgctcggggacaagcccttcttcggcggcgacaagttcgggttcgtcgacgccgccttcgcgcccttcaccgcatggttccacagctacgagaggtacggcgagttcagcctggcggaggtggcgcccaagatcgcggcgtgggccaagcggtgcggcgagcgggagagcgtcgccaagagcctctactcgcccgagaaggtctacgacttcatcggcctgcttaagaagaggtacggcatcgagtag

SEQ ID NO: 12117 - protein, 222 aa, Hordeum vulgare
MAGEKGLVLLDFWVSPFGQRVRIALAEKGLPYEYVEEDLIAGKSDRLLRSNPVHKKIPVLLHDGRPVNESLIILNYLDDAFPDAPALLPSDPYARAQARFWADYVDKKVYDCGTRLWKVKGEPQAQARAEMLEILKTLDGALGDKPFFGGDKFGFVDAAFAPFTAWFHSYERYGEFSLAEVAPKIAAWAKRCGERESVAKSLYSPEKVYDFIGLLKKRYGIE

SEQ ID NO: 12118 - DNA, 657 bp, Daucus carota
  CDS (1)..(657)
atggcacatcagggagttaaattgttgggtgcatgggctagtccatacagccgaagagttgaaattgctctgaaattaaaaggcatcgattatgaattcgtcgcggaaactctgtcgcctaagagtgccgatattctgaaatacaaccctgtccataagaagctcccaatattcttgcacaatggcaagcctgttgtcgaatctcttgtcattgttgagtatattgacgagacttggagctctggaccttccattttgcctgcagaccctctcggaaaagccaatgctcgtttctgggctaaattcatcgacgacaagttgatgcccgcgataatgaacattcgtcgctgccaaggcgaagagcaagtgaaagctatcgatgaagtagtcgagcttttcaagttgctcgaaaaccaactcaacgggaagaaattcttcggaggtgacacaattggactagtcgacatcacggctaatttcttagcactatggcttataattcatcaagagataatggggttacagattgtgaccgaagagaagcttcctgtattttgtaagtggattgatgagtacctcaactccagcgttattaagcagagtttgccttccaaagaagaattatcagccgccttgcttgcctatcacaaatcttaa

SEQ ID NO: 12119 - protein, 218 aa, Daucus carota
MAHQGVKLLGAWASPYSRRVEIALKLKGIDYEFVAETLSPKSADILKYNPVHKKLPIFLHNGKPVVESLVIVEYIDETWSSGPSILPADPLGKANARFWAKFIDDKLMPAIMNIRRCQGEEQVKAIDEVVELFKLLENQLNGKKFFGGDTIGLVDITANFLALWLIIHQEIMGLQIVTEEKLPVFCKWIDEYLNSSVIKQSLPSKEELSAALLAYHKS

SEQ ID NO: 12120 - DNA, 708 bp, Alopecurus myosuroides
  CDS (1)..(708)
atggccggcggaaacgacctgaagctgctggggacatggccaagtccgtacgccatcagggtgaagctcgcgctcgcccacaagggcctgagctacgagtacgcggaggaggacctcgccaacaagagcgagcttctgctcagctccaacccggtgcacaggaagataccggtgctcatccacaacggcgtgccggtctgcgagtccaacatcatcctggagtacatcgacgaggccttcgccggccgttccatcctccccgccgacccgtacgaacgagccatggcccgcttctgggccgcctacgtcgacgacaagcttttggcggcgtgggccacgatggtgttcaaaggcaagacagaggaggagaaactcgaggggaagaaggcgctgttcgcggcgttggagacgctcgagggggccctcgccaagtgctccgacgggaaggacttcttcggcggagacaccgtggggctcgtggacatggtgctggggagccacctctcgtttctcaaggcgacggaggccatggccggagaggaaatcttgcgcagtgacaggactcaactccttgccgcgtggatggcgcgcttcagcgagctcgacgcggcgaaggcggccttgccggacgtggatagggtggttgagttcgtgaagatgaggcaggcgcggctggctgccgccgcagctgcggcatcaaacaactag

SEQ ID NO: 12121 - protein, 235 aa, Alopecurus myosuroides
MAGGNDLKLLGTWPSPYAIRVKLALAHKGLSYEYAEEDLANKSELLLSSNPVHRKIPVLIHNGVPVCESNIILEYIDEAFAGRSILPADPYERAMARFWAAYVDDKLLAAWATMVFKGKTEEEKLEGKKALFAALETLEGALAKCSDGKDFFGGDTVGLVDMVLGSHLSFLKATEAMAGEEILRSDRTQLLAAWMARFSELDAAKAALPDVDRVVEFVKMRQARLAAAAAAASNN

SEQ ID NO: 12122 - DNA, 672 bp, Nicotiana tabacum
  CDS (1)..(672)
atggcagaagtgaagttgctaggtttttggtatagtccatttagtcgcagagttgagtgggctctaaagataaagggcgtgaaatatgaatatatagaagaagatcgagataacaagagctctctacttcttcaatccaatcctattcacaaaaaagtccctgttctcattcacaatggaaaacgcattgttgagtctatggttattcttgaatacattgatgagacatttgaaggcccttccattttgcctaaagacccctatgatcgagctttagctcgtttctgggctaagttccttgacgataaggtgccagcagtagtgaagactttcttgcgcaaaggggaggagcaagagaaagataaagaggaagtttgtgagatgctgaaagttcttgacaatgagctcaaggataagaagttctttgtgggtgacaaatttgggtttgctgatattgctgcaaatttggtggcattttggctaggagttttcgaagaagcctctggagttgttttagtgacaagtgaaaaatttccaaatttttgtaagtggagaggtgagtacattaactgcagccaaatcaaggaatctctacctccaagagatgagttgcttgctttttaccgatctcgctgtcaagctgctgcagcttctgcttccgctcccaaatga

SEQ ID NO: 12123 - protein, 223 aa, Nicotiana tabacum
MAEVKLLGFWYSPFSRRVEWALKIKGVKYEYIEEDRDNKSSLLLQSNPIHKKVPVLIHNGKRIVESMVILEYIDETFEGPSILPKDPYDRALARFWAKFLDDKVPAVVKTFLRKGEEQEKDKEEVCEMLKVLDNELKDKKFFVGDKFGFADIAANLVAFWLGVFEEASGVVLVTSEKFPNFCKWRGEYINCSQIKESLPPRDELLAFYRSRCQAAAASASAPK

SEQ ID NO: 12124 - DNA, 672 bp, Nicotiana tabacum
  CDS (1)..(672)
atggcagaagtgaagttgctaggtttttggtatagcccatttagtcacagagttgagtgggctctaaagataaagggcgtgaaatatgaatatatagaagaagatcgagataacaagagctctctacttcttcaatccaatcctgtttacaaaaaagtccctgttctcattcacaatggaaaacccattgttgagtctatgatcattcttgaatacattgatgagacttttgaaggcccttcaattttgcctaaagacccttatgatcgagctttagctcgtttctgggctaagttccttgacgataaggtggcagcagtggtgaatactttctttcgcaaaggagaggagcaagagaaaggtaaagaggaagtttatgagatgctgaaagttcttgacaatgagctcaaggataagaaattctttgcgggtgacaaatttgggtttgctgatattgctgcaaatttggtgggattttggctaggagtttttgaagaaggctatggagatgttttggtgaaaagtgaaaaatttccaaatttttctaagtggagagatgagtacattaactgcagccaagtcaatgaatctctacctccaagagatgagttgcttgcttttttccgagctcgttttcaagctgttgttgcttctcgttccgctcccaaatga

SEQ ID NO: 12125 - protein, 223 aa, Nicotiana tabacum
MAEVKLLGFWYSPFSHRVEWALKIKGVKYEYIEEDRDNKSSLLLQSNPVYKKVPVLIHNGKPIVESMIILEYIDETFEGPSILPKDPYDRALARFWAKFLDDKVAAVVNTFFRKGEEQEKGKEEVYEMLKVLDNELKDKKFFAGDKFGFADIAANLVGFWLGVFEEGYGDVLVKSEKFPNFSKWRDEYINCSQVNESLPPRDELLAFFRARFQAVVASRSAPK

SEQ ID NO: 12126 - DNA, 672 bp, Nicotiana tabacum
  CDS (1)..(672)
atggcagaagtgaagttgctaggattttggtatagtccatttactcacagagttgagtgggctctaaagcttaagggcgtgaaatatgaatatatagaagaagaccgagataacaagagctctctacttcttcaatccaatcctgttcataaaaaagtccctgttctcattcacaatggaaaacccattgttgagtctatggtcattcttgaatacattgatgagacatttgaaggcccttccattttgcctaaagacccttatgaccgagctttagctcgtttctggtctaagttccttggcgacaaggtggcagcagtggtgaatactttctttcgcaaaggagaggagcaagagaaaggtaaagaagaagtgtatgagatgctgaaagttcttgacaatgagctcaaggataagaagttctttgtgggtgacaaatttgggtttgctgatattgctgcaaatttggtgggattttggctaggagtttttgaagaaggctatggagttgttttggtgacaagtgaaaaatttccaaatttttctaggtggagagatgagtacattaactgcagccaagtcaaggaatctctaccttcaagagatgagttgcttgcttttttccgagctcgttttcaagctgttgttgcttctatttccgctcccaaatga

SEQ ID NO: 12127 - protein, 223 aa, Nicotiana tabacum
MAEVKLLGFWYSPFTHRVEWALKLKGVKYEYIEEDRDNKSSLLLQSNPVHKKVPVLIHNGKPIVESMVILEYIDETFEGPSILPKDPYDRALARFWSKFLGDKVAAVVNTFFRKGEEQEKGKEEVYEMLKVLDNELKDKKFFVGDKFGFADIAANLVGFWLGVFEEGYGVVLVTSEKFPNFSRWRDEYINCSQVKESLPSRDELLAFFRARFQAVVASISAPK

SEQ ID NO: 12128 - DNA, 666 bp, Nicotiana tabacum
  CDS (1)..(666)
atggcgaacgaagaggtgattctgttggatttctggcctagcatgtttggcatgaggctcaggattgcattagctgaaaaggagataaagtatgagtacaaagaagaggacttgaggaacaaaagccctttgcttttacaaatgaatccaatccacaagaaaatcccagtgttgattcacaatggaaaacccatttgtgagtctattattgcagttgagtacattgaagaagtttggaaagacaaagcccctaatttgctcccttctgatccttatgacagagctcaagctaggttctgggctgattacattgacaagaagttgtatgattttgggaggaagttatggacaacaaaaggagaagagcaggaggcagctaagaaagatttcatagaatgcctcaaggtgttggagggagcactaggagacaagccttactttggaggggaaagttttgggtttgtggatattgctctgattggatactacagctggttttatgcctatgagacttttggcaacttcagcacagaggctgagtgcccaaaatttgtggcttgggccaagaggtgcatgcagagggagagtgttgctaagtctttacctgaccaacctaaagtccttgagtttgtaaaagtgcttaggcaaaagtttggacttgagtaa

SEQ ID NO: 12129 - protein, 221 aa, Nicotiana tabacum
MANEEVILLDFWPSMFGMRLRIALAEKEIKYEYKEEDLRNKSPLLLQMNPIHKKIPVLIHNGKPICESIIAVEYIEEVWKDKAPNLLPSDPYDRAQARFWADYIDKKLYDFGRKLWTTKGEEQEAAKKDFIECLKVLEGALGDKPYFGGESFGFVDIALIGYYSWFYAYETFGNFSTEAECPKFVAWAKRCMQRESVAKSLPDQPKVLEFVKVLRQKFGLE

SEQ ID NO: 12130 - DNA, 663 bp, Nicotiana tabacum
  CDS (1)..(663)
atggagagcaacaacgtggttctgctagatttctggccaagctcttttggtatgaggctaagaattgcattggccttaaagggaatcaaatatgaagcaaaggaggaaaacttatctgataaaagccctttgcttctggagatgaaccctgttcacaaaaagatccctattttgattcacaatagtaaagccatttgtgagtctctaaacattcttgagtacattgatgaagtctggcatgacaaatgtccattacttccttctgatccttacgaaaggtcacaagccagattctgggccgactatattgacaagaagatatatagcacaggaagaagagtgtggagcggtaaaggtgaagatcaagaagaagcaaagaaggaattcatagaaatactcaagactttggaaggagagcttggaaataaaacttactttggtggtgataatctgggttttgtggatgtggctttggttccctttactagttggttttattcttatgagacttgtgcaaactttagtatagaagcagagtgtccaaagctggtggtatgggcaaaaacatgtatggagagcgagagtgtctcaaagtcccttcctcatcctcacaagatctatggttttgtcttggaactcaagcacaagctcggtcttgcttga

SEQ ID NO: 12131 - protein, 220 aa, Nicotiana tabacum
MESNNVVLLDFWPSSFGMRLRIALALKGIKYEAKEENLSDKSPLLLEMNPVHKKIPILIHNSKAICESLNILEYIDEVWHDKCPLLPSDPYERSQARFWADYIDKKIYSTGRRVWSGKGEDQEEAKKEFIEILKTLEGELGNKTYFGGDNLGFVDVALVPFTSWFYSYETCANFSIEAECPKLVVWAKTCMESESVSKSLPHPHKIYGFVLELKHKLGLA

SEQ ID NO: 12132 - DNA, 666 bp, Nicotiana tabacum
  CDS (1)..(666)
atggcgaacgaagaggtgattctgttggatttctggcctagtatgtttggcatgaggctgaggattgcattagctgaaaaggaaataaagtatgagtacaaacaagaggacttgaggaacaaaagccctttgcttttacaaatgaatcctatccacaagaaaatcccagtgttgattcacaatggaaaacccatttgtgagtctattattgcagttgagtacattgaagaagtttggaaagacaaagcccctagtttgctcccttctgatccttatgacagagctcaagctaggttctgggctgactacattgacaagaagttgtatgattttgggaggaaattatgggcaacaaaaggagaagagcaggaggcagctaagaaagatttcatagaatgccttaaggtgttggagggagcactaggagacaggccttactttggaggggaaagttttgggtttgtggatattgctctgattggattctacagctggttttatgcctatgagacttttggcaacttcagcacagaggctgagtgcccaaaatttgtggcttgggccaagaggtgcatgcagagggagagtgttgctaagtctttacctgaccaacctaaagtccttgagtttgtaaaagttcttaggcagaagtttggacttgagtaa

SEQ ID NO: 12133 - protein, 221 aa, Nicotiana tabacum
MANEEVILLDFWPSMFGMRLRIALAEKEIKYEYKQEDLRNKSPLLLQMNPIHKKIPVLIHNGKPICESIIAVEYIEEVWKDKAPSLLPSDPYDRAQARFWADYIDKKLYDFGRKLWATKGEEQEAAKKDFIECLKVLEGALGDRPYFGGESFGFVDIALIGFYSWFYAYETFGNFSTEAECPKFVAWAKRCMQRESVAKSLPDQPKVLEFVKVLRQKFGLE

SEQ ID NO: 12134 - DNA, 675 bp, Brassica napus
  CDS (1)..(675)
atggcggagaaagaagaagtgaagcttctggggatatgggcgagccctttcagccgtcggatcgagatggctttcaaactcaaagggataccgtacgattacgttgaagaaatattggagcacaaaagccctttgcttcttgcactcaaccctatccacaagaaggtccctgttcttgtccacaatggcaaaaccattctcgagtctcaagtgattcttgaatacatcgatgagacttggaaacagaatccaattctccctcaggatccttacgagagatccaaggctcgattcttaggcaaactcgtcgatgaacagatcatcactgcgggttttgtatcaatggcaagagcagacgagaaaggaagagaggctttggccgagcagacaagagaactgattatgaatctggagaaggaacttgtcggaaaagatttcttcggtggtaagagtgtcgggtttttggatttggtcgccggaagtatgattccgttttgtttggagagaggttgggaaggaattggattgaaagtgattacagaggagaagtttccagaatacagcagatgggtgaagaacttggagaaggttgaggctgtgaaagattgtattcctccaagagagaaacatgttgaacacatgaattatatgggggaaagaatcagatccgcttag

SEQ ID NO: 12135 - protein, 224 aa, Brassica napus
MAEKEEVKLLGIWASPFSRRIEMAFKLKGIPYDYVEEILEHKSPLLLALNPIHKKVPVLVHNGKTILESQVILEYIDETWKQNPILPQDPYERSKARFLGKLVDEQIITAGFVSMARADEKGREALAEQTRELIMNLEKELVGKDFFGGKSVGFLDLVAGSMIPFCLERGWEGIGLKVITEEKFPEYSRWVKNLEKVEAVKDCIPPREKHVEHMNYMGERIRSA

SEQ ID NO: 12136 - DNA, 648 bp, Brassica napus
  CDS (1)..(648)
atggcagaggaggtgatacttctggacttctgggcgagtatgtttgggatgaggacgaggatcgctctggaggagaaaaaagtcaagttcgattatagagaacaagatttatggaataaaggctccttgctcctcgagatgaacccgattcataagaaaataccggttctcatccacaatggtaaaccggtctgtgagtctctcatccaggtcgagtacatcgacgagacttggcccggtgaaaaccccttccttccttctgatccttatcaaagagctcatgccaagttttgggcagatttcatcgacaaaaaggtgaatgttacggcgaggaggatttgggcgataaaaggtgaggagaaggaagcatccaaggagttaatagatatattcaagacgctagaagccgagcttggagacaagcattacttcggaggcgaaacgtttgggtatgtggacatagctctcattgggttctacagctggtttggagtctacaacaagtttgggaatatgcgtatcgaaacagagtgtccaacgttgactgcgtgggcccaaaggtgtttgaagagagagagcgtcgctaaaaccctgcctgagtcggagaaggtcactacgttcatttcccagcgtcttggcgtcgagtag

SEQ ID NO: 12137 - protein, 215 aa, Brassica napus
MAEEVILLDFWASMFGMRTRIALEEKKVKFDYREQDLWNKGSLLLEMNPIHKKIPVLIHNGKPVCESLIQVEYIDETWPGENPFLPSDPYQRAHAKFWADFIDKKVNVTARRIWAIKGEEKEASKELIDIFKTLEAELGDKHYFGGETFGYVDIALIGFYSWFGVYNKFGNMRIETECPTLTAWAQRCLKRESVAKTLPESEKVTTFISQRLGVE

SEQ ID NO: 12138 - DNA, 705 bp, Brassica napus
  CDS (1)..(705)
atgggtctattgagtggtgttaacaatgatgagtacgtaaggctattaggagcatggcctagccctttcgtgctgaggactcggatcgcacttaacctaaagcgtgtaccgtacgagtatctcgaagaagaagatactttgaattcggagagcgtgttaaactacaaccccgtccataaacagatccccatcctcatccatggaaacaaaccaatccgtgaatcactcaacatcgtcatgtacgtcgatgaaacttggctctccggccctccgatacttccttctgatccctttgatcgtgccgttgctcgtttttgggacgtctacattgacgaacactgtttcacatcaatcaatggagtggcggtagcaaaggacgaggaggaaagaaagatggcaatagcgaagctagagcagtgtatggctcttttggaagaaacgtttcaagaatgcagcaaaggaagaggcttctttggtggagacaacataggattcatcgatatcggtttcgggtcgatgttgggtcctcttaaggttcttgagaaattttcaggcgtcaagttcatacatccagagaacacgccaggtcttttcaattgggcagacagattctacgcccatgaagcagtcaagcctgtcatgcccgatatcgaaaaactggtcgagttcgctaggcttaagttcaatacttcaatctttaaataa

SEQ ID NO: 12139 - protein, 234 aa, Brassica napus
MGLLSGVNNDEYVRLLGAWPSPFVLRTRIALNLKRVPYEYLEEEDTLNSESVLNYNPVHKQIPILIHGNKPIRESLNIVMYVDETWLSGPPILPSDPFDRAVARFWDVYIDEHCFTSINGVAVAKDEEERKMAIAKLEQCMALLEETFQECSKGRGFFGGDNIGFIDIGFGSMLGPLKVLEKFSGVKFIHPENTPGLFNWADRFYAHEAVKPVMPDIEKLVEFARLKFNTSIFK

SEQ ID NO: 12140 - DNA, 690 bp, Glycine max
  CDS (1)..(690)
atgttgaccaaccagtctttctcagcaatgggagacgaggtgattctgttgaatttctggttaagcctttatgggatgagggtctggattgcactagaggaaaagggcatcaagtatgagaatagacaagagaatattagtaacaagagccagttactcttgcaaatgaacccagttcacaagaaaataccagttctcttccacaatagcagacacatctgtgattcactcattgctgttgagtatattgatgaggtttggaatgatcaatctcccttgttgccttctgatccttaccagagatcacaggctagattctggtctaactatgttgacaccaagatatatgagattgccgtgaggttttggaatactaaaggacaagagaaagaagctgccagggaagaatttttggagtgcatgaagttattggaagaacaactggtggatgagccatattttggtggaaagaactttggctttgtggatgttgcacttgtttctttgttcagttatttttataccttcactagtatatatggaaatttaatcaatgaggaacggtttcccaaaatcattgcttgggccaataggtgtattcaaaaagagtgtgtgttcaagtgttttcccgaggagctgaaggtcaaagagcatgtttcacagaagagaaaggattcgaacagtgaatag

SEQ ID NO: 12141 - protein, 229 aa, Glycine max
MLTNQSFSAMGDEVILLNFWLSLYGMRVWIALEEKGIKYENRQENISNKSQLLLQMNPVHKKIPVLFHNSRHICDSLIAVEYIDEVWNDQSPLLPSDPYQRSQARFWSNYVDTKIYEIAVRFWNTKGQEKEAAREEFLECMKLLEEQLVDEPYFGGKNFGFVDVALVSLFSYFYTFTSIYGNLINEERFPKIIAWANRCIQKECVFKCFPEELKVKEHVSQKRKDSNSE

SEQ ID NO: 12142 - DNA, 654 bp, Glycine max
  CDS (1)..(654)
atgggaagtgaagatcgtgtgaagctggtgaacttttgggcgagtccatttggcaaaagggttgaatgggccttgaaactgaagggtgtaaagtatgagtatattgaagaagatgtctacaacatgagcagtctagttatggagttgaacccggttcacaagaaggttccgattcttgttcatgcccagaaaccaatcgctgagtcattcaccattcttgaatacattgatgaaacatggaagcagtatccactattacctcaagatccttatcaaagagcacttgctcgcttttgggccaatttcggtgagcaaaagcttatgagagcagcacgaaaagcaatgacaaccagccgggatgaacgcgcaaaggctcttaaggaaacgagagaactaatggagagaatagaagaagagattaagggaaagaaatatttcggaggggacaatatagggttccttgacattgcactcggatggatctcttactggcttcctgttgtggaggaagttggatcgatgcacataatagacccattgaaatttccagccatcacttcatggatgaccaattttctcagccaccgtgtgatcaaagacaatttgcccccaagagataagatgcttgtttactaccgcaacttggttaattaa

SEQ ID NO: 12143 - protein, 217 aa, Glycine max
MGSEDRVKLVNFWASPFGKRVEWALKLKGVKYEYIEEDVYNMSSLVMELNPVHKKVPILVHAQKPIAESFTILEYIDETWKQYPLLPQDPYQRALARFWANFGEQKLMRAARKAMTTSRDERAKALKETRELMERIEEEIKGKKYFGGDNIGFLDIALGWISYWLPVVEEVGSMHIIDPLKFPAITSWMTNFLSHRVIKDNLPPRDKMLVYYRNLVN

SEQ ID NO: 12144 - DNA, 738 bp, Zea mays
  CDS (1)..(738)
atggcagagagcatggggagagacggtggtgatggtgagctcaagctgctggggctgtgggcgagcccgttcgtcacgagagcgaagctcgcgctccagatcaagggcctaagctacgagtacgtcgaggaggatctcggcaacaagagcgagctgctgctcagctccaacccggtgcacaagacggtgccggtgctgatccacaacgggacgccggtctgcgagtcgacggtcatcgtccagtacatcgacgaagctttcgccggcactggcccgtccctcctccccgctgacccctaccagcgcgcccttgctcgcttctgggccgcctacctcgaagacaagattgtgacgccgtggcggcgggtgttcatggtcaaggccgacgaggagaaggccgaggcgatgaggcagacggtcgcagccatggacgcgctggagggaggcctgaaggaatgctcttctgggggtgggggacagagccccttcttcggcggcgacagcgtcggctacgtggacgtccttctgggtggcatggtttcatgggtcaaggcatccgagccgctcttcggcgccaagatcatcgacgcagccaggacgccgctcctggccgcgtggatggagcgcttctgcgagctggacgcggccaaggcggtcctgcaggacgtccatgcggtggtcgagtacgccaggacggtgcaggcacgggttgccgctgcgaccgcaagcaatcagtag

SEQ ID NO: 12145 - protein, 245 aa, Zea mays
MAESMGRDGGDGELKLLGLWASPFVTRAKLALQIKGLSYEYVEEDLGNKSELLLSSNPVHKTVPVLIHNGTPVCESTVIVQYIDEAFAGTGPSLLPADPYQRALARFWAAYLEDKIVTPWRRVFMVKADEEKAEAMRQTVAAMDALEGGLKECSSGGGGQSPFFGGDSVGYVDVLLGGMVSWVKASEPLFGAKIIDAARTPLLAAWMERFCELDAAKAVLQDVHAVVEYARTVQARVAAATASNQ

SEQ ID NO: 12146 - DNA, 726 bp, Zea mays
  CDS (1)..(726)
atggctggaggaggaggacaggagctgaagctgctcggtacgtggacgagcccgtttgtgaccagggtgaagctcgcactcagcttcaagggcctgagctacgagaacctggaggaggaggacctctaccacaacaagagcgagctgctcctcaagtccaacccggtgcacaggcaggtgcctgttctcatccacaacggcaggtccatctgcgagtcccagctcatcgtgcagtacatcgacgaggccttcggcagcgcaaacggcccctccctcctcgccgccgagccctacgaacgtgccgtggctcgcttctggggcgcctacattgacgacaagctgttcgcgtcggcgtttcaggccggcagggccaagacggaggaggaaaaggccgaggcgttgaagcggacgttcgcggcggtggagacgctggaggcggccttcgagggcatctccgacgggaagcctttcttcggcggcgacagcgtggggtacctggacatcgtgctggggggcctcgtaccgatggtttactacggcgaggcgcgtcatggcatcaagctgtttgacggcaccagaagcccgctcttggaggcgtgggtggagcggtttggggcgttggatgccgccaaagcagtcctgccggacgtccacgagctggtcgagcacagcaagatgaagcgcgaacgagctgcagccatggccgcggccactggtagcgactaa

SEQ ID NO: 12147 - protein, 241 aa, Zea mays
MAGGGGQELKLLGTWTSPFVTRVKLALSFKGLSYENLEEEDLYHNKSELLLKSNPVHRQVPVLIHNGRSICESQLIVQYIDEAFGSANGPSLLAAEPYERAVARFWGAYIDDKLFASAFQAGRAKTEEEKAEALKRTFAAVETLEAAFEGISDGKPFFGGDSVGYLDIVLGGLVPMVYYGEARHGIKLFDGTRSPLLEAWVERFGALDAAKAVLPDVHELVEHSKMKRERAAAMAAATGSD

SEQ ID NO: 12148 - DNA, 654 bp, Helianthus annuus
  CDS (1)..(654)
atggcgaatgaggtgaagttgcacggagttacaggaagtccgttcgtctgcagagcggttattgctctgaatctgaaggaaatcaagtatgaatttgttgcggaagatttgagcaacaagagtgctgatttacttaaatacaatcctgtttataagaaggtgccggtgctcgtacacaacgggaatccgatatcggagtctcttgtgatcgtggagtatattgatgaagtgtggaaaggagttccgattttgcctcaggatgcttacgagaaggctcaggctcgattttgggccaaagttattgatgataagtgtcttcctgcagtattcaaggctattgcgagccatggagaggagcaagctgttgcagaagctcatgaggcactgcaatttctggaaaatgaactgaaagtgaaaggcagcaagttttttggaggtgataacatcaacctggttgatatttctgcaactttcctagccctttgggttggtgcagctgaagaagcattaggaatagaggtgttaagcaaacacaagtttccgaagttaaccgaatggagtgataactatgttaactgtcaagctgtgaaggatagcttacctccaaaagaaaacttagttgctttctttaagaagcggtttggtaaggcataa

SEQ ID NO: 12149 - protein, 217 aa, Helianthus annuus
MANEVKLHGVTGSPFVCRAVIALNLKEIKYEFVAEDLSNKSADLLKYNPVYKKVPVLVHNGNPISESLVIVEYIDEVWKGVPILPQDAYEKAQARFWAKVIDDKCLPAVFKAIASHGEEQAVAEAHEALQFLENELKVKGSKFFGGDNINLVDISATFLALWVGAAEEALGIEVLSKHKFPKLTEWSDNYVNCQAVKDSLPPKENLVAFFKKRFGKA

SEQ ID NO: 12150 - DNA, 723 bp, Brassica napus
  CDS (1)..(723)
atggcggagaaagaagaagtgaagcttctgggaatatgggcgagccctttcagccgtcggatcgagatggctctcaaactcaaagggataccgtacgattacgttgaagaaatattggagcacaaaagccctttgcttcttgcactcaaccccatccacaagaaggtccctgttcttgtccacaatggcaaaaccattctcgagtctcaagtgattcttgaatacatcgatgagacttggaaacagaatccacttctccctcaggatccttacgagagatccaaggctcgattcttagctaaactcgtcgatgagcagatcatcactgcgggttttgtatcaatggcaagagcagacgagaaaggaagagaggctttggccgagcagacaagagaactgattatgaatctggagaaggaacttgtcggaaaagatttcttcggtggtaagagtgtcgggtttttggatttggtcgccggaagtatgattccgttttgtttggagagaggttgggaaggaattggattgaaagtgattacagaggagaagtttccagaatacagcagatgggtgaagaacttggagaaggttgaggctgtgaaagattgtattcctccaagagagaaacatgttgaacacatgaattatatgggggaaagaatcagatccgcttacacgaaagtcatatttggttcggtgtttcaatgttttaagttgctgtaa

SEQ ID NO: 12151 - protein, 240 aa, Brassica napus
MAEKEEVKLLGIWASPFSRRIEMALKLKGIPYDYVEEILEHKSPLLLALNPIHKKVPVLVHNGKTILESQVILEYIDETWKQNPLLPQDPYERSKARFLAKLVDEQIITAGFVSMARADEKGREALAEQTRELIMNLEKELVGKDFFGGKSVGFLDLVAGSMIPFCLERGWEGIGLKVITEEKFPEYSRWVKNLEKVEAVKDCIPPREKHVEHMNYMGERIRSAYTKVIFGSVFQCFKLL

SEQ ID NO: 12152 - DNA, 705 bp, Brassica napus
  CDS (1)..(705)
atgggtctattgagtggtgttaacaatgatgagtacgtaaggctattaggagcatggcctagccctttcgtgctgaggactcggatcgcacttaacctaaagcgtgtaccgtacgagtatctcgaagaagaagatactttgaattcggagagcgtgttaaactacaaccccgtccataaacagatccctatcctcatccatggcaataaaccaatccgtgaatctctcaacatcgtcatgtacgtcgatgaaacttggctctccggccctcccatacttccctcagacccatttgatcgtgccgtagctcgcttttgggacgtctacatcgacgaacactgtttcacatcaatcaatggagtggcggtagcaaaagacgaggaggaaagaaagacggcaatagcaaaactagaaaagtgtatggctctattggaagaaacgtttcaagaatgcagcaaaggaagaggcttctttggaggagacaacataggattcatcgatatcggtttcggatcgatgttgggtcctctcaaggttcttgagaaatttacaggcgtcaagttcatacatccagaaaacacaccaggtcttttcaattgggcagacagattctacgcccatgaagcagtcaagcctgtcatgcccgatatcgaaaaactggtcgagttcgctaggcttaagttcaatacttcaatctttaaatga

SEQ ID NO: 12153 - protein, 234 aa, Brassica napus
MGLLSGVNNDEYVRLLGAWPSPFVLRTRIALNLKRVPYEYLEEEDTLNSESVLNYNPVHKQIPILIHGNKPIRESLNIVMYVDETWLSGPPILPSDPFDRAVARFWDVYIDEHCFTSINGVAVAKDEEERKTAIAKLEKCMALLEETFQECSKGRGFFGGDNIGFIDIGFGSMLGPLKVLEKFTGVKFIHPENTPGLFNWADRFYAHEAVKPVMPDIEKLVEFARLKFNTSIFK

SEQ ID NO: 12154 - DNA, 675 bp, Brassica napus
  CDS (1)..(675)
atggcggagaaagaagaagtgaagcttctgggaatatgggcgagccctttcagccgtcggatcgagatggctctcaaactcaaagggataccgtacgattacgttgaagaaatattggagcacaaaagccctttgcttcttgcactcaaccccatccacaagaaggtccctgttcttgtccacaatggcaaaaccattctcgagtctcaagtgattcttgaatacatcgatgagacttggaaacagaatccacttctccctcaggatccttacgagagatccaaggctcgattcttagctaaactcgtcgatgagcagatcatcactgcgggttttgtatcaatggcaagagcagacgagaaaggaagagaggctttggccgagcagacaagagaactgattatgaatctggagaaggaacttgtcggaaaagatttcttcggtggtaagagtgtcgggtttttggatttggtcgccggaagtatgattccgttttgtttggagagaggttgggaaggaattggattgaaagtgattacagaggagaagtttccagaatacagcagatgggtgaagaacttggagaaggttgaggctgtgaaagattgtattcctccaagagagaaacatgttgaacacatgaattatatgggggaaagaatcagatccgcttag

SEQ ID NO: 12155 - protein, 224 aa, Brassica napus
MAEKEEVKLLGIWASPFSRRIEMALKLKGIPYDYVEEILEHKSPLLLALNPIHKKVPVLVHNGKTILESQVILEYIDETWKQNPLLPQDPYERSKARFLAKLVDEQIITAGFVSMARADEKGREALAEQTRELIMNLEKELVGKDFFGGKSVGFLDLVAGSMIPFCLERGWEGIGLKVITEEKFPEYSRWVKNLEKVEAVKDCIPPREKHVEHMNYMGERIRSA

SEQ ID NO: 12156 - DNA, 681 bp, Helianthus annuus
  CDS (1)..(681)
atgtcgtcgactgaagaatcggagttggtgctgctaggagcgtgggcaagcatgttcagttcgagggtagaaatcgcgttggctgaaaagggcatcaactacaagtacatagaagaggagcatgtgctggacaacaaaagccctcttcttctcaaacacaaccccgtttataagaagatcccagttttgattcacaaaggcaaacccatatgtgaatccttaatcatcgtccaatacatcgatgacacatggaaggaaggatatcctttgttaccttctgatccttatctcaaatctcaagctgctttctgggcggattacgtggataagcatatttatcaaggtgcgaagttgatttgggattctaaaggtgaagggatgcagaaaggagttgaagaattcgtaggttacctcaaggtgttggaaagggaacttggtgagaagccatatttcaatggcgagtcctttggatttgttgatatagcacttatatcctactacagtcatattattgcggatgagaggatagggaattttagtattgagaaacactgtccaaagttgtttgtttgggccacacaatgcatgaaaagggagagtgtttccaagactcttgctgatccaaccaagatatgtgagttgcttatcgagattcgaaagaaaaatggtctagaagattga

SEQ ID NO: 12157 - protein, 226 aa, Helianthus annuus
MSSTEESELVLLGAWASMFSSRVEIALAEKGINYKYIEEEHVLDNKSPLLLKHNPVYKKIPVLIHKGKPICESLIIVQYIDDTWKEGYPLLPSDPYLKSQAAFWADYVDKHIYQGAKLIWDSKGEGMQKGVEEFVGYLKVLERELGEKPYFNGESFGFVDIALISYYSHIIADERIGNFSIEKHCPKLFVWATQCMKRESVSKTLADPTKICELLIEIRKKNGLED

SEQ ID NO: 12158 - DNA, 675 bp, Helianthus annuus
  CDS (1)..(675)
atgccggcaattgaagattcaggggtcgttgtgctaggatggtgggtaagcatgttcactactagggtacggattgctttggcagaaaaaggcatcagctacgaatacctagaagaagacataccaaacaaaagtcctctccttctcaagcacaaccccatttataagaaggtcccagttctgattcacaaaggcaaacccatctgtgaatccttaatcattgtccaatacatccatgaaacatggaaagaaggataccctttgttaccttctgatccttacctcaaatctcaagctgctttctgggctgattacatcgataagcatatttatcaagttgtgaagttaacttgggattcaaaaggtgaagagatgcagaaaagagttgaagaatttctgggttacctcaaggtgttggaaagggaactcggtgagaagccatatttcaatggtgagtcctttggatttgttgatatggcacttatatgctactacagtcatattattgcatttgggaagataggcaatttcagtgttgagaaagatacaccaaagttgtttgcttgggctacacaatgcttgaaaagggagagtgtttccaagactcttgctgatccaaacaagatttacgagttgcttatcgagattagaaagaaaaatggtctagaagattga

SEQ ID NO: 12159 - protein, 224 aa, Helianthus annuus
MPAIEDSGVVVLGWWVSMFTTRVRIALAEKGISYEYLEEDIPNKSPLLLKHNPIYKKVPVLIHKGKPICESLIIVQYIHETWKEGYPLLPSDPYLKSQAAFWADYIDKHIYQVVKLTWDSKGEEMQKRVEEFLGYLKVLERELGEKPYFNGESFGFVDMALICYYSHIIAFGKIGNFSVEKDTPKLFAWATQCLKRESVSKTLADPNKIYELLIEIRKKNGLED

SEQ ID NO: 12160 - DNA, 660 bp, Helianthus annuus
  CDS (1)..(660)
atggatgatgttatactgctagacttctgggtgagtgtgttcggtcagagggtaagaattgctctagctgaaaaaggtgttcactatgaaaacagagaagaaaacccgcagaacaaaaccccacttctccttgaaatgaacccggtccataaaaagatcccggttctcatccaccagggcaaacccgtatgcgaatccaacatcattgttcagtacatcgacgaggtgtggcacgacgacaagtccccgtcattgctgccttccgatccttatctccgagctcaggccaggttctgggctgacttcgttgacaaaaaggtatatgaggctgggaagaagatatggatgacagaaggcgaagaagatcgacaagtggcgaagaaggagttgatagaggtgttgaaggtgttagaagggcagctgggtgaaaagccttatttggtgggggaaagcttcgggttagcggatatagcactgattccgttcagcgtgtggttccatgcgtttgggaagatgaccatgaacatgaacatcgagagagaatgcccgaagctggctgcttgggtcaaccgctgcatggaaagagaggccgtctccaaatctcttcctcatcctcataagatttacgaattcgaccagaagaagaagaaaggccagtaa

SEQ ID NO: 12161 - protein, 219 aa, Helianthus annuus
MDDVILLDFWVSVFGQRVRIALAEKGVHYENREENPQNKTPLLLEMNPVHKKIPVLIHQGKPVCESNIIVQYIDEVWHDDKSPSLLPSDPYLRAQARFWADFVDKKVYEAGKKIWMTEGEEDRQVAKKELIEVLKVLEGQLGEKPYLVGESFGLADIALIPFSVWFHAFGKMTMNMNIERECPKLAAWVNRCMEREAVSKSLPHPHKIYEFDQKKKKGQ

SEQ ID NO: 12162 - DNA, 657 bp, Helianthus annuus
  CDS (1)..(657)
atggatgatgttatactgctagacttctgggtgagtgtgttcggtcagagggtaagaattgctctagctgaaaaaggtgttcactatgaaaacagagaagaaaacccgcagaacaaaaccccacttctccttgaaatgaacccggtccataaaaagatcccggttctcatccaccggggcaaacccgtatgcgaatccaacatcattgttcagtacatcgatgaggcgtggcacgacgacaagtctccgtcattgctgccttccgatccttatctccgagctcaggcaaggttctgggctgacttcgttgacaagaaggtatatgaggctgggaagaagatatggacgacagaaggaggcgaacaagtggcgaagaaggaggagttgatagaggtgttgaaggtgttagaagggcagctgggtgaaaagccttatttggtgggggaaagcttcgggttagcggatatagcactgattccgttcagcgtgtggttccatgcgtttgggaagatgaccatgaacatgaacatcgagagagaatgcccgaagctggctgcttgggtcaaccgctgcatggaaagagaggccgtctccaaatctcttcctcatcctcataagatttacgaattcgaccagaagaagaagaaaggccagtaa

SEQ ID NO: 12163 - protein, 218 aa, Helianthus annuus
MDDVILLDFWVSVFGQRVRIALAEKGVHYENREENPQNKTPLLLEMNPVHKKIPVLIHRGKPVCESNIIVQYIDEAWHDDKSPSLLPSDPYLRAQARFWADFVDKKVYEAGKKIWTTEGGEQVAKKEELIEVLKVLEGQLGEKPYLVGESFGLADIALIPFSVWFHAFGKMTMNMNIERECPKLAAWVNRCMEREAVSKSLPHPHKIYEFDQKKKKGQ

SEQ ID NO: 12164 - DNA, 699 bp, Glycine max
  CDS (1)..(699)
atggctcaaagggacttgaggcttttgggtgcttggttcagtccatttgccctgagggtgcagattgcccttaacctcaagggtttggattatgaggttgttgaagagactttgaatcccaaaagtgaattgcttcttaagtccaaccctgtgcacaagaaaatcccagttttcttccatggagataaagtcatatgtgaatctgcaatcatagttgagtacatagatgaggtttggtccaacaatgctctctccatccttccacaaaatgcatatgatcgagctaatgcccgattttgggtttcttacatcgatgacaagtggcttacgtccttgaaaagtgttctagcgactgaagatgatgaggcaaagaagctacactttgagcaagcggaagaagtgcttgagaaggtggaagaagtgttcaacaagtgcagtgaagggaaggcctatttcggaggagatacgattggatttgttgacattggttttggaagctttttgagtttcattagagtctcagagaatatgaatgaaagaaaattgcttgatgaaacgaagcaccctggtttgaccctatgggctgaaacttttgctgctgatcctgctgtgaagggccttctgccagagactgaaaagcttgttgagtttgcaaagattcttcagctaaaatgggctgctgcagctgctgcaaagtaa

SEQ ID NO: 12165 - protein, 232 aa, Glycine max
MAQRDLRLLGAWFSPFALRVQIALNLKGLDYEVVEETLNPKSELLLKSNPVHKKIPVFFHGDKVICESAIIVEYIDEVWSNNALSILPQNAYDRANARFWVSYIDDKWLTSLKSVLATEDDEAKKLHFEQAEEVLEKVEEVFNKCSEGKAYFGGDTIGFVDIGFGSFLSFIRVSENMNERKLLDETKHPGLTLWAETFAADPAVKGLLPETEKLVEFAKILQLKWAAAAAAK

SEQ ID NO: 12166 - DNA, 660 bp, Glycine max
  CDS (1)..(660)
atgggagatgaggtgattctgctgaatttctggttaagcccttatgggatgagggtccggattgcattagaagaaaagggcatcaagtatgaaagtagagaagaggacttaagcaacaagagctctttactcctccaaatgaacgcagttcataagaaaataccagttctcatccacaatggcaaacctgtctgtgagtcactcattattgttgagtatattgatgaggtttggaatgatcaatctcccttgttgccatctgatccttaccagagaaaccaagctagattctgggctaactatgttgacactaagatgtatgaaattgccttgaagttttggagaactgaaggggaagagaaagaagctgcgaaggaagaattttcggagtgtctggagttatttgaagaacaactgggggacaaaccttattttggtggagacaaccttggtcttctggatgttgcactagttccattgatctgttatttttacgcgtataatttatatggcaatttcatcaacgagaacaagtgcccgaaaatcattgcttgggctaagaggtgcactcaaaaagagagtgtttcaaagtgttttcctgaggtgcagagggtcaaagagtttatttcgcagaagaaaaagaatttgaacagtgagtag

SEQ ID NO: 12167 - protein, 219 aa, Glycine max
MGDEVILLNFWLSPYGMRVRIALEEKGIKYESREEDLSNKSSLLLQMNAVHKKIPVLIHNGKPVCESLIIVEYIDEVWNDQSPLLPSDPYQRNQARFWANYVDTKMYEIALKFWRTEGEEKEAAKEEFSECLELFEEQLGDKPYFGGDNLGLLDVALVPLICYFYAYNLYGNFINENKCPKIIAWAKRCTQKESVSKCFPEVQRVKEFISQKKKNLNSE

SEQ ID NO: 12168 - DNA, 699 bp, Glycine max
  CDS (1)..(699)
atggctcaaagggacttgaggcttttgggtgcttggttcagtccatttgtcctgagggtgcagattgcccttaacctcaagggtttggattatgaggttgttgaagagactttgaatcccaaaagtgaattgcttcttaagtccaaccctgtgcacaagaaaatcccagttttcttccatggagataaagtcatatgtgaatctgcaatcatagttgagtacatagatgaggtttggtccaacaatgctctctccatccttccacaaaatgcatatgatcgagctaatgcccgattttgggtttcttacatcgatgacaagtggcttacgtccttgaaaagtgttctagcgactgaagatgatgaggcaaagaagctacactttgagcaagcggaagaagtgcttgagaaggtggaagaagtgttcaacaagtgcagtgaagggaaggcctatttcggaggagatacgattggatttgttgacattggttttggaagctttttgagtttcattagagtctcagagaatatgaatgaaagaaaattgcttgatgaaacgaagcaccctggtttgaccctatgggctgaaacttttgctgctgatcctgctgtgaagggccttctgccagagactgaaaagcttgttgagtttgcaaagattcttcagctaaaatgggctgctgcagctgctgcaaagtaa

SEQ ID NO: 12169 - protein, 232 aa, Glycine max
MAQRDLRLLGAWFSPFVLRVQIALNLKGLDYEVVEETLNPKSELLLKSNPVHKKIPVFFHGDKVICESAIIVEYIDEVWSNNALSILPQNAYDRANARFWVSYIDDKWLTSLKSVLATEDDEAKKLHFEQAEEVLEKVEEVFNKCSEGKAYFGGDTIGFVDIGFGSFLSFIRVSENMNERKLLDETKHPGLTLWAETFAADPAVKGLLPETEKLVEFAKILQLKWAAAAAAK

SEQ ID NO: 12170 - DNA, 678 bp, Glycine max
  CDS (1)..(678)
atggcttcaagtcaggaagaggtgactcttttgggagtaattggaagcccatttgcttgcagggtgaagattgccctcaagttgaagggagttgaatacaaatatgtggaagaaaatttggccaacaagagtgatttgcttctcaaatccaacccagttcacaagaaagttccagtttttattcacaatgagaagcccatagcagagtctcttgtgattgttgagtacattgatgagacatggaagaacaaccccatcttgccttctgatccttaccaaagagccttggctcgtttctggtccaaattcattgatgacaagattgtgggtgctgcatggaatgctgttttcacggttgatgagaaagagcgtgagaagaatgttgtagaaacatatgaggctctgcagtttcttgagaatgagatcaaggacaagaaattctttggaggagaagaggttgggttggtagatatagctggtgtctacatagcattttgggtccctttgattcaagaaattgcagggttggagctattaagcagtgagaaatttcctaagctttacaagtggagccaagaatttgtgaaccatccaattgtcaaagaaggttttccccctagagacccagtttttgcctttttcaaaggacgctatgaaagcctttctgcttcaagatag

SEQ ID NO: 12171 - protein, 225 aa, Glycine max
MASSQEEVTLLGVIGSPFACRVKIALKLKGVEYKYVEENLANKSDLLLKSNPVHKKVPVFIHNEKPIAESLVIVEYIDETWKNNPILPSDPYQRALARFWSKFIDDKIVGAAWNAVFTVDEKEREKNVVETYEALQFLENEIKDKKFFGGEEVGLVDIAGVYIAFWVPLIQEIAGLELLSSEKFPKLYKWSQEFVNHPIVKEGFPPRDPVFAFFKGRYESLSASR

SEQ ID NO: 12172 - DNA, 681 bp, Glycine max
  CDS (1)..(681)
atggccaaagactatggagaggttgagttgtttggtgtaggtggaagcccttttgccagaagggtgcagattgccctagaactgaagggagttcaatacacttactttgaagaagatcttaggaacaagagtgctcttcttctcaaatacaaccctgttcacaagaaggtgcctgtgcttgtccacaatggaagacccttggctgagtcccttgtgatccttgaatacattgatgagacatgggagaaccaccaccccatcttgcctcaacaaccttatgatagagccttggctcgattctggtcaaggtacattgatgacaaatgcctgcctgcaatatcaaaggcagcatttactgtagacaaggaggaacgtgacaagggcactgaggaatcactcgagtctcttcaaattcttgagaatgagctcaaacacaagttctttggaggagagactatagacatagtggacatagccgctggtttcatagctttctggctccctgcaattgaagaggctgttgggttgaaattgctgaccaatgagaagtttccaaaactctacaaatggggtgaagactacaccaaccaccctattgtgaaaaagaatcttccccaaagagataggcttgtggggttcttcaaagctcgatatgcatcatccaacagtgcttccaaatag

SEQ ID NO: 12173 - protein, 226 aa, Glycine max
MAKDYGEVELFGVGGSPFARRVQIALELKGVQYTYFEEDLRNKSALLLKYNPVHKKVPVLVHNGRPLAESLVILEYIDETWENHHPILPQQPYDRALARFWSRYIDDKCLPAISKAAFTVDKEERDKGTEESLESLQILENELKHKFFGGETIDIVDIAAGFIAFWLPAIEEAVGLKLLTNEKFPKLYKWGEDYTNHPIVKKNLPQRDRLVGFFKARYASSNSASK

SEQ ID NO: 12174 - DNA, 684 bp, Helianthus annuus
  CDS (1)..(684)
atgggaaaaggcagtgaaatcaagcttattggaacccctccaagtccttatgtgaaccgggttcaattcgttctcaacctcaagtcaattgactatgagtttgtcgaagaaaatctcacttgcaaaagcgagcttctgttgacatcgaacccggtttataagaaagtaccggttcttatccatgcgaacaaaccacccattcccgagtctcttatcataatcgagtacctcgatgaaatctattcagatgtccacccaatcctcccctcggaccctttggctcgagctgataaccgattttgggctaactacatggacaccaagttttcccccttgttcgaagagttgaggaaaacaccagggaaagaaggaaaaaaagcaatagtaaaacaaataatcgaaggatctcagttattggaagaagcatttgtaaagtttagcaatgggaagccgtattttggtggagatgatgtaggatatctagatgttgttcttggatgttttcttggttggacaaagtttgttgaaaaacataacgaatttaagatatttgatgaagctagaaccccaaaattgctagaatggacagaccgtatatggtcgcatgaagcccttaaggatgtaatccccgggagcgaaacactgaagaacttttatatgattctgatgaagtataaaccttaa

SEQ ID NO: 12175 - protein, 227 aa, Helianthus annuus
MGKGSEIKLIGTPPSPYVNRVQFVLNLKSIDYEFVEENLTCKSELLLTSNPVYKKVPVLIHANKPPIPESLIIIEYLDEIYSDVHPILPSDPLARADNRFWANYMDTKFSPLFEELRKTPGKEGKKAIVKQIIEGSQLLEEAFVKFSNGKPYFGGDDVGYLDVVLGCFLGWTKFVEKHNEFKIFDEARTPKLLEWTDRIWSHEALKDVIPGSETLKNFYMILMKYKP

SEQ ID NO: 12176 - DNA, 660 bp, Helianthus annuus
  CDS (1)..(660)
atggtgggatctgaggtcattttgttggatttttggccaagcatgttcggaatgagggtaagaatcgctttggctgaaaagggtatcgagtatgattacaaagaacaagacttgcccgataaaagcacgttgcttcttgagatgaacccagttcacaagaaaatcccggttcttatacacaagggaaaacctataaatgagtcgtgtattattgttcagtatattgacgagacgtggaaggataagtccccgttgatgccctccgatccttacactagagctcaagctaggttttgggctgactatgtcgacaaaaaggtttatgatgcattaaagaaaagtgggacattaaagggtgaacaacaggaaaaggcaaagaaggaattcatagagattttgaaggtgttggaagggcagattggggaaaaaccatattttatgggagagtcctttgggtatgcagatattgcacttgtgaccttttactgttggttttatacatttgagacccttgggaattatagtattgaaaaagagtgcccaaagttgattgcatgggccaaaaggtgcatgcaaagggaaagtgtctccaaaactcttcctgattcgaagaagatttatgagttctttatggagatgagaagcaagcttggtttgtag

SEQ ID NO: 12177 - protein, 219 aa, Helianthus annuus
MVGSEVILLDFWPSMFGMRVRIALAEKGIEYDYKEQDLPDKSTLLLEMNPVHKKIPVLIHKGKPINESCIIVQYIDETWKDKSPLMPSDPYTRAQARFWADYVDKKVYDALKKSGTLKGEQQEKAKKEFIEILKVLEGQIGEKPYFMGESFGYADIALVTFYCWFYTFETLGNYSIEKECPKLIAWAKRCMQRESVSKTLPDSKKIYEFFMEMRSKLGL

SEQ ID NO: 12178 - DNA, 690 bp, Hordeum vulgare
  CDS (1)..(690)
atggatcatcaagaggagaaggtgaagctttttggcatgtgggcgagcccctacgtcctcaaggtgaaatgggcgctgagcatcaagggcgtggagtacgagtacctggaggaggacctgaggaacaagagcgacgatctcctggaacacaaccccgtgcacaagaaggtccccgtgctgctctaccacggcaagccggtggcagagtccgacgtcatcgtcgagttcgtcgacgaggcgtggagccaccgaggcggccgcatcctccccggcgacccctacgagcgcgccatggctcgtttctgggtgaggtttgtgcacgacaagctctcgccgccgatttggaagtggttcacgacggcgccaggcgaggaccaggaggccgcgcggggggcctccgttgagcagctgcaggtcctggaggagttgctcgccgtcggcgggaaggagttcttcgccggggagagcgttgaactcgtggacctgtcgctcggcgcgatggcgtacgtggtcccgatgtacgaggagatcgtcggcgtgaggctggtcaccgaggagaggtttccgtctctgtcggcgtggatggggcggttcttgggctcgccgccggtgaaggatcacccgccgccagtggagaggctgatacccaggtaccgagccatgcgcgaagcctttctgaagatgggctag

SEQ ID NO: 12179 - protein, 229 aa, Hordeum vulgare
MDHQEEKVKLFGMWASPYVLKVKWALSIKGVEYEYLEEDLRNKSDDLLEHNPVHKKVPVLLYHGKPVAESDVIVEFVDEAWSHRGGRILPGDPYERAMARFWVRFVHDKLSPPIWKWFTTAPGEDQEAARGASVEQLQVLEELLAVGGKEFFAGESVELVDLSLGAMAYVVPMYEEIVGVRLVTEERFPSLSAWMGRFLGSPPVKDHPPPVERLIPRYRAMREAFLKMG

SEQ ID NO: 12180 - DNA, 708 bp, Oryza sativa
  CDS (1)..(708)
atggccggaggaggagacgagctgaagctgctgggcatgtgggcgagcccgtacgttctgcgagtgaagctcgcgctcagtctcaagggcctcgactacgagtacgtcgaggaggatctcaagaacaagagcgagctcctcctcagctccaacccggtgaacaagaaggtgcccgtcctcatccacaatggcaagccagtctgcgagtcgcagatcatcctgcagtacctcgacgaggcgttccccgatgccggcgccaccctgctccccgccgacccccacgaacgcgccgtcgctcgcttctgggccgcctttatcgacgacaagctggtggcgccatgggagaaggtgttcagggccaagacggaggaggagagggccgcgtggatgaagcagatgttcgtcgcggtggaagctctcgagggaggcctgaaggagtgctccaaggggaagggatgcttcttcggcggcgacagcgtcgggtacgtcgacgtcgtgctggggggtgccgtctccttcgtgcacgccaacgacatgatcaccggtggaaagctcttcgacgctgcgaggacgccgctgctggcggcgtggttggagcgcttcggcgagctcgacgccgccaaggcggtgctgcaggacgtcgacagggcggtggagcacaccaaggtgcggtacgcacggaatgccgccaccgccgcaaacgactga

SEQ ID NO: 12181 - protein, 235 aa, Oryza sativa
MAGGGDELKLLGMWASPYVLRVKLALSLKGLDYEYVEEDLKNKSELLLSSNPVNKKVPVLIHNGKPVCESQIILQYLDEAFPDAGATLLPADPHERAVARFWAAFIDDKLVAPWEKVFRAKTEEERAAWMKQMFVAVEALEGGLKECSKGKGCFFGGDSVGYVDVVLGGAVSFVHANDMITGGKLFDAARTPLLAAWLERFGELDAAKAVLQDVDRAVEHTKVRYARNAATAAND

SEQ ID NO: 12182 - DNA, 714 bp, Oryza sativa
  CDS (1)..(714)
atggctgcagaagatgagctgaagctcctgggattttgggcgagcccctacgtttgcagagtgaagctcgcactccacctcaaaggcctgatctacgactatgtcaaggaggatgtcttcaccaacaagagcgagctcctcctcagctgcaacccggtgcacgcgaaggtccccgtgctcatccacaacggcaagcccatctgcgagtcgcaggtcatcgtacaatacatcgacgaggtcttccccgacgccggcgtcaccctcctccccgccgacccccacgatcgcgccgccgctcgcttctgggccgcctacatcgacgacaagctactgcccccgtggatgcacgcgtacaggggaaagacggacgaggagaaggccgagaggatgaagcagacgcttgcggtggtcgacgcgctggagacggcgatggaggagtgctccaaggggaacgccttcttcggcggcgacaccgtcgggtacgtcgacgtcgcgctggggggcttgctctcctggttgcacgggaccgaggagctgtgtggcgccaagatcttggacgccgccaagaccccgctcctgtcggcgtgggcgcggcgcttcggcgagctggatgcagccaacgcggcgctgccggacgtcggcaggttggtcgagttttgcaagatgaggcatgtcgagctggaggctgcagaggcagcagctgcgcgcaactga

SEQ ID NO: 12183 - protein, 237 aa, Oryza sativa
MAAEDELKLLGFWASPYVCRVKLALHLKGLIYDYVKEDVFTNKSELLLSCNPVHAKVPVLIHNGKPICESQVIVQYIDEVFPDAGVTLLPADPHDRAAARFWAAYIDDKLLPPWMHAYRGKTDEEKAERMKQTLAVVDALETAMEECSKGNAFFGGDTVGYVDVALGGLLSWLHGTEELCGAKILDAAKTPLLSAWARRFGELDAANAALPDVGRLVEFCKMRHVELEAAEAAAARN

SEQ ID NO: 12184 - DNA, 693 bp, Triticum aestivum
  CDS (1)..(693)
atggccggacgagatgacctgaagctgctcggcacatggccaagcccgtttgttaccagggtgaagctggcactcgccctgaagggcctgagctacgaggacgtggaggaggacctgtacaagaagagcgagcttctcctcaagtccaacccggtgcacaagaagataccagtgctcatccacaacggcgccccggtctgcgagtccatgatcattctgcagtacatcgacgaagtgttcgccggcaccggcccgtcccttctcccagcggacccctacgagcgcgccattgctcgcttctggatggcctacgttgacgacaagctggtagccccatggaggcagtggttgaggggcaagacagaggaggagaaatccgagggaaagaagcaggcgttcgcggcggtggagattcttgaaggggccctgagggaatgctccaagggaaggggcttcttcggcggcgacggcctcgggctcgtcgacgttgcgctgggaggcgttctgtcgtggatgaaggtgaccgaggtgttgtccggtgacaagatcttcgatgccgccaagaccccgctcctggccgcatgggtggagcgcttcagcgagctcgacgcggccaaggtggccctgccagacgtgggcaggctgcttgagttcgccaaggcacgagaggctgccgctgcaccgtctaactga

SEQ ID NO: 12185 - protein, 230 aa, Triticum aestivum
MAGRDDLKLLGTWPSPFVTRVKLALALKGLSYEDVEEDLYKKSELLLKSNPVHKKIPVLIHNGAPVCESMIILQYIDEVFAGTGPSLLPADPYERAIARFWMAYVDDKLVAPWRQWLRGKTEEEKSEGKKQAFAAVEILEGALRECSKGRGFFGGDGLGLVDVALGGVLSWMKVTEVLSGDKIFDAAKTPLLAAWVERFSELDAAKVALPDVGRLLEFAKAREAAAAPSN

SEQ ID NO: 12186 - DNA, 738 bp, Zea mays
  CDS (1)..(738)
atgtcattaatgagaatggagagaggagacgaggagctgaagctgctgggcatgtgggcgagcccgttcgtgctacgggtgcaactcgcgcttagcctcaagggcctgagctacgagtacgtggaggtggacatcagcaacaagagcgagctcctcctccactccaaccccgtccacaacaaggtccccgtgctcatccacaacgggaaccccgtctgtgagtcgcagctcatcctgcagtacatcgacgaggccttcgccgccaccggcccgtgcctcctcccggccgacccctacgaacgcgccgtcgctcgcttctgggccgcctacatcgacgacaaggtgctggcgtcttggatgcaggcctcgaggggcaagacagaggaggacagagccgagggaagaaatcagtggctcgtcgtggttgagacgctggagggagcgctgagggactgcgccgccggcaaggggatgatgatgcccttcttcggcggcgacagcgtcggctatgtggacgtggtgctcggcagcctgcttgggtgggtcagcgcaaaccaggaggtttggggcatagagtgcttccatccccgacgggctccgctgctggcagcgtgggcggaccgcttcgccgcactgcaaaccgtccagacggtggtgccccaagtcagcaggctggttgagctcggcaagatgttgagggcccgtcaatcggacggggccgctgctgcaagcaactga

SEQ ID NO: 12187 - protein, 245 aa, Zea mays
MSLMRMERGDEELKLLGMWASPFVLRVQLALSLKGLSYEYVEVDISNKSELLLHSNPVHNKVPVLIHNGNPVCESQLILQYIDEAFAATGPCLLPADPYERAVARFWAAYIDDKVLASWMQASRGKTEEDRAEGRNQWLVVVETLEGALRDCAAGKGMMMPFFGGDSVGYVDVVLGSLLGWVSANQEVWGIECFHPRRAPLLAAWADRFAALQTVQTVVPQVSRLVELGKMLRARQSDGAAAASN

SEQ ID NO: 12188 - DNA, 726 bp, Zea mays
  CDS (1)..(726)
atggctggggatggggagctgaagctgctgggcatgtgggcgagcccgttcgtccttcgtgcgagactcgcgctcagcttcaagggcctcaagtatgagtacgtcgaggaggagatctttggaaacaagagcgagctcctcctcgagtccaacccggtgcacaagaaggtacccgtgctcatccacaacggcaaggctatctgcgagtcacagatcatcgtgcagtacatcagtgaggtctacgacggcacaggcccttctctcctccccgtcggcgcctacgaccgtgctgtggctcgcttttgggctgcctacgttgacgacaaggtcttcagctcgttcatgatgatgataatgggcaagacggacgacgagaaggcagaggggcggaagcagttgtttgccgcggcggagaccctggagggagcactgaaggagtgctcgtgctccaaggggagacccagacccttcttcggcggcgacagcgtcggctacgtggacatagcgctcggaggcttcgtcgcgtgggtgcagacgagggacctgctgtctggcttggagcatttcgacgccgacaagaccccgctcctcgcgacgtggctggagcgcttctgcgcattgaacgaaaccaaggctgtcatgccggacgtgatgaagctgctcgagttctccaagaagaggcaagcacaagctgatgcggctgccgctgcagtggtcttgaggtag

SEQ ID NO: 12189 - protein, 241 aa, Zea mays
MAGDGELKLLGMWASPFVLRARLALSFKGLKYEYVEEEIFGNKSELLLESNPVHKKVPVLIHNGKAICESQIIVQYISEVYDGTGPSLLPVGAYDRAVARFWAAYVDDKVFSSFMMMIMGKTDDEKAEGRKQLFAAAETLEGALKECSCSKGRPRPFFGGDSVGYVDIALGGFVAWVQTRDLLSGLEHFDADKTPLLATWLERFCALNETKAVMPDVMKLLEFSKKRQAQADAAAAAVVLR

SEQ ID NO: 12190 - DNA, 20 bp, Artificial sequence
  primer
atggcggagaaagaagagag

SEQ ID NO: 12191 - DNA, 21 bp, Artificial sequence
  primer
ttaggcagacttaattgtctc

SEQ ID NO: 12192 - protein, 233 aa, Artificial sequence
  consensus sequence
  Variant (2)..(4): Xaa in position 2 to 4 is any amino acid
  Variant (6)..(6): Xaa in position 6 is any amino acid
  Variant (8)..(8): Xaa in position 8 is any amino acid
  Variant (10)..(11): Xaa in position 10 to 11 is any amino acid
  Variant (13)..(15): Xaa in position 13 to 15 is any amino acid
  Variant (18)..(19): Xaa in position 18 to 19 is any amino acid
  Variant (22)..(23): Xaa in position 22 to 23 is any amino acid
  Variant (25)..(26): Xaa in position 25 to 26 is any amino acid
  Variant (27)..(27): Xaa in position 27 is any or no amino acid
  Variant (30)..(33): Xaa in position 30 to 33 is any amino acid
  Variant (34)..(35): Xaa in position 34 to 35 is any or no amino acid
  Variant (38)..(38): Xaa in position 38 is any amino acid
  Variant (42)..(43): Xaa in position 42 to 43 is any amino acid
  Variant (46)..(46): Xaa in position 46 is any amino acid
  Variant (50)..(50): Xaa in position 50 is any amino acid
  Variant (54)..(57): Xaa in position 54 to 57 is any amino acid
  Variant (58)..(62): Xaa in position 58 to 62 is any or no amino acid
  Variant (65)..(66): Xaa in position 65 to 66 is any amino acid
  Variant (67)..(67): Xaa in position 67 is any or no amino acid
  Variant (70)..(71): Xaa in position 70 to 71 is any amino acid
  Variant (73)..(74): Xaa in position 73 to 74 is any amino acid
  Variant (79)..(84): Xaa in position 79 to 84 is any amino acid
  Variant (85)..(89): Xaa in position 85 to 89 is any or no amino acid
  Variant (92)..(92): Xaa in position 92 is any amino acid
  Variant (93)..(95): Xaa in position 93 to 95 is any or no amino acid
  Variant (99)..(99): Xaa in position 99 is any amino acid
  Variant (102)..(102): Xaa in position 102 is any amino acid
  Variant (107)..(110): Xaa in position 107 to 110 is any amino acid
  Variant (112)..(112): Xaa in position 112 is any amino acid
  Variant (114)..(137): Xaa in position 114 to 137 is any amino acid
  Variant (138)..(152): Xaa in position 138 to 152 is any or no amino acid
  Variant (155)..(161): Xaa in position 155 to 161 is any amino acid
  Variant (162)..(170): Xaa in position 162 to 170 is any or no amino acid
  Variant (174)..(175): Xaa in position 174 to 175 is any amino acid
  Variant (176)..(177): Xaa in position 176 to 177 is any or no amino acid
  Variant (179)..(180): Xaa in position 179 to 180 is any amino acid
  Variant (182)..(194): Xaa in position 182 to 194 is any amino acid
  Variant (195)..(200): Xaa in position 195 to 200 is any or no amino acid
  Variant (202)..(209): Xaa in position 202 to 209 is any amino acid
  Variant (210)..(211): Xaa in position 210 to 211 is any or no amino acid
  Variant (213)..(216): Xaa in position 213 to 216 is any amino acid
  Variant (218)..(229): Xaa in position 218 to 229 is any amino acid
  Variant (230)..(232): Xaa in position 230 to 232 is any or no amino acid
LXXXWXSXFXXRXXXALXXKGXXYXXXEEXXXXXXKSXLLLXXNPXHKKXPVLXXXXXXXXXKPXXXESXXIXXYIDEXXXXXXXXXXXLPXXXXDPYXRAXARFWXXXXDXKXXXXXXXXXXXXXXXXXXXXXXXXXXXXXXXXXXXXXXXLEXXXXXXXXXXXXXXXXFGGXXXXGXXDXXXXXXXXXXXXXXXXXXXGXXXXXXXXXXPXXXXWXXXXXXXXXXXXXXXP

SEQ ID NO: 12193 - protein, 20 aa, Artificial sequence
  protein pattern
  Variant (2)..(2): Xaa in position 2 is any amino acid
  Variant (3)..(3): Xaa in position 3 is Asp, Glu, Gly, Asn or Gln
  Variant (4)..(5): Xaa in position 4 to 5 is any amino acid
  Variant (6)..(6): Xaa in position 6 is Ile, Leu or Val
  Variant (7)..(7): Xaa in position 7 is any amino acid
  Variant (10)..(11): Xaa in position 10 to 11 is any amino acid
  Variant (13)..(13): Xaa in position 13 is Ile, Leu, Met or Val
  Variant (14)..(14): Xaa in position 14 is any amino acid
  Variant (16)..(16): Xaa in position 16 is Ile, Leu or Val
  Variant (18)..(19): Xaa in position 18 to 19 is any amino acid
  Variant (20)..(20): Xaa in position 20 is Phe, Trp or Tyr
HXXXXXXESXXIXXYXDXXX

SEQ ID NO: 12194 - protein, 14 aa, Artificial sequence
  protein pattern
  Variant (3)..(7): Xaa in position 3 to 7 is any amino acid
  Variant (8)..(8): Xaa in position 8 is Lys or Arg
  Variant (10)..(10): Xaa in position 10 is any amino acid
  Variant (11)..(11): Xaa in position 11 is Ala, Asp, Asn, Thr or Val
LPXXXXXXAXXRFW

SEQ ID NO: 12195 - protein, 29 aa, Artificial sequence
  protein pattern
  Variant (2)..(5): Xaa in position 2 to 5 is any amino acid
  Variant (6)..(6): Xaa in position 6 is any or no amino acid
  Variant (8)..(8): Xaa in position 8 is any amino acid
  Variant (9)..(9): Xaa in position 9 is Phe or Tyr
  Variant (10)..(10): Xaa in position 10 is Ala, Cys, Gly, Ser or Val
  Variant (11)..(11): Xaa in position 11 is any amino acid
  Variant (13)..(15): Xaa in position 13 to 15 is any amino acid
  Variant (18)..(19): Xaa in position 18 to 19 is any amino acid
  Variant (21)..(21): Xaa in position 21 is any amino acid
  Variant (22)..(22): Xaa in position 22 is Ile, Leu or Val
  Variant (23)..(23): Xaa in position 23 is any amino acid
  Variant (25)..(27): Xaa in position 25 to 27 is any amino acid
  Variant (28)..(28): Xaa in position 28 is any or no amino acid
LXXXXXSXXXXRXXXALXXKXXXYXXXXE

SEQ ID NO: 12196 - DNA, 294 bp, Arabidopsis thaliana
  CDS (1)..(294)
atgcagtcggcgaaggaaaagatcagtgacatggccagtacggccaaggagaaactcaacatcggtggcgcaaaggcacaaggtcatgcggagaagacgatggcaaggaccaaaaaagagaagaagttggcccaagagcgagagaagtctaaggaggcgcaggccaaagctgacctccatcaatccaaggctgagcatgctgcggacgctcaggttcacggccaccatcttcccggtcactccacctaccctacccgagccaccggagctaattacccgccgggacagatctaa

SEQ ID NO: 12197 - protein, 97 aa, Arabidopsis thaliana
MQSAKEKISDMASTAKEKLNIGGAKAQGHAEKTMARTKKEKKLAQEREKSKEAQAKADLHQSKAEHAADAQVHGHHLPGHSTYPTRATGANYPPGQI

SEQ ID NO: 12198 - DNA, 623 bp, Triticum aestivum
  CDS (126)..(482)
acatccaattccaatcacaagctccaaacaagcacagcaaaccaatccagagtaccatcggctatcaatcagcaggaggaagaaatagctgctcgatcggggaagaatcaagaggctcggcgaagatgcaggcggcgaaggagaaggtgaaggacggggtgagcgcggtgaaggccaagaccaagatcacgcaggccaaggcgtcggagaaggcggaggcggccacggcgaggtcgcacgccgagcgggagctggcgcacgagcgcggcaaggccaaggtcgccgcggccaagatggagctgcaccaggacaaggcgctccaccgggaggaggccatggagcaccgcatccacaagcacggcggccacggccgccaccaccacaagcacggcgtcggcatcgtggccgcgcccccaccggcaactggggcgggagccggggcgtaccaccatcctcccgccgccggtggccactactactaatccctaggcagctcgatcgccagctagatgggcacatgcgtcgcttctgtgtgatgtgatcttgatagctaataagcctctactttgtactctgtgtgtaatgacttaccaacgcgtgctttttaattttgcacttggttg

SEQ ID NO: 12199 - protein, 118 aa, Triticum aestivum
MQAAKEKVKDGVSAVKAKTKITQAKASEKAEAATARSHAERELAHERGKAKVAAAKMELHQDKALHREEAMEHRIHKHGGHGRHHHKHGVGIVAAPPPATGAGAGAYHHPPAAGGHYY

SEQ ID NO: 12200 - DNA, 628 bp, Triticum aestivum
  CDS (99)..(449)
aaaaacattcccagacacccaagcacccacacaaagaacacaacagcacatacacacagcaagcagaagaagcttttttttttcaaggagcggcgaggatgcagacggccaaggtgaaggtgaaggacgcggtgagctcggccaaggagaaggcgaaggagggcacggccaaggcgcagggcaagacgggcaaggccacggccaccacgcacggcgagaaggagatggccaaggaggagacgcgcgccaacaaggcccaggccaaggccgagatgcaccaggagaaggccgagcaccgcgccgaggccgcggccgggcgccacggcgccacgcacgtgcccctcaccgggccgcatggccaccaccgtcccgtcggcgcggctcctgccgccgccgaccctgcgtacccgggcaccggcgcgtacccgaccacggacaagtacgtgtagacgtgagatgatcgagggacaggagctggcagctagtgttttttatgtgtggctagttatcctgcccgtgtgttgtaggtggcgcgcgcgtgtatgctgtgcccacatgcgtgtgcccgaataaaatgtatcggtcagttgtaaaatgcacctttgatgtactagtaatttgtgactgg

SEQ ID NO: 12201 - protein, 116 aa, Triticum aestivum
MQTAKVKVKDAVSSAKEKAKEGTAKAQGKTGKATATTHGEKEMAKEETRANKAQAKAEMHQEKAEHRAEAAAGRHGATHVPLTGPHGHHRPVGAAPAAADPAYPGTGAYPTTDKYV

SEQ ID NO: 12202 - DNA, 339 bp, Zea mays
  CDS (1)..(339)
atgcagacagcgaaggtgaaggcgaaggacatggtgagctcggcgaaggagaaggtgaaggaggggtcggcaaagatgcagggcaagacgggcgaggcgacggcggccacgcacggcgagaaggagatggccaaggaggcggcccgcgccaagaaggaccaggccaacgccgacaagcaccaggagaaggccgaccaccgagcggacgccgccactggccaccacggcacgcgcgtgcccctcaccggcccgcacggccaccacggcgctggcgcggccgtcgaccccgcgtacccgtcctccggcaacacgtacccggcgtcgggcaagtacatctag

SEQ ID NO: 12203 - protein, 112 aa, Zea mays
MQTAKVKAKDMVSSAKEKVKEGSAKMQGKTGEATAATHGEKEMAKEAARAKKDQANADKHQEKADHRADAATGHHGTRVPLTGPHGHHGAGAAVDPAYPSSGNTYPASGKYI

SEQ ID NO: 12204 - DNA, 369 bp, Oryza sativa
  CDS (1)..(369)
atgcagacggcgaaggtgaaggtgcaggacatggtgagcggtgccaaggagaaggtgaaggaggggacggccaaggcgcacggcaaggccggccaggcgacggcggccacgcacggcgagaaggagatggccaagcaggaggagaaggccggcaaggcacaggccaaggccgacgagcaccaggagagggcggagcaccgcgccaacgccaccacgggccgccacggcacgcgcgtgccgcttacggccggcggcaaccgccaccaccacgctccggtcggcggccccgccgtcgaccctgcatacccggccgccggcaccggcaccggcaccggcacgtacgcggcgtccgacaaatcgtacatctag

SEQ ID NO: 12205 - protein, 122 aa, Oryza sativa
MQTAKVKVQDMVSGAKEKVKEGTAKAHGKAGQATAATHGEKEMAKQEEKAGKAQAKADEHQERAEHRANATTGRHGTRVPLTAGGNRHHHAPVGGPAVDPAYPAAGTGTGTGTYAASDKSYI

SEQ ID NO: 12206 - DNA, 312 bp, Oryza sativa
  CDS (1)..(312)
atgcaggcggtgaaggagaaggtgaaggacaaggtgagcgcggtgaaggcgaaggggaaggtgagcaaggccaaggccgacgagaagaaggaggtggcgacggcgaggtcccacgccgagagggagctggcgcacgagcgcgctaaggccagggtcgccgccgccaagatggagctgcaccaggacaaggccctccaccgcgaggaggccatccagcacaggctccataagcatggcgccggaaccaccgccggcgttcgtccgaccgccgcggcgccggcgccgcacctcccacctgctagctactactag

SEQ ID NO: 12207 - protein, 103 aa, Oryza sativa
MQAVKEKVKDKVSAVKAKGKVSKAKADEKKEVATARSHAERELAHERAKARVAAAKMELHQDKALHREEAIQHRLHKHGAGTTAGVRPTAAAPAPHLPPASYY

SEQ ID NO: 12208 - DNA, 396 bp, Glycine max
  CDS (1)..(396)
atgcaatcttcaaaggagaagctgaaaaacatgaccagtgctgccaaggagcaagtcgacatctataaagcaaaaatagacgagaagacagagaaagcaacggcaagaacagaagaggagagggtgattacccatgaacgtgcaaaggcaaaggaagctgaagcaaagatggagctgcatgaagcaaaagccaggcatgcagcagagaagctaagcaccaaccaatcacattatggtctccaccatggccacaaccctcccctggtaggaacaactgagactcactaccagcaagggcaccaccagccacttggggcagttcctatgcctggagccatttatccatcttatccgctaggagcaaaccctaaccctccaaggaacaaacatatataa

SEQ ID NO: 12209 - protein, 131 aa, Glycine max
MQSSKEKLKNMTSAAKEQVDIYKAKIDEKTEKATARTEEERVITHERAKAKEAEAKMELHEAKARHAAEKLSTNQSHYGLHHGHNPPLVGTTETHYQQGHHQPLGAVPMPGAIYPSYPLGANPNPPRNKHI

SEQ ID NO: 12210 - DNA, 402 bp, Glycine max
  CDS (1)..(402)
atgcaatcctcaaaggagaagatgaaaaacatggcaagtgctgccaaggaacaagtcgacatctataaagccaaaatagacgagaaggcagagaaagcaacggcaagaacagaagaggagagggtgatagcccatgagcacgcaaaggcaaaggaagctggagcaaagatggagctgcatgaagctaaagcaaggcatgcagcagagaagctaagcgccaaccaatcacattatggtctccaccatggccacaacaaccctcccttagtaggaacaactcagactcactaccagcaagggcaccagcaccagccacttggggcagttcctatgcctggaaccacttatccatcttatccactaggaggaaaccctaaccctccaaggaacaaacatatataa

SEQ ID NO: 12211 - protein, 133 aa, Glycine max
MQSSKEKMKNMASAAKEQVDIYKAKIDEKAEKATARTEEERVIAHEHAKAKEAGAKMELHEAKARHAAEKLSANQSHYGLHHGHNNPPLVGTTQTHYQQGHQHQPLGAVPMPGTTYPSYPLGGNPNPPRNKHI

SEQ ID NO: 12212 - DNA, 635 bp, Zea mays
  CDS (89)..(430)
aacattcccagacacccaagcacccacacaaagaacacatacacacagcaagcggaagaagcttttttcccgaggaagagcggcgaggatgcagacggccaaggtgaaggtgaaggacgcggtgagctcggccaaggagaaggcgaaggagggcacggccaaggcgcagggcaagacgggcaaggccacggcgaccacgcacggcgagaaggagatggccaaggaggagacgcgcgccaacgaggcccaggccaaggccgagatgcaccaggagaaggccgagcaccgcgccgaggccgccgcggggcgccacggtgccacgcacgtgcccctcaccgggccgcatggccaccaccgccctgcgggcgccgccgccgaccctgcgtacacgggcaccggcgcgtacccgaccacggacaagtacgtctagacgccagatgatcgggggatcaggagctggcagctagtgttttttgtgtgtggctagtgatcctgcccgtgtgtcgtagttggcgcgcgcgtgtatgctgtgcgaacatgcgtgtgcccgaataaaatgtatcggtcagttgtaaaatgcacctttgatgtactagtaatttgtgagtccaaaaaaaaaaaaaaaaaaaaaaaaa

SEQ ID NO: 12213 - protein, 113 aa, Zea mays
MQTAKVKVKDAVSSAKEKAKEGTAKAQGKTGKATATTHGEKEMAKEETRANEAQAKAEMHQEKAEHRAEAAAGRHGATHVPLTGPHGHHRPAGAAADPAYTGTGAYPTTDKYV

SEQ ID NO: 12214 - DNA, 675 bp, Zea mays subsp. mays
  CDS (113)..(466)
ccaattccgatcacaagctccaatcaaaccaatccagagtaccatcggctatcaatcagcaggaggaagaaaccgctgctcgaccggggaagaaccaagaggctcggcgaagatgcaggcggcgaaggagaaggtgaaggacggcgtgagcgcggtgaaggccaaggccaagatcacgcaggccaaggcgtcggagaaggcggaggcggccacggcgaggtcgcacgcggagcgggagctggcgcacgagcgcggcaaggccaaggtggccgcggccaagatggagctgcaccaggacaaggcgctccaccgggaggaggccatggagcaccgcatccacaagcacggcggcggccacggccgccaccaccacaagcacggcgtcggcatcgtggccgcgcccccgccggcgaccggtgccggggcttaccaccctcctcctgccgccggtggccactactactgatcagctacgcagctggatcgccagctagatgggcacatgcgtcgcgtttgtgtgatgtgttctcgatagctaataagtctgtactttgtgatgtttatgtttgacttacccacgcgtggtttttcattttgcacttggcttggatatgagagctgtacttgatatttatgcacatatgaatgcatgcgaccttgttggcttgtcccgcg

SEQ ID NO: 12215 - protein, 117 aa, Zea mays subsp. mays
MQAAKEKVKDGVSAVKAKAKITQAKASEKAEAATARSHAERELAHERGKAKVAAAKMELHQDKALHREEAMEHRIHKHGGGHGRHHHKHGVGIVAAPPPATGAGAYHPPPAAGGHYY

SEQ ID NO: 12216 - DNA, 405 bp, Arabidopsis thaliana
  CDS (1)..(405)
atgcaatcggcgaaacagaagataagcgatatggctagtacagccaaggagaagatggtgatatgtcaagcaaaagctgatgagaaggcagagcgggcgatggcgaggacgaaagaggagaaagagatagcgcaccaacggagaaaggcgaaggaagcagaagcgaatatggatatgcacatggctaaagcggctcatgcggaagacaagcttatggctaagcaatctcactaccatgttactgatcatggtccccacgtgcctcaacaagcgcctgtaccggctcccgcaccggttatgggacacggttacgggcataatcctaccggagttacctcagtgcctcctcagacctatcatccgacttatcctccgacgggacatcataatcatcatcactactaa

SEQ ID NO: 12217 - protein, 134 aa, Arabidopsis thaliana
MQSAKQKISDMASTAKEKMVICQAKADEKAERAMARTKEEKEIAHQRRKAKEAEANMDMHMAKAAHAEDKLMAKQSHYHVTDHGPHVPQQAPVPAPAPVMGHGYGHNPTGVTSVPPQTYHPTYPPTGHHNHHHY

SEQ ID NO: 12218 - DNA, 387 bp, Vitis vinifera
  CDS (1)..(387)
atgatgcaatcttacaaggagaagataagcaacatggccagcgtggccaaggagcacatcaccatctgcaaggccagagctcaggagaaggcagagaaagcaatggcgaggacaaaggaggagaaagagatagccaaggagcgtaggaaggccaaagaggctcaagccaagatgcagttgcatgcagagaaggcggagcacgccgcccgcaaactcaacgccaagcactcacatcttcactcgactcacacccaccaaggctacaatcagcctgctgctggggccacagctccgatgtaccctcagcctcagcctgttgttggagccactaccgccccaacctatcctccttcaacgcatcctcctccagaggccaagtatttctag

SEQ ID NO: 12219 - protein, 128 aa, Vitis vinifera
MMQSYKEKISNMASVAKEHITICKARAQEKAEKAMARTKEEKEIAKERRKAKEAQAKMQLHAEKAEHAARKLNAKHSHLHSTHTHQGYNQPAAGATAPMYPQPQPVVGATTAPTYPPSTHPPPEAKYF

SEQ ID NO: 12220 - DNA, 375 bp, Populus trichocarpa
  CDS (1)..(375)
atgcaagctgctaaggagaaaatcaccaatttggctagtgttgctaaggagcgcatgactatctgcaaagccaaggttgaagagcaggcagagttaacaacagccaggacagcagaagagaaagagttggccagggagcgtagaaaagtaaagggagcacaggcaaagatggaattgcatcaggccaaagccaagcatgcagctgagaaattaagttccaagcaccaccaccaccaccaaccgcctgtggtgggcactcagcccgttgttggaacccatgctaaccagccagtcggaactggtggtaccatgcctggaaccacggcccctgcataccccctaggaggacaccctcctggacacaggcatatttag

SEQ ID NO: 12221 - protein, 124 aa, Populus trichocarpa
MQAAKEKITNLASVAKERMTICKAKVEEQAELTTARTAEEKELARERRKVKGAQAKMELHQAKAKHAAEKLSSKHHHHHQPPVVGTQPVVGTHANQPVGTGGTMPGTTAPAYPLGGHPPGHRHI

SEQ ID NO: 12222 - DNA, 441 bp, Sorghum bicolor
  CDS (1)..(441)
atgcaggcggtgaaggagaaggtgaaggacgcgatgagcacggcgaaggcgaaggcgagggagcaggaggcgaaggcggaggagaaggccggcaaggcgacggcgagctcgagcgccgagaaagagctggtgcaccagcgcgccaaggccaaggtcgccgccgccaagatggacctccaccaggagaaggccatccacaaggaggaggccatcgcgcagaagctccaccatggtcgtcgccaccaccagcaccactacggcggctacggcgccggtcccggcgtcgtcggaccagcagcgacgacgactgctgctactactgctgtcccgccggcaccagcagccaccacggcggccgccgtaccgccgccgccaacgacgacggctgctggaccgctgcatcaccaccacgctccggcggccaaccgacactactactag

SEQ ID NO: 12223 - protein, 146 aa, Sorghum bicolor
MQAVKEKVKDAMSTAKAKAREQEAKAEEKAGKATASSSAEKELVHQRAKAKVAAAKMDLHQEKAIHKEEAIAQKLHHGRRHHQHHYGGYGAGPGVVGPAATTTAATTAVPPAPAATTAAAVPPPPTTTAAGPLHHHHAPAANRHYY

SEQ ID NO: 12224 - DNA, 312 bp, Sorghum bicolor
  CDS (1)..(312)
atgcagacggcgaaggtgaaggcgaaggacatggcgagcgaggcgaaggagaaggcgaaggaggcgacagccaagatgcagggcaagacgggcgaggcgacggcggccacgcacggcgagaaggagatggccaaggaggcggcccgcgccaagaaggaccaggccagcgccgacaagcaccaggagaaggccgagcaccgcgtggacgccgccgccacgactggccgccacggcgccggcgccggcgcggccgtcgaccgcgcgtacccgtccgccggcaccacgtacccggcgtcgggcaagtacatctag

SEQ ID NO: 12225 - protein, 103 aa, Sorghum bicolor
MQTAKVKAKDMASEAKEKAKEATAKMQGKTGEATAATHGEKEMAKEAARAKKDQASADKHQEKAEHRVDAAATTGRHGAGAGAAVDRAYPSAGTTYPASGKYI

SEQ ID NO: 12226 - DNA, 375 bp, Ricinus communis
  CDS (1)..(375)
atgaaatcagcgaaggagaagatcagcaatatggccagtgctgccaaagagcacataaccatctgcagagctaaagttgacgaaaaggtagagaaagcggcagctcggacaccggagcaaaaacagatagcaaaggagcgtaggaaggcaagagaagcgcaggccaagatggagttgcatcaagccaaagccaagcatgctgctcagaagtcgagacaccaccacccacctacggtaggcacccagtatggccctacccagcctgtggttggaacccaagtaaacaatcccgtgggaagcacggctaccatggctggaaccactgtgccttcgtaccctttaggagggcatcctcctggatataagtatatgtaa

SEQ ID NO: 12227 - protein, 124 aa, Ricinus communis
MKSAKEKISNMASAAKEHITICRAKVDEKVEKAAARTPEQKQIAKERRKAREAQAKMELHQAKAKHAAQKSRHHHPPTVGTQYGPTQPVVGTQVNNPVGSTATMAGTTVPSYPLGGHPPGYKYM

SEQ ID NO: 12228 - DNA, 306 bp, Oryza sativa subsp. indica
  CDS (1)..(306)
atgcaggcggtgaaggagaaggtgaaggacaaggtgagcgcggtgaaggcgaaggggaaggtgagcaaggccaaggccgacgagaagaaggaggtggcgacggcgaggtcccacgccgagagggagctggcgcacgagcgcgctaaggccagggtcgccgccgccaagatggagctgcaccaggacaaggccctccaccgcgaggaggccatccagcacaggctccataagcatggcgccggaaccaccgccggcgttcgtccgaccgccgcggcgccggcgccgcaccccccacctgctagctag

SEQ ID NO: 12229 - protein, 101 aa, Oryza sativa subsp. indica
MQAVKEKVKDKVSAVKAKGKVSKAKADEKKEVATARSHAERELAHERAKARVAAAKMELHQDKALHREEAIQHRLHKHGAGTTAGVRPTAAAPAPHPPPAS

SEQ ID NO: 12230 - DNA, 351 bp, Oryza sativa subsp. japonica
  CDS (1)..(351)
atgcagacggcgaaggtgaaggtgcaggacatggtgagcggtgccaaggagaaggtgaaggaggggacggccaaggcgcacggcaaggccggccaggcgacggcggccacgcacggcgagaaggagatggccaagcaggaggagaaggccggcaaggcacaggccaaggccgacgagcaccaggagagggcggagcaccgcgccaacgccaccacgggccgccacggcacgcgcgtcccgcttagggccgcgcggcacccgccaccaccacgttccagtcggcggccccgccgtcgaccctgcatacccggccgccggcaccggcaccggcaccggcactgtagcgagtga

SEQ ID NO: 12231 - protein, 116 aa, Oryza sativa subsp. japonica
MQTAKVKVQDMVSGAKEKVKEGTAKAHGKAGQATAATHGEKEMAKQEEKAGKAQAKADEHQERAEHRANATTGRHGTRVPLRAARHPPPPRSSRRPRRRPCIPGRRHRHRHRHCSE

SEQ ID NO: 12232 - DNA, 426 bp, Boea hygrometrica
  CDS (1)..(426)
atgcaagctgtgaaacagaaggtgagtaacgctgcagcagcagccaaagagcatgttgacgtgatgaaagccaaagctgaagagaagagagagttatctatggcaaggaccaaggaagaagaagcgattgctacagagcggaggaaagccaaggaagctgaggccaacatgaggctgcacgctaccaaggctgataatgcggccgtgaaattgcaagggaagcaaaaagggctcttcggtaatcgtcaccacggtacaggtgcggctacggtggggcaaggcaatcattatcccactggtaccaccgccccgatgtcgaatactactgcccctggctatggtaactataatgcgacgggcgggactattacaccgacaactaatattggcggccaccgccgccaccaccaccatggcctgaaatga

SEQ ID NO: 12233 - protein, 141 aa, Boea hygrometrica
MQAVKQKVSNAAAAAKEHVDVMKAKAEEKRELSMARTKEEEAIATERRKAKEAEANMRLHATKADNAAVKLQGKQKGLFGNRHHGTGAATVGQGNHYPTGTTAPMSNTTAPGYGNYNATGGTITPTTNIGGHRRHHHHGLK

SEQ ID NO: 12234 - DNA, 390 bp, Boea hygrometrica
  CDS (1)..(390)
atgcagactgcgaagcaaaagatgagcgatgctgcggcgtcagccaaggagcgtgttgatgtcctgaaagccaaagcggaagggaaggcggataaaactatggcaagttcgaaggaagacaaagaagtggccaaggaacagaagaaggcgaaagaagctgaagccaaggtgaggaagcatgaagagaaggccgataatgcgaccggccatttgcaggcgaagcatcagggacaatttggtcagcaggatcttcacggtgcgggtgcggcgccggcgacgcaaggcaatcagtatcccgcagggggagccactcagattccaccggaggaagctgcggcccagtatgagcaggctgcaccggggacgaacccggcagctccgactcagtag

SEQ ID NO: 12235 - protein, 129 aa, Boea hygrometrica
MQTAKQKMSDAAASAKERVDVLKAKAEGKADKTMASSKEDKEVAKEQKKAKEAEAKVRKHEEKADNATGHLQAKHQGQFGQQDLHGAGAAPATQGNQYPAGGATQIPPEEAAAQYEQAAPGTNPAAPTQ

SEQ ID NO: 12236 - DNA, 309 bp, Bupleurum chinense
  CDS (1)..(309)
atgcgttcagcaaaggagaggataagtaacgcagctagtgctgctcagcatcatgtagacatctccaaagcccatgctcaagaaaaggcatcgaaggcaacagcgataacaagtcatgagaaagtgatagctcatgaaagaatgaaagctaaagaggctgaagctaagatgaaacttcattctgccaaagccgaacacgctgctgagaaactctatgggaagcacgccccaggaaaaacagggcacgtgccggctggaagtactactgcagtggcgccaggtcacactgcagggaaaggccgccactag

SEQ ID NO: 12237 - protein, 102 aa, Bupleurum chinense
MRSAKERISNAASAAQHHVDISKAHAQEKASKATAITSHEKVIAHERMKAKEAEAKMKLHSAKAEHAAEKLYGKHAPGKTGHVPAGSTTAVAPGHTAGKGRH

SEQ ID NO: 12238 - DNA, 354 bp, Hordeum vulgare var. distichum
  CDS (1)..(354)
atgcaggcggcgaaggagaaggtgaaggacggcgtgagcgcggtgaaggccaagaccaagatcacgcaggccaaggcgtcggagaaggcggaggcggccacggcgaggtcgcacgcggagcgggagctggcgcacgagcgcggcaaggccaaggtggccgcggcaaagatggagctgcaccaggataaggcgctccatcgggaggaggccatggagcaccgcatccacaagcacggtggcggccatggccgccaccaccacaagcacggcgtcggcatcgtggccgcgcccccgccggctactggggccggggggtactaccctcctcctgccgccggtggccagtactactaa

SEQ ID NO: 12239 - protein, 117 aa, Hordeum vulgare var. distichum
MQAAKEKVKDGVSAVKAKTKITQAKASEKAEAATARSHAERELAHERGKAKVAAAKMELHQDKALHREEAMEHRIHKHGGGHGRHHHKHGVGIVAAPPPATGAGGYYPPPAAGGQYY

SEQ ID NO: 12240 - DNA, 387 bp, Glycine tomentella
  CDS (1)..(387)
atgcaatcctcaaaggagaagctgaaaaacatggccagtgctgccaaggagaaagtcgacatctataaagccaaaatagacgagaaggcagagaaggcaacggcaagaacagaagaggagagggtgattgcccatgaacgtgcaaaggcaaaggaagctgaagcaaagatggagctgcatgaagctaaagccaggcatgcagcagagaagctaagcaccaaccaatcacattatggcctccaccatggccacaaccctcccctagtaggaacaactgagactcactaccagcaagggcaccaccagccacctggggcagttcctatgcctggagccacttatccactaggaggaaaacataaccctcgcaggaacaaacatatataa

SEQ ID NO: 12241 - protein, 128 aa, Glycine tomentella
MQSSKEKLKNMASAAKEKVDIYKAKIDEKAEKATARTEEERVIAHERAKAKEAEAKMELHEAKARHAAEKLSTNQSHYGLHHGHNPPLVGTTETHYQQGHHQPPGAVPMPGATYPLGGKHNPRRNKHI

SEQ ID NO: 12242 - DNA, 387 bp, Glycine tomentella
  CDS (1)..(387)
atgcaatcctcaaaggagaagctgaaaaacatggccagtgctgccaaggagaaagtcgacatctataaagccaaaatagacgagaaggcagagaaggcaacggcaagaacagaagaggagagggtgattgcccatgaacgtgcaaaggcaaaggaagctgaagcaaagatggagctgcatgaagctaaagccaggcatgcagcagagaagctaagcaccaaccaatcacattatggcctccaccatggccacaaccctcccctagtaggaacaactgagactcactaccagcaagggcaccaccagccacttggggcagttcctatgcctggagccacttatccactaggaggaaaacataaccctcgcaggaacaaacatatataa

SEQ ID NO: 12243 - protein, 128 aa, Glycine tomentella
MQSSKEKLKNMASAAKEKVDIYKAKIDEKAEKATARTEEERVIAHERAKAKEAEAKMELHEAKARHAAEKLSTNQSHYGLHHGHNPPLVGTTETHYQQGHHQPLGAVPMPGATYPLGGKHNPRRNKHI

SEQ ID NO: 12244 - DNA, 387 bp, Glycine tomentella
  CDS (1)..(387)
atgcaatcctcaaaggagaagcttttaaacatggccagtgctgccaaggagaaagtcgacatctataaagccaaaatggacgagaaggcagagaaggcaacggcaagaacagaagaggagagggtgattgcccatgaacgtgcaaaggcaaaggaagctgaagcaaagatggagctgcatgaagctaaagccaggcatgcagcagagaagctaagcaccaaccaatcacattatgacctccaccatgggcacaaccctcccctagtaggaacaactgagactcactaccagcaagggcaccaccagccacttggggaagttcctatgcctggagccacttatccactaggaggaaaccataaccctcgcaggaacaaacatatataa

SEQ ID NO: 12245 - protein, 128 aa, Glycine tomentella
MQSSKEKLLNMASAAKEKVDIYKAKMDEKAEKATARTEEERVIAHERAKAKEAEAKMELHEAKARHAAEKLSTNQSHYDLHHGHNPPLVGTTETHYQQGHHQPLGEVPMPGATYPLGGNHNPRRNKHI

SEQ ID NO: 12246 - DNA, 396 bp, Glycine tomentella
  CDS (1)..(396)
atgcaatcctcaaaggagaagctgaaaaacatggccagtgctgccaaggagcaagttgacatttataaagccaaaatagacgagaaggcagagaaggcaacggcaagaacagaagaggagagggtgattgcccatgaacgtgcaaaggcaaaggaagctgaagcaaagatggagctgcatgaagctaaagccaggcatgcagcagagaagctaagcaccaaccaatcacattatggcctccaccatggccacaaccctcccctagtaggaacaactgagactcactaccagcaagggcaccaccagccacttggggcagttcctattcctggagctacttatccatcttatccgctaggaggaaaccataacccttccaggaacaaacatatataa

SEQ ID NO: 12247 - protein, 131 aa, Glycine tomentella
MQSSKEKLKNMASAAKEQVDIYKAKIDEKAEKATARTEEERVIAHERAKAKEAEAKMELHEAKARHAAEKLSTNQSHYGLHHGHNPPLVGTTETHYQQGHHQPLGAVPIPGATYPSYPLGGNHNPSRNKHI

SEQ ID NO: 12248 - DNA, 396 bp, Glycine tomentella
  CDS (1)..(396)
atgcaatcctcaaaggagaagctgaaaaacatggccagtgctgccaaggagaaagtcgacatctataaagccaaaatagacgagaaggcagagaaggcaacggcaagaacagaagaggagagggtgattgcccatgaacgtgcaaaggcaaaggaagctgaagcaaagatggagctgcatgaagctaaagccaggcatgcagcggagaagctaagcaccaaccaatcacattatggcctccaccatggccacaaccctcccctagtaggaacaactgagactcactaccagcaagggcaccagcagccacttggggcagttcctatgcctggagccacttatccatcttatccactaggaggaaaccataaccctcgcaggaacaaacatatataa

SEQ ID NO: 12249 - protein, 131 aa, Glycine tomentella
MQSSKEKLKNMASAAKEKVDIYKAKIDEKAEKATARTEEERVIAHERAKAKEAEAKMELHEAKARHAAEKLSTNQSHYGLHHGHNPPLVGTTETHYQQGHQQPLGAVPMPGATYPSYPLGGNHNPRRNKHI

SEQ ID NO: 12250 - DNA, 387 bp, Glycine tomentella
  CDS (1)..(387)
atgcaatcctcaaaggagaagctgaaaaacatggccagtgctgccaaggagaaagtcgacatctataaagccaaaatggacgagaaggcagagaaggcaacggcaagaacagaagaggagagggtgattgcccatgaacgtgcaaaggcaaaggaagctgaagcaaagatggagctgcatgaagctaaagccaggcatgcagcagagaagctaagcaccaaccaatcacattatgacctccaccatgggcacaaccctcccctagtaggaacaactgagactcactaccagcaagggcaccaccagccacttggggaagttcctatgcctggagccacttatccactaggaggaaaccataaccctcgcaggaacaaacatatataa

SEQ ID NO: 12251 - protein, 128 aa, Glycine tomentella
MQSSKEKLKNMASAAKEKVDIYKAKMDEKAEKATARTEEERVIAHERAKAKEAEAKMELHEAKARHAAEKLSTNQSHYDLHHGHNPPLVGTTETHYQQGHHQPLGEVPMPGATYPLGGNHNPRRNKHI

SEQ ID NO: 12252 - DNA, 387 bp, Glycine tomentella
  CDS (1)..(387)
atgcaatcctcaaaggagaagctgaaaaacatggccagtgctgccaaggagaaagtcgacatctataaagccaaaatagacgagaaggcagagaaggcaacggcaagaacagaagaggagagggtgattgcccatgaacgtgcaaaggcaaaggaagctgaagcaaagatggagctgcatgaagctaaagccaggcatgcagcagagaagctaagcaccgaccaatcacattatggcctccaccatggccacaaccctcccctagtaggaacaactgagactcactaccagcaagggcaccaccagccacttggggcagttcctatgcctggagccacttatccactaggaggaaaccataaccctcgcaggaacaaacatatataa

SEQ ID NO: 12253 - protein, 128 aa, Glycine tomentella
MQSSKEKLKNMASAAKEKVDIYKAKIDEKAEKATARTEEERVIAHERAKAKEAEAKMELHEAKARHAAEKLSTDQSHYGLHHGHNPPLVGTTETHYQQGHHQPLGAVPMPGATYPLGGNHNPRRNKHI

SEQ ID NO: 12254 - DNA, 387 bp, Glycine tabacina
  CDS (1)..(387)
atgcaatcctcaaaggagaagctgaaaaacatggccagtgctgccaaggagaaagtcgacatctataaagccaaaatagacgagaaggcagagaaggcaacggcaagaacagaagaggagagggtgattgcccatgaacgtgcaaaggcaaaggaagctgaagcaaagatggagctgcatgaagctaaagccaggcatgcagcagagaagctaagcaccaaccaatcacattatggcctccaccatggccacaaccctcccctagtaggaacaactgagactcactaccagcaagggcaccaccagccacttggggcagttcctatgcctggagccacttatccactaggaggaaaccataaccctcgcaggaacaaacatatataa

SEQ ID NO: 12255 - protein, 128 aa, Glycine tabacina
MQSSKEKLKNMASAAKEKVDIYKAKIDEKAEKATARTEEERVIAHERAKAKEAEAKMELHEAKARHAAEKLSTNQSHYGLHHGHNPPLVGTTETHYQQGHHQPLGAVPMPGATYPLGGNHNPRRNKHI

SEQ ID NO: 12256 - DNA, 396 bp, Glycine latifolia
  CDS (1)..(396)
atgcaatcctcaaaggagaagctgaaaaacatggccggtgctgccaaggagcaagtcgacatctataaagcaaaaatagacgagaaggcagagaaagcaacggcaagaacaaaagaggagagggtgattgcccatgaacgtgcaaaggcaaaggaagctgaagcaaagatgaagctgcatgaagcaaaagccaggcatgcagcagagaagctaagcaccaaccaatcacattatgccctccaccatggtcacaaccctctcctggtaggaacaactgagactcactaccagcaagggcaccaccagccacttggggcagttcctatgcctggagccacttatccatcttatccactaggaggaaaccctaaccctcccaggaacaaacatatataa

SEQ ID NO: 12257 - protein, 131 aa, Glycine latifolia
MQSSKEKLKNMAGAAKEQVDIYKAKIDEKAEKATARTKEERVIAHERAKAKEAEAKMKLHEAKARHAAEKLSTNQSHYALHHGHNPLLVGTTETHYQQGHHQPLGAVPMPGATYPSYPLGGNPNPPRNKHI

SEQ ID NO: 12258 - DNA, 396 bp, Glycine canescens
  CDS (1)..(396)
atgcaatcctcaaaggagaagctgaaaaacatggccagtgctgccaaggagcaagtcgacatctataaagccaaagtagacgagaaggcagagaaggcaacggcaagaacagaagaggagagggtgattgcccatgaacgtgcaaaggcaaaggaagctgaagcaaagatggagctgcatgaagctaaagctaggcatgcagcagagaagctaaacaccaaccaatcacattatggcctccaccatggccacaaccctcccctagtaggaacaactgagactcactaccagcaagggcaccaccagccacttggggcagttcctatgcctggagctacttatccatcttatccgctaggaggaaaccataacccttccaggaacaaacatatataa

SEQ ID NO: 12259 - protein, 131 aa, Glycine canescens
MQSSKEKLKNMASAAKEQVDIYKAKVDEKAEKATARTEEERVIAHERAKAKEAEAKMELHEAKARHAAEKLNTNQSHYGLHHGHNPPLVGTTETHYQQGHHQPLGAVPMPGATYPSYPLGGNHNPSRNKHI

SEQ ID NO: 12260 - DNA, 396 bp, Glycine canescens
  CDS (1)..(396)
atgcaatcctcaaaggagaagctgaaaaacatggccagtgctgccaaggagcaagtcgacatctataaagccaaaatagacgagaaggcagagaaggcaacggcaagaacagaagaggagagggtgattgcccatgaacgtgcaaaggcaaaggaagctgaagcaaagatggagctgcatgaagctaaagctaggcatgcagcagagaagctaaacaccaaccaatcacattatggcctccaccatggccacaaccctcccctagtaggaacaactgagactcactaccagcaagggcaccaccagccacttggggcagttcctatgcctggagctacttatccatcttatccgctaggaggaaaccataacccttccaggaacaaacatatataa

SEQ ID NO: 12261 - protein, 131 aa, Glycine canescens
MQSSKEKLKNMASAAKEQVDIYKAKIDEKAEKATARTEEERVIAHERAKAKEAEAKMELHEAKARHAAEKLNTNQSHYGLHHGHNPPLVGTTETHYQQGHHQPLGAVPMPGATYPSYPLGGNHNPSRNKHI

SEQ ID NO: 12262 - DNA, 402 bp, Glycine tomentella
  CDS (1)..(402)
atgcaatcctcaaaggagaagatgaaaaacatggccagtgctgccaaggaagaagtcgacatctataaagccaaaatagacgagaaggcagagaaagcaacggcaagaacagaagaggagagggtgatagcccatgagcacgcaaaggcaaaggaagctgaagcaaagatggagctgcatcaagctaaagcaaggcatgcagcagagaagctaagcgccaaccaatcacattatggcctccaccatggccacaacaaccctcccttagtcggaacaactcagactcactaccagcaaggacaccagcaccagccacttggggcagttcctatgcctggagccacttatccatcttatccactaggaggaaaccctaaccttccaaggaacaaacatatataa

SEQ ID NO: 12263 - protein, 133 aa, Glycine tomentella
MQSSKEKMKNMASAAKEEVDIYKAKIDEKAEKATARTEEERVIAHEHAKAKEAEAKMELHQAKARHAAEKLSANQSHYGLHHGHNNPPLVGTTQTHYQQGHQHQPLGAVPMPGATYPSYPLGGNPNLPRNKHI

SEQ ID NO: 12264 - DNA, 402 bp, Glycine tomentella
  CDS (1)..(402)
atgcaatcctcaaaggagaagatgaaaaacatggccagtgctgccaaggaacaagtcgacatctataaagccaaaatagacgagaaggcagagaaagcaacggcaagaacagaagaggagagggtgatagcccatgagcacgcaaaggcaaaggaagctgaagcaaagatggagctgcatgaagctaaagcaaggcatgcaacagagaagctaagtgccaaccaatcacattatggcctccaccatggccacaacaaccctcccttagtaggaacaactcagactcactaccagcaaggacaccagcaccagccacttggggcagttcctatgcctggagccacttatccatcttatccactaggaggaaaccctaaccctccaaggaacaaacatatataa

SEQ ID NO: 12265 - protein, 133 aa, Glycine tomentella
MQSSKEKMKNMASAAKEQVDIYKAKIDEKAEKATARTEEERVIAHEHAKAKEAEAKMELHEAKARHATEKLSANQSHYGLHHGHNNPPLVGTTQTHYQQGHQHQPLGAVPMPGATYPSYPLGGNPNPPRNKHI

SEQ ID NO: 12266 - DNA, 402 bp, Glycine tomentella
  CDS (1)..(402)
atgcaatcctcaaaggagaagatgaaaaacatggccagtgctgccaaggaacaagtcgacatctataaagccaaaatagacgagaagggagagaaagcaacggcaagaacagaagaggagagggtgatagcccatgagcacgcaaaggcaaagggagctgaagcaaagatggagctgcatgaagctaaagcaaggcatgcagcagagaagctaagtgccaaccaatcacattatggcctccaccatggccacaacaaccctcccttagtaggaacaactcagactcactaccagcaaggacaccagcaccagccacttggggcagttcctatgcctggagccacttatccatcttatccactaggaggaaaccctaaccctccaaggaacaaacatatataa

SEQ ID NO: 12267 - protein, 133 aa, Glycine tomentella
MQSSKEKMKNMASAAKEQVDIYKAKIDEKGEKATARTEEERVIAHEHAKAKGAEAKMELHEAKARHAAEKLSANQSHYGLHHGHNNPPLVGTTQTHYQQGHQHQPLGAVPMPGATYPSYPLGGNPNPPRNKHI

SEQ ID NO: 12268 - DNA, 402 bp, Glycine tomentella
  CDS (1)..(402)
atgcaatcctcaaaggagaagatgaaaaacatggccagtgctgccaaggaacaagtcgacatatataaagccaaaatagacgagaagggagagaaagcaacggcaagaacagaagaggagagggtcatagcccatgagcacgcaaaggcaaaggaagctgaagcaaagatggagctgcatgaagctaaagcaaggcatgcagcagagaagctaaacgccaaccaatcacattatggcctcgaccatggccacaacaaccctcccttagtaggaacaactcagactcactaccagcaaggacaccagcaccagccacttggggcagttcctatgcctggagccacttatccatcttatccactaggaggaaaccctaaccctccaaggaacaaacatatataa

SEQ ID NO: 12269 - protein, 133 aa, Glycine tomentella
MQSSKEKMKNMASAAKEQVDIYKAKIDEKGEKATARTEEERVIAHEHAKAKEAEAKMELHEAKARHAAEKLNANQSHYGLDHGHNNPPLVGTTQTHYQQGHQHQPLGAVPMPGATYPSYPLGGNPNPPRNKHI

SEQ ID NO: 12270 - DNA, 402 bp, Glycine tomentella
  CDS (1)..(402)
atgcaatcctcaaaggagaagatgaaaaacatggccagtgctgccaaggaacaagtcgacatatataaagccaaaatagacgagaaggcagagaaagcaacggcaagaacagaagaggagagggtcatagcccatgagcacgcaaaggcaaaggaagctgaagcaaagatggagctgcatgaagctaaagcaaggcatgcagcagagaagctaaacgccaaccaatcacattatggcctcgaccatggccacaacaaccctcccttagtaggaacaactcagactcactaccagcaaggacaccagcaccagccacttggggcagttcctatgcctggagccacttatccatcttatccactaggaggaaaccctaaccctccaaggaacaaacatatataa

SEQ ID NO: 12271 - protein, 133 aa, Glycine tomentella
MQSSKEKMKNMASAAKEQVDIYKAKIDEKAEKATARTEEERVIAHEHAKAKEAEAKMELHEAKARHAAEKLNANQSHYGLDHGHNNPPLVGTTQTHYQQGHQHQPLGAVPMPGATYPSYPLGGNPNPPRNKHI

SEQ ID NO: 12272 - DNA, 402 bp, Glycine tomentella
  CDS (1)..(402)
atgcaatcctcaaaggagaagatgaaaaacatggccagtgctgccaaggaacaagtcgacatctataaagccaaaatagacgagaaggcagagaaagcaacggcaagaacaaaagaggagagggcgatagcccatgagcacgcaaaggcaaaggaagctgaagcaaagatggagctgcatgaagctaaagcaaggcatgcagcagagaagctaagtgccaaccaatcacattatggcctccaccatggccacaacaaccctcccttagtaggaacaactcagactcactaccagcaaggacaccagcaccagccacttggggcagttcctatgcctggagccacttatccatcttatccactaggaggaaaccctaaccctccaaggaacaaacatatataa

SEQ ID NO: 12273 - protein, 133 aa, Glycine tomentella
MQSSKEKMKNMASAAKEQVDIYKAKIDEKAEKATARTKEERAIAHEHAKAKEAEAKMELHEAKARHAAEKLSANQSHYGLHHGHNNPPLVGTTQTHYQQGHQHQPLGAVPMPGATYPSYPLGGNPNPPRNKHI

SEQ ID NO: 12274 - DNA, 402 bp, Glycine tomentella
  CDS (1)..(402)
atgcaatcctcaaaggagaagatgaaaaacatggccagtgctgccaaggaacaagtcgacatctataaagccaaaatagacgagaaggcagagaaagcaacggcaagaacagaagaggagagggtgatagcccatgagcacgcaaaggcaaaggaagctgaagcaaagatggagctgcatgaagctaaagcaaggcatgcagcagagaagctaagtgccaaccaatcacattatggcctccaccatggccacaacaaccctcccttagtaggaacaactcagactcactaccagcaaggacaccagcaccagccacttggggcagttcctatgcctggagccacttatccatcttatccactaggaggaaaccctaaccctccaaggaacaaacatatataa

SEQ ID NO: 12275 - protein, 133 aa, Glycine tomentella
MQSSKEKMKNMASAAKEQVDIYKAKIDEKAEKATARTEEERVIAHEHAKAKEAEAKMELHEAKARHAAEKLSANQSHYGLHHGHNNPPLVGTTQTHYQQGHQHQPLGAVPMPGATYPSYPLGGNPNPPRNKHI

SEQ ID NO: 12276 - DNA, 402 bp, Glycine tomentella
  CDS (1)..(402)
atgcaatcctcaaaggagaagatgaaaaacatggccagtgctgccaaggaacaagtcgacatctataaagccaaaatagacgggaaggcagagaaagcaacggcaagaacagaagaggagagggtgatagcccatgagcacgcaaaggcaaaggaagctgaagcaaagatggagctgcatgaagctaaagcaaggcatgcagcagagaagctaagtgccaaccaatcacattatggcctccaccatggccacaacaaccctcccttagtaggaacaactcagactcactaccagcaaggacaccagcaccagctacttggggcagttcctatgcctggagccacttatccatcttatccactaggaggaaaccctaaccctccaaggaacaaacatatataa

SEQ ID NO: 12277 - protein, 133 aa, Glycine tomentella
MQSSKEKMKNMASAAKEQVDIYKAKIDGKAEKATARTEEERVIAHEHAKAKEAEAKMELHEAKARHAAEKLSANQSHYGLHHGHNNPPLVGTTQTHYQQGHQHQLLGAVPMPGATYPSYPLGGNPNPPRNKHI

SEQ ID NO: 12278 - DNA, 402 bp, Glycine tomentella
  CDS (1)..(402)
atgcaatcctcaaaggagaagatgaaaaacatggccagtgctgccaaggaagaagtcgacatctataaagccaaaatagacgagaaggcagagaaagcaacggcaagaacagaagaggagagggtgatagcccatgagcacgcaaaggcaaaggaagctgaagcaaagatggagctgcatcaagctaaagcaaggcatgcagcagagaagctaagcgccaaccaatcacattatggcctccaccatggccacaacaaccctcccttagtcggaacaactcagactcactaccagcaaggacaccagcaccagccacttggggcagttcctatgcctggagccacttatccatcttatccactaggaggaaaccctaaccctccaaggaacaaacatatataa

SEQ ID NO: 12279 - protein, 133 aa, Glycine tomentella
MQSSKEKMKNMASAAKEEVDIYKAKIDEKAEKATARTEEERVIAHEHAKAKEAEAKMELHQAKARHAAEKLSANQSHYGLHHGHNNPPLVGTTQTHYQQGHQHQPLGAVPMPGATYPSYPLGGNPNPPRNKHI

SEQ ID NO: 12280 - DNA, 402 bp, Glycine tabacina
  CDS (1)..(402)
atgcaatcctcaaaggagaagatgaaaaacatggccagtgctgccaaggaacaagtcgacatctataaatccaaaatagacgagaaggcagagaaagcaacggcaagaacagaagaggagagggtgatagcccatgagcacgcaaaggcaaaggaagctgaagcaaagatggagctgcatgaagctaaagcaaggcatgcagcagagaagctaagcgccaaccaatcacattatggcctccaccatggccacaacaaccctcccttagtaggaacaactcagactcaccaccagcaagggtaccagcaccagccacttggggcagttcctatgcctggagccacttatccatcttatccactaggaggaaaccctaaccctccaaggaacaaacatatataa

SEQ ID NO: 12281 - protein, 133 aa, Glycine tabacina
MQSSKEKMKNMASAAKEQVDIYKSKIDEKAEKATARTEEERVIAHEHAKAKEAEAKMELHEAKARHAAEKLSANQSHYGLHHGHNNPPLVGTTQTHHQQGYQHQPLGAVPMPGATYPSYPLGGNPNPPRNKHI

SEQ ID NO: 12282 - DNA, 402 bp, Glycine tabacina
  CDS (1)..(402)
atgcaatcctcaaaggagaagatgaaaaacatggccagtgctgtcaaggaacaagtcgacatctataaatccaaaatagacgagaaggcagagaaagcaacggcaagaacagaagaggagagggtgatagcccatgagcacgcaaaggcaaaggaagctgaagcaaagatggagctgcatgaagctaaagcaaggcatgcagcagagaagctaagcgccaaccaatcacattatggcctccaccatggccacaacaaccctcccttagtaggaacaactcagactcactaccagcaagggtaccagcaccagccacttggggcagttcctatgcctggagccacttatccatcttatccactaggaggaaaccctaaccctccaaggaacaaacatatataa

SEQ ID NO: 12283 - protein, 133 aa, Glycine tabacina
MQSSKEKMKNMASAVKEQVDIYKSKIDEKAEKATARTEEERVIAHEHAKAKEAEAKMELHEAKARHAAEKLSANQSHYGLHHGHNNPPLVGTTQTHYQQGYQHQPLGAVPMPGATYPSYPLGGNPNPPRNKHI

SEQ ID NO: 12284 - DNA, 402 bp, Glycine soja
  CDS (1)..(402)
atgcaatcctcaaaggagaagatgaaaaacatggcaagtgctgccaaggaacaagtcgacatctataaagccaaaatagacgagaagacagagaaagcaacggcaagaacagaagaggagagggtgatagcccatgagcacgcaaaggcaaaggaagctggagcaaagatggagctgcatgaagctaaagcaaggcatgcagcagagaagctaagcgccaaccaatcacattatggcctccaccatggccacaacaaccctcccttagtaggaacaactcagactcactaccagcaagggcaccagcaccagccacttggggcagttcctatgcctggaaccacttatccatcttatccactaggaggaaaccctaaccctccaaggaacaaacatatataa

SEQ ID NO: 12285 - protein, 133 aa, Glycine soja
MQSSKEKMKNMASAAKEQVDIYKAKIDEKTEKATARTEEERVIAHEHAKAKEAGAKMELHEAKARHAAEKLSANQSHYGLHHGHNNPPLVGTTQTHYQQGHQHQPLGAVPMPGTTYPSYPLGGNPNPPRNKHI

SEQ ID NO: 12286 - DNA, 402 bp, Glycine latifolia
  CDS (1)..(402)
atgcaatcctcaaaggagaagatgaaaaacatggccagtgctgccaaggaacaagtcgacctctataaatccgaaataggcgagaaggcagagaaagcaacggcaagaacagaagaggagagggtgatagcccatgagcacgcaaaggcaaaggaagctgaagcaaagatggagctgcatgaagctaaagcaaggcatgcagcagagaagctaagcgccaaccaatcacattatggcctccaccatggccacaacaaccctcccttagtaggaacaactcagactcactaccagcaaggacaccagcaccagccacctggggcagttcctatgcctggagccacttatccatcttatccactaggaggaaaccctaaccctccaaggaacaaacatatataa

SEQ ID NO: 12287 - protein, 133 aa, Glycine latifolia
MQSSKEKMKNMASAAKEQVDLYKSEIGEKAEKATARTEEERVIAHEHAKAKEAEAKMELHEAKARHAAEKLSANQSHYGLHHGHNNPPLVGTTQTHYQQGHQHQPPGAVPMPGATYPSYPLGGNPNPPRNKHI

SEQ ID NO: 12288 - DNA, 402 bp, Glycine canescens
  CDS (1)..(402)
atgcaatcctcaaaggagaagatgaaaaacatggccagtgctgccaaggaacaagtcgacatctataaagccaaaatagacgagaaggcagagaaagcaacagcaagaacagaagaggagagggtgatagcccatgagcacgcaaaggcaaaggaagctgaagcaaagatggagctacatgaagctaaagcaaggcatgcagcagagaagctaagcgccaaccaatcacattatggcctccaccatgaccacaacaaccctcccttagtaggaacaactcagactcactaccagcaagggcaccagcaccagccacttggggcagttcctatgcctggagtcacttatccatcttatccactaggaggaaaccctaaccctccagggaacaaacatatataa

SEQ ID NO: 12289 - protein, 133 aa, Glycine canescens
MQSSKEKMKNMASAAKEQVDIYKAKIDEKAEKATARTEEERVIAHEHAKAKEAEAKMELHEAKARHAAEKLSANQSHYGLHHDHNNPPLVGTTQTHYQQGHQHQPLGAVPMPGVTYPSYPLGGNPNPPGNKHI

SEQ ID NO: 12290 - DNA, 402 bp, Glycine canescens
  CDS (1)..(402)
atgcaatcctcaaaggagaagatgaaaaacatggccagtgctgccaaggaacaagtcgacatctataaagccaaaatagacgagaaggcagagaaagcaacagcaagaacagaagaggagagggtgatagcccatgagcacgcaaaggcaaaggaagctgaagcaaagatggggctacatgaagctaaagcaaggcatgcagcagagaagctaagcgccaaccaatcacattatggcctccaccatgaccacaacaaccctcccttagtaggaacagctcagactcactaccagcaagggcaccagcaccagccacttggggcagttcctatgcctggagttacttatccatcttatccactagggggaaaccctaaccctccagggaacaaacatatataa

SEQ ID NO: 12291 - protein, 133 aa, Glycine canescens
MQSSKEKMKNMASAAKEQVDIYKAKIDEKAEKATARTEEERVIAHEHAKAKEAEAKMGLHEAKARHAAEKLSANQSHYGLHHDHNNPPLVGTAQTHYQQGHQHQPLGAVPMPGVTYPSYPLGGNPNPPGNKHI

SEQ ID NO: 12292 - DNA, 336 bp, Craterostigma plantagineum
  CDS (1)..(336)
atgcagacggcgaaacagaaagtgagcgacgcggcggcttcagctcagcagaacgtcgataaagttcgagccaaagcccaagaaaagatggagaaaaccgatgcgaggacatcagaagagaaagaaatggcccacgagcgtaaggagattagcgaagccgaagctaagatgaagaagcacgaatccaaggcacaaaacgtggataagaaggcccacagccaccagcagccgccgcttggtgcggaggcgccgcccactgagggtggcgttacccctactcctagtccggcggccggtggtcagtatcctggtggtgctgggagtcatgtgatgtga

SEQ ID NO: 12293 - protein, 111 aa, Craterostigma plantagineum
MQTAKQKVSDAAASAQQNVDKVRAKAQEKMEKTDARTSEEKEMAHERKEISEAEAKMKKHESKAQNVDKKAHSHQQPPLGAEAPPTEGGVTPTPSPAAGGQYPGGAGSHVM

SEQ ID NO: 12294 - DNA, 336 bp, Craterostigma plantagineum
  CDS (1)..(336)
atgcagacggcgaagcagaaagtgagcgacgcggcggcttcagctcagcagaacgtcgataaaattcgagccaaagcccaagaaaaggcggacaaaaccgatgcgaggacatcagaagagaaagagatggcccacgagcgtaaggagattagtgaagccgaagctaagatgaagaagcaccaatccaaggcacaaaacgtggataagaaggcccacagccaccagcagccgccgcttggtgcggcggcgccgcccactgacggtggcgttacccctactcctagtccggcggccggtggtcagtatcctggtggtgctgggagtcatgtgatgtga

SEQ ID NO: 12295 - protein, 111 aa, Craterostigma plantagineum
MQTAKQKVSDAAASAQQNVDKIRAKAQEKADKTDARTSEEKEMAHERKEISEAEAKMKKHQSKAQNVDKKAHSHQQPPLGAAAPPTDGGVTPTPSPAAGGQYPGGAGSHVM

SEQ ID NO: 12296 - DNA, 342 bp, Pseudotsuga menziesii
  CDS (1)..(342)
atgcagcctgtcaagaatgcagccgctgcagccaaggagaagatgagtaacgcggcagccactactaaggagaaattggacaaaaccaaggcatctgccgaggagaagatgcataaaagtactgcccacagcaagggagaaagggagatagcgcatcaggagaaggaagccaaagaagcagaggcagaaatgagaaaacattctgctaaagctgagaacaaaatccaacgagaggaggagaagcatctacaccatagagcgggcgctggtattatgaaccctactcacactgctactcataccaccaccaccactgcccctcctccgggcaagtatatatga

SEQ ID NO: 12297 - protein, 113 aa, Pseudotsuga menziesii
MQPVKNAAAAAKEKMSNAAATTKEKLDKTKASAEEKMHKSTAHSKGEREIAHQEKEAKEAEAEMRKHSAKAENKIQREEEKHLHHRAGAGIMNPTHTATHTTTTTAPPPGKYI

SEQ ID NO: 12298 - DNA, 312 bp, Arabidopsis thaliana
  CDS (1)..(312)
atgcaatcggcgaaacagaagataagcgatatggctagtacagccaaggagaagatggtgatatgtcaagcaaaagctgatgagaaggcagagcgggcgatggcgaggacgaaagaggagaaagagatagcgcaccaacggagaaaggcgaaggaagcagacgcgaatatggatatgcacatggctaaagcggctcatgcggaagacaagcttatggctaagcaatctcactaccatgttactgatcatggtccccacgtgtcacaacaagcgtctgtaccgtctcccgcaccggttatggcacacggttga

SEQ ID NO: 12299 - protein, 103 aa, Arabidopsis thaliana
MQSAKQKISDMASTAKEKMVICQAKADEKAERAMARTKEEKEIAHQRRKAKEADANMDMHMAKAAHAEDKLMAKQSHYHVTDHGPHVSQQASVPSPAPVMAHG

SEQ ID NO: 12300 - DNA, 381 bp, Arachis hypogaea
  CDS (1)..(381)
atgaaatcttcaaaggagaagctaagcaacatggtcagtgccgccaaggaacacgttgacatctgcggagccaaaattgacgagaagacagagaaagcaagggcacgaacagaggaggagaaagtgatagcacatgagcgcgcaaaggcgagagaagcaaaggcaaaaatggagttgcatgaagccaaagccaggcatgcagccgagaagctaagcaccaagcaggcgcacctggacccttcctcgtttggagcacaccatcagcagcccccaacaacaacgcaccagcagccattagggtctcttgcaacgcctgctggaggagtcaccaatccttcatatccattgggaggaaatcatcatatcaataagcacatttag

SEQ ID NO: 12301 - protein, 126 aa, Arachis hypogaea
MKSSKEKLSNMVSAAKEHVDICGAKIDEKTEKARARTEEEKVIAHERAKAREAKAKMELHEAKARHAAEKLSTKQAHLDPSSFGAHHQQPPTTTHQQPLGSLATPAGGVTNPSYPLGGNHHINKHI

SEQ ID NO: 12302 - DNA, 459 bp, Hordeum vulgare var. distichum
  CDS (1)..(459)
atgaatctcgccaaggagaaggtgaaggacgccgcgagcgccgccaaggccaaggccaagatcacgcacgccaaggtggccgagaaaacggaggcggcgacggcaaggtcacacgacgagcgtgagctggcgcacgagcggggcaaggccaaggtcgccgccgccgaggcggagctgtaccaggccaaggtgacccaccgcgaggaagccatggagcaccgcctccacaagcgcgggcataagcacagcggcgatgttgatcttattaatgcacttatatttgtcaacttgtgctgctatcaaaatgtggaatatggtgttgatgttgaacatgaattctatcaacttgttgcggtgttatcaataggagtcgctgatctcaccctcgtacaccgtggcacgtcgacggcggcagcggactgctcggtgggcggctacgaatcgaagacaggagggtga

SEQ ID NO: 12303 - protein, 152 aa, Hordeum vulgare var. distichum
MNLAKEKVKDAASAAKAKAKITHAKVAEKTEAATARSHDERELAHERGKAKVAAAEAELYQAKVTHREEAMEHRLHKRGHKHSGDVDLINALIFVNLCCYQNVEYGVDVEHEFYQLVAVLSIGVADLTLVHRGTSTAAADCSVGGYESKTGG

SEQ ID NO: 12304 - DNA, 297 bp, Brassica napus
  CDS (1)..(297)
atgcattcagcgaaggaaaagatcagcgacattgccagcacggccaaggagaagctcaacatcggtggagcaaaggcacaaggccatgcggagaagactatggctaggacttcagaagagaagaagatggctcacgagcgagagaagtctaaggaggcgcaggccaaggccgagctccacgagtctaaggctgagcatgcggcggacgctcaggttcaccgccaccaccttcctggacacaccgcctaccctagccgaaccacgggagctgctcattacccaccgggacagatctaa

SEQ ID NO: 12305 - protein, 98 aa, Brassica napus
MHSAKEKISDIASTAKEKLNIGGAKAQGHAEKTMARTSEEKKMAHEREKSKEAQAKAELHESKAEHAADAQVHRHHLPGHTAYPSRTTGAAHYPPGQI

SEQ ID NO: 12306 - DNA, 297 bp, Brassica napus
  CDS (1)..(297)
atgcattcagcgaaggaaaagatcagcgacattgccagcacggccaaggagaagctcaacatcggtggagcaaaggcacaaggccatgcggagaagactatggctaggacttcagaagagaagaagatggctcacgagcgagagaagtctaaggaggcgcaggccaaggccgagctccacgagtctaaggctgagcatgcggcggacgctcaggttcaccgccaccaccttcctggacacaccgcctaccctagccgaaccacgggagctgcttattacccaccgggacagatctaa

SEQ ID NO: 12307 - protein, 98 aa, Brassica napus
MHSAKEKISDIASTAKEKLNIGGAKAQGHAEKTMARTSEEKKMAHEREKSKEAQAKAELHESKAEHAADAQVHRHHLPGHTAYPSRTTGAAYYPPGQI

SEQ ID NO: 12308 - DNA, 312 bp, Oryza sativa
  CDS (1)..(312)
atgcaggcggtgaaggagaaggtgaaggacaaggtgagcgcggtgaatgcgaaggggaaggtgagcaaggccaaggccgacgagaagaaggaggtggcgacggcgaggtcccacgccgagagggagctggcgcacgagcgcgctaaggccagggtcgccgccgccaagatggagctgcaccaggacaaggccctccaccgcgaggaggccatccagcacaggctccataagcatggcgccggaaccaccgccggcgttcgtccgaccgccgcggcgccggcgccgcacctcccacctgctagctactactag

SEQ ID NO: 12309 - protein, 103 aa, Oryza sativa
MQAVKEKVKDKVSAVNAKGKVSKAKADEKKEVATARSHAERELAHERAKARVAAAKMELHQDKALHREEAIQHRLHKHGAGTTAGVRPTAAAPAPHLPPASYY

SEQ ID NO: 12310 - DNA, 360 bp, Triticum aestivum
  CDS (1)..(360)
atgcaggcggcgaaggagaaggtgaaggacggcgtgagcgcggtgaaggccaagaccaagatcacgcaggccaaggcgtcggagaaggcggaggcggccacggcgaggtcgcacgcggagcgggagctggcgcacgagcgcggcaaggccaaggtggccgcggccaagatggagctgcaccaggacaaggcgctccaccgcgaggaggccatggagcaccgcatccacaagcacggcggcggccacggccgccaccaacacaagcacggcgtcggcatcgtggccgcgcccccgccggcgaccggggccggggccggggcgtaccaccctcctcctgccgccggtggccactactactaa

SEQ ID NO: 12311 - protein, 119 aa, Triticum aestivum
MQAAKEKVKDGVSAVKAKTKITQAKASEKAEAATARSHAERELAHERGKAKVAAAKMELHQDKALHREEAMEHRIHKHGGGHGRHQHKHGVGIVAAPPPATGAGAGAYHPPPAAGGHYY

SEQ ID NO: 12312 - DNA, 21 bp, Artificial sequence
  primer
atgcagtcggcgaaggaaaag

SEQ ID NO: 12313 - DNA, 26 bp, Artificial sequence
  primer
ttagatctgtcccggcgggtaattag

SEQ ID NO: 12314 - protein, 73 aa, Artificial sequence
  consensus sequence
  Variant (3)..(4): Xaa in position 3 to 4 is any amino acid
  Variant (5)..(11): Xaa in position 5 to 11 is any or no amino acid
  Variant (13)..(13): Xaa in position 13 is any amino acid
  Variant (15)..(19): Xaa in position 15 to 19 is any amino acid
  Variant (21)..(21): Xaa in position 21 is any amino acid
  Variant (24)..(30): Xaa in position 24 to 30 is any amino acid
  Variant (33)..(34): Xaa in position 33 to 34 is any amino acid
  Variant (37)..(37): Xaa in position 37 is any amino acid
  Variant (39)..(39): Xaa in position 39 is any amino acid
  Variant (41)..(41): Xaa in position 41 is any amino acid
  Variant (45)..(46): Xaa in position 45 to 46 is any amino acid
  Variant (48)..(50): Xaa in position 48 to 50 is any amino acid
  Variant (52)..(52): Xaa in position 52 is any amino acid
  Variant (54)..(55): Xaa in position 54 to 55 is any amino acid
  Variant (59)..(59): Xaa in position 59 is any amino acid
  Variant (61)..(61): Xaa in position 61 is any amino acid
  Variant (65)..(66): Xaa in position 65 to 66 is any amino acid
  Variant (68)..(69): Xaa in position 68 to 69 is any amino acid
  Variant (72)..(72): Xaa in position 72 is any amino acid
MQXXXXXXXXXKXKXXXXXSXAKXXXXXXXAKXXEKXEXAXARTXXEXXXAXEXXKAKXAXAKMXXHXXKAXH

SEQ ID NO: 12315 - protein, 60 aa, Artificial sequence
  protein pattern
  Variant (3)..(3): Xaa in position 3 is Ala, Ser or Thr
  Variant (4)..(4): Xaa in position 4 is any amino acid
  Variant (6)..(6): Xaa in position 6 is any amino acid
  Variant (8)..(9): Xaa in position 8 to 9 is any amino acid
  Variant (10)..(10): Xaa in position 10 is Asp or Asn
  Variant (11)..(12): Xaa in position 11 to 12 is any amino acid
  Variant (13)..(13): Xaa in position 13 is Ala, Gly or Ser
  Variant (14)..(14): Xaa in position 14 is any amino acid
  Variant (15)..(15): Xaa in position 15 is Ala or Val
  Variant (17)..(17): Xaa in position 17 is Ala or Glu
  Variant (18)..(23): Xaa in position 18 to 23 is any amino acid
  Variant (24)..(24): Xaa in position 24 is Ala or Ser
  Variant (25)..(25): Xaa in position 25 is Glu, Lys or Arg
  Variant (26)..(27): Xaa in position 26 to 27 is any amino acid
  Variant (28)..(28): Xaa in position 28 is Glu or Gly
  Variant (29)..(30): Xaa in position 29 to 30 is any amino acid
  Variant (31)..(31): Xaa in position 31 is Glu or Gly
  Variant (32)..(32): Xaa in position 32 is any amino acid
  Variant (33)..(33): Xaa in position 33 is Ala, Ser or Thr
  Variant (34)..(34): Xaa in position 34 is any amino acid
  Variant (36)..(36): Xaa in position 36 is any amino acid
  Variant (37)..(37): Xaa in position 37 is Ser or Thr
  Variant (38)..(39): Xaa in position 38 to 39 is any amino acid
  Variant (41)..(41): Xaa in position 41 is Glu, Lys or Arg
  Variant (42)..(42): Xaa in position 42 is any amino acid
  Variant (43)..(43): Xaa in position 43 is Ile, Leu or Met
  Variant (44)..(44): Xaa in position 44 is Ala, Thr or Val
  Variant (45)..(45): Xaa in position 45 is any amino acid
  Variant (46)..(46): Xaa in position 46 is Glu or Gln
  Variant (47)..(48): Xaa in position 47 to 48 is any amino acid
  Variant (49)..(49): Xaa in position 49 is Lys or Arg
  Variant (50)..(50): Xaa in position 50 is Ala, Ser or Val
  Variant (51)..(52): Xaa in position 51 to 52 is any amino acid
  Variant (53)..(53): Xaa in position 53 is Ala or Asp
  Variant (54)..(54): Xaa in position 54 is Ala, Asp, Glu, Gly or Gln
  Variant (56)..(59): Xaa in position 56 to 59 is any amino acid
MQXXKXKXXXXXXXXKXXXXXXXXXXXXXXXXXXAXXXXEXXXXXXXXXXXXXXAXXXXH

SEQ ID NO: 12316 - DNA, 1236 bp, Arabidopsis thaliana
  CDS (1)..(1236)
atgtccggaggaataatggatgaagagatcgagattcctccgttcttcctttgtcctatctctttggagatcatgaaagatccagtgatagtctctaccggaataacctacgacagagacagcatcgagaaatggctatttgcaggcaagaaaaactcgtgtccggtcaccaaacaagacataaccgacgcggatctcaccccgaatcacactctacgccgtctcatccaatcttggtgcaccctaaacgcctcctacggcgtcgagaggatccctaccccaagacctccgatttgtaaatctgagatcgaaaagctcattagagattcagcctcttcccatgaaaaccaagtcaagtgtctcaaacgacttcgtcagattgtgtcggagaacgcgaccaacaagcggtgtttagaggcagcgggagtaccggagttcttggccaacatcgtaagcaacgactcagaaaatgggagtttgaccgacgaagccctcaacttactttaccacctcgagacctcagagacagtcctcaagaatcttttaaacaacaagaaagataacaatatcgtaaagtcgttgacgaagatcatgcagcgtgggatgtacgagtccagagtctatgccactttgcttctcaagaacattctcgaagtagcggatccaatgcagagtatgactctcaagccagaggttttcactgaggtcgtccagatcttggacgaccggatctcgcagaaggcgaccaaagctgccatgcatatattggtgaacatatgcccatggggaaggaacagacacaaggccgtggaagctggagtaatctctgtgatcatcgagcttctcatggacgagagcttcacatcagagaggagaggtccagagatggcgatggtggttcttgatctgttgtgtcagtgtgcggagggacgagccgagttcttgaaccacggagcagccatagcggtggtgtgcaagaagatacttagggtttcacagacagcaagcgatagagcggttagggttttgttgtcggtgggaaggttctgcgcaacgcctgctttgttgcacgagatgttacagttgggggttgtagcgaagctttgtcttgtgcttcaagtaagctgtggaggtaagaccaaagagaaggcaaaggagttgcttaagttgcacgctagggtctggaaggactcgccttgtctcccaaaaaacatgattcttgcatatccctgctga

SEQ ID NO: 12317 - protein, 411 aa, Arabidopsis thaliana
MSGGIMDEEIEIPPFFLCPISLEIMKDPVIVSTGITYDRDSIEKWLFAGKKNSCPVTKQDITDADLTPNHTLRRLIQSWCTLNASYGVERIPTPRPPICKSEIEKLIRDSASSHENQVKCLKRLRQIVSENATNKRCLEAAGVPEFLANIVSNDSENGSLTDEALNLLYHLETSETVLKNLLNNKKDNNIVKSLTKIMQRGMYESRVYATLLLKNILEVADPMQSMTLKPEVFTEVVQILDDRISQKATKAAMHILVNICPWGRNRHKAVEAGVISVIIELLMDESFTSERRGPEMAMVVLDLLCQCAEGRAEFLNHGAAIAVVCKKILRVSQTASDRAVRVLLSVGRFCATPALLHEMLQLGVVAKLCLVLQVSCGGKTKEKAKELLKLHARVWKDSPCLPKNMILAYPC

SEQ ID NO: 12318 - DNA, 1221 bp, Arabidopsis thaliana
  CDS (1)..(1221)
atggatgaagagatcgagattcctccgttcttcctttgtcctatctctttggagatcatgaaagatccagtgatagtctctaccggaataacctacgacagagacagcatcgagaaatggctatttgcaggcaagaaaaactcgtgtccggtcaccaaacaagacataaccgacgcggatctcaccccgaatcacactctacgccgtctcatccaatcttggtgcaccctaaacgcctcctacggcgtcgagaggatccctaccccaagacctccgatttgtaaatctgagatcgaaaagctcattagagattcagcctcttcccatgaaaaccaagtcaagtgtctcaaacgacttcgtcagattgtgtcggagaacgcgaccaacaagcggtgtttagaggcagcgggagtaccggagttcttggccaacatcgtaagcaacgactcagaaaatgggagtttgaccgacgaagccctcaacttactttaccacctcgagacctcagagacagtcctcaagaatcttttaaacaacaagaaagataacaatatcgtaaagtcgttgacgaagatcatgcagcgtgggatgtacgagtccagagtctatgccactttgcttctcaagaacattctcgaagtagcggatccaatgcagagtatgactctcaagccagaggttttcactgaggtcgtccagatcttggacgaccggatctcgcagaaggcgaccaaagctgccatgcatatattggtgaacatatgcccatggggaaggaacagacacaaggccgtggaagctggagtaatctctgtgatcatcgagcttctcatggacgagagcttcacatcagagaggagaggtccagagatggcgatggtggttcttgatctgttgtgtcagtgtgcggagggacgagccgagttcttgaaccacggagcagccatagcggtggtgtgcaagaagatacttagggtttcacagacagcaagcgatagagcggttagggttttgttgtcggtgggaaggttctgcgcaacgcctgctttgttgcacgagatgttacagttgggggttgtagcgaagctttgtcttgtgcttcaagtaagctgtggaggtaagaccaaagagaaggcaaaggagttgcttaagttgcacgctagggtctggaaggactcgccttgtctcccaaaaaacatgattcttgcatatccctgctga

SEQ ID NO: 12319 - protein, 406 aa, Arabidopsis thaliana
MDEEIEIPPFFLCPISLEIMKDPVIVSTGITYDRDSIEKWLFAGKKNSCPVTKQDITDADLTPNHTLRRLIQSWCTLNASYGVERIPTPRPPICKSEIEKLIRDSASSHENQVKCLKRLRQIVSENATNKRCLEAAGVPEFLANIVSNDSENGSLTDEALNLLYHLETSETVLKNLLNNKKDNNIVKSLTKIMQRGMYESRVYATLLLKNILEVADPMQSMTLKPEVFTEVVQILDDRISQKATKAAMHILVNICPWGRNRHKAVEAGVISVIIELLMDESFTSERRGPEMAMVVLDLLCQCAEGRAEFLNHGAAIAVVCKKILRVSQTASDRAVRVLLSVGRFCATPALLHEMLQLGVVAKLCLVLQVSCGGKTKEKAKELLKLHARVWKDSPCLPKNMILAYPC

SEQ ID NO: 12320 - DNA, 1495 bp, Glycine max
  CDS (105)..(1397)
atcttcaacttgttcaactctctcaaaaccaaataaaatctttcacaactcaaaactcaagctccaaattttcactttacacctttgaattcattttttcacacatggacgagatcgacgtgcctccgttcttcgtgtgccctatttcattagagctcatgaaggaccccgtgacggtctccaccggcatcacctacgaccgcgacagcatcgagaagtggctcttcgccgaggtgaagaacgacacgtgtcccgtcacgaagcagcccctcctcccggacctcactccgaaccacacgctccgcagactcatccaagcctggtgcaccgtcaacgcctcccacggcgtccagagaatccccacaccaaaaccaccggtcgacaaaaccctcatcgagaaactcctccgcaacacctcggcttcggactccccgagcctccagctccggtccctccgaaccctcaagtccattgcctcggaatcccaatcaaacaaacgctgcatcgaatctgcagaaggcgcagttaatttcctagcaacaattataaccaccaccaccaccaccaccaccaacctactcgatgatgacatcgagttggaaataaaaacaagtacagcccacgaagcattgagccttttacacagcattcagctgtcagagtccggtttgaaggctctgttgaaccatccagaatttataaactctctaaccaagatgatgcaaagagggatctacgagtcacgcgcctacgctgttttcttgctgaattccttgtccgaggtggcggatccggcgcagttgattaacctaaaaactgatttgttcactgaattggttcaggttcttaaggatcaggtttcggagaaggtctcgaaggcgaccctgcaggcattgattcaggtgtgttcgtggggcagaaatagggtgaaggctgtggaggctggagctgtgccggttctggtggagcttcttctcgaatgcaacgagagaaaaccgatagaaatggtgctggttttgttggagattttatgtcagagtgctgacgggagggcggggctgttggcccacgcggcgggggtggtgatcgtggcgaagaagattctgagggtttcaacgatggcgaacgatagggcggcgaagattctgctttcggtgtgcagattttcccccacgccgggcttggtgcaggagatggtgcagcttggggtggtggcaaagctttgtctggtgctgcaggtggatagtgggaacaaagcaaaagagatagctagggagattctcaaattgcatgctagggcttggaggaattcgccttgcatctcacaatttgcttgcttcgtttccaatgagttcgtgaaagaaagaaaatccactttgtttttgttttgttcgtgacaccattggatgtaatcgattatttaagaaactaattccttctgtgagatctagtttgcggtgaaagaaaaccgaaagtaaatcacagttgagttttc

SEQ ID NO: 12321 - protein, 430 aa, Glycine max
MDEIDVPPFFVCPISLELMKDPVTVSTGITYDRDSIEKWLFAEVKNDTCPVTKQPLLPDLTPNHTLRRLIQAWCTVNASHGVQRIPTPKPPVDKTLIEKLLRNTSASDSPSLQLRSLRTLKSIASESQSNKRCIESAEGAVNFLATIITTTTTTTTNLLDDDIELEIKTSTAHEALSLLHSIQLSESGLKALLNHPEFINSLTKMMQRGIYESRAYAVFLLNSLSEVADPAQLINLKTDLFTELVQVLKDQVSEKVSKATLQALIQVCSWGRNRVKAVEAGAVPVLVELLLECNERKPIEMVLVLLEILCQSADGRAGLLAHAAGVVIVAKKILRVSTMANDRAAKILLSVCRFSPTPGLVQEMVQLGVVAKLCLVLQVDSGNKAKEIAREILKLHARAWRNSPCISQFACFVSNEFVKERKSTLFLFCS

SEQ ID NO: 12322 - DNA, 1275 bp, Zea mays
  CDS (1)..(1275)
atggaggaggacccgcagccgcaggtggaggtgccctgctacttcctgtgccccatctcgctggccatcatgcgagaccccgtgacgctccccaccggcatcacctacgaccgcgacggcatcgagcgctggctcctcactgccaccacctgcccgctcaccaagcagcccgtgccggcggactgcgaccccacgcccaaccacacgctgcgccgcctcatccagtcatggtgcgcgctccacgacgccgacagcgccgaccgcgtccacacgcccaagccccgcgtcgaccgcaccgccgtcaccgcgctggtctcccgggtccactccgccgccaccgggtcggcgccgccgcagcgcccacagctcctcgccgcgctgcgcgagctcagggacgtggcggccgagagcgaccgcaaccggaagctcgtcgccgccgtcccaggcgcggtggacgtcctagccgcggtgttcgcggcgtcggccaacaagtcgtcggaaggcacaggcaccgccgatgccgtccgcgacgatgcgctcgaggtcatcgccttgctcccggtccccgagcaatgcctgcgccgcctcgaggagacgaacgaggcgctggtctccgcgctcgtctccgcgctgcagtggtccagcgccccgtccagggcgcgcgcagcgctgctcctggagcgcgtcacggccgccctgccgcccagccggctggcatccctcccggagcaggtgttcagggaggccgtggagctgctccgcgacaggccggtgtccaggcccgcgaccaaggcggcgctgcaggtgctggtgcgcacggcagcgtggggacgcaaccgcgtcaaggcagtggacgccggcgcggtgcccgtgctcgtcgacatgctcttcgacgacggggcggagcgccgcgcgtgcgagctcgtcctggcggctctggaccgcctgtgcgggtgcgcggatgggcgcgccgagctggtggcgcacgccgcgggagtggcggccgtgggcaggaaggcgctgagggtgtcggaggtggccacggacaaggcagtcagggtgctgcggtccgtggcgaggcacgcggggacgtcggcggtggtgcaggagatggcgcaggccggcgtggcggcgatgctgtgcgtggtggcccagtcggagcagtacggcaagaggacgagagagcgcgcgcgggagacgctacggctgcacgcgagggcatggcggacctcgccgtgcttgaatcaccacctccaggccgtgtacccttgctag

SEQ ID NO: 12323 - protein, 424 aa, Zea mays
MEEDPQPQVEVPCYFLCPISLAIMRDPVTLPTGITYDRDGIERWLLTATTCPLTKQPVPADCDPTPNHTLRRLIQSWCALHDADSADRVHTPKPRVDRTAVTALVSRVHSAATGSAPPQRPQLLAALRELRDVAAESDRNRKLVAAVPGAVDVLAAVFAASANKSSEGTGTADAVRDDALEVIALLPVPEQCLRRLEETNEALVSALVSALQWSSAPSRARAALLLERVTAALPPSRLASLPEQVFREAVELLRDRPVSRPATKAALQVLVRTAAWGRNRVKAVDAGAVPVLVDMLFDDGAERRACELVLAALDRLCGCADGRAELVAHAAGVAAVGRKALRVSEVATDKAVRVLRSVARHAGTSAVVQEMAQAGVAAMLCVVAQSEQYGKRTRERARETLRLHARAWRTSPCLNHHLQAVYPC

SEQ ID NO: 12324 - DNA, 1311 bp, Zea mays
  CDS (1)..(1311)
atggccatggagctagcctcgtcgtattcggcggcggagatcccccactacttcctctgcccgatctcgctggaggtcatgcgcgacccggtcacgctcgccaccggcatcacctacgaccgcgccagcatcgagcgctggctcttcaccgacggccacgccacctgccccgtcacgcgccgcgcgctggcgcccgccgagatggacgccacgcccaaccacacgctgcgccgcctcatccaggcctggtgcgccgcgcaccaggtcgagcgcttccccacgccgcgccagccgctcgactcctgccgcgtcgccgcgctcctcgaccaggggcgccacggcggggcggccgccgcgctcagggagatcaaggccgtcatcgccgagagcgagcgcaacaggcgctgcgtcgaggccacgccaggcgccgtcgacttcctcgcctcactagtcgccaaggactcctcggccgataggtctccatccaagcgtgccagcagccagcaagatgccgacgacggtgactccctgggggaggaggtgctggattctccgaccttcatgagctcgccggcggaggacgcgctcggcgtcctctactcgctcaagccgtctgagcggagccttgcccagatcatggaacgggaaggaaacttcctcgacacgctggcgtctgtcctgcgccgcccgagctaccggacgcgcgcctatggcatccttctcctcaaggcgatgacggaggtcatgacgccggcgcagttcatgatggtgagcgccgacctggtgcaggaggtggtgctcgtggtctcggaccgggtgtcctccaaggctgtcagggcggcgctgcacgtgctgtgccgcctctgtccgtggggccggaaccgcgtgaaggccgtccaggccggcgcggtggccgcgctggtcgagctgctcctcgatgagggcggcagccgcgtcaccgagctagccgtggtggccatcgaccacctatgcggctgcgcggagggccggtcggacctggtcgcgcacccggcggggctggccgtcctgtccaagaaggtcatgcgggtgtccgcagccgccaccgagagcgccgtgcgcgccctccacgcagtggccaggcactcgccgacgccctcggtgcggcaggagatgctcgccgtcggtgtggtggcaaaactgctgcttgtgctgcagaccaatgccggcgagagggctggtctcagggtaaaggagatgctaaagacacacgctagggtttggaaggactcgccatgcctccaaacacaccggggttcttacccttgttga

SEQ ID NO: 12325 - protein, 436 aa, Zea mays
MAMELASSYSAAEIPHYFLCPISLEVMRDPVTLATGITYDRASIERWLFTDGHATCPVTRRALAPAEMDATPNHTLRRLIQAWCAAHQVERFPTPRQPLDSCRVAALLDQGRHGGAAAALREIKAVIAESERNRRCVEATPGAVDFLASLVAKDSSADRSPSKRASSQQDADDGDSLGEEVLDSPTFMSSPAEDALGVLYSLKPSERSLAQIMEREGNFLDTLASVLRRPSYRTRAYGILLLKAMTEVMTPAQFMMVSADLVQEVVLVVSDRVSSKAVRAALHVLCRLCPWGRNRVKAVQAGAVAALVELLLDEGGSRVTELAVVAIDHLCGCAEGRSDLVAHPAGLAVLSKKVMRVSAAATESAVRALHAVARHSPTPSVRQEMLAVGVVAKLLLVLQTNAGERAGLRVKEMLKTHARVWKDSPCLQTHRGSYPC

SEQ ID NO: 12326 - DNA, 1248 bp, Zea mays
  CDS (1)..(1248)
atggccatggaggaaccgcctcagctgttcttgtgccccatatccatggagctgatggaggaccccgtcacggtgttaaccggcgtcacctacgatcgcagcagcatcgagcggtggttcttcaagtacggcaaggcgacgtgcccggccaccatgcagcggctgaattccttcgacctcacgcccaaccacactctgaagcgcgtcatctccacctggcttgaccacgcctcctccccctcctcatcgtcgtcgagcacgccgctgtgtaataagctggagcgggaaaagctaccgtcggtgttcgcgagcattgaggccacgccgttcaaggtcaccgcgctcaaaaacctcaggcgctgcatggacggagacgtggcagcgcagaaggacttcgtcgcctacggcggcattcaggtgctcggccgcgtcatgacacaggcgctggcggagagctgcgccggtggagacttctcatcgttccggacgtgcgaggaggccggcgccgtcctcgccacgctccctctctccgacgacgcgtcggtggagctcgtgctcaaacccgagtgcatgaagcccgtggtcgcggtgctgcagcgcggcagcgccgagtctaggctgcacgctatggccatcctcgctaagatctccagggccatcggcgccgaccgtgactggacccctggtgtagacgtcgacgacctggtcaagtccctcctcgagctcctgtccgacggtgcctcagcgaagctgagctaccgcgcgctcgacgtgctcctcgacgtcacggcgcgctcccgcggcgcgcggcgcgccaaggccgtcgaagtgggcgcggtctgcgtgctcgtggagctccttcccgacgccgagcgccgcatcgccgagcgcgcgctcctcctactcaagcgcctgtgcaagtgccccgaaggccggctcgccttcgtggagcacgcgctggcggtgtcggccgtggcgcagacgctgctgcgcgtgtcgcgcctcgccagcgggctggccgtgagcgtgctgtggctggtggcgtgcgcggtgacgcctgcggagagggtgctggatgacatgctgatgagcggcggtgtggcgaagctgctggcactcctgcaggtggagaactccgcgtcgaccaaggagaaggcggcgaagcttctcagtgtgcacggcgcattctggaggcagtacccgtgcttccccactgacctcagggactacctgaaattcctcaactga

SEQ ID NO: 12327 - protein, 415 aa, Zea mays
MAMEEPPQLFLCPISMELMEDPVTVLTGVTYDRSSIERWFFKYGKATCPATMQRLNSFDLTPNHTLKRVISTWLDHASSPSSSSSSTPLCNKLEREKLPSVFASIEATPFKVTALKNLRRCMDGDVAAQKDFVAYGGIQVLGRVMTQALAESCAGGDFSSFRTCEEAGAVLATLPLSDDASVELVLKPECMKPVVAVLQRGSAESRLHAMAILAKISRAIGADRDWTPGVDVDDLVKSLLELLSDGASAKLSYRALDVLLDVTARSRGARRAKAVEVGAVCVLVELLPDAERRIAERALLLLKRLCKCPEGRLAFVEHALAVSAVAQTLLRVSRLASGLAVSVLWLVACAVTPAERVLDDMLMSGGVAKLLALLQVENSASTKEKAAKLLSVHGAFWRQYPCFPTDLRDYLKFLN

SEQ ID NO: 12328 - DNA, 1347 bp, Zea mays
  CDS (1)..(1347)
atggagcgggcgcgggcgcgggcgccggctctggctctggcgccggtggaggttcccaagttcttcgtgtgcccgatctcgctggaggtcatgcgggacccggtcacgctgtcgtcggggatcacctacgaccgcgacagcatcgagcgctggctgttcaccgacgggcacggcgactgccccgtcaccaagctgccgctgggcgccgacgacctcgagcccacgcccaaccacacgctccggcggctcatccagtcctggtgcgccgcgcacgccgtcgagcggttccccaccccgcgcccaccggtcgacgccgaccgcgtcgccgcgatcgtgggctgcgccaagaagggtggccagcaggaagtgctggccgcgctcagggagctcgcggacatcatcggggagagcgaccgcaaccggcgctgcgtcgagggcgtgccagaagccgtggagttcctcgtgtccgtcgtcaagaaacacgccgcaggcacgtcgtcgtccaagcctctcggcggatgcagatcccaagaggagccgatgtgcggcgtgccggactcccctaaggcgtgctcgccggaggaggcggctctgagcatcttgcattctctcaagctctccgaggcgagcctgaagagagccttggagagcagcgacggtttcgtggacaccttagcgtccgtgctgcgctggccgccgaactaccgggcgcgcacgtacgcgatgcacctgctgaaggcggcgctgtcggcgatgcagccctcgcagctgagctcggcgagcacggatctggtcgagggcgtcgtgagggtggtggcagaccggacgttgtcgcccaaggcgatcaaggtggcgcttcacgtgctctgccggctttgcccgtggggccgcaaccgcgtcaaggcagtcgaggccggcgccgtggcggcggtggtggagctgctcctcaacgtggggtgcgggtgcggtggcagcaacggcaagcgggcggtggagctcgcggtggttgccatcgatcatctgtgcggctgcgcagaagggcggttggagctcgtggcccacccggcagggctggctgttgttgcgcgagccgcgacgcggctgtcccccaccgccaccgagagcgcggtgcgcgcgctgcacgcggtggccaggcactccgcgacccccgcggtgctgcaggagatgcttgccgtcggagtagtagcgaggctgctgtacctggtgcaggccggcgcatcgggcgagcgcccgagggagagggcgcgggagatgctcaagatgcacgccagagtttggaggggctcgccgtgcttggcgtcgcacatggcatcctacccttgttga

SEQ ID NO: 12329 - protein, 448 aa, Zea mays
MERARARAPALALAPVEVPKFFVCPISLEVMRDPVTLSSGITYDRDSIERWLFTDGHGDCPVTKLPLGADDLEPTPNHTLRRLIQSWCAAHAVERFPTPRPPVDADRVAAIVGCAKKGGQQEVLAALRELADIIGESDRNRRCVEGVPEAVEFLVSVVKKHAAGTSSSKPLGGCRSQEEPMCGVPDSPKACSPEEAALSILHSLKLSEASLKRALESSDGFVDTLASVLRWPPNYRARTYAMHLLKAALSAMQPSQLSSASTDLVEGVVRVVADRTLSPKAIKVALHVLCRLCPWGRNRVKAVEAGAVAAVVELLLNVGCGCGGSNGKRAVELAVVAIDHLCGCAEGRLELVAHPAGLAVVARAATRLSPTATESAVRALHAVARHSATPAVLQEMLAVGVVARLLYLVQAGASGERPRERAREMLKMHARVWRGSPCLASHMASYPC

SEQ ID NO: 12330 - DNA, 1227 bp, Zea mays
  CDS (1)..(1227)
atggcgagcgcgcccggcgaggtgccgtcccacttcctctgccccatctcgctgcagctcatgcgggaacccgtcacgttgcccaccggcatctcctacgaccgcgccgccatctcccgctggctggccacgcctgcgccggccggcggccgcacctgcccggtcacgcgcgtgccgctcccgccgcagccccagctcactcccaaccacaccctccgccgtctcatccacgcctggctcgcgtccctctcccccgaggcggaggtcaacgaggacgtggccgcgctgcgggggcccgtgcccggcgcggaggtggtcgtcgcgctgctgtccgacgccgccggggctcaggttgaggcgctcaagaggctgcgggagctggtggccgagtgcgaggacagcagggcggttctcgagtcccaggacggggtgttcgacgccttgtcccgcgtcgtgagcagtgccgacgcgtgctcgacggcgcgcgaggaggcggtcgggctgctcgcgtcgctccggatcccggagccggagctggccggcgtcgtggccaggcacagcaacctgggggatgcactcacggccgtcctccgctcgtcgaatctgaagtcgcgcgcgaacgccgctctgctcgttaggtccctctcggaagcggcgtggccggcctgggtcatcgggctgagccaggagcttctagcggaggttgtccgcgtggtccgcgaccgtgtctccacgcaggcgaccaaggcagcactgcacgccctcgcggcgctctgcccctacggcctgacccgcgtcaagatcgtgggcgtgggcgcggtgccggcgatcgtggacctcctgctcgacgaccccgagaggcgtgtcaacgagctcgcgcttgtggcgctggaccggttgtgtacgtgcgccgagggccgcgctgagctggtcgcgcacgcggcggggctggccgtggtgggcaagaaggcgctgcgggtgtcggagaccgcgagcgagcgggcggtgcgcgtgctgcgctccgtggcgcgtcacgcggccacgcctgccgtgctgcaggagatggtggagtccggcgtcgtggccaagctctgcgcggcgctgtggtcccagcagtgcgggttgaggaccaagcagaaggcgcatgaggtgctcaagctgcactccaggacctggaggagctcgccctgcctatctccaaaatttttggggctctacccatcatga

SEQ ID NO: 12331 - protein, 408 aa, Zea mays
MASAPGEVPSHFLCPISLQLMREPVTLPTGISYDRAAISRWLATPAPAGGRTCPVTRVPLPPQPQLTPNHTLRRLIHAWLASLSPEAEVNEDVAALRGPVPGAEVVVALLSDAAGAQVEALKRLRELVAECEDSRAVLESQDGVFDALSRVVSSADACSTAREEAVGLLASLRIPEPELAGVVARHSNLGDALTAVLRSSNLKSRANAALLVRSLSEAAWPAWVIGLSQELLAEVVRVVRDRVSTQATKAALHALAALCPYGLTRVKIVGVGAVPAIVDLLLDDPERRVNELALVALDRLCTCAEGRAELVAHAAGLAVVGKKALRVSETASERAVRVLRSVARHAATPAVLQEMVESGVVAKLCAALWSQQCGLRTKQKAHEVLKLHSRTWRSSPCLSPKFLGLYPS

SEQ ID NO: 12332 - DNA, 1230 bp, Zea mays
  CDS (1)..(1230)
atggccatggaggagccgcctcagctgttcttgtgccccatctccatggagctgatggaggaccccgtcacggtgtccaccggcgttacctacgaccgccgcagcatcgagcggtggttcttcaagtacggcaagacgacgtgcccggccaccatgcagcggctgaattccttcggcctcacgcccaaccacactctcaagcgcgtcatctccacctggcttgaccgcgcctcctcctcgtcgtcgagcacgccgctgcgtaacaatctggcgcgggaaaagctaccgtcgttgctcgcgagcattgaggccacgccgttcaaggtcaccgcgctcaaaaacctcaggtgctgcatggacggagacgtggcagcgcaggaggacttcgtcgcctacggcggcatccagatgctcggacgcgtcatgacacaggcgttggcggagagctgcgccggtggagacttctcggcgttccggacgtgtgaggaggccggcgccgtcctcgccacgctccctctctccgacgacgcgtcggtggagctcgtgctcaaacccgagtgcatgaagcccgtggtcgcggtagtgcagcgcggcagcgccgagtctaggctgcacgccatggccatcctcgccaagatctccagtgccagcggcgccgaccgtgactggacgcctggtgtagacgtcgaggaccttgtcaagtcccttctcgagctcctgtcggacggtgcctcagcgaagctgagctcccgcgcgctcgacgtgctcctcgacgtcatggcgcgctcccgcggcgctcggcgtgccaaggccgtcgaggtaggcgcggtctgcgtgctcgtggaactcctccccgacgccagccgccgcgtcgctgagcgcgcgctgctcctactcaagcgtatgtgtaagtgccccgagggccggctcgccttcgcggaccacgcgctggcggtgtcggccgtggcgcggacgatgctgcgcgtgtcaggcctcgccagcaggcttgccgtcagcgtgctgtggctggtggcgtgcgcggtgacgcccgcggagagggtgctggatgacatgctgatgagcggcggcgtggcgaagctgctggcgctgctgcaggtggagaactccgcgtcgaccaaggagaaggcggcgaaactcctcaggatgcacggcgcgttctggaggcagtacccgtgcttccccaccggagcaactccaagaggttgctaa

SEQ ID NO: 12333 - protein, 409 aa, Zea mays
MAMEEPPQLFLCPISMELMEDPVTVSTGVTYDRRSIERWFFKYGKTTCPATMQRLNSFGLTPNHTLKRVISTWLDRASSSSSSTPLRNNLAREKLPSLLASIEATPFKVTALKNLRCCMDGDVAAQEDFVAYGGIQMLGRVMTQALAESCAGGDFSAFRTCEEAGAVLATLPLSDDASVELVLKPECMKPVVAVVQRGSAESRLHAMAILAKISSASGADRDWTPGVDVEDLVKSLLELLSDGASAKLSSRALDVLLDVMARSRGARRAKAVEVGAVCVLVELLPDASRRVAERALLLLKRMCKCPEGRLAFADHALAVSAVARTMLRVSGLASRLAVSVLWLVACAVTPAERVLDDMLMSGGVAKLLALLQVENSASTKEKAAKLLRMHGAFWRQYPCFPTGATPRGC

SEQ ID NO: 12334 - DNA, 1215 bp, Oryza sativa
  CDS (1)..(1215)
atggcgagcgcggcggccgaggtgccgtcctacttcgtctgcccgatctcgctgcagctcatgcgcgaccccgtcacgctccctacggggatctcgtacgaccgcgccgcgatcgcgcggtggctcgccgcgccgggggcccgccggacgtgtcccgtcacgcggcagccgctcgagcacgggctggagctcacgcccaaccacaccctgcgccgcctgatccagtcgtgggcggcctccgtctcccccgggtcggccgtggacgaggaggtggccgcgctacgaccggtttcgagcgacgaggttgcgtcgctcctgtccgacgccgccgcggcgcaggtgggcgcgctcaggaggctgcgggagctggcggcggagtgcgaggatagcagggcaatgctggagtcccagggcggggtgttcgacgtgctatctcgcgtcgtgaccagcggcagcgcctgctcgacggcgcgggaggaggcggttggtgtcctcgcgtcgctccggatcccggagcaggagctgatcggcgtctcgaccaggcacggcaacctggcggagtccctcacggccgtgctccgctcgtcgaatctccagtcgcgggcgcacgcggtgcagctcgtgaggacgctcgccgacgcggtggtcccggcgtgggtgatcggcctcaacgcggagctcctcgccgaggtggtcggcgtggtccgcgaccgcgtctcggcgcgggccaccaaggcgtccctccacgcgctcgccgcgctctgcccgtacggccggcaccgcgtgaagatcgtgggcgccggcgcggtggcggcgctggtggagctgctgctggacgagcccgagcggcgcgtgtgcgagctggcgctggccgtgctggaccggctgtgcacgtgcgcggaggggcgcgcggagctggtggcgcacgcggcgggcgtggccgtggtggggaagaaggtgctgcgggtgtcggaggcggcgagcgagcgggcggtgcgcgtgctgcggtcggtggcgcggcacgcggcgacgccggcggtgctgcaggagatggcgcagtgcggcgtggtggggaagctgtgcctggcgctgcggtcggagcagtgcggggtgaagaccaaggagaaggcgcacgaggtgctcaagctgcactccagggtctggagggcctcgccatgcttgtctcccagcttcttggcgctttacccatcatga

SEQ ID NO: 12335 - protein, 404 aa, Oryza sativa
MASAAAEVPSYFVCPISLQLMRDPVTLPTGISYDRAAIARWLAAPGARRTCPVTRQPLEHGLELTPNHTLRRLIQSWAASVSPGSAVDEEVAALRPVSSDEVASLLSDAAAAQVGALRRLRELAAECEDSRAMLESQGGVFDVLSRVVTSGSACSTAREEAVGVLASLRIPEQELIGVSTRHGNLAESLTAVLRSSNLQSRAHAVQLVRTLADAVVPAWVIGLNAELLAEVVGVVRDRVSARATKASLHALAALCPYGRHRVKIVGAGAVAALVELLLDEPERRVCELALAVLDRLCTCAEGRAELVAHAAGVAVVGKKVLRVSEAASERAVRVLRSVARHAATPAVLQEMAQCGVVGKLCLALRSEQCGVKTKEKAHEVLKLHSRVWRASPCLSPSFLALYPS

SEQ ID NO: 12336 - DNA, 1329 bp, Oryza sativa
  CDS (1)..(1329)
atggaggaggcggcggcggaggtgccgtcctacttcctgtgcccgatctcgctggagatcatgagggacccggtgacgctggcgacggggatcacctacgaccggagcagcatcgagcggtggatgttcggcggcggcggcggcgacggggggaaggggacgtgcccggtgacgcggcggcagctggcgccggcggagcgggaggcgacgcccaaccacacgctgcggcggctcatccaggcgtggtgcgccgcgcacgccgtcgagaggttccccaccccgcgcccgcccgtcgactcctgccgcgtcgccgcgctcgtcgacgaggggacgacgacgatgctcggcggcggcggcaggcagcggcagctcgccgcgctccgggagatcaaggccatcgccgccgagagcgaccgcaacaagcgctgcgtcgaggccacgcccggcgccgtcgagttcctcgtctccgtcgtcgtccagagccatgccgccgcctccacctcagccagctcggacgacgacgacctgttcgactcggtgatcgattcccccatgtcgacgagctcgccggaggaggaggccctgggcgtgctctactccctcaagccgtccgagcccaccctgcgccgcgtcctcggcaaggacaatggcgtcggcttcctcgacaccctcgcctccgtgctccgccgcccgagctaccgttcgcgcgcgtatgccatcctcctcctgaaggcggtgacgtcggcgatgccgccggagcggctgatggcggtgagccccgagctggtggaggaggtggtccgggtggtgtccgacggcgtgtcgtcgaaggcggtgaaggcggcgctgcacgtgctgtgccggctgtgcccgtgggggcggaaccgcgtgaaggcggtggaggccggcgcggtggcggcgctggtggagctcctcctcgacgaggagggcggcggcgggcggcggcgcgcggcggagctggcggtggtggcgatcgaccacctgtgcgggtgcgcggaggggaggtcggagctggtggcgcacccggcggggctcgccgtggtgtccaagagggcgatgcgggtgtcgccggcggccaccgagagcgccgtgcgcgcgctccacgccgtcgcgaggaacgcggcgacgccggccgtgctgcaggagatgctcgccgtcggcgtggtggcgaagctgctgctggtgctgcaggcggacggcggcgagcgcgccagggcgagggcgagggagatgctcagggcgaacgctagggtttggaaggactcgccatgcttgcaagctcaccttaaggcttcttacccctcctga

SEQ ID NO: 12337 - protein, 442 aa, Oryza sativa
MEEAAAEVPSYFLCPISLEIMRDPVTLATGITYDRSSIERWMFGGGGGDGGKGTCPVTRRQLAPAEREATPNHTLRRLIQAWCAAHAVERFPTPRPPVDSCRVAALVDEGTTTMLGGGGRQRQLAALREIKAIAAESDRNKRCVEATPGAVEFLVSVVVQSHAAASTSASSDDDDLFDSVIDSPMSTSSPEEEALGVLYSLKPSEPTLRRVLGKDNGVGFLDTLASVLRRPSYRSRAYAILLLKAVTSAMPPERLMAVSPELVEEVVRVVSDGVSSKAVKAALHVLCRLCPWGRNRVKAVEAGAVAALVELLLDEEGGGGRRRAAELAVVAIDHLCGCAEGRSELVAHPAGLAVVSKRAMRVSPAATESAVRALHAVARNAATPAVLQEMLAVGVVAKLLLVLQADGGERARARAREMLRANARVWKDSPCLQAHLKASYPS

SEQ ID NO: 12338 - DNA, 1278 bp, Oryza sativa
  CDS (1)..(1278)
atggccgccatggacgagcctcctcagctattcctctgcccgatctccatggagctcatggaggatccggtgacggtgtccaccggcgtgacgtacgaccgccggagcatcgaggagtggctcttcgtctacggccggaccacctgcccggccaccatgcagcctctctccaacttcgacctcactcccaaccacactctcaagcgcgtcatctcgtcgtggctcgatcgcggctcgtcgtcgtcgtcgtcttcgtcgccgtcgacgtcgacgctgtcgagcccgatccacgagctggcgacgccgctgtcgcgcgcgctggagcaggagcggttgctggctgcgctggccgagctggaggagacgccgttcaaggtgaccaagctgaagagcatgagggcccgcatggcgggcgacgtggcaatgcagggggagttcgtcgcctcgggcggggtgcgcgtggtggggcgcgtgatggcgcaggcgctggcggagagcggcggcgacttctcggcgttcgccgcgtgcgaggaggctgccgcggtgctcgccgcgctcccgctctcggacgaggcgtcggtgcgggtcgtccttgcgccggagtgcatcaggcccgtcatggcgctgctccagcgcggcggcgccgaggcgaggctgcacgccatggacatcctcaccaagatctccagctccggatcaggcggcgactggaccgccggcgtcgacatcgacgacgtgatcaagtccctcctcgagctcctctccgacgaggcctccacgaggctcagctcgcgcgcgctcgacgtgctcctcgacgtcgtggagcgggcgcggggcgcccgcgccaaggccgtcgaggtcggcgccgtgcacgtcctcgtcgagctcctcgccgacgccgacgaccgccgcgtcaccgagcgggtactgctgctgctgaagcggctgtgcaagtgccccgaggggcggctcgccttcgcggagcacgacctgtcggtggcggccgtggcgaggacgatgctgcgcgtgtcggagctgtccacgcagctcgccgtcaaggtgctgtggctcgtgtccgtggtggcgccgtcggagaaggtcctcgaggacatgatgctgaccggcgccgtcgcgaagctcctggggctgctccacgtcgagagctcgccgtcgacgaagcagaagacggtgaggatggttaggatccacggggtagtctggaggcagtacgcgtgcttccctaccgacttcagggactacctcaggctgctcgattga

SEQ ID NO: 12339 - protein, 425 aa, Oryza sativa
MAAMDEPPQLFLCPISMELMEDPVTVSTGVTYDRRSIEEWLFVYGRTTCPATMQPLSNFDLTPNHTLKRVISSWLDRGSSSSSSSSPSTSTLSSPIHELATPLSRALEQERLLAALAELEETPFKVTKLKSMRARMAGDVAMQGEFVASGGVRVVGRVMAQALAESGGDFSAFAACEEAAAVLAALPLSDEASVRVVLAPECIRPVMALLQRGGAEARLHAMDILTKISSSGSGGDWTAGVDIDDVIKSLLELLSDEASTRLSSRALDVLLDVVERARGARAKAVEVGAVHVLVELLADADDRRVTERVLLLLKRLCKCPEGRLAFAEHDLSVAAVARTMLRVSELSTQLAVKVLWLVSVVAPSEKVLEDMMLTGAVAKLLGLLHVESSPSTKQKTVRMVRIHGVVWRQYACFPTDFRDYLRLLD

SEQ ID NO: 12340 - DNA, 1338 bp, Oryza sativa
  CDS (1)..(1338)
atggcgctgctggcgcggagggcgcggaaggcggtgatggcgaaggcgccggcgccgctgctgcagaagaggggtggcggcgcggcggcggagctggcgatcccggcgcacttccggtgcccgatctcgctggacctgatgcgcgacccggtgacggcgccgacggggatcacgtacgacagggaggggatcgaggcgtggctggacaccgggcgcgcggtgtgccccgtcacccacgcgccgctccggcacgaggacctcgtccccaaccacgccatccgccgcgtcatccaggactggtgcgtcgccaaccggtcccgcggcgtggagcgcatccccacgcccaagatccccgtcacgcccgtgcaggcctccgagctgctgttcgacgtcgcggagtcggcggcgcggcgcggcgcggcggggcgcgccgccggggcggtcgccagggtccgggcgctcgcgagggacagcgagcggaaccggcggtgcttcgtgtccgtcggcacggggcgcgtgctggccgcggcgttcgagtctctcgccgccgccggggaggcgggcgttctcgaggacgtcctggcggcattggtctgcatgatgccgttggacgaggaggcggccagggtcttggcctcgtctagctcgatgggttcactcgtcgccattgccaagcacgggagcttggccggaaggctgaacgctgtgctggcgatcaaggaggccgtgtcgcgggacggagcgttcgtggacctggcggatgacaaggtcgacaaggtcgtcgacgcgctggtcgtgatcatcaaggctccgatctgcccgcaggccaccaaggctgccatggtcgccacctaccacctggcgagctccgacgagcgcgtcgcggcgagggtagcatccacggggctcgtcccaacgctcatcgaggccctcgtagacgccgacaagagcgtgtccgagaaggccctggcggtgctcgacgcaatgctcgcctcggaggaaggccgcgcgagcgcgcggggccacgccctcgcaatgccggccctcgtgaagaagatgttccgcgtgtccgacgtggccaccgagctcgccgtgtcggcgatgtggcggctcggctgcaaggcctcctccggcgacgaggaggccgccgcgacggggtgcctggtcgaggcgctgcgtgtgggcgcgttccagaagcttctcctcctcctgcaggtgggctgcagggacgcgaccaaggagaaggccactgagctgctcaagatgctcaacaagcacaaagggttgggggagtgtgtcgacgctgtggatttcagagggctcaataggctgtcatga

SEQ ID NO: 12341 - protein, 445 aa, Oryza sativa
MALLARRARKAVMAKAPAPLLQKRGGGAAAELAIPAHFRCPISLDLMRDPVTAPTGITYDREGIEAWLDTGRAVCPVTHAPLRHEDLVPNHAIRRVIQDWCVANRSRGVERIPTPKIPVTPVQASELLFDVAESAARRGAAGRAAGAVARVRALARDSERNRRCFVSVGTGRVLAAAFESLAAAGEAGVLEDVLAALVCMMPLDEEAARVLASSSSMGSLVAIAKHGSLAGRLNAVLAIKEAVSRDGAFVDLADDKVDKVVDALVVIIKAPICPQATKAAMVATYHLASSDERVAARVASTGLVPTLIEALVDADKSVSEKALAVLDAMLASEEGRASARGHALAMPALVKKMFRVSDVATELAVSAMWRLGCKASSGDEEAAATGCLVEALRVGAFQKLLLLLQVGCRDATKEKATELLKMLNKHKGLGECVDAVDFRGLNRLS

SEQ ID NO: 12342 - DNA, 1356 bp, Oryza sativa
  CDS (1)..(1356)
atgggtgaggagtcgtcgccggcggcggcgccggcggtggaggtgctgtcctacttcgtgtgcccgatctcgctggagatcatgcgggacccggtgacgctgtcgacggggatcacctacgaccgggagagcatcgagcggtgggtgttcaccgacggccacggcgagtgcccggtgaccaagcagcggctggcgccggcggaccgggagcccacgcccaaccacacgctccgccgcctcatacaggggtggtgcgccgtccacgccgtcgagcgcttccccaccccgcgcccccccgtcgacgccgcccgcgtcgccgccatcgtggacgccgcgcggccgctgctgcgccggcgtcgtcagcgggaggagctgatggcttcgctgagggagctcgccgacatcgttgccgagagcgaccgcaaccggcggtgcgtccagggcgcctccggcgccgtggagttcctcctgtccgtcgtcaaggagcgcgcctccgtggcgggcgtggacgacgcgacgtcggccaagccggaagagacgacgtgcggcggcgtgcatgatccggcgaaggcgagctcgccggaggaggcggccctgagcatcctgcattcgctcaagctctccgaggagagcttcaagagggtcttggagggcagcggcggtgaggatttcttggaaaccatggcgtgcgtgctgcggcgaccgagctacctctcgcggatgcagggaatccacctgctgaaatcggcgctcccggcgatggcccccgcgcggctgacgtcggcgagagccgcgctggtcgacggcgtggtgggggtggtggcggacaggccgtcggcgaaggcggtcaaggtggcgctccacgtgctctgccggctctgcccgtgggcccggaaccgcgtcaaggcggtcgacgccggcgccgtgtcggcgctcgtgcgcctcctcctcgacgagggctgcggcggcggcggcggcgaccggcgcgcgtgcgagctcgccgccgtggcgatcgaccacatctgcaggctgcgcggaggggcgcctggctctggtggcgcacccggcggggctcagcgccaggtggcgtgcagcgctgaccgctgcccgcacacggcgggcgccgagagcgccgtgcgcgcgctgcacgccgtggcgaggcactcggcgacgtcggcggtgctgcaggagatgctgcccgtcggcgtggtggcgaggctgctcttcctggtgcaggtcggcgcctccggcgagcggacgagggcgagggcgagggagatgctcaagatgcacgccagggtgtggagggactcgccatgcttggcctcgcacttgaatgcttcctaccctcgctga

SEQ ID NO: 12343 - protein, 451 aa, Oryza sativa
MGEESSPAAAPAVEVLSYFVCPISLEIMRDPVTLSTGITYDRESIERWVFTDGHGECPVTKQRLAPADREPTPNHTLRRLIQGWCAVHAVERFPTPRPPVDAARVAAIVDAARPLLRRRRQREELMASLRELADIVAESDRNRRCVQGASGAVEFLLSVVKERASVAGVDDATSAKPEETTCGGVHDPAKASSPEEAALSILHSLKLSEESFKRVLEGSGGEDFLETMACVLRRPSYLSRMQGIHLLKSALPAMAPARLTSARAALVDGVVGVVADRPSAKAVKVALHVLCRLCPWARNRVKAVDAGAVSALVRLLLDEGCGGGGGDRRACELAAVAIDHICRLRGGAPGSGGAPGGAQRQVACSADRCPHTAGAESAVRALHAVARHSATSAVLQEMLPVGVVARLLFLVQVGASGERTRARAREMLKMHARVWRDSPCLASHLNASYPR

SEQ ID NO: 12344 - DNA, 1266 bp, Oryza sativa
  CDS (1)..(1266)
atggcaatggagcctcctcccctgttcctgtgccccatctcgatggagctaatggaggaccccgtcacggtggccaccggcgtcacctacgaccgccggagcatcgagcggtggttcttcaagtacggcaagacgacgtgcccggccaccatgcagcggcttgcttccttcgacttcactcccaaccacaccctcaagcgcgtcatctcgtcgtggctggaccgcgcctcctcgtcgtcgtcgccgagcacggccggctcgccggcgacgacgtcgtcgtcgtcgtcgtcaaacgcgatggagagggagaggttgccgtcggtgctcgctggcattgaggagacgccgttcaaggcgaccgcgctcaagaacctcaagtcctgcatggccggcgacgaggcggcgcgggaggatttcgtggcgtgcggcggcatccaggtgctcggccgggtcatgacgcaggcgctggaggagagctccgccgggggggacttctcggcgttccggacgtgcgaggaggccgccgccgtcctcgccacgctgccgctctcggacgacgcgtcggtggagctcctgctcaagccggagtgcataaggcccgtgtccgtgctggtccagcgcggcagcgccgaggcgaggctgcacgcaatgtccatgatctccaagatctccagggccagcgtccgcgactggaccgcggaggtcgacgtcgacgacatggtcaaggccctcctcgagctcctctccgacggcgcctccgcgaagctgagctcccgcgcgctcgacgtgctcctcgacgtcacggcgcggtactcccgcggcgcgcggcgcgccaaggccgtggagctgggcgccgtgcgcgtcctcgccgagctcctcctcgacgccgaccgccacgtcgccgagcggtcgctcctcctcctgaagcgcatgtgcaagtgccccgaggggcggctggccttcgccgagcacgggctggcggtggccgccgtggcgcgcgccgtgctccgggtgtccgggctcgccacgaggctcgccgtcaacgtgctgtggctggtggcgtgcgccccggcccccgccgagagggtgctggaggacatggtggtgggcggcgccgtggcgaagctgctggcgctgatgcaagtggagagctcgccgtcgaccaaggacaaggcggtgaagatgctgcgagcgcacggcgcgttctggaggcagtacccttgcttccccacggacctcaaggactacctcaaatctctcaactga

SEQ ID NO: 12345 - protein, 421 aa, Oryza sativa
MAMEPPPLFLCPISMELMEDPVTVATGVTYDRRSIERWFFKYGKTTCPATMQRLASFDFTPNHTLKRVISSWLDRASSSSSPSTAGSPATTSSSSSSNAMERERLPSVLAGIEETPFKATALKNLKSCMAGDEAAREDFVACGGIQVLGRVMTQALEESSAGGDFSAFRTCEEAAAVLATLPLSDDASVELLLKPECIRPVSVLVQRGSAEARLHAMSMISKISRASVRDWTAEVDVDDMVKALLELLSDGASAKLSSRALDVLLDVTARYSRGARRAKAVELGAVRVLAELLLDADRHVAERSLLLLKRMCKCPEGRLAFAEHGLAVAAVARAVLRVSGLATRLAVNVLWLVACAPAPAERVLEDMVVGGAVAKLLALMQVESSPSTKDKAVKMLRAHGAFWRQYPCFPTDLKDYLKSLN

SEQ ID NO: 12346 - DNA, 1242 bp, Oryza sativa
  CDS (1)..(1242)
atggaggagcagcagcaggtggaggtggaggtggaggtgccgtcctacttcgtgtgccccatctcgctgcagatcatgcgcgacccggtgacgctccccaccggcatcacctacgaccgcgacggcatcgagcgatggctcctcaccgccggcacctgcccgctcaccaagcagcccgtgccgcccgactgcgaccccacgcccaaccacaccctgcgccgcctcatccagtcgtggtgcgccctccacgccgaccatggcgtcgacctcgtccccacccccaagccccccgccgaccgcgcccgcgtcgccgacctcgtctcccgcctccgcgccgccacgagctccgctgccctcctcgacgcgctgcgcgagctcagggacgttgccgccgagagcgagcgtaacaggaagctcctcgccgccgtccccggcgcggtggatgttctggccgccgtcgtcgtcgcgtcgtgtcgagacgccaaggccgcgtgcgacgaggccctcgagatcgtctgctcgctggagctctcggagcggtgcctggcgcggctcgtcgagaggaacgaggagctcgtcgacgcgctcgtcgccacgctgcagcggacgaacaccacgtcccgggcgcacgcggcgctgctcctggaggccgtgacggcggtcatgccgtcgaacaggctggtgtccctcccggaggaggtgttcggtgaggcggtgcagctgctccgcgacagggtatcgagcccggcgacgagggcggcgctgcacgtgctggtcggcacgacgtcgtggggccgcaaccgcgtgaaggcggtggacgccggcgcggtggcggtgctggtcgacatgctcctggacgggccagtcgagcggcgcgggtgcgagctggccctggcggcgctggaccggatgtgcgggtgcgcggaggggcgggcggcgctggtgtcgcacggcgcgggcgtggcggtggtggggaggaaggtgctgagggtgtcggaggtggcgagcgagaaggcggtgcgggtgctgcggtcggtggcgaggcacgcggcgacggcggcggtggtgcaggagatggggcagacgggggcggtggagaagctgtgcgtggtggcgcagtcggagcagtgcggggagaggacgcgggagcgggcgcgggagacgctgcggctgcacgccagagcgtggaggaactcgccctgcttgcagcctcacctccaggccctctacccttcttgctga

SEQ ID NO: 12347 - protein, 413 aa, Oryza sativa
MEEQQQVEVEVEVPSYFVCPISLQIMRDPVTLPTGITYDRDGIERWLLTAGTCPLTKQPVPPDCDPTPNHTLRRLIQSWCALHADHGVDLVPTPKPPADRARVADLVSRLRAATSSAALLDALRELRDVAAESERNRKLLAAVPGAVDVLAAVVVASCRDAKAACDEALEIVCSLELSERCLARLVERNEELVDALVATLQRTNTTSRAHAALLLEAVTAVMPSNRLVSLPEEVFGEAVQLLRDRVSSPATRAALHVLVGTTSWGRNRVKAVDAGAVAVLVDMLLDGPVERRGCELALAALDRMCGCAEGRAALVSHGAGVAVVGRKVLRVSEVASEKAVRVLRSVARHAATAAVVQEMGQTGAVEKLCVVAQSEQCGERTRERARETLRLHARAWRNSPCLQPHLQALYPSC

SEQ ID NO: 12348 - DNA, 1383 bp, Oryza sativa
  CDS (1)..(1383)
atgtcgtcgtcctcgccgtcgctgctgtctcgtcggagtacggcggagctggagctgcctgtcccgccggagttccggtgcccgatatcgctagagctgatgcgcgaccccgtcgtggggccaaccggcatcacctacgaccgtgccggcatcgaggcgtggctgctcgccgccggagcggggaagacggcggcggcgtcgtcgacgtgcccggttaccaaaggtgacctccgcgccgacgacctcgtccccaaccacgccctccgccgcgtcatccaggcgtggtgcgtcgccaaccgctgccgtggcgtcgagcggatccccacgccgcgggtgcccgtcacgccggcgcaggcgggcgaggtgctgggcgaggtcgaggccgccgcgcgggcgggcgacgcggcgaggtgcgtcgcggcggtgcgcgaggtggggcgcctcgcgcgggagtccgaccgggaccgccggtgcctcgcgtccgccggcgcggcgcgcgcgctcgccgcggcggtcgcgtcgttccccgcggcgagtgactcggcgtcggcgtcgtcggtcctgctcgacgacgtcctggcggcgctggtgctcgtcatgccgctcgacgaggaggccatcgtggccatcggctcgtcggccgcgtcggtggcgctgctcgccaacgtcgccaagcacggcgacctgcagaggaggctccaggcggtggtcgtcatcagggagatcgtcgcgttgtcctcctgctgctcacgcaacggcggcgccgccaccgccattgatctcagcgacaaccttgacgggatcatcgaggtgttggtgaacacgatccgggacccgatctcccctcaggccaccaaggcctccctcgtcgccgcgtaccacctcgcgctcgccgacggccacgctgcggcgcgcctcgcggaggccggcctcgtgccgtccctcgtcgagctcctcatcgacggcgaccggagcacggccgagaaagcgctcgccgcgctcgacgcgacgctggcgtccgaggccggcagggcgcgcgcccaagccgacgcgctcgccgtgccggtgctcgtcaagaagatgttccgcgtgtccgacacggccaccgagctcgtcgtctcggcgctccaccgcatctgcaagaaatggcacgacggtgatgacgacgaggtggggtcgccggcggcgaggcggagcgccgtcgtggaggcggtgcaggtgggcgcgttccagaaggtgatgatgctgctgcaggttgggtgcagggatgcaaccaaggagaaggcgactgagctgctcaagctgatgatcaagtatgaaactagaggaggagctcactgcattgacgccatggatttcagagggctcaagagggtttcttga

SEQ ID NO: 12349 - protein, 460 aa, Oryza sativa
MSSSSPSLLSRRSTAELELPVPPEFRCPISLELMRDPVVGPTGITYDRAGIEAWLLAAGAGKTAAASSTCPVTKGDLRADDLVPNHALRRVIQAWCVANRCRGVERIPTPRVPVTPAQAGEVLGEVEAAARAGDAARCVAAVREVGRLARESDRDRRCLASAGAARALAAAVASFPAASDSASASSVLLDDVLAALVLVMPLDEEAIVAIGSSAASVALLANVAKHGDLQRRLQAVVVIREIVALSSCCSRNGGAATAIDLSDNLDGIIEVLVNTIRDPISPQATKASLVAAYHLALADGHAAARLAEAGLVPSLVELLIDGDRSTAEKALAALDATLASEAGRARAQADALAVPVLVKKMFRVSDTATELVVSALHRICKKWHDGDDDEVGSPAARRSAVVEAVQVGAFQKVMMLLQVGCRDATKEKATELLKLMIKYETRGGAHCIDAMDFRGLKRVS

SEQ ID NO: 12350 - DNA, 1314 bp, Oryza sativa
  CDS (1)..(1314)
atggagtacggcacgccgcagcatttcatgtgcccgatctcgctgcagccgatgcaggatcccgtcacctcccccaccggcatctcctacgaccgccgcgccatccaccgctggctcgccgccggccactcctcctgccccgtcaccggccaccccctctccctctccgacctcacccccaacctcaccctccgccgcctcatccactcttggcaccactccactactacgccatttcccgtcgagcgttcgacgccgtcgccgccgccgcttcgggaggttgacgacgacgacgtcgtggagaggctggtgatggagatggagggtggtggtggtggttcttggtgccccccgtcgtgtgacttgctccgcgaggcggcggcggtcgcggcggggagcggcgtcgcgcggaggcgcatggtgggcgccggcgtgctccgccgcgtgctgcgtttggtggtgtggtgtggcgggagggggtcgtcgtcgggtgaggcggcggtgatggtggagatgtttgatgcgtgcctcgctctcttccacgcgctcgacgtctccgccgacgagctccgcccgctcgtcgccgacggccacgacctcgtcgacgcggtgacgcgcgtgatggcgacactcgaggccggcgacgcgaacgcgacgagggcgagggagagcgcggtgcggctgctggaggccgtgacggaggccgccgacgcgccggtcctggagcggctgagcccggagttcttctccgccgcgacggccgtggtgcgcgaccgcggcgccgtgtccccgggcgcggcgcgcgcggcggtgcgggcgctggcgaacgcgtgccgcgcccgcgcgagcggcgcctgcaggaaccgcgcgctcgccgtggacgccggggcggcgcgcgaggccatcgagctggagctcgacgcgtggtcgtcgccgcaggccccgggggggcggcgcgccacggaggccgtgatggcgctgctggcggagctgtgcgcttgcgcggaggggcgcgcggcggtggcgtcgcacccggcggggatcacggtggtggcgaggcgggtgctgcgcgtgtcggccgccgccgacgcgtgcgccgtgcgcgtgctggcggccgtggcggggcgggcggcgtcgccggaggtgcttcgcgagatggcgcgcgtcggcgccgtcgggaagctgtgctgcgtgctgcaggcagagtgcgacgccggcgtgaaggaggcggcgagggcggtgctgaggatgcactccggcgtgtggagcggatcgccatgtgtcagcgcttacctgctgtctcgctacctctaa

SEQ ID NO: 12351 - protein, 437 aa, Oryza sativa
MEYGTPQHFMCPISLQPMQDPVTSPTGISYDRRAIHRWLAAGHSSCPVTGHPLSLSDLTPNLTLRRLIHSWHHSTTTPFPVERSTPSPPPLREVDDDDVVERLVMEMEGGGGGSWCPPSCDLLREAAAVAAGSGVARRRMVGAGVLRRVLRLVVWCGGRGSSSGEAAVMVEMFDACLALFHALDVSADELRPLVADGHDLVDAVTRVMATLEAGDANATRARESAVRLLEAVTEAADAPVLERLSPEFFSAATAVVRDRGAVSPGAARAAVRALANACRARASGACRNRALAVDAGAAREAIELELDAWSSPQAPGGRRATEAVMALLAELCACAEGRAAVASHPAGITVVARRVLRVSAAADACAVRVLAAVAGRAASPEVLREMARVGAVGKLCCVLQAECDAGVKEAARAVLRMHSGVWSGSPCVSAYLLSRYL

SEQ ID NO: 12352 - DNA, 1317 bp, Glycine max
  CDS (1)..(1317)
atggtgttgggatggaggagaaggaagggcagcaacaaaaaccgtcgcaaaggtggcaaatccatcgctgagttggtgactcccaatcacttcagatgtccaatttctcttgacttgatgaaggatcctgtgacattgtcaacagggataacctacgatagggagagtgtggagatgtggtttgatgaagggaacatcacatgtcctgtcacaaaccaggttgtgaggaactttgacatgattccaaaccattcccttagggtaatgattcaagattggtgtgtggagaataggcaacatggggtggagaggattccaacaccaaggataccaattggctcaattgaggttgctgagcttctgatgctagtgaaggcctcgtcaacggatttggaccaatatggttgccttgaattggtgcagaaactgaagaggtggggtggtgagagtgagaggaacaagaggtgcatagtggacaatggagcacctgtggcattggcttcatcatttgatgcatttgccaatgattccattgagaggaatgtggtgcttcttgaggagattttgtcagcactcaattggatgtttccacttcaattggaggcacacaagtctttggggtctttggcttctctaagatgcatggtttggttcttgaagcaccaagatctctcagggaaagagaagtccattgtggcattgaaagagcttctgaaatttggtgatgtgaagcatttggaggccttgtcacaaattgaaggggtcaatgaactcttggtggagttcatcaacaagaggattagtccaaccatcacaaaggcctcattgagtgcggtttggtacttggtttcatcctcttccaattcaagtgataagatgaggttgaaatttgttgaattgggtttggtttcttctttgcttgacattctcattgactcagacaagagcatgtgtgagaaggctgtgaccattttggactctctatgcagctctgaagaaggaaggaacaaggcttgtgggaatgatctaacaattcctcttttggtgaagaaaattctgagagtttcacctttgacaacagactattctgtttccgcgatttggaaactgtgcaagtttggagaaaaagatgaagggagaacccttgttgaggcccttcaagttggtgcctttcagaagctcttgttggtgttgcaagttggatgtggtgatgagactaaggagaaagcaactgaacttctcaaattgctcaatccttacagggctgaattggaatgcatagactcagattacaagaatgttaagagatcattttaa

SEQ ID NO: 12353 - protein, 438 aa, Glycine max
MVLGWRRRKGSNKNRRKGGKSIAELVTPNHFRCPISLDLMKDPVTLSTGITYDRESVEMWFDEGNITCPVTNQVVRNFDMIPNHSLRVMIQDWCVENRQHGVERIPTPRIPIGSIEVAELLMLVKASSTDLDQYGCLELVQKLKRWGGESERNKRCIVDNGAPVALASSFDAFANDSIERNVVLLEEILSALNWMFPLQLEAHKSLGSLASLRCMVWFLKHQDLSGKEKSIVALKELLKFGDVKHLEALSQIEGVNELLVEFINKRISPTITKASLSAVWYLVSSSSNSSDKMRLKFVELGLVSSLLDILIDSDKSMCEKAVTILDSLCSSEEGRNKACGNDLTIPLLVKKILRVSPLTTDYSVSAIWKLCKFGEKDEGRTLVEALQVGAFQKLLLVLQVGCGDETKEKATELLKLLNPYRAELECIDSDYKNVKRSF

SEQ ID NO: 12354 - DNA, 1257 bp, Glycine max
  CDS (1)..(1257)
atggacgagatcgacgtgcctccgttcttcgtgtgccctatttcattagagctcatgaaggaccccgtgacggtctccaccggcatcacctacgaccgcgacagcatcgagaagtggctcttcgccgaggtgaagaacgacacgtgtcccgtcacgaagcagcccctcctcccggacctcactccgaaccacacgctccgcagactcatccaagcctggtgcaccgtcaacgcctcccacggcgtccagagaatccccacaccaaaaccaccggtcgacaaaaccctcatcgagaaactcctccgcaacacctcggcttcggactccccgagcctccagctccggtccctccgaaccctcaagtccattgcctcggaatcccaatcaaacaaacgctgcatcgaatctgcagaaggcgcagttaatttcctagcaacaattataaccaccaccaccaccaccaccaccaacctactcgatgatgacatcgagttggaaataaaaacaagtacagcccacgaagcattgagccttttacacagcattcagctgtcagagtccggtttgaaggctctgttgaaccatccagaatttataaactctctaaccaagatgatgcaaagagggatctacgagtcacgcgcctacgctgttttcttgctgaattccttgtccgaggtggcggatccggcgcagttgattaacctaaaaactgatttgttcactgaattggttcaggttcttaaggatcaggtttcggagaaggtctcgaaggcgaccctgcaggcattgattcaggtgtgttcgtggggcagaaatagggtgaaggctgtggaggctggagctgtgccggttctggtggagcttcttctcgaatgcaacgagagaaaaccgatagaaatggtgctggttttgttggagattttatgtcagagtgctgacgggagggcggggctgttggcccacgcggcgggggtggtgatcgtggcgaagaagattctgagggtttcaacgatggcgaacgatagggcggcgaagattctgctttcggtgtgcagattttcccccacgccgggcttggtgcaggagatggtgcagcttggggtggtggcaaagctttgtctggtgctgcaggtggatagtgggaacaaagcaaaagagaaagctagggagattctcaaattgcatgctagggcttggaggaattcgccttgcatacctcacaatttgcttgcttcgtttccaatgagttcgtga

SEQ ID NO: 12355 - protein, 418 aa, Glycine max
MDEIDVPPFFVCPISLELMKDPVTVSTGITYDRDSIEKWLFAEVKNDTCPVTKQPLLPDLTPNHTLRRLIQAWCTVNASHGVQRIPTPKPPVDKTLIEKLLRNTSASDSPSLQLRSLRTLKSIASESQSNKRCIESAEGAVNFLATIITTTTTTTTNLLDDDIELEIKTSTAHEALSLLHSIQLSESGLKALLNHPEFINSLTKMMQRGIYESRAYAVFLLNSLSEVADPAQLINLKTDLFTELVQVLKDQVSEKVSKATLQALIQVCSWGRNRVKAVEAGAVPVLVELLLECNERKPIEMVLVLLEILCQSADGRAGLLAHAAGVVIVAKKILRVSTMANDRAAKILLSVCRFSPTPGLVQEMVQLGVVAKLCLVLQVDSGNKAKEKAREILKLHARAWRNSPCIPHNLLASFPMSS

SEQ ID NO: 12356 - DNA, 1128 bp, Glycine max
  CDS (1)..(1128)
atggacgaaattgaagttcctcaatacttcatatgcccaatatccctccaaatcatgaaggaccccgttacggccataacgggcataacatatgatcgtgaaagcatagagcaatggctattcaccaacaagaacaccacatgccccgtgtccaaccaacccctccctagagactctgacctaacccctaaccacacccttcgccgattgatccaagcttggtgcacccaaaacgcttcacttggcatcgttcggattccgaccccaaaatcccctctcaacaaaatacaagtccttaaactcctcaaagacctcaatgaccccaaaagcctcttgcaattggagcttcttgccgcggagagcgagaggaacaaaaagtgcttgctagaggctggtgtgccaagggccatgatcatgttcattgtgaattgttataaaaagggtcaaattcaaaagggtctcgaagaagctcttagcatattgcaatttgtcaagatccccagggaggaagacaacgatcaaatactggattctctagcatggcttctaagccatgacgaaatggaaaactccatagcccaaggacgacatgtgtcgcgttctcgagaggctcaaaccctcgttcttcgaaacaatggtgaagattctaggacatcatgcgataacacaacaaggggtgaatgctgcacttcacaatcacgagtggtggaagctggtttggttcacgaactcattgagatcgaactaatggaaccagaaaaaagaatcacggaactaaccctagcaatattgtttcatttgtgctcttgcgccaacggaagagccaagtttctgagccacgaagggtccatcgcggtggtgacggagagaatactgaaggtttcggcatcggtggacgatagggccgtgtttgttctctcacaggtttcgaagttttcgggcacgaccatggtcttgcaggagatgttgagagtggggactgtggcgaagctttgcatggtgcttcaggctgatcgtgccaagtatttgaaggacaaagcgatggagattctcaaggggcactctgaggtttgggcgaactctccttgcattcccaatacgtcttttggtggatacgtgaaatactga

SEQ ID NO: 12357 - protein, 375 aa, Glycine max
MDEIEVPQYFICPISLQIMKDPVTAITGITYDRESIEQWLFTNKNTTCPVSNQPLPRDSDLTPNHTLRRLIQAWCTQNASLGIVRIPTPKSPLNKIQVLKLLKDLNDPKSLLQLELLAAESERNKKCLLEAGVPRAMIMFIVNCYKKGQIQKGLEEALSILQFVKIPREEDNDQILDSLAWLLSHDEMENSIAQGRHVSRSREAQTLVLRNNGEDSRTSCDNTTRGECCTSQSRVVEAGLVHELIEIELMEPEKRITELTLAILFHLCSCANGRAKFLSHEGSIAVVTERILKVSASVDDRAVFVLSQVSKFSGTTMVLQEMLRVGTVAKLCMVLQADRAKYLKDKAMEILKGHSEVWANSPCIPNTSFGGYVKY

SEQ ID NO: 12358 - DNA, 1212 bp, Glycine max
  CDS (1)..(1212)
atggacgaaattgaaatccctgcccatttcctctgccccatttcccttcaactcatgagggaccctgtcacggtttgcacaggaatcacttatgatagagaaaacatagagagatggttattttcatgcaagaacaacacatgccccgttactaagcagtgcctattagaccatggtctcactccaaaccacactctacgcaggctgatccaatcctggtgcaccctcaatgcctcacttggagttgaacgcattcctactccaaagtcaccaatagacaaaactcagattgtgaaactcctcacagaagcaaaaaggttcccagagaagcaactcaagtgcctcacaaggcttcgatccgttgcctttgaaggccaaaggaacaaaacatgtttagagtctgctggagtaatagaattcttggccacaacaatgaagaacaacaacacacaagaagactcaactgttctcagtgaagcagctattgaagtcttgttccacctcaatctctccgaggctcgacttaaaactctgattaacaacgaggaatttcattttatcgagtcattgtttcatgtgctgaggcttggaaactaccaatctagagtctatgctacaatgctgcttagatcagcatttgaggtagctgatccaatccaattgatcagtgtcaaaaccgcgctgtttgtggaaatcatgcgcgtgctttgcgatcagatctcgcatcaggcttcaaaggctgcattgaagctcattgtggagctctttccgtggggaagaaacaggatcaaaggggtcgaggatggtacagtttcggtcctcatcgagctacttctcggcacctcggaaagaagaacatgtgaactcattttgatagctttggatcagctttgtgggtgtgcagaagggcgtgcagagttgttgaaccatggggcaggagtggccattgtgtccaagaaaattctaagggtctctcatgtggctagtgaaagaggggttagaattttggcctctatttgtaggtattctgccaatgctagagtgcttcatgaaatgttgcaggttggggctgtgtccaagttgtgtttggtgcttcaagtgaattgcggttttaagactaaggagagagccaaagaggtactcaaattgcactcggtggtttggaagaattccccatgtattcctgtacctttgttatcttcctatccatga

SEQ ID NO: 12359 - protein, 403 aa, Glycine max
MDEIEIPAHFLCPISLQLMRDPVTVCTGITYDRENIERWLFSCKNNTCPVTKQCLLDHGLTPNHTLRRLIQSWCTLNASLGVERIPTPKSPIDKTQIVKLLTEAKRFPEKQLKCLTRLRSVAFEGQRNKTCLESAGVIEFLATTMKNNNTQEDSTVLSEAAIEVLFHLNLSEARLKTLINNEEFHFIESLFHVLRLGNYQSRVYATMLLRSAFEVADPIQLISVKTALFVEIMRVLCDQISHQASKAALKLIVELFPWGRNRIKGVEDGTVSVLIELLLGTSERRTCELILIALDQLCGCAEGRAELLNHGAGVAIVSKKILRVSHVASERGVRILASICRYSANARVLHEMLQVGAVSKLCLVLQVNCGFKTKERAKEVLKLHSVVWKNSPCIPVPLLSSYP

SEQ ID NO: 12360 - DNA, 1281 bp, Glycine max
  CDS (1)..(1281)
atgccaaaatcagaaaagactaaggagtataaaaaagaaaacgggaatatagacattgcgatccccacccacttccggtgcccggtaacattggacatgatgaaggaccccgtgaccgtttccacgggcataacctacgaccgcgacagcatcgagaagtggatcgagtccgggaaccgcacgtgcccggtcaccaaaacggagttgacaaccttcgacatgatcccgaaccacgccatccgtaggatgatccaggactggtgcgtggagcaccgttcccacggcatcgaacggatccccactcctcgtatccccgtcaccccgtacgaggttgctgacacgtgtacgaggatcttgtcggcggcgcaacacggggacgagaacaagtgcgtggagttggtgagcaaaattaaagcgtggggaagggaaagtgagagaaataagagatgcatagtttctaacggtgctgctttagcactagcgaacgctttcaactctttctcatcgcgtgggttgttaattgagaagaacgtggttgtgttggatgagattctgggtgctttggtatggatgcgtcctctttctgaagagggtagatccgtgttggggtcatcgagttctatctcttgcatggtttggttcatgaacggtaaacaattatccacaaggcaaaacgctgctttggttcttaaggagatgcatgttgaggctttggtgaaatgtgtaggagtttttgaggctttgattaacatgattaaggagcctgttgggagtggttccaccaaggcctgtttgtcaacgattttcaacttggttaataataaaagaggcgtgacgacttgtcaaaggtttgtggaattgggtttggttgatgtggtgttggaggttcttgttgatgcggagagaggggtgtgtgagaaggctttgggggtgttggatagcgtttgtgattgcaagcaaggggtggagatggcaaaggctaatgctttgactttgcctcttgtgattaagaagctcttgagggtgtctgagttgtgttcaagcttcgcggtttcggttctttggaagctttgtgacaagaatattgaagaaggggtgttgattgaggcgcttcaaatgggggtgtttcataaactacttgttttgttgcaagtgggttgtggtgagggaaccaaagagaaggctacggagttgttgaagttgttgaatagttgcaggagcaaagctgagtgtgttcatcattcttcgttggatttcaagcatttgaagaatcccttctaa

SEQ ID NO: 12361 - protein, 426 aa, Glycine max
MPKSEKTKEYKKENGNIDIAIPTHFRCPVTLDMMKDPVTVSTGITYDRDSIEKWIESGNRTCPVTKTELTTFDMIPNHAIRRMIQDWCVEHRSHGIERIPTPRIPVTPYEVADTCTRILSAAQHGDENKCVELVSKIKAWGRESERNKRCIVSNGAALALANAFNSFSSRGLLIEKNVVVLDEILGALVWMRPLSEEGRSVLGSSSSISCMVWFMNGKQLSTRQNAALVLKEMHVEALVKCVGVFEALINMIKEPVGSGSTKACLSTIFNLVNNKRGVTTCQRFVELGLVDVVLEVLVDAERGVCEKALGVLDSVCDCKQGVEMAKANALTLPLVIKKLLRVSELCSSFAVSVLWKLCDKNIEEGVLIEALQMGVFHKLLVLLQVGCGEGTKEKATELLKLLNSCRSKAECVHHSSLDFKHLKNPF

SEQ ID NO: 12362 - DNA, 1320 bp, Glycine max
  CDS (1)..(1320)
atggttttgtcatggacaaaagggagagtgttccggcgtgccagaaagggtaaggagttgaaatattctggtggcgacatggagatagagattgcgatccccacccacttccggtgcccggtaaccttggacatgatgaaggaccccgtgaccgtttccacgggcataacctatgaccgcgacagcatcgagaagtggatcgagtccgggaaccgcacgtgcccggtcaccaaaaccgagctgaccagcctcgacgacatgatcccgaaccacgccatccgtaggatgatccaggactggtgcgtggagcaccgctcccacggcatcgaacggatccccactcctcgtatccccgtcaccccgtacgaggttgccgacacgtgtacgaggatcctgtcggcggcgcagcacggcgacgagaacaagtgcgtggagttggtgaggaagatcaaggcttgggggaaggaaagtgagagaaacaaaaggtgcatagtggccaatggtgctgctttagcactatccaatgccttcaactctttctcatcacgtgggttgttgattgagaagaacgtggttgtgttggatgagattctgggggctttggtatggatgcgtcctctttctgaagagggtagatccgtgttggggtcaacgagttctatctcttgcatggtttggttcatgaacggtaaacaattgtccacaaggcaaaacgctgctttggttcttaaggaaatgcatgttgaggcgttggtgaagtgtgtagatgttgttgaggctttggttaacatgattaaggagcctgttgggaatggttccaccaagccgtgtttgtcaacgattttcaacttggttagttattcttcagttagaggtgtgacttgtgaaaggtttgtggaattgggtttggttgatgcggtgttggaggttcttgttgatgcggagagaggggtgtgtgagaaggctttgggggtgttggattgcgtttgtgattgcaagcaaggggtgcagatggcaaaggctaatgctttgactttgcctcttgtgattaagaagcttttgagggtgtctgagttgagttcaagctttgcggtttcggttctttggaaacttttttgtgacaagaatgaagaaggggtgttgattgaggcgcttcaaatgggagtgtttcataaactacttgttttgttgcaagtgggttgtggtgagggaaccaaagagaaggctacggagttgttgaagttgttgaatggttgtaggagcaaagccgagtgtgttgattcgtccttggatttcaagcatttgaagaagcccttctaa

SEQ ID NO: 12363 - protein, 439 aa, Glycine max
MVLSWTKGRVFRRARKGKELKYSGGDMEIEIAIPTHFRCPVTLDMMKDPVTVSTGITYDRDSIEKWIESGNRTCPVTKTELTSLDDMIPNHAIRRMIQDWCVEHRSHGIERIPTPRIPVTPYEVADTCTRILSAAQHGDENKCVELVRKIKAWGKESERNKRCIVANGAALALSNAFNSFSSRGLLIEKNVVVLDEILGALVWMRPLSEEGRSVLGSTSSISCMVWFMNGKQLSTRQNAALVLKEMHVEALVKCVDVVEALVNMIKEPVGNGSTKPCLSTIFNLVSYSSVRGVTCERFVELGLVDAVLEVLVDAERGVCEKALGVLDCVCDCKQGVQMAKANALTLPLVIKKLLRVSELSSSFAVSVLWKLFCDKNEEGVLIEALQMGVFHKLLVLLQVGCGEGTKEKATELLKLLNGCRSKAECVDSSLDFKHLKKPF

SEQ ID NO: 12364 - DNA, 1260 bp, Glycine max
  CDS (1)..(1260)
atgaacgaaatcgatgttccttcgttctttctctgccccatttcgctagatatcatgaaggatccagtgacggtctcaacgggcatcacctacgaccgtgaaagcatcgaaacctggctgttctcgaagaaaaacacgacatgccccattaccaaactgcccttgatagattacaccgatctcacaccaaaccacacccttcgtagactcatccaagcgtggtgttccatgaacgcttctcacggcatcgaaaggatcccaacccctaaaccccccgttaacaagaaccaaatttcgaagcttctcaaagacgcttctcattcccctctcacatgcctcagaagactcaaatccatctcttccggaagcgaaacaaataagcggtgcatggaggcttctggcgctgttgagtttctagcatcaattgtaatcaacaccaaccgcaacattgattcttcacatgaggctgactcaaacgacggatctggattcgagttgaaaacaagtgcatgcgatgaagcgttgagtttgcttcataatcttcatttatccgaacaagggttgaagactctcttaagcttcagaaacggcgagtttattgagtctttaacaagagtcatgcaaaaggggttctttgaatcacgcgcttatgctgtgttcttgttgaaatctatttccgaagtggctgaaccagtgcaactattgcatctaagacaagaactttttgtcgaactggtacaagtcctgaaggatcaaatttcacagaagacatcaaaggcgacccttcaaaccctgatccaattctctccttgggggaggaacaggatcagagctgtggaagcagctgctgttcctgttttgattgagcttcttctcgattgcaaggagagaaagccttgtgagatgatgctggtgttgttggagctgctatgccagtgtgctgagggaagagcagaacttttgagccatgcagcaggtcttgccattgtgtccaaaaagattctaagggtttcgactttggcgaatgatagagctgttaagattattctgtctctttcgaggttctctgcgactccacatgttgttcaagaaatgctgaaactcggtgtggtcgcgaaattgtgcttggtgcttcaggtggatagtggaaacagggctaaggaaaaagctagagagatactcaaattgcatgctcgggcgtggaggaattctccatgcataccgaacaatttgcttaattcatacccgaattatgtgtga

SEQ ID NO: 12365 - protein, 419 aa, Glycine max
MNEIDVPSFFLCPISLDIMKDPVTVSTGITYDRESIETWLFSKKNTTCPITKLPLIDYTDLTPNHTLRRLIQAWCSMNASHGIERIPTPKPPVNKNQISKLLKDASHSPLTCLRRLKSISSGSETNKRCMEASGAVEFLASIVINTNRNIDSSHEADSNDGSGFELKTSACDEALSLLHNLHLSEQGLKTLLSFRNGEFIESLTRVMQKGFFESRAYAVFLLKSISEVAEPVQLLHLRQELFVELVQVLKDQISQKTSKATLQTLIQFSPWGRNRIRAVEAAAVPVLIELLLDCKERKPCEMMLVLLELLCQCAEGRAELLSHAAGLAIVSKKILRVSTLANDRAVKIILSLSRFSATPHVVQEMLKLGVVAKLCLVLQVDSGNRAKEKAREILKLHARAWRNSPCIPNNLLNSYPNYV

SEQ ID NO: 12366 - DNA, 1260 bp, Glycine max
  CDS (1)..(1260)
atgaacgaaatcgatgttccttcgttctttctctgccccatttcgctagaaatcatgaaggatccagtgacggtctcaacgggcatcacctacgaccgtgaaagcatcgaaacgtggctgttctcgaagaaaaacacgacatgccccattaccaaacagcccttgattgattacaccgatctcacaccaaaccacacccttcggagactcatccaatcgtggtgtaccatgaacgcttctcacggcatcgaaaggatcccaacccctaaaccccccgttaacaagaaccaaatttcgaagcttctcaaagacgcttctcattcccctctcacatgcctcagaagactcaaatccatcgcttcaggaagcgaaacaaataagcggtgcatggaagcttctggcgctgttgagtttctagcatcaattgtaatcaacaacaacagcaacattgattcttcaaatgaggctgactcaaacgacggatctggattcgagttgaaaacaagtgcaagcgatgaagcgttgagtttgcttcataatcttcatttatctgaacaagggttgaagactctcttaagcttcagaaacggcgagtttattgagtctttaacaagagtcatgcaaaaggggttctttgaatcacgcgcttatgctgtgttcttgttgaaatctacttccgaagtggctgaaccagtgcaactattgcatctaagacaagaactttttgtcgaactggtacaagtcctgaaggatcaaatttcacagaagacatcaaaagcgacccttcaaaccctgatccaattctctccttgggggaggaacaggatcaaagctgtggaagcagatactgttcctgttttggttgagcttcttctcgattgcaaggagagaaagccttgtgagatgatgctggtgttgttggaactgctatgccagtgtgctgagggaagagcagaacttttgagccatgcagcaggtcttgccattgtgtccaaaaagattctaagggtttcaactttggcgaatgatagagctgttaagattattctgtctctttcgaggttctctgcgactccacatgttgttcaagaaatgctgaaactcggtgtggtcgcgaaattgtgcttggtgcttcaggtggatagtggaaacaaggctaaggaaaaagctagagagatactcaaattgcatgctcgggcgtggaggaattctccatgcataccgaacaatttgcttaattcatacacgaattatgtgtga

SEQ ID NO: 12367 - protein, 419 aa, Glycine max
MNEIDVPSFFLCPISLEIMKDPVTVSTGITYDRESIETWLFSKKNTTCPITKQPLIDYTDLTPNHTLRRLIQSWCTMNASHGIERIPTPKPPVNKNQISKLLKDASHSPLTCLRRLKSIASGSETNKRCMEASGAVEFLASIVINNNSNIDSSNEADSNDGSGFELKTSASDEALSLLHNLHLSEQGLKTLLSFRNGEFIESLTRVMQKGFFESRAYAVFLLKSTSEVAEPVQLLHLRQELFVELVQVLKDQISQKTSKATLQTLIQFSPWGRNRIKAVEADTVPVLVELLLDCKERKPCEMMLVLLELLCQCAEGRAELLSHAAGLAIVSKKILRVSTLANDRAVKIILSLSRFSATPHVVQEMLKLGVVAKLCLVLQVDSGNKAKEKAREILKLHARAWRNSPCIPNNLLNSYTNYV

SEQ ID NO: 12368 - DNA, 1263 bp, Glycine max
  CDS (1)..(1263)
atggacattaacgagatcgatgttccttcattctttctctgccccatttcgttagaaatcatgaaggatccagtgacggtctcaacaggcatcacctacgaccgtgaaagcatcgaaacatggctgttctcgaagaaaaacacgacatgccccatgaccaaacagcccttgatagattacaccgatctcacaccaaaccacacccttcggagactcatccaagcgtggtgtaccatgaacacttctcacggcatcgaaaggatcccaacccccaaaccccccattaacaaaaatcaaatttccaagcttctcaaggacgcttctcattcccctctcacatgcctcaggagactcaaatccatcgcttcaggaagcgaaacaaataagcggtgcatggaagcttctggtgttgttgaatttctagcatcaattgtaatcaacaacaacaacatcgtttcttcaaatgaggctgactcaaatgagggatctggattcgagttgagaacaagtgcaagcgatgaagcgttgagtttgcttcataatcttcatttatctgatcaagggttgaagactctcttgagcttcaaaaccggcgactttattgagtctttaacaagagttatgcaaaaggggttctttgaatcacgcgcttatgcagtgttcttgttgaaatccatgtccgaagtggctgagccagtgcaattattgcatctaagacaagacctttttgtcgaactagtacaagtcttgaaggatcaaatttctcaaaagacatcaaaagcaacacttcaaaccctgatccaattctctccttgggggaggaacaggatcaaagctgtggaagcaggtaccgttcctgttttggtagagcttcttctcgattgcaaggagagaaagccttgcgagatgatgctggtgttgttggaaattctatgccagtgtgctgagggaagagcagaacttttgaatcatgcagcaggtcttgccattgtgtccaaaaagattctaagggtttcgactttggccaatgatagagctgttaagattcttctgtctgtttcgagattctctgcgactccacatgttgttcaagaaatgcttaaacttggtgtggtcgcgaaattgtgcttggtgcttcaggtggatagtggaaacaaggctaaggaaaaggcaagagagattctcaaattgcatgctcgtgcgtggaggaattctccatgcataccgaacaatttgcttaattcatacccgaactatgtgtga

SEQ ID NO: 12369 - protein, 420 aa, Glycine max
MDINEIDVPSFFLCPISLEIMKDPVTVSTGITYDRESIETWLFSKKNTTCPMTKQPLIDYTDLTPNHTLRRLIQAWCTMNTSHGIERIPTPKPPINKNQISKLLKDASHSPLTCLRRLKSIASGSETNKRCMEASGVVEFLASIVINNNNIVSSNEADSNEGSGFELRTSASDEALSLLHNLHLSDQGLKTLLSFKTGDFIESLTRVMQKGFFESRAYAVFLLKSMSEVAEPVQLLHLRQDLFVELVQVLKDQISQKTSKATLQTLIQFSPWGRNRIKAVEAGTVPVLVELLLDCKERKPCEMMLVLLEILCQCAEGRAELLNHAAGLAIVSKKILRVSTLANDRAVKILLSVSRFSATPHVVQEMLKLGVVAKLCLVLQVDSGNKAKEKAREILKLHARAWRNSPCIPNNLLNSYPNYV

SEQ ID NO: 12370 - DNA, 1308 bp, Glycine max
  CDS (1)..(1308)
atggttttgtcttggactagaagaaacgttttccgccgtgcaaagaaggagaaggaacaaagtcaactattagaagttgaggttgtgattcccaaccactttcgctgtccggtgagtttggagctgatgacagatccggtgactttatcaaccggcattacctacgaccgtgtgagcatcgagaagtggatcgagggagaaaacagaacctgccccgtcaccaaccaggtgctgacaaccttcgacctcatccccaaccatgccattcgcatgatgattcaggattggtgcgtccaaaacagttcttatgggattgaaagaatccccactcctcgtattcccatctccagctacgaggtatccgacacttgtacgaggatcttgtcggcttgccagcgtggggacaatgagaggtgtcaggagttggttggaaagattaaggtttggggtagagagagtgagaggaacaagaggtgcatagttggtgctggtgctggtgctgttcttgcatatgcctttgattgtttctcaagtaactctattgataagcatgtggttgttttggaggaggttttggaggtgatgacatggatgatcccatttggggaagagggtgtttctaaattgagttcaagagcttctttgaattcattggtttggtttctagaagggaaagaccttgcatcaaggcaaagtgctgctttgttgcttaaagaagtgtgtgtgcaagaattggccaaggttggaaatgttgttgaggctttggttaagatgcttagggagcctattgggagtagtacttccacaaaggcttgtttggcaacaatttttaacttggtttcttcagcggctgcgaatagagaggggattgttcaaagatttgtggagttgggtttggtttcacttttgcttgaggctattgttgatggagaaaaaggggtgtgtgagaaggcacttggggtgttggattgcatttgtgattgccaaaaggggaaggaggttgttgaaagcaatgctcttgccttgcctcttgttgttaagaagcttttgagggtgtcaccattggcttcaagttttgctgtgtctattctaaggaagatttgtgacaagagggaggaaggggttctggttgaggcacttcaagttggggtttttcagaagctcttggttatgctgcaggttgggtgtgatgagagcaccaaggagaatgctacccggttgttgaaactgttgaatggttacaggaacaaagcggagtgcactgactcatcatcattggatttcaagcatcttaagaagccattctaa

SEQ ID NO: 12371 - protein, 435 aa, Glycine max
MVLSWTRRNVFRRAKKEKEQSQLLEVEVVIPNHFRCPVSLELMTDPVTLSTGITYDRVSIEKWIEGENRTCPVTNQVLTTFDLIPNHAIRMMIQDWCVQNSSYGIERIPTPRIPISSYEVSDTCTRILSACQRGDNERCQELVGKIKVWGRESERNKRCIVGAGAGAVLAYAFDCFSSNSIDKHVVVLEEVLEVMTWMIPFGEEGVSKLSSRASLNSLVWFLEGKDLASRQSAALLLKEVCVQELAKVGNVVEALVKMLREPIGSSTSTKACLATIFNLVSSAAANREGIVQRFVELGLVSLLLEAIVDGEKGVCEKALGVLDCICDCQKGKEVVESNALALPLVVKKLLRVSPLASSFAVSILRKICDKREEGVLVEALQVGVFQKLLVMLQVGCDESTKENATRLLKLLNGYRNKAECTDSSSLDFKHLKKPF

SEQ ID NO: 12372 - DNA, 1212 bp, Glycine max
  CDS (1)..(1212)
atggatgaaattgaaatccctgctcatttcctctgccccatttccctccaactcatgagggaccctgtcacggtttgcacaggaatcacttatgatagagagaacatagagagatggttattttcatgcaagaacaacacatgccccgttactaagcagtgtctattaaaccatgatctcaccccaaaccacactctacggaggttgatccaatcttggtgcaccctcaacgcctctctaggagttgaacgcattccaactccaaagtcaccaatagacagaactcagattgtgaaactcctcacagaagcaaaaaggttccctgagaagcaactcaagtgcctcacaaggcttcgatccattgcctttgaaggccaaaggaacaaaacatgtttagagtctgcaggagtaatagaattcttggtctcaacaatgaagaacaacaacacacaagaagactcaactgttctcagtgaagcagctattgaagtcttgttccacctcaatctttccgaggctcgggttaaagctctgattaacaacgaggaatttcattttattgagtcattgtttcatgttttaagacttggaaactaccaatctagagcctttgctacaatgctgcttagatcagcatttgaggtagctgatccaatccaattgatcagtgtcaaaactgcactgttcgtggaaatcatgcgcgttctgcgcgatcagatttcgcagcaggcttcaaaggctgcattgaagctcattgtggagctctttccgtggggaagaaacaggatcaaaggggttgagggtggtgctgttttggtcctcgttgagttacttcttggtgcctcggaaagaagaacgtgtgaactcattttgatagctttggatcagctttgtgggtgtgcagaagggcgtgcagagttgttgaaccatggagcaggagtggccattgtgtccaagaaaattctaagggtctctcatgtggcaagtgacagaggggttagaattttagcctctatttgtaggtattccgccaatgctagagtgcttcatgaaatgttgcaggttggggcagtgtccaagttgtgcttggtgcttcaagtgaattgcagtttaaagactaaggagagggcaaaggaaatactccaattgcattctgtggtttggaagaattctccatgtattcctgtacctttgttatcttcctatccatga

SEQ ID NO: 12373 - protein, 403 aa, Glycine max
MDEIEIPAHFLCPISLQLMRDPVTVCTGITYDRENIERWLFSCKNNTCPVTKQCLLNHDLTPNHTLRRLIQSWCTLNASLGVERIPTPKSPIDRTQIVKLLTEAKRFPEKQLKCLTRLRSIAFEGQRNKTCLESAGVIEFLVSTMKNNNTQEDSTVLSEAAIEVLFHLNLSEARVKALINNEEFHFIESLFHVLRLGNYQSRAFATMLLRSAFEVADPIQLISVKTALFVEIMRVLRDQISQQASKAALKLIVELFPWGRNRIKGVEGGAVLVLVELLLGASERRTCELILIALDQLCGCAEGRAELLNHGAGVAIVSKKILRVSHVASDRGVRILASICRYSANARVLHEMLQVGAVSKLCLVLQVNCSLKTKERAKEILQLHSVVWKNSPCIPVPLLSSYP

SEQ ID NO: 12374 - DNA, 1215 bp, Glycine max
  CDS (1)..(1215)
atggaagaagttgaaatcccacaatattttgtttgtcccatttcgtttcagatcatggaggaccctgtgactactgtgacaggcataacatatgatagagaaagcatagagcagtggttgcttaaggccaaagattgtgtgtgtcctgtttccaagcaaccattgccaagaagctctcaatacttgacccctaatcacacacttcggaggctgattcaagcttggtgttcagcaaacacggccaatggtgttgatcgaattccgaccccgaaaacgcctttgagcatgatccaagttcagaagcttgtgaagggtcttgaggctccttgttcttatcaaacatcgttggagaagttgcatgccttggctacaattgagaggaacagaacttgcatggctgaggctagtgtggctaaggccatgatcaaattgattaacaagagtttcaaagaaggaaacacaaacaccacctgcatagaaaaggctttgagaattgttcatgttctttggagcaatgatcaatatagcatgaagactctagttggggaggacttagacttcatcaactctttgacttggattgtgaggcttcatttggatgaaaacaacatcaagatggtaaacgaagcaatgccccttttgaagttgacaattgaagttgttgattcaacccttttggggaatttaagccttgaattcttcaaggaaatggtgagagttttgagaaagaaaagactctctcaacaagccattaaatatgctttgtgggtgcttacagaaactagcactttgggtagaaacagaacaaggattgttgaagcaggtgcagtcacagaactcatagagcttgagcttgagaaaccagagaagaacatgacagagctcatattcaatcttctggcactcctgtgttcttgtgctgatggaagagaacagtttctgcgacacgctgccggcattgcagtgctttctaagagggttttcagggtttctgctgccactgatgacagagcaattcatgtgttttcagtgattgccaagttttcagcatcaaatgaggttgttctagagatgttgagggttggagctgtgtcaaagctttgcatggtgatgcaagcagattgtgcttcttatttgaaagagaaagcaagagacatccttaggttgcactccaaagtttggaacaattctccctgcatacaaaatgtgttataa

SEQ ID NO: 12375 - protein, 404 aa, Glycine max
MEEVEIPQYFVCPISFQIMEDPVTTVTGITYDRESIEQWLLKAKDCVCPVSKQPLPRSSQYLTPNHTLRRLIQAWCSANTANGVDRIPTPKTPLSMIQVQKLVKGLEAPCSYQTSLEKLHALATIERNRTCMAEASVAKAMIKLINKSFKEGNTNTTCIEKALRIVHVLWSNDQYSMKTLVGEDLDFINSLTWIVRLHLDENNIKMVNEAMPLLKLTIEVVDSTLLGNLSLEFFKEMVRVLRKKRLSQQAIKYALWVLTETSTLGRNRTRIVEAGAVTELIELELEKPEKNMTELIFNLLALLCSCADGREQFLRHAAGIAVLSKRVFRVSAATDDRAIHVFSVIAKFSASNEVVLEMLRVGAVSKLCMVMQADCASYLKEKARDILRLHSKVWNNSPCIQNVL

SEQ ID NO: 12376 - DNA, 1296 bp, Glycine max
  CDS (1)..(1296)
atggttttgtcttggtcaagaaggaacgttttccgccgtgccaagaaggagaagtcacaaactcaattggaagtggaggttgtgattcccaaccactttcactgcccggtgagtctggagctgatgacagacccagtgactttatcaaccggcatcacctacgaccgtgtgagcattgagaagtggatcgagggagggaacagaacctgccccgtcaccaaccaggtgctgacaaccttcgacatcatccccaaccacgccattcgcaggatgattcaggattggtgtgtcgaaaatagttcttatgggattgatagaatccccacacctcgtattcctatctcggcatacgaggtttccgacacgtgtaccaggatcttgtcggcttgccagcgtggagatgacaagaggtgtcaggagttggtcgggaagattaaggtttggagtagagagagtgagaggaacaagaggtgcatagttggtgctggtgctggtgctgttcttgcatatgcctttgattgtttctcaagtaactctattgaaaaacatgtggtgcttttggaggaggttttggaggtgatgacatggatggtcccacttggggaagagggtgtttctaaattgagttcaggagcttctttgaattcgttggtatggtttctagaggggaaagaccttgcatcaaggcaaagtgctgctttgttgcttaaagaagtgtgtgttcaagaattggccaaggttggagaagttgttgaagctttggttaagatggttagggagcctattgggagcacttccaccaaggcttgtttggcaacaatttttaacttggtgtcgttggctgcgaatagagagggaattgctcaaagatttgtggagttgggtttggtttcacttttgctagaggctattgttgatggagagaaaggggtgtgtgagaaggcacttggggtgttggattgcatttgtgattgcgagaaggggaaggaggttgtgaagagcaatgctctagccttgcctcttgttgttaggaagcttttgagggtgtcaccattggcttcaggttttgctgtgtctattcttaggaagatttgtgacaagagggaggaagggattctgattgaggcacttcaagttgggctttttcagaagctcttggttctgctgcaggttgggtgtgatgagagcaccaaggagaatgctaccgggttgttgaaactgttgaatggttacaggaacaaagcggagtgcactgactcatcattgaatttcgagcatcttaagaagccattttaa

SEQ ID NO: 12377 - protein, 431 aa, Glycine max
MVLSWSRRNVFRRAKKEKSQTQLEVEVVIPNHFHCPVSLELMTDPVTLSTGITYDRVSIEKWIEGGNRTCPVTNQVLTTFDIIPNHAIRRMIQDWCVENSSYGIDRIPTPRIPISAYEVSDTCTRILSACQRGDDKRCQELVGKIKVWSRESERNKRCIVGAGAGAVLAYAFDCFSSNSIEKHVVLLEEVLEVMTWMVPLGEEGVSKLSSGASLNSLVWFLEGKDLASRQSAALLLKEVCVQELAKVGEVVEALVKMVREPIGSTSTKACLATIFNLVSLAANREGIAQRFVELGLVSLLLEAIVDGEKGVCEKALGVLDCICDCEKGKEVVKSNALALPLVVRKLLRVSPLASGFAVSILRKICDKREEGILIEALQVGLFQKLLVLLQVGCDESTKENATGLLKLLNGYRNKAECTDSSLNFEHLKKPF

SEQ ID NO: 12378 - DNA, 1248 bp, Glycine max
  CDS (1)..(1248)
atgcccggtagtttagaaccgttggatttgggtgttcacataccctaccacttcagatgcccaatctcgctcgaactcatgcgagacccagtaaccgtctgcaccggtcaaacctacgaccgcgccagcatcgaggcatgggtcagcaccggcaacagcacgtgtccggtcacacgcgccactctcacagacttcaccctaatcccgaaccacacccttcgccgccttatccaagagtggtgcgtcgctaaccgcgcttttggcgtcgagcgaatccccactcccaaacagcccgcagaccctgccttagttcgctctctcctcaaccaagcttcttccggttctgcccctgctcacctccgcctttcttccattcgccgactcagacaactcgctcgcgactcggacaagaatcgttccctcattgcctctcacaacgttcgccagatccttctccctatcgttttcaacaacggttcggatgagttgaaaaacgaatcgctcgcgctactcgttatgtttccgcttggtgagtcggaatgtgcttcgctcgcatctgattctgtgaagattggctatctatcgcggatgttgacgcataactcgttcgacgtccgagtcaactcggccgcgttgatcgagatcgtcgtcgccgggacgcactcgccggagctacgcgcggaggtgagcagtgtcgacgaaatctacgacggagtggtggatctgctccggagcccgatctcgcacccgcgcgcgctcaagatcgggatcaaggccttgttcgcgctttgtttggtgaagaatacgcggcagaaggcggtggacgccggcacgccggcggttctagtcgaccggctcgcggacttcgagaagtgcgacgcggagagggcgctggccacggtggagctgctctgccggattccggcgggatgcgaggcgttcgccggacacgcgctgacggtgccgatgctggtgaagataattctgaaaatctccgaccgtgcgacggagtacgccgccggagcgctgctctcgctgtgttcggaatcggagcggtgccagcgcgaggcggtggcggcgggcgtgctgactcagcttctgcttctcgtgcagagcgattgcacggagagagcgaagaggaaggcgcagatgctgctgaagcttcttcgggattcgtggccgcaagattccatcggaaataattctgacgattttgcatgcagccaggtcgttgtggttcccttttga

SEQ ID NO: 12379 - protein, 415 aa, Glycine max
MPGSLEPLDLGVHIPYHFRCPISLELMRDPVTVCTGQTYDRASIEAWVSTGNSTCPVTRATLTDFTLIPNHTLRRLIQEWCVANRAFGVERIPTPKQPADPALVRSLLNQASSGSAPAHLRLSSIRRLRQLARDSDKNRSLIASHNVRQILLPIVFNNGSDELKNESLALLVMFPLGESECASLASDSVKIGYLSRMLTHNSFDVRVNSAALIEIVVAGTHSPELRAEVSSVDEIYDGVVDLLRSPISHPRALKIGIKALFALCLVKNTRQKAVDAGTPAVLVDRLADFEKCDAERALATVELLCRIPAGCEAFAGHALTVPMLVKIILKISDRATEYAAGALLSLCSESERCQREAVAAGVLTQLLLLVQSDCTERAKRKAQMLLKLLRDSWPQDSIGNNSDDFACSQVVVVPF

SEQ ID NO: 12380 - DNA, 1433 bp, Zea mays
  CDS (1)..(1227)
atggcgagcgcgcccggcgaggtgccgtcccacttcctctgccccatctcgctgcagctcatgcgggaacccgtcacgctgcccaccggcatctcctacgaccgcgccgccatctcccgctggctggccacgcctgcgccggccggcggccgcacctgcccggtcacgcgcgtgccgctcccgccgcagccccagctcactcccaaccacaccctccgccgtctcatccacgcctggctcgcgtccctctcccccgaggcggaggtcaacgaggacgtggccgcgctgcgggggcccgtgcccggcgcggaggcggtcgtcgcgctgctgtccgacgccgccggggctcaggttgaggcgctcaagaggctgcgggagctggtggccgagtgcgaggacagcaggacggttctcgagtcccaggacggggtgttcgacgccttgtcccgcgtcgtgagcagtgccgatgcgtgctcgacggcgcgcgaggaggcggtcgggctgctcgcgtcgctccggatcccggagccggagctggccggcgtcgtggccaggcacagcaacctgggggatgcactcacggccgtcctccgctcgtcgaatctgaagtcgcgcgcgaacgccgctctgctcgttaggtccctctccgaagcggcgtggccggcctgggtcatcgggctgagccaggagcttctagcggaggttgtccgcgtggtccgcgaccgtgtctccacgcaggcgaccaaggcagcactgcacgccctcgcggcgctctgcccctacggccggacccgcgtcaagatcgtgggcgtgggcgcggtgccggcgatcgtggacctcctgctcgacgaccccgagaggcgtgtcaacgagctcgcgcttgtggcgctggaccggttgtgtacgtgcgccgagggccgcgctgagctggtcgcgcacgcggcggggctggccgtggtgggcaagaaggcgctgcgggtgtcggagaccgcgagcgagcgggcggtgcgcgtgctgcgctccgtggcgcgtcacgcggccacgcctgccgtgctgcaggagatggtggagtccggcgtcgtggccaagctctgcgcggcgctgtggtcccagcagtgcgggttgaggaccaagcagaaggcgcatgaggtgctcaagctgcactccaggacatggaggagctcgccctgcttgtctccaaaatttttggggctctacccatcatgacgatggggcttcttttcctgttgattcattctttcaatctaaggcaccagattgtgcctgcagaagttgaacacatctgaattctttttgcttggtaaccgaattagtgtaggatgatgtaatctttttgataatctgttcagttcagagcacctgatttgccgcgagatgttgagatggagaaaaaaaaaaaaaaaagcggccct

SEQ ID NO: 12381 - protein, 408 aa, Zea mays
MASAPGEVPSHFLCPISLQLMREPVTLPTGISYDRAAISRWLATPAPAGGRTCPVTRVPLPPQPQLTPNHTLRRLIHAWLASLSPEAEVNEDVAALRGPVPGAEAVVALLSDAAGAQVEALKRLRELVAECEDSRTVLESQDGVFDALSRVVSSADACSTAREEAVGLLASLRIPEPELAGVVARHSNLGDALTAVLRSSNLKSRANAALLVRSLSEAAWPAWVIGLSQELLAEVVRVVRDRVSTQATKAALHALAALCPYGRTRVKIVGVGAVPAIVDLLLDDPERRVNELALVALDRLCTCAEGRAELVAHAAGLAVVGKKALRVSETASERAVRVLRSVARHAATPAVLQEMVESGVVAKLCAALWSQQCGLRTKQKAHEVLKLHSRTWRSSPCLSPKFLGLYPS

SEQ ID NO: 12382 - DNA, 1356 bp, Oryza sativa
  CDS (115)..(1356)
gacatctacaccacatacaatacaagagctactactacagctcaccatcaccggagcaagagccaagaagacgacgacgacgacgagctagcagcagcattgcaaccgacggcaatggaggagcagcagcaggtggaggtggaggtggaggtgccgtcctacttcgtgtgccccatctcgctgcagatcatgcgcgacccggtgacgctccccaccggcatcacctacgaccgcgacggcatcgagcgatggctcctcaccgccggcacctgcccgctcaccaagcagcccgtgccgcccgactgcgaccccacgcccaaccacaccctgcgccgcctcatccagtcgtggtgcgccctccacgccgaccatggcgtcgacctcgtccccacccccaagccccccgccgaccgcgcccgcgtcgccgacctcgtctcccgcctccgcgccgccacgagctccgctgccctcctcgacgcgctgcgcgagctcagggacgttgccgccgagagcgagcgtaacaggaagctcctcgccgccgtccccggcgcggtggatgttctggccgccgtcgtcgtcgcgtcgtgtcgagacgccaaggccgcgtgcgacgaggccctcgagatcgtctgctcgctggagctctcggagcggtgcctggcgcggctcgtcgagaggaacgaggagctcgtcgacgcgctcgtcgccacgctgcagcggacgaacaccacgtcccgggcgcacgcggcgctgctcctggaggccgtgacggcggtcatgccgtcgaacaggctggtgtccctcccggaggaggtgttcggtgaggcggtgcagctgctccgcgacagggtatcgagcccggcgacgagggcggcgctgcacgtgctggtcggcacgacgtcgtggggccgcaaccgcgtgaaggcggtggacgccggcgcggtggcggtgctggtcgacatgctcctggacgggccagtcgagcggcgcgggtgcgagctggccctggcggcgctggaccggatgtgcgggtgcgcggaggggcgggcggcgctggtgtcgcacggcgcgggcgtggcggtggtggggaggaaggtgctgagggtgtcggaggtggcgagcgagaaggcggtgcgggtgctgcggtcggtggcgaggcacgcggcgacggcggcggtggtgcaggagatggcgcagacgggggcggtggagaagctgtgcgtggtggcgcagtcggagcagtgcggggagaggacgcgggagcgggcgcgggagacgctgcggctgcacgccagagcgtggaggaactcgccctgcttgcagcctcacctccaggccctctacccttcttgctga

SEQ ID NO: 12383 - protein, 413 aa, Oryza sativa
MEEQQQVEVEVEVPSYFVCPISLQIMRDPVTLPTGITYDRDGIERWLLTAGTCPLTKQPVPPDCDPTPNHTLRRLIQSWCALHADHGVDLVPTPKPPADRARVADLVSRLRAATSSAALLDALRELRDVAAESERNRKLLAAVPGAVDVLAAVVVASCRDAKAACDEALEIVCSLELSERCLARLVERNEELVDALVATLQRTNTTSRAHAALLLEAVTAVMPSNRLVSLPEEVFGEAVQLLRDRVSSPATRAALHVLVGTTSWGRNRVKAVDAGAVAVLVDMLLDGPVERRGCELALAALDRMCGCAEGRAALVSHGAGVAVVGRKVLRVSEVASEKAVRVLRSVARHAATAAVVQEMAQTGAVEKLCVVAQSEQCGERTRERARETLRLHARAWRNSPCLQPHLQALYPSC

SEQ ID NO: 12384 - DNA, 1643 bp, Oryza sativa
  CDS (102)..(1430)
cattcccttcaactcaaactcctcttcttcttcttcctcccatcgatctctctccttcgcgatcaactcgagctcgaactcgtctcgtggtagtagcgagcatggaggaggcggcggcggaggtgccgtcctacttcctgtgcccgatctcgctggagatcatgagggacccggtgacgctggcgacggggatcacctacgaccggagcagcatcgagcggtggatgttcggcggcggcggcggcgacggggggaaggggacgtgcccggtgacgcggcggcagctggcgccggcggagcgggaggcgacgcccaaccacacgctgcggcggctcatccaggcgtggtgcgccgcgcacgccgtcgagaggttccccaccccgcgcccgcccgtcgactcctgccgcgtcgccgcgctcgtcgacgaggggacgacgacgatgctcggcggcggcggcaggcagcggcagctcgccgcgctccgggagatcaaggccatcgccgccgagagcgaccgcaacaagcgctgcgtcgaggccacgcccggcgccgtcgagttcctcgtctccgtcgtcgtccagagccatgccgccgcctccacctcagccagctcggacgacgacgacctgttcgactcggtgatcgattcccccatgtcgacgagctcgccggaggaggaggccctgggcgtgctctactccctcaagccgtccgagcccaccctgcgccgcgtcctcggcaaggacaatggcgtcggcttcctcgacaccctcgcctccgtgctccgccgcccgagctaccgttcgcgcgcgtatgccatcctcctcctgaaggcggtgacgtcggcgatgccgccggagcggctgatggcggtgagccccgagctggtggaggaggtggtccgggtggtgtccgacggcgtgtcgtcgaaggcggtgaaggcggcgctgcacgtgctgtgccggctgtgcccgtgggggcggaaccgcgtgaaggcggtggaggccggcgcggtggcggcgctggtggggctcctcctcgacgaggagggcggcggcgggcggcggcgcgcggcggagctggcggtggtggcgatcgaccacctgtgcgggtgcgcggaggggaggtcggagctggtggcgcacccggcggggctcgccgtggtgtccaagagggcgatgcgggtgtcgccggcggccaccgagagcgccgtgcgcgcgctccacgccgtcgcgaggaacgcggcgacgccggccgtgctgcaggagatgctcgccgtcggcgtggtggcgaagctgctgctggtgctgcaggcggacggcggcgagcgcgccagggcgagggcgagggagatgctcagggcgaacgctagggtttggaaggactcgccatgcttgcaagctcaccttaaggcttcttacccctcctgatcatttcatcaccatcacatccatccaccgatctattaattattattaattgctaagaggagcacgtgctttaatttgcactcctcttagtagttaattagattttgtgattacttttagttctttaatttgtttatgatctgaatgtacaaaatacactgtaaatctttcattaattctgtacaaaaatacactataaatctttcattgcct

SEQ ID NO: 12385 - protein, 442 aa, Oryza sativa
MEEAAAEVPSYFLCPISLEIMRDPVTLATGITYDRSSIERWMFGGGGGDGGKGTCPVTRRQLAPAEREATPNHTLRRLIQAWCAAHAVERFPTPRPPVDSCRVAALVDEGTTTMLGGGGRQRQLAALREIKAIAAESDRNKRCVEATPGAVEFLVSVVVQSHAAASTSASSDDDDLFDSVIDSPMSTSSPEEEALGVLYSLKPSEPTLRRVLGKDNGVGFLDTLASVLRRPSYRSRAYAILLLKAVTSAMPPERLMAVSPELVEEVVRVVSDGVSSKAVKAALHVLCRLCPWGRNRVKAVEAGAVAALVGLLLDEEGGGGRRRAAELAVVAIDHLCGCAEGRSELVAHPAGLAVVSKRAMRVSPAATESAVRALHAVARNAATPAVLQEMLAVGVVAKLLLVLQADGGERARARAREMLRANARVWKDSPCLQAHLKASYPS

SEQ ID NO: 12386 - DNA, 1242 bp, Zea mays
  CDS (1)..(1242)
atggaggaaccgcctcagctgttcttgtgccccatatccatggagctgatggaggaccccgtcacggtgttaaccggcgtcacctacgatcgcagcagcatcgagcggtggttcttcaagtacggcaaggcgacgtgcccggccaccatgcagcggctgaattccttcgacctcacgcccaaccacactctgaagcgcgtcatctccacctggcttgaccacgcctcctccccctcctcatcgtcgtcgagcacgccgctgtgtaataagctggagcgggaaaagctaccgtcggtgttcgcgagcattgaggccacgccgttcaaggtcaccgcgctcaaaaacctcaggcgctgcatggacggagacgtggcagcgcagaaggacttcgtcgcctacggcggcattcaggtgctcggccgcgtcatgacacaggcgctggcggagagctgcgccggtggagacttctcatcgttccggacgtgcgaggaggccggcgccgtcctcgccacgctccctctctccgacgacgcgtcggtggagctcgtgctcaaacccgagtgcatgaagcccgtggtcgcggtgctgcagcgcggcagcgccgagtctaggctgcacgctatggccatcctcgctaagatctccagggccatcggcgccgaccgtgactggacccctggtgtagacgtcgacgacctggtcaagtccctcctcgagctcctgtccgacggtgcctcagcgaagctgagctaccgcgcgctcgacgtgctcctcgacgtcacggcgcgctcccgcggcgcgcggcgcgccaaggccgtcgaagtgggcgcggtctgcgtgctcgtggagctccttcccgacgccgagcgccgcatcgccgagcgcgcgctcctcctactcaagcgcctgtgcaagtgccccgaaggccggctcgccttcgtggagcacgcgctggcggtgtcggccgtggcgcagacgctgctgcgcgtgtcgcgcctcgccagcgggctggccgtgagcgtgctgtggctggtggcgtgcgcggtgacgcctgcggagagggtgctggatgacatgctgatgagcggcggtgtggcgaagctgctggcactcctgcaggtggagaactccgcgtcgaccaaggagaaggcggcgaagcttctcagtgtgcacggcgcattctggaggcagtacccgtgcttccccactgacctcagggactacctgaaattcctcaactga

SEQ ID NO: 12387 - protein, 413 aa, Zea mays
MEEPPQLFLCPISMELMEDPVTVLTGVTYDRSSIERWFFKYGKATCPATMQRLNSFDLTPNHTLKRVISTWLDHASSPSSSSSSTPLCNKLEREKLPSVFASIEATPFKVTALKNLRRCMDGDVAAQKDFVAYGGIQVLGRVMTQALAESCAGGDFSSFRTCEEAGAVLATLPLSDDASVELVLKPECMKPVVAVLQRGSAESRLHAMAILAKISRAIGADRDWTPGVDVDDLVKSLLELLSDGASAKLSYRALDVLLDVTARSRGARRAKAVEVGAVCVLVELLPDAERRIAERALLLLKRLCKCPEGRLAFVEHALAVSAVAQTLLRVSRLASGLAVSVLWLVACAVTPAERVLDDMLMSGGVAKLLALLQVENSASTKEKAAKLLSVHGAFWRQYPCFPTDLRDYLKFLN

SEQ ID NO: 12388 - DNA, 1248 bp, Oryza sativa Japonica Group
  CDS (1)..(1248)
atgccggggagcgtgccgctggcgctgggcctggacacggcgggggtgcaggtgccctggtacttccggtgccccatctccctggagctgatgcgcgacccggtgacggtgtccaccggccagacctacgaccgcgccagcatcgagtcgtgggtggccaccggcaacaccacctgccccgtcacccgctccccgctcgaccgcgccttcaccctcatccccaaccacaccctccgccgcctcatccaggactggtgcgtcgcccaccgctccctcggcgtcgagcgcatccccaccccgaagcagccagccgaccccgacctcatccgctccctcctcgcccagtgccccgcgctcccgccgctccgcaagctcagggcgctcgcccgggactccgacaagaaccgcctcgtcatggccacccacgagacacgggcggcgctcgttgacatggcgtttgggacgaacgctggtggggaggaggtcgaggccgaggcgatggcggttcttgctatggttgggttgggtgaggctgaggctgtggaggtggtggggaggagggagagggtggcgaggctcggggagctgctggtgagtggggaaggggcggcgacgacgacggcgacgctggagtgcagggttaatgctggggctgtggtggaggcggttgcggcggtgtccggcgcggacgccagggcggtgctgggcgcggcggagggggtcatggaggggctcgtcgcgctggtcgaggagaaggcccacgcgcgcgccgtccgcgtcgggatccgtggactgttcgcgctctgcctcgccaaggagaaccgcccccgcgccgtcgccgccggtgccgcggcggcgctcgcgcgtcgcgtcgcggagggaggcggtggcgcgggggagccggagcgcgcgctggccgcggtggagcggctgtgccggacggagggcgggcgcgacgcggtggtcgcgggcgccgggggaggcgcggcggcggtgtgcgcgctggtgcgcgccatgtccgggcggtcagcggagcacgcggcgggggcgctggtggcggtggtgggcggatcggagccgctccaggtggaggcggtccgcgcgggcgccatgagccagctcctcctcatgggcgggtgctcggagcgggcgaagcggaaggcgcagcacctgctcaagctgctccggtcggcgtggcccgccgccgactccatcgccaactccgacgacttcctccaaccatactaa

SEQ ID NO: 12389 - protein, 415 aa, Oryza sativa Japonica Group
MPGSVPLALGLDTAGVQVPWYFRCPISLELMRDPVTVSTGQTYDRASIESWVATGNTTCPVTRSPLDRAFTLIPNHTLRRLIQDWCVAHRSLGVERIPTPKQPADPDLIRSLLAQCPALPPLRKLRALARDSDKNRLVMATHETRAALVDMAFGTNAGGEEVEAEAMAVLAMVGLGEAEAVEVVGRRERVARLGELLVSGEGAATTTATLECRVNAGAVVEAVAAVSGADARAVLGAAEGVMEGLVALVEEKAHARAVRVGIRGLFALCLAKENRPRAVAAGAAAALARRVAEGGGGAGEPERALAAVERLCRTEGGRDAVVAGAGGGAAAVCALVRAMSGRSAEHAAGALVAVVGGSEPLQVEAVRAGAMSQLLLMGGCSERAKRKAQHLLKLLRSAWPAADSIANSDDFLQPY

SEQ ID NO: 12390 - DNA, 1281 bp, Oryza sativa Japonica Group
  CDS (1)..(1281)
atgagcattccgcacctgttcaggtgcccgatcagcctggacatcttcaccgacccggtgacgctgtgcacggggcagacgtacgaccggccgtgcatcgagcggtggctcgccgccggccaccgcacctgccccgtcacaatgcagccgctcggcgacgccaccgcgctcgtgcccaaccgcacgctgcgccacctcatcgagcgctggctgtccaccgaccaacaccacaaccaccacctccccgagccggcggcgccggcggcggaggccgaggccgacgcggaggagccgtcgctcgcggcgctcaagcgttgcctgcagcagccggacgccgccggcgccggtaaggcgaaggttggcgcgctcaagaaggtgatgacgctggcgtccgagtcggacgtcggccgcgcgtgcatggtccagctgggcttcctgcccgtgctgctgcagctcgtgttccacgcgccggcggcgccgccgtcggagcgacgcggcggcgaggcggcggtggtggaggagctcgcgctgcaatgcgcgctcggcctcatgccgtcgagcgccgcctcgccgcagctcggctgcctgaacgtgctcaagagcgaggccagcctggcgtcgctcgtcgccctgctggagcgcgggcgggggcggacgagggcggggctgtgccgcctcctcgaggccgtcgccacggccgccgcgacgagggagctggcgctcgtcgtggccgcctcgccgcgggtgtggcaggcgctcctcccgctcctgcggcacgacggccctgcgcccacgcccgcgccgccgcacgacgcgcacgcggcgtcggacgccgccgtgcgcgccgtggcggcgatctgcgcgtccgagccggcgcggggcggcgccatccaccacggcgcggtcggcgcgctcctcgggcacctctcgtgggcggcgtcggggaagtgcgcctccggcggctgcgccggcgccgtgccgagcgcgctggcggcggtggaggcgctggcggcgtcggaggccgggcgcatggcggtggcgcgcgcccccggcgggacgcgggcgctggtgaggcacgtgttcatgatgaactcgagcaacgacggcagcgagcacgcggtggcggcgctgctggccgtgtgcagggagtcgcgggcggcgcggagcgaggcggccggcgccggcgtggtgacgctgctgctgctgctgctgcagagccagtgcggcgccagggcgaaggccaaggccaggtctctgctcaagctgctcaaatccatgtga

SEQ ID NO: 12391 - protein, 426 aa, Oryza sativa Japonica Group
MSIPHLFRCPISLDIFTDPVTLCTGQTYDRPCIERWLAAGHRTCPVTMQPLGDATALVPNRTLRHLIERWLSTDQHHNHHLPEPAAPAAEAEADAEEPSLAALKRCLQQPDAAGAGKAKVGALKKVMTLASESDVGRACMVQLGFLPVLLQLVFHAPAAPPSERRGGEAAVVEELALQCALGLMPSSAASPQLGCLNVLKSEASLASLVALLERGRGRTRAGLCRLLEAVATAAATRELALVVAASPRVWQALLPLLRHDGPAPTPAPPHDAHAASDAAVRAVAAICASEPARGGAIHHGAVGALLGHLSWAASGKCASGGCAGAVPSALAAVEALAASEAGRMAVARAPGGTRALVRHVFMMNSSNDGSEHAVAALLAVCRESRAARSEAAGAGVVTLLLLLLQSQCGARAKAKARSLLKLLKSM

SEQ ID NO: 12392 - DNA, 1350 bp, Oryza sativa Japonica Group
  CDS (1)..(1350)
atgtctcgcgcgacgagggtggccgggaggctgatgccagagatatcgttgctgagacgggggaggaagtcggcggcgagaggcggcgacgatgcggaggtggaggtgtcggtgccggcgaacttcgtgtgcccgatctcgcttgagatgatgagggacccggtgacggcgccgacggggatcacgtacgatcgggagagcgtggaagggtggctggcgagggggcacgacacgtgtccggtgaccggccggccggtgaggctcgccgacctggtgcccaaccacgcgacgcggcggatgatccaggactggtgcgtggcgaaccgggcgcgcggggtggagcgggtgcccacgcccagggtgcccgtcggcgaggacgacgccgaggaggtggtagccggggtgtccgccgcggcgaggcggggcgacgcggcggcgtgcggcgccgcggccgcaacggccagggcgctcgggagggagagcgagcggaaccggcggtgcctcgccggcgcgggcgcggcgcacgcgctgtcgtccgcgttcgggctgctcgccggggaggagcccgtcgtcgagggcgccgtcgccggcgcgctcggggagatcctcgccgcgctcacggtgttcttcccgctcgacgaggagtgccgcagctgcattgcctcgccgccgtcgctcaagtcgctcgcctcgctgctctcccacggcggcgagctcgccgcgcgggtcagcgccgccgtcgtgctccgcgagctcgcctcctccggcgaccgccacgccctggaggccatcgcgagggcccacggcatgtgcgacgcgctcgtcggcctcgtcacgagccccgtctcctcgcaggccaccaaggccgccctcgtcacggcctactacctcgtctcctccggcgaccgcgccgccgcgcgcttcgcggagctcggcgtggtccccgccgccgtggagctcctcgtggacgccgacaaggggacgagcgagaaggccctggccgtgctcgacgccgccctgtgcgccgacgccggcgtcgagtccgcgcgcgcgcacgcgctgaccgtcccggtgctcgtcaagaagatgttccgggtgtccgacatggcgacggacttcgccgtgtccgcgctctggcgcctctgccgcgccggcgccggcgccgcgccgtgccgcgccgaggcgctccgcgtcggcgcgttccagaagctgctgctgctgctccaggtgggctgcgccggcgtcaccaaggagcgcgccagcgagctgctcaagatgctcaacgggtcgcgaggcagcgtcgaatgcatcgagacagtggatttcaagggtctcaagaggccattctga

SEQ ID NO: 12393 - protein, 449 aa, Oryza sativa Japonica Group
MSRATRVAGRLMPEISLLRRGRKSAARGGDDAEVEVSVPANFVCPISLEMMRDPVTAPTGITYDRESVEGWLARGHDTCPVTGRPVRLADLVPNHATRRMIQDWCVANRARGVERVPTPRVPVGEDDAEEVVAGVSAAARRGDAAACGAAAATARALGRESERNRRCLAGAGAAHALSSAFGLLAGEEPVVEGAVAGALGEILAALTVFFPLDEECRSCIASPPSLKSLASLLSHGGELAARVSAAVVLRELASSGDRHALEAIARAHGMCDALVGLVTSPVSSQATKAALVTAYYLVSSGDRAAARFAELGVVPAAVELLVDADKGTSEKALAVLDAALCADAGVESARAHALTVPVLVKKMFRVSDMATDFAVSALWRLCRAGAGAAPCRAEALRVGAFQKLLLLLQVGCAGVTKERASELLKMLNGSRGSVECIETVDFKGLKRPF

SEQ ID NO: 12394 - DNA, 1359 bp, Zea mays
  CDS (1)..(1359)
atggttacgccggcggtgtcccgctaccggcttcgcccgcggttggtgcgtgtggcggtgtcagagatcccgctcgccacgaggcggacgaggcagcagcccgtggccgcgacggagccggcgattccgagcaacttcctgtgcccgatctcgttggagatgatgcaggaccccgtgacggcgccgacgggaatcacgtacgaccgggacagcgtggaggggtggctggagcgcggccactccacgtgccccgtcaccgcgcgcccgctgcgcgcggaggacctgatcccgaaccacgccacgcggcggatgatccaggactggtgcgtcgccaaccgcgccctcggggtggagcgcgtgcccacgccccgcgtcccgctgtccgccgacgacgcggctgagctcctggcggcggtgtccgccgccgcgcggcgaggggacgcgatggtgtgccgccagctggcggccaaggccagggcgctagggaaggagagcgaccgcaaccgacggtgcctcgcggcggggggagccgcccgcgtgctttcctcggcgttccttcggctcgttgaccagccggcgtcgttcggcggcgcgctgggcgagatcctggccacgctggtcgtgttcttcccgctcgacgaggtgtgcaggagccacattgcctccccggcgtcgctggacgccatcgtctcgatcctgtcccacgacggcgaggcgaccacgaagtccagcgccgccgtcgtgctccgcgagatcgcgtcgtcgtccgactccgaccccgagtgcctcgacgccctgtccgtgaccagcggagtacacgacgcgctcatcaagctcctgcagaagcccgtgtcggcgcaggccaccaaggccgcgctggtcaccgcctactacctcgtcaggggcagcgacctagcggccaggcgcctggtcgacctcggcatggtcgatctcctggtcgagatgctagtcgacgccgacaagggcacgacggagaaggcgctcgcggtgctcgacagcctgttgctcacggaggaagggcgcgggaaggcgtgcgcgcacgcgttggccgtgccggtgctggtcaagaagatgcagcacgtgtccgagatggcaaccgagttcgccgtgtcggcgctgtggcggctgtgcaagagcttctcgggcgagggtccgtgcaaggccgaggcgctgcagctgggcgcgttccaaaagctcctcctcctgctgcaggtcggctgcatgggcgtgaccaaggaaagggccagcgagctgctcaggctcctgaatgggtcgagagacggcgttgagtgcattgagacggtagatttcaaggggctcaagagacccttctcatga

SEQ ID NO: 12395 - protein, 452 aa, Zea mays
MVTPAVSRYRLRPRLVRVAVSEIPLATRRTRQQPVAATEPAIPSNFLCPISLEMMQDPVTAPTGITYDRDSVEGWLERGHSTCPVTARPLRAEDLIPNHATRRMIQDWCVANRALGVERVPTPRVPLSADDAAELLAAVSAAARRGDAMVCRQLAAKARALGKESDRNRRCLAAGGAARVLSSAFLRLVDQPASFGGALGEILATLVVFFPLDEVCRSHIASPASLDAIVSILSHDGEATTKSSAAVVLREIASSSDSDPECLDALSVTSGVHDALIKLLQKPVSAQATKAALVTAYYLVRGSDLAARRLVDLGMVDLLVEMLVDADKGTTEKALAVLDSLLLTEEGRGKACAHALAVPVLVKKMQHVSEMATEFAVSALWRLCKSFSGEGPCKAEALQLGAFQKLLLLLQVGCMGVTKERASELLRLLNGSRDGVECIETVDFKGLKRPFS

SEQ ID NO: 12396 - DNA, 1251 bp, Zea mays
  CDS (1)..(1251)
atgccggggagcgtgccgctgggtctgtgcctggacacggcgggggtgcaggtgccgtggtacttcaggtgccccatctccctggagctgatgcgcgaccccgtgacggtgtcgacggggcagacctacgaccgcgccagcatcgagtcctgggtggccacgggcaacaccacctgccccgtgacccgcgcggcgctcgccgacttcacgctcatccccaaccacaccctccgccggctgatccaggagtggtgcgtggcgcaccggtccatgggcgtggagcgcatccccacaccgaagcagcccgccgacccggacctggtgcggtccctcgtggcgcagggcccggggctccccgcgctgcggaggctcagggcgctggccagggagtcggacaagaacaggctggtgatggccacgcacgagaccagggccgcgctggtggaggccgcctttgggtccgggtccggggcggcgagcgaggagctcgaggccgaggccatggcggtgctcgcgctggtggggctcggggaggccgaggccgcggaggtggtcgggagggaggaacgggtggccaggctcggcaaggtcctcggcggcggcgggccgctggaggcgagggtgaacgcgggcgccgtggtggaggccgtggcgtcggcgtcgggggccgaggcccgggctgcgctgggcggcgccgagggcgtgatggacgggctggtggcgctggcggaggaggagaaggccaacaacgcccgcgccgtgcgcgtcggggtccgggccctgttcgcgctgtgcctggcgaaggagaaccgcgcgcgcgcggtggcggcgggggccgcggcggcgctggcgcggcgcgtggcggagggcggcgccggggagcccgagcgcgcgctggcggccgtggagcggctgtgccgcgccgagggcgggcgcgacgccgtggtggccggcgcgggcggcgggcccgcggccgtggcggcgctggtgcgcgccatgtccgggcgcggcgcggagcacgcggcgggcgcgctggcggccgtggtggtgggcgcgggcgggtcggaggcgctgcaggcggaggcggtccgggcgggggccatggggcggctgctgctgatggtgcagggcgggtgctcggagcgcgccaagcgcaaggcgcagcacctgctgaagctgctccgctccgcctggccgagcgccgactgcgtcgccaactccgacgacttcctccaacactaccactactga

SEQ ID NO: 12397 - protein, 416 aa, Zea mays
MPGSVPLGLCLDTAGVQVPWYFRCPISLELMRDPVTVSTGQTYDRASIESWVATGNTTCPVTRAALADFTLIPNHTLRRLIQEWCVAHRSMGVERIPTPKQPADPDLVRSLVAQGPGLPALRRLRALARESDKNRLVMATHETRAALVEAAFGSGSGAASEELEAEAMAVLALVGLGEAEAAEVVGREERVARLGKVLGGGGPLEARVNAGAVVEAVASASGAEARAALGGAEGVMDGLVALAEEEKANNARAVRVGVRALFALCLAKENRARAVAAGAAAALARRVAEGGAGEPERALAAVERLCRAEGGRDAVVAGAGGGPAAVAALVRAMSGRGAEHAAGALAAVVVGAGGSEALQAEAVRAGAMGRLLLMVQGGCSERAKRKAQHLLKLLRSAWPSADCVANSDDFLQHYHY

SEQ ID NO: 12398 - DNA, 1335 bp, Zea mays
  CDS (1)..(1335)
  misc_feature (308)..(308): k is g or t
atggtccggaaggagacggccatgaggctgcccccgcagcaccagggcctggaggtcaagatccccagcttcttccgctgccccatctcgctggacgtcatgcgctcgcccgttagcctctgcaccggcgtcacctacgaccgcgcctccatccagcagtggctcgactccggcaacaccacgtgcccggccaccatgctcccgctcccctccaccgacctcgtccccaacctcactctccgcagcctcatcgcccactgggccgcctccgccgcctcctgttcccccaccgccgccggcggcgccgkagtcgccgactcctcttcggcacgtacttcttctcccgcgagcctcgtccgccaggtggcttcgtccggcgtggacccctcgccggccctccgcgagctggcagcctatctctccgacgacgacgtcgacgacttcgaaaagaacgcgcttgtgggcgccggccgcgccgccgagaccgtcgcgtcagttcttcggagaagagccgaggaaaccggcgtcgaaggcgtggaggcggccacgagagtgctagccttgatcttggcctcggacggcatcgacgactcgaacaagaagcgggtggccactggcctcgccgcggacgcggcggcctcgaccgcgtcgctggcgcgcgtgatgcgcggcgggagcgacctggaggcgaggatcgacgcggccaagctggcggagctgttgctcgccaatgcggccggcgaggcgaaggcggcggcgaccaaatcgtccgagttgctggccgagctggtacgcctcgtgggcaccgtcgacgagacgggcgccctggacaggaacgccgtggacgccggcctctcctgcctggccgccatctgcgggtcgtgccgtgccgcgcgtggcgagatggtgcgccttggcgcggtcccggccgctgtgcgcgctctgcgcgcctcgacggagtccggcgcgtccgcgaaggcgctccgggtcctcgagtccgccgtgggctgcgccgagggccgtgccgcgctgtgcgccaacgcggaggacgccatccctgcggtggtgggcaagatgatgaaggctgggcgcgacggcgcggaggccgccgtggccgtgctctgggcggtctgccaccggtaccaggaccgccgggcggcggacgcggctgcggcggccgagggcgggctgacgaggctgctcctcctgatgcagagcgggtgctcgccggcggcgagacagatggcgctggagctgctgaagatatacagggtgaacgccaagagctgtctcgccggctacgactccaagaccacccacatcatgccgttctga

SEQ ID NO: 12399 - protein, 444 aa, Zea mays
  misc_feature (103)..(103): The Xaa at location 103 stands for Gly, or Val.
MVRKETAMRLPPQHQGLEVKIPSFFRCPISLDVMRSPVSLCTGVTYDRASIQQWLDSGNTTCPATMLPLPSTDLVPNLTLRSLIAHWAASAASCSPTAAGGAXVADSSSARTSSPASLVRQVASSGVDPSPALRELAAYLSDDDVDDFEKNALVGAGRAAETVASVLRRRAEETGVEGVEAATRVLALILASDGIDDSNKKRVATGLAADAAASTASLARVMRGGSDLEARIDAAKLAELLLANAAGEAKAAATKSSELLAELVRLVGTVDETGALDRNAVDAGLSCLAAICGSCRAARGEMVRLGAVPAAVRALRASTESGASAKALRVLESAVGCAEGRAALCANAEDAIPAVVGKMMKAGRDGAEAAVAVLWAVCHRYQDRRAADAAAAAEGGLTRLLLLMQSGCSPAARQMALELLKIYRVNAKSCLAGYDSKTTHIMPF

SEQ ID NO: 12400 - DNA, 1344 bp, Zea mays
  CDS (1)..(1344)
  misc_feature (1252)..(1252): m is a or c
atggcgctgctggtgcggagggcacggagggcggcgaccaaggccgcggtgtccctcgccggcagaaccggcagcgtggagcttgccatcccggcgcacttccggtgcccgatctcgctggacctcatgcgggaccccgtcacggcgccggcgggaatcacgtacgaccgcgagagcatcgaggcgtggctggacacgggccgcgccacctgccccgtcacccacgcgccgctccgccacgaggacctcgtccccaaccacgccatccgtcgcgtcatccaggactggtgcgtcgccaaccgctcccgcggcgtcgagcgcatccccacgcccaagatccccgtcacgcccgtccaggcctccgagctcctcttcgacctcgccgggtccgcgcgccgccgcgacgccgctgcgcggtgcgtcgaggtggtcaccaagataaaggtcctcgccagggacagcgagcgaaacaggagctgcttcgcgtccatcggcacgggccgcgtgctagccgccgcgtacgagtcgctcgctgctgctgctgctgacgccgccgcaccggcggggcgcgtccttgaggacatcctggcggcattggtctgcatgatgccgttggacgaggaggccgccaggacgttggccttgccgacctcgctggggtctctggtcgccattgctgagaacggcagcttggcaggaaggctgaacgccgtgctggcgatcaaggaggtcgtctcatgcgacggggcggccactgatctgagcgggaaggtcgacgagatcgtagacgcgctggcaaagatcatcaagtctccaatctgtcctcaggcaaccaaggccggcatggtcgccacctatcacctggcgctatacgacgagcgtgtcgcggcgcgccttgccgctgccgggctcgtccccgtgctcgttgaggtccttgtagacgccgacaagagcatgtccgagaaggcactggccgtgctcgacgcggtgctcgcctcggaggaaggccgcgcgagcgcgcgggcgcacgcgctcgccgtgcccatgctcatcaagaagatgttccgcgtgtccgacctggccacccagcttgccgtgtcggcgatgtggcggctcggaaaggctcacagcgacggcgaggatgacggtgcggtgacgcgatgtcttgtcgaagcgctgggggttggggcgttccagaagcttctcctgctcttgcaggtcggctgcagggacgcaaccaaggagaaggccmccgagctgctcaagttgctcaacaagtacaagagcgtaggcgaatgcgtcgacgctgtggatttcagagggctgaataagctgtcatcttaa

SEQ ID NO: 12401 - protein, 447 aa, Zea mays
  misc_feature (418)..(418): The Xaa at location 418 stands for Pro, or Thr.
MALLVRRARRAATKAAVSLAGRTGSVELAIPAHFRCPISLDLMRDPVTAPAGITYDRESIEAWLDTGRATCPVTHAPLRHEDLVPNHAIRRVIQDWCVANRSRGVERIPTPKIPVTPVQASELLFDLAGSARRRDAAARCVEVVTKIKVLARDSERNRSCFASIGTGRVLAAAYESLAAAAADAAAPAGRVLEDILAALVCMMPLDEEAARTLALPTSLGSLVAIAENGSLAGRLNAVLAIKEVVSCDGAATDLSGKVDEIVDALAKIIKSPICPQATKAGMVATYHLALYDERVAARLAAAGLVPVLVEVLVDADKSMSEKALAVLDAVLASEEGRASARAHALAVPMLIKKMFRVSDLATQLAVSAMWRLGKAHSDGEDDGAVTRCLVEALGVGAFQKLLLLLQVGCRDATKEKAXELLKLLNKYKSVGECVDAVDFRGLNKLSS

SEQ ID NO: 12402 - DNA, 1266 bp, Arabidopsis thaliana
  CDS (1)..(1266)
atgccggggaatttagagccgttggatctcggaatccaaataccataccatttcagatgcccaatctcacttgacctaatgtctgatcccgtaaccatctccaccggccaaacttacgaccgaaccagcatcgactcatggatcgctatgggcaacaccacttgtccagtcacacgtgtcgctctctccgacttcactctcatccctaaccacactctccgccgtcttatccaagaatggtgcgtcgctaaccgctctaacggcgtcgaacggattcctacacctaaacaaccggcggatccaatctccgttaggtcacttctcagtcaagcatccgcaattaccggaactcacgtctctgttcgttcacgcgccgccgctattcgtcgtttgagaggattagctagagatagtgagaagaatcgcgttttgatcgctggtcataacgcgagggagattttggtgaggattttgttcgccgatattgaaacgacgtcgttgtcttcggagcttgtttctgagtcgcttgctcttttggttttattgcatatgacggagacggagtgtgaagctgttgcgtcggatcctagtcgggtcgggtttatgacccgattgttgtttgattcttcgattgaaattagggttaacgccgccgcgttgattgagatggtgttgaccggagcgaaatccatggatctgaaattgatcatttccggatctgattcgatattcgaaggcgttctcgatcttctcaagaatccgatttcatcgcggcgagctttgaagatcggaatcaaagcgattttcgctctctgtctcgtgaaacaaacgagacatctagcgatctccgccggagctccggggattttaatcgaccgtctcgcggcggatttcgataggtgtgatacggagcgaggtttagcgacagtggagcttctttgccgattaccagaaggatgtgctgcgtttggtgagcatgctttgacggtgccgctaatggtgaagacgatattaagagtttcagatagagcgacggagtacgcggcgggagcgttgttggctttatgtacggcggaggaacggtgtagagatgaagctgcggcggcgggattggtgacgcagttgttgcttctggtgcagagtgattgtacggagagagcgaagagaaaagctcagatgcttttgaagcttctcagagactcttggcctgacgattctaccgttcattccgacgatttcaatcgtagcgaagtggcgccgttttga

SEQ ID NO: 12403 - protein, 421 aa, Arabidopsis thaliana
MPGNLEPLDLGIQIPYHFRCPISLDLMSDPVTISTGQTYDRTSIDSWIAMGNTTCPVTRVALSDFTLIPNHTLRRLIQEWCVANRSNGVERIPTPKQPADPISVRSLLSQASAITGTHVSVRSRAAAIRRLRGLARDSEKNRVLIAGHNAREILVRILFADIETTSLSSELVSESLALLVLLHMTETECEAVASDPSRVGFMTRLLFDSSIEIRVNAAALIEMVLTGAKSMDLKLIISGSDSIFEGVLDLLKNPISSRRALKIGIKAIFALCLVKQTRHLAISAGAPGILIDRLAADFDRCDTERGLATVELLCRLPEGCAAFGEHALTVPLMVKTILRVSDRATEYAAGALLALCTAEERCRDEAAAAGLVTQLLLLVQSDCTERAKRKAQMLLKLLRDSWPDDSTVHSDDFNRSEVAPF

SEQ ID NO: 12404 - DNA, 1248 bp, Arabidopsis thaliana
  CDS (1)..(1248)
atggggagagatgaaacagagacgtacattacagtgccaagtttcttcaaatgtccgatatctcttgacgtgatgagatctccggttagtctctgtaccggcgtgacttatgatcgagccagtatccagagatggctcgatggtggtaacaacacttgtcccgctactatgcaacttctcaaaactaaagattttgttcctaacctcactcttcaacgtcttatcaatatctggtctgattcaatcggccgtcgtcacaacggtgattctccggttctgaatccgccgtctggtagagaagttccgacgaaggaagaagtgaatgtgttgttggagagattgatgagtctggagaatttgatgaagatcgttcgattcgtgaaggattcggattcgaacagagagtttctctcgaagaagatggagttcgtaccaatgctcgttgatattatacgcacgaagaagacgaagatcgagttagttataatggcgattaggattttggattcgattaaagtagatcgtgaacggttatcgaatctgatgttggcgaatgacggcggagattgtttaacggcgattctcttagcgattcaacgcgggaatctggaatcgaagatcgaatcggttcgggttttggattggatctccttcgacgctaaatcaaagcttatgatagcagaacgtgacggagttttaacagagatgatgaaatcgataagtatcactgagtcgtcagatccgagtttgatcgaagcgagtttatcgtttctaatcacaatctccaaatcaaaacgagtgagatcgaaactaatcgctgcaaaagcaatcacgaagatcaaagacattcttctgacggagacgttaacaaacgttgccgtgacggagaagtcgttgaagctgttagagactttatcgtcaaagcgagaagggagattggagatttgtggagacgacaatggtagatgtgtggaaggagtggtgaagaagctcttgaaagtatcgacgacggcgacggaacacgccgtgacgattttgtggtgtttgtgttatgttttcagggaagataagacggtggaagagacggtggagagaagtaacggagttacgaagctgttagtggtgatacagagcaattgttcggcgatggttagacaaatggcgaaagatttgattaaagtgttgaagtttaattcctctgctttggctgcttacgagaccaagactactcatattatgcctttttga

SEQ ID NO: 12405 - protein, 415 aa, Arabidopsis thaliana
MGRDETETYITVPSFFKCPISLDVMRSPVSLCTGVTYDRASIQRWLDGGNNTCPATMQLLKTKDFVPNLTLQRLINIWSDSIGRRHNGDSPVLNPPSGREVPTKEEVNVLLERLMSLENLMKIVRFVKDSDSNREFLSKKMEFVPMLVDIIRTKKTKIELVIMAIRILDSIKVDRERLSNLMLANDGGDCLTAILLAIQRGNLESKIESVRVLDWISFDAKSKLMIAERDGVLTEMMKSISITESSDPSLIEASLSFLITISKSKRVRSKLIAAKAITKIKDILLTETLTNVAVTEKSLKLLETLSSKREGRLEICGDDNGRCVEGVVKKLLKVSTTATEHAVTILWCLCYVFREDKTVEETVERSNGVTKLLVVIQSNCSAMVRQMAKDLIKVLKFNSSALAAYETKTTHIMPF

SEQ ID NO: 12406 - DNA, 1308 bp, Arabidopsis thaliana
  CDS (1)..(1308)
atggatcaagagatagagattccttccttcttcctttgtccaatctctctagatatcatgaaagatccggtgatagtttccaccggaataacctacgaccgagaaagcatcgagaagtggctcttttccggtaagaaaaactcatgtccagtcaccaaacaagtcataaccgaaactgatcttaccccaaaccacactcttcgccgtttgattcaatcttggtgtaccctcaacgcatcatatggtatagagaggatcccaactccaaaacctccgatctgtaaatcggagatcgaaaagcttatcaaagagtcgtcatcttcgcatctaaaccaagtcaaatgcctcaaacgacttcgtcaaatagtatctgagaatacaaccaacaaacggtgcttagaagccgcagaagttccggagtttttggcaaatatcgtaagcaactctgtagatacgtataactctccttcttcttcactttcttcttcgaatctcaacgacatgtgtcagtcaaacatgttggagaatcgatttgattcttcaagaagcttgatggacgaagccctaagcgtactctaccatcttgacacatcggagacagccctcaagagtcttttaaacaacaagaaaggaacaaatcttgtgaaaacgttgacgaagattatgcaacgtgggatctacgagtcaagagcctatgcagctttgcttctcaagaagctcctggaagttgcggatccaatgcagatcatattgttggaacgagaacttttcggtgaggtgattcaaatcttgcacgaccagatctctcacaaggcgacaagatcagcaatgcaaatcttggtgatcacatgtccatggggaaggaatagacacaaggcagtggaaggtggaacaatctcgatgataatcgagcttttaatggacgatactttctcatcagagagaaggaattcagagatggcgatggtggttcttgatatgttatgtcagtgcgcagaaggaagagctgagttcttgaatcacggtgccgctattgcggttgtgtctaagaagatattgagggtctcacaaataactagtgaaagggcagttagggttttgctttcggttgggaggttctgcgcgacaccctctttgttgcaggagatgttgcaattgggagttgtagcaaagctgtgtctggtacttcaagttagctgtggtaacaagactaaagaaaaggctaaagaattgcttaagcttcacgctagggtttggagggaatcaccatgtgtcccaagaaatttgtatgattcgtatcctgcttga

SEQ ID NO: 12407 - protein, 435 aa, Arabidopsis thaliana
MDQEIEIPSFFLCPISLDIMKDPVIVSTGITYDRESIEKWLFSGKKNSCPVTKQVITETDLTPNHTLRRLIQSWCTLNASYGIERIPTPKPPICKSEIEKLIKESSSSHLNQVKCLKRLRQIVSENTTNKRCLEAAEVPEFLANIVSNSVDTYNSPSSSLSSSNLNDMCQSNMLENRFDSSRSLMDEALSVLYHLDTSETALKSLLNNKKGTNLVKTLTKIMQRGIYESRAYAALLLKKLLEVADPMQIILLERELFGEVIQILHDQISHKATRSAMQILVITCPWGRNRHKAVEGGTISMIIELLMDDTFSSERRNSEMAMVVLDMLCQCAEGRAEFLNHGAAIAVVSKKILRVSQITSERAVRVLLSVGRFCATPSLLQEMLQLGVVAKLCLVLQVSCGNKTKEKAKELLKLHARVWRESPCVPRNLYDSYPA

SEQ ID NO: 12408 - DNA, 1308 bp, Arabidopsis thaliana
  CDS (1)..(1308)
atgggttttttatggagaacgagatctaacgagaagaagataactccggttttgagttggccggaatcagaaccggagtcagagataacaattccaccggagtttcaatgtccaatctcgatcgatctaatgaaagatccagtaataatctcaacaggcattacttacgaccgcgtaagcatcgaaacatggatcaattcaggcaacaaaacatgtccagtcacgaacactgtcttaaccacgttcgatcaaatcccaaaccacacgattcgtaagatgattcaaggatggtgcgtggagaaaggatcgccgttgattcaacgtattccgacgccacgtgtccctttaatgccatgtgaggtctacgagattagtagaaaattatcgtctgcgacgcggcgtggggattacgagaaatgtggggtgattattgagaagattaagaagttaggggatgagagtgagaaaaatcgaaagtgtgttaatgaaaacagcgtcggatgggttctttgtgattgtttcgacaagttctcgggagatgagaaattaacgtttatgttgaatgagattttgtctttgctgacgtggatgtttccgattggtttagagggtatttcgaaactcgcgtctgcgacatcatttcgttgcgtggcgggtttgttgaagagtacggatgattccgttcgtcaaaacgccgcgtttattatgaaggagattctctcattagacgaaacgcgagttcactcgtttgcggttgagaacggagtcgccgaagcgttagtaaagttgattcgcgattcggtttcgtctagttcaacaaaatcttcgttgatagcgatttatcaaatggtgttgcaaaagcctgaaatcgcgtcggagtttctcgaaattggtttggtgagtataacggtggagatgatcgttgatgccgagaatagcgtttgtgaaaaagcgttagcggttcttgacgcgatttgcgaaacagaacatggtagagaggaagtgaggaaaaatgcgttggtgatgccgcttttggtgaagaagattgcgaaggtttctgaattagcgactaggagctcaatgtcaatgattttgaagctgtggaaaacaggaaacacggttgcggttgaagatgcggtgcgtttgggcgcgtttcagaaggtgttgcttgtgttgcaagttgggtatggagaagagactaaggagaaagcgacagagttgttgaagatgatgaatacacaaatgaaattgatgagtgattgtgttgattctttaaaagagtttaagtatatcaaaaagccattttga

SEQ ID NO: 12409 - protein, 435 aa, Arabidopsis thaliana
MGFLWRTRSNEKKITPVLSWPESEPESEITIPPEFQCPISIDLMKDPVIISTGITYDRVSIETWINSGNKTCPVTNTVLTTFDQIPNHTIRKMIQGWCVEKGSPLIQRIPTPRVPLMPCEVYEISRKLSSATRRGDYEKCGVIIEKIKKLGDESEKNRKCVNENSVGWVLCDCFDKFSGDEKLTFMLNEILSLLTWMFPIGLEGISKLASATSFRCVAGLLKSTDDSVRQNAAFIMKEILSLDETRVHSFAVENGVAEALVKLIRDSVSSSSTKSSLIAIYQMVLQKPEIASEFLEIGLVSITVEMIVDAENSVCEKALAVLDAICETEHGREEVRKNALVMPLLVKKIAKVSELATRSSMSMILKLWKTGNTVAVEDAVRLGAFQKVLLVLQVGYGEETKEKATELLKMMNTQMKLMSDCVDSLKEFKYIKKPF

SEQ ID NO: 12410 - DNA, 1296 bp, Arabidopsis thaliana
  CDS (1)..(1296)
atgggactttcattgagagtgagacgtcgtggaggaagtgttagcaagaaagagatcattccggtgacaagttgctcggaggaagtggagataaccataccatcgcagtttcaatgtccgatatcttacgagctaatgaaggatccggtgattattgcctcggggatcacttacgatcgcgaaaacatcgagaagtggttcgagtccgggtaccaaacttgtcccgttacaaacacggttttgacaagtttggaacagattccgaaccatacgattcggaggatgattcaaggttggtgcgggtcgtcactaggcggcgggattgaacgaatcccgacgcctcgtgtacccgtgaccagtcatcaagtctccgagatttgtgagaggttatccgctgctacgcggcgtggagactacgccgcgtgcatggagatggttacgaagatgacgagactaggaaaagagagcgagaggaatcgaaaatgcgttaaggaaaacggcgcgggattggttctttgcgtttgcttcgacgcgttttccgaaaacgcaaatgcgtcattattattggaggagactgtgtctgtgctgacgtggatgcttcccattggtttagaaggtcaatccaaactcaccacgacgtcgtcgtttaatcgtttagtggaactgttgagaaatggtgatcaaaacgctgcgtttttgataaaagagcttcttgagcttaacgtaactcacgttcacgcgttaacaaagatcaatggcgtccaagaagcgttcatgaaatcgattaatcgcgattctacatgcgtcaactcgttaatatcaatccaccatatgatcttgacaaatcaagaaaccgtatcaaggtttcttgaattggatcttgtgaatataacagtggagatgctagtggattcagaaaacagcgtttgcgagaaagcgttaacggtattaaacgtgatttgtgaaactaaagaaggaagagagaaagtgagaagaaacaagctggtgataccgattttggtgaagaagattttgaagatttctgagaagaaagatttggtttctgtgatgtggaaggtttgtaaaagtggtgatgggtctgaagttgaagaagcgttgagattaggtgcgtttaagaagcttgttgtcatgttacaagttggatgtggtgaaggaactaaggagaaagttacagagttgttgaagatgatgaataaagttatgaagatgaatggttttgttgatcgttcttattcttcttcaattgagtttaaacatgttaagaaaccattttaa

SEQ ID NO: 12411 - protein, 431 aa, Arabidopsis thaliana
MGLSLRVRRRGGSVSKKEIIPVTSCSEEVEITIPSQFQCPISYELMKDPVIIASGITYDRENIEKWFESGYQTCPVTNTVLTSLEQIPNHTIRRMIQGWCGSSLGGGIERIPTPRVPVTSHQVSEICERLSAATRRGDYAACMEMVTKMTRLGKESERNRKCVKENGAGLVLCVCFDAFSENANASLLLEETVSVLTWMLPIGLEGQSKLTTTSSFNRLVELLRNGDQNAAFLIKELLELNVTHVHALTKINGVQEAFMKSINRDSTCVNSLISIHHMILTNQETVSRFLELDLVNITVEMLVDSENSVCEKALTVLNVICETKEGREKVRRNKLVIPILVKKILKISEKKDLVSVMWKVCKSGDGSEVEEALRLGAFKKLVVMLQVGCGEGTKEKVTELLKMMNKVMKMNGFVDRSYSSSIEFKHVKKPF

SEQ ID NO: 12412 - DNA, 1434 bp, Arabidopsis thaliana
  CDS (6)..(1418)
attatatgaatatatatacgtacacaaaatcatacgtttttccacaaatggatcaagaagaggaagagatcgagattcctaattactttatctgcccaatctcactagagatcatgaaagatccagtcacgaccgtttctggcatcacttacgaccgtcaaaacatcgttaaatggctcgaaaaggtcccttcttgtcccgtcacgaagcaacctcttcccttagactccgatcttacacctaaccacatgcttcgccgtcttatccaacactggtgcgtcgagaacgagacacgtggcgttgtcagaatctctacacctcgagttcctcctggaaaacttaacgtcgtcgaagagatcaagaatctcaaaaagttcggccaagaagccttaggaagagaagaaacgttgcagaagcttgaagttttggcaatggacggaaataacagaagattgatgtgtgaatgtggcgtacataagtctttgatcttgttcgtagtcaagtgtactagtgaagacgaagacggacgacgtcgtatcaaaggactagatgagtctcttcgtcttcttcacttgatcggtattccatcaaacgacgcaaaaacaatcttgatggaaaacgatcgagttatggaatcgttgacttgggttttacaccaagaagactttctcagtaaggcttatacaattgtgctattgaggaatctaacggaatacacttcctctcatatcgtagagagattgaatcccgagatttttaaagggatcatagggtttctcaaggatgttgtaaatagtgttaatcggacgagccctaccgtgagagaaacggtacagtcatcatcaaggcctagcttgggaaaaacggaaccatcaaaacttgatcatagtttggtcatcaaacaagcggtgactgccgcgctgatgattcttttagagacttcttcgtggagccgaaaccgatcactccttgtggatctcggtgcggtttctgaactcatcgaactcgaaataagctacactggcgagaaaagaatcacagaacttatgttaggagttttatctcgtttatgttgctgtgcgaacggtagagccgagattcttgctcataggggcggaatcgcggttgtgacaaagcggctattgagggtttcacctgcggcagacgatagagctatctctatcctaactacagtgtcaaaattctcgccggaaaacatggtggtggaagagatggttaatgttgggacggtagagaagctctgttccgttctaggaatggattgtggtttgaacttgaaggagaaagcaaaagagatactaaaagatcattttgatgagtggaagaagtttccatgtattgacataactcttctcactaagctgctaagcatctcacccaaagggccaaagatctaagtaaataatctgctgc

SEQ ID NO: 12413 - protein, 470 aa, Arabidopsis thaliana
MNIYTYTKSYVFPQMDQEEEEIEIPNYFICPISLEIMKDPVTTVSGITYDRQNIVKWLEKVPSCPVTKQPLPLDSDLTPNHMLRRLIQHWCVENETRGVVRISTPRVPPGKLNVVEEIKNLKKFGQEALGREETLQKLEVLAMDGNNRRLMCECGVHKSLILFVVKCTSEDEDGRRRIKGLDESLRLLHLIGIPSNDAKTILMENDRVMESLTWVLHQEDFLSKAYTIVLLRNLTEYTSSHIVERLNPEIFKGIIGFLKDVVNSVNRTSPTVRETVQSSSRPSLGKTEPSKLDHSLVIKQAVTAALMILLETSSWSRNRSLLVDLGAVSELIELEISYTGEKRITELMLGVLSRLCCCANGRAEILAHRGGIAVVTKRLLRVSPAADDRAISILTTVSKFSPENMVVEEMVNVGTVEKLCSVLGMDCGLNLKEKAKEILKDHFDEWKKFPCIDITLLTKLLSISPKGPKI

SEQ ID NO: 12414 - DNA, 1266 bp, Arabidopsis thaliana
  CDS (1)..(1266)
atgcctaggaatatagaaccattggatcttggaatccaaataccatatcatttcagatgtccaatatcactcgaacttatgcaagacccagtcaccgtctgcaccggccaaacctacgaccgagccagcatcgagtcatgggtctccatcggtaacaacacgacatgtccagtcacacgagctcctctctccgacttcacactcatccctaaccacactctccgtcgtctcatccaagaatggtgcgtcgctaaccgctccaatggagtcgaacgtatccctactcctaaacaaccagctgatccaacctctgttcgtgctcttctcagtcaagcctctgctataacaggaacccacgtctctgttcgttcacgcgccgccgctctccgccgtttacgtggtttcgctcgtgattctgataaaaatcgcgttttgatcgcagctcataacgctacagagattttgattaagattctgttctctgaaacgacgtcgtcggagttagtctctgagtctttagctctacttgttatgttaccgataacggagccgaaccagtttgtttcgatatcgtcggatccgggtcgggtcgagtttttgacccggttgttattcgattcgtcgattgaaacacgcgttaacgccgccgcgttgatcgagattgtttcgacgggaaccaaatcggcggacctgaaaggttcgatttcgaattcagaatctgtattcgaaggagttctcgatcttctgagaaatccgatttcgtcacgacgagctctcaaaatcggaatcaaaactctgttcgcgctctgttcagtgaaatcgacgcgacacatcgcgatcacagccggtgcgccggagattctaatagacagactcgcggcggatttcgatagatgcgatacggagcgagccttagcgacggtggagctactctgccgaacgccggaaggatgcgcggcgttcggtgagcacgctttaacggtgccgttgttagttaaaacgatattgagagtttcggatcgcgcgacggagtatgcggcgggggcgttgttagcgctttgtacggcggaggaaaggtggagggaggaagcggcgggggcgggagtggtggtacagttgttgttgatggtgcagagtgagtgtacggagagagcgaagaagaaagcacagaagttattgaagcttctgagagattcatggcctgactacaattccttcgctaactccgatgactttggttgcagcagccaagtggtccctttttga

SEQ ID NO: 12415 - protein, 421 aa, Arabidopsis thaliana
MPRNIEPLDLGIQIPYHFRCPISLELMQDPVTVCTGQTYDRASIESWVSIGNNTTCPVTRAPLSDFTLIPNHTLRRLIQEWCVANRSNGVERIPTPKQPADPTSVRALLSQASAITGTHVSVRSRAAALRRLRGFARDSDKNRVLIAAHNATEILIKILFSETTSSELVSESLALLVMLPITEPNQFVSISSDPGRVEFLTRLLFDSSIETRVNAAALIEIVSTGTKSADLKGSISNSESVFEGVLDLLRNPISSRRALKIGIKTLFALCSVKSTRHIAITAGAPEILIDRLAADFDRCDTERALATVELLCRTPEGCAAFGEHALTVPLLVKTILRVSDRATEYAAGALLALCTAEERWREEAAGAGVVVQLLLMVQSECTERAKKKAQKLLKLLRDSWPDYNSFANSDDFGCSSQVVPF

SEQ ID NO: 12416 - DNA, 1323 bp, Physcomitrella patens subsp. patens
  CDS (1)..(1323)
atggcgcttggctctagcctgcaggtgcaggagaggacgcaactgaagctgcagcttccgcaccaggtgatcgtcccggcgttttttctgtgccccatatcgctggagctgatgcgggatcccgtgacgttatgcacaggaatgacgttcgaccgcgccagcatagagcggtggctgggactcgggcacaacacgtgccctgcgactaatcagattctcgagagccaggagctcattccaaatcatactcttcgacgtctcattcagaactggtgtgttgccaataaggcttacggcgtggagcgaatcccaactccgaaagcgccggcggagccaggcgacgtgaagcagttgctcgaaggcatcggtcaatgtgaggaggtggggtgtgattccttgaagaatctgtggagtttagcgaaagagtgtgagcgcaacaggaggtgcattgagaaagtgggggcggtccccattctcgctaaggctttggcccaactatgggtgggcatgcgctactctgcgggttgcaacaggggtcgggaggtagcttgtgaagaggcattggccacaatcgcgctgcttcagcttgacgatggcgacaggagggctctggttgctccagagtcactcgagtgtttggtatttctcctcacgtccggaagtctggacgcgaagttaaacgcggccgacgttattcatactttgtgtgaggaggatcctcatgtgaaaactgccgtggctagcctccctggagccatgaaagggcttgtaaacctcctcaaggatgatttgtgtccaagagcagtccaggcaggtttgcggtgcttgttgtgtgtctgccttccccgaagtaaccgtgtcatggccattgagtgtcgagctataagcgttgtggtggagcttttgccgaacaccgagaagagaaccaaggagctggcattcgcggttatggagattctcgctaactgcgccgaaggtcgggaggcgatctccaaccacgccctggccatccccatgatagtcaaatcaatgttgggcgtctcgcaacgcgttacggaatgcgctgtgtcgaccttgtgggtcgttctttcctacgcctccaaccgaagtgttacaaatacggcgttgcaagcaggagcattcgccaatctgctcatgttactgcctggcgagtgcagccagcgcgcgaagcacaaagcccgggacagcttgaggctcctcaacgagaactggggtagctacacttgcagacccgccgacgaagctcgcatcatcaacaagcgagacttgggtcagctgcgatttaagaccgatctagtgtaa

SEQ ID NO: 12417 - protein, 440 aa, Physcomitrella patens subsp. patens
MALGSSLQVQERTQLKLQLPHQVIVPAFFLCPISLELMRDPVTLCTGMTFDRASIERWLGLGHNTCPATNQILESQELIPNHTLRRLIQNWCVANKAYGVERIPTPKAPAEPGDVKQLLEGIGQCEEVGCDSLKNLWSLAKECERNRRCIEKVGAVPILAKALAQLWVGMRYSAGCNRGREVACEEALATIALLQLDDGDRRALVAPESLECLVFLLTSGSLDAKLNAADVIHTLCEEDPHVKTAVASLPGAMKGLVNLLKDDLCPRAVQAGLRCLLCVCLPRSNRVMAIECRAISVVVELLPNTEKRTKELAFAVMEILANCAEGREAISNHALAIPMIVKSMLGVSQRVTECAVSTLWVVLSYASNRSVTNTALQAGAFANLLMLLPGECSQRAKHKARDSLRLLNENWGSYTCRPADEARIINKRDLGQLRFKTDLV

SEQ ID NO: 12418 - DNA, 1296 bp, Physcomitrella patens subsp. patens
  CDS (1)..(1296)
atggcgttgggcgcctccgttacggcgctcaaaccatgtgacccaggattgccacggcaggcgctgctggagcccatccagacacatctgcccctacaggtgccagcggattttgagtgtcccattcacttggacatcatgacagaccccgtgactctgagcaccggcataacatacgatcgcgtgagtatcgaaaggtggctggaaatgggtcacaacacatgcccaaccacgaaccagaccctccagagcaagaagttcatccccaatcacattctccgcagcaccattcagaagtggtgcctggccaacagcacgcccgggatcgacagactaccggccccgaggcaaccagtggagcttcagacagtgcagaacatactccaaatcatcactgagtgcgccgacgcggggcactgcgacagcgagtctttggaaaaactttacgccatagctggagaatgcagccgcaacaggaattgtctgaaagaagctggagcagttcccatactcagtgccgctttagcaagttcaaggacagatctagacagccggaaagcagcggagcgcgccctgcacgtgattgcgttgctgaaactcgatgacgatgacaaaaaatcgcttgtggagtggaaacctttctctcgtctctgcacgattctcgcatcggggtcctccagtggaaagattatggccgccaacttgatacacatactcgtcggtgaggacgcatggctgaaagccattgtgggcaactacccaggggcgatcaaggggctcgtgagtgtcctcagagaagctggtttacgccccaaaccaacgaagatcgtgttacggtgtatgctctctctcacctccacgaaaaagaactgcatcgcggcggtcgatgccggcgctgtcgtagccctcattgagcttgtacctcgaaccgaaacgcggaacttggaatatgccttcgcgattctggagcttctcgccaaatgcgcggaagggcgagaggggatcacgaatcacccattcgccatccctcgaatcgtcagctcgctcctcggcgtctctaaccagacttccgagcacgctgtcgcggccctttgcgaagtaatctcgctcgcttctaaccggtccgttgtcaatacggcgctccgagctggtgctttcacaaaactcttgatgcttctgcccagcaactgtagccagcgagcgaaggtgaaggcgcggatgactctcaagctgctcaacgatgtctcagggacgcattccacaggtctggacggtgaatctgccgtcatggtttag

SEQ ID NO: 12419 - protein, 431 aa, Physcomitrella patens subsp. patens
MALGASVTALKPCDPGLPRQALLEPIQTHLPLQVPADFECPIHLDIMTDPVTLSTGITYDRVSIERWLEMGHNTCPTTNQTLQSKKFIPNHILRSTIQKWCLANSTPGIDRLPAPRQPVELQTVQNILQIITECADAGHCDSESLEKLYAIAGECSRNRNCLKEAGAVPILSAALASSRTDLDSRKAAERALHVIALLKLDDDDKKSLVEWKPFSRLCTILASGSSSGKIMAANLIHILVGEDAWLKAIVGNYPGAIKGLVSVLREAGLRPKPTKIVLRCMLSLTSTKKNCIAAVDAGAVVALIELVPRTETRNLEYAFAILELLAKCAEGREGITNHPFAIPRIVSSLLGVSNQTSEHAVAALCEVISLASNRSVVNTALRAGAFTKLLMLLPSNCSQRAKVKARMTLKLLNDVSGTHSTGLDGESAVMV

SEQ ID NO: 12420 - DNA, 1233 bp, Physcomitrella patens subsp. patens
  CDS (1)..(1233)
atggaccaggtagcggtgccgccgtttttcctatgtccgatatcgctggagttgatgcgagatcctgtgacgttaagcacgggaatgacatatgatcgtgcgggcatcgagaagtggctgggtttggggcacaatacgtgccccaccacgaaccaaatcctcgatagccaggagatgattcccaatcacaccctccgccggctgcttcacaactggtgcgccgagaacgaagttcacgacgtggggagaatccccacgttgaaggagttggacaccgacatggtgacgcagttactgcagagtatcgctcaatgtcgggagatggagtggttggattcgttgaggaagctgcggatgttagcgaaagagtgtgagcgcaacaggaagcgcattgccgaggccgggggagttggtaccctggctgcagccatggggaggggagagatggatatgtctgtggaggcgtgcgaggacgctgtggccataattgtgcacttgcagctcggcgatggcgacaagagggctttgtccgagccgaagatgctgtcgcatttggggtttgttctcgcatcgggtagcttggaggggaaggtgaacgcggcggacataattcatgctctttgcaaggagaatccgcgcgtgaaagcagctgtgggagatctcccaggggctatcagagcaatcgtgaatctcctccgtgaggatctttaccctagagcagtgcaatcaggtctacgctgcttacaatccatgtgcctgtcgcgccggaatcgtgtcactgccatcaattgccgcacaatcaccacgcttgttgcactgcttcccaacacggacaagcgaaacaaggagcgagtgttcgcgcttctggagattctcgcgaactgcgccgaggggcgggaagcgatctccaatcacgcgctggccatccccgtgatggtgaaatcaatgctgggtgtgtcccaccgcgccacggagtacgccgtggccgcactgtggctggtcctctcttacgcctccaaccgcaatgtcatcaacacggcgctgcaagcgggtgctttcacgaacttgctcatgttactgtcgagtcagtgcagccaactggcgaagaaaagagcgcaggatagcgtcaagctcttaaatgaggtggtcttggatacctacacatgcaggcatgtcgactctccagggataactcatcacagaaacacactttccaccaccgagccagtgtag

SEQ ID NO: 12421 - protein, 410 aa, Physcomitrella patens subsp. patens
MDQVAVPPFFLCPISLELMRDPVTLSTGMTYDRAGIEKWLGLGHNTCPTTNQILDSQEMIPNHTLRRLLHNWCAENEVHDVGRIPTLKELDTDMVTQLLQSIAQCREMEWLDSLRKLRMLAKECERNRKRIAEAGGVGTLAAAMGRGEMDMSVEACEDAVAIIVHLQLGDGDKRALSEPKMLSHLGFVLASGSLEGKVNAADIIHALCKENPRVKAAVGDLPGAIRAIVNLLREDLYPRAVQSGLRCLQSMCLSRRNRVTAINCRTITTLVALLPNTDKRNKERVFALLEILANCAEGREAISNHALAIPVMVKSMLGVSHRATEYAVAALWLVLSYASNRNVINTALQAGAFTNLLMLLSSQCSQLAKKRAQDSVKLLNEVVLDTYTCRHVDSPGITHHRNTLSTTEPV

SEQ ID NO: 12422 - DNA, 1236 bp, Vitis vinifera
  CDS (1)..(1236)
atggattttcctgtggatttcagatgccccatctccatggagctcatgcaagaccctgtcaccatatccaccggcgtcacctatgagcgaaagaatatcgaaaaatggctcttctcttacaacaacaagacatgcccaacaaccatgcagcgcatcaacagttttgatatcacccctaatcacaccctcaagaggctcatcctcgcatggcagaatgaggaagctgctcggtcatgtgattcgcggccggtgcggtccctcaagcacgatgaattggtgtcgctgcttgccaccatggagtccactccattcaaggttaattctctcaagaaacttcgagctattgttggattaggccatgaggtgaaggatgatttcatgaggtgcggtggggttgaagttcttgttcaaatcattgcccaaatcctcgttgagtcctcagattttgtggctttcacagcttgtgaggaggctctgggggttctgcaccagtacctctatttatctgaagatgatgagaaaactattcagcttttgtccaagcctgaatccatcaagtccttggccatcatgcttcagagaggaagcggtgaagcccggttttgcgcggtcacaatcttccaaaagttggcacaagctgattataattggaagaaatttgttatacaagatcaggggtttgagttctttagatctttgttagaacttgtgtctgacgaccaaatctgcaccaaggcaagcgcaagcgccttggagcttctcatagaaattttgggatcatccaagaaaagtcggttaaaagccattgaagctggcgcagtctgcatcctcattgagcttctcccagactccaaccggtccaaatgtgaaaaaatgcttctgcttctgaaattactatgtgaatgtgcagaagggagactagccttggtggaacatggattagggatagctgccatatccaagaaactactacatgtctcaagcgcctccaccaagatcaccgtgaagatcttatggctcatctgtagttatcatcccagcgaaagggtcctggaagaaatgctgattttaggatcagtgaagaagcttttggtattgttgcatatcggtaatcgatcatctacaaaggagaaggtggtgaagatcttcaggttgcatcgaaattcatggaggcagtacccttgtttcccttgggagttgaaggattattcgggattaacgaatcaatcttgctaa

SEQ ID NO: 12423 - protein, 411 aa, Vitis vinifera
MDFPVDFRCPISMELMQDPVTISTGVTYERKNIEKWLFSYNNKTCPTTMQRINSFDITPNHTLKRLILAWQNEEAARSCDSRPVRSLKHDELVSLLATMESTPFKVNSLKKLRAIVGLGHEVKDDFMRCGGVEVLVQIIAQILVESSDFVAFTACEEALGVLHQYLYLSEDDEKTIQLLSKPESIKSLAIMLQRGSGEARFCAVTIFQKLAQADYNWKKFVIQDQGFEFFRSLLELVSDDQICTKASASALELLIEILGSSKKSRLKAIEAGAVCILIELLPDSNRSKCEKMLLLLKLLCECAEGRLALVEHGLGIAAISKKLLHVSSASTKITVKILWLICSYHPSERVLEEMLILGSVKKLLVLLHIGNRSSTKEKVVKIFRLHRNSWRQYPCFPWELKDYSGLTNQSC

SEQ ID NO: 12424 - DNA, 1269 bp, Vitis vinifera
  CDS (1)..(1269)
atgtgtctccaacccaacccctcttcaatggcaatggattttcctgtggatttcagatgccccatctccatggagctcatgcaagaccctgtcaccatatccactggggtcacctatgagcgaaagaatatcgaaaaatggctcttctcttacaacaagaagacatgcccaacaaccatgcagcgcatcaacagttttgatatcacccctaatcacaccctcaagaggctcatcctcgcatggcagaatgaggaagccgctcggtcatgtgagtcgcggccggtgcggtccctcaagcacgatgaattggtgtcgctgcttgccaccatggaatccactccattcaaggttaattctctcaagaaacttcgtgccattgttggattaggccatgaggtgaaggatgatttcatgaggtgcggtggggttgaagttcttgttcaaatcattgcccaaatcctcattgagacctttgattttgtggcttttacagcttgtgaggaggctctgggggttctgcaccagtacctctctttatctgaagaagatgagaaaacaatccagcttttgtccaagcctgaatccatcaagtccttggccatcatgcttcaacgaggaagcggtgaagcccggttttacgcggtcacaatcttccaaaagctggcacaagttgattataattggaagaagtttgtcatacaagatcagggctttgagttcttcagatctttgttagagcttgtgtctgatgaccaaatctgcaccaaggcaagtgcaagtgccttggagcttctcatagaaatactgggatcatccaagacaagtcggttaaaagtcattgaagctggcgcagtctgcatcctcattgagcttctcccagactccaaccgctccaaatgtgaaaaaatgcttctgcttctgaaattactatgtgaatgtgcagaagggagactagccttggttgaacatggactagggatagctgccatatccaagaaactactacatgtctcaagcgccgccaccaagatcaccgtgaagatcttatggctcatctgtagctatcatcccagcgaaagggtcctggaagaactgctgatttttggatcagtgaagaagcttttggcattgttgcatatcgacaatcgatcatctacaaaggagaaggtggtgaagatcttcaagttgcatggaaattcatggaggcagaacccttgtttcccttgtgagttgaaggatcatttgggattaatgaatggatcttgctga

SEQ ID NO: 12425 - protein, 422 aa, Vitis vinifera
MCLQPNPSSMAMDFPVDFRCPISMELMQDPVTISTGVTYERKNIEKWLFSYNKKTCPTTMQRINSFDITPNHTLKRLILAWQNEEAARSCESRPVRSLKHDELVSLLATMESTPFKVNSLKKLRAIVGLGHEVKDDFMRCGGVEVLVQIIAQILIETFDFVAFTACEEALGVLHQYLSLSEEDEKTIQLLSKPESIKSLAIMLQRGSGEARFYAVTIFQKLAQVDYNWKKFVIQDQGFEFFRSLLELVSDDQICTKASASALELLIEILGSSKTSRLKVIEAGAVCILIELLPDSNRSKCEKMLLLLKLLCECAEGRLALVEHGLGIAAISKKLLHVSSAATKITVKILWLICSYHPSERVLEELLIFGSVKKLLALLHIDNRSSTKEKVVKIFKLHGNSWRQNPCFPCELKDHLGLMNGSC

SEQ ID NO: 12426 - DNA, 1221 bp, Vitis vinifera
  CDS (1)..(1221)
atggatgatgttgaaattcctgagtacttcatctgtcccatatcgcttcagatcatgagagatccagttacagccataactggaatcacatacgatcgagagagcatcgaaaactggctgttcaaaggcaacaacacatgcccagtcaccaaacaaccattaccccctgattctgacttgactcccaatcacaccctccggcgattgatccaatcttggtgcactgagaatgcttcaaacggcgtggttcggattcccactcctaaggctcctctcaccaagtctcatgttgtgaagctggtgaaggagctttgggttcctcagttgcagctcaaaactctgaggaagttggagttgcttgctatggagaatgagagaaacaggaggtatatggtggaagctggggtaattaaaagcatgtcgtcatttcttgtggcttgtttcaataaacagcagactgttggccttgaagaagctctcagcattctctatctgattcgggttaatccaacttccgagacaaggctactaccgattgaaaatgatagaattatggaaacttttacatggattttgcagtgcaagatggatggtcacagcagtattaaagcacatgcgctgttggtgttgaaggtaatggtgaaaacagcaagctccacccagctagagaggctaaaacctgagttcttgtcgagtgttgtaggggtgcttagggaagggatctcgcaccagggcatcaatgccgccttgcacatcttgctagacacgtgtccgtggggaagaaaccgaatgagtatgattgaatccggggcaattcatgacgtcatagagattgaattaggaatgccggagaggaggacgacggagctgattctagggatattgtttcatctatgctcctgcgctgatggtagatctcagttcctaagccacagtggtgcaattgctgtggtctccaacaggatgctcaatgtttccatagcagccgacgatcgagccattttgatactttctttgataagcaagtactgcgggacttgtgtggtacttgaggagatgatcagtgttagagctgtttctaagctttgtgtggtgctccaagctgactacgcacattatttgaaagaaaaagcaagggaaattctaagatcacactacgatttctggaagaactctccttgtttcatctcttctcccttgtcaaagatccaattaatttga

SEQ ID NO: 12427 - protein, 406 aa, Vitis vinifera
MDDVEIPEYFICPISLQIMRDPVTAITGITYDRESIENWLFKGNNTCPVTKQPLPPDSDLTPNHTLRRLIQSWCTENASNGVVRIPTPKAPLTKSHVVKLVKELWVPQLQLKTLRKLELLAMENERNRRYMVEAGVIKSMSSFLVACFNKQQTVGLEEALSILYLIRVNPTSETRLLPIENDRIMETFTWILQCKMDGHSSIKAHALLVLKVMVKTASSTQLERLKPEFLSSVVGVLREGISHQGINAALHILLDTCPWGRNRMSMIESGAIHDVIEIELGMPERRTTELILGILFHLCSCADGRSQFLSHSGAIAVVSNRMLNVSIAADDRAILILSLISKYCGTCVVLEEMISVRAVSKLCVVLQADYAHYLKEKAREILRSHYDFWKNSPCFISSPLSKIQLI

SEQ ID NO: 12428 - DNA, 1236 bp, Vitis vinifera
  CDS (1)..(1236)
atggaagaaatcgatgttcctccatttttcctctgcccgatttctttggagattatgaaagatccggtgacggtgtcaacgggtataacgtacgatcgggagagcatcgagaagtggttgttttcgggcaaaaataacacctgtccggcgacgaagcaggttctgtcggcggactccgatctgactcccaaccacactctccggcggctgattcaggcgtggtgcactctcaatgcttcaaacggtgtagagcgtattccgacgcccaagattccgatcaacaagatccagatcgtgaagcttctcaatgatgctaagtctccacagttgcagatgaaatgtatcggaaaacttcgagcccttgcgactgagagcgacgccaacaagcggtgcattgagtccgccggtgcagttgaattcttagcttcaatagtgagcaaagccaacttcacaacattcgaagaggaatcagataaagggctagagtccaggagcgcgagcagtgaagctctaagtattctccattatctcctactgtcagaagccgggctcaagaagcttgtgggaaaaaatggtgaatttgtgggttgcttggtacgagtactacaacgaggaaactacgagtctcgagcttatgctgtaatgctattgagttcgatgctccaagttgctgatccaatacaattaatcgccttgaaacccgaattcttcgtggaagcagtgcaagttttgcaggatcatatatctcaccaggccacaaaagctacactcaaactactaattgaggtttgtccatgggggagaaacaaggtcaaagcagtggaagccggcgcagtttcgatattgacagagcttcttctcgcttcttcagaaaaaagggcttgtgagatgatcctaacggtgttggatcagctatgcgggtgcgcggaaggaagagccgaactgttgaagcatgcagccgggatggctatagtgtcaaagaagatactgagggtttctcacgtggcaagtgaacgggcagtgagaattctgtattccatttccaagttctctgcaactccaagtgttcttcaagagatgtcgcagctgggtgtggtggcgaaattgtgtttggtgcttcaagtggattgtgggagcaggaccaaggagaaaaccagagatatcctcagattgcatgccagggcatggaagaactctccatgcatacccaccaatttgctttcttcatatccatag

SEQ ID NO: 12429 - protein, 411 aa, Vitis vinifera
MEEIDVPPFFLCPISLEIMKDPVTVSTGITYDRESIEKWLFSGKNNTCPATKQVLSADSDLTPNHTLRRLIQAWCTLNASNGVERIPTPKIPINKIQIVKLLNDAKSPQLQMKCIGKLRALATESDANKRCIESAGAVEFLASIVSKANFTTFEEESDKGLESRSASSEALSILHYLLLSEAGLKKLVGKNGEFVGCLVRVLQRGNYESRAYAVMLLSSMLQVADPIQLIALKPEFFVEAVQVLQDHISHQATKATLKLLIEVCPWGRNKVKAVEAGAVSILTELLLASSEKRACEMILTVLDQLCGCAEGRAELLKHAAGMAIVSKKILRVSHVASERAVRILYSISKFSATPSVLQEMSQLGVVAKLCLVLQVDCGSRTKEKTRDILRLHARAWKNSPCIPTNLLSSYP

SEQ ID NO: 12430 - DNA, 1236 bp, Vitis vinifera
  CDS (1)..(1236)
atggctgtgtggagttcaatggatgacatcgagataccgcaatatttcttatgccctatatctcttcagatcatgaaagacccggttacagccatgacgggcatcacctatgatcgagaaagcattgagcagtggttgttgacagccaaggataccacttgtccggtaaccaagcagcctttggagcgagactttgtattgacgcccaatcacacactccgccgcctaattcaagcatggtgtgctgacaatgcaacgaatggcgtggatcggattcctactccgaagactcctctggacagaacccatgtcgttaaacttattcgcgatctgggtgttgctcaattgtatctgaaaacattgcagaagatggaagctcttactagagataacgaaaggaacaggaactgtatggcggatgcaggcgcagcgaaggctattgttttgttgatcataaagtgtttcaaggaaaacaagaccaccggggtagaggaagggctgagaatccttcatcttatttggagtccaacctctgaaatgaagctccttctaaaagaaaactacgatttcgtggatgcagtaacatgggctttaggctgcgagaccgacaattatgtggctgtgagatcaaatgcagtgttggttttaaaaaatatagtggaagttgctagtccaaatcttctggagcgattaaagtttgaattcctcaacagactcataaggacgatgagggagaaaatctctcaagcagctatgaaagccgccttgtacgtcctaatggaggtatgcccttgggggagaaacaaatggcaaatgatcgaagccggtgcagtgttccagctcatcgaaatggaactagaaaacccagaaaagaagatcacagaaatcatcttctgtctgttgggtcatctatgttcctgtgctgatggtagagctcagtttctagcccatgcgggaagcatggccatgctgtcaaaaaggatcttaagggtatctaacacgactgacgatcgagcacttcacataattgcattgatctccaagttctcagggacaaacgaagtccttatggagatgctgagagttggggcagtgtcaaagctttgcatggtgcttcaagcagattgtgcaaagtacttgaaagagaaagcaagggagatcctcaggttgcattccaaggtgtggaacaactctccttgtattgctgtttatcttttaacaaggtacgctaggtaa

SEQ ID NO: 12431 - protein, 411 aa, Vitis vinifera
MAVWSSMDDIEIPQYFLCPISLQIMKDPVTAMTGITYDRESIEQWLLTAKDTTCPVTKQPLERDFVLTPNHTLRRLIQAWCADNATNGVDRIPTPKTPLDRTHVVKLIRDLGVAQLYLKTLQKMEALTRDNERNRNCMADAGAAKAIVLLIIKCFKENKTTGVEEGLRILHLIWSPTSEMKLLLKENYDFVDAVTWALGCETDNYVAVRSNAVLVLKNIVEVASPNLLERLKFEFLNRLIRTMREKISQAAMKAALYVLMEVCPWGRNKWQMIEAGAVFQLIEMELENPEKKITEIIFCLLGHLCSCADGRAQFLAHAGSMAMLSKRILRVSNTTDDRALHIIALISKFSGTNEVLMEMLRVGAVSKLCMVLQADCAKYLKEKAREILRLHSKVWNNSPCIAVYLLTRYAR

SEQ ID NO: 12432 - DNA, 1200 bp, Vitis vinifera
  CDS (1)..(1200)
atggatgaaatcgatgttccttctcattttatgtgcccaatttccctgcaactcatgagagatccagtcacggttgcaactgggatcacatacgatcgagagaacatagagagatggttgttttcatgcaaaaacaacacttgtccattcacaaaacaggtacttgttgacacagacctaactccaaaccacacccttcgaagattgatccaggcatggtgcatcgtcaacgcctgtcatggggttgaacggattccaacaccaaagcctcctatcgacaaagcccagatcatcaaactcctcaatgatgccatcaagttcccacagatgcagctcaaatgcctccaaaggcttagatccattgcattcgaaagcgacaggaacaaaaagtgtttggaagctgcaggtgcagttgaattcttagcttccatcataaagaaagatgaatcagcagtgattgaagttgcgctgagcatcctctatcaactcgaaacctcggaagcggccctcaagagtcttgtaagcagtaactacggatttatagagtcgttggtacatgttctgaaatgcggaaactaccaatctcgggcatatgcagccatgctattgaagtccatcttccaggtggcagatccaatccaattgatcaatgctagccctgaattgttcacggagatagtccatgtattgcgcgatgggatttcacagcaagcctcaaaggcagcactgaagcttcttgtggagctttgtccatggggaagaaaccgaatcaaggcagtggtagccggtgtatcacatgtcttgattgagcatcttcttgacacctcagaaaagagaacctgtgaactaatcctagttgttttggatcaactatgcagctgtgctgaagggcgagcggagctgttgaagcatggggctgggctggccatagtttccaagaaaatacttagggtttctcaggtgggaactgatagggcagtgaaaatcttggcctctgtttcaaagttttcagcaacttctagggttcttcaagagatgttgcaagtgggtgttgtttccaagttgtgtttggtgcttcaagtggactctagtaaaaaaaccaaagagaaaacaagggagatcctcaacttgcactctagggtttggaagaacccttcatgtattcctgctcgtttgttctcatcttatccatcttcttga

SEQ ID NO: 12433 - protein, 399 aa, Vitis vinifera
MDEIDVPSHFMCPISLQLMRDPVTVATGITYDRENIERWLFSCKNNTCPFTKQVLVDTDLTPNHTLRRLIQAWCIVNACHGVERIPTPKPPIDKAQIIKLLNDAIKFPQMQLKCLQRLRSIAFESDRNKKCLEAAGAVEFLASIIKKDESAVIEVALSILYQLETSEAALKSLVSSNYGFIESLVHVLKCGNYQSRAYAAMLLKSIFQVADPIQLINASPELFTEIVHVLRDGISQQASKAALKLLVELCPWGRNRIKAVVAGVSHVLIEHLLDTSEKRTCELILVVLDQLCSCAEGRAELLKHGAGLAIVSKKILRVSQVGTDRAVKILASVSKFSATSRVLQEMLQVGVVSKLCLVLQVDSSKKTKEKTREILNLHSRVWKNPSCIPARLFSSYPSS

SEQ ID NO: 12434 - DNA, 1248 bp, Vitis vinifera
  CDS (1)..(1248)
atgcctgggagtttagagccattggatgtgggtgttcagatcccataccacttcaggtgtccgatctcgctcgagctcatgtgtgaccctgtcaccgttagcacgggtcagacctacgaccgagccagcatcgagtactgggtcggcaccggcaacaccacctgccccgtcacgcggtcttctcttaccgacttcaccctcatccccaaccacacccttcgccgtctcatccaggactggtgcgttgccaaccggtcctttggagttgagcgtattcccactcccaaacagcctgccgacccagcctcggttcggtctctgcagactcaggtctcttctcagtccaatccttcccacaccaggctttcggcggtgaagcgactcagaggactcgctcgtgactcggacaaaaaccgctctatcattggttcgcataatgttcaggaggttcttctccccgttattttttcggattcggagtgtgactcggctgagttgaagcatgagtcactcgcgcttttggtgatgtttcctctctctgagtcggagtgcgcgttcgtagcgtcccagccggaccgagtcgcgcatctcgtgtcgctcctatttcacgcatcgatcgaggttcgggtcaactcggccgcactcatcgagatcgtggtcgccggaaccagatcactggatctcagagctcaaatcagcaatgtggatgaaatcttcgaaggaataaccggaattctcaactatccattggcctatcctcgcgcgctcaaagttggaatcaaagccttattcgccctatgcctggccaagcaaagccgccacaaggcggtcgctgccggtgctgtgactgctctcatcgaccgattggccgattttgagaagtgcgacgtggagcgagccctggcaacagtggagctgctctgccgcgttccggcgggttgcgccgccttcgcagcacacgcactcaccgtgcccctcctcgtgagaaaaattctaaaagtctccgaccgcgcaacggagtacgctgccggagcgctgctgtcgctgtgctcggcggcggagcagagccagagagaggcggtctccgcgggggtagtgactcagcttttgctgctggtacaaagcgactgtacggaaagagcaaagcgcaaagcacaacttttgttgaagcttcttcgggattcgtggccagaagattcggtagtcaattctgacgattttggttgcagtgatgttgttccattttga

SEQ ID NO: 12435 - protein, 415 aa, Vitis vinifera
MPGSLEPLDVGVQIPYHFRCPISLELMCDPVTVSTGQTYDRASIEYWVGTGNTTCPVTRSSLTDFTLIPNHTLRRLIQDWCVANRSFGVERIPTPKQPADPASVRSLQTQVSSQSNPSHTRLSAVKRLRGLARDSDKNRSIIGSHNVQEVLLPVIFSDSECDSAELKHESLALLVMFPLSESECAFVASQPDRVAHLVSLLFHASIEVRVNSAALIEIVVAGTRSLDLRAQISNVDEIFEGITGILNYPLAYPRALKVGIKALFALCLAKQSRHKAVAAGAVTALIDRLADFEKCDVERALATVELLCRVPAGCAAFAAHALTVPLLVRKILKVSDRATEYAAGALLSLCSAAEQSQREAVSAGVVTQLLLLVQSDCTERAKRKAQLLLKLLRDSWPEDSVVNSDDFGCSDVVPF

SEQ ID NO: 12436 - DNA, 1248 bp, Populus trichocarpa
  CDS (1)..(1248)
atggatcaaatcgatgttccttatcattttctttgcccaatttcccttcaactcatgagagatccagttacagtctcaactgggattacctatgatagagagaacattgagaaatggttattttcatgcaaaaataaaacttgccctgttacaaagcaagagttgtttaccaaagatctcaccccaaaccacacccttcgtcgtttgatccaagcatggtgcaccctcaatgcctcgttcggtatcgagagaatcccaactccaaagccactcgctgacagagcccagatctccaaactccttaatgatgctaagaaatttccacacttgctgctcaagagtctacgaaggcttagatcaatcacgcttgaaagtgaaaggaatagaagctgtctagaggaagctggtgtagttgatttcttggcttcgatcttgaaaactgataattctacttcagttcagatagacagcgatgataatgaatcggagttcacaagggcaagtgatgaagcattgaacattctttatcatctcaaaatatcacagaggcaattaaagaatctgataatcaacgatagcgatcggtttctagagtcgttgctgcaaatcttgaagcatagtagctatcaatctagagcttatgcgacaatgttgttgaagtccgttttcgaagtggcagatccaacgcatttgattagtatcagaccggaaatgtttgtcgagatagtacgcgtacttgatgatcagatctcacaacaggcctcaaaggcagcattgaagcttctcgtggaaatttgtccatggggaagaaaccgaatcaaagccgtcgaaggtggtgcagtttctgtcttgatcgagcttcttcttgatacatcagacaagagagcttgtgaacttattctagctgttttagaactgctttgtggttgtgctgatggacgagcagagttattgaagcacggggcaggactcgcagttgtttccaagaaaatacttagggtctctcatgttgcaagtgataaggcagtgagaattctgtgctccatttgcaggttttctgcaacttctagggttcttcaagaaatgttgcaggttggtgctgtggccaagttgtgcctgattttgcaagtggatagtagtttaaagagcaaggagagagctagagagatcctcaaggtgcactccaaggtctggaggagctctgcttgtatccctgcatatttgatgtcttcttatccatcttcctga

SEQ ID NO: 12437 - protein, 415 aa, Populus trichocarpa
MDQIDVPYHFLCPISLQLMRDPVTVSTGITYDRENIEKWLFSCKNKTCPVTKQELFTKDLTPNHTLRRLIQAWCTLNASFGIERIPTPKPLADRAQISKLLNDAKKFPHLLLKSLRRLRSITLESERNRSCLEEAGVVDFLASILKTDNSTSVQIDSDDNESEFTRASDEALNILYHLKISQRQLKNLIINDSDRFLESLLQILKHSSYQSRAYATMLLKSVFEVADPTHLISIRPEMFVEIVRVLDDQISQQASKAALKLLVEICPWGRNRIKAVEGGAVSVLIELLLDTSDKRACELILAVLELLCGCADGRAELLKHGAGLAVVSKKILRVSHVASDKAVRILCSICRFSATSRVLQEMLQVGAVAKLCLILQVDSSLKSKERAREILKVHSKVWRSSACIPAYLMSSYPSS

SEQ ID NO: 12438 - DNA, 1227 bp, Populus trichocarpa
  CDS (1)..(1227)
atggctgatatagaaattcctgaatattttctatgtcccatatcgctacaaatcctgaaagatccagtaacaacaataacaggcatcacatacgagcgagaaagcatagaacactggttgaagacagcccaaggaaaccctacgtgtccagttacaaagcagcctttgccaggagattctgagttgataccaaatcacacattgaggcggctaattcaatcatggtgcactctgaatgccatcgatggcatcgatcgaattcccactccgaaatctcctatcaagaagagccaagtccttagactcatcaaggatcttgatgtccctgatcactcttgtactaaagcattaatgaaactggaagccctggccgcagagaatgaaaggaataggacttgcatggtggaagctggcgtggcaaaagctatggttcttttcattataaaatgtttcaaagaaggaaagacaaccggccttgaagaaggtttgagaattctttatcttatttggaaccaatcacaagaaatcaagcttcttgtcagggagaaccaagaattcatcgattcattgacatggaccttacgttgtaagatagataatcatgttgatgtcaagactcacgcaatgctagtattgcacaaaacaatatgcgttgtttgtcaagagctattggagagattaaaggttgatttcttcaaagagatcgtaacaagggttcttaggaagagaatctctaaactagccataaagtcagccttgcttgtcctaacagaagtgtgttttgggggcagaaacagaatgaaaattgttgaagctaatgcggtttttgagctcattgaactagagctagagaaacccgagaggaacatcacagagctcatttttaatcttttggctcagttgtgttcatgtgcagctgggagagaacagtttctaaagcacgcaggaagcattgccctgctttcaaagagggtccttagggtttctccagcaacagatgatcgagcagtgcacatacttgattcaatctcaaaattttctgctggagacgaagctgttctagagatgttgagagttggtgctgtgtcaaaactactctgcatgcttattcaggcagactgtgctccctatttaaaaaagaaagcaagagggatcctcaggttgcactccaatacgtggaacaattctccttgcattgccgtagatttgttaacaaggtatccataa

SEQ ID NO: 12439 - protein, 408 aa, Populus trichocarpa
MADIEIPEYFLCPISLQILKDPVTTITGITYERESIEHWLKTAQGNPTCPVTKQPLPGDSELIPNHTLRRLIQSWCTLNAIDGIDRIPTPKSPIKKSQVLRLIKDLDVPDHSCTKALMKLEALAAENERNRTCMVEAGVAKAMVLFIIKCFKEGKTTGLEEGLRILYLIWNQSQEIKLLVRENQEFIDSLTWTLRCKIDNHVDVKTHAMLVLHKTICVVCQELLERLKVDFFKEIVTRVLRKRISKLAIKSALLVLTEVCFGGRNRMKIVEANAVFELIELELEKPERNITELIFNLLAQLCSCAAGREQFLKHAGSIALLSKRVLRVSPATDDRAVHILDSISKFSAGDEAVLEMLRVGAVSKLLCMLIQADCAPYLKKKARGILRLHSNTWNNSPCIAVDLLTRYP

SEQ ID NO: 12440 - DNA, 1248 bp, Populus trichocarpa
  CDS (1)..(1248)
atggatggttttgagcatcaagcgccatcattttttatctgcccaatatctcttcaggtcatgaaagatcctgttactatatccacaggcatgacctttgaccgagagagcattcagaaatggcttttctcttataagaaaatcatttgtcctgttacaaaacaacccctttctgatttccgtctcactccaaattctaatcttcttcgcttgatccaatcatggcacttgcagcacgcatcatcatcaacaacaaagtttgtggagccggagcctaataatcaagatgccttgatgaaagtccttcttgaagagattaagcaaccccatttgcaggtaaaatctcttagaaagatcaagtcattaatccaggagaatcgtggtgatagtagcaggattacttgcatcagagatgatagcttattttctctagtagcatctcttgtagtcaaaactgagttagtaccaggggttccacagattactggtaatgacacgccagaaattatcaatgaagctgtgtcttctctgtgtcttttaaggccatccgatgagacattaaagatggtttcacaaaatgaaaatggcctgttaatcgaatcactttgtttaattataacacagtatttgagcaatctacagattagaattcaagctgctcttcttctgaagtccatatttgaagtggttgatggaatttacaaggaaggacttagagttgagttctttgagagcatcacggagatattgaaggaccaaatttcaaaacatggaagcctgacagtcttggctactttgatggaagttttgtcatatgggaagaataaagagaaagctattgagggaggactcattccgatcctgatcgaattgctagctgaggacaatgagaggcatgtgtgcgagctgatgttagccgtgctagaaaaactgtgccagaaagcagaagggcgggctgcctttttggcacatccagcaggcatagcagttgtatcatcgaagattttgaaggtttcccatgttggagatgataaatcaataagtttgttgtcatccgttttaagattttgtatcagtagaggtgaggttgcacaagaatttatggaggtgggtggagtgacaaagatttgcttggtgatagaaagtggatgcaatttaaagaccaaggaaaaagccagggaaatcttagggtttcatcttaaaacatggaacaagactccttgtttcccctctttatttaaagcttga

SEQ ID NO: 12441 - protein, 415 aa, Populus trichocarpa
MDGFEHQAPSFFICPISLQVMKDPVTISTGMTFDRESIQKWLFSYKKIICPVTKQPLSDFRLTPNSNLLRLIQSWHLQHASSSTTKFVEPEPNNQDALMKVLLEEIKQPHLQVKSLRKIKSLIQENRGDSSRITCIRDDSLFSLVASLVVKTELVPGVPQITGNDTPEIINEAVSSLCLLRPSDETLKMVSQNENGLLIESLCLIITQYLSNLQIRIQAALLLKSIFEVVDGIYKEGLRVEFFESITEILKDQISKHGSLTVLATLMEVLSYGKNKEKAIEGGLIPILIELLAEDNERHVCELMLAVLEKLCQKAEGRAAFLAHPAGIAVVSSKILKVSHVGDDKSISLLSSVLRFCISRGEVAQEFMEVGGVTKICLVIESGCNLKTKEKAREILGFHLKTWNKTPCFPSLFKA

SEQ ID NO: 12442 - DNA, 1350 bp, Populus trichocarpa
  CDS (1)..(1350)
atgccgatatttgaagcaaatagctttagaaacgtaaagctagatgggagtgctggtggccaagttctagacctagaaactgccattaaggatggcattttgggcggtgttaccggcggcggtttagtttgtgctggtgtggcggagaaattggatctgaagaagatggttgaagagcttgaatcaatagaagtgccgccggtgtttatatgtccgatttcgttagacccaatgcaagacccagtgactctttgcaccggacagacttacgagagatacaacatcctcaaatggttctctctgggtcattgcacgtgccccacaacaatgcaagagctttgggatgatacggtaacgccaaacaagactatgcggcagctgatttatagctggttctcgcagaagttcttagccacgaagaagagatcagaggatgtgcaaggaagggctattgaacttctggataatctgaagaaagtcaagggtcaagctaaagtgcagactttgaaggaacttaggcaggttgtggctgcacattctacggcaaggaaggctgtgctggataattgcgggactgccttggttacatcttttttgggcccctttaccactcatgctgtcgggtctgaggctgttggaattctagtgaatttggatctcgattatgcaaccaagtcgaatttgaggcaacctgcaaggatttccttaatggttgatatgttgaatgagggttctatcgagaccaagattaattgtacccgattgatggaaatgttgatggaagggaatgattttgagcatgaaaacatgtcgagcttgagacttttagttggtttgttgaggttggtgaaagacaagaaacacccaaatgggttattggctggacttggtttgttaaagagtatttgttcacatgaatcggtaaggggctcagttgtgagcattgggacagttcctccattagtggagctattgccaagtttgaataatgagtgcttggaattagcgctttatattctggatgttctttcaagtattcccgagggaagattggctttgaaggtttgtgccaacacaataccgaatgtggtgaagttattgatgagggtttccgagacatgcacgcggcttgctttgtcgatattatgggcagtttgcatgctcgcaccagaagaatgtactgcacttgctgtggaggcgggtttggcagccaaactactactagtaatacagagtgcttgcaatcctgtgttgaagcagcaatcggttgagctattgaaattgtgtagtctaaattacacatctaccatttttatttccgagtgtaagcttacgagaacaatacagtga

SEQ ID NO: 12443 - protein, 449 aa, Populus trichocarpa
MPIFEANSFRNVKLDGSAGGQVLDLETAIKDGILGGVTGGGLVCAGVAEKLDLKKMVEELESIEVPPVFICPISLDPMQDPVTLCTGQTYERYNILKWFSLGHCTCPTTMQELWDDTVTPNKTMRQLIYSWFSQKFLATKKRSEDVQGRAIELLDNLKKVKGQAKVQTLKELRQVVAAHSTARKAVLDNCGTALVTSFLGPFTTHAVGSEAVGILVNLDLDYATKSNLRQPARISLMVDMLNEGSIETKINCTRLMEMLMEGNDFEHENMSSLRLLVGLLRLVKDKKHPNGLLAGLGLLKSICSHESVRGSVVSIGTVPPLVELLPSLNNECLELALYILDVLSSIPEGRLALKVCANTIPNVVKLLMRVSETCTRLALSILWAVCMLAPEECTALAVEAGLAAKLLLVIQSACNPVLKQQSVELLKLCSLNYTSTIFISECKLTRTIQ

SEQ ID NO: 12444 - DNA, 1341 bp, Populus trichocarpa
  CDS (1)..(1341)
atgatactttcctggagatcaagaagaaattcgaagaaaaacaagattccaagccaagaaatcaattcagacatggaaatctcgaatcctaggcacttctgctgcccgatttctcttgacttgatgaaagatcctgtcacattgtccacgggaatcacatatgacagagaaagtatagaaaaatggattgaagagggcaacctaacgtgtccggttacaaaccaggtgttagcaagctatgatcagataccaaatcattccataagaaagatgattcaagattggtgcgtggagaaccgttcttatggtgtcgagaggattcctacgcctcgcgttccagtgacaccctatgacgtttcggagacttgtaagagggttaatgatgcaactcgacgtggggagcaaaagaagtgtcgggaattggttaggaagatcaagaactggggtaaagagagtgagcgcaacaagaagtgtattgtggagaatggggctggttgtgtcttatcggcttgtttcgagtccttcgcaagtgtttcagtggggaaagatgaggatttgttgggagagattttatcggttttggtatggatgtttccacttggtgaagaaggccaaagtaagcttgggtcggttaggtctttgaattgtttggtatggttcttgaagagtggagatctttcagcaaggcaaaatgcagctttggtgcttaaaaatcttcttgctttggatcaaaaacatgtgagtgccttggtggggattgaaggcgtgtttgcagcactggttaagttgatcaaggagcctatttgccctactgctaccaaggcttcattgatggcaattttctacatgacttcaccatcaagcctcaatgagaagatgataccaatgtttgtggaaatgggtttggtgtcagtgatcgtagagattcttgttgatggagataaaagcatatgtgagaaggcattaggtgttctggaccatatttgtgattgcaaagaagggagagaaaaggcctatgagaatgctctaattgttgctgttttgatcaagaaaatcttgaaagtatcaggtttggcatcagaattgtcagtctccattctctggaagctcttcaagaattctcaatacagaccagaggatgatgatgctgaaggaggtgtggtagttgaggcacttcaagtgggtgcttttcagaaattattggtcttactgcaagtgggttgtggcgagagcacaaaagagaagcttaaagagttgctaaaactgctgaatctttgtagagttaggttagattgttttgattctacagcagatttcaagtatctcaaaagatcatactga

SEQ ID NO: 12445 - protein, 446 aa, Populus trichocarpa
MILSWRSRRNSKKNKIPSQEINSDMEISNPRHFCCPISLDLMKDPVTLSTGITYDRESIEKWIEEGNLTCPVTNQVLASYDQIPNHSIRKMIQDWCVENRSYGVERIPTPRVPVTPYDVSETCKRVNDATRRGEQKKCRELVRKIKNWGKESERNKKCIVENGAGCVLSACFESFASVSVGKDEDLLGEILSVLVWMFPLGEEGQSKLGSVRSLNCLVWFLKSGDLSARQNAALVLKNLLALDQKHVSALVGIEGVFAALVKLIKEPICPTATKASLMAIFYMTSPSSLNEKMIPMFVEMGLVSVIVEILVDGDKSICEKALGVLDHICDCKEGREKAYENALIVAVLIKKILKVSGLASELSVSILWKLFKNSQYRPEDDDAEGGVVVEALQVGAFQKLLVLLQVGCGESTKEKLKELLKLLNLCRVRLDCFDSTADFKYLKRSY

SEQ ID NO: 12446 - DNA, 1347 bp, Populus trichocarpa
  CDS (1)..(1347)
atgattgtttcttggagattaaggagaaagtccaagaaaaacaagaatccaagccaagaaatcaattcggacatggaaatcatgattcctagacacttctgttgcccgatttctcttgacttgatgaaagatccggtcacattatcgacaggaatcacatacgatagagaaagtatcgaaaaatggatcgaagatggcaacctaacatgtccggttacaaaccaggtgttagccagctttgatcagattccgaatcattccctgcgcaagatgattcaagattggggtgttgagaatcgttcttatgggtttgaaaggattcctacgcctcgtgtccctgtgacatcgtacgaggtttcggagatttgtaggagggttaattttgcaactcaacgaggcgagcaaaagaagtgtcaagagctggttaggaagatcaagaattggggtaaagagagtgagcgcaacaagagatgcgttgtggagaatggggctggttgtgttttatcggcttgcttcgagtcctttgcaagtgttgcaatggagaaagatgaggatttgttgggagagattttatcagctttggtatggatgtttccacttggtgaaggcggccaaagtaggcttggatccatcgtgtctttgaattgtttggtatggttcttgaagaggggagatctttcagccaggcaaaatgcagctttggtgcttaaaaatcttcttgctctagatcaaaggcatgtaaatgccctggtgaagattgaaggagtggttgaagctttggttaagttaatcaaggagcctatttgcccaacagccaccaaagcttcattgatggcaattttctacatgacttcaccatcaagtctcaatgagaagatgataccaacatttgtggaaatgggtttggtttcattgatcatagagattctagttgatggagataaaagcatatgcgagaaggcactaggtgttttggaccatatttgtgattgcaaagaagggagagaaaaggcctatgagaatgctctcattgtagctgttttgatcaagaaaatcttgaatgtatcagatttggcatcagaattgtcagtttccattctctggaagcttttcaagaattacggagagagatcagaggatggcgatgatgatgcagaaggaggtgttgtagttgaagcacttcaagtgggtgctttccagaagttgttggtcttattgcaagtgggctgtggttatagcacaaagaagaagcttaaagagttgctaaaattgttgaatctttgtagagttaagttagattgttttgattcttcagcagatttcaagtatgtcaaaaggtcatactga

SEQ ID NO: 12447 - protein, 448 aa, Populus trichocarpa
MIVSWRLRRKSKKNKNPSQEINSDMEIMIPRHFCCPISLDLMKDPVTLSTGITYDRESIEKWIEDGNLTCPVTNQVLASFDQIPNHSLRKMIQDWGVENRSYGFERIPTPRVPVTSYEVSEICRRVNFATQRGEQKKCQELVRKIKNWGKESERNKRCVVENGAGCVLSACFESFASVAMEKDEDLLGEILSALVWMFPLGEGGQSRLGSIVSLNCLVWFLKRGDLSARQNAALVLKNLLALDQRHVNALVKIEGVVEALVKLIKEPICPTATKASLMAIFYMTSPSSLNEKMIPTFVEMGLVSLIIEILVDGDKSICEKALGVLDHICDCKEGREKAYENALIVAVLIKKILNVSDLASELSVSILWKLFKNYGERSEDGDDDAEGGVVVEALQVGAFQKLLVLLQVGCGYSTKKKLKELLKLLNLCRVKLDCFDSSADFKYVKRSY

SEQ ID NO: 12448 - DNA, 1230 bp, Populus trichocarpa
  CDS (1)..(1230)
atggatgatattgaagttccaaagttttttgtctgcccaatatctctccaaatcatgaaagacccggttacaaccataactggcatcacatatgatcgagagagcattgagcactggttattcactagtcaaaacacagcttgtccagtcaccaaacagcccttgcaaaaagatttagatttaacccctaatcacaccttacgcaggttaatccaagcttggtgcaccgagaatgcatcccatggtgttgatagaatccccacccctaaaccttgtcttgacaaagcccatgtccttaaactcatcaaaaatctttcgcatcacgagttgcaaattaaaactcttacacgattggaattacttgcggcggagaatgaaagaaacaggaagtgcatggtggatgctggcctgcccaaggccatgttattgtttatagcagcatgtttcaagaaaggtcaagtttctggtattcaagaagctcttagtatactatgttttattagaattcctcgaagtgaatcaagggccttttatagtgaaaatgatgataagattatcgaatccttgacttgggttttagggtgcaaaatggagaattatgccacagttaaatcccatgcagcttcggtgttgaaaatgctacttgaagaagcgagttctagtgtattggagaggcttaaacctgaattctttgagaggattgttggtgttttgagagagagaatcactcatcaaggtattaatgccgccttgcaagtgttgttaaatgcttgtccctggggaagaaatcggaaaatgatggtggaatccggtgcagtttttgagcttattgagcttgaattgggatcacctgaaagaagaaccacagagctcaatttgggtgttctttttcatttatgttgttgtgctgagggaagggctcaattcttaagccatggaggtagcattgctgtggttgcaaagagaatattgagggtttctccagcggtggatgatcgagccattctgatcctttcacagatatgtaaattctcaggaacaagtatggtgatccaagaaatggcggatgttaaagctgtgacaaagctatgtatgttgcttcaagcagactgtgcaacatatttgaaggacaaagctagggaaatccttagatcacactctgacaagtggaagaactctccttgcattttttcttctctctcgagtcttgagttccaggtatccagctag

SEQ ID NO: 12449 - protein, 409 aa, Populus trichocarpa
MDDIEVPKFFVCPISLQIMKDPVTTITGITYDRESIEHWLFTSQNTACPVTKQPLQKDLDLTPNHTLRRLIQAWCTENASHGVDRIPTPKPCLDKAHVLKLIKNLSHHELQIKTLTRLELLAAENERNRKCMVDAGLPKAMLLFIAACFKKGQVSGIQEALSILCFIRIPRSESRAFYSENDDKIIESLTWVLGCKMENYATVKSHAASVLKMLLEEASSSVLERLKPEFFERIVGVLRERITHQGINAALQVLLNACPWGRNRKMMVESGAVFELIELELGSPERRTTELNLGVLFHLCCCAEGRAQFLSHGGSIAVVAKRILRVSPAVDDRAILILSQICKFSGTSMVIQEMADVKAVTKLCMLLQADCATYLKDKAREILRSHSDKWKNSPCIFSSLSSLEFQVSS

SEQ ID NO: 12450 - DNA, 1242 bp, Populus trichocarpa
  CDS (1)..(1242)
atggaagatattgaagtcccttcattttttctctgccctatttctctccagatcatgaaagacccggttatagtcccaaccgggataacttatgatcgcgagagcatcgaaaaatggttgttttcaggcaagaatgatacatgtccaattacaaaacttgtgatatcaggttgcgaggtgacaccaaaccacactcttaggaggttgatccagtcttggtgcactctcaatgcttcttacggtattgaaagaatcccaactccaaagcctccaatcaacaaaacacaggttgccaagcttctcaatgatgctaagtcaccacagcaacaggttaagtgtctaaggaagctacgttcaattgctaacgagaacgaaacaaacaaaagatgcatggaggctgcaggtgctgtggagttcttggtctcggtggtgaataacttcaattctttatcatttgaagaaacttcagatgatgggtttgagatagcaagaccaggtgatgaggccttgagtatcctctatggtctagaaatatccgaatccggtctaaagaatcttattatgggaataaatggtgaattgatcattgagaccttaacgaaagttatgcaaggtggaaactacgagtctcgagcttatgctgtcttgttgttgaaatcaatgcttgaagttgctgatccgctgaaactcatcagtttgaaacatgaactcttctccgaaatagttcaagttttacgtgatcaaatatctcacaaagcctcaaatgcttcattacaactactaatcaatctttgcccatggggaagaaacagaatcaaagccattgaagctaaggcagtctcggttttgattgatcttctacttgattcatcagagagaagaacctgtgagatggtgctaatggtgttggacttgctatgccaatgtgcagaagggagagctgaattgttaggacatggtgcaggcctagcagttgtttcaaagaagatacttagggtttctcaggtggcaagtgagagggcagtgaggattatcttgtctatctcaaagtactcgacaacaaccagtgtccttcaagagatgttgcagattggaatcgtggccaagctatgtttggtgcttcaagtggattgcggaagcaagaccaaagacaaggccagagaggtgcttaaaattcatgcgagagtttggaagagttctcgttgcataccagcaaatctactttcttcatatccagcctga

SEQ ID NO: 12451 - protein, 413 aa, Populus trichocarpa
MEDIEVPSFFLCPISLQIMKDPVIVPTGITYDRESIEKWLFSGKNDTCPITKLVISGCEVTPNHTLRRLIQSWCTLNASYGIERIPTPKPPINKTQVAKLLNDAKSPQQQVKCLRKLRSIANENETNKRCMEAAGAVEFLVSVVNNFNSLSFEETSDDGFEIARPGDEALSILYGLEISESGLKNLIMGINGELIIETLTKVMQGGNYESRAYAVLLLKSMLEVADPLKLISLKHELFSEIVQVLRDQISHKASNASLQLLINLCPWGRNRIKAIEAKAVSVLIDLLLDSSERRTCEMVLMVLDLLCQCAEGRAELLGHGAGLAVVSKKILRVSQVASERAVRIILSISKYSTTTSVLQEMLQIGIVAKLCLVLQVDCGSKTKDKAREVLKIHARVWKSSRCIPANLLSSYPA

SEQ ID NO: 12452 - DNA, 1242 bp, Populus trichocarpa
  CDS (1)..(1242)
atgcctggaagcttggagcctttagatttaacagttcagattccataccattttcggtgtccgatctctcttgaactaatgtgtgacccagtcaccgttagcacaggtcagacttacgatcgttccagcatagaatcatgggtagccaccggtaatactacctgtcctgttacccgagccccactcaccgacttcactttaatcccaaaccacacccttcgccgtttgattcaagattggtgtgttgcaaatcgtgctttcggcgttgaacgaattccaaccccgaaacagcctgccgaaccgagtttagttcgttccttgttaaaccaagcagcttccgcgtcaaatccaactcactctcgcctctctgctctccgccgactcagaggactcgctcgagattccgataagaaccgctctgtcatttcctctcataacgttcgtgaagttcttgtcaacctcgtgttttcaacctctcagtcgtcggacttgagccacgagtcactcgcgatcctggttctgtttccgctcactgagttcgactgtgtggggatatcttcagaaccggagcggatcagttatttagctaatttactattccattcatcaatcgaagtccgagtcaactcagctgcactcattgaaaatgttattgcaggaacaagatcatcagatcttcgacttcaaattagcaacacagagattatcttcgaaggagtgatagagattttaaaaaatcctttatcatcccctcgagcgcttaaaattgggataaaagcgctcttcgctttatgtctagttaaacaaacaaggcataaagcggtcaccgccggagcggcggagacattaatcgacagactggcagattttgataaatgtgatgcagaaagagccctggctacaatagaattactttgcagaatacaagttggttgcgcagcatttgcagcgcacgcgctgactgtgccgttgttagtcaagactatcctgaagatatcggatagagcgacggagtacgcggcgggagcgttgctggcgctgtgttcagcgtcggagctgagtcagaaggaggcggtttgtgcagggatattgacgcagttgttgctgttagtacagagtgattgtactgatagggctaagaggaaggcgcagatgttgctgaagttgttaagggatgcatggcctgaggattctgtcggcaattctgatgattttctttgcagtgaagtggtgccgttttga

SEQ ID NO: 12453 - protein, 413 aa, Populus trichocarpa
MPGSLEPLDLTVQIPYHFRCPISLELMCDPVTVSTGQTYDRSSIESWVATGNTTCPVTRAPLTDFTLIPNHTLRRLIQDWCVANRAFGVERIPTPKQPAEPSLVRSLLNQAASASNPTHSRLSALRRLRGLARDSDKNRSVISSHNVREVLVNLVFSTSQSSDLSHESLAILVLFPLTEFDCVGISSEPERISYLANLLFHSSIEVRVNSAALIENVIAGTRSSDLRLQISNTEIIFEGVIEILKNPLSSPRALKIGIKALFALCLVKQTRHKAVTAGAAETLIDRLADFDKCDAERALATIELLCRIQVGCAAFAAHALTVPLLVKTILKISDRATEYAAGALLALCSASELSQKEAVCAGILTQLLLLVQSDCTDRAKRKAQMLLKLLRDAWPEDSVGNSDDFLCSEVVPF

SEQ ID NO: 12454 - DNA, 1248 bp, Populus trichocarpa
  CDS (1)..(1248)
atggatcaaatcgatgttccttatcattttctttgcccaatttcgcttcaactcatgagagatccagttacaatctctactgggattacctatgatagagagaacattgagagatggttattttcatgcaagaacaacacttgccctgtcacaaagcaagagttgtttggtaaagatctaaccccaaaccacactcttcgacgattgatccaagcatggtgcaccctcaatgcctctttcggaatcgagcgaatcccaactccaaagccacccattgaaagagcccagatcgccaaacttcttaatgacgctaagaaatttccacacttgcagctcaagagtctacgaaggcttagatcgatcacgcttgaaagtgaaaggaatagaatctgtctagaggaagctggtgcagttgatttcctggctacaatcttgaaaaatggtgattctacttcagttgacatagctagcgatgataatgagtctgagttctcaagagcaagtgatgaagcattgaacattctttatcatctcaaaatatcacaaaggaaattgaagaatctgataaccaatgatggcgatcaattcttggagtcattacttcaaatcttgaagcatagtagctatcaatctagagcttatgcgacaatgttattgaagtccgtctttgaagtggcagatccaatgcatttgatcagtatcagaccagaaatgtttgtagaattagtacgtgtactcaatgatcagatctcacaacaatcttcaaaggcggcattgaagcttcttgtggaggtctgtccatggggaagaaaccgaatcaaagctgtcgaaggtagcgccgtttcggtcttgattgagcttcttctagataaatcagaaaagagagcttgtgaacttgttctagctgttttggatctgctttgtggttgtgctgagggacgagcagagttattgaagcacggggcaggacttgccgttgtttccaagaaaatacttagggtttctcatgttgcaagtgataaggcagtgagaatcctgtactccatttgtaggttttcagcaacgtctagggttcttcaagaaatgttgcaggttggtgttgtggccaagttgtgtttggttttgcaggtggatagtagtttcaagagcaaggagagagctagggagatcctcaagctgcactccagggtttggaggaattctgcttgtgttcctgcttatttgatgtcttcttatccatcttcctga

SEQ ID NO: 12455 - protein, 415 aa, Populus trichocarpa
MDQIDVPYHFLCPISLQLMRDPVTISTGITYDRENIERWLFSCKNNTCPVTKQELFGKDLTPNHTLRRLIQAWCTLNASFGIERIPTPKPPIERAQIAKLLNDAKKFPHLQLKSLRRLRSITLESERNRICLEEAGAVDFLATILKNGDSTSVDIASDDNESEFSRASDEALNILYHLKISQRKLKNLITNDGDQFLESLLQILKHSSYQSRAYATMLLKSVFEVADPMHLISIRPEMFVELVRVLNDQISQQSSKAALKLLVEVCPWGRNRIKAVEGSAVSVLIELLLDKSEKRACELVLAVLDLLCGCAEGRAELLKHGAGLAVVSKKILRVSHVASDKAVRILYSICRFSATSRVLQEMLQVGVVAKLCLVLQVDSSFKSKERAREILKLHSRVWRNSACVPAYLMSSYPSS

SEQ ID NO: 12456 - DNA, 1233 bp, Populus trichocarpa
  CDS (1)..(1233)
atggatgaaatagaagttcctgaatattttctatgccccatttcgctacaaatcctgaaagaccctgttacaacaataacaggcatcacttacgagcgagaaagcatagagcaatggttgaaggcagcaaaaagcaaccctacttgcccggtaacaaagcagtctttgccaagagattctgagctgacaccaaatcacacattgaggaggctaattcaatcatggtgcactgtgaatgctatatatggggttgatcgaatccccaccccaaagtctcctatcaaaaagagccaaatatttagactcatcaaggatcttgatgcccctgatgatcacttgcgtacgaaggcattaaggagaatggaagcccttgccaaagagaatgaaaggaacaggacttgcatggtggaagctggtgtgacaaaagctgcggttctttttatcataaaatgtttcaaagaaggaaagactgctggtcttgaagaagttttgaggattctttatcttatttggaacccatctcaagaaatcaagcttcttgttagggagaaccaagatttcatcgattcattgacatggattttacgttgtgatcagataaacaatcacgttgatgtcaagagccatgcaatgctattattgcacaaaacaacggagattgtatgtcaaaagctactggagagtttaaaggttgatttcttcaaagagatcataacaagggttcttaggaagagaatctctaaacaagccgtaaagtcatccttgcttgttcttacagaagtgtgtcattggggcagaaacagaatgaaaattgttgaagctaatgctgttttcgagctcattgaactagaactagagaaacccgagaagaacatcacagagctcatttttaatatcttggctcaattatgttcatgcgcagatgggagagaacagtttctaaagcacgcaggaagcattgccatgatttcaaagagggtccttagggtttctccagcaactgatgatcgagcactgcacatacttgattcaatctcaaaattttctgctagtgatgaagctgctctagagatgttgagagttggtgccgtgtcaaaactttgcatggttattcaagcagactgtgctccctacttgaaaaagaaagcaagaggaatccttaggttgcactcccatatgtggaacaattctccttgcattgctgtatatttgttaaccaggtatcctggataa

SEQ ID NO: 12457 - protein, 410 aa, Populus trichocarpa
MDEIEVPEYFLCPISLQILKDPVTTITGITYERESIEQWLKAAKSNPTCPVTKQSLPRDSELTPNHTLRRLIQSWCTVNAIYGVDRIPTPKSPIKKSQIFRLIKDLDAPDDHLRTKALRRMEALAKENERNRTCMVEAGVTKAAVLFIIKCFKEGKTAGLEEVLRILYLIWNPSQEIKLLVRENQDFIDSLTWILRCDQINNHVDVKSHAMLLLHKTTEIVCQKLLESLKVDFFKEIITRVLRKRISKQAVKSSLLVLTEVCHWGRNRMKIVEANAVFELIELELEKPEKNITELIFNILAQLCSCADGREQFLKHAGSIAMISKRVLRVSPATDDRALHILDSISKFSASDEAALEMLRVGAVSKLCMVIQADCAPYLKKKARGILRLHSHMWNNSPCIAVYLLTRYPG

SEQ ID NO: 12458 - DNA, 1275 bp, Populus trichocarpa
  CDS (1)..(1275)
atgtcaatccaagagttggtgattccaaaccagtttctgtgcccaatatctcttgatcttatgaaggatcccgtcacattatcttctgggataacatatgatcgggagagcatagaaacgtggctcgagggtgggaattttacgtgcccggtaacgaatcaagtgctaaggagttttgatcagattcctaatcacagtcttaggaaaatgattcaagattggggtgtggcgaatcgtaactatggcgtcgaccgaatcccaacacctcgagttccggttttgggagctcaggtctcggaggttctttttagtttggaggactcgacaaagcgtttgaatggggcagggtgcctagaactggtgcagaaaatcaagaaatggggcaatgaaagcgagcgtaacaggcgttgtatcgtggcgaatggagcacttagtgtgtttgcagctgcgtttgattcatttgcgagagattcttttgaaagaaatgctaatgtgttggaggagatattatctgccatgaattggatgtttcctatattccaacattcacttgatgcagaagcacgagcgcatttaggctcgcaagattctttacgctgcttggtgtggttcttgaaaagcggagatctttcggtgaagcaagactccatgattgcattaagagaaattgtttctttagaccaaaaacaggtagaagcattggcagccattgaagaggtgtatgaagttctttttaggttcattaaggacccagtttgccctgcaatcaccaaagcttctcttatggtaatattctatctagtatcatctccttcttccactagcataaagaccagatcagcattagtggagatgggcctggtttctttgttactagaagttaccatagactcagaaaggagcacaagtgagagagcattaggtgtttttgatagactttgtgattgtgaagaaggaagagaagaggcctacaggaatgctctaacatgtccagtcttggtgaagaaaatcttgagggtatcagaattggcaacgcagtcttcagtttctgccatttggaagcttagcaagtatggaaagaaacatgaagagaacgtcctggttgaggctcttcaagtaggtttatttcagaagctagtgttgctcttacagcttggttgtggagatgagacaaaggagaagacaacagaacttctgaaactgatgagtccttacagagatggattggaatgcattgactcagtagatttcaaaaatctaaaacggtcattttga

SEQ ID NO: 12459 - protein, 424 aa, Populus trichocarpa
MSIQELVIPNQFLCPISLDLMKDPVTLSSGITYDRESIETWLEGGNFTCPVTNQVLRSFDQIPNHSLRKMIQDWGVANRNYGVDRIPTPRVPVLGAQVSEVLFSLEDSTKRLNGAGCLELVQKIKKWGNESERNRRCIVANGALSVFAAAFDSFARDSFERNANVLEEILSAMNWMFPIFQHSLDAEARAHLGSQDSLRCLVWFLKSGDLSVKQDSMIALREIVSLDQKQVEALAAIEEVYEVLFRFIKDPVCPAITKASLMVIFYLVSSPSSTSIKTRSALVEMGLVSLLLEVTIDSERSTSERALGVFDRLCDCEEGREEAYRNALTCPVLVKKILRVSELATQSSVSAIWKLSKYGKKHEENVLVEALQVGLFQKLVLLLQLGCGDETKEKTTELLKLMSPYRDGLECIDSVDFKNLKRSF

SEQ ID NO: 12460 - DNA, 1236 bp, Populus trichocarpa
  CDS (1)..(1236)
atggatggttctgatcatcatattgtgccatctttctttatctgcccaatatctcttcaaattatgaaagatccagttactatatccacaggtatgacctttgatcgagaaagcatacagaaatggcttttctcttataaaaacatcgcttgtcctattacaaaacaacccctctctgatttccgtctcaccccaaactctaatcttcttcgcttgatccaatcatggcacttgcaacacgcatcatcatcaacaacaaagtttgcggagcctaatcatgatgccttgatgaaagtgcttcttgaggagatcaagcaaccccatttacaggtaaaatctctcagaaagatcaagtcattaatccaagagaatcatggtgataatagcaggattagttgcattagagatgatagtttattttcccttgcagtatctcttgtagtacaaactgagttaccagggattccacagattactggtaatgacactccggtgatcgctgaagcggtgtctttgttatgtcttttatgtccatctgatgaggcattaaagatggtttcacaaaatgaaaatggcctattaatctgttcactatgttcaattatgacacagtatctgagcaatctacagcttagaattcaagctgctcttgtcctgaagtccatattcgaagtggtagatgacatgtacaaggaaggacttaaatttgagttctttgagaatatcattgagatattaaaggaccaaaattcaaaacatggaagcatggcagttttagctattttaataagagttttatcatatgggaagaataaagagaaagctattaagggaggatgcattccgatcctgatcgagttgctagctgaggaaaatgagaggcatgtctgcgagatgatgttagtcgttctagaaaaactgtgccagaaagcagaagggcgggcggcctttttgtcacatccagcaggcatggcagctgtggtatcaaagatcttgaaggtttcccatgttggagatgataaatcaataagtttgctgtcatgtgtcttaagattttgtactagcagtggtgaggctgctcaagaatttatggaggtgggtggaatgactaagatttgcttggtgatacaaagtggaagcaattcaaaaaccaaggaaaaggccagggaaattttagggtttcacttcaaaacatggaacaagtctccttgtttcccttcttcattcaaagcttga

SEQ ID NO: 12461 - protein, 411 aa, Populus trichocarpa
MDGSDHHIVPSFFICPISLQIMKDPVTISTGMTFDRESIQKWLFSYKNIACPITKQPLSDFRLTPNSNLLRLIQSWHLQHASSSTTKFAEPNHDALMKVLLEEIKQPHLQVKSLRKIKSLIQENHGDNSRISCIRDDSLFSLAVSLVVQTELPGIPQITGNDTPVIAEAVSLLCLLCPSDEALKMVSQNENGLLICSLCSIMTQYLSNLQLRIQAALVLKSIFEVVDDMYKEGLKFEFFENIIEILKDQNSKHGSMAVLAILIRVLSYGKNKEKAIKGGCIPILIELLAEENERHVCEMMLVVLEKLCQKAEGRAAFLSHPAGMAAVVSKILKVSHVGDDKSISLLSCVLRFCTSSGEAAQEFMEVGGMTKICLVIQSGSNSKTKEKAREILGFHFKTWNKSPCFPSSFKA

SEQ ID NO: 12462 - DNA, 1239 bp, Populus trichocarpa
  CDS (1)..(1239)
atggaagatattgaagtcccttcattttttctctgccctatttctctccaaatcatgaaagacccggttatagtcccaactgggataacttatgatcgtgagagcattgagaaatggctgttttcaagcaagaatgatacctgtccagtcacaaaacaagtgatatcaggttgtgaggtgacaccaaaccatactcttaggaggttgattcaatcttggtgcaccctcaatgcgtcatatggtgttgaaagaatcccaactccaaagcctccaattagcaaagcacagattgccaagcttctcaatgatgctaaatcgccggagcaacaggttacgtgtctaaggaagctacgttccttcgctaacgagaatgaaacaaacaaaagatgcatggaggctgcaggtgctgtagagttcttggtctcaatgctaaataacttccattctttatcatttgaagtaacttcagatgatgggtttgagatctcaagaccaagtgatgaggccttgagtattctctacggtctacaaatatcagaatctggcctaaagaatcttgttatgggaagaaatggtgaattcattgagaccttaacgaaagttatgcaaggcggaaactatgagtctcgagcttatgcggtcttcttgttgaaatcgatgcttgaagttgctgatacactgaaactcatcagtttgaaacatgaactcttcgacgaaatagtccaagttttacgtgatcaaatatctcaccaagcatcaaaagctacattgcaactgctaataagtctttgtccatggggaagaaacagaatcaaagccattgaagctaaggcagtcccggttctgattgatcttctacttgattcaccagagaaaagaacctgcgagatggtgctaatggtgctggacctgctatgccagtgtgcagaaggaagagctgaattgttagggcacggtgcaggcctagctattgtttcaaagaagatacttagggtttctcaggtggcaagcgagagggcagtgaggatcatcttgtctatctcaaagtactcaataactactagtgttcttcaagagatgttgcagattggcatcgtggccaagctatgtttggtgcttcaagtggattgcggaagcaagatcaaagacaaggcaagagaggtgcttaaaatgcaagctagagtttggaagagttctccttgcataccagcaaatctgctctcttcatatccagaatga

SEQ ID NO: 12463 - protein, 412 aa, Populus trichocarpa
MEDIEVPSFFLCPISLQIMKDPVIVPTGITYDRESIEKWLFSSKNDTCPVTKQVISGCEVTPNHTLRRLIQSWCTLNASYGVERIPTPKPPISKAQIAKLLNDAKSPEQQVTCLRKLRSFANENETNKRCMEAAGAVEFLVSMLNNFHSLSFEVTSDDGFEISRPSDEALSILYGLQISESGLKNLVMGRNGEFIETLTKVMQGGNYESRAYAVFLLKSMLEVADTLKLISLKHELFDEIVQVLRDQISHQASKATLQLLISLCPWGRNRIKAIEAKAVPVLIDLLLDSPEKRTCEMVLMVLDLLCQCAEGRAELLGHGAGLAIVSKKILRVSQVASERAVRIILSISKYSITTSVLQEMLQIGIVAKLCLVLQVDCGSKIKDKAREVLKMQARVWKSSPCIPANLLSSYPE

SEQ ID NO: 12464 - DNA, 1227 bp, Populus trichocarpa
  CDS (1)..(1227)
atggatgatattgaagttccaagattttttatctgcccaatctatctccaaatcatgaaagacccagttacaaccataactggcatcacatatgatcgagaaagcatcgagcgttggctattcactagtgaaaacactacatgtccagttaccaaacagtccttgccaaaggactcagatttaacccctaaccacaccttacgcagattaatccaagcttggtgcactgagaatgcatcacatggtgttgatcgaatccccacccctaagccctgccttgacaaagcctatgtccttaaactcataaaaaacctttcccatcataagttgcaaatcgaagctcttacacaaatggaagtacttgcagcggagaatgaaaggaacaggaagtgcatggttgatgctggcttgcccaaggccttgttagtgttcatcgtatcgtgtttcgagaatggtcaagtttctggtattcaagaagctctcagtatattacgtttaattaaaattccccgaagtgaatcgagggtgtttctttgtgaaaatggtaagattatcgaatccttgacgtggcttttagggtacaaaatggataattatgccactgttaaatcccatgcagtttcagtgttgagaatactccttgaagatgcgagttctagtgtgctaaagaggcttaaacctgaattctttgagaggattgttggtgttttgagagagaaaatcacccagcaaggtattaaagatgccttggaagtgctgttagatgcttgcccttgggcaggaaatcggaaaatgatggttgaatctggtgcagtttttgagctcatagagcttgaattgggatctcctgaaaggagaaccacagagctcaatttgggtgtattgtttcatttatgttgttgtgctgagggaagagcacaattcctaagtcatggaggcagcattgctgtggttgcaaagagaatcttaagggtgtccccagaagtcaatgatcgggccattctgatcctttcattgatatgcaaattctcaggaacaagcatggtgatccaagaaatggtggatgttaaagctgtgccaaagctgtttatgttgcttcaagctgattgtgcaccatatttgaaggacaaagctagggaaatccttagatcacatttcgatgagtggaagaactttccttgcattttttcttccctctcaagtcttgagtacaaggtatctaggtga

SEQ ID NO: 12465 - protein, 408 aa, Populus trichocarpa
MDDIEVPRFFICPIYLQIMKDPVTTITGITYDRESIERWLFTSENTTCPVTKQSLPKDSDLTPNHTLRRLIQAWCTENASHGVDRIPTPKPCLDKAYVLKLIKNLSHHKLQIEALTQMEVLAAENERNRKCMVDAGLPKALLVFIVSCFENGQVSGIQEALSILRLIKIPRSESRVFLCENGKIIESLTWLLGYKMDNYATVKSHAVSVLRILLEDASSSVLKRLKPEFFERIVGVLREKITQQGIKDALEVLLDACPWAGNRKMMVESGAVFELIELELGSPERRTTELNLGVLFHLCCCAEGRAQFLSHGGSIAVVAKRILRVSPEVNDRAILILSLICKFSGTSMVIQEMVDVKAVPKLFMLLQADCAPYLKDKAREILRSHFDEWKNFPCIFSSLSSLEYKVSR

SEQ ID NO: 12466 - DNA, 1320 bp, Populus trichocarpa
  CDS (1)..(1320)
atggtttttagctggaaaaggaagagagctgctcaggaaaagctgaagaaaggcgaggagttggtgataccaaaacactttctttgcccaatatctctagatcttatgaaagatccggtgacattgtcttctgggataacgtatgatcgggagagcattgaagcgtggcttgaaggtgggagttttacgtgcccggcgacaaatcaagtgctaaggagtttggatcagattcctaatcatagtcttaggagaatgattcaagattggggtgtggcgaatcggaactacggcgtcgaacgaatcccaacacctagagttccggtttcggggattcaggtctcggaggttcttcttagtttggaggattcagtgaagagtttgaatggactacggtgcctagagttggtgcacaaaatcaagaagtggggcagtgaaagcgagcgtaataggcgttgtgtcgtagcgaatggagcaattcgtgtgcttgcagctgcatttgaagcgtttgcgatggattcttttgaaagcaatgctactttgttggaggagatattatccaacatgaattggatgtttccttttttccaacattcacttgatacggaagcacaagcacgtttaggatcgcaagattctttacgctgcttggtgtggttcttgaaatgtagagatctttcggcgaagcaagactccatgattgcattgaaagaacttgcttcttcagaccaaaagcatgcagaagcactggcaaccattgaagaggtgaatgaagtgctatttaggttcattaaggaaccaatttgccctacaatcaccaaagcttctcttatggtaatattctatctactctcatctcctccctccactagcacaaagatcaaatcagaattcgtcaagatgggcctggtctctttgttattagaagttactgtagactcagaaaagagcacaagtgagacagcattaggtgtctttgacatactttgtgattgtgaagaaggtaaagaagaggcctctaggaatgctttaacatgtccagtcttggtgaagaaaatcttaagggtatcagaattggcaacccaattctcagtctccgccatttggaagcttagcaagcatgaaaaggaacacgaagtgaatgtcctggttgaggctcttcaagtaggtatatttcagaagctagtgttgctcttacagtttggctgtggaggtgagaccaaagagaaggcgacagaacttttgaaactgatgaatccttacagagctggattggaatgcattgactcagtagatttcaaaaatgtaaaacggtcattctga

SEQ ID NO: 12467 - protein, 439 aa, Populus trichocarpa
MVFSWKRKRAAQEKLKKGEELVIPKHFLCPISLDLMKDPVTLSSGITYDRESIEAWLEGGSFTCPATNQVLRSLDQIPNHSLRRMIQDWGVANRNYGVERIPTPRVPVSGIQVSEVLLSLEDSVKSLNGLRCLELVHKIKKWGSESERNRRCVVANGAIRVLAAAFEAFAMDSFESNATLLEEILSNMNWMFPFFQHSLDTEAQARLGSQDSLRCLVWFLKCRDLSAKQDSMIALKELASSDQKHAEALATIEEVNEVLFRFIKEPICPTITKASLMVIFYLLSSPPSTSTKIKSEFVKMGLVSLLLEVTVDSEKSTSETALGVFDILCDCEEGKEEASRNALTCPVLVKKILRVSELATQFSVSAIWKLSKHEKEHEVNVLVEALQVGIFQKLVLLLQFGCGGETKEKATELLKLMNPYRAGLECIDSVDFKNVKRSF

SEQ ID NO: 12468 - DNA, 1242 bp, Populus trichocarpa
  CDS (1)..(1242)
atgcctcgaagtctagaaccgttagatttgaccgttcagattccataccattttcggtgtccgatctcccttgaactaatgtgtgacccggtcaccgttaatacaggccaaacttacgatcgttctagcatcgaatcatgggtggctaccggtaatactacctgtccggttacccgagccctactcaccgacttcactttaatcccaaaccacactcttcgccgtttgattcaagactggtgcgtggcaaatcgcgccttcggcgtggaacgaataccaactcccaaacagccagccgaaccgagcttagttcgttctttattaagccaagctgcttccgagtcaaacccaactcactctcgcctctctgctctccgtcgactcagaggactcgctcgtgattcggacaagaaccgttctctcatttcttcgcataacgttcgcgaaatcctggtcaatctcgtgttttcaagcagtcaatcattagagttgagccacgagtcactcgcgatcctggttatgtttccactcaccgagttcgactgtgtggcaatagcttcagaccccgagcggatcagttgtttagcaaatttactatttcattcatcaatcgaagtccgagtcaactcggctgcactcatcgagaatgttattgcgggaacaagatcgtcagatcttcggcttcaaattagtaacatggagattatcttcgaaggagtaatagatatcttgaaaaatcctctatcgtctcctcgagcgcttaaaattgggataaaagggctcttcgctttatgtctagttaaacaaactagacataaagcggtgtccgccggagcggcggagacattaatcgacaggctggcagatcttgataaatgtgatgcagaaagagcccttgctacaatagaattgctttgcagaatacaagttggttgcgcagcattcgtagcgcacgcgctgactgttccgttgttagttaagactattctgaagatatcggatagagcgacggagtacgcggcgggagcgttgctggcgctgtgttcagcgtcggagcagagtcaaaaggaggcagtttgcgcaggaatactgacgcagctgctgttgctagtacagagtgattgtactgatagagctaagaggaaggcacagatgttgttgaagttgttaagggattcatggcctgaggattctgcagggaattctgatgattttgtctgcagtgaggtggtgcctttttga

SEQ ID NO: 12469 - protein, 413 aa, Populus trichocarpa
MPRSLEPLDLTVQIPYHFRCPISLELMCDPVTVNTGQTYDRSSIESWVATGNTTCPVTRALLTDFTLIPNHTLRRLIQDWCVANRAFGVERIPTPKQPAEPSLVRSLLSQAASESNPTHSRLSALRRLRGLARDSDKNRSLISSHNVREILVNLVFSSSQSLELSHESLAILVMFPLTEFDCVAIASDPERISCLANLLFHSSIEVRVNSAALIENVIAGTRSSDLRLQISNMEIIFEGVIDILKNPLSSPRALKIGIKGLFALCLVKQTRHKAVSAGAAETLIDRLADLDKCDAERALATIELLCRIQVGCAAFVAHALTVPLLVKTILKISDRATEYAAGALLALCSASEQSQKEAVCAGILTQLLLLVQSDCTDRAKRKAQMLLKLLRDSWPEDSAGNSDDFVCSEVVPF

SEQ ID NO: 12470 - DNA, 1242 bp, Populus trichocarpa
  CDS (1)..(1242)
atggaagatattgaagtcccttcattttttctctgccctatttctctccagatcatgaaagacccggttatagtcccaaccgggataacttatgatcgcgagagcatcgaaaaatggttgttttcaggcaagaatgatacatgtccaattacaaaacttgtgatatcaggttgcgaggtgacaccaaaccacactcttaggaggttgatccagtcttggtgcactctcaatgcttcttacggtattgaaagaatcccaactccaaagcctccaatcaacaaaacacaggttgccaagcttctcaatgatgctaagtcaccacagcaacaggttaagtgtataaggaagctacgttcaattgctaacgagaacgaaacaaacaaaagatgcatggaggctgcaggtgctgtggagttcttggtctcggtggtgaataacttcaattctttatcatttgaagaaacttcagatgatgggtttgagatagcaagaccaggtgatgaggccttgagtatcctctatggtctagaaatatccgaatccggtctaaagaatcttattatgggaataaatggtgaattgatcattgagaccttaacgaaagttatgcaaggtggaaactacgagtctcgagcttatgctgtcttgttgttgaaatcaatgcttgaagttgctgatccgctgaaactcatcagtttgaaacatgaactcttctccgaaatagttcaagttttacgtgatcaaatatctcacaaagcctcaaatgcttcattacaactactaatcaatctttgcccatggggaagaaacagaatcaaagccattgaagctaaggcagtctcggttttgattgatcttctacttgattcatcagagagaagaacctgtgagatggtgctaatggtgttggacttgctatgccaatgtgcagaagggagagctgaattgttaggacatggtgcaggcctagcagttgtttcaaagaagatacttagggtttctcaggtggcaagtgagagggcagtgaggattatcttgtctatctcaaagtactcgacaacaaccagtgtccttcaagagatgttgcagattggaatcgtggccaagctatgtttggtgcttcaagtggattgcggaagcaagaccaaagacaaggccagagaggtgcttaaaattcatgcgagagtttggaagagttctcgttgcataccagcaaatctactttcttcatatccagcctaa

SEQ ID NO: 12471 - protein, 413 aa, Populus trichocarpa
MEDIEVPSFFLCPISLQIMKDPVIVPTGITYDRESIEKWLFSGKNDTCPITKLVISGCEVTPNHTLRRLIQSWCTLNASYGIERIPTPKPPINKTQVAKLLNDAKSPQQQVKCIRKLRSIANENETNKRCMEAAGAVEFLVSVVNNFNSLSFEETSDDGFEIARPGDEALSILYGLEISESGLKNLIMGINGELIIETLTKVMQGGNYESRAYAVLLLKSMLEVADPLKLISLKHELFSEIVQVLRDQISHKASNASLQLLINLCPWGRNRIKAIEAKAVSVLIDLLLDSSERRTCEMVLMVLDLLCQCAEGRAELLGHGAGLAVVSKKILRVSQVASERAVRIILSISKYSTTTSVLQEMLQIGIVAKLCLVLQVDCGSKTKDKAREVLKIHARVWKSSRCIPANLLSSYPA

SEQ ID NO: 12472 - DNA, 1368 bp, Sorghum bicolor
  CDS (1)..(1368)
atgtcccgcgcagcgagggcggcgtccaggctggtgccggagatacccatgctgaggcggagcagcaagcagcagcagcaggcctccgcggcggcggaggaggagcaggaggtggcggtgccggcgcacttcgtgtgcccgatctctcttgacctgatgcgggacccggtgacggcgcccacggggatcacgtacgaccgggagagcgtggagggctggctggcgcgcgggaacgcccggtgccccgtcaccggccggcccctgcggctcgccgacctggtccccaaccacgccacgcgccggatgatccaggactggtgcgtcgccaaccgcgccagcggcgtccagcgggtgcccacgcccaaggtgccgctcgccgacgccgacgccgccgacgccgtcgcctcggtggccgccgcggccaggcgcggggacgtggccgcgtgcggggccgccgcggccagggccagggcgctggcgaaggagagcgaccgcaacaggcgctgcctcgcggcagccggcgccgcgcgtgcgctggccgccgcgttcgcgcgcctcgccagcgagcgcgtcgagggtgccgccgcggtctcctgcgcgctgggcgacgtcctggccgcgctcaccgtgttcttcccgctcgacgacgaggcccgccgctgcattgcctccccgtcgtcgctcaagtccctcgtctccgtcatgtcccacggcgagctccaggcgcgggccagcgccgccgtcgtgctccgcgagctcgcgtcgtcgtcgtcggccgtcgacgggcacacgctcgaggccgtccagaggaccccaggcatgttggacgcgctcgtggacctcgtccggagccccatctccacgtcggccaccaaggccgcgctcgtcacggcctactacctcgtcgccgcctccgaccgcgcggcggcgcgcttcgcggagctcggcgcggtggcggtgctcgtggaggccctcgtcgacgccgacaagggcacgagcgagaaggcgctggccgcgctcgacggcgtcctgtgcgccgacgccggcctcgcggccgcgcgcgcgcacgcgctggccgtgcccgtgctcgtcaagaagatgttccgcgtgtccgacatggccacggacttcgccgtctccgcgctctggcgcctctgccgcgcgggcgacgccgctggcgccgccgcgtgccgcgccgaggcggtccgcgtcggagcgttccagaagctgctgctgctgctccaggtcggctgcggcggcgtcaccaaggagcgcgccagcgagctgctcaagatgctcaacggctccagaggcagcgtcgagtgcatcgagaccgtcgacttcaagggactcaagaggccattttga

SEQ ID NO: 12473 - protein, 455 aa, Sorghum bicolor
MSRAARAASRLVPEIPMLRRSSKQQQQASAAAEEEQEVAVPAHFVCPISLDLMRDPVTAPTGITYDRESVEGWLARGNARCPVTGRPLRLADLVPNHATRRMIQDWCVANRASGVQRVPTPKVPLADADAADAVASVAAAARRGDVAACGAAAARARALAKESDRNRRCLAAAGAARALAAAFARLASERVEGAAAVSCALGDVLAALTVFFPLDDEARRCIASPSSLKSLVSVMSHGELQARASAAVVLRELASSSSAVDGHTLEAVQRTPGMLDALVDLVRSPISTSATKAALVTAYYLVAASDRAAARFAELGAVAVLVEALVDADKGTSEKALAALDGVLCADAGLAAARAHALAVPVLVKKMFRVSDMATDFAVSALWRLCRAGDAAGAAACRAEAVRVGAFQKLLLLLQVGCGGVTKERASELLKMLNGSRGSVECIETVDFKGLKRPF

SEQ ID NO: 12474 - DNA, 1239 bp, Sorghum bicolor
  CDS (1)..(1239)
atggccatggaggagccgcctcagctgttcttgtgtcccatctccatggagctgatggaggaccccgtcacggtgtccaccggcgtcacctacgatcgccgtagcatagagcggtggttcttcaagtacggcaagacgacgtgcccggccaccatgcagcggctgaattccttcgacctcacgcccaaccacactctgaagcgcgtcatctccacctggcttgaccgcgcctcctcctcgtcgtcgagcacgccgctgtgtactaagctggcgcgggaaaagctaccgtcggtgctcgccggcattgaggccacgccgttcaaggtcaccgcgctcaagaacctcaggcgctgcatggatgaagacgtggcagcgcagcaggacttcgtcgcctacggcggcattcaggtgctcggccgcgtcatgacacaggcgctggcggagagctgcgccggtgtagatttctcggcgttccggacgtgcgaggaggccggcgccgtcctcgccacgctccctctctccgacgacgcgtcggtggagctcgtgctcaaaccggagtgcatgaagcccgtggtcgcggtggtgcagcgcggcagcgccgattcgaggctgcacgctatggccatcctcgccaagatctccggtgccagcggcgccgaccgcgactggacccctggtgtggacgtcgacgacctggtcaagtccctcctcgagctcctgtccgacggtgcctcagcgaagttgagctcccgcgcgctcgacgtgctcctcgacgtcacagcgcgctcccgcggcgctcggcgcgccaaggccgtggaggtgggcgccgtctgcgtgctcgtggagctcctccccgacgccgaccgccgcgtcgccgagcgcgcgctcctcctgctcaagcgcctgtgcaagtgccccgagggccggctcgccttcgcggagcacgcgctggcggtgtcggccgtggcgcggacgatgctgcgcgtgtcggtcctcgccagcaggctggccgtgagcgtgctgtggctggtggcgtgctcggcgacgcccgcggagagggtgctggatgacatgctggtgagcggcggcgtggggaagctgctggcgctcctgcaggtggagaactccgcgtcgaccaaggagaaggcggcgaagctcctcagggtgcacggcccattctggaggcagtacccgtgcttccccacagacctcagggactacctgaaattcctcaactga

SEQ ID NO: 12475 - protein, 412 aa, Sorghum bicolor
MAMEEPPQLFLCPISMELMEDPVTVSTGVTYDRRSIERWFFKYGKTTCPATMQRLNSFDLTPNHTLKRVISTWLDRASSSSSSTPLCTKLAREKLPSVLAGIEATPFKVTALKNLRRCMDEDVAAQQDFVAYGGIQVLGRVMTQALAESCAGVDFSAFRTCEEAGAVLATLPLSDDASVELVLKPECMKPVVAVVQRGSADSRLHAMAILAKISGASGADRDWTPGVDVDDLVKSLLELLSDGASAKLSSRALDVLLDVTARSRGARRAKAVEVGAVCVLVELLPDADRRVAERALLLLKRLCKCPEGRLAFAEHALAVSAVARTMLRVSVLASRLAVSVLWLVACSATPAERVLDDMLVSGGVGKLLALLQVENSASTKEKAAKLLRVHGPFWRQYPCFPTDLRDYLKFLN

SEQ ID NO: 12476 - DNA, 1206 bp, Sorghum bicolor
  CDS (1)..(1206)
atggagcggtcgccggcgccggctccggtggaggtgcccaagttcttcgtgtgcccgatctcgctggaggtcatgcgggacccggtgacgctgtcgtcggggatcacctacgaccgagacagcatcgagcgctgggtgttcaccgacgggcacggcgactgccccgtcaccaagctgccgctgggcgccgacgacctggagcccacgcccaaccacacgctccggcggctcatccagtcctggtgcgccgcgcacgccgtcgagcggttcccgaccccgcgcccgcccgtcgacgccgaccgcaaacacgccgctaccacgtcgtcgtcgtcgtccaagcctctcctcggcggatgcggatcccaatcccattcccaagaggaatcgacgtgcggtggcgtgccgggctcgcccaaggcgtgctcgccggaggaggcggctctgagcatcttgcattctctaaagctctcagaggcgagcctgaagagagtcctggacagcagcgacgacttcgtggacgccttggcgtccgtgctgcggcgctggccgagctaccgggcgcgcacgtacgcgatgcacctgctcaaggcggcgctgtcggccatgcagccctcgcggctgagctcgacggcgagcaccgagctggtcgagggcgtggtgaaggtggtggcggacaggacgctgtcgcccaaggccatcaaggtggcgctccacgtgctctgccggctctgcccgtggggccggaaccgcatcaaggccgtcgaggccggcgccgtggcggcgctcgtggagctgctcctcggcgacgggtgcggtgccggcggtggcaggagcaacggcaagcgggcgtgggagctcgcggcggttgccatcgaccatctctgcggctgcgcggaagggcggttggagctcgtggcccacccggcagggctggcggttgttgcgagagccgcgacgcggctgtccgccacggccaccgagagcgcggtgcgcgcgctgcacgcggtggccaggcactccgcgacccccgcggtgctgcaggagatgctcgccgtcggagtggtggcgaggctgctgtacctggtgcaggccggcgccgccggcgaccggccgagggagagggcgagggagatgctcaagatgcacgccagagtttggaggggctcgccgtgcttggcggcgcacatggcatcctacccttgctga

SEQ ID NO: 12477 - protein, 401 aa, Sorghum bicolor
MERSPAPAPVEVPKFFVCPISLEVMRDPVTLSSGITYDRDSIERWVFTDGHGDCPVTKLPLGADDLEPTPNHTLRRLIQSWCAAHAVERFPTPRPPVDADRKHAATTSSSSSKPLLGGCGSQSHSQEESTCGGVPGSPKACSPEEAALSILHSLKLSEASLKRVLDSSDDFVDALASVLRRWPSYRARTYAMHLLKAALSAMQPSRLSSTASTELVEGVVKVVADRTLSPKAIKVALHVLCRLCPWGRNRIKAVEAGAVAALVELLLGDGCGAGGGRSNGKRAWELAAVAIDHLCGCAEGRLELVAHPAGLAVVARAATRLSATATESAVRALHAVARHSATPAVLQEMLAVGVVARLLYLVQAGAAGDRPRERAREMLKMHARVWRGSPCLAAHMASYPC

SEQ ID NO: 12478 - DNA, 1281 bp, Sorghum bicolor
  CDS (1)..(1281)
atggaggaggagccgcagccgcaggtggaggtggaggtgccctgctacttcctgtgccccatctcgctgtccatcatgcgggaccccgtcacgctccccaccggcatcacctacgaccgcgacggcatcgagcgctggctcctcaccgccgccacctgcccgctcaccaagcagcccgtgccggcggactgcgaccccacgcccaaccacacgctgcgccgcctcatccagtcctggtgcgcgctccacgccgccgacggcgtcgatcgagtccacacgcccaagccccgcgccgacgtcgcagcgctggtctcgcggctccacgacgctgccgccgccgggtcaacggcgccgcagccacagctcctcgccgcgctgcgcgagctcagggacgtggcggccgagagcgaccgcaaccggaagctcgtcgccgccgtccccggcgcggtggacgtcctggccgcggtgttcgcggcgtccgccaacgccaagtcgtcggaaggcacagccgccgccgccgccgccgtccgcgacgaggcgctcgaggtcgtctcgtcgctccaggtcccggagcagtgcctgcgccgcgtcgcggagaccaacgaggcgctggtctcggcgctcgtctccgcgctgcagcgttccagcgccgcgtcgagggcgcgcgcggcgctgctcctggagcgcgtcacggccgcgctgccgcccagcaggctggcgtccctcccggagcaggtgttcagggaggcggtggagctgctccgcgacaggccggccgtctccaggcccgccaccaaggcggcgctgcacgtgctcgtgcgcacggcggcgtggggacgcaaccgcgtcaaggcggtggacgccggcgcggtgcccgtgctcgtcgacatgctcttcgacgacggggcggagcgccgcgcgtgcgagctcgtcctggcggcgctggaccgcctgtgcgggtgcgcggaggggcgcgccgacctggtggcgcacggcgcgggagtggcggccgtgggcaggaaggcgctgagggtgtcggaggtggccacggacaaggcggtgagggtgctgcggtcggtggcgaggcacgcggcgacggcggcggtggtgcaggagatggcgcatgccggcgtcgtggcgacgctgtgcgtggtggcgcagtcggagcagtacgccgagaggacgagggagcgggcgcgggagacgctccggctgcatgccagggcatggcggacctcgccgtgcttgcatcaccacctccaggccctgtacccttgctga

SEQ ID NO: 12479 - protein, 426 aa, Sorghum bicolor
MEEEPQPQVEVEVPCYFLCPISLSIMRDPVTLPTGITYDRDGIERWLLTAATCPLTKQPVPADCDPTPNHTLRRLIQSWCALHAADGVDRVHTPKPRADVAALVSRLHDAAAAGSTAPQPQLLAALRELRDVAAESDRNRKLVAAVPGAVDVLAAVFAASANAKSSEGTAAAAAAVRDEALEVVSSLQVPEQCLRRVAETNEALVSALVSALQRSSAASRARAALLLERVTAALPPSRLASLPEQVFREAVELLRDRPAVSRPATKAALHVLVRTAAWGRNRVKAVDAGAVPVLVDMLFDDGAERRACELVLAALDRLCGCAEGRADLVAHGAGVAAVGRKALRVSEVATDKAVRVLRSVARHAATAAVVQEMAHAGVVATLCVVAQSEQYAERTRERARETLRLHARAWRTSPCLHHHLQALYPC

SEQ ID NO: 12480 - DNA, 1389 bp, Sorghum bicolor
  CDS (1)..(1389)
atggtcacgccggtgtcccgctaccgccttcgcccgcggtcggtgcgtgtggcggtgtcggagatcccgctcgccacgaggcggacgaggcagccgccgcagctcgtgccgggggcggcggcggccgtggcgacggagccggcgattccgagcaatttcctgtgcccgatctcgctggagatgatgcgggaccccgtgacggcgccgacggggatcacgtacgaccgtgacagcgtggaggggtggctggagcgcggccactccacgtgccccgtcaccgcccgcccgctgcgcgcggaggacctcatcccgaaccacgccacccggcggatgatccaggagtggtgcgtcgccaaccgcgccctcggggtggagcgcgtgcccacgccccgcgtcccgctctccgccgccgccgcggccgatctcctggccgcggtgtccgccgcagcgcggcgaggggacgcgccggcgtgccgccagctggcggccagagccagggcgctagggaaggagagcgaccgcaaccgccggtgcctcgcggcggcgggagccgcccgcgcgctctcttcagcgttctcacagctcgttggccagcctgcgctggcgtcgttgttgaccgcgctcggcggcgcgctggacgagatcttggccgcgctggtcgtgttcttcccgctcggagaggagtccaggagccacattgcctccccggcgtcgctgaacgccgtcgtctcgatcctgtcccacggcgagacgaccgcgaaggccggcgccgccgtcgtgctccgcgagatcgcgtcgtcgtccgaccccgagtgcctcgacgccatgtccgagaccgacggaatacacgacgcgctcatcaagctcctgcagaggcccgtgtcggcgcaggccaccaaggccgcgatggtcaccgcctactacctcgtcacgaacagcggcctagcagccagccgcctggtcgacctcggcatggtggagctcctggtcgagctgctggtcgacgccgacaagggcacgacggagaaggcgctcgcggtgctggacagcctgctgctcacggaggaaggccgtgggaaggcgtgcgcgcacgcattggccgtgccggtgctggtcaagaagatgcagcacgtgtccgacatggcaaccgagttcgccgtgtcggcgctgtggcggctgtgcaagagcttctccggcgagggtccgtgcaaggccgaggcgctgcagttgggcgcgttccagaagctcctcctcctgctgcaggtcggctgcatgggcgtgaccaaggagagggctagcgagctgctcaggctcctgaatgcatcgagagatggtgtcgaatgcattgagacggtggatttcaaggggctcaagagacccttctcatga

SEQ ID NO: 12481 - protein, 462 aa, Sorghum bicolor
MVTPVSRYRLRPRSVRVAVSEIPLATRRTRQPPQLVPGAAAAVATEPAIPSNFLCPISLEMMRDPVTAPTGITYDRDSVEGWLERGHSTCPVTARPLRAEDLIPNHATRRMIQEWCVANRALGVERVPTPRVPLSAAAAADLLAAVSAAARRGDAPACRQLAARARALGKESDRNRRCLAAAGAARALSSAFSQLVGQPALASLLTALGGALDEILAALVVFFPLGEESRSHIASPASLNAVVSILSHGETTAKAGAAVVLREIASSSDPECLDAMSETDGIHDALIKLLQRPVSAQATKAAMVTAYYLVTNSGLAASRLVDLGMVELLVELLVDADKGTTEKALAVLDSLLLTEEGRGKACAHALAVPVLVKKMQHVSDMATEFAVSALWRLCKSFSGEGPCKAEALQLGAFQKLLLLLQVGCMGVTKERASELLRLLNASRDGVECIETVDFKGLKRPFS

SEQ ID NO: 12482 - DNA, 1257 bp, Sorghum bicolor
  CDS (1)..(1257)
atggaggtctcgtcgtcttcggcggcggcggaggtcccccattacttcctctgcccgatctcgctggaggtgatgcgcgacccggtcacgctcgccaccggcatcacctacgaccgcgccagcatcgagcgctggctcttcgccgacggccacgccacctgccccgtcacgcgccgcgcgctggcgcccgccgagatggacgccacgcccaaccacacgctgcgccgcctcatccaggcctggtgcgccgcgcaccaggtcgagcgcttccccacgccgcgcccgccgctcgactcgtgccgcgtcgccgcgctcctcgacgaaggacgccacggcggggaccgccaggcggccgccgcgctcagggagatcaaggccgtcgtcgccgagagcgagcgcaacaggcgctgcgtcgaggccacgccaggcgccgtcgacttcctcgcctcacttgtcgcgaagcactcatccaagcgcgccagcagccagcaagacgccgccgacgacttcctcgccggcggagacgcgctcggcgtcctctactcgctcaagccgtctgagcggagccttgcccagatcttggaacgggacggcgacttcctcgacacgctggcgtgcgtcctgcgccgcccgagctaccggtcgcgcgcctacggcatccttctcctcaaggcgatgacggcggtcatgacgccggcgcggctcacgacggtgagcgccgacctggtgcaggaggtggtgcgcgtggtctcggatcgggtgtcctccaaggctgtccgggcggcgctgcacgtgctgtgccgcctctgcccgtggggtcggaaccgcgtcaaggccgtcgaggccggcgccatggccgcgctggtcgagctgctcctcgacgcgggcggccgccgcgtcacggagctagccgtcgtggccatcgaccacctctgcggctgcgcggagggccggtcggagctggtcgcgcacccggcggggctggccgtcgtgtccaagaaggtcatgcgggtgtccacagccgccaccgagagcgccgtgcgcgcgctccacgccgtggccaggcactcgccgacgccctcagtgctgcaggagatgctcgccgtcggcgtggtggcaaaacttctgctggtgttgcaggtcaatgccggcgagagggctggtctcagggcaaaggagatactaaagacacacgctagggtttggaaggactcgccatgcctccaaacatacatgcgggattcttacccttgctga

SEQ ID NO: 12483 - protein, 418 aa, Sorghum bicolor
MEVSSSSAAAEVPHYFLCPISLEVMRDPVTLATGITYDRASIERWLFADGHATCPVTRRALAPAEMDATPNHTLRRLIQAWCAAHQVERFPTPRPPLDSCRVAALLDEGRHGGDRQAAAALREIKAVVAESERNRRCVEATPGAVDFLASLVAKHSSKRASSQQDAADDFLAGGDALGVLYSLKPSERSLAQILERDGDFLDTLACVLRRPSYRSRAYGILLLKAMTAVMTPARLTTVSADLVQEVVRVVSDRVSSKAVRAALHVLCRLCPWGRNRVKAVEAGAMAALVELLLDAGGRRVTELAVVAIDHLCGCAEGRSELVAHPAGLAVVSKKVMRVSTAATESAVRALHAVARHSPTPSVLQEMLAVGVVAKLLLVLQVNAGERAGLRAKEILKTHARVWKDSPCLQTYMRDSYPC

SEQ ID NO: 12484 - DNA, 1275 bp, Sorghum bicolor
  CDS (1)..(1275)
atggaggtctcgtcgtcctcggcggcggcggaggtcccccactattttctctgcccgatctcgctggaggtgatgcgtgacccggtcacgctcgccaccggcatcacctacgaccgcgccagcatcgagcgctggctcttcgccgacggccacgccacctgccccgtcacgcgccgcgcgctggcgcccgccgagatggacgccacgcccaaccacacgctgcgccgcctcatccaggcctggtgcgccgcgcaccaggtcgagcgcttccccacgccgcgcccgccgctcgactcgtgccgcgtcgccgcgctcctcgacgaaggacgacacggcggggaccgccaggcggcagccgcgctcagggagatcaaggccgtcgtcgcagagagcgagcgcaacaggcgctgcgtcgaggccacgccaggcgccgtcgacttcctcgcctcacttgtcgcgaagcactcatccaagcgcgccagcagccagcaagacgccgcagacgacttcgtgctggattctccgacctccacgagctcgccggcggaggacgcgctcggcgtcctctactcgctgaagccgtctgagcggagccttgcccagatcttggaacgggacgccgacttcctcgacacgctggcgtgcgtcctgcgccgcccgagctaccggtcgcgcgcctacggcatccttctcctcaaggcgataacggcggtcatgacgccggcgcggctcatgacggtgagcgccgacctggtgcaggaggtggtgcgcgtggtctcggatcgggtgtcctccaaggctgtacgggcggcgctgcacgtgctgtgccgcctctgcccctggggccggaaccgcgtcaaggccgtcgaggccggcgccgtggccacgctggtcgagctgctcctcgacgagggtggccgccgcgtcaccgagctagccgtcgtggccatcgaccacctctgcggctgcgcggagggccggtcggagctggtcgcgcacccggcggggctggccgtcgtgtccaagaaggtcatgcgggtgtccgtagtcgccaccgagagcgccgtgcgcgcgctccacgccgtggccaggcattcgccgacgccctccgtgctgcaggatatgctcgccgtcggtgtggtggcaaaactgctgctagtgctgcaggtcaatgccggcgatagggccggtatcagggcaaaggacatgctaaagacacacgctagggtttggaaggactcgccatgcctccaaagggattcttacccttgctga

SEQ ID NO: 12485 - protein, 424 aa, Sorghum bicolor
MEVSSSSAAAEVPHYFLCPISLEVMRDPVTLATGITYDRASIERWLFADGHATCPVTRRALAPAEMDATPNHTLRRLIQAWCAAHQVERFPTPRPPLDSCRVAALLDEGRHGGDRQAAAALREIKAVVAESERNRRCVEATPGAVDFLASLVAKHSSKRASSQQDAADDFVLDSPTSTSSPAEDALGVLYSLKPSERSLAQILERDADFLDTLACVLRRPSYRSRAYGILLLKAITAVMTPARLMTVSADLVQEVVRVVSDRVSSKAVRAALHVLCRLCPWGRNRVKAVEAGAVATLVELLLDEGGRRVTELAVVAIDHLCGCAEGRSELVAHPAGLAVVSKKVMRVSVVATESAVRALHAVARHSPTPSVLQDMLAVGVVAKLLLVLQVNAGDRAGIRAKDMLKTHARVWKDSPCLQRDSYPC

SEQ ID NO: 12486 - DNA, 1224 bp, Sorghum bicolor
  CDS (1)..(1224)
atgccggggagcgtgccgctgggtctgggcctggacacggcgggggtgcaggtgccgtggtacttccggtgccccatctccctggagctgatgcgcgacccggtgacggtgtcgacggggcagacctacgaccgcgccagcatcgagtcgtgggtggccaccggcaacaccacctgccccgtcacccgcgcgccgctcgccgacttcacgctcatccccaaccacaccctccgccggctcatccaggagtggtgcgtcgcgcaccgctccatgggcgtggagcgcatcccgacgccgaagcagcccgcggacccggacctggtgcgctccctcgtcgcgcagggcccgggactccccgcgctgcggaggctcagggcgctcgccagggagtccgacaagaacaggctcgtcatggccacgcacgagaccagggccgcgctggtggaggccgccttcggctccggggccgaggaggtccaggccgaggccatggcggtgctcgcgctggtggggctcggcgaggcggaggccgcggcggtggtcgggagggaggagagggtggccaggctcggcaaggtcctcgccgccggcgtcggcgtcccgctggaggcgcgggtgaacgcgggcgccgtggcggaggccgcggcgtcggcgtcgggcgcggaggcccgcgccgtgctgggcgccgccgagggcgtcatggacggcctggtggcgctggtggaggagaaggccaacgcccgcgccgtgcgcgtcgggatccgggcgctgttcgcgctgtgcctggccaaggagaaccgcccgcgcgcggtggcggcgggcgccgcgtcggcgctggcgcggcgcgtggcggagggaggcgccggtgagcccgagcgcgcgctggcggccgtggagcggctgtgccgcgccgagggcgggcgcgacgccgtggtggccggggccggtggcgggtccgcggccgtgacggcgctggtgcgcgccatgtccggacgcgcggcggagcacgcggcgggcgcgctggtggccgtggtgggcggctccgaggcgctgcaggtggaggcggtccgggccggcgccatgagccagctgctgctgatggtgcagggcgggtgctcggagcgcgccaagcgcaaggcgcagcacctgctgaagctgctccgctccgcctggcccaacaccgactgcatcgccaactccgacgacttcctccaacactactga

SEQ ID NO: 12487 - protein, 407 aa, Sorghum bicolor
MPGSVPLGLGLDTAGVQVPWYFRCPISLELMRDPVTVSTGQTYDRASIESWVATGNTTCPVTRAPLADFTLIPNHTLRRLIQEWCVAHRSMGVERIPTPKQPADPDLVRSLVAQGPGLPALRRLRALARESDKNRLVMATHETRAALVEAAFGSGAEEVQAEAMAVLALVGLGEAEAAAVVGREERVARLGKVLAAGVGVPLEARVNAGAVAEAAASASGAEARAVLGAAEGVMDGLVALVEEKANARAVRVGIRALFALCLAKENRPRAVAAGAASALARRVAEGGAGEPERALAAVERLCRAEGGRDAVVAGAGGGSAAVTALVRAMSGRAAEHAAGALVAVVGGSEALQVEAVRAGAMSQLLLMVQGGCSERAKRKAQHLLKLLRSAWPNTDCIANSDDFLQHY

SEQ ID NO: 12488 - DNA, 1290 bp, Sorghum bicolor
  CDS (1)..(1290)
atggaggagcctccccacctgttcctgtgccccatctccatggagctcatggacgaccccgtcaccgtctccacgggggtcacctacgaccgccgcagcatcgagcggtggatcttcgggtgcggcagggccacctgtccggccaccatgcagccgctcgccaaccttgagctcaccccgaaccacaccctcaagcgcgtcatcggctcctggctcgacgaccgcggccgcgggtcgacgtcgacgtcggcgtcgtcgtcgccgtccacgtcgtcactgtcgagcccggcccacgagctggccacgccgctgtcgcgggtcctggaggcggagcggctgcgttcggcgctggccggcctcgaggagacgccgttcaaggtgacggcgctcaagggcatgcgggcatgcatggccggcgacgtggccatgcagtgcgagttcgtgtcctcgggcgggatccaggcggtcgcgcgggtcatggcgcaggcgctcgcggagagcggcgccggcggcgacttctccgcgttcacggcgtgcgaggaggccgccgcggtgctcgccgtcctcccgctcacggacgcggcgtcggtggggctccttctcgcgcctgagtgcatgcggccggtgatggcattgctccagcgcggcagcgccgaggcgaggctgcacgccatggacatcgttaccaagatctccaatgccggcgccggagactggaccgcctgcgtcgaggttgacgacgtgctcaagtccctcctcgagctcctggccgacgaggtctccatctcaacgaggctcagctcccgcgcgctcgacgtgctcctggacgtcgtggagcggtcccggatcggccccaccaaggccgtggaggtcggcgcggtgcacgtcctcgtcgagctcctcgcgaatgccgacgaccgccacgacgcagagcggatactgctgcttctcaagtgcctgtgcaagtgccccgagggccgcatggccttcgcggaacacgacctgtcggtggcggccgtagcgaagacgatgctgcgggtgtcggagctcgccaccgagctggccgtcaaggttctgtggctcgtctccgtggtggcgccctcggagaaggtcctagaggacatggtgctgaccggcgcagtggcgaagcttctgggcttgctgcacgtcgagagcccgccggcgacgaagcagaagacggtgcggatgatgaggatcaatggcgtgttctggcggcagtacccgtgtttccctactgatctcagggattacctgcggcttcttgactga

SEQ ID NO: 12489 - protein, 429 aa, Sorghum bicolor
MEEPPHLFLCPISMELMDDPVTVSTGVTYDRRSIERWIFGCGRATCPATMQPLANLELTPNHTLKRVIGSWLDDRGRGSTSTSASSSPSTSSLSSPAHELATPLSRVLEAERLRSALAGLEETPFKVTALKGMRACMAGDVAMQCEFVSSGGIQAVARVMAQALAESGAGGDFSAFTACEEAAAVLAVLPLTDAASVGLLLAPECMRPVMALLQRGSAEARLHAMDIVTKISNAGAGDWTACVEVDDVLKSLLELLADEVSISTRLSSRALDVLLDVVERSRIGPTKAVEVGAVHVLVELLANADDRHDAERILLLLKCLCKCPEGRMAFAEHDLSVAAVAKTMLRVSELATELAVKVLWLVSVVAPSEKVLEDMVLTGAVAKLLGLLHVESPPATKQKTVRMMRINGVFWRQYPCFPTDLRDYLRLLD

SEQ ID NO: 12490 - DNA, 1227 bp, Sorghum bicolor
  CDS (1)..(1227)
atggcgagcgcgcctgctggcgaggtgccgtcccacttcctctgccccatctcgctgcagctcatgcgggaacccgtcacgctgcccaccggcatctcctacgaccgcgccgctatctcccgctggctggccgcgcccgcgcccgccggcggccgcacatgcccggtcacgcgcgtgccgctcccgccgcagccccagctgacgcccaaccacaccctccgccgcctcatccacgcctggctcgcgtccctctcccccgaggcggaggtcgacgaggacgtggccgcgctgcggaggcccgtgccgggcgccgaggtggccgcgctgctgtcccacgccgccgcggcacaggttgaggcgctcaagaggctgcgggagctggtggccgagtgcgaggacaaccgggcggttctcgagtcccaggacggggtgttcgacgccttgtctcgcgtcgtcagcagtgccgacgcgtgctcgacggcgcgcgaggaggcggtcggggtgctcgcgtcgctgcggatcccggagccggagctggccgccgtcgtggccaggcacagcaacctgggggaggcactcacggccgtcctccgctcgtcgaacgtgaagtcgcgcgcgaacgccgctctgctcgttcggtccctctcggaagcggcctggccggcctgggtgatcgggctgagccaggagcttctcgccgaggttgtccgcgtggtccgcgaccgtgtctcgacgcaggcgaccaaggcagcgctgcacgccctcgccgcgctctgcccctacggccggacccgcgtcaagatcgtgggcgcgggctcggtgccggcgatcgtggacctcctgctcgacgaccccgagaggcgtgtcaacgaggtcgcgctcgtggcgctggaccggttgtgcacgtgcgccgagggtcgcgctgagctggtcgcgcacgcggcggggctggccgtggtgggcaagaaggtgctgagggtgtcggaggccgcgagcgagcgcgcggtgcgcgtgctgcgctccgtggcgcgccacgcggcgacgcctgccgtgctgcaggagatggcgcagtccggcgtcgtggccaagctctgcgcggcgctgcggtccgagcagtgcggggtgaggaccaaggagagggcgcatgaggtgctcaagctgcactccaggacctggaggagctcgccctgcctgtctccaaaatttttggagctctacccttcatga

SEQ ID NO: 12491 - protein, 408 aa, Sorghum bicolor
MASAPAGEVPSHFLCPISLQLMREPVTLPTGISYDRAAISRWLAAPAPAGGRTCPVTRVPLPPQPQLTPNHTLRRLIHAWLASLSPEAEVDEDVAALRRPVPGAEVAALLSHAAAAQVEALKRLRELVAECEDNRAVLESQDGVFDALSRVVSSADACSTAREEAVGVLASLRIPEPELAAVVARHSNLGEALTAVLRSSNVKSRANAALLVRSLSEAAWPAWVIGLSQELLAEVVRVVRDRVSTQATKAALHALAALCPYGRTRVKIVGAGSVPAIVDLLLDDPERRVNEVALVALDRLCTCAEGRAELVAHAAGLAVVGKKVLRVSEAASERAVRVLRSVARHAATPAVLQEMAQSGVVAKLCAALRSEQCGVRTKERAHEVLKLHSRTWRSSPCLSPKFLELYPS

SEQ ID NO: 12492 - DNA, 1365 bp, Sorghum bicolor
  CDS (1)..(1365)
atggctctgctggtgcggagggcacgcagggcggcgaccaaggccgcggtgtcgctcggcggcggcggcggcagcggcagcagcagcgtggagctcgcgatcccggcgcactaccggtgcccgatctcgctggatctcatgcgggaccccgtcacggcgccgacggggatcacgtacgaccgcgagagcatcgaggcgtggctggacacgggccgcgccacctgccccgtcacccacgcgccgctccgccacgaggacctcgtccccaaccacgccatccgccgcgtcatccaggactggtgcgtcgccaaccgctcccgcggcgtcgagcgcatccccacgcccaagatccccgtcacccccgtccaggcctccgagctcctcttcgacctcgcggggtgcgcgcgccgccgcgacgccgccgcgcccgcgcggtgcgccgaggtggtcgccaagatcaaggccctcgccagggacagcgagcggaacaggcgctgcttcgcgtccatcggcacgggccgcgtgctcgccgccgcgttcgagtcgctcgcttctgctgctgctgctgacgctgcgccggcggggcgcgtccttgaggacatcctcgcggcattggtctgcatgatgccgttggacgaggaggccgccaggacgctgggcttgccgagctcgctggggtctctggtcgccattgctgagaacgggaccttggcgggaaggctgaacgccgtgctggcgatcaaagaggtcgtctcatgcgacggagcgttcactgatctgagcggaaaggtcgacgagatcgtagacgcgctggcaaagatcatcaagtctccgatctgcccacaggcaaccaaggccggcatggtcgccacctatcacctggcgctatacgacgagcgcgtcgcggcgcgccttgccgccgccgggctcgtccccgtgctcatcgaggccctcgtagacgccgacaagagcatgtccgagaaggcactggctgtgctcgacgcggtgctcgcctcggaggaaggccgcgcaagcgcgcgggcgcacgcgctcgccgtgcccatgctcgtcaagaagatgttccgcgtgtccgacctggcgacccaactcgcggtgtcggcgatgtggcgccttggaaaggcgcacagcgacggcgaggaggaggagaatgcggtgacgcggtgccttgtcgaggcgctgcgggttggggcgttccagaaactgctcctgctcttgcaggtcggctgcagggacgcaaccaaggagaaggccaccgagctgctcaagttgctcaacaagtacaagagcgtaggcgaatgcgtcgacgctgtggatttcagagggctgaacaagctgtcatcttaa

SEQ ID NO: 12493 - protein, 454 aa, Sorghum bicolor
MALLVRRARRAATKAAVSLGGGGGSGSSSVELAIPAHYRCPISLDLMRDPVTAPTGITYDRESIEAWLDTGRATCPVTHAPLRHEDLVPNHAIRRVIQDWCVANRSRGVERIPTPKIPVTPVQASELLFDLAGCARRRDAAAPARCAEVVAKIKALARDSERNRRCFASIGTGRVLAAAFESLASAAAADAAPAGRVLEDILAALVCMMPLDEEAARTLGLPSSLGSLVAIAENGTLAGRLNAVLAIKEVVSCDGAFTDLSGKVDEIVDALAKIIKSPICPQATKAGMVATYHLALYDERVAARLAAAGLVPVLIEALVDADKSMSEKALAVLDAVLASEEGRASARAHALAVPMLVKKMFRVSDLATQLAVSAMWRLGKAHSDGEEEENAVTRCLVEALRVGAFQKLLLLLQVGCRDATKEKATELLKLLNKYKSVGECVDAVDFRGLNKLSS

SEQ ID NO: 12494 - DNA, 1398 bp, Sorghum bicolor
  CDS (1)..(1398)
atgtcgtcccagcagcagttgtggacggctcccgccaaggaggaggctccaccgccaccaccaccaccgccgccggagttcctgtgcccgatcacgctagacctgatgcaggaccctgtcgcggcgcccactggcatcacctacgaccgcgctgccatcgagacctggctgttttccggcggccagcgcacatgtccggtgacacacggcgacctcagcgcgggagacttcgtccccaaccacactctccgccgcctcatccaggactggtacgccaccaaccgttgctgcagcagcgtcgaccgggtccccgccacgcccgaggaggccgccgtcgccgagctggagggcgccacgcgcgcaggcgacgccgagcggtgcgctgccgcacgcgcgggtccggcactcgcctggcgggcggcggagcagaaccggcgccgcggcctcgagtccgccggcgcggcgcgcgctctcgccgcggcgttcacgttctttgcggccaccgccgacgatgctgcggccgctactgacgacgtcctcgacgtcgtgctggcagcgctggttctcgtgatgccgatggacgaggcggccatcctggccgtgggctcgtcgagcgcgtccgtggcgcggctggtcgccgtcgccgcgaacggcgacctgcacaggaggctgcaagccgtggtggtaatcagagagatcatctcgctctcagcttacagagatacgacgaccgatctgagcgcgaacgccgaggccatcgccgaggtgctggtgaagacgatcagagacggcatctgccagccggcaaccagggcgtgcctggtcacggcgtaccacctcgcgtgcaccggcggcgagagcgccgcggcgcgtctcgcggcggcgggggtcgtgacggtgctcgtggagctcctcgtggacgctgacaggagcacggccgagaaggctctggccgcgctcgacgcggcactggcggcgtccggcgacggcagagcgcgtgcccgtgccgacgcgctcgccatgcccgtgctggtgaagaaaatgttctgcgtgtccgacgcggccaccgcgctcgtcgtgtccgtgctgctgcgcatctgcaagaaatgcccgggagacggcgaggaatgcccgggagactgcgcatctgcatctgcaagaaatgcccgggagacggcaatggcggctaggcggcacgccatcgtggaggcgctgcagctgggcgcgctccagaaggtgctgttgcttctgcaggttggatgcagtggggaaaccaaggaaaatgccgctgaactgctgaggttgatggtcaggtaccagggcagagaggagtgctgcgtcgacgccatggatttgagagggatcaagagagacactactgcaattttgacaggatag

SEQ ID NO: 12495 - protein, 465 aa, Sorghum bicolor
MSSQQQLWTAPAKEEAPPPPPPPPPEFLCPITLDLMQDPVAAPTGITYDRAAIETWLFSGGQRTCPVTHGDLSAGDFVPNHTLRRLIQDWYATNRCCSSVDRVPATPEEAAVAELEGATRAGDAERCAAARAGPALAWRAAEQNRRRGLESAGAARALAAAFTFFAATADDAAAATDDVLDVVLAALVLVMPMDEAAILAVGSSSASVARLVAVAANGDLHRRLQAVVVIREIISLSAYRDTTTDLSANAEAIAEVLVKTIRDGICQPATRACLVTAYHLACTGGESAAARLAAAGVVTVLVELLVDADRSTAEKALAALDAALAASGDGRARARADALAMPVLVKKMFCVSDAATALVVSVLLRICKKCPGDGEECPGDCASASARNARETAMAARRHAIVEALQLGALQKVLLLLQVGCSGETKENAAELLRLMVRYQGREECCVDAMDLRGIKRDTTAILTG

SEQ ID NO: 12496 - DNA, 1245 bp, Ricinus communis
  CDS (1)..(1245)
atggaaatcgatattccttgccatttcctttgcccgatttctctgcaactaatgagagatccagttactgtctcaactgggatcacctacgatagagagaatatagagagatggttatttgcttgcaagaacaacacttgccctgtcacaaagcaagtcattttaaatgacgaggatctgaccccaaatcacactcttcgccgcttgatccaagcatggtgcacgctcaatgcctctcatggaatcgagcgaatcccaactccgaaaccaccaattgacaagacccagattgcagaacttctcaatgattgcaatacattcccacacctgcagctcaaatatctcagaaggattagatcgatcactcttgaaagtgaaaggaacagaagttttcttgaggctgccggtgcagttgatatcttggcttcaatagtagtgaatgataattctacttcggttgagatttctatagatgatgaccctgagtttacaagagcaagtgatgaggctttgagtattctttatcttctcaaaatctcagacagcaaattgaagaatctcatagccaaagatagaggtgtgtttgtggagtcattgatacagattctgaaacatagtaactatcaatcaagagcttattcaacaatgttgctgaagtccattttcgaagtggccgatccaatccagttgattactattagaccagaaatattgacagaagtagtgcatgtattgcgggatcagatctcacaacaaacatcaaaggctgcattgaagctgcttgtagaggtttgtccatggggaagaaatcgaatcaaagcagtagaaggcggtgcagttacagttctcatagagctactcctagaaacatcagacaggagatcatgtgagcttactctaataattttagatctgctttgtgggtgtgctgagggacgagcagagttcttgaagcatggagcagggcttgcaatcgtttcaaagaaaatacttagggtttctcatgtggcaagcgacagggctgtcagaattttgtgttcaatttgcaggttttctgcaactcccagagttcttcaggaaatgttgcaagttggtgtagtggcaaagctgtgtttggtgctgcaagtggatagtggttgcaagagtaaggagagagctagagagatcctcaggttgcattccagggtatggaagaattctccttgtgttcctgcttatttgatgtcttgctatccatcttcctga

SEQ ID NO: 12497 - protein, 414 aa, Ricinus communis
MEIDIPCHFLCPISLQLMRDPVTVSTGITYDRENIERWLFACKNNTCPVTKQVILNDEDLTPNHTLRRLIQAWCTLNASHGIERIPTPKPPIDKTQIAELLNDCNTFPHLQLKYLRRIRSITLESERNRSFLEAAGAVDILASIVVNDNSTSVEISIDDDPEFTRASDEALSILYLLKISDSKLKNLIAKDRGVFVESLIQILKHSNYQSRAYSTMLLKSIFEVADPIQLITIRPEILTEVVHVLRDQISQQTSKAALKLLVEVCPWGRNRIKAVEGGAVTVLIELLLETSDRRSCELTLIILDLLCGCAEGRAEFLKHGAGLAIVSKKILRVSHVASDRAVRILCSICRFSATPRVLQEMLQVGVVAKLCLVLQVDSGCKSKERAREILRLHSRVWKNSPCVPAYLMSCYPSS

SEQ ID NO: 12498 - DNA, 1263 bp, Ricinus communis
  CDS (1)..(1263)
atgcccggaagtttagagtctttagatttaagtgtacagataccttaccatttcagatgtccaatctccctcgaactcatgcgtgaccctgtcaccgttagcaccggtcaaacctacgaccgtgccagcatcgaatcatgggttgctaccggtaacagtacatgtccagtcactcgtcttcctcttaccgatttcacgctcatccccaaccatactcttcgccgcctaatccaagactggtgcgtcgctaatcgttctttcggtatcgaacgcattcctacgcctaaacagccagctgaacctagcctcgttcggtctctactgaaccaagttacgtctgttacgaatacagctcattcacgcctttcagctattcgtcggctcaaatctctcgctcgtgactcggacaaaaatcggtctctcatctcttcacataatgctacgaatcttctcgtcaatcttctgttctccaacacttcatcggatttaactcacgaagcaatgtccctcgtcgttatgtttccactcacggagtcagaatgcatatctatagcgtcaaacaccgagagaatcatttttttggcgaatctcttgttccactcgtcaatcgaaatccgagttaactcagctgcacttatcgaaacagttatcgccggaacaaaatcttcagatcttcgtgctcaattcagtaacgtcgatgaaattgtcgaaggagtcatagagttgttaaaaaggccaatctccaactatcctcgcgcgcttaaaatcggaatcaaagcgctattcgcgttatgtctagttaagcagacacggcacaaagctgtgtccgccggagcggtggagacgttaattgatagattagcggacttcgacaaatgtgacgcggagagagcattagcaacgatagagcttttgtgcagagttccggaaggagtagcggaattcgcggagcatgctctgacagtgccgttactggtgaagacgatactgaagatatcggacagagcgacggagtacgcggcgggagcattactggcgttatgtacggcgtcggagaagagtcagagagaggcggtgagtgcagggatattgacgcagctgttgttactcgtgcaaagtgatgtacggatagagcaaagagaaagatgtttcagaaaccttgcctcaaaattatcatatttgaatttctctcgatcaattgaatcatccaaacggaaaaatttaaaattttgtaatttttacaaaaataaaaatattttttaa

SEQ ID NO: 12499 - protein, 420 aa, Ricinus communis
MPGSLESLDLSVQIPYHFRCPISLELMRDPVTVSTGQTYDRASIESWVATGNSTCPVTRLPLTDFTLIPNHTLRRLIQDWCVANRSFGIERIPTPKQPAEPSLVRSLLNQVTSVTNTAHSRLSAIRRLKSLARDSDKNRSLISSHNATNLLVNLLFSNTSSDLTHEAMSLVVMFPLTESECISIASNTERIIFLANLLFHSSIEIRVNSAALIETVIAGTKSSDLRAQFSNVDEIVEGVIELLKRPISNYPRALKIGIKALFALCLVKQTRHKAVSAGAVETLIDRLADFDKCDAERALATIELLCRVPEGVAEFAEHALTVPLLVKTILKISDRATEYAAGALLALCTASEKSQREAVSAGILTQLLLLVQSDVRIEQRERCFRNLASKLSYLNFSRSIESSKRKNLKFCNFYKNKNIF

SEQ ID NO: 12500 - DNA, 1224 bp, Ricinus communis
  CDS (1)..(1224)
atggataatcttcaacttgaatctctagacgtaccatccttctttatctgccctatctctcttcaaatgatgaaagatccagttaccatctgtactggcatgaccttcgatcgcgagagcatccagaaatggctattctcttacaatcacatcacttgtcccattactaaacagcccctctctgacttctctcttatcccaaactctaatcttcttcgcctgatacaatcatggcaggtgcacgactcatcttatagaaagtctatagagcagcaacgacaggcaaagcacgacgctttcattcctcttagagtggttcttgaagagatcaagcaaccccatttgcacgtaaagtctctaagaaagatcaagacactaatctgcgaccggactttcttcacgggcgatgatgttttatattcatctgtagcatcccttattgttaaatctgagtccagcatcactggtcatgatcattcttcgatacttatcgatgaagcagtgtctgtgctgtgtcttttaaagccatctgatgagacattaaagatagtctcacaaaatggaaatggtcttttaattgattcgctttgtacaataatgacaaagtaccaatacgaccaacctagaactcaagctgctgttatattgaaatccatatttaaagtggtggatgggatttacaaggaaggacttaaagcagatttctttgagagtattgcggagatattgaaggatcaaaactcgaagcaaggaagcatggcagtcttaaccattttaacggaagttttgcagtttgggaaaaacaaagagaaagctattaaaggaggactggttccggtactagttgaattgcttgctgagaagaatgaaaagccggcttgtgaaatgatgttgtttgcacttgaaaatctttgcaggaaagctgaagggcgggcggcttttctcgcccatccaatgggcgtagcagctgtgttatcaaagattttgagggtttcccatgttggaaattataaagcaataagtttgttgttatggattttcaggttctgtaagagcaatgaaattgcagaggaatttatggaggtgggtggcgtggctaaggttttcatgctggtacaaactggatgcgattcaaagactcagggtaaagcttgggaacttttagggtttcataagaaaatatggggcaagtctccttgcttcccctcttcaatcagagactga

SEQ ID NO: 12501 - protein, 407 aa, Ricinus communis
MDNLQLESLDVPSFFICPISLQMMKDPVTICTGMTFDRESIQKWLFSYNHITCPITKQPLSDFSLIPNSNLLRLIQSWQVHDSSYRKSIEQQRQAKHDAFIPLRVVLEEIKQPHLHVKSLRKIKTLICDRTFFTGDDVLYSSVASLIVKSESSITGHDHSSILIDEAVSVLCLLKPSDETLKIVSQNGNGLLIDSLCTIMTKYQYDQPRTQAAVILKSIFKVVDGIYKEGLKADFFESIAEILKDQNSKQGSMAVLTILTEVLQFGKNKEKAIKGGLVPVLVELLAEKNEKPACEMMLFALENLCRKAEGRAAFLAHPMGVAAVLSKILRVSHVGNYKAISLLLWIFRFCKSNEIAEEFMEVGGVAKVFMLVQTGCDSKTQGKAWELLGFHKKIWGKSPCFPSSIRD

SEQ ID NO: 12502 - DNA, 1212 bp, Ricinus communis
  CDS (1)..(1212)
atggacgatattgaaattcctcagtattttatatgtccaatatctctgcaaatcatgaaagacccagtaacaattataactggtataacatatgatcgtgatagcattgaacagtggctattcactaccaaaaacacaatctgtcctgtcactaaacaatctctaccgaaagatttcgatctaacccctaatcatactttgcgtagattaatccaagcttggtgtattgataatgcttcgagtggtattgatagaatccccactcctaaaccttgtctcgacaaattccatctccttaaacttatcaaggacctgcatcttcctcggcttcaaatgaaaacccttgtccagttggagcttctcgcagcggagaacgacaggaatagaaagtatatggcggaaacaggagtgcccaaggcgttattattgtttatagtaacatgtttcaagaaaggtcgatttgatggtattcaagaagcagttagtattcttcggttgattcgcattcctccacaggaatcaagggctcttcttagcgaaaacgatcagattattgaatctttgacatgggttttaaggtggtgcagtagcgataatcatattactattaaatctcatgcagtttcagtactcaagatggtttctgaagatgcgagttctagtgtgttagaaaggcttaaacctgaattttttgaaacgattgttggtgtaattagagagaaaataactcaacaaggtattaacgcagctctgaaagtgttgtcacatgcttgtccttggggaagaaacaggataatgatggtagatgcaggagccgttttcgagcttatcgaactggaatggagatacccagaaaagaaaaccacagagcttattttggggatactatttcatctatgttcatgtgctgatggaagggccaagttcttgagtcatagaggaggaattgctgtggtagcaaagaggatcttgaaagtttctccggcagccgatgaccgagcagttttaatcctttcattgatatgcaaattctcaggaacaagcatggtgcttcaagaaatgttgaatgttaaagctgtgtcaaagctttgtatgatgcttcaagctgattgtgctgtttatttgaaggacaaagccagagaaatcctaagattacattctgatgagtggaagaattctccttgtattgatgcttcttttttgacagggtaa

SEQ ID NO: 12503 - protein, 403 aa, Ricinus communis
MDDIEIPQYFICPISLQIMKDPVTIITGITYDRDSIEQWLFTTKNTICPVTKQSLPKDFDLTPNHTLRRLIQAWCIDNASSGIDRIPTPKPCLDKFHLLKLIKDLHLPRLQMKTLVQLELLAAENDRNRKYMAETGVPKALLLFIVTCFKKGRFDGIQEAVSILRLIRIPPQESRALLSENDQIIESLTWVLRWCSSDNHITIKSHAVSVLKMVSEDASSSVLERLKPEFFETIVGVIREKITQQGINAALKVLSHACPWGRNRIMMVDAGAVFELIELEWRYPEKKTTELILGILFHLCSCADGRAKFLSHRGGIAVVAKRILKVSPAADDRAVLILSLICKFSGTSMVLQEMLNVKAVSKLCMMLQADCAVYLKDKAREILRLHSDEWKNSPCIDASFLTG

SEQ ID NO: 12504 - DNA, 1242 bp, Ricinus communis
  CDS (1)..(1242)
atggaagatattgatgtcccttctttctttctctgccccatctctctccagctcatgacagatccagttacagtgccaactggtataacttatgatcgccagagtatagagaaatggctcttcgcaggcaagaatcacacatgtccagttacaaaacaactcatttctgattgtgacttaaccccaaacttaactcttatgcgtttgattcagtcctggtgcacccttaatgcttcacacggcgtagaaagaatccccacccctaaacctcccatcagtaaacaacagatcgctaagcttctcaaagatgctaagtcacctcagcaacagcttaagtgtttaaggaagttacgttccatagccaatgtcaacgatacaaacaaaagatgcatggaggctgctggtgctgttgagttcttggcttccattgttaacaactttacttctttgtcgttcgaagagtcttctctagatggtgctgggatcgagattgcaagactaagtgacgaggccttgagcattctttatagtcttcaattatccgaatcgggtctcaggaatcttataggaaagaatggagaagtcattcaatctttaacaagagtgatgcaaaatggaaactacgagtctcgagcttatgcagttttgctgttgaaatcagcactcgaggttgctgatccgatgcaacttgtaagtttgagacctgaacttttcgtcgagatagttcaagttttaagtgaccaaatctcccatcaagcatccaaagctgcattgcagctgctcatcaatctttgtccatggggaagaagtagactcaaagcaaccgaggcgaaagcagtgtctactttgatcgatcttcttcttgattcatcagagaaacggacttgcgaaatggcgctagcagtgcttgatttgctatgccaatgcgcagaaggaagagctgaattgttaaagcacggagctggattagcagttgtttcaaagaagatattaagagtttctcaggtggcaagtgagaaggcagtgaggattcttttatcaatttcaaaattctcagcaacttctactgttttacatgaaatgttgcagattggtgttgtggccaaattgtgtttggtgctccaagtagactgtggcagcaagggcaaagataaggccagggaagtgcttaaattgcatgctagagcctggaagaattctccttgcatacctgcaaatcttctatcttcttatccagcttaa

SEQ ID NO: 12505 - protein, 413 aa, Ricinus communis
MEDIDVPSFFLCPISLQLMTDPVTVPTGITYDRQSIEKWLFAGKNHTCPVTKQLISDCDLTPNLTLMRLIQSWCTLNASHGVERIPTPKPPISKQQIAKLLKDAKSPQQQLKCLRKLRSIANVNDTNKRCMEAAGAVEFLASIVNNFTSLSFEESSLDGAGIEIARLSDEALSILYSLQLSESGLRNLIGKNGEVIQSLTRVMQNGNYESRAYAVLLLKSALEVADPMQLVSLRPELFVEIVQVLSDQISHQASKAALQLLINLCPWGRSRLKATEAKAVSTLIDLLLDSSEKRTCEMALAVLDLLCQCAEGRAELLKHGAGLAVVSKKILRVSQVASEKAVRILLSISKFSATSTVLHEMLQIGVVAKLCLVLQVDCGSKGKDKAREVLKLHARAWKNSPCIPANLLSSYPA

SEQ ID NO: 12506 - DNA, 1281 bp, Ricinus communis
  CDS (1)..(1281)
atgatgtctacatggaggaagagaagggcggcctaccgtgccaggaaggagcggctagaggttgaaaatggcgatatggagctagccatacccaatcattttcgctgcccaatatcgttggatttgatgaaagatccggtgactctatcaactgggattacttatgatcgccagagtattgagaagtggatcgagggtgggaatgttacctgtcctattacagctcaggttttgaggagtcttgagcctataccgaatcataccatacgtaaaatgattcaagattggtgtgtggacaataagtcttttgggattgaaaggattcccacacctagaatccctgtaagttctgtggaggctttggagattcagtcaaggattacagcttcttgtaatcaaggtgatcgagttgggtgcagaaatttggtggcgaagatcaagacgttgttgaaggaaagtgaaagaaacaagagatgcattttgagtaatgcatcatctttcagcgaaaacgctgcggtattggaggaaattttgtcatgtttgacattaatgtttcctcttgatgttgaggctaagggctaccttggatcgtctgcatctatgaattgcttagtgtggttcctgaagggcggagttttgtctggaagaagaaacgcagttttggtgcttaaagaacttgtttcgttggaccaaaggaaagtggaggctttatcaggtattgaaggaggtgcagaagcattgtttaagctgattaaggaacccatttgccctactgctacaaaagcttcattggtgatcatttacaacatggccatgtcaactcctacaaatgccagagtcatttcaagttttgtagatatgggtatagtctcacttctgatggaaatgcttgtagataccgaaaagagcatttgcgaaaaggcgctaggcgttctcgatggaatctgttgcagtgatcaggggagagagaaagcttatgatcattctctaacaatcccagttcttgtcaaaaagatacacagagtttcagaattggcaacagaattttctgtctccatactgtggaagctttgcaagaatgagaagaggaaggagggaaatgttcttcctgaagcgcttcaagtgggtgcttttcagaagctattgctgctgctgcaagttggttgtggtgagagaacaaaggagaaagcaactgaactgttgaagctgctgaatccttatagagagagactggagtgtattgattcttcagatttgaaggacctcaaaaggccattttga

SEQ ID NO: 12507 - protein, 426 aa, Ricinus communis
MMSTWRKRRAAYRARKERLEVENGDMELAIPNHFRCPISLDLMKDPVTLSTGITYDRQSIEKWIEGGNVTCPITAQVLRSLEPIPNHTIRKMIQDWCVDNKSFGIERIPTPRIPVSSVEALEIQSRITASCNQGDRVGCRNLVAKIKTLLKESERNKRCILSNASSFSENAAVLEEILSCLTLMFPLDVEAKGYLGSSASMNCLVWFLKGGVLSGRRNAVLVLKELVSLDQRKVEALSGIEGGAEALFKLIKEPICPTATKASLVIIYNMAMSTPTNARVISSFVDMGIVSLLMEMLVDTEKSICEKALGVLDGICCSDQGREKAYDHSLTIPVLVKKIHRVSELATEFSVSILWKLCKNEKRKEGNVLPEALQVGAFQKLLLLLQVGCGERTKEKATELLKLLNPYRERLECIDSSDLKDLKRPF

SEQ ID NO: 12508 - DNA, 1344 bp, Ricinus communis
  CDS (1)..(1344)
atgatgctatcttggagaacaagaagagctgctgccgctgcaagaaagaagagactccaggatgtctccggcaatgataacttggagatggatatcaccgtcccagttccgacacatttccggtgtccgatatctctagacttgatgaaagaccctgttactttgtccactgggatcacctacgatagagaaagcattgagaaatgggttgaagctggtcatcagacttgtcctgttactaatcaagtcttgttatgctttgatcagataccaaaccattccttgcgcaagatgattcagagttggtgcgtggagaatcgttctttcggcattgaacgaatcccgacgcctagaattcctgtctctccttatgatgtttccgagatttgtaagagaattatggcggctacacaacgtggggatttcaagaagtgtaaggatttagttgcaaagatcaagaactggggaagggagagcgaacgtaataagcggtgcatagtggagaatggagttggttgtgttttgtcaattgcttttgagtcatttgcaggtatatcaatggagaaacacgcagatctgttagtggatattttgtcagttctggtatggatgtttccatttggtgtagaagggaaattaacgctaggatcgatgaattctttacgttgcatgttatggattttaaaaaatggagatctcacagctaaacagactgcagtattagtacttaaagagcttctttctttagatcaaaagcatgtaaacacattggccgagataggagtcattcaagaactagtgaagctgatcaagaaaccaattagcccttctgctaccaaagcttcattaatggtaatattctacatgttgtctccaccatcaattagcgaaaagattgcatccacattagtagaattgggtttagtctcattgattatagagattcttcttgaaggagataaagggatatctgagaaggcattgggtgttttggaccatatttgtgattcaaaagaaggaagagaaaaggcatatgaaaatgctctatttgttcctgtattgtttcacaagattttggggtcagatttggcatcaaatttctcagtatcaattctttggaagctctgcaagaatgacaaaagaaaggatggaggtgttgtagctgaggcacttgaacttaaagtaggtgcttttcaaaaactgttgattctattgcaggttggttgtggagaaaatacaaaggagaaggttaaagagttgttgaaattgttgaatctttatagaacaaaggttgactgtcttggttcatcaatggatttcagatatctcaagaagtcatactga

SEQ ID NO: 12509 - protein, 447 aa, Ricinus communis
MMLSWRTRRAAAAARKKRLQDVSGNDNLEMDITVPVPTHFRCPISLDLMKDPVTLSTGITYDRESIEKWVEAGHQTCPVTNQVLLCFDQIPNHSLRKMIQSWCVENRSFGIERIPTPRIPVSPYDVSEICKRIMAATQRGDFKKCKDLVAKIKNWGRESERNKRCIVENGVGCVLSIAFESFAGISMEKHADLLVDILSVLVWMFPFGVEGKLTLGSMNSLRCMLWILKNGDLTAKQTAVLVLKELLSLDQKHVNTLAEIGVIQELVKLIKKPISPSATKASLMVIFYMLSPPSISEKIASTLVELGLVSLIIEILLEGDKGISEKALGVLDHICDSKEGREKAYENALFVPVLFHKILGSDLASNFSVSILWKLCKNDKRKDGGVVAEALELKVGAFQKLLILLQVGCGENTKEKVKELLKLLNLYRTKVDCLGSSMDFRYLKKSY

SEQ ID NO: 12510 - DNA, 1311 bp, Ricinus communis
  CDS (1)..(1311)
atggtttttggttggcggaggaacagaagtgctgctggcaagaagccgcaagccagctcgaatatggagcttgtaattcccaatcattatctttgcccaatatctctagatcttatgaaagatccagtcactttgtcatctgggataacttatgatcgagaaagcatagaggcatggcttgaagctggaaatttcacatgtcctgttacaggtctagtgctcaggagttttgatcagatacccaatcatactctcagggcaatgatccaagagtggtgtgtggagcacaggagatatggcgtcgaacgtattccaacaccaagagttcctgtctccccaattcaggtgtctgagactctttcctgtctggatgcttcaactaagcgtttggatcagtacggatgcgtagaattggtgcagaaaattaagagatggagcagtgaaagtgagcgtaatagacgttgcattgtagcaaatggagcaagtggagtgttggctgcagcatttagtgccttctccagggattcttccagaagaaatgatagtgttcttgaggaaatattatcagcaattgctccgatgatgcttcctatgtcagattcagaatcccaaatatatctgagctcaccagattcattatgtaccatggtacggttcttggaacatggagatctgtcatccaaacagaattcaatcatcgcactgaaagagcttctttcttctgatgaacagcatgcagaagcactagcatcatttgaagaagtgcatgaactgctatttaagttcataaaagacccggtatgtcctaagataaccaaagcttcccttgtagtaattttccatcttctttcttcccattcttctggtggaaacatcaaatccacatttgcgaaaatgggtttggttcctttaatcataggaatcatcatcggctcagagaggagcatatgcgagggagctttaggtgttcttgataaactttgcgactgtgaagaagggagagaagaggcttatagcaatgccctaacatggccagtcttggtgaagaaaatcttgcgagtttcagaactggcaacgcagtattcagtttcagccatttggaagcttaataaatatggaaggaaagagaaagttttggtcgaagcacttcaggttggtgctttccaaaagctggtattactgttacaagttggctgtggtaatgagacaaaagagaaagcaactgagcttttgaagctaatgaatccttacagaagtgaattggagtgcattgagtctgttgatttcaagaatctcaagcgttcattttga

SEQ ID NO: 12511 - protein, 436 aa, Ricinus communis
MVFGWRRNRSAAGKKPQASSNMELVIPNHYLCPISLDLMKDPVTLSSGITYDRESIEAWLEAGNFTCPVTGLVLRSFDQIPNHTLRAMIQEWCVEHRRYGVERIPTPRVPVSPIQVSETLSCLDASTKRLDQYGCVELVQKIKRWSSESERNRRCIVANGASGVLAAAFSAFSRDSSRRNDSVLEEILSAIAPMMLPMSDSESQIYLSSPDSLCTMVRFLEHGDLSSKQNSIIALKELLSSDEQHAEALASFEEVHELLFKFIKDPVCPKITKASLVVIFHLLSSHSSGGNIKSTFAKMGLVPLIIGIIIGSERSICEGALGVLDKLCDCEEGREEAYSNALTWPVLVKKILRVSELATQYSVSAIWKLNKYGRKEKVLVEALQVGAFQKLVLLLQVGCGNETKEKATELLKLMNPYRSELECIESVDFKNLKRSF

SEQ ID NO: 12512 - DNA, 1215 bp, Oryza sativa subsp. indica
  CDS (1)..(1215)
atggcgagcgctgcggccgaggtgccgtcctacttcgtctgcccgatctcgctgcagctcatgcgcgaccccgtcacgctccctacggggatctcgtacgaccgcgccgcgatcgcgcggtggctcgccgcgccgggggcccgccggacgtgtcccgtcacgcggcagccgctcgagcacgggctggagctcacgcccaaccacaccctgcgccgcctgatccagtcgtgggcggcctccgtctcccccgggtcggccgtggacgaggaggtggccgcgctacggccggtttcgagcgacaaggttgcgtcgctcctgtccgacgccgccgcggcgcaggtgggcgcgctcaggaggctgcgggagctggcggcggagtgcgaggatagcagggcaatgctagagtcccagggcggggtgttcgacgtgctatctcgcgtcgtgaccagcggcagcgcctgctcgacggcgcgggaggaggcggttggtgtcctcgcgtcgctccggatcccggagcaggagctgatcggcgtctcgaccaggcacggcaacctggcggagtccctcacggccgtgctccgctcgtcgaatctccagtcgcgggcgcacgcggtgcagctcgtgaggacgctcgccgacgcggtggtcccggcgtgggtgatcggcctcaacgcggagctcctcgccgaggtggtcggcgtggtccgcgaccgcgtctcggcgcgggccaccaaggcgtccctccacgcgctcgccgcgctctgcccgtacggccggcaccgcgtgaagatcgtgggcgccggcgcggtggcggcgctggtggagctgctgctggacgagcccgagcggcgcgtgtgcgagctggcgctggccgtgctggaccggctgtgcacgtgcgcggaggggcgcgcggagctggtggcgcacgcggcgggcgtggccgtggtggggaagaaggtgctgcgggtgtcggaggcggcgagcgagcgggcggtgcgcgtgctgcggtcggtggcgcggcacgcggcgacgccggcggtgctgcaggagatggcgcagtgcggcgtggtggggaagctgtgcctggcgctgcggtcggagcagtgcggggtgaagaccaaggagaaggcgcacgaggtgctcaagctgcactccagggtctggagggcctcgccatgcttgtctcccagcttcttggcgctttacccatcatga

SEQ ID NO: 12513 - protein, 404 aa, Oryza sativa subsp. indica
MASAAAEVPSYFVCPISLQLMRDPVTLPTGISYDRAAIARWLAAPGARRTCPVTRQPLEHGLELTPNHTLRRLIQSWAASVSPGSAVDEEVAALRPVSSDKVASLLSDAAAAQVGALRRLRELAAECEDSRAMLESQGGVFDVLSRVVTSGSACSTAREEAVGVLASLRIPEQELIGVSTRHGNLAESLTAVLRSSNLQSRAHAVQLVRTLADAVVPAWVIGLNAELLAEVVGVVRDRVSARATKASLHALAALCPYGRHRVKIVGAGAVAALVELLLDEPERRVCELALAVLDRLCTCAEGRAELVAHAAGVAVVGKKVLRVSEAASERAVRVLRSVARHAATPAVLQEMAQCGVVGKLCLALRSEQCGVKTKEKAHEVLKLHSRVWRASPCLSPSFLALYPS

SEQ ID NO: 12514 - DNA, 1329 bp, Oryza sativa subsp. indica
  CDS (1)..(1329)
atggaggtggcggcggcggaggtgccgtcctacttcctgtgcccgatctcgctggagatcatgagggacccggtgacgctggcgacggggatcacctacgaccggagcagcatcgagcggtggatgttcggcggcggcggcggcgacggggggaaggggacgtgcccggtgacgcggcggcagctggcgccggcggagcgggaggcgacgcccaaccacacgctgcggcggctcatccaggcgtggtgcgccgcgcacgccgtcgagcggttccccaccccgcgcccgcccgtcgactcctgccgcgtcgccgcgctcgtcgacgaggggacgacgacgatgctcggcggcggcggcaggcagcggcagctcgccgcgctccgggagatcaaggccatcgccgccgagagcgaccgcaacaagcgctgcgtcgaggccacgcccggcgccgtcgagttcctcgtctccgtcgtcgtccagagccacgccgccgcctccacctcagccagctcggacgacgacgacctgttcgactcggtgatcgattcccccatgtcgacgagctcgccggaggaggaggccctgggcgtgctctactccctcaagccgtccgagcccaccctgcgccgcgtcctcggcaaggacaatggcgtcggcttcctcgacaccctcgcctccgtgctccgccgcccgagctaccgttcgcgcgcgtacgccatcctcctcctgaaggcggtgacgtcggcgatgccgccggagcggctgatggcggtgagccccgagctggtggaggaggtggtccgggttgtgtccgacggcgtgtcgtcgaaggcggtgaaggcggcgctgcacgtgctgtgccggctgtgcccgtgggggcggaaccgcgtgaaggcggtggaggccggcgcggtggcggcgctggtggagctcctcctcgacgaggagggcggcggcgggcggcggcgcgcggcggagctggcggtggtggcgatcgaccacctctgcgggtgcgcggaggggaggtcggagctggtggcgcacccggcggggctcgccgtggtgtccaagagggcgatgcgggtgtcgccggcggccaccgagagcgccgtgcgcgcgctccacgccgtcgcgaggaacgcggcgacgccggccgtgctgcaggagatgctcgccgtcggcgtggtggcgaagctgctgctggtgctgcaggcggacggcggcgagcgagccagggcgagggcgagggagatgctcagggcgaacgctagggtttggaaggactcgccatgcttgcaagctcacctcaaggcttcttacccctcctga

SEQ ID NO: 12515 - protein, 442 aa, Oryza sativa subsp. indica
MEVAAAEVPSYFLCPISLEIMRDPVTLATGITYDRSSIERWMFGGGGGDGGKGTCPVTRRQLAPAEREATPNHTLRRLIQAWCAAHAVERFPTPRPPVDSCRVAALVDEGTTTMLGGGGRQRQLAALREIKAIAAESDRNKRCVEATPGAVEFLVSVVVQSHAAASTSASSDDDDLFDSVIDSPMSTSSPEEEALGVLYSLKPSEPTLRRVLGKDNGVGFLDTLASVLRRPSYRSRAYAILLLKAVTSAMPPERLMAVSPELVEEVVRVVSDGVSSKAVKAALHVLCRLCPWGRNRVKAVEAGAVAALVELLLDEEGGGGRRRAAELAVVAIDHLCGCAEGRSELVAHPAGLAVVSKRAMRVSPAATESAVRALHAVARNAATPAVLQEMLAVGVVAKLLLVLQADGGERARARAREMLRANARVWKDSPCLQAHLKASYPS

SEQ ID NO: 12516 - DNA, 1353 bp, Oryza sativa subsp. indica
  CDS (1)..(1353)
atgggtgaggagtcgtcgccggcggcggcgccggcggtggaggtgccgtcctacttcatgtgcccgatctcgctggagatcatgcgggacccggtgacgctgtcgacggggatcacctacgaccgggagagcatcgagcggtgggtgttcaccgacggccacggcgagtgcccggtgaccaagcagcggctggcgccggcggaccgggagcccacgcccaaccacacgctccgccgcctcatacaggggtggtgcgccgtccacgccgtcgagcgcttccccaccccgcgcccccccgtcgacgccgcccgcgtcgccgccatcgtggacgccgcgcggccgctgctgcgccggcgtcgtcagcgggaggagctgatggcttcgctgagggagctcgccgacatcgtcgccgagagcgaccgcaaccggcggtgcgtccagggcgcctccggcgccgtggagttcctcctgtccgtcgtcaaggagcgcacctccgtggcgggcgtggacgacgcgacgtcggccaagccggaagagacgacgtgcggcggcgtgcatgatccggcgaaggcgagctcgccggaggaggcggccctgagcatcctgcattcgctcaagctctccgaggagagcttcaagagggtcttggaggacagcggcggtgaggatttcttggaaaccatggcgtgcgtgctgcggcggccgagctacctctcgcggatgcagggaatccacctgctgaaatcggcgctcccggcgatggcccccgcgcggctgacgtcggcgagcgccgcgctggtcgacggcgtggtgggggtggtggcggacaggccgtcggcgaaggcggtcaaggtggcgctccacgtgctctgccggctctgcccgtggggccggaaccgcgtcaaggcggtcgacgccggcgccgtgtcggcgctcgtgcgcctcctcctcgacgagggctgcggcggcggcggcggcgaccggcgcgcgtgcgagctcgccgccgtggcgatcgaccacatctgcggctgcgcggaggggcgcctggcgctggtggcgcacccggcggggctcgcggcggtggcgtgcgcggcgacgcggctgcccgccgcggcgggcgccgagagcgccgtgcgcgcgctgcacgccgtggcgaggcactcggcgacgtcggcggtgctgcaggagatgctggccgtcggcgtggtggcgaggctgctcttcctggtgcaggtcggcgcctccggcgagcggacgagggcgagggcgagggagatgctcaagatgcacgccagggtgtggagggactcgccatgcttggcctcgcacttgaatgcttcctaccctcgctga

SEQ ID NO: 12517 - protein, 450 aa, Oryza sativa subsp. indica
MGEESSPAAAPAVEVPSYFMCPISLEIMRDPVTLSTGITYDRESIERWVFTDGHGECPVTKQRLAPADREPTPNHTLRRLIQGWCAVHAVERFPTPRPPVDAARVAAIVDAARPLLRRRRQREELMASLRELADIVAESDRNRRCVQGASGAVEFLLSVVKERTSVAGVDDATSAKPEETTCGGVHDPAKASSPEEAALSILHSLKLSEESFKRVLEDSGGEDFLETMACVLRRPSYLSRMQGIHLLKSALPAMAPARLTSASAALVDGVVGVVADRPSAKAVKVALHVLCRLCPWGRNRVKAVDAGAVSALVRLLLDEGCGGGGGDRRACELAAVAIDHICGCAEGRLALVAHPAGLAAVACAATRLPAAAGAESAVRALHAVARHSATSAVLQEMLAVGVVARLLFLVQVGASGERTRARAREMLKMHARVWRDSPCLASHLNASYPR

SEQ ID NO: 12518 - DNA, 1266 bp, Oryza sativa subsp. indica
  CDS (1)..(1266)
atggcaatggagcctcctcccctgttcctgtgccccatctcgatggagctaatggaggaccccgtcacggtggccaccggcgtcacctacgaccgccggagcatcgagcggtggttcttcaagtacggcaagacgacgtgcccggccaccatgcagcggcttgcttccttcgacttcactcccaaccacaccctcaagcgcgtcatctcgtcgtggctggaccgcgcctcctcgtcgtcgtcgccgagcacggccggctcgccggcgacgacgtcgtcgtcgtcgtcgtcaaacgcgatggagagggagaggttgccgtcggtgctcgctggcattgaggagacgccgttcaaggcgaccgcgctcaagaacctcaggtcctgcatggccggcgacgaggcggcgcgggaggatttcgtggcgtgcggcggcatccaggtgctcggccgggtcatgacgcaggcgctggcggagagctccgccgggggggacttctcggcgttccggacgtgcgaggaggccgccgccgtcctcgccacgctgccgctctcggacgacgcgtcggtggagctcctgctcaagccggagtgcatgaggcccgtgtccgagctggtccagcgcggcagcgccgaggcgaggctgcacgcaatgtccatgatctccaagatctccagggccagcgtccgcgactggaccgcggaggtcgacgtcgacgacatggtcaaggccctcctcgagctcctctccgacggcgcctccgcgaagctgagctcccgcgcgctcgacgtgctcctcgacgtcacggcgcggtactcccgcggcgcgcggcgcgccaaggccgtggagctgggcgccgtgcgcgtcctcgccgagctcctcctcgacgccgaccgccacgtcgccgagcggtcgctcctcctcctgaagcgcatgtgcaagtgccccgaggggaggctggccttcgccgagcacgggctggcggtggccgccgtggcgcgcgccgtgctccgggtgtccgggctcgccacgaggctcgccgtcaacgtgctgtggctggtggcgtgcgccccggcccccgccgagagggtgctggaggacatggtggtgggcggcgctgtggcgaagctgctggcgctgatgcaagtggagagctcgccgtcgaccaaggacaaggcggtgaagatgctgcgagcgcacggcgcgttctggaggcagtacccttgcttccccacggacctcaaggactacctcaaatctctcaactga

SEQ ID NO: 12519 - protein, 421 aa, Oryza sativa subsp. indica
MAMEPPPLFLCPISMELMEDPVTVATGVTYDRRSIERWFFKYGKTTCPATMQRLASFDFTPNHTLKRVISSWLDRASSSSSPSTAGSPATTSSSSSSNAMERERLPSVLAGIEETPFKATALKNLRSCMAGDEAAREDFVACGGIQVLGRVMTQALAESSAGGDFSAFRTCEEAAAVLATLPLSDDASVELLLKPECMRPVSELVQRGSAEARLHAMSMISKISRASVRDWTAEVDVDDMVKALLELLSDGASAKLSSRALDVLLDVTARYSRGARRAKAVELGAVRVLAELLLDADRHVAERSLLLLKRMCKCPEGRLAFAEHGLAVAAVARAVLRVSGLATRLAVNVLWLVACAPAPAERVLEDMVVGGAVAKLLALMQVESSPSTKDKAVKMLRAHGAFWRQYPCFPTDLKDYLKSLN

SEQ ID NO: 12520 - DNA, 1137 bp, Oryza sativa subsp. japonica
  CDS (1)..(1137)
atggcgagcgcggcggccgaggtgccgtcctacttcgtctgcccgatctcgctgcagctcatgcgcgaccccgtcacgctccctacggggatctcgtacgaccgcgccgcgatcgcgcggtggctcgccgcgccgggggcccgccggacgtgtcccgtcacgcggcagccgctcgagcacgggctggagctcacgcccaaccacaccctgcgccgcctgatccagtcgtgggcggcctccgtctcccccgggtcggccgtggacgaggaggtggccgcgctacgaccggtttcgagcgacgaggttgcgtcgctcctgtccgacgccgccgcggcgcaggtgggcgcgctcaggaggctgcgggagctggcggcggacgcctgctcgacggcccgggaggaggcggttggtgtcctcgcgtcgctccggatcccggagcaggagctgatcggcgtctcgaccaggcacggcaacctggcggagtccctcacggccgtgctccgctcgtcgaatctccagtcgcgggcgcacgcggtgcagctcgtgaggacgctcgccgacgcggtggtcccggcgtgggtgatcggcctcaacgcggagctcctcgccgaggtggtcggcgtggtccgcgaccgcgtctcggcgcgggccaccaaggcgtccctccacgcgctcgccgcgctctgcccgtacggccggcaccgcgtgaagatcgtgggcgccggcgcggtggcggcgctggtggagctgctgctggacgagcccgagcggcgcgtgtgcgagctggcgctggccgtgctggaccggctgtgcacgtgcgcggaggggcgcgcggagctggtggcgcacgcggcgggcgtggccgtggtggggaagaaggtgctgcgggtgtcggaggcggcgagcgagcgggcggtgcgcgtgctgcggtcggtggcgcggcacgcggcgacgccggcggtgctgcaggagatggcgcagtgcggcgtggtggggaagctgtgcctggcgctgcggtcggagcagtgcggggtgaagaccaaggagaaggcgcacgaggtgctcaagctgcactccagggtctggagggcctcgccatgcttgtctcccagcttcttggcgctttacccatcatga

SEQ ID NO: 12521 - protein, 378 aa, Oryza sativa subsp. japonica
MASAAAEVPSYFVCPISLQLMRDPVTLPTGISYDRAAIARWLAAPGARRTCPVTRQPLEHGLELTPNHTLRRLIQSWAASVSPGSAVDEEVAALRPVSSDEVASLLSDAAAAQVGALRRLRELAADACSTAREEAVGVLASLRIPEQELIGVSTRHGNLAESLTAVLRSSNLQSRAHAVQLVRTLADAVVPAWVIGLNAELLAEVVGVVRDRVSARATKASLHALAALCPYGRHRVKIVGAGAVAALVELLLDEPERRVCELALAVLDRLCTCAEGRAELVAHAAGVAVVGKKVLRVSEAASERAVRVLRSVARHAATPAVLQEMAQCGVVGKLCLALRSEQCGVKTKEKAHEVLKLHSRVWRASPCLSPSFLALYPS

SEQ ID NO: 12522 - DNA, 1248 bp, Oryza sativa subsp. japonica
  CDS (1)..(1248)
atggaggaggcggcggcggaggtgccgtcctacttcctgtgcccgatctcgctggagatcatgagggacccggtgacgctggcgacggggatcacctacgaccggagcagcatcgagcggtggatgttcggcggcggcggcggcggcggcgggaaggggacgtgcccggtgacgcggcggcagctggcgccggcggagcgggaggcgacgcccaaccacacgctgcggcggctcatccaggcgtggggacgacgacgatgctcggcggcggcggcaggcagcggcagctcgccgcgctccggggagatcaaggccatcgccgccgagagcgaccgcaacaagcgctgcgtcgaggccacgcccggcgccgtcgagttcctcgtctccgtcgtcgtccagagccatgccgccgcctccacctcagccagctcggacgacgacgacctgttcgactcggtgatcgattcccccatgtcgacgagctcgccggaggaggaggccctgggcgtgctctactccctcaagccgtccgagcccaccctgcgccgcgtcctcggcaaggacaatggcgtcggcttcctcgacaccctcgcctccgtgctccgccgcccgagctaccgttcgcgcgcgtatgccatcctcctcctgaaggcggtgacgtcggcgatgccgccggagcggctgatggcggtgagccccgagctggtggaggaggtggtccgggtggtgtccgacggcgtgtcgtcgaaggcggtgaaggcggcgctgcacgtgctgtgccggctgtgcccgtgggggcggaaccgcgtgaaggcggtggaggccggcgcggtggcggcgctggtggagctcctcctcgacgaggagggcggcggcgggcggcggcgcgcggcggagctggcggtggtggcgatcgaccacctgtgcgggtgcgcggaggggaggtcggagctggtggcgcacccggcggggctcgccgtggtgtccaagagggcgatgcgggtgtcgccggcggccaccgagagcgccgtgcgcgcgctccacgccgtcgcgaggaacgcggcgacgccggccgtgctgcaggagatgctcgccgtcggcgtggtggcgaagctgctgctggtgctgcaggcggacggcggcgagcgcgccagggcgagggcgagggagatgctcagggcgaacgctagggtttggaaggactcgccatgcttgcaagctcaccttaaggcttcttacccctcctga

SEQ ID NO: 12523 - protein, 415 aa, Oryza sativa subsp. japonica
MEEAAAEVPSYFLCPISLEIMRDPVTLATGITYDRSSIERWMFGGGGGGGGKGTCPVTRRQLAPAEREATPNHTLRRLIQAWGRRRCSAAAAGSGSSPRSGEIKAIAAESDRNKRCVEATPGAVEFLVSVVVQSHAAASTSASSDDDDLFDSVIDSPMSTSSPEEEALGVLYSLKPSEPTLRRVLGKDNGVGFLDTLASVLRRPSYRSRAYAILLLKAVTSAMPPERLMAVSPELVEEVVRVVSDGVSSKAVKAALHVLCRLCPWGRNRVKAVEAGAVAALVELLLDEEGGGGRRRAAELAVVAIDHLCGCAEGRSELVAHPAGLAVVSKRAMRVSPAATESAVRALHAVARNAATPAVLQEMLAVGVVAKLLLVLQADGGERARARAREMLRANARVWKDSPCLQAHLKASYPS

SEQ ID NO: 12524 - DNA, 1266 bp, Oryza sativa subsp. japonica
  CDS (1)..(1266)
atggcaatggagcctcctcccctgttcctgtgccccatctcgatggagctaatggaggaccccgtcacggtggccaccggcgtcacctacgaccgccggagcatcgagcggtggttcttcaagtacggcaagacgacgtgcccggccaccatgcagcggcttgcttccttcgacttcactcccaaccacaccctcaagcgcgtcatctcgtcgtggctggaccgcgcctcctcgtcgtcgtcgccgagcacggccggctcgccggcgacgacgtcgtcgtcgtcgtcgtcaaacgcgatggagagggagaggttgccgtcggtgctcgctggcattgaggagacgccgttcaaggcgaccgcgctcaagaacctcaagtcctgcatggccggcgacgaggcggcgcgggaggatttcgtggcgtgcggcggcatccaggtgctcggccgggtcatgacgcaggcgctggaggagagctccgccgggggggacttctcggcgttccggacgtgcgaggaggccgccgccgtcctcgccacgctgccgctctcggacgacgcgtcggtggagctcctgctcaagccggagtgcatgaggcccgtgtccgtgctggtccagcgcggcaaccccaagcaaaggctgcacgcaatgtccatgatctccaagatctccagggccagcgtccgcgactggaccgcggaggtcgacgtcgacgacatggtcaaggccctcctcgagctcctctccgacggcgcctccgcgaagctgagctcccgcgcgctcgacgtgctcctcgacgtcacggcgcggtactcccgcggcgcgcggcgcgccaaggccgtggagctgggcgccgtgcgcgtcctcgccgagctcctcctcgacgccgaccgccacgtcgccgagcggtcgctcctcctcctgaagcgcatgtgcaagtgccccgaggggcggctggccttcgccgagcacgggctggcggtggccgccgtggcgcgcgccgtgctccgggtgtccgggctcgccacgaggctcgccgtcaacgtgctgtggctggtggcgtgcgccccggcccccgccgagagggtgctggaggacatggtggtgggcggcgccgtggcgaagctgctggcgctgatgcaagtggagagctcgccgtcgaccaaggacaaggcggtgaagatgctgcgagcgcacggcgcgttctggaggcagtacccttgcttccccacggacctcaaggactacctcaaatctctcaactga

SEQ ID NO: 12525 - protein, 421 aa, Oryza sativa subsp. japonica
MAMEPPPLFLCPISMELMEDPVTVATGVTYDRRSIERWFFKYGKTTCPATMQRLASFDFTPNHTLKRVISSWLDRASSSSSPSTAGSPATTSSSSSSNAMERERLPSVLAGIEETPFKATALKNLKSCMAGDEAAREDFVACGGIQVLGRVMTQALEESSAGGDFSAFRTCEEAAAVLATLPLSDDASVELLLKPECMRPVSVLVQRGNPKQRLHAMSMISKISRASVRDWTAEVDVDDMVKALLELLSDGASAKLSSRALDVLLDVTARYSRGARRAKAVELGAVRVLAELLLDADRHVAERSLLLLKRMCKCPEGRLAFAEHGLAVAAVARAVLRVSGLATRLAVNVLWLVACAPAPAERVLEDMVVGGAVAKLLALMQVESSPSTKDKAVKMLRAHGAFWRQYPCFPTDLKDYLKSLN

SEQ ID NO: 12526 - DNA, 1383 bp, Oryza sativa subsp. japonica
  CDS (1)..(1383)
atgtcgtcgtcctcgccgtcgctgctgtctcgtcggagtacggcggagctggagctgcctgtcccgccggagttccggtgcccgatatcgctagagctgatgcgcgaccccgtcgtggggccaaccggcatcacctacgaccgtgccggcatcgaggcgtggctgctcgccgccggagcggggaagacggcggcggcgtcgtcgacgtgcccggttaccaaaggtgacctccgcgccgacgacctcgtccccaaccacgccctccgccgcgtcatccaggcgtggtgcgtcgccaaccgctgccgtggcgtcgagcggatccccacgccgcgggtgcccgtcacgccggcgcaggcgggcgaggtgctgggccaagtcgagccccccgcgcgggcgggcaacgcggcaagttgcttcgcggcggtgccccaggtggggggcctcgcgcgggagtccgaccgggaccgccggtgcctcgggtccgccggcgcggcgcgcgcgctcgccgcggcggtcgcgtcgttccccgcggcgagtgactcggcgtcggcgtcgtcggtcctgctcgacgacgtcctggcggcgctggtgctcgtcatgccgctcgacgaggaggccatcgtggccatcggctcgtcggccgcgtcggtggcgctgctcgccaacgtcgccaagcacggcgacctgcagaggaggctccaggcggtggtcgtcatcagggagatcgtcgcgttgtcctcctgctgctcacgcaacggcggcgccgccaccgccattgatctcagcgacaaccttgacgggatcatcgaggtgttggtgaacacgatccgggacccgatctcccctcaggccaccaaggcctccctcgtcgccgcgtaccacctcgcgctcgccgacggccacgctgcggcgcgcctcgcggaggccggcctcgtgccgtccctcgtcgagctcctcatcgacggcgaccggagcacggccgagaaagcgctcgccgcgctcgacgcgacgctggcgtccgaggccggcagggcgcgcgcccaagccgatgcgctcgccgtgccggtgctcgtcaagaagatgttccgcgtgtccgacacggccaccgagctcgtcgtctcggcgctccaccgcatctgcaagaaatggcacgacggtgatgacgacgaggtggggtcgccggcggcgaggcggagcgccgtcgtggaggcggtgcaggtgggcgcgttccagaaggtgatgatgctgctgcaggttgggtgcagggatgcaaccaaggagaaggcgactgagctgctcaagctgatgatcaagtatgaaactagaggaggagctcactgcattgacgccatggatttcagagggctcaagagggtttcttga

SEQ ID NO: 12527 - protein, 460 aa, Oryza sativa subsp. japonica
MSSSSPSLLSRRSTAELELPVPPEFRCPISLELMRDPVVGPTGITYDRAGIEAWLLAAGAGKTAAASSTCPVTKGDLRADDLVPNHALRRVIQAWCVANRCRGVERIPTPRVPVTPAQAGEVLGQVEPPARAGNAASCFAAVPQVGGLARESDRDRRCLGSAGAARALAAAVASFPAASDSASASSVLLDDVLAALVLVMPLDEEAIVAIGSSAASVALLANVAKHGDLQRRLQAVVVIREIVALSSCCSRNGGAATAIDLSDNLDGIIEVLVNTIRDPISPQATKASLVAAYHLALADGHAAARLAEAGLVPSLVELLIDGDRSTAEKALAALDATLASEAGRARAQADALAVPVLVKKMFRVSDTATELVVSALHRICKKWHDGDDDEVGSPAARRSAVVEAVQVGAFQKVMMLLQVGCRDATKEKATELLKLMIKYETRGGAHCIDAMDFRGLKRVS

SEQ ID NO: 12528 - DNA, 1314 bp, Vitis vinifera
  CDS (1)..(1314)
  misc_feature (669)..(669): y is t or c
  misc_feature (930)..(930): k is g or t
  misc_feature (945)..(945): m is a or c
  misc_feature (1023)..(1023): y is t or c
  misc_feature (1089)..(1089): r is g or a
  misc_feature (1098)..(1098): r is g or a
atggctgtgtggagttcaatggatgacatcgagataccgcaatatttcttatgccctatatctcttcagatcatgaaagacccggttacagccatgacgggcatcacctatgatcgagaaagcattgagcagtggttgttgacagccaaggataccacttgtccggtaaccaagcagcctttggagagagactttgtgttgacgcccaatcacacactccgccgcctaattcaagcatggtgtgctgccaatgcaacgaatggcgtggatcagattcctactccgaagactcctctggacaggacccatgtcgttaaacttattcgcgatctgggtgttgctcaattgtatctgaaaacattgcagaagatggaagctcttactagagataacgaaaggaacaggaactgtatggcggatgcaggcgcagcgaaggctattgttttgttgatcataaagtgtttcaaggaaaacaagaccaccggggtagaggaagggctgagaatccttcatcttatttggagtccaacctctgaaatgaagctccttctaaaagaaaactacgatttcgtggatgcagtaacatgggctttaggctgcgagaccgacaattatgtggctgtgagatcaaatgcagtgttggttttaaaaaatatagtggaagttgcyagtccaaatcttctggagcgattaaagtttgaattcctcaacagactcataaggacgatgagggagaaaatctctcaagcagctatgaaagccgccttgtacgtcctaatggaggtatgcccttgggggagaaacaaatggcaaatgatcgaagccggtgcagtgttccagctcatcgaaatggaactagaaaacccagaaaagaagatcacagaaatcatcttctgtctgttgggtcatctatgttcctgtgctgatggkagagctcagtttctmgcccatgcgggaagcatggccatgctgtcaaaaaggatcttaagggtatctaacacgactgacgatcgagcacttcayataattgcattgatctccaagttctcagggacaaacgaagtccttatggagatgctgagagttggrgcagtgtcraagctttgcatggtgcttcaagcagattgtgcaaagtacttgaaagagaaagcaagggagatcctcaggttgcattccaagaaatctggaaaattttggcaaattattaataatctttctgttgttggtgggttgaatgataccgatgaggaggatatcagatggtcgctggaagcctggatcagcaagaagggaaaaaacgtgctctacaattaa

SEQ ID NO: 12529 - protein, 437 aa, Vitis vinifera
MAVWSSMDDIEIPQYFLCPISLQIMKDPVTAMTGITYDRESIEQWLLTAKDTTCPVTKQPLERDFVLTPNHTLRRLIQAWCAANATNGVDQIPTPKTPLDRTHVVKLIRDLGVAQLYLKTLQKMEALTRDNERNRNCMADAGAAKAIVLLIIKCFKENKTTGVEEGLRILHLIWSPTSEMKLLLKENYDFVDAVTWALGCETDNYVAVRSNAVLVLKNIVEVASPNLLERLKFEFLNRLIRTMREKISQAAMKAALYVLMEVCPWGRNKWQMIEAGAVFQLIEMELENPEKKITEIIFCLLGHLCSCADGRAQFLAHAGSMAMLSKRILRVSNTTDDRALHIIALISKFSGTNEVLMEMLRVGAVSKLCMVLQADCAKYLKEKAREILRLHSKKSGKFWQIINNLSVVGGLNDTDEEDIRWSLEAWISKKGKNVLYN

SEQ ID NO: 12530 - DNA, 1254 bp, Brassica campestris
  CDS (1)..(1254)
  misc_feature (512)..(512): n is a, g, c or t
atgccgagaagtttagagccgttggatcttggaatccagataccgtaccatttcagatgtccaatctcactagagctgatgcgcgacccagtcaccgtctgcaccggtcaaacctacgatcgaacaagcatcgagtcatgggtctccaccggtaacaacaccacgtgtccagtcacacgcgctcctttgtccgacttcacactcatcccaaaccacactctccgccgtctcatccaagaatggtgcgtcgctaaccgctccaacggcgtcgagcgtatccccacacccaaacagccagctgatcccacctccgttcgcgctctcctcagccaagcctccgcgacttccggagctcacgtctcggctcgctcacgcgccgccgctctccgtcgtctacgtggcttcgcgcgggactccgagaagaaccgcgttttgatcgcggctcataacgctaaagagattctgattaggatcttgttctccgacgatatcgattcatcggagttggtctntgaatcgctcgctcttctcgttatgttcccgatgacggagcatgataaatgcgtttcgatcatttcggatccgggtcgggtcgagtttttaacccggttactgttcgattcctcggtggagacacgtgtcaacgcagccgcgttgatcgagatggcggttacaggatcgaaggaaacggtttcgagttccgaatccattttcgaaggagtcctcgatcttctacgcaatccggcgtcgtcgtacccgcggcgagctctcaagatcggaatcaaagctttgttcgcgctctgcctctcgaagaacacgcgccacgtcgcggtctcggccggcgcgccggagattctgatcgacaggctcgcggcggggttagacaggtgcgacacggagcgagcgttagcgacggtggagattctctgccgatctccggagggatgcgcggcgttcggggagcacgctctgacggttccggttcttgtcaagacgattctgagggtttctgatagggcgacggagtacgcggcgggggcgctgctggcgctttgcacggcggaggagaggtggagagacgaggcggcggcggcgggagtggtggttcagttgctgctgatggtgcagagtgagtgtacggagagggcgaagaggaaggcgcagaagctgctgaagcttctgagagactcgtggcctgactactccttcgctaactccgatgatttcgcctgcagcgaagtggtccccttttga

SEQ ID NO: 12531 - protein, 417 aa, Brassica campestris
  misc_feature (171)..(171): The Xaa at location 171 stands for Cys, Phe, Ser, or Tyr.
MPRSLEPLDLGIQIPYHFRCPISLELMRDPVTVCTGQTYDRTSIESWVSTGNNTTCPVTRAPLSDFTLIPNHTLRRLIQEWCVANRSNGVERIPTPKQPADPTSVRALLSQASATSGAHVSARSRAAALRRLRGFARDSEKNRVLIAAHNAKEILIRILFSDDIDSSELVXESLALLVMFPMTEHDKCVSIISDPGRVEFLTRLLFDSSVETRVNAAALIEMAVTGSKETVSSSESIFEGVLDLLRNPASSYPRRALKIGIKALFALCLSKNTRHVAVSAGAPEILIDRLAAGLDRCDTERALATVEILCRSPEGCAAFGEHALTVPVLVKTILRVSDRATEYAAGALLALCTAEERWRDEAAAAGVVVQLLLMVQSECTERAKRKAQKLLKLLRDSWPDYSFANSDDFACSEVVPF

SEQ ID NO: 12532 - DNA, 1254 bp, Picea sitchensis
  CDS (1)..(1254)
atggatccaaaagagaacacagcggtagctgagatcccttcctacttcatatgtccgatatctatgcagataatgagagaccccattacagtttgcactagtatcacatacgatcgagaaagtatggagaaatggatctattcttgcggtaagaacacatgccctgcaacgatgcaagtgatgcccaactacaatatgactcccaactacaccctgcgtcgcctcattcaagggtggtgtctcgccaacagttcaaaaggcgttcaaccaatccccacgcccaagccgcccatcgactcgaatcaggtcaataaattgcttcaagattttgaatcgtgctcgccttttcaactaattaatggcttgaagaaactgagatctctggccgatgagagcgaggcaaacagaaggtgtattgctgtttgtggtggagattctgcattgatttctgtgattgaaatgaatactgtagaaatggaaagtggatgttatcaatgcccgatggcttgcgatgaggccttggggattctgtacaaacttccgatggccgatgagactgcagaaacgcttagtaggtccaaaaccctaaaacccatttcatggattctcaagaaaggaagctgcaatggaagattttattcggccatgttgctgaagaccgtttcaagcagtgggcagaagatactgcaacagctcgttgtgaatgcggacgatgatctcattgaaggactccttcaactgctgacagaggaagtctgccttcaggcaactacttcatctctggagattttgatggccatctgttctccttccagaaagaacagaatcaaggcaatagaggccggagctatttatatattgattgaattacttcctgaatcgcagagaatgaattgcgagaagatgctgtgtcttctggatattttgtgtgaatgtgcagagggaagagctacaacaattgatcatgccatgggcatagcttccatctccaagaagatattcagagtctctcaggttgcaactgagaaagcaattcgaatactctggtcgctctgcaagttctctccgactcctcgccttcttaacgaaatggtgcagattggtgccgtctacaaattgtgtgtgctcctgcaacttgaatgcacatcaaagacgaaacaaaaggccagggaaatgctcagagcgcacggtaagtattggacaatctcaccgtgcgttccatcgtattcgctaggaatctatggacagtattga

SEQ ID NO: 12533 - protein, 417 aa, Picea sitchensis
MDPKENTAVAEIPSYFICPISMQIMRDPITVCTSITYDRESMEKWIYSCGKNTCPATMQVMPNYNMTPNYTLRRLIQGWCLANSSKGVQPIPTPKPPIDSNQVNKLLQDFESCSPFQLINGLKKLRSLADESEANRRCIAVCGGDSALISVIEMNTVEMESGCYQCPMACDEALGILYKLPMADETAETLSRSKTLKPISWILKKGSCNGRFYSAMLLKTVSSSGQKILQQLVVNADDDLIEGLLQLLTEEVCLQATTSSLEILMAICSPSRKNRIKAIEAGAIYILIELLPESQRMNCEKMLCLLDILCECAEGRATTIDHAMGIASISKKIFRVSQVATEKAIRILWSLCKFSPTPRLLNEMVQIGAVYKLCVLLQLECTSKTKQKAREMLRAHGKYWTISPCVPSYSLGIYGQY

SEQ ID NO: 12534 - DNA, 1326 bp, Populus trichocarpa
  CDS (1)..(1326)
atgatgatctctacatggagaaagcgaagagaagcacgactagctggcaagcagcggctagagagcgaaacgggagacattgaggtgacagtaccgaaccattttcgatgcccggtatcgctagacttgatgaaagatccggtcaccatgtcaagtgggattacttatgatcgtgagagcattgagaagtggatagaggctggcaatgtgacctgccccataacaaacaaggtcttgaggagccttgatccgataccaaatcacacaatacgtaaaatgattcaggactggtgcgttgcgaatagttcttatgggattgaaaggattccaacgcctagaattcctgtgagttctgaggaggttttggagattcattccaaaattaaaacagcttgcagaaaaggagatcaagctgggtgccaaaatctggttgccaagattaaggcactagcaaaggagagcgaacgtaacaggaggtgccttgtggctactggaacggctggtgttttgtcatctgcttttgaagagttttcaaaagcttctttcgatgataacgttgcagtcttggaggaaatactgtcaggtttggcggtacttttgcctcatgacaaggccacgacttaccttggctcagatgcatctatggattgcgttgtgtggttcttgaaaagtgaggatttgtctacgagaagaaatgcagtcctggtgctaaaagagctcgttccattggataatagaaaagtagacatgttattggaaattgaaggagccacggaagctctgtttaagctaattaaggcacccatttgcccgtctgcaacaaaagcttcattgctgatcatttatcatatggtcatgtcgtcgtctccaacaaatgcgaagatcatagataagtttcttgatttgggtttggtttcattgctgctagaaatgcttgtagacgcggaaagaagtatatgtgagaaggcgttgggggttcttgatggaatttgtgacagggatcaagggagagagaaggcatacaatcatgctctcacaataccagttctagtcaggaaaatacaccgagtctcagacttagcaatgaagttctccgtctctattttatttaagctctgcatgaatgagaagagaggaaatggcggtgttcttgtggaagctattcaaaggaatgcttttgaaaagcttttggttctcttacaggttggctgtgatgagagaacaagggagaaggcaactcagctgttgaagttgttgaatgtttatagaggcagagtggattgtattgattctgtggatttcaagaacctcaaaaggcccttctaa

SEQ ID NO: 12535 - protein, 441 aa, Populus trichocarpa
MMISTWRKRREARLAGKQRLESETGDIEVTVPNHFRCPVSLDLMKDPVTMSSGITYDRESIEKWIEAGNVTCPITNKVLRSLDPIPNHTIRKMIQDWCVANSSYGIERIPTPRIPVSSEEVLEIHSKIKTACRKGDQAGCQNLVAKIKALAKESERNRRCLVATGTAGVLSSAFEEFSKASFDDNVAVLEEILSGLAVLLPHDKATTYLGSDASMDCVVWFLKSEDLSTRRNAVLVLKELVPLDNRKVDMLLEIEGATEALFKLIKAPICPSATKASLLIIYHMVMSSSPTNAKIIDKFLDLGLVSLLLEMLVDAERSICEKALGVLDGICDRDQGREKAYNHALTIPVLVRKIHRVSDLAMKFSVSILFKLCMNEKRGNGGVLVEAIQRNAFEKLLVLLQVGCDERTREKATQLLKLLNVYRGRVDCIDSVDFKNLKRPF

SEQ ID NO: 12536 - DNA, 1347 bp, Zea mays
  CDS (1)..(1347)
atggagcgggcgcgggcgcgggcgccggctctggctctggcaccggtggaggttcccaagttcttcgtgtgcccgatctcgctggaggtcatgcgggacccggtcacgctgtcgtcggggatcacctacgaccgcgacagcatcgagcgctggctgttcaccgacgggcacggcgactgccccgtcaccaagctgccgctgggcgccgacgacctcgagcccacgcccaaccacacgctccggcggctcatccagtcctggtgcgccgcgcacgccgtcgagcggttccccaccccgcgcccaccggtcgacgccgaccgcgtcgccgcgatcgtgggctgcgccaagaagggtggccagcaggaagtgctggccgcgctcagggagctcgcggacatcatcggggagagcgaccgcaaccggcgctgcgtcgagggcgtgccagaagccgtggagttcctcgtgtccgtcgtcaagaaacacgccgcaggcacgtcgtcgtccaagcctctcggcggatgcagatcccaagaggagccgatgtgcggcgtgccggactcccctaaggcgtgctcgccggaggaggcggctctgagcatcttgcattctctcaagctctccgaggcgagcctgaagagagccttggagagcagcgacggtttcgtggacaccttagcgtccgtgctgcgctggccgccgaactaccgggcgcgcacgtacgcgatgcacctgctgaaggcggcgctgtcggcgatgcagccctcgcagctgagctcggcgagcacggatctggtcgagggcgtcgtgagggtggtggcagaccggacgttgtcgcccaaggcgatcaaggtggcgcttcacgtgctctgccggctttgcccgtggggccgcaaccgcgtcaaggcagtcgaggccggcgccgtggcggcggtggtggagctgctcctcaacgaggggtgcgggtgcggtggcagcaacggcaagcgggcggtggagctcgcggtggttgccatcgaccatctgtgcggctgcgcagaagggcggttggagctcgtggcccacccggcagggctggctgttgttgcgcgagccgcgacgcggctgtcccccaccgccaccgagagcgcggtgcgcgcgctgcacgcggtggccaggcactccgcgacccccgcggtgctgcaggagatgcttgccgtcggagtagtagcgaggctgctgtacctggtgcaggccggcgcatcgggcgagcgcccgagggagagggcgcgggagatgctcaagatgcacgccagagtttggaggggctcgccgtgcttggcgtcgcacatggcatcctacccttgttga

SEQ ID NO: 12537 - protein, 448 aa, Zea mays
MERARARAPALALAPVEVPKFFVCPISLEVMRDPVTLSSGITYDRDSIERWLFTDGHGDCPVTKLPLGADDLEPTPNHTLRRLIQSWCAAHAVERFPTPRPPVDADRVAAIVGCAKKGGQQEVLAALRELADIIGESDRNRRCVEGVPEAVEFLVSVVKKHAAGTSSSKPLGGCRSQEEPMCGVPDSPKACSPEEAALSILHSLKLSEASLKRALESSDGFVDTLASVLRWPPNYRARTYAMHLLKAALSAMQPSQLSSASTDLVEGVVRVVADRTLSPKAIKVALHVLCRLCPWGRNRVKAVEAGAVAAVVELLLNEGCGCGGSNGKRAVELAVVAIDHLCGCAEGRLELVAHPAGLAVVARAATRLSPTATESAVRALHAVARHSATPAVLQEMLAVGVVARLLYLVQAGASGERPRERAREMLKMHARVWRGSPCLASHMASYPC

SEQ ID NO: 12538 - DNA, 1299 bp, Glycine max
  CDS (1)..(1299)
atggttttgtcttggactagaagaaacgttttccgccgtgcaaagaaggagaaggaacaaagtcaactattagaagttgaggttgtgattcccaaccactttcgctgtccggtgagtttggagctgatgacagatccggtgactttatcaaccggcattacctacgaccgtgtgagcatcgagaagtggatcgagggagaaaacagaacctgccccgtcaccaaccaggtgctgacaaccttcgacctcatccccaaccatgccattcgcatgatgattcaggattggtgcgtccaaaacagttcttatgggattgaaagaatccccactcctcgtattcccatctccagctacgaggtatccgacacttgtacgaggatcttgtcggcttgccagcgtgggaggtgtcaggagttggttggaaagattaaggtttggggtagagagagtgagaggaacaagaggtgcatagttggtgctggtgctggtgctgttcttgcatatgcctttgattgtttctcaagtaactctattgataagcatgtggttgttttggaggaggttttggaggtgatgacatggatgatcccatttggggaagagggtgtttctaaattgagttcaagagcttctttgaattcattggtttggtttctagaagggaaagaccttgcatcaaggcaaagtgctgctttgttgcttaaagaagtgtgtgtgcaagaattggccaaggttggaaatgttgttgaggctttggttaagatgcttagggagcctattgggagtagtactcccacaaaggcttgtttggcaacaatttttaacttggtttcttcagcggctgcgaatagagaggggattgttcaaagatttgtggagttgggtttggtttcacttttgcttgaggctattgttgatggagaaaaaggggtgtgtgagaaggcacttggggtgttggattgcatttgtgattgccaaaaggggaaggaggttgttgaaagcaatgctcttgccttgcctcttgttgttaagaagcttttgagggtgtcaccattggcttcaagttttgctgtgtctattctaaggaagatttgtgacaagagggaggaaggggttctggttgaggcacttcaagttggggtttttcagaagctcttggttatgctgcaggttgggtgtgatgagagcaccaaggagaatgctacccggttgttgaaactgttgaatggttacaggaacaaagcggagtgcactgactcatcatcattggatttcaagcatcttaagaagccattctaa

SEQ ID NO: 12539 - protein, 432 aa, Glycine max
MVLSWTRRNVFRRAKKEKEQSQLLEVEVVIPNHFRCPVSLELMTDPVTLSTGITYDRVSIEKWIEGENRTCPVTNQVLTTFDLIPNHAIRMMIQDWCVQNSSYGIERIPTPRIPISSYEVSDTCTRILSACQRGRCQELVGKIKVWGRESERNKRCIVGAGAGAVLAYAFDCFSSNSIDKHVVVLEEVLEVMTWMIPFGEEGVSKLSSRASLNSLVWFLEGKDLASRQSAALLLKEVCVQELAKVGNVVEALVKMLREPIGSSTPTKACLATIFNLVSSAAANREGIVQRFVELGLVSLLLEAIVDGEKGVCEKALGVLDCICDCQKGKEVVESNALALPLVVKKLLRVSPLASSFAVSILRKICDKREEGVLVEALQVGVFQKLLVMLQVGCDESTKENATRLLKLLNGYRNKAECTDSSSLDFKHLKKPF

SEQ ID NO: 12540 - DNA, 1269 bp, Glycine max
  CDS (1)..(1269)
atgctgtatgaatctgatataatgacagaaattgaaactcctcaattttttctttgtcctatttcgcttcagatcatgaaggaccctgtgacaaccgttacagggataacatacgacagagaaggcatcgaacaatggttgctaaaagcgaaagattgcacgtgtccaatcacaaagcaacgattgccacgaagcacagagttcttaaccccaaaccacacgcttcggaggctaatccaagcgtggtgctcagcaaacgaagccaatggcgtagaccaaattccaaccccaaaatcccctcttagcatcgccaacgttgagaaactcgtgaaggatctcgaagtatcttcccgttttcaaagggcactggagaagttgcacgatcttgcaatagagaacgggaggaacagaaggtgcatggcttctgcgggtgtagcagaagctatggtgcacgtgatcacaaagagttttatccaaggtaacaaaacgacctcgtgcgttgaagaggctctgagaattcttggtttgctttggagtagtgctaataatatggtcgacaacgacaacatgaagcgcatggtgggtgagaactttgactttctcaactctttgacttgggttttgcagcttcaaaccaagaacaacgttaaggtaataaacgaagcaatgccaatattgaaattgacaattgaagccaaagattcaacccctttagggaacttgaagcttgaattctttaaagttgttgtgagtgtgatgaaaaatagagaactcactcagcaagctgttaaatctgcattgcacgtgcttatagaaacctgtcctttggggagaaacagaatgaagatagttgaagcaggtgcagtggtggaactcattgaacttgcacttgaaaaaccagaaaagaatatgacagaactcatatttattctcttggctcatctttgttcttgtgctgatgggagagaacagtttctgcaacatgctgcaggcattgctgtggtttcaaagaggatccttagggtttcaccaaccactgatgatcgagctcttcatatattttccttggtttcgaagttctcggcctccaatgaggtcgtgcaagagatgctgagggttggtgctgtgtcaaagctttgcatggtgttgcaagcagattgtgcttcctatttgaaggaaaaagcaagaggggtacttaggttgcactcaaaaacatggaacaattctccatgtattcaagtgtatttgttaaccagattccataggtga

SEQ ID NO: 12541 - protein, 422 aa, Glycine max
MLYESDIMTEIETPQFFLCPISLQIMKDPVTTVTGITYDREGIEQWLLKAKDCTCPITKQRLPRSTEFLTPNHTLRRLIQAWCSANEANGVDQIPTPKSPLSIANVEKLVKDLEVSSRFQRALEKLHDLAIENGRNRRCMASAGVAEAMVHVITKSFIQGNKTTSCVEEALRILGLLWSSANNMVDNDNMKRMVGENFDFLNSLTWVLQLQTKNNVKVINEAMPILKLTIEAKDSTPLGNLKLEFFKVVVSVMKNRELTQQAVKSALHVLIETCPLGRNRMKIVEAGAVVELIELALEKPEKNMTELIFILLAHLCSCADGREQFLQHAAGIAVVSKRILRVSPTTDDRALHIFSLVSKFSASNEVVQEMLRVGAVSKLCMVLQADCASYLKEKARGVLRLHSKTWNNSPCIQVYLLTRFHR

SEQ ID NO: 12542 - DNA, 1278 bp, Nicotiana benthamiana
  CDS (1)..(1278)
  misc_feature (577)..(577): n is a, g, c or t
  misc_feature (686)..(686): n is a, g, c or t
atggaagaagtagagatacctcaatattttttgtgtcctatatcacttcaaataatgaaagatccggtgacgacggtgaccggaataacgtacgaccgggaaagcatcgagatgtggttgttaacggcggaggaagagacggagacggcggcgtgtccggtaacaaagcaacctttgccaaaagacaccgagttgttgacaccaaatcatatgctccggcggctaattcaagcttggtgcatagtcaacgcagagaaaggcgttgaccgaattccaacaccaaagtatcctatgaacaaatcgaatattctccgattacttcgacaagttaataataatgatcatcagctttgtgctgaagctttgaggaaaatggctgatttggttagtgagaatgaaaagaacaggaaatgcatggaacaagctggtgcaattaaggctatggtttgtttcatagtaaaaagtttcaaatatgagaaattatttcctggtattgaagaagctttaaggattttccatttaatttggaatccaaaatccgaaaacaagcagtatgtaaaggataaccctgatttanttcaagcaattttatggattttaaagagcaatttgaataccagtcacgtcctagtcaagactcatgcaatgatggttttgaagaacgtgacagaagtttcgagttcgantcttttaacaggattagaccccgagtttttccaacaaatggcgaatacattgcgaaaaaatggaaagtactacatctctcaacaagcaacaaaagcagctttacaagtgctaatagatgcatgtctatggggaagaaataggctaaaaatcgtcgaatcgggagccattttcgagctgattgagcttgaattatctaaccctgagaaaagggttagtgaattagtattctgtctattggctaatctatgcgtattagctgatgggagagcagaattgttgaaacatgcagctggaattgcagtggtcacaaaaaggacactaaggatatcttcagctacagatgatagtgcacttcaaattcttggtttaatttcaaagttttctgccacaaacgaagtgttattggaaatgttaagggtaggaggggtatcaaaactttgcatggcaattcaagcagattgtgagcctcatttgaagaagaaagcaagagagatattgagagcacattctcatgtttggagtaattctccttgtatctccttgtatacagtttatcttttgacagatttcctggacaatagcaagatttga

SEQ ID NO: 12543 - protein, 425 aa, Nicotiana benthamiana
  misc_feature (193)..(193): The Xaa at location 193 stands for Ile, Leu, Phe, or Val.
  misc_feature (229)..(229): The Xaa at location 229 stands for Asn, Ile, Ser, or Thr.
MEEVEIPQYFLCPISLQIMKDPVTTVTGITYDRESIEMWLLTAEEETETAACPVTKQPLPKDTELLTPNHMLRRLIQAWCIVNAEKGVDRIPTPKYPMNKSNILRLLRQVNNNDHQLCAEALRKMADLVSENEKNRKCMEQAGAIKAMVCFIVKSFKYEKLFPGIEEALRIFHLIWNPKSENKQYVKDNPDLXQAILWILKSNLNTSHVLVKTHAMMVLKNVTEVSSSXLLTGLDPEFFQQMANTLRKNGKYYISQQATKAALQVLIDACLWGRNRLKIVESGAIFELIELELSNPEKRVSELVFCLLANLCVLADGRAELLKHAAGIAVVTKRTLRISSATDDSALQILGLISKFSATNEVLLEMLRVGGVSKLCMAIQADCEPHLKKKAREILRAHSHVWSNSPCISLYTVYLLTDFLDNSKI

SEQ ID NO: 12544 - DNA, 1242 bp, Oryza sativa
  CDS (1)..(1242)
atggaggagcagcagcaggtggaggtggaggtggaggtgccgtcctacttcgtgtgccccatctcgctgcagatcatgcgcgacccggtgacgctccccaccggcatcacctacgaccgcgacggcatcgagcgatggctcctcaccgccggcacctgcccgctcaccaagcagcccgtgccgcccgactgcgaccccacgcccaaccacaccctgcgccgcctcatccagtcgtggtgcgccctccacgccgaccatggcgtcgacctcgtccccacccccaagccccccgccgaccgcgcccgcgtcgccgacctcgtctcccgcctccgcgccgccacgagctccgctgccctcctcgacgcgctgcgcgagctcagggacgtttccgccgagagcgagcgtaacaggaagctcctcgccgccgtccccggcgcggtggatgttctggccgccgtcgtcgtcgcgtcgtgtcgagacgccaaggccgcgtgcgacgaggccctcgagatcgtctgctcgctggagctctcggagcggtgcctggcgcggctcgtcgagaggaacgaggagctcgtcgacgcgctcgtcgccacgctgcagcggacgaacaccacgtcccgggcgcacgcggcgctgctcctggaggccgtgacggcggtcatgccgtcgaacaggctggtgtccctcccggaggaggtgttcggtgaggcggtgcagctgctccgcgacagggtatcgagcccggcgacgagggcggcgctgcacgtgctggtcggcacgacgtcgtggggccgcaaccgcgtgaaggcggtggacgccggcgcggtggcggtgctggtcgacatgctcctggacgggccagtcgagcggcgcgggtgcgagctggccctggcggcgctggaccggatgtgcgggtgcgcggaggggcgggcggcgctggtgtcgcacggcgcgggcgtggcggtggtggggaggaaggtgctgagggtgtcggaggtggcgagcgagaaggcggtgcgggtgctgcggtcggtggcgaggcacgcggcgacggcggcggtggtgcaggagatggcgcagacgggggcggtggagaagctgtgcgtggtggcgcagtcggagcagtgcggggagaggacgcgggagcgggcgcgggagacgctgcggctgcacgccagagcgtggaggaactcgccctgcttgcagcctcacctccaggccctctacccttcttgctga

SEQ ID NO: 12545 - protein, 413 aa, Oryza sativa
MEEQQQVEVEVEVPSYFVCPISLQIMRDPVTLPTGITYDRDGIERWLLTAGTCPLTKQPVPPDCDPTPNHTLRRLIQSWCALHADHGVDLVPTPKPPADRARVADLVSRLRAATSSAALLDALRELRDVSAESERNRKLLAAVPGAVDVLAAVVVASCRDAKAACDEALEIVCSLELSERCLARLVERNEELVDALVATLQRTNTTSRAHAALLLEAVTAVMPSNRLVSLPEEVFGEAVQLLRDRVSSPATRAALHVLVGTTSWGRNRVKAVDAGAVAVLVDMLLDGPVERRGCELALAALDRMCGCAEGRAALVSHGAGVAVVGRKVLRVSEVASEKAVRVLRSVARHAATAAVVQEMAQTGAVEKLCVVAQSEQCGERTRERARETLRLHARAWRNSPCLQPHLQALYPSC

SEQ ID NO: 12546 - DNA, 1212 bp, Medicago truncatula
  CDS (1)..(1212)
atggatgaaattgatgttccttcacattttctttgcccaatttccctacaacttatgaaagatcctgtcacactttccacaggaattacgtacgacagagaaaacatagaaaaatggttattttcattccaaaacaatacttgtcctgttacaaaacaaaccttattagaaaccgatcttaataatcttataccaaaccatactttacgtcgtttgattcaatcttggtgtacccttaatgcttcatttggtgttgaacgtattccaacaccaaaatcaccaatagatagaacacagattcttaaactcctcaatgaagcaaagaaattcccagaaaaacaactcaattgtcttgtaaagcttcgttctatcgtcttcgaaagcgaaaggaacaaaaaatgtttggaatctgcaggtgcaatagagtttctagctttaaccatgaagaacaatttaaattcaagttctctgagtgaagcagctattgaaattttgtttcatcttaacccttctgaagaacatgttaagaatctgataaacaatgaaagcattcaatttattgagtcattgtttcatgttttgaagcttggaagctaccaatctagaggttatgcaacaatgctgttgaaatcggcgtttgaagtatccgatccgattcaattaataagcgtaaaaaaggcgatttttgaagagataatgagagtgctagttgataagatctcacaacaagcttcaaaagctgcattaaaactacttctggagcttttaccatggggaagaaaccgaattaaagcggttgaaggaggcgtggttttagtcctaatcgaacttcttttcgatgtttcggaaagaagggtttgtgaattgatgttaataggtttggatcaaatttgtggttgtgcagaagggagagcagaattgttgaatcatggagcaggattggctattgtgtcaaagaaaattttgagggtttctcatgttgcaagtgatagaggtgttagaattatgagttctatttgtaggtattctgcaaattctagagttttacatgaaatgttgcatgttggagcagtttcaaagttgtgtttggtgcttcaagttgatagtaatttcaagacaaaagagagggctaaggagatactcaaattgcattctactgtttggaagaattctacatgtattcctgttccattgttatcttcttatccatga

SEQ ID NO: 12547 - protein, 403 aa, Medicago truncatula
MDEIDVPSHFLCPISLQLMKDPVTLSTGITYDRENIEKWLFSFQNNTCPVTKQTLLETDLNNLIPNHTLRRLIQSWCTLNASFGVERIPTPKSPIDRTQILKLLNEAKKFPEKQLNCLVKLRSIVFESERNKKCLESAGAIEFLALTMKNNLNSSSLSEAAIEILFHLNPSEEHVKNLINNESIQFIESLFHVLKLGSYQSRGYATMLLKSAFEVSDPIQLISVKKAIFEEIMRVLVDKISQQASKAALKLLLELLPWGRNRIKAVEGGVVLVLIELLFDVSERRVCELMLIGLDQICGCAEGRAELLNHGAGLAIVSKKILRVSHVASDRGVRIMSSICRYSANSRVLHEMLHVGAVSKLCLVLQVDSNFKTKERAKEILKLHSTVWKNSTCIPVPLLSSYP

SEQ ID NO: 12548 - DNA, 1224 bp, Capsicum annuum
  CDS (1)..(1224)
atggaagaaattcaagtaccaccttatttcctctgtccgatttcactggagatgatgaaagatccagtcacgatctcgactggaataacatacgatcgagagaacatcgagagatggatattctcagctaagaacaatacgtgtccggttacgaagcaatcccttacgagcatagagttgacccctaatgtcactctacgacgattcatccaatcgtggtgtactctcaatgcgtcccatggcatcgagaggttccctacaccgaagcctccggtcagcaaagctcaaatcttaaagctcatgaaagaagcgaaatcgcgcgaaatgcaaatgaaatcactcaacacacttagatccatagcttctgtgaacgatgctaacaagcgttgcatggagtctgcgggcgcagcggagttcttagcctctgttgtgattgattcgagtgatgtgttgggtgaagagggtttcatgagtactaaagatgaagcattaagcatcctctaccaactcaagttatcagaagatggattgaggtcactcatcacgagtggaaatggtgaattcatcgagtcactgacacgcgtcatgcagcgtgggagctatgagtcaagggcttacgcggtgatgctgatgaaagacatgttcgaagcatccacactaccaactctattttcgagcttgaagaaagagttcttcgctcaagtggttcgagtcttgagggatgagatctctcaaaaggccaccaaagcgtcattgcaagtgctagcgcacgcgtgtccatttgggaggaacagagtgaaagcagctgaggcaggagccgttagggttttggtggaccttctgctcgattcatccgagaaaaggacctgcgaactgatgctaatcttgctggatcaaatttgtcagagcgcagaagggagagccgagctgttgaatcatccgggagggttagccatcgtctcgaagaaaatacttagggtttcgaaagtagggagcgaaagggcaatcaagatattgcattcgatatcaaagttttcatcaacacaaagtgttgttcaagagatgttgagtttgggtgttgtggcaaagctttgtttggtacttcaagttgattgtggaagtaaagctaaggatagagctagagatattctcaaaattcatgcaaaggcatggaggaattctccttgtatacctatgaatttattatcttcatatccattttag

SEQ ID NO: 12549 - protein, 407 aa, Capsicum annuum
MEEIQVPPYFLCPISLEMMKDPVTISTGITYDRENIERWIFSAKNNTCPVTKQSLTSIELTPNVTLRRFIQSWCTLNASHGIERFPTPKPPVSKAQILKLMKEAKSREMQMKSLNTLRSIASVNDANKRCMESAGAAEFLASVVIDSSDVLGEEGFMSTKDEALSILYQLKLSEDGLRSLITSGNGEFIESLTRVMQRGSYESRAYAVMLMKDMFEASTLPTLFSSLKKEFFAQVVRVLRDEISQKATKASLQVLAHACPFGRNRVKAAEAGAVRVLVDLLLDSSEKRTCELMLILLDQICQSAEGRAELLNHPGGLAIVSKKILRVSKVGSERAIKILHSISKFSSTQSVVQEMLSLGVVAKLCLVLQVDCGSKAKDRARDILKIHAKAWRNSPCIPMNLLSSYPF

SEQ ID NO: 12550 - DNA, 1338 bp, Nicotiana tabacum
  CDS (1)..(1338)
atgatttcaacatggaggaaaaggagaacagaaaaaagggtagcaaagagaggattagtggaggatattacaaacatggagttggtgattcctagacatttcacatgtccaatttccttagacttaatgaaagatccagtgaccttgtcaacagggatcacatacgatagagagaatattgagaaatggattgaggctgggaatcaaacttgtcccatcacaaatcaaacattgagaaatggtgaaccaattccaaatcacagcataaggaaaatgatccaacaatggtgtgttgagaacaaggatcatgggattgaaagaattccaactccaagaattcctgtgacatcgtccgaggttgttgaactacttgcaaaaataagcaaagagattcatgacttagagttgtgcggagaattagtgtccaaagtgaagaagttggtgaatgaaagtgagaggaacaaacggtgctttgttaccaatggtactgcacaggttttatcagctgcatttgttgcattttcagaggaaattaatatgagaaatgcttcaacaggggaagtgatcttgtcaactttgacgactatattgcctctggatggggagtccaagttgaatcttggatcgatttcatcgttacgttgcatggtgtggttcttgaagaatgggagtttatcaagcaggagaaatgcagtttttgtgctaaaagatatcttgaaaatggaggaacaagacaaggttgaaatcttgttaggaatggaaggagctttagaaggcttagtgaaacttgtgaaagagccaatttgccctactactacaaaagcttctttgttagcaatctaccacatggttaattcatcacatttgtcgtcgtctttcgccaacaagaaggctcaatcaagatttgttgatctggggttagttgaattgctggtagagatgcttgttgattgtgaaaagagcatatgtgaaaaggcattaggtgttttggatggaatttgcagctctatagaaggaagaaaaagggcttacagttatgctctaactgtgcctgttttggtcaagaaattgctgagagtttcagatttggcaactgagttttcagtttcaattctatggaagattgggaagaatgagaagagggaaaatggaggtgatgttcttgttgaagctctaaaacttggtgcttttcagaagcttttgctgctgctacaagttggttgtagtgaaacaacaaaagagaaggctagtgagttgttgaagttgttgaatgtgcatagggatagagcagagtgtgttgattcattggacttcaagagtctcaaaaggccattctga

SEQ ID NO: 12551 - protein, 445 aa, Nicotiana tabacum
MISTWRKRRTEKRVAKRGLVEDITNMELVIPRHFTCPISLDLMKDPVTLSTGITYDRENIEKWIEAGNQTCPITNQTLRNGEPIPNHSIRKMIQQWCVENKDHGIERIPTPRIPVTSSEVVELLAKISKEIHDLELCGELVSKVKKLVNESERNKRCFVTNGTAQVLSAAFVAFSEEINMRNASTGEVILSTLTTILPLDGESKLNLGSISSLRCMVWFLKNGSLSSRRNAVFVLKDILKMEEQDKVEILLGMEGALEGLVKLVKEPICPTTTKASLLAIYHMVNSSHLSSSFANKKAQSRFVDLGLVELLVEMLVDCEKSICEKALGVLDGICSSIEGRKRAYSYALTVPVLVKKLLRVSDLATEFSVSILWKIGKNEKRENGGDVLVEALKLGAFQKLLLLLQVGCSETTKEKASELLKLLNVHRDRAECVDSLDFKSLKRPF

SEQ ID NO: 12552 - DNA, 1296 bp, Glycine max
  CDS (1)..(1296)
atggttttgtcttggtcaagaaggaacgttttccgccgtgccaagaaggagaagtcacaaactcaattggaagtggaggttgtgattcccaaccactttcactgcccggtgagtctggagctgatgacagacccagtgactttatcaaccggcatcacctacgaccgtgtgagcattgagaagtggatcgagggagggaacagaacctgccccgtcaccaaccaggtgctgacaaccttcgacatcatccccaaccacgccattcgcaggatgattcaggattggtgtgtcgaaaatagttcttatgggattgatagaatccccacacctcgtattcctatctcggcatacgaggtttccgacacgtgtaccaggatcttgtcggcttgccagcgtggagatgacaagaggtgtcaggagttggtcgggaagattaaggtttggagtagagagagtgagaggaacaagaggtgcatagttggtgctggtgctggtgctgttcttgcatatgcctttgattgtttctcaagtaactctattgaaaaacatgtggtgcttttggaggaggttttggaggtgatgacatggatggtcccacttggggaagagggtgtttctaaattgagttcaggagcttctttgaattcgttggtatggtttctagaggggaaagaccttgcatcaaggcaaagtgctgctttgttgcttaaagaagtgtgtgttcaagaattggccaaggttggagaagttgttgaagctttggttaagatggttagggagcctattgggagcacttccaccaaggcttgtttggcaacaatttttaacttggtgtcgttggctgcgaatagagagggaattgctcaaagatttgtggagttgggtttggtttcacttttgctagaggctattgttgatggagagaaaggggtgtgtgagaaggcacttggggtgttggattgcatttgtgattgcgagaaggggaaggaggttgtgaagagcaatgctctagccttgcctcttgttgttaggaagcttttgagggtgtcaccattggcttcaggttttgctgtgtctattcttaggaagatttgtgacaagagggaggaagggattctgattgaggcacttcaagttgggctttttcagaagctctcggttctgctgcaggttgggtgtgatgagagcaccaaggagaatgctaccgggttgttgaaactgttgaatggttacaggaacaaagcggagtgcactgactcatcattgaatttcgagcatcttaagaagccattttaa

SEQ ID NO: 12553 - protein, 431 aa, Glycine max
MVLSWSRRNVFRRAKKEKSQTQLEVEVVIPNHFHCPVSLELMTDPVTLSTGITYDRVSIEKWIEGGNRTCPVTNQVLTTFDIIPNHAIRRMIQDWCVENSSYGIDRIPTPRIPISAYEVSDTCTRILSACQRGDDKRCQELVGKIKVWSRESERNKRCIVGAGAGAVLAYAFDCFSSNSIEKHVVLLEEVLEVMTWMVPLGEEGVSKLSSGASLNSLVWFLEGKDLASRQSAALLLKEVCVQELAKVGEVVEALVKMVREPIGSTSTKACLATIFNLVSLAANREGIAQRFVELGLVSLLLEAIVDGEKGVCEKALGVLDCICDCEKGKEVVKSNALALPLVVRKLLRVSPLASGFAVSILRKICDKREEGILIEALQVGLFQKLSVLLQVGCDESTKENATGLLKLLNGYRNKAECTDSSLNFEHLKKPF

SEQ ID NO: 12554 - DNA, 1329 bp, Petroselinum crispum
  CDS (1)..(1329)
atgatttcttcatggaaaaagattagggcttctcgccatgcaaacaaaagaaatggcttagatgatttatccaacatggaggtatctataccgaatcatttccggtgtcctatttcattggacttgatgaaagatccggttactttgtctaccggaataacttacgatcgtcatagtattgagacgtggatcgaagccggaaacaagacttgtcctattacaaaacaaatgttgagtacacttgagccaattccgaatcatacaataaggaaaatgatacaagattggtgcgtggacaatagctcgtatgggattgagagaattccaactcctagaatccccgtgagctcgcatcaagtcacggagatgctttctaaggttgttgcggcgtgtagaagagaggaggccagcgcgtgtcaagagctggttgggaagattaagcgtttggtgaaagaaaatgaacggaacaagcgatgttttgtggctaatgggaccgttggggttttagcgtcaacgtttgaagcattttcgaagttgtcgtttgataagaatgttgcggtgctagaggagattttgtcatgtttgtcattgatgacacctttggatggagaagccaaagcttttcttggatcaaattcttcgttgaattgcatggtttggtttttgaagagtggcgatttatctgctcgagcaaattctgttttagtacttaaacatgttttgtcaactgatcagaagaaaatggaggagttttcgatgatcgaaggctctttggaagccttggtcaaagtaatcaaagagccggtctctccaacaaccacaaaagcctctttgctaatcgtttactacatggtttcaacttcatcatccagcagagtggatgacaagattatagcaagatttatcgacatggggctgattgaaaggctactagaaatgcttgtggattgcgataaaagcatatgtgaaaaagcacttggagttttggatggcctgtgtttgacaaatgaaggaagagaaaaggcctatgctaatgccctaacaatgcctgttctggtcaagaaaatccttcgagtttccgatttggcaacagagttttcggtgtcaattgtttggaagctaagcaagaacgataaaagcgaagatggaggagtcattgttgaagctcttcgagtaggggcgtttcagaagttattgttattgttgcagtttggttgtaatgagaaaataaaggacaaggccacagaattgttgaagttgttgaatctgcacagggacaagttggagtgcattgattcaatggatttcaaaaatctcaaacgtacttaa

SEQ ID NO: 12555 - protein, 442 aa, Petroselinum crispum
MISSWKKIRASRHANKRNGLDDLSNMEVSIPNHFRCPISLDLMKDPVTLSTGITYDRHSIETWIEAGNKTCPITKQMLSTLEPIPNHTIRKMIQDWCVDNSSYGIERIPTPRIPVSSHQVTEMLSKVVAACRREEASACQELVGKIKRLVKENERNKRCFVANGTVGVLASTFEAFSKLSFDKNVAVLEEILSCLSLMTPLDGEAKAFLGSNSSLNCMVWFLKSGDLSARANSVLVLKHVLSTDQKKMEEFSMIEGSLEALVKVIKEPVSPTTTKASLLIVYYMVSTSSSSRVDDKIIARFIDMGLIERLLEMLVDCDKSICEKALGVLDGLCLTNEGREKAYANALTMPVLVKKILRVSDLATEFSVSIVWKLSKNDKSEDGGVIVEALRVGAFQKLLLLLQFGCNEKIKDKATELLKLLNLHRDKLECIDSMDFKNLKRT

SEQ ID NO: 12556 - DNA, 1371 bp, Arabidopsis thaliana
  CDS (1)..(1371)
atggatcaagaagaggaagagatcgagattcctaattactttatctgcccaatctcactagagatcatgaaagatccagtcacgaccgtttctggcatcacttacgaccgtcaaaacatcgttaaatggctcgaaaaggtcccttcttgtcccgtcacgaagcaacctcttcccttagactccgatcttacacctaaccacatgcttcgccgtcttatccaacactggtgcgtcgagaacgagacacgtggcgttgtcagaatctctacacctcgagttcctcctggaaaacttaacgtcgtcgaagagatcaagaatctcaaaaagttcggccaagaagccttaggaagagaagaaacgttgcagaagcttgaagttttggcaatggacggaaataacagaagattgatgtgtgaatgtggcgtacataagtctttgatcttgttcgtagtcaagtgtactagtgaagacgaagacggacgacgtcgtatcaaaggactagatgagtctcttcgtcttcttcacttgatcggtattccatcaaacgacgcaaaaacaatcttgatggaaaacgatcgagttatggaatcgttgacttgggttttacaccaagaagactttctcagtaaggcttatacaattgtgctattgaggaatctaacggaatacacttcctctcatatcgtagagagattgaatcccgagatttttaaagggatcatagggtttctcaaggatgttgtaaatagtgttaatcggacgagccctaccgtgagagaaacggtacagtcatcatcaaggcctagcttgggaaaaacggaaccatcaaaacttgatcatagtttggtcatcaaacaagcggtgactgccgcgctgatgattcttttagagacttcttcgtggagccgaaaccgatcactccttgtggatctcggtgcggtttctgaactcatcgaactcgaaataagctacactggcgagaaaagaatcacagaacttatgttaggagttttatctcgtttatgttgctgtgcgaacggtagagccgagattcttgctcataggggcggaatcgcggttgtgacaaagcggctattgagggtttcacctgcggcagacgatagagctatctctatcctaactacagtgtcaaaattctcgccggaaaacatggtggtggaagagatggttaatgttgggacggtagagaagctctgttccgttctaggaatggattgtggtttgaacttgaaggagaaagcaaaagagatactaaaagatcattttgatgagtggaagaagtttccatgtattgacataactcttctcactaagctgctaagcatctcacccaaagggccaaagatctaa

SEQ ID NO: 12557 - protein, 456 aa, Arabidopsis thaliana
MDQEEEEIEIPNYFICPISLEIMKDPVTTVSGITYDRQNIVKWLEKVPSCPVTKQPLPLDSDLTPNHMLRRLIQHWCVENETRGVVRISTPRVPPGKLNVVEEIKNLKKFGQEALGREETLQKLEVLAMDGNNRRLMCECGVHKSLILFVVKCTSEDEDGRRRIKGLDESLRLLHLIGIPSNDAKTILMENDRVMESLTWVLHQEDFLSKAYTIVLLRNLTEYTSSHIVERLNPEIFKGIIGFLKDVVNSVNRTSPTVRETVQSSSRPSLGKTEPSKLDHSLVIKQAVTAALMILLETSSWSRNRSLLVDLGAVSELIELEISYTGEKRITELMLGVLSRLCCCANGRAEILAHRGGIAVVTKRLLRVSPAADDRAISILTTVSKFSPENMVVEEMVNVGTVEKLCSVLGMDCGLNLKEKAKEILKDHFDEWKKFPCIDITLLTKLLSISPKGPKI

SEQ ID NO: 12558 - DNA, 1254 bp, Brassica napus
  CDS (1)..(1254)
atgccgagaagtctagagccgttggatcttggaatccagataccgtaccatttcagatgtccaatctcattagagctgatgcgcgacccagtcaccgtctgcaccggtcaaacctacgatcgaacaagcatcgaatcatgggtctccaccggtaacaacaccacgtgtccagtcacacgcgctcctttgtccgacttcacactcatcccaaaccacactctccgccgtctcatccaagaatggtgcgtcgctaaccgctccaacggcgtcgagcgtatccccacacccaaacagccagctgatccaacctccgtccgagctctcctcagccaagcctccgccacgtccggaactcacgtctccgctcgctcacgcgccgccgccctccgccgcctacgtgccttcgcgcgagactccgaaaagaaccgcgttttgatcgcggcgcacaacgccaaagagattctgatcaggatcctgttctccgacgatatcgattcatcggagttggtctctgaatcgctcgctcttctcgttatgttcccgatgacggagcatgataaatgcgtttcgatcatttcggatccgggtcgggtcgagtttttaacccggttactgttcgattcctcggtggagacacgtgtcaacgcagccgcgttgatcgagatggcggttacaggatcgaaggaaacggtttcgagttccgaatccattttcgaaggagtcctcgatcttctacgcaatccggcgtcctcgtacccgcggcgagctctcaagatcggaatcaaagccctgttcgcgctctgcctctcgaaaaacacgcgccgcatcgcggtctcatccggcgcgccggagattctgatcgacaggctcgcggcggggttagacaggtgcgacacggagcgagctttagctacggtggagcttctctgccggactccggagggatgcgcggcgttcggcgagcacgctctgacggtgccggttcttgtgaagacgattctgagggtttctgatcgtgcgacggagtacgcggcgggggcgttgttagcgctttgcacggcggaggaaaggtggagagacgaggcggtggcggcgggagtggtggttcagttgctgctgatggtgcagagtgagtgtacggagagggcgaagaggaaggcacagaagctgctgaagcttctgagagactcgtggcctgactactccttcgctaactccgatgatttcgcctgcagcgaagtggtccccttttga

SEQ ID NO: 12559 - protein, 417 aa, Brassica napus
MPRSLEPLDLGIQIPYHFRCPISLELMRDPVTVCTGQTYDRTSIESWVSTGNNTTCPVTRAPLSDFTLIPNHTLRRLIQEWCVANRSNGVERIPTPKQPADPTSVRALLSQASATSGTHVSARSRAAALRRLRAFARDSEKNRVLIAAHNAKEILIRILFSDDIDSSELVSESLALLVMFPMTEHDKCVSIISDPGRVEFLTRLLFDSSVETRVNAAALIEMAVTGSKETVSSSESIFEGVLDLLRNPASSYPRRALKIGIKALFALCLSKNTRRIAVSSGAPEILIDRLAAGLDRCDTERALATVELLCRTPEGCAAFGEHALTVPVLVKTILRVSDRATEYAAGALLALCTAEERWRDEAVAAGVVVQLLLMVQSECTERAKRKAQKLLKLLRDSWPDYSFANSDDFACSEVVPF

SEQ ID NO: 12560 - DNA, 1266 bp, Glycine max
  CDS (1)..(1266)
atggacatgaacgagatcgatgttccttcattctttctctgccccatttcgctagatatcatgaaggatccagtgacggtctcaacgggcatcacctacgaccgtgaaagcatcgaaacctggctgttctcgaagaaaaacacgacatgccccattaccaaactgcccttgatagattacaccgatctcacaccaaaccacacccttcgtagactcatccaagcgtggtgttccatgaacgcttctcacggcatcgaaaggatcccaacccctaaaccccccgttaacaagaaccaaatttcgaagcttctcaaagacgcttctcattcccctctcacatgcctcagaagactcaaatccatctcttccggaagcgaaacaaataagcggtgcatggaggcttctggcgctgttgagtttctagcatcaattgtaatcaacaccaaccgcaacattgattcttcacatgaggctgactcaaacgacggatctggattcgagttgaaaacaagtgcatgcgatgaagcgttgagtttgcttcataatcttcatttatccgaacaagggttgaagactctcttaagcttcagaaacggcgagtttattgagtctttaacaagagtcatgcaaaaggggttctttgaatcacgcgcttatgcagtgttcttgttgaaatccatgtccgaagtggctgaaccagtgcaactattgcatctaagacaagaactttttgtcgaactagtacaagtcttgaaggatcaaatttctcaaaagacatcaaaagcaacacttcaaaccctgatccaattctctccttgggggaggaacaggatcaaagctgtggaagcaggtaccgttcctgttttggtagagcttcttctcgattgcaaggagagaaagccttgcgagatgatgctggtgttgttggaaattctatgccagtgtgctgagggaagagcagaacttttgaatcatgcagcaggtcttgccattgtgtccaaaaagattctaagggtttcgactttggccaatgatagagctgttaagattcttctgtctgtttcgagattctctgcgactccacatgttgttcaagaaatgcttaaacttggtgtggtcgcgaaattgtgcttggtgcttcaggtggatagtggaaacaaggctaaggaaaaggcaagagagattctcaaattgcatgctcgtgcgtggaggaattctccatgcataccgaacaatttgcttaattcatacccgaactatgtgtga

SEQ ID NO: 12561 - protein, 421 aa, Glycine max
MDMNEIDVPSFFLCPISLDIMKDPVTVSTGITYDRESIETWLFSKKNTTCPITKLPLIDYTDLTPNHTLRRLIQAWCSMNASHGIERIPTPKPPVNKNQISKLLKDASHSPLTCLRRLKSISSGSETNKRCMEASGAVEFLASIVINTNRNIDSSHEADSNDGSGFELKTSACDEALSLLHNLHLSEQGLKTLLSFRNGEFIESLTRVMQKGFFESRAYAVFLLKSMSEVAEPVQLLHLRQELFVELVQVLKDQISQKTSKATLQTLIQFSPWGRNRIKAVEAGTVPVLVELLLDCKERKPCEMMLVLLEILCQCAEGRAELLNHAAGLAIVSKKILRVSTLANDRAVKILLSVSRFSATPHVVQEMLKLGVVAKLCLVLQVDSGNKAKEKAREILKLHARAWRNSPCIPNNLLNSYPNYV

SEQ ID NO: 12562 - DNA, 1248 bp, Glycine max
  CDS (1)..(1248)
atgcccggtagtttagaaccgttggatttgggtgttcacataccctaccacttcagatgcccaatctcgctcgaactcatgcgagacccagtaaccgtctgcaccggtcaaacctacgaccgcgccagcatcgaggcatgggtcagcaccggcaacagcacgtgtccggtcacacgcgccactctcacagacttcaccctaatcccgaaccacacccttcgccgccttatccaagagtggtgcgtcgctaaccgcgcttttggcgtcgagcgaatccccactcccaaacagcccgcagaccctgccttagttcgctctctcctcaaccaagcttcttccggttctgcccctgctcacctccgcctttcttccattcgccgactcagacaactcgctcgcgactcggacaagaatcgttccctcattgcctctcacaacgttcgccagatccttctcccaatcgttttcaacaacggttctgacgagttgagtcacgagtcgctcgcgctgctcgttatgtttccgctcggcgagtcggaatgtgcttcgctcgcatctgattcgatgaagattggctatctatcgcggatgttgacgcataactcgttcgacgtccgagtcaactcggccgcgttgatcgagatcgtcgtcgccgggacgcactcgccggagctacgcgcggaggtgagcagtgtcgacgaaatctacgacggagtggtggatctgctccggagcccgatctcgcacccgcgcgcgctcaagatcgggatcaaggccttgttcgcgctttgtttggtgaagaatacgcggcagaaggcggtggacgccggcacgccggcggttctagtcgaccggctcgcggacttcgagaagtgcgacgcggagagggcgctggccacggtggagctgctctgccggattccggcgggatgcgaggcgttcgccggacacgcgctgacggtgccgatgctggtgaagataattctgaaaatctccgaccgtgcgacggagtacgccgccggagcgctgctctcgctgtgttcggaatcggagcggtgccagcgcgaggcggtggcggcgggcgtgctgactcagcttctgcttctcgtgcagagcgattgcacggagagagcgaagaggaaggcgcagatgctgctgaagcttcttcgggattcgtggccgcaagattccatcggaaataattctgacgattttgcatgcagccaggtcgttgtggttcccttttga

SEQ ID NO: 12563 - protein, 415 aa, Glycine max
MPGSLEPLDLGVHIPYHFRCPISLELMRDPVTVCTGQTYDRASIEAWVSTGNSTCPVTRATLTDFTLIPNHTLRRLIQEWCVANRAFGVERIPTPKQPADPALVRSLLNQASSGSAPAHLRLSSIRRLRQLARDSDKNRSLIASHNVRQILLPIVFNNGSDELSHESLALLVMFPLGESECASLASDSMKIGYLSRMLTHNSFDVRVNSAALIEIVVAGTHSPELRAEVSSVDEIYDGVVDLLRSPISHPRALKIGIKALFALCLVKNTRQKAVDAGTPAVLVDRLADFEKCDAERALATVELLCRIPAGCEAFAGHALTVPMLVKIILKISDRATEYAAGALLSLCSESERCQREAVAAGVLTQLLLLVQSDCTERAKRKAQMLLKLLRDSWPQDSIGNNSDDFACSQVVVVPF

SEQ ID NO: 12564 - DNA, 1248 bp, Glycine max
  CDS (1)..(1248)
atgcccggtagtttagaaccgttggatttgggtgttcacataccctaccacttcagatgcccaatctcgctcgaactcatgcgagacccagtaaccgtctgcaccggtcaaacctacgaccgcgccagcatcgaggcatgggtcagcaccggcaacagcacgtgtccggtcacacgcgccactctcacagacttcaccctaatcccgaaccacacccttcgccgccttatccaagagtggtgcgtcgctaaccgcgcttttggcgtcgagcgaatccccactcccaaacagcccgcagaccctgccttagttcgctctctcctcaaccaagcttcttccgattctgcccctgctcaccttcgcctttcttctctccgccgactcagacaactcgctcgcgactcggacaagaatcgttctctcattgcctctcacaaccttctccagatccttctcccaatcgttttcaacaacggttctgacgagttgagtcacgagtcgctcgcgctgctcgttatgtttccgctcggcgagtcggaatgtgcttcgctcgcatctgattcgatgaagattggctatttatcgcggatgttggcgcataactcgttcgacgtccgagtcaactcggccgcgttggttgagatcgtcgtcgtcgggacgcactcgccggagctacgcgcggaggtgagcagtgtcgacgaaatctacgacggagtggtggatctgctccggagcccgatctcgcacccgcgcgcgctcaagatcgggatcaaggccttgttcgcgctttgtttggtaaagaatacgcggcagaaggcggtggacgccggcgcgccggcggtgctcgtggaccggctcgcggacttcgagaagtgcgacgcggagagggcgctggccacggtggagctgctctgccggattccggcgggatgcgaggcgttcgccggacacgcgctgacggtgccgatgctggtgaagataattctgaaaatctccgaccgtgcgacggagtacgccgccggagcgctgctctcgctgtgttcggaatcggagcggtgccagcgcgaggcggtggcggcgggcgtgctgactcagcttctgcttctcgtgcagagcgattgcacggagagagcgaagaggaaggcgcagatgctgctgaagcttcttcgggattcgtggccgcaagattccatcggaaataattctgacgattttgcatgcagccagggcggtgtggttcccttttga

SEQ ID NO: 12565 - protein, 415 aa, Glycine max
MPGSLEPLDLGVHIPYHFRCPISLELMRDPVTVCTGQTYDRASIEAWVSTGNSTCPVTRATLTDFTLIPNHTLRRLIQEWCVANRAFGVERIPTPKQPADPALVRSLLNQASSDSAPAHLRLSSLRRLRQLARDSDKNRSLIASHNLLQILLPIVFNNGSDELSHESLALLVMFPLGESECASLASDSMKIGYLSRMLAHNSFDVRVNSAALVEIVVVGTHSPELRAEVSSVDEIYDGVVDLLRSPISHPRALKIGIKALFALCLVKNTRQKAVDAGAPAVLVDRLADFEKCDAERALATVELLCRIPAGCEAFAGHALTVPMLVKIILKISDRATEYAAGALLSLCSESERCQREAVAAGVLTQLLLLVQSDCTERAKRKAQMLLKLLRDSWPQDSIGNNSDDFACSQGGVVPF

SEQ ID NO: 12566 - DNA, 1347 bp, Zea mays
  CDS (1)..(1347)
atggagcgggcgcgggcgcgggcgccggctctggctctggcgccggtggaggttcccaagttcttcgtgtgcccgatctcgctggaggtcatgcgggacccggtcacgctgtcgtcggggatcacctacgaccgcgacagcatcgagcgctggctgttcaccgacgggcacggcgactgccccgtcaccaagctgccgctgggcgccgacgacctcgagcccacgcccaaccacacgctccggcggctcatccagtcctggtgcgccgcgcacgccgtcgagcggttccccaccccgcgcccaccggtcgacgccgaccgcgtcgccgcgatcgtgggctgcgccaagaagggtggccagcaggaagtgctggccgcgctcagggagctcgcggacatcatcggggagagcgaccgcaaccggcgctgcgtcgagggcgtgccagaagccgtggagttcctcgtgtccgtcgtcaagaaacacgccgcaggcacgtcgtcgtccaagcctctcggcggatgcagatcccaagaggagccgatgtgcggcgtgccggactcccctaaggcgtgctcgccggaggaggcggctctgagcatcttgcattctctcaagctctccgaggcgagcctgaagagagccttggagagcagcgacggtttcgtggacaccttagcgtccgtgctgcgctggccgccgaactaccgggcgcgcacgtacgcgatgcacctgctgaaggcggcgctgtcggcgatgcagccctcgcagctgagctcggcgagcacggagctggtcgagggcgtcgtgagggtggtggcagaccggacgttgtcccccaaggcgatcaaggtggcgcttcacgtgctctgccggctttgcccgtggggccgcaaccgcgtcaaggcagtcgaggccggcgccgtggcggcggtggtggagctgctcctcaacgtggggtgcgggtgcggtggcagcaacggcaagcgggcggtggagctcgcggtggttgccatcgatcatctgtgcggctgcgcagaagggcggttggagctcgtggcccccccgccagggctggctgttgttgcgcgagccgcgacgcggctgtccccccccgccaccgagagcgcggtgcgcgcgctgcacgcggtggccaggcactccgcgacccccgcggtgctgcaggagatgcttgccgtcggagtagtagcgaggctgctgtacctggtgcaggccggcgcatcgggcgagcgcccgagggagagggcgcgggagatgctcaagatgcaccccagagtttggaggggctcgccgtgcttggcgtcgcacatggcatcctacccttgttga

SEQ ID NO: 12567 - protein, 448 aa, Zea mays
MERARARAPALALAPVEVPKFFVCPISLEVMRDPVTLSSGITYDRDSIERWLFTDGHGDCPVTKLPLGADDLEPTPNHTLRRLIQSWCAAHAVERFPTPRPPVDADRVAAIVGCAKKGGQQEVLAALRELADIIGESDRNRRCVEGVPEAVEFLVSVVKKHAAGTSSSKPLGGCRSQEEPMCGVPDSPKACSPEEAALSILHSLKLSEASLKRALESSDGFVDTLASVLRWPPNYRARTYAMHLLKAALSAMQPSQLSSASTELVEGVVRVVADRTLSPKAIKVALHVLCRLCPWGRNRVKAVEAGAVAAVVELLLNVGCGCGGSNGKRAVELAVVAIDHLCGCAEGRLELVAPPPGLAVVARAATRLSPPATESAVRALHAVARHSATPAVLQEMLAVGVVARLLYLVQAGASGERPRERAREMLKMHPRVWRGSPCLASHMASYPC

SEQ ID NO: 12568 - DNA, 22 bp, Artificial sequence
  primer
atgtccggaggaataatggatg

SEQ ID NO: 12569 - DNA, 22 bp, Artificial sequence
  primer
tcagcagggatatgcaagaatc

SEQ ID NO: 12570 - protein, 553 aa, Artificial sequence
  consensus sequence
  Variant (2)..(3): Xaa in position 2 to 3 is any amino acid
  Variant (5)..(5): Xaa in position 5 is any amino acid
  Variant (11)..(12): Xaa in position 11 to 12 is any amino acid
  Variant (14)..(14): Xaa in position 14 is any amino acid
  Variant (19)..(20): Xaa in position 19 to 20 is any amino acid
  Variant (23)..(23): Xaa in position 23 is any amino acid
  Variant (28)..(29): Xaa in position 28 to 29 is any amino acid
  Variant (32)..(32): Xaa in position 32 is any amino acid
  Variant (34)..(38): Xaa in position 34 to 38 is any amino acid
  Variant (39)..(47): Xaa in position 39 to 47 is any or no amino acid
  Variant (51)..(51): Xaa in position 51 is any amino acid
  Variant (53)..(55): Xaa in position 53 to 55 is any amino acid
  Variant (57)..(61): Xaa in position 57 to 61 is any amino acid
  Variant (62)..(65): Xaa in position 62 to 65 is any or no amino acid
  Variant (69)..(69): Xaa in position 69 is any amino acid
  Variant (73)..(73): Xaa in position 73 is any amino acid
  Variant (76)..(76): Xaa in position 76 is any amino acid
  Variant (78)..(83): Xaa in position 78 to 83 is any amino acid
  Variant (84)..(109): Xaa in position 84 to 109 is any or no amino acid
  Variant (111)..(156): Xaa in position 111 to 156 is any amino acid
  Variant (157)..(215): Xaa in position 157 to 215 is any or no amino acid
  Variant (217)..(247): Xaa in position 217 to 247 is any amino acid
  Variant (248)..(260): Xaa in position 248 to 260 is any or no amino acid
  Variant (262)..(263): Xaa in position 262 to 263 is any amino acid
  Variant (265)..(292): Xaa in position 265 to 292 is any amino acid
  Variant (293)..(342): Xaa in position 293 to 342 is any or no amino acid
  Variant (344)..(355): Xaa in position 344 to 355 is any amino acid
  Variant (356)..(371): Xaa in position 356 to 371 is any or no amino acid
  Variant (373)..(376): Xaa in position 373 to 376 is any amino acid
  Variant (378)..(389): Xaa in position 378 to 389 is any amino acid
  Variant (390)..(399): Xaa in position 390 to 399 is any or no amino acid
  Variant (401)..(409): Xaa in position 401 to 409 is any amino acid
  Variant (410)..(416): Xaa in position 410 to 416 is any or no amino acid
  Variant (418)..(421): Xaa in position 418 to 421 is any amino acid
  Variant (422)..(422): Xaa in position 422 is any or no amino acid
  Variant (425)..(443): Xaa in position 425 to 443 is any amino acid
  Variant (444)..(445): Xaa in position 444 to 445 is any or no amino acid
  Variant (447)..(451): Xaa in position 447 to 451 is any amino acid
  Variant (452)..(455): Xaa in position 452 to 455 is any or no amino acid
  Variant (457)..(459): Xaa in position 457 to 459 is any amino acid
  Variant (461)..(471): Xaa in position 461 to 471 is any amino acid
  Variant (472)..(499): Xaa in position 472 to 499 is any or no amino acid
  Variant (501)..(504): Xaa in position 501 to 504 is any amino acid
  Variant (505)..(506): Xaa in position 505 to 506 is any or no amino acid
  Variant (508)..(511): Xaa in position 508 to 511 is any amino acid
  Variant (512)..(512): Xaa in position 512 is any or no amino acid
  Variant (514)..(516): Xaa in position 514 to 516 is any amino acid
  Variant (517)..(517): Xaa in position 517 is any or no amino acid
  Variant (519)..(525): Xaa in position 519 to 525 is any amino acid
  Variant (526)..(529): Xaa in position 526 to 529 is any or no amino acid
  Variant (531)..(532): Xaa in position 531 to 532 is any amino acid
  Variant (534)..(536): Xaa in position 534 to 536 is any amino acid
  Variant (538)..(548): Xaa in position 538 to 548 is any amino acid
  Variant (549)..(552): Xaa in position 549 to 552 is any or no amino acid
PXXFXCPISLXXMXDPVTXXTGXTYDRXXIEXWXXXXXXXXXXXXXXTCPXTXXXLXXXXXXXXXPNHXLRRXIQXWXXXXXXXXXXXXXXXXXXXXXXXXXXXXXXXXPXXXXXXXXXXXXXXXXXXXXXXXXXXXXXXXXXXXXXXXXXXXXXXXXXXXXXXXXXXXXXXXXXXXXXXXXXXXXXXXXXXXXXXXXXXXXXXXXXXXXXXXXXLXXXXXXXXXXXXXXXXXXXXXXXXXXXXXXXXXXXXXXXXXXXXRXXAXXXXXXXXXXXXXXXXXXXXXXXXXXXXXXXXXXXXXXXXXXXXXXXXXXXXXXXXXXXXXXXXXXXXXXXXXXXXXXLXXXXXXXXXXXXXXXXXXXXXXXXXXXXGXXXXLXXXXXXXXXXXXXXXXXXXXXXEXXXXXXXXXXXXXXXXCXXXXXGRXXXXXXXXXXXXXXXXXXXXXVXXXXXXXXXAXXXLXXXXXXXXXXXXXXXXXXXXXXXXXXXXXXXXXXXXXXXEXXXXXXGXXXXXLXXXXQXXXXXXXXXXXKXXAXXXLXXXXXXXXXXXXXXXC

SEQ ID NO: 12571 - protein, 35 aa, Artificial sequence
  protein pattern
  Variant (2)..(3): Xaa in position 2 to 3 is any amino acid
  Variant (5)..(5): Xaa in position 5 is any amino acid
  Variant (10)..(11): Xaa in position 10 to 11 is any or no amino acid
  Variant (13)..(14): Xaa in position 13 to 14 is any or no amino acid
  Variant (16)..(16): Xaa in position 16 is any amino acid
  Variant (20)..(22): Xaa in position 20 to 22 is any amino acid
  Variant (23)..(23): Xaa in position 23 is Ser or Thr
  Variant (25)..(25): Xaa in position 25 is any amino acid
  Variant (26)..(26): Xaa in position 26 is Ser or Thr
  Variant (27)..(27): Xaa in position 27 is Phe or Tyr
  Variant (28)..(28): Xaa in position 28 is Asp or Glu
  Variant (30)..(30): Xaa in position 30 is any amino acid
  Variant (31)..(31): Xaa in position 31 is Ala, Gly, Asn or Ser
  Variant (32)..(32): Xaa in position 32 is Ile or Val
  Variant (33)..(34): Xaa in position 33 to 34 is any amino acid
PXXFXCPISXXLXXMXDPVXXXXGXXXXRXXXXXW

SEQ ID NO: 12572 - protein, 11 aa, Artificial sequence
  protein pattern
  Variant (3)..(3): Xaa in position 3 is Ala or Thr
  Variant (4)..(4): Xaa in position 4 is any amino acid
  Variant (5)..(6): Xaa in position 5 to 6 is Lys or Arg
  Variant (7)..(7): Xaa in position 7 is Leu, Met or Val
  Variant (8)..(8): Xaa in position 8 is Ile or Leu
  Variant (9)..(9): Xaa in position 9 is any amino acid
  Variant (10)..(10): Xaa in position 10 is Ala, Asp, Glu, Gly, Asn, Ser or Thr
NHXXXXXXXXW

SEQ ID NO: 12573 - DNA, 495 bp, Arabidopsis thaliana; identical to SEQ ID NO: 5888
  CDS (1)..(495)

SEQ ID NO: 12574 - protein, 164 aa, Arabidopsis thaliana; identical to SEQ ID NO: 5889

SEQ ID NO: 12575 - DNA, 495 bp, Arabidopsis thaliana; identical to SEQ ID NO: 5888
  CDS (7)..(495)

SEQ ID NO: 12576 - protein, 162 aa, Arabidopsis thaliana
MEVATPAPAPIPSERNIVLAPATTTTTATVETHKKNRIQVSNTKKPLFFYVNLAKRYIQQHNEVELSALGMAITTVVTISEILKNNGLATEKKVLTSTVGMKDETKGKMVQKAKIEIVLGKSDKFDSLVPPVTNGKTPEEEASAETEASVEAQEEVAAATEV

SEQ ID NO: 12577 - DNA, 441 bp, Zea mays; identical to SEQ ID NO: 5848
  CDS (1)..(441)

SEQ ID NO: 12578 - protein, 146 aa, Zea mays; identical to SEQ ID NO: 5849

SEQ ID NO: 12579 - DNA, 441 bp, Zea mays; identical to SEQ ID NO: 5852
  CDS (1)..(441)

SEQ ID NO: 12580 - protein, 146 aa, Zea mays; identical to SEQ ID NO: 5853

SEQ ID NO: 12581 - DNA, 441 bp, Zea mays; identical to SEQ ID NO: 5854
  CDS (1)..(441)

SEQ ID NO: 12582 - protein, 146 aa, Zea mays; identical to SEQ ID NO: 5855

SEQ ID NO: 12583 - DNA, 420 bp, Zea mays; identical to SEQ ID NO: 5856
  CDS (1)..(420)

SEQ ID NO: 12584 - protein, 139 aa, Zea mays; identical to SEQ ID NO: 5857

SEQ ID NO: 12585 - DNA, 597 bp, Zea mays; identical to SEQ ID NO: 5858
  CDS (1)..(597)

SEQ ID NO: 12586 - protein, 198 aa, Zea mays; identical to SEQ ID NO: 5859

SEQ ID NO: 12587 - DNA, 459 bp, Oryza sativa; identical to SEQ ID NO: 5860
  CDS (1)..(459)

SEQ ID NO: 12588 - protein, 152 aa, Oryza sativa; identical to SEQ ID NO: 5861

SEQ ID NO: 12589 - DNA, 438 bp, Oryza sativa; identical to SEQ ID NO: 5862
  CDS (1)..(438)

SEQ ID NO: 12590 - protein, 145 aa, Oryza sativa; identical to SEQ ID NO: 5863

SEQ ID NO: 12591 - DNA, 399 bp, Oryza sativa; identical to SEQ ID NO: 5864
  CDS (1)..(399)

SEQ ID NO: 12592 - protein, 132 aa, Oryza sativa; identical to SEQ ID NO: 5865

SEQ ID NO: 12593 - DNA, 510 bp, Oryza sativa; identical to SEQ ID NO: 5866
  CDS (1)..(510)

SEQ ID NO: 12594 - protein, 169 aa, Oryza sativa; identical to SEQ ID NO: 5867

SEQ ID NO: 12595 - DNA, 408 bp, Glycine max; identical to SEQ ID NO: 5870
  CDS (1)..(408)

SEQ ID NO: 12596 - protein, 135 aa, Glycine max; identical to SEQ ID NO: 5871

SEQ ID NO: 12597 - DNA, 396 bp, Glycine max; identical to SEQ ID NO: 5872
  CDS (1)..(396)

SEQ ID NO: 12598 - protein, 131 aa, Glycine max; identical to SEQ ID NO: 5873

SEQ ID NO: 12599 - DNA, 435 bp, Glycine max; identical to SEQ ID NO: 5874
  CDS (1)..(435)

SEQ ID NO: 12600 - protein, 144 aa, Glycine max; identical to SEQ ID NO: 5875

SEQ ID NO: 12601 - DNA, 399 bp, Glycine max; identical to SEQ ID NO: 5876
  CDS (1)..(399)

SEQ ID NO: 12602 - protein, 132 aa, Glycine max; identical to SEQ ID NO: 5877

SEQ ID NO: 12603 - DNA, 721 bp, Triticum aestivum
  CDS (161)..(559)
tctcgccgcggaatcccgatatttatttttcttgcgttccggtccccaggcttcgagttatttccctggtctggtgctcgcgcggcggcggcggcggcggagggtttgcgtcggcgctctcgcgagctagggtttcgggccgaggaggaggaggagcgagatggaggaggtgacggagggggtcaagaacctggccgtcacggagccgcacaagaagaaccggatccaggtctccaacacgaagaagccgctcttcttctatgtcaacctcgccaagaggtacatgcagatgcataacgaggtggaactctccgctctcggcatggctatcgccactgtggtgacagttgccgaaattctgaaaaataatggccttgctgttgaaaagaaaatcatgacatccactgttgatgtcaatgatgaatcaaggggccgcccgatgcagaaggctaagattgaaatagtgctgggcaagacggagaacttcgacgagctgatggccgccgccgcggaggagagggaagtcgcagccgccgaggagggcgaggagcagggctaataaactgtcttgagccggctgttgtagcttttatttagtacttgctgctaggttgtgtgttatcttctcttggccagcaagagataggtacttgtgtaaccaaagagttctttgtatttgtttcgtctccgtggtagtttaatgtcgatggtattctggtcc

SEQ ID NO: 12604 - protein, 132 aa, Triticum aestivum; identical to SEQ ID NO: 5843

SEQ ID NO: 12605 - DNA, 441 bp, Zea mays; identical to SEQ ID NO: 5886
  CDS (1)..(441)

SEQ ID NO: 12606 - protein, 146 aa, Zea mays; identical to SEQ ID NO: 5887

SEQ ID NO: 12607 - DNA, 393 bp, Arabidopsis thaliana; identical to SEQ ID NO: 5838
  CDS (1)..(393)

SEQ ID NO: 12608 - protein, 130 aa, Arabidopsis thaliana; identical to SEQ ID NO: 5839

SEQ ID NO: 12609 - DNA, 393 bp, Arabidopsis thaliana; identical to SEQ ID NO: 5840
  CDS (1)..(393)

SEQ ID NO: 12610 - protein, 130 aa, Arabidopsis thaliana; identical to SEQ ID NO: 5891

SEQ ID NO: 12611 - DNA, 396 bp, Physcomitrella patens subsp. patens; identical to SEQ ID NO: 5892
  CDS (1)..(396)

SEQ ID NO: 12612 - protein, 131 aa, Physcomitrella patens subsp. patens; identical to SEQ ID NO: 5893

SEQ ID NO: 12613 - DNA, 366 bp, Physcomitrella patens subsp. patens; identical to SEQ ID NO: 5894
  CDS (1)..(366)

SEQ ID NO: 12614 - protein, 121 aa, Physcomitrella patens subsp. patens; identical to SEQ ID NO: 5895

SEQ ID NO: 12615 - DNA, 390 bp, Vitis vinifera; identical to SEQ ID NO: 5898
  CDS (1)..(390)

SEQ ID NO: 12616 - protein, 129 aa, Vitis vinifera; identical to SEQ ID NO: 5899

SEQ ID NO: 12617 - DNA, 435 bp, Vitis vinifera; identical to SEQ ID NO: 5900
  CDS (1)..(435)

SEQ ID NO: 12618 - protein, 144 aa, Vitis vinifera; identical to SEQ ID NO: 5901

SEQ ID NO: 12619 - DNA, 393 bp, Vitis vinifera; identical to SEQ ID NO: 5904
  CDS (1)..(393)

SEQ ID NO: 12620 - protein, 130 aa, Vitis vinifera; identical to SEQ ID NO: 5905

SEQ ID NO: 12621 - DNA, 411 bp, Populus trichocarpa; identical to SEQ ID NO: 5906
  CDS (1)..(411)

SEQ ID NO: 12622 - protein, 136 aa, Populus trichocarpa; identical to SEQ ID NO: 5907

SEQ ID NO: 12623 - DNA, 402 bp, Populus trichocarpa; identical to SEQ ID NO: 5908
  CDS (1)..(402)

SEQ ID NO: 12624 - protein, 133 aa, Populus trichocarpa; identical to SEQ ID NO: 5909

SEQ ID NO: 12625 - DNA, 447 bp, Populus trichocarpa; identical to SEQ ID NO: 5910
  CDS (1)..(447)

SEQ ID NO: 12626 - protein, 148 aa, Populus trichocarpa; identical to SEQ ID NO: 5911

SEQ ID NO: 12627 - DNA, 390 bp, Sorghum bicolor; identical to SEQ ID NO: 5912
  CDS (1)..(390)

SEQ ID NO: 12628 - protein, 129 aa, Sorghum bicolor; identical to SEQ ID NO: 5913

SEQ ID NO: 12629 - DNA, 573 bp, Sorghum bicolor
  CDS (1)..(573)
atgcaggcggtgcgtccggccgcggagggggaggaggcacaggcacaggagcaggcggtgagggaggaggtggccgaggtgaagagggaggtggcgaaggcgcacgaggaggaggcggcgcctgaggagaaagacgtggcggttgtcggggaggaggctgacgccgaggcggaggcggaggcggagactgagggcgaggcggaggcggaggcggaggccggtgcgtctgccaagaagaaccgcatccaggtgtccaccaacaagaagccgctctatttctacgtcaatctcgccaagaggtacatgcagaactacgacgaggttgaactctctgctctggggatggccattggtaccgtcgtgactgtcgccgagatcctcaagaataatggcctcgccactgaaaagaagatcctgacatcaaccatcggcaccaaagacgagtccaagggccggcttgtccgtaaagccaagattgagattctgctgtgcaaatcagagaatttcaacagcatcatgtctagcaagaaatccgaccgcccgaaatccgccgaggaagagatcaaggtgtga

SEQ ID NO: 12630 - protein, 190 aa, Sorghum bicolor
MQAVRPAAEGEEAQAQEQAVREEVAEVKREVAKAHEEEAAPEEKDVAVVGEEADAEAEAEAETEGEAEAEAEAGASAKKNRIQVSTNKKPLYFYVNLAKRYMQNYDEVELSALGMAIGTVVTVAEILKNNGLATEKKILTSTIGTKDESKGRLVRKAKIEILLCKSENFNSIMSSKKSDRPKSAEEEIKV

SEQ ID NO: 12631 - DNA, 426 bp, Sorghum bicolor; identical to SEQ ID NO: 5916
  CDS (1)..(426)

SEQ ID NO: 12632 - protein, 141 aa, Sorghum bicolor; identical to SEQ ID NO: 5917

SEQ ID NO: 12633 - DNA, 444 bp, Sorghum bicolor; identical to SEQ ID NO: 5918
  CDS (1)..(444)

SEQ ID NO: 12634 - protein, 147 aa, Sorghum bicolor; identical to SEQ ID NO: 5919

SEQ ID NO: 12635 - DNA, 387 bp, Ricinus communis; identical to SEQ ID NO: 5920
  CDS (1)..(387)

SEQ ID NO: 12636 - protein, 128 aa, Ricinus communis; identical to SEQ ID NO: 5921

SEQ ID NO: 12637 - DNA, 462 bp, Ricinus communis; identical to SEQ ID NO: 5922
  CDS (1)..(462)

SEQ ID NO: 12638 - protein, 153 aa, Ricinus communis; identical to SEQ ID NO: 5923

SEQ ID NO: 12639 - DNA, 465 bp, Picea sitchensis; identical to SEQ ID NO: 5932
  CDS (1)..(465)

SEQ ID NO: 12640 - protein, 154 aa, Picea sitchensis; identical to SEQ ID NO: 5933

SEQ ID NO: 12641 - DNA, 402 bp, Populus trichocarpa; identical to SEQ ID NO: 5934
  CDS (1)..(402)

SEQ ID NO: 12642 - protein, 133 aa, Populus trichocarpa; identical to SEQ ID NO: 5935

SEQ ID NO: 12643 - DNA, 441 bp, Zea mays; identical to SEQ ID NO: 5936
  CDS (1)..(441)

SEQ ID NO: 12644 - protein, 146 aa, Zea mays; identical to SEQ ID NO: 5937

SEQ ID NO: 12645 - DNA, 393 bp, Brassica napus; identical to SEQ ID NO: 5942
  CDS (1)..(393)

SEQ ID NO: 12646 - protein, 130 aa, Brassica napus; identical to SEQ ID NO: 5943

SEQ ID NO: 12647 - DNA, 465 bp, Brassica napus; identical to SEQ ID NO: 5944
  CDS (1)..(465)

SEQ ID NO: 12648 - protein, 154 aa, Brassica napus; identical to SEQ ID NO: 5945

SEQ ID NO: 12649 - DNA, 489 bp, Brassica napus; identical to SEQ ID NO: 5948
  CDS (1)..(489)

SEQ ID NO: 12650 - protein, 162 aa, Brassica napus; identical to SEQ ID NO: 5949

SEQ ID NO: 12651 - DNA, 393 bp, Brassica napus; identical to SEQ ID NO: 5950
  CDS (1)..(393)

SEQ ID NO: 12652 - protein, 130 aa, Brassica napus; identical to SEQ ID NO: 5951

SEQ ID NO: 12653 - DNA, 474 bp, Brassica napus; identical to SEQ ID NO: 5952
  CDS (1)..(474)

SEQ ID NO: 12654 - protein, 157 aa, Brassica napus; identical to SEQ ID NO: 5953

SEQ ID NO: 12655 - DNA, 399 bp, Hordeum vulgare; identical to SEQ ID NO: 5970
  CDS (1)..(399)

SEQ ID NO: 12656 - protein, 132 aa, Hordeum vulgare; identical to SEQ ID NO: 5971

SEQ ID NO: 12657 - DNA, 408 bp, Linum usitatissimum
  CDS (1)..(408)
atggaagagattactgagggcgtgaacaacatggaccttgccggagctgatgcgagcaagaagaatcggattcaggtctctaacaccaagaagcccctcttcttctatgttaatctcgctaagaggtatatgcagcagttcaatgaggtggaactatccgctcttggaatggctattgccacagttgtcaccgtggcagaaattctcaagaacaatggattggctgtggagaagaaaatcatgacctccactgttgacatgagggatgattcgaggggacggcctgtccaaaaagccaagattgagatactactggggaagactgcaaactttgatgaactgatggcagctgctgcagaagagagggagagggagagggaagcaggagaagaagaggagcagagctga

SEQ ID NO: 12658 - protein, 135 aa, Linum usitatissimum; identical to SEQ ID NO: 5957

SEQ ID NO: 12659 - DNA, 399 bp, Triticum aestivum; identical to SEQ ID NO: 5974
  CDS (1)..(399)

SEQ ID NO: 12660 - protein, 132 aa, Triticum aestivum; identical to SEQ ID NO: 5975

SEQ ID NO: 12661 - DNA, 420 bp, Triticum aestivum
  CDS (1)..(420)
atggaggaggtgacggaggcggtgaacaaccttaccataggggaaggagcagcggcgacggcgggagcggaggggcacaagaagaaccgcatccaggtctccaacaccaagaagcccctcttcttctacgtcaacctcgccaagaggtacatgcagctgcacgaagaggtggagctctcggccctcggcatggctattgcaactgtggtgactgttgcggaaattctaaaaaataacggccttgctgttgagaagaaaataatgacatctactgttgatgtcaaagatgatacaaggaaccgccctatccagaaggtcaagatcgaaatattgattggcaagacggagaaattcgatgaactgatggctgccgctgcagaggagagggaggcagcgggcgctgaggaagagcaaagctga

SEQ ID NO: 12662 - protein, 139 aa, Triticum aestivum
MEEVTEAVNNLTIGEGAAATAGAEGHKKNRIQVSNTKKPLFFYVNLAKRYMQLHEEVELSALGMAIATVVTVAEILKNNGLAVEKKIMTSTVDVKDDTRNRPIQKVKIEILIGKTEKFDELMAAAAEEREAAGAEEEQS

SEQ ID NO: 12663 - DNA, 20 bp, Artificial sequence
  primer
atggcgatggaagtagcaac

SEQ ID NO: 12664 - DNA, 20 bp, Artificial sequence
  primer
ctagacctcggtggcagcgg

SEQ ID NO: 12665 - protein, 161 aa, Artificial sequence
  consensus sequence
  Variant (2)..(13): Xaa in position 2 to 13 is any amino acid
  Variant (14)..(53): Xaa in position 14 to 53 is any or no amino acid
  Variant (80)..(83): Xaa in position 80 to 83 is any amino acid
  Variant (94)..(94): Xaa in position 94 is any amino acid
  Variant (99)..(99): Xaa in position 99 is any amino acid
  Variant (108)..(108): Xaa in position 108 is any amino acid
  Variant (110)..(110): Xaa in position 110 is any amino acid
  Variant (115)..(115): Xaa in position 115 is any amino acid
  Variant (120)..(122): Xaa in position 120 to 122 is any amino acid
  Variant (124)..(126): Xaa in position 124 to 126 is any amino acid
  Variant (129)..(130): Xaa in position 129 to 130 is any amino acid
  Variant (138)..(138): Xaa in position 138 is any amino acid
  Variant (140)..(140): Xaa in position 140 is any amino acid
  Variant (142)..(144): Xaa in position 142 to 144 is any amino acid
  Variant (147)..(147): Xaa in position 147 is any amino acid
  Variant (150)..(154): Xaa in position 150 to 154 is any amino acid
  Variant (155)..(160): Xaa in position 155 to 160 is any or no amino acid
EXXXXXXXXXXXXXXXXXXXXXXXXXXXXXXXXXXXXXXXXXXXXXXXXXXXXKKNRIQVSNTKKPLFFYVNLAKRYMQXXXXVELSALGMAIXTVVTXAEILKNNGXAXEKKIXTSTVXXXDXXXGRXXQKAKIEIXLXKXXXFDXLMXXXXXXXXXXXE

SEQ ID NO: 12666 - protein, 60 aa, Artificial sequence
  protein pattern
  Variant (2)..(2): Xaa in position 2 is any or no amino acid
  Variant (24)..(24): Xaa in position 24 is Ile, Leu or Met
  Variant (26)..(26): Xaa in position 26 is any amino acid
  Variant (27)..(27): Xaa in position 27 is Phe, His or Tyr
  Variant (28)..(28): Xaa in position 28 is Asp, Glu, Gly, Asn or Thr
  Variant (29)..(29): Xaa in position 29 is Asp or Glu
  Variant (40)..(40): Xaa in position 40 is Ala or Thr
  Variant (45)..(45): Xaa in position 45 is Ile or Val
  Variant (46)..(46): Xaa in position 46 is Ala, Ser or Thr
  Variant (54)..(54): Xaa in position 54 is Phe or Leu
  Variant (56)..(56): Xaa in position 56 is any amino acid
  Variant (57)..(57): Xaa in position 57 is Ala or Glu
  Variant (59)..(59): Xaa in position 59 is any amino acid
  Variant (60)..(60): Xaa in position 60 is Ile or Val
NXRIQVSNTKKPLFFYVNLAKRYXQXXXXVELSALGMAIXTVVTXXEILKNNGXAXXKXX

SEQ ID NO: 12667 - protein, 39 aa, Artificial sequence
  protein pattern
  Variant (3)..(3): Xaa in position 3 is any amino acid
  Variant (4)..(4): Xaa in position 4 is Ile, Met or Val
  Variant (5)..(5): Xaa in position 5 is any amino acid
  Variant (6)..(6): Xaa in position 6 is Asp or Glu
  Variant (7)..(7): Xaa in position 7 is Asp, Glu or Gly
  Variant (8)..(8): Xaa in position 8 is Ala, Asn, Ser or Thr
  Variant (9)..(10): Xaa in position 9 to 10 is any amino acid
  Variant (11)..(11): Xaa in position 11 is Lys or Arg
  Variant (12)..(12): Xaa in position 12 is any amino acid
  Variant (13)..(13): Xaa in position 13 is Phe, Ile, Leu, Met or Val
  Variant (14)..(14): Xaa in position 14 is Pro or Gln
  Variant (16)..(16): Xaa in position 16 is Ala, Pro, Thr or Val
  Variant (21)..(21): Xaa in position 21 is any or no amino acid
  Variant (23)..(23): Xaa in position 23 is any amino acid
  Variant (24)..(24): Xaa in position 24 is any or no amino acid
  Variant (26)..(26): Xaa in position 26 is Ser or Thr
  Variant (27)..(27): Xaa in position 27 is Ala, Asp, Glu or Gly
  Variant (28)..(28): Xaa in position 28 is any amino acid
  Variant (31)..(31): Xaa in position 31 is Glu, Asn or Ser
  Variant (33)..(33): Xaa in position 33 is Met or Val
  Variant (34)..(34): Xaa in position 34 is any amino acid
  Variant (35)..(35): Xaa in position 35 is Ala or Pro
  Variant (36)..(36): Xaa in position 36 is Ala, Pro or Val
  Variant (37)..(37): Xaa in position 37 is Ala, Asp, Asn, Pro or Thr
  Variant (38)..(38): Xaa in position 38 is any amino acid
  Variant (39)..(39): Xaa in position 39 is Ala, Asp, Glu, Gly, Gln or Thr
TVXXXXXXXXXXXXKXKIEIXLXXKXXXFDXLXXXXXXX

SEQ ID NO: 12668 - DNA, 1343 bp, Arabidopsis thaliana
  exon (1)..(610)
  intron (611)..(696)
  exon (697)..(1343)
atgaacatctcctctcgcggtgctgctgcgatcgatgagtccctcgtgtttggatcttctggtgtcgtctacgctccctatggagattacttgaagttcgtgaagaagatcattgccactaagctgcttcgacctcaggtgttggagcggtcacgaggtcttcgtgctgaagagctacaacgactttacaacagaattcttgataaggcgaagatgaatgagaacgttgagatcggtaaggaagcgacgatgctcatgaacaacatcttctgtaggatgagcatgggaaggagtttctcagaggagaatggtgaggcagagagagtcagaggcttggtggctgaatcatatgccttggcgaagaagattttcttcgcatctgtactgcgcagactgcttaagaagcttcggatcccactattcaagaaggatatcatggatgtttccaacagattcaatgagctgctagagaagattcttgtggaacacaatgagaaactggacgaggaacataaagacacggatatgatggacgtgttgttggcagcttatgcagatgaaaacgctgagtataagattactaggaatcatatcaagtcatttttcgtggtaaatgttcatcattatgtcagatttcatataaggagggtccaaacaaaatttacttataattgttccgagtctttttaacgcaggagcttttcgtgggaggcactgatacctcggtgcaaacaacacaatggacaatggccgagatcattaataactctgacgttcttgagaggctgagagaagaaattgactctgttgtagggacatcaagaatgattcaagaaacagatataccaaaccttccttatttgcaagcggtggttaaggaaggactaagattgcacccaccatttcctctcttgacgaggaagtttgaagaaaggtgtgagatcaaagggttctacatcccggagaagacatttcttattataaatgcttacgcttggatgagagatcctgattcctgggaagatcctaatgagtttaagccggagaggtttttaggttcttcaagattaggacaagtagacgagagagaggaagctcagaagtacattcctttcggcggaggaaggagaggctgtcctggagcaaatctagcttctattttcgtaggaaccgcgattggagtgatggtgcagtgctttgactggggaatcaaaggagataagatcaacatggaagagacttttgaaggactgacccttaccatggttcatccaattaagtgcactccgattcctcgaacactgccttttgtaacttctaatctccagagtcctagctcttga

SEQ ID NO: 12669 - protein, 418 aa, Arabidopsis thaliana
MNISSRGAAAIDESLVFGSSGVVYAPYGDYLKFVKKIIATKLLRPQVLERSRGLRAEELQRLYNRILDKAKMNENVEIGKEATMLMNNIFCRMSMGRSFSEENGEAERVRGLVAESYALAKKIFFASVLRRLLKKLRIPLFKKDIMDVSNRFNELLEKILVEHNEKLDEEHKDTDMMDVLLAAYADENAEYKITRNHIKSFFVELFVGGTDTSVQTTQWTMAEIINNSDVLERLREEIDSVVGTSRMIQETDIPNLPYLQAVVKEGLRLHPPFPLLTRKFEERCEIKGFYIPEKTFLIINAYAWMRDPDSWEDPNEFKPERFLGSSRLGQVDEREEAQKYIPFGGGRRGCPGANLASIFVGTAIGVMVQCFDWGIKGDKINMEETFEGLTLTMVHPIKCTPIPRTLPFVTSNLQSPSS

SEQ ID NO: 12670 - DNA, 1530 bp, Glycine max
  CDS (1)..(1530)
atggctgaaactgacatccaagactatctccaactcttcttcctctggttactctccatcatcgccgttagagccatactcaccaaactccgccacaagcctcgccgtccaccgggcccacggtccctccccatcatcggccacctccatctcatctccgccctgcctcaccagtctttccacgcgctctccacgcgctacggccccgccgtgcaagtcttcctcggctccgtccccgccgtggtcgtttcgtgcccggaactcgcgaaggagttcctgaaaacgcacgagcccagcttctcgaaccggttcgtgagtgcagcggttcaccacctgtcctatgggtccaaggggttcctcttcgcgccctacggaagctactggaggttcttgaagaagatttgcatgtcggagcttctcggtggccgcaccctcgaccagttccggcacttgagggagcaagaaactttgaggtttctgcgcgtgttgagggcgaaaggggaggcgcatgaggccgtggatgttagtggggagttgatgactttgaccaacagtgtaatatcgaggatggttttgagtcgaacatgttgcgagagcgatggtgacgtggagcacgtgaggaagatggtggcggacactgctgagctggcggggaagttcaacgtggcggattttgtgtggttgtgtaaggggttggatttgcatgggataaagaagaggcttgtgggtattttggagaggtttgatggcatgatggagagggtgataagggagcatgaggaggagagggagagaaggaaggaaagaggggaaggggaggagattagggatttgctagatattttgttggaaattcatcaagatgagagcagggagatcaagttatctagagagaatgtcaaggctttcatcttggacatatatatggcaggaaccgacacatcagctataaccatggagtgggccctagcagagttaatcaacaaccatcatgtgatggagaaagcaagacaagagatagattcagtgacagggaaccaaaggctaatacaagaatcagatcttcccaaccttccatacctacaagccatagtcaaagaaacactaaggattcaccctacagcgccactgctagggagagaatcatcagaaagctgcaatgtatgtggttatgacattccagcaaagtccttagtgtttgttaatctgtggtctatgggaagggaccccaaaatttgggaggaccctcttgagttcaggccagagaggtttatgaacaataatgaagaaaaacaaattgatgtgaggggacagaatttccaactattgccatttgggactgggagaaggttgtgccctggtgcatcacttgcacttcagactgtgcctactaacgttgctgctatgattcaatgctttgaatttagggttgatgggactgttagcatggaagaaaaaccagccatgacacttcctagggcacatcctttgatttgtgtccctgtgccacgcatgaaccttcccttctag

SEQ ID NO: 12671 - protein, 509 aa, Glycine max
MAETDIQDYLQLFFLWLLSIIAVRAILTKLRHKPRRPPGPRSLPIIGHLHLISALPHQSFHALSTRYGPAVQVFLGSVPAVVVSCPELAKEFLKTHEPSFSNRFVSAAVHHLSYGSKGFLFAPYGSYWRFLKKICMSELLGGRTLDQFRHLREQETLRFLRVLRAKGEAHEAVDVSGELMTLTNSVISRMVLSRTCCESDGDVEHVRKMVADTAELAGKFNVADFVWLCKGLDLHGIKKRLVGILERFDGMMERVIREHEEERERRKERGEGEEIRDLLDILLEIHQDESREIKLSRENVKAFILDIYMAGTDTSAITMEWALAELINNHHVMEKARQEIDSVTGNQRLIQESDLPNLPYLQAIVKETLRIHPTAPLLGRESSESCNVCGYDIPAKSLVFVNLWSMGRDPKIWEDPLEFRPERFMNNNEEKQIDVRGQNFQLLPFGTGRRLCPGASLALQTVPTNVAAMIQCFEFRVDGTVSMEEKPAMTLPRAHPLICVPVPRMNLPF

SEQ ID NO: 12672 - DNA, 1530 bp, glycine max
  CDS (1)..(1530)
atgattgagatgatagtgttcctcttccttgtcttgcttatatcccttatcttgagcagcagttccaataatagcctccagcttcccccaagcccaccaagcattcctctgctaggtcacctccaccacctcaccccttccctatacaaatccctctacaccctctcatccaagcacggtcccctcctcctcctccgcctcggcccctcccgccgcctcctcctccttgtctcctccgccgccgtcgctaccgatgtcttcaagacccacgacctcgccttctcgtcgcgccccgccttcgccttcgccgagaggctccccttcggcacctccggcttcgtcaccgccccctatgggccctactggcgcttcatgaagaaactctgcgtcacggagcttctctccacgcgccaacttgagcgctccaggagcataaggagggaagagatactacgttccatcaaaagggttattgacaatgctcgtgagactgttgcacttgatttgggctccgagttcaccaaattcaccaacaatgtcacttgcaggacggccatgagcaccagttgtgcggaaaaatgcgaggatgctgagaggatcaggaagctagtaaaggagtcctttgagctagctgcgaaattgtgctttggtgatgtgttgggccctttcaaggagttgagtttttgggtgtatgggaaaaaggccatagacatgagcacaaggtacgatgagttgttggaagaggtgctcaaggagcatgaacacaaaagattatcgcgtgcaaatggtgatcaaagtgaaagggatttgatggatattctgttagatgtttatcatgatgctcatgcagagttcaagatcacaatggctcatattaaagccttctttatggatctcttcattgcaggcacacacacctcagcagaagcaacacagtgggcaatggccgagctcctcaaccaccctgaagcatttcaaaaggtgagaaaggagatagagttagtcactggcaatgttaggcttgttgatgaatccgatatcacaaacttgccatatttgcaagcagttgtgaaggaaacactaagactctacccgccggcaccaatcacgacaagagagtgtcgccaacactgcaaaataaacagcttcgatgtgccaccaaagacagcagtggcaatcaatttgtatgccataatgagagaccctgattcttgggacaatcctaatgagttttgccctgaaaggttcttgcaagaacaagatcatgaggatttgagtgatgatggtaagagaatgaagttcaattttgttccatttggaggtgggaggagaggttgtccagggacagcactggcattcagcttgatgaacactgcagttgctgctatggtgcagtgctttgattggaaaattggtaaagatggaaaaggagaaaaggttgatatggaatctgggtctggtatgtctttgagcatggttcacccccttatttgcgttcccgtagtacattttatcccatatgatatataa

SEQ ID NO: 12673 - protein, 509 aa, glycine max
MIEMIVFLFLVLLISLILSSSSNNSLQLPPSPPSIPLLGHLHHLTPSLYKSLYTLSSKHGPLLLLRLGPSRRLLLLVSSAAVATDVFKTHDLAFSSRPAFAFAERLPFGTSGFVTAPYGPYWRFMKKLCVTELLSTRQLERSRSIRREEILRSIKRVIDNARETVALDLGSEFTKFTNNVTCRTAMSTSCAEKCEDAERIRKLVKESFELAAKLCFGDVLGPFKELSFWVYGKKAIDMSTRYDELLEEVLKEHEHKRLSRANGDQSERDLMDILLDVYHDAHAEFKITMAHIKAFFMDLFIAGTHTSAEATQWAMAELLNHPEAFQKVRKEIELVTGNVRLVDESDITNLPYLQAVVKETLRLYPPAPITTRECRQHCKINSFDVPPKTAVAINLYAIMRDPDSWDNPNEFCPERFLQEQDHEDLSDDGKRMKFNFVPFGGGRRGCPGTALAFSLMNTAVAAMVQCFDWKIGKDGKGEKVDMESGSGMSLSMVHPLICVPVVHFIPYDI

SEQ ID NO: 12674 - DNA, 1620 bp, Zea mays
  CDS (1)..(1620)
atggaagtggtcacagcacgagaactcatcaaccccacaggcctccccattctcctcctcgttgccggcctcaccgttttctttgtgctgcgccgccgcagcagtggcgggcttcggctccctccgagcccgttcgctctgcccgtcctgggccacctgcacctcctggccccgctcccgcaccaggcgctgcaccgcctggcagcccgccacggcccgctcttgtacctccgcctcggctccatgccggccatcgccgcctgctccccggacgccgcccgcgaggtgctcaagacccacgaggccgcgttcctggaccgccccaagcccacggcggtgcaccgcctgacgtacggcgggcaggacttctccttctcgccgtacgggccctactggcgcttcatgaagcgcgcgtgcgtgcacgagctccttgccgggcgcacgctggagcggctccgccacgtccgccgcgaggaggtgtcccgcctcgtgggctccctgtcccggagcgcgtgcgacggcgcggccgtcgacgtggacgccgtgctcatgggcgtcacgggcgacatcatctcgcggatggtgatgagccggcggtggaccggggacgacagcaccaccgaggagatgaggagcctggtcgccgagaccgccgagctgacgggcacgttcaacctgcaggactacatcggcatgttcaaacattgggacgtgcagggcctgggcaagcgcatcgacgcggtgcaccgcaagttcgacgccatgatggagcggatactgacggcgagggatgccgagaggcggtgccggcggaaggcgtctgcggacggcgccggcgagggggacaagaaggacctgcttgacatgctctttgacatgcacgaggacgaaggtgccgagatgcggctcacaagagataacatcaaggccttcatgctggacatcttcgcggccggcacggacacgacgacgatcacgctggaatgggcgctgtcggagttgatcaacaacccagccgtcctccgccgggcgcaggcggagctggacgccgccgtgggcgcgtcccggctcgccgacgagtcggacatcccacggctcccctacctgcaggccatcgcgaaggagaccctgcggctgcacccgacgggcccgctggtggtgcgacgctccatggcgccctgcaatgtgtccggctacgacgtgccggccggcgcgacggtgttcgtgaacgtgtgggcgatcgggcgcgacccggcgtcctgggcgccggacccgctggcgttccggccggagcggttcctggaggaggaagggggaggagagagcgcggggctggacgtgcgcgggcagcacttccacctgctgccgtttgggtccgggcggcggatatgccccggcgcgtcgctggccatgctcgtggttcaggcggcgctggcggccatgctgcagtgcttcgagtggacgcccgtcggcggcgcgcccgtagacatggaggagggtcccgggctcacgctgccgcggaagcgcccgctcgtctgcaccgtcaaggccaggcttcacccgctgccggttcccgccgccgccgctaataacggcgtggaagaaactgcgggcgtgtga

SEQ ID NO: 12675 - protein, 539 aa, Zea mays
MEVVTARELINPTGLPILLLVAGLTVFFVLRRRSSGGLRLPPSPFALPVLGHLHLLAPLPHQALHRLAARHGPLLYLRLGSMPAIAACSPDAAREVLKTHEAAFLDRPKPTAVHRLTYGGQDFSFSPYGPYWRFMKRACVHELLAGRTLERLRHVRREEVSRLVGSLSRSACDGAAVDVDAVLMGVTGDIISRMVMSRRWTGDDSTTEEMRSLVAETAELTGTFNLQDYIGMFKHWDVQGLGKRIDAVHRKFDAMMERILTARDAERRCRRKASADGAGEGDKKDLLDMLFDMHEDEGAEMRLTRDNIKAFMLDIFAAGTDTTTITLEWALSELINNPAVLRRAQAELDAAVGASRLADESDIPRLPYLQAIAKETLRLHPTGPLVVRRSMAPCNVSGYDVPAGATVFVNVWAIGRDPASWAPDPLAFRPERFLEEEGGGESAGLDVRGQHFHLLPFGSGRRICPGASLAMLVVQAALAAMLQCFEWTPVGGAPVDMEEGPGLTLPRKRPLVCTVKARLHPLPVPAAAANNGVEETAGV

SEQ ID NO: 12676 - DNA, 1551 bp, Oryza sativa
  CDS (1)..(1551)
atggcatcgttgatggaagtgcaggtgccgctgttgggaatgggcactacgatgggcgccctggctctggctctcgtcgtcgttgtggttgtgcacgttgccgtgaacgcctttgggcggcggcggcttcccccgagtccggcgagcctaccggtgatcgggcaccttcacctgctccggccgccggtgcaccgcaccttccacgagctggcggcgaggctgggccccctgatgcacgtccggctggggtcgacgcactgcgttgtggcgagctcggcggaggtggcggcggagctgatccgcagccacgaggcgaagatatcggagcggccgctgacggcggtggcccggcagttcgcgtacgagtcggcggggttcgcgttcgcgccctacagcccgcactggcgcttcatgaagcggctgtgcatgtcggagctgctgggcccgcgcacggtggagcagctgcgccccgtgcgccgagccgggctggtgtcgctgctgcgccacgtgttgtcgcagccggaggcggaggcggtggacctgacccgcgagctcatccgcatgtccaacacctccatcatccgcatggccgccagcacggtccccagcagcgtgacggaggaggcgcaggagctggtgaaggtggtggcggagctggtgggcgccttcaacgccgacgactacatcgccctgtgccgtggctgggacctgcagggcctcgggcgccgtgcggccgacgtgcacaagaggttcgacgcgctgctggaggagatgatcaggcacaaggaggaggctaggatgcggaagaagacagacacagacgtcggcagcaaggacctgcttgacatcctgctggacaaggcggaggacggcgcggcggaggtgaagctcaccagagacaacatcaaggccttcatcatcgacgttgttactgccgggtccgacacttcggccgccatggtggagtggatggtggcggagctgatgaaccacccggaggccctgcgcaaggtgcgggaggagatcgaggcggtggtggggcgggacaggatcgccggcgagggggacctgccgagactgccgtatctgcaggcggcgtacaaggagacgctgcggttgaggccggcggcgccgatcgcgcacaggcagtcgacggaggagatccagatccgagggttcagggtgccggcgcagacggcggtgttcatcaacgtgtgggccatcgggcgagacccggcgtactgggaggagccgctggagttcaggccggagcggttcctcgccggcggcggcggcgagggcgtggagccgcgcgggcagcacttccagttcatgccgttcgggagcggccggcgcgggtgccccgggatggggcttgcgctgcagtcggtgccggcggtggtggcggcgctgctgcagtgcttcgattggcagtgcatggacaataagttgatagacatggaggaggcagacggcctggtttgcgctcggaagcatcgcctcctcctccacgcccacccgcgcctccaccctttcccgccgctcctctag

SEQ ID NO: 12677 - protein, 516 aa, Oryza sativa
MASLMEVQVPLLGMGTTMGALALALVVVVVVHVAVNAFGRRRLPPSPASLPVIGHLHLLRPPVHRTFHELAARLGPLMHVRLGSTHCVVASSAEVAAELIRSHEAKISERPLTAVARQFAYESAGFAFAPYSPHWRFMKRLCMSELLGPRTVEQLRPVRRAGLVSLLRHVLSQPEAEAVDLTRELIRMSNTSIIRMAASTVPSSVTEEAQELVKVVAELVGAFNADDYIALCRGWDLQGLGRRAADVHKRFDALLEEMIRHKEEARMRKKTDTDVGSKDLLDILLDKAEDGAAEVKLTRDNIKAFIIDVVTAGSDTSAAMVEWMVAELMNHPEALRKVREEIEAVVGRDRIAGEGDLPRLPYLQAAYKETLRLRPAAPIAHRQSTEEIQIRGFRVPAQTAVFINVWAIGRDPAYWEEPLEFRPERFLAGGGGEGVEPRGQHFQFMPFGSGRRGCPGMGLALQSVPAVVAALLQCFDWQCMDNKLIDMEEADGLVCARKHRLLLHAHPRLHPFPPLL

SEQ ID NO: 12678 - DNA, 1587 bp, Oryza sativa
  CDS (1)..(1587)
atggatcatcagctggtagctcgaggtctcttcaagcctctcctcctcttcgtcgccggcctgattgttctctacgcgctccgccgccgccgccgccaccgccggagcagcggcctgcgcctcccgccgagcccgttcgggctgcccatcctgggccacctccacctgctcgcgccgctgccgcaccaggcgctccaccgcctcgccgcgcgccacggcccgctcctcttcctccgcctcggctccgtcccctgcgtcgccgcctgctcgccggacgccgcccgcgaggtgctcaagacccacgaggccgcgttcctcgaccgccccaagcccgccgccgtccaccgcctcacctacggcggccaggacttctccttctcggcgtacgggccctactggcgcttcatgaagcgcgcgtgcgtgcacgagctcctcgccggacgaacgctcgaccggctccgccacgtccgccgcgaggaggtggcgcgcctcgtcggctcgctccgcgcgagcgccgacggcggcgagcgcgtcgacgtcgacgccgcgctcatgggcctcaccggcgacatcgtctcccgcatggtgatgggccggcggtggaccggcgacgacaacgacgcggaggagatgcggagcgtggtcgccgagacggcggagctcaccggcacgttcaacctgcaggactacatcggcgtcttcaagtactgggacgtgcaggggctcggcaagcgcatcgatgcggtgcaccgcaagttcgacgccatgatggagcggatactgacggcgagggaagccaagaggaagctacgccggcaagcggcggccgacggcgaggacgacgagaaggacctccttgacatgctcttcgacatgcacgaagacgaagccgccgagatgcgtctcaccagagacaacatcaaggcgttcatgctggacatcttcgcggcggggacggacacgacgacgatcacgctggagtgggcgctgtcagagctaatcaacaacccgcccgtcctccgcaagctacaggcggagctcgacgcggtggtcggcggcgcgcggctcgccgacgagtcggacatcccgagcctcccgtacctgcaggccgtggcgaaggagacgctgcggctgcacccgacgggcccgctcgtggtgcggcgctcgctggagcgcgccacggtggccggctacgacgtcccggcgggcgccacggtgttcgtgaacgtgtgggcgatcggccgcgacgcggcgtggtggccggagccgacggcgttccggccggagaggttcgtctccggcggcggcggcggcgggacggcggcggacgtgcgcgggcagcacttccacctgctgccgttcgggtcggggcggcggatctgccccggcgcgtcgctggcgatgctggtggtgcaggcggcgctggccgccatggtgcagtgcttcgagtggagccccgtcggcggcgcgccggtggacatggaggaggggcccgggctgacgctgccgcggaagcgcccgctcgtctgcaccgtctcgccgcggatacacccgctgccggctgctgcgtcagcatcgctgacgtga

SEQ ID NO: 12679 - protein, 528 aa, Oryza sativa
MDHQLVARGLFKPLLLFVAGLIVLYALRRRRRHRRSSGLRLPPSPFGLPILGHLHLLAPLPHQALHRLAARHGPLLFLRLGSVPCVAACSPDAAREVLKTHEAAFLDRPKPAAVHRLTYGGQDFSFSAYGPYWRFMKRACVHELLAGRTLDRLRHVRREEVARLVGSLRASADGGERVDVDAALMGLTGDIVSRMVMGRRWTGDDNDAEEMRSVVAETAELTGTFNLQDYIGVFKYWDVQGLGKRIDAVHRKFDAMMERILTAREAKRKLRRQAAADGEDDEKDLLDMLFDMHEDEAAEMRLTRDNIKAFMLDIFAAGTDTTTITLEWALSELINNPPVLRKLQAELDAVVGGARLADESDIPSLPYLQAVAKETLRLHPTGPLVVRRSLERATVAGYDVPAGATVFVNVWAIGRDAAWWPEPTAFRPERFVSGGGGGGTAADVRGQHFHLLPFGSGRRICPGASLAMLVVQAALAAMVQCFEWSPVGGAPVDMEEGPGLTLPRKRPLVCTVSPRIHPLPAAASASLT

SEQ ID NO: 12680 - DNA, 1581 bp, Oryza sativa
  CDS (1)..(1581)
atggacgttgtgcctctcccgctgctgctcggctccctggccgtgtccgccgccgtgtggtaccttgtgtacttcctccgcggcggcagcggcggcgacgcggcgaggaagcggcggcctttgccacccgggccacgcgggtggcccgtgctgggcaacctgccgcagctcggcgacaagccgcaccacaccatgtgcgccctggcgcggcagtacggcccgctgttccggctccggttcggctgcgccgaggtggtggtggccgcgtcggcgcccgtggctgcgcagttcctgcgcgggcacgatgccaacttcagcaaccgcccgcccaactcgggcgccgagcacgtcgcgtacaactaccaggacctcgtcttcgcgccctacggtgctcgctggcgcgccctgcggaagctgtgcgcgctccacctcttctcggccaaggcgctcgacgacctccgagcagtccgggagggcgaggtcgcgctcatggtgaggaacctcgctcggcagcaggcggcgtcagtggcgctggggcaggaagcgaacgtctgcgccacgaacacgctggcccgcgccaccatcggtcaccgggtgttcgccgtcgacggcggggaaggcgcaagggagttcaaggagatggttgtggagctgatgcagctcgccggcgttttcaacgtcggggacttcgtgccggcgctccggtggctcgacccgcagggcgtcgtggcaaagatgaagaggctgcaccgtcggtacgacaacatgatgaacggattcatcaacgaaaggaaggccggggcgcagcccgacggggtcgccgctggcgagcacggcaacgaccttctaagcgtgctgctggcgaggatgcaggaggagcagaagctggacggcgacggcgaaaagatcaccgaaactgacatcaaagctctgctcctgaacctattcactgcggggacggatacgacatcgagcacggtggagtgggcactggcggagctgatccggcacccggacgtcctcaaggaggcccagcatgagcttgacaccgtcgtcggtaggggtcgtctcgtgtccgagtctgaccttccacgcctcccctacctcaccgcggtgatcaaggagacgtttcggcttcacccgtcaacgccgctctcactgcctcgggaggctgcagaggagtgtgaggtggacggctaccgtatccccaagggcgctaccctcctagtcaacgtctgggctatagcccgtgacccgacccaatggcccgacccgctacagtaccagccttctcggtttctccccggcaggatgcatgcagacgtggatgtcaagggtgctgatttcggcctgataccattcggagcaggacggagaatatgcgctggccttagttggggcttgcggatggtcacactgatgactgccacgctagtgcacgggttcgactggaccttggctaacggcgcgactccggacaagctcaacatggaggaggcctatgggctcaccttgcagagggccgtgccgttgatggtccagcccgtgccaaggctgcttccatcggcttatggagtataa

SEQ ID NO: 12681 - protein, 526 aa, Oryza sativa
MDVVPLPLLLGSLAVSAAVWYLVYFLRGGSGGDAARKRRPLPPGPRGWPVLGNLPQLGDKPHHTMCALARQYGPLFRLRFGCAEVVVAASAPVAAQFLRGHDANFSNRPPNSGAEHVAYNYQDLVFAPYGARWRALRKLCALHLFSAKALDDLRAVREGEVALMVRNLARQQAASVALGQEANVCATNTLARATIGHRVFAVDGGEGAREFKEMVVELMQLAGVFNVGDFVPALRWLDPQGVVAKMKRLHRRYDNMMNGFINERKAGAQPDGVAAGEHGNDLLSVLLARMQEEQKLDGDGEKITETDIKALLLNLFTAGTDTTSSTVEWALAELIRHPDVLKEAQHELDTVVGRGRLVSESDLPRLPYLTAVIKETFRLHPSTPLSLPREAAEECEVDGYRIPKGATLLVNVWAIARDPTQWPDPLQYQPSRFLPGRMHADVDVKGADFGLIPFGAGRRICAGLSWGLRMVTLMTATLVHGFDWTLANGATPDKLNMEEAYGLTLQRAVPLMVQPVPRLLPSAYGV

SEQ ID NO: 12682 - DNA, 1512 bp, Glycine max
  CDS (1)..(1512)
atggctgaaactgacatccaagactatctccaactcttcttcctctggttactctccatcatcgccgttagagccatactcaccaaactccgccacaagcctcgccgtccaccgggcccacggtccctccccatcatcggccacctccatctcatctccgccctgcctcaccagtctttccacgcgctctccacgcgctacggccccgccgtgcaagtcttcctcggctccgtccccgccgtggtcgtttcgtgcccggaactcgcgaaggagttcctgaaaacgcacgagcccagcttctcgaaccggttcgtgagtgcagcggttcaccacctgtcctatgggtccaaggggttcctcttcgcgccctacggaagctactggaggttcttgaagaagatttgcatgtcggagcttctcggtggccgcaccctcgaccagttccggcacttgagggagcaagaaactttgagggcgaaaggggaggcgcatgaggccgtggatgttagtggggagttgatgactttgaccaacagtgtaatatcgaggatggttttgagtcgaacatgttgcgagagcgatggtgacgtggagcacgtgaggaagatggtggcggacactgctgagctggcggggaagttcaacgtggcggattttgtgtggttgtgtaaggggttggatttgcatgggataaagaagaggcttgtgggtattttggagaggtttgatggcatgatggagagggtgataagggagcatgaggaggagagggagagaaggaaggaaagaggggaaggggaggagattagggatttgctagatattttgttggaaattcatcaagatgagagcagggagatcaagttatctagagagaatgtcaaggctttcatcttggacatatatatggcaggaaccgacacatcagctataaccatggagtgggccctagcagagttaatcaacaaccatcatgtgatggagaaagcaagacaagagatagattcagtgacagggaaccaaaggctaatacaagaatcagatcttcccaaccttccatacctacaagccatagtcaaagaaacactaaggattcaccctacagcgccactgctagggagagaatcatcagaaagctgcaatgtatgtggttatgacattccagcaaagtccttagtgtttgttaatctgtggtctatgggaagggaccccaaaatttgggaggaccctcttgagttcaggccagagaggtttatgaacaataatgaagaaaaacaaattgatgtgaggggacagaatttccaactattgccatttgggactgggagaaggttgtgccctggtgcatcacttgcacttcagactgtgcctactaacgttgctgctatgattcaatgctttgaatttagggttgatgggactgttagcatggaagagaaaccagccatgacacttcctagggcacatcctttgatttgtgtccctgtgccacgcatgaaccttcccttctag

SEQ ID NO: 12683 - protein, 503 aa, Glycine max
MAETDIQDYLQLFFLWLLSIIAVRAILTKLRHKPRRPPGPRSLPIIGHLHLISALPHQSFHALSTRYGPAVQVFLGSVPAVVVSCPELAKEFLKTHEPSFSNRFVSAAVHHLSYGSKGFLFAPYGSYWRFLKKICMSELLGGRTLDQFRHLREQETLRAKGEAHEAVDVSGELMTLTNSVISRMVLSRTCCESDGDVEHVRKMVADTAELAGKFNVADFVWLCKGLDLHGIKKRLVGILERFDGMMERVIREHEEERERRKERGEGEEIRDLLDILLEIHQDESREIKLSRENVKAFILDIYMAGTDTSAITMEWALAELINNHHVMEKARQEIDSVTGNQRLIQESDLPNLPYLQAIVKETLRIHPTAPLLGRESSESCNVCGYDIPAKSLVFVNLWSMGRDPKIWEDPLEFRPERFMNNNEEKQIDVRGQNFQLLPFGTGRRLCPGASLALQTVPTNVAAMIQCFEFRVDGTVSMEEKPAMTLPRAHPLICVPVPRMNLPF

SEQ ID NO: 12684 - DNA, 1530 bp, Glycine max
  CDS (1)..(1530)
atggcttatcaagtgttggtgatttgtgtggtctccagcatagtgtttgcatacatagtatggagaaaagaaaggaagaaaaagcttccaccgagtccaaagggccttcccatcattgggcacctccaccttgtgtccccaataccccaccaagatttttacaagctctcactccgccatggacccatcatgcaacttttcctcggctcagtcccttgtgtggtggcttccaccgcggaagccgccaaagagttcctcaaaacccacgaaatcaacttctccaaccgccccggccaaaacgtcgccgttaaaggccttgcctacgattcccaggacttccttttcgcatttgcacccttcggaccctactggaagttcatgaagaaactctgcatgtccgagcttctcagcggccgaatgatggaccagttccttcccgtgaggcagcaagagaccaagagattcatcagccgcgtgttccgaaaaggcgttgccggcgagcccgtggatttcggagacgagctaatgacactctccaacaacgttgtgtctagaatgacgctgagtcagaaaacttctgacaacgacaaccaggctgaagagatgaagaagctggtgtcggatatcgcggagctcatggggaagttcaacgtttcggacttcatttggtacttgaagccttttgatttgcaggggttcaacaagaaaatcaaggagactcgagacaggttcgacgttgtggtggacggaatcataaagcagcgtgaagaagaaagaatgaaaaacaaagaaacgggcacagcacgtcagtttaaggacatgcttgatgttttattggacatgcacgaagataagaatgctgaaatcaaattagacaaaaaaaacattaaggccttcatcatggacatatttgttgctgggactgacacgtcagctgtaagcatagaatgggctatggcagagttaatcaacaatccacacgtgttggagaaggcaagacaagagatagatgcagtagttggaaaaagtagaatggtagaggaatcagatattgccaaccttccttaccttcaagccattgttagagaaacacttaggcttcaccctggtggtccattgattgttagagagtcatcaaaaagtgctgtggtttgtgggtatgatattccagcaaagacacgattatttgtcaatgtttgggctattggtagggatcccaatcactgggagaacccttttgagtttaggccagagaggtttatcagagatgggcagaatcaattggatgttaggggacaacattatcattttattccatttgggagtggaagaagaacgtgtcctggtgcttctctagcttggcaggttgttcctgtgaatctggctataattattcaatgtttccaatggaagcttgttggtggcaatggcaaggtggacatggaagaaaagtctggcatcactcttccgagggctaaccccataatttgtgtccctgttccaagaattaacccattccttactatgtga

SEQ ID NO: 12685 - protein, 509 aa, Glycine max
MAYQVLVICVVSSIVFAYIVWRKERKKKLPPSPKGLPIIGHLHLVSPIPHQDFYKLSLRHGPIMQLFLGSVPCVVASTAEAAKEFLKTHEINFSNRPGQNVAVKGLAYDSQDFLFAFAPFGPYWKFMKKLCMSELLSGRMMDQFLPVRQQETKRFISRVFRKGVAGEPVDFGDELMTLSNNVVSRMTLSQKTSDNDNQAEEMKKLVSDIAELMGKFNVSDFIWYLKPFDLQGFNKKIKETRDRFDVVVDGIIKQREEERMKNKETGTARQFKDMLDVLLDMHEDKNAEIKLDKKNIKAFIMDIFVAGTDTSAVSIEWAMAELINNPHVLEKARQEIDAVVGKSRMVEESDIANLPYLQAIVRETLRLHPGGPLIVRESSKSAVVCGYDIPAKTRLFVNVWAIGRDPNHWENPFEFRPERFIRDGQNQLDVRGQHYHFIPFGSGRRTCPGASLAWQVVPVNLAIIIQCFQWKLVGGNGKVDMEEKSGITLPRANPIICVPVPRINPFLTM

SEQ ID NO: 12686 - DNA, 1509 bp, Glycine max
  CDS (1)..(1509)
atggcttatcaagtgttggtgatttgtgtggtctccagcatagtgtttgcatacatagtatggagaaaagaaaggaagaaaaagcttccaccgagtccaaagggccttcccatcattgggcacctccaccttgtgtccccaataccccaccaagatttttacaagctctcactccgccatggacccatcatgcaacttttcctcggctcagtcccttgtgtggtggcttccaccgcggaagccgccaaagagttcctcaaaacccacgaaatcaacttctccaaccgccccggccaaaacgtcgccgttcagttcttaacctacgtgtttggcccttacggaccctccgtgaagttcatcaagaaactttgcatgtccgaactcctcggtgggcgcatgctggaccagttccttcctgtgagacagcaagagacaaaaaaattcatcaaacgcgtcctccaaaagggtatcgctggtgaagccgttgacttcggaggagagttcatgagactctccaacaacatcatttcgagaatgaccatgaaccagacgagttccgaggacgagaaacaggccgaagagatgaggatgctggtggcggatgtcgcagaactcatgggcacgttcaacgtgtcggacttcatttggttcttgaagccttttgatttgcaggggttcaacaagaggatcaggaaaacgaggatcagattcgacgctgtcttggacagaatcatcaagcagcgtgaagaggaaagaaggaacaacaaggaaatcggtggaacgcgtcagtttaaggatatacttgatgttttgttggacataggcgaagatgacagttctgaaatcaaattaaccaaagagaacattaaggccttcatcatggatatatttgttgccgggactgacacgtcagctgcaaccatggaatgggctatggcagagttaatcaacaatccatgtgtgttggagaaggcaaggcaagagatagatgcagtggttggaaatagtagaataatagaagaatcagacattgtcaaccttccttacctacaagccattgttagagaaacacttaggattcacccaggtggtccattgattgttagagagtcatcaaaaagtgttgtggtttgtgggtatgaaattccagccaagacccgattatttgtcaatgtttgggctattggaagggaccccaatcattgggagaacccatttgagtttaggccggagaggttttttgaaaatggacaaagtcaattggatgttaggggacaacattatcattttattccattcgggagtggaagaagatcatgccctggtacttctctggcattgcagattgtgcatgtgaatctggctattatgattcagtgttttcagtggaagtttgataatggcaataacaaggtggacatggaagagaagtctggcatcactcttccgagggctcaccccataatttgtgtccctgttccaaggcttaacccattccctgttatgtga

SEQ ID NO: 12687 - protein, 502 aa, Glycine max
MAYQVLVICVVSSIVFAYIVWRKERKKKLPPSPKGLPIIGHLHLVSPIPHQDFYKLSLRHGPIMQLFLGSVPCVVASTAEAAKEFLKTHEINFSNRPGQNVAVQFLTYVFGPYGPSVKFIKKLCMSELLGGRMLDQFLPVRQQETKKFIKRVLQKGIAGEAVDFGGEFMRLSNNIISRMTMNQTSSEDEKQAEEMRMLVADVAELMGTFNVSDFIWFLKPFDLQGFNKRIRKTRIRFDAVLDRIIKQREEERRNNKEIGGTRQFKDILDVLLDIGEDDSSEIKLTKENIKAFIMDIFVAGTDTSAATMEWAMAELINNPCVLEKARQEIDAVVGNSRIIEESDIVNLPYLQAIVRETLRIHPGGPLIVRESSKSVVVCGYEIPAKTRLFVNVWAIGRDPNHWENPFEFRPERFFENGQSQLDVRGQHYHFIPFGSGRRSCPGTSLALQIVHVNLAIMIQCFQWKFDNGNNKVDMEEKSGITLPRAHPIICVPVPRLNPFPVM

SEQ ID NO: 12688 - DNA, 1224 bp, Glycine max
  CDS (1)..(1224)
atgaaaaccaacgacctcaatttctgttaccgaccccactttggatcctccgagtacttcttgtacaaaggctctgattttatcaccgccccatatggcccttattggcgcttcatcaagaagctttgcatgacgcagcttctatccagctcgcagctagggcgcttcgtgcacgtccgagagcaagaaattaataaactcttgaaatctgttctagtgtgttccagtgaaggtagggttattgatttgagctttgagctcacttctttgaccaacaatatcttgtgccggatggctatgagcaccagctgtttggatagggttcatgatgctgctgagattcttgacttggtgagggagtttttgcatgcaggagctaagttgagcatgggtgaggtgttgggacctttggggaagtttgatttgtttgggtatgggaagaagcttgtcaaaatagttggcaagtttgatcaggttttggagcgtatcatggaggaacacgaagagaaaaacactgaggttcgtcgaggagaaacaggggacatgatggatattatgttgcaagtttataaagatccaaatgctgaagtgaggttaacaaggaatcatatcaaggccttcttcctagatattttcctagcgggaacagaaacgtcttcagcagcgttgcaatgggcaatggctgagatgatgaacaaggaaggagtgttaaaaagggtgaaggaagagatcgatgaagtggtgggaactaacaggttggttagtgaatcagacattacaaatctacgttacctccaagctgtagtgaaggaagttttaagactccatccaacggcgccgcttgctataagagaatcagcagagaactgcagcatcaacgggtatgatatcaagggccagacacgaacactcatcaatgtctacgccatcatgcgggacccagaagcgtggcccaacccagaggagtttatgccggagaggttcttggatgggatcaacgccgctgatttcagctatcttccgtttgggtttggcaggagggggtgccctggatcttcccttgcattaacgctcatacaagtcacgcttgcatcgcttatccaatgttttcaatggaatatcaaagccggagagaagctttgtatggaagaagcctcatccttctctacaggattggcaaagcctcttctttgttaccctataactcgttttaatcctttttaa

SEQ ID NO: 12689 - protein, 407 aa, Glycine max
MKTNDLNFCYRPHFGSSEYFLYKGSDFITAPYGPYWRFIKKLCMTQLLSSSQLGRFVHVREQEINKLLKSVLVCSSEGRVIDLSFELTSLTNNILCRMAMSTSCLDRVHDAAEILDLVREFLHAGAKLSMGEVLGPLGKFDLFGYGKKLVKIVGKFDQVLERIMEEHEEKNTEVRRGETGDMMDIMLQVYKDPNAEVRLTRNHIKAFFLDIFLAGTETSSAALQWAMAEMMNKEGVLKRVKEEIDEVVGTNRLVSESDITNLRYLQAVVKEVLRLHPTAPLAIRESAENCSINGYDIKGQTRTLINVYAIMRDPEAWPNPEEFMPERFLDGINAADFSYLPFGFGRRGCPGSSLALTLIQVTLASLIQCFQWNIKAGEKLCMEEASSFSTGLAKPLLCYPITRFNPF

SEQ ID NO: 12690 - DNA, 1542 bp, Glycine max
  CDS (1)..(1542)
atgctagacatcaaaggctacctcgtactcttcttcctatggttcatatcaaccattctgatacgttccatcttcaagaaaccacagcgtctaagactcccaccgggtcctccaatttcaatacccttgctgggacacgcgccatatctccgttcactgctccaccaagcattgtacaagctatcactgcgctatggacccttgatccacgtcatgatcggttcgaagcacgtggtggtggcgtcgtcggcggagacggccaagcagatcctcaaaacctcggaggaggcattctgcaaccgtcccttaatgatagcgagcgagagcctaacctacggcgcggcggactacttcttcatcccctacggcacatactggcggttcctgaagaagctctgcatgacggagcttctgagcgggaagaccctggagcatttcgtgagaatccgcgagagcgaggtggaggcgttcctcaagagaatgatggagatttcaggcaatggaaattacgaggtggtgatgaggaaggagctcataacgcacacgaataacatcatcacgaggatgataatggggaagaagagtaatgcggaaaacgatgaggtggccaggttgaggaaggtggtgagggaggtcggggagttgcttggggcgtttaacttgggggatgttattgggttcatgaggcctttggatctgcaagggtttgggaagaagaacatggaaactcaccacaaggtggatgcgatgatggagaaggtgttgagggagcatgaggaggctagggctaaggaagatgctgactctgataggaagaaggatctttttgatattttgttgaacctcattgaagctgatggtgctgacaataagctcactagagagagtgccaaagcctttgctctggacatgttcatcgccggcacaaacggccccgcaagcgtcctagagtggtcactggcggagctggtgagaaacccccacgttttcaagaaggcaagagaagagattgagtcagtggtaggcaaagaaaggctggtcaaagaatcagacattcccaacctaccatacctacaagcagtgctgaaggaaaccctaaggctgcacccgccaaccccaatattcgcaagagaagccatgcgaacatgccaggttgaaggctacgacattccggaaaattccactattttgatcagcacatgggccattggtagggatccaaattactgggatgacgcactcgagtacaagccggagaggttcttgttctccgacgacccgggcaagagcaagattgacgtgagggggcagtactatcagctcctgccctttgggagcgggagaagaagctgccccggagcctcgctagcgttgcttgtcatgcaagcaacgctagcgagtttgatccagtgcttcgactggatcgttaatgatggtaaaaaccatcatgttgacatgtctgaggaagggagggtgactgtgtttttggccaagccactcaagtgcaagcctgttccgcgtttcactccgttcgctgcctga

SEQ ID NO: 12691 - protein, 513 aa, Glycine max
MLDIKGYLVLFFLWFISTILIRSIFKKPQRLRLPPGPPISIPLLGHAPYLRSLLHQALYKLSLRYGPLIHVMIGSKHVVVASSAETAKQILKTSEEAFCNRPLMIASESLTYGAADYFFIPYGTYWRFLKKLCMTELLSGKTLEHFVRIRESEVEAFLKRMMEISGNGNYEVVMRKELITHTNNIITRMIMGKKSNAENDEVARLRKVVREVGELLGAFNLGDVIGFMRPLDLQGFGKKNMETHHKVDAMMEKVLREHEEARAKEDADSDRKKDLFDILLNLIEADGADNKLTRESAKAFALDMFIAGTNGPASVLEWSLAELVRNPHVFKKAREEIESVVGKERLVKESDIPNLPYLQAVLKETLRLHPPTPIFAREAMRTCQVEGYDIPENSTILISTWAIGRDPNYWDDALEYKPERFLFSDDPGKSKIDVRGQYYQLLPFGSGRRSCPGASLALLVMQATLASLIQCFDWIVNDGKNHHVDMSEEGRVTVFLAKPLKCKPVPRFTPFAA

SEQ ID NO: 12692 - DNA, 1560 bp, Glycine max
  CDS (1)..(1560)
atggctgattaccaaggcaccatcatacttttcatcatatggctagtctccacaatagtggttcgagccatagtcagcaaaaaacagaacaagactaatagaccaccaagtccactagccttacccatcattggacatctccaccttcttgctccaatacctcaccaagctcttcacaagctctccacccgccatggacccataatgcaccttctccttggctccgtgccatgtgtcgtggcttccacaccagaagccgccaaagaattcctcaaaactcacgaaaactccttctccaaccgcccgcaaagttttgcggttgattatctaacatatggctcgcaggacttctctttcgcgccatatggaccgtattggaaattcatgaagaaaatatgcatgtctgagcttctggggggtcacacactgagtcagcttctacctgtgaggagacaagagactttaaggtttcttagacttatgcttcagagagggaaggcagctgaggccattgatgttgggagagaactactgaggctctcgaataacgttgtgtcaaggatgattatgagccaaacgtgttctgaagatgatagtgaggctgaagaggtgaggaagttggtgcaagacactgtgcatctcactgggaagtttaatgtttcggacttcatttggttccttaggaagtgggatttgcaggggttcgggaaaggactcaaggagattcgggacaggtttgatgccattatggagagggcgatcaagaagcatgaagaggaaaggaagaaaagaagggaagagggtagtggaggagagggtcatatcaaggatctacttgatgtattgttggacatacatgaagatgagaactctgatattaaattgactaaagagaacataaaggccttcatcttggatgtgtttatggcaggaacagacactgcagccttaacaaccgaatgggctctagctgagttgattaaccacccacatgtgatggagagagcaagacaagagattgatgctgtgatagggaatggtagaatagtagaagaatcagacattgccaacctttcttacctgcaagctgtagtgaaggaaactctgaggattcaccccacaggtccaatgattattagagaatcatcagaaagcagcactatctggggctatgagattccagcaaagactcagttatttgttaatgtgtgggctattggaagggaccctaatcactgggagaacccacttgagttcaggccagagaggtttgctagtgaagagggaagtgggaaggggcagttagatgtgagggggcaacattttcacatgattccatttgggagtgggagaagagggtgtcctggaacctcactggctttgcaggttgtgcaggcaaaccttgctgctatgattcaatgctttgaatggaaggttaaaggaggcattgaaattgctgacatggaagagaaaccagggttaactctttcaagggctcatccattgatttgtgtccctgtgcctaggcttaatccttttcctaatatatcaaatgcctaa

SEQ ID NO: 12693 - protein, 519 aa, Glycine max
MADYQGTIILFIIWLVSTIVVRAIVSKKQNKTNRPPSPLALPIIGHLHLLAPIPHQALHKLSTRHGPIMHLLLGSVPCVVASTPEAAKEFLKTHENSFSNRPQSFAVDYLTYGSQDFSFAPYGPYWKFMKKICMSELLGGHTLSQLLPVRRQETLRFLRLMLQRGKAAEAIDVGRELLRLSNNVVSRMIMSQTCSEDDSEAEEVRKLVQDTVHLTGKFNVSDFIWFLRKWDLQGFGKGLKEIRDRFDAIMERAIKKHEEERKKRREEGSGGEGHIKDLLDVLLDIHEDENSDIKLTKENIKAFILDVFMAGTDTAALTTEWALAELINHPHVMERARQEIDAVIGNGRIVEESDIANLSYLQAVVKETLRIHPTGPMIIRESSESSTIWGYEIPAKTQLFVNVWAIGRDPNHWENPLEFRPERFASEEGSGKGQLDVRGQHFHMIPFGSGRRGCPGTSLALQVVQANLAAMIQCFEWKVKGGIEIADMEEKPGLTLSRAHPLICVPVPRLNPFPNISNA

SEQ ID NO: 12694 - DNA, 1533 bp, Glycine max
  CDS (1)..(1533)
atggcttttcaagtgttgttcatttgtttgatctcaaccatcgtgtttgcatccatactatggagaaaacaaaacaaaaacaagacccttcttccaccgagtccaatgcccctacccatcattggacacctccaccttctttctccaacacctcaccaagattttcacaagctctcactccgctatggacccataatacacctttttcttggttcagtcccctgtgtggtggcttccacagcagaagccgccaaagagttcctcaaaactcacgaacccgccttctccaaccgccccgctaacactgtcgccgtcgaaaccttaacctacggtttccaagacttcttgttcgcaccctacggaccctattggaagttcatgaagaaactctgcatgtccgaactcctcggtggccacatgctggaccagtttcttcccgtgagacagcaagagacaaaaaaattcatcaaacgtgtcctccaaaagggtatttctggtgaggccgtggattttgggggagagttcatcacgctctcgaacaacatcgtgtcgagaatgatcgtgagtcagacgagtactactgaggacgagaacgaagttgaagagatgaggaagctggtgaaggatgccgcagagctctcggggaagttcaacatatcggacttcgtttcgttcttgaagcgctttgatttgcaggggttcaacaagaggctcgagaagattcgggactgctttgacaccgtgttggacagaatcataaagcaacgtgaagaggaaagaaggaacaagaatgaaaccgttggaaaacgagaatttaaggatatgcttgatgttttgtttgacatatctgaagatgagagttctgaaattaaattaaacaaagaaaacattaaggccttcatcttggacatattaattgctgggactgacacctcagctgtaacgatggaatgggctatggcagagttaatcaacaatccaggtgtgttggagaaggcaagacaagaaatggatgcagtggttggaaagagtagaatagtagaagaatcagatattgccaaccttccttacttgcaaggcattgttagagaaacattaagacttcacccagctggtccattgctttttagagagtcatctagaagagctgtggtttgtgggtatgatattccagcaaagactcgattatttgtcaatgtttgggctattggtagggaccccaatcactgggagaaccctcttgagtttaggccagagaggtttgttgaaaatgggaagagtcaattggatgttaggggacaacattatcatctacttccgttcggtagtggaagaagagcatgtcctggtacttctttggcattgcaagttgtgcatgtgaatttggcagttctaattcagtgtttccaatggaaggttgactgtgacaatggcaaggtgaacatggaagaaaaggctggcatcactcttccgagggctcaccccataatttgtgtccctattcgaagacttaacccattccctgttgtgtga

SEQ ID NO: 12695 - protein, 510 aa, Glycine max
MAFQVLFICLISTIVFASILWRKQNKNKTLLPPSPMPLPIIGHLHLLSPTPHQDFHKLSLRYGPIIHLFLGSVPCVVASTAEAAKEFLKTHEPAFSNRPANTVAVETLTYGFQDFLFAPYGPYWKFMKKLCMSELLGGHMLDQFLPVRQQETKKFIKRVLQKGISGEAVDFGGEFITLSNNIVSRMIVSQTSTTEDENEVEEMRKLVKDAAELSGKFNISDFVSFLKRFDLQGFNKRLEKIRDCFDTVLDRIIKQREEERRNKNETVGKREFKDMLDVLFDISEDESSEIKLNKENIKAFILDILIAGTDTSAVTMEWAMAELINNPGVLEKARQEMDAVVGKSRIVEESDIANLPYLQGIVRETLRLHPAGPLLFRESSRRAVVCGYDIPAKTRLFVNVWAIGRDPNHWENPLEFRPERFVENGKSQLDVRGQHYHLLPFGSGRRACPGTSLALQVVHVNLAVLIQCFQWKVDCDNGKVNMEEKAGITLPRAHPIICVPIRRLNPFPVV

SEQ ID NO: 12696 - DNA, 1158 bp, Glycine max
  CDS (1)..(1158)
atgaagaaactctgcgtcacggagcttctctccacgcgccaacttgagcgctccaggagcataaggagggaagagatactacgttccatcaaaagggttattgacaatgctcgtgagactgttgcacttgatttgggctccgagttcaccaaattcaccaacaatgtcacttgcaggacggccatgagcaccagttgtgcggaaaaatgcgaggatgctgagaggatcaggaagctagtaaaggagtcctttgagctagctgcgaaattgtgctttggtgatgtgttgggccctttcaaggagttgagtttttgggtgtatgggaaaaaggccatagacatgagcacaaggtacgatgagttgttggaagaggtgctcaaggagcatgaacacaaaagattatcgcgtgcaaatggtgatcaaagtgaaagggatttgatggatattctgttagatgtttatcatgatgctcatgcagagttcaagatcacaatggctcatattaaagccttctttatggatctcttcattgcaggcacacacacctcagcagaagcaacacagtgggcaatggccgagctcctcaaccaccctgaagcatttcaaaaggtgagaaaggagatagagttagtcactggcaatgttaggcttgttgatgaatccgatatcacaaacttgccatatttgcaagcagttgtgaaggaaacactaagactctacccgccggcaccaatcacgacaagagagtgtcgccaacactgcaaaataaacagcttcgatgtgccaccaaagacagcagtggcaatcaatttgtatgccataatgagagaccctgattcttgggacaatcctaatgagttttgccctgaaaggttcttgcaagaacaagatcatgaggatttgagtgatgatggtaagagaatgaagttcaattttgttccatttggaggtgggaggagaggttgtccagggacagcactggcattcagcttgatgaacactgcagttgctgctatggtgcagtgctttgattggaaaattggtaaagatggaaaaggagaaaaggttgatatggaatctgggtctggtatgtctttgagcatggttcacccccttatttgcgttcccgtagtacattttatcccatatgatatataa

SEQ ID NO: 12697 - protein, 385 aa, Glycine max
MKKLCVTELLSTRQLERSRSIRREEILRSIKRVIDNARETVALDLGSEFTKFTNNVTCRTAMSTSCAEKCEDAERIRKLVKESFELAAKLCFGDVLGPFKELSFWVYGKKAIDMSTRYDELLEEVLKEHEHKRLSRANGDQSERDLMDILLDVYHDAHAEFKITMAHIKAFFMDLFIAGTHTSAEATQWAMAELLNHPEAFQKVRKEIELVTGNVRLVDESDITNLPYLQAVVKETLRLYPPAPITTRECRQHCKINSFDVPPKTAVAINLYAIMRDPDSWDNPNEFCPERFLQEQDHEDLSDDGKRMKFNFVPFGGGRRGCPGTALAFSLMNTAVAAMVQCFDWKIGKDGKGEKVDMESGSGMSLSMVHPLICVPVVHFIPYDI

SEQ ID NO: 12698 - DNA, 1674 bp, Zea mays
  CDS (29)..(1561)
acaaacacttgatagtactactcaaggtatggcttttcaagtgttgttcatttgtttgatctcaaccatcgtgtttgcatccatactatggagaaaacaaaacaaaaacaagacccttcttccaccgagtccaatgcccctacccatcattggacacctccaccttctttctccaacacctcaccaagattttcacaagctctcactccgctatggacccataatacacctttttcttggttcagtcccctgtgtggtggcttccacagcagaagccgccaaagagttcctcaaaactcacgaacccgccttctccaaccgccccgctaacactgtcgccgtcgaaaccttaacctacggtttccaagacttcttgttcgcaccctacggaccctattggaagttcatgaagaaactctgcatgtccgaactcctcggtggccacatgctggaccagtttcttcccgtgagacagcaagagacaaaaaaattcatcaaacgtgtcctccaaaagggtatttctggtgaggccgtggattttgggggagagttcatcacgctctcgaacaacatcgtgtcgagaatgatcgtgagtcagacgagtactactgaggacgagaacgaagttgaagagatgaggaagctggtgaaggatgccgcagagctctcggggaagttcaacatatcggacttcgtttcgttcttgaagcgctttgatttgcaggggttcaacaagaggctcgagaagattcgggactgctttgacaccgtgttggacagaatcataaagcaacgtgaagaggaaagaaggaacaagaatgaaaccgttggaaaacgagaatttaaggatatgcttgatgttttgtttgacatatctgaagatgagagttctgaaattaaattaaacaaagaaaacattaaggccttcatcttggacatattaattgctgggactgacacctcagctgtaacgatggaatgggctatggcagagttaatcaacaatccaggtgtgttggagaaggcaagacaagaaatggatgcagtggttggaaagagtagaatagtagaagaatcagatattgccaaccttccttacttgcaaggcattgttagagaaacattaagacttcacccagctggtccattgctttttagagagtcatctagaagagctgtggtttgtgggtatgatattccagcaaagactcgattatttgtcaatgtttgggctattggtagggaccccaatcactgggagaaccctcttgagtttaggccagagaggtttgttgaaaatgggaagagtcaattggatgttaggggacaacattatcatctacttccgttcggtagtgaaagaagagcatgtcctggtacttctttggcattgcaagttgtgcatgtgaatttggcagttctaattcagtgtttccaatggaaggttgactgtgacaatggcaaggtgaacatggaagaaaaggctggcatcactcttccgagggctcaccccataatttgtgtccctattcgaagacttaacccattccctgttgtgtgattgttttttattttaaacatcatttttccattcacgtatatgatatgatgtcatgtcaaacatttatgcactttttacataatatatttggggattcaaaaaaaaaaaaaaaa

SEQ ID NO: 12699 - protein, 510 aa, Zea mays
MAFQVLFICLISTIVFASILWRKQNKNKTLLPPSPMPLPIIGHLHLLSPTPHQDFHKLSLRYGPIIHLFLGSVPCVVASTAEAAKEFLKTHEPAFSNRPANTVAVETLTYGFQDFLFAPYGPYWKFMKKLCMSELLGGHMLDQFLPVRQQETKKFIKRVLQKGISGEAVDFGGEFITLSNNIVSRMIVSQTSTTEDENEVEEMRKLVKDAAELSGKFNISDFVSFLKRFDLQGFNKRLEKIRDCFDTVLDRIIKQREEERRNKNETVGKREFKDMLDVLFDISEDESSEIKLNKENIKAFILDILIAGTDTSAVTMEWAMAELINNPGVLEKARQEMDAVVGKSRIVEESDIANLPYLQGIVRETLRLHPAGPLLFRESSRRAVVCGYDIPAKTRLFVNVWAIGRDPNHWENPLEFRPERFVENGKSQLDVRGQHYHLLPFGSERRACPGTSLALQVVHVNLAVLIQCFQWKVDCDNGKVNMEEKAGITLPRAHPIICVPIRRLNPFPVV

SEQ ID NO: 12700 - DNA, 1509 bp, Arabidopsis thaliana
  CDS (1)..(1509)
atgcttgcaaaaatcgtcgttgactttcaaaattgcctcattttcattcttatatccttattttctctcctttgcctctttgtattcgtcttcaagaagccaaaggactcacgaggctgtgatctgcctccgagccctccttctcttccgataatcggtcatcttcaccttatactctctactctacctcacaagtcctttcaaaatatatcctccaagtatggacctcttctccttctccgatttttcaatgtccccgttgtcctcaaatcctctgccaatgtggcctacgagatcttcaagacgcacgacgtgaacatctcgtcccatggccaccctccgattgacgagtgtctcttttttgggtcttctagctttgtagtggctccttatggatattactggaggttaatgaagaagctcatggtcacaaagctgttcggacctcaggcactcgagcggttacgacacgtccgtgaagatgaactagaaaggtttcacacaaacctgcttagtaaggaaatgaaaggcgagactgtccagattgctaaggaagcaataaagctgactaacaatagcgtctgcaaaatgatcatgggtaggagttgtttagaggagaatggtgatgcagcaagagttaggggattggtcaccgagacatttgccttggttaagaaaatcttcttgacacaagtgttgcgtaggctgtttgaaatactcggaatctcactgttcaaaaaagagatattgggtgtttcccgcaaattcgacgagtttctggaaaagattcttgtggaacacgatgagaaaccggactttcaaggtggagacatgatggacgtgttgttggcagcttatcgagatgaaaatgcagagtataagatcactaggaaccatatcaagtcgttgttcgcggagcttatccttggaggcactgacacctcagcgcagacaattgagtggacaatggcagaaatcattaataagcctaacattcttgagaaattgagaaaagaactcgattctgttgtaggaaaaacaaggctgattgaagagaaggatctaccaaacctcccttatctgcaatcggtcgtcaaggaagggctaagattgcacccaccagcgcctgtgtttggaaggaaagtcctagaaggatgtacgattaaaggctattatgtaccaaagaacacagctcttgttgttaatgcttatgctgtgatgagagatccccattattgggaagatcctgatgagtttaagccagagaggtttttaactacttcaagcaaaaaagaagaggagagagagcaagaacttaagtacattccttttggcagcggaaggagaggatgtcctggagtaaatctaggttatatatttgtaggaaccgcaataggaatgatggtgcattgctttgactggagagtcaaaggagataaggtcaacatggacgagactgctgctgcattgaccttaaacatggccgtgggacgaagagacacgtgttga

SEQ ID NO: 12701 - protein, 502 aa, Arabidopsis thaliana
MLAKIVVDFQNCLIFILISLFSLLCLFVFVFKKPKDSRGCDLPPSPPSLPIIGHLHLILSTLPHKSFQNISSKYGPLLLLRFFNVPVVLKSSANVAYEIFKTHDVNISSHGHPPIDECLFFGSSSFVVAPYGYYWRLMKKLMVTKLFGPQALERLRHVREDELERFHTNLLSKEMKGETVQIAKEAIKLTNNSVCKMIMGRSCLEENGDAARVRGLVTETFALVKKIFLTQVLRRLFEILGISLFKKEILGVSRKFDEFLEKILVEHDEKPDFQGGDMMDVLLAAYRDENAEYKITRNHIKSLFAELILGGTDTSAQTIEWTMAEIINKPNILEKLRKELDSVVGKTRLIEEKDLPNLPYLQSVVKEGLRLHPPAPVFGRKVLEGCTIKGYYVPKNTALVVNAYAVMRDPHYWEDPDEFKPERFLTTSSKKEEEREQELKYIPFGSGRRGCPGVNLGYIFVGTAIGMMVHCFDWRVKGDKVNMDETAAALTLNMAVGRRDTC

SEQ ID NO: 12702 - DNA, 1464 bp, Arabidopsis thaliana
  CDS (1)..(1464)
atggaggcagtgatcagctttgactttcagaactgcttcatcttcatcctcatatttctcttaacgttcctatgcttctttttcttcttcaagaaaccaaaggattcacgagttaacttcgatttgcctccgagccctccttctctaccaatcattggtcatgttcaccttctcctctctactctaacccacaagtcattacagaaactctcctccaggacacaagacgtgaacatctcctctcgcggtgtcaccgcggttgatgagtccctcgtgtttggatcttccagtttcgtcactgctccttacggagattactggaagttcatgaagaagcttactgtcatgaagcttctcggaccgcaggcacaagagcagtcacgagacatccgtgcagatgacataaagcggttttgcaggaatctgctcgataaagcaaggaagaaggagagcgttgagattggtaaagaagcaatgaatctcatgaacaacattttgtgcaagatgagcatgggaaggagtttttcagaggagaatggtgagacagagaaactaaggggattagttaccgagtcgattggcttgatgaaaaagatgttcttggcagttttgttgcgcagacagcttcagaaacttggaatctcactattcaagaaggatatcatgggcgtttccaacaaatttgatgtgctgctagagaaagttcttgtggaacatagagagaaaccggagaaggatcaaggtacggttatgttggacgtgttgttggcagcttatggagacgaaaatgcagagtacaagatcactaagaatcacatcaaggcttttttcgtggaccttttcattggagccactgatacctctgtgcaaacaatacagtggacaatggccgagatcatgaacaatactcacattcttgagagaatgagagaagaaattgattctgtcgtagggaaatcaaggttgattcaagaaacggatttaccgaacctcccttacttgcacgctgtcattaaggaagcactaagactgcacccaccggggcctctcttgccaagggaatttcaacaagggtgtaagatcggagggttctacataccggagaagacaacacttttgattaatgcctatgttgtgatgagagatccgaatgtctgggaagaccctgaggagtttaaaccagagagatttctagcttcttcaaggtcagggcaagaggacgagagaagagagcaagctcttaagtttcttcctttcggcagtggaaggagaggatgtcctggatcaaatctagcttatatgattgtaggaagtgcaataggaatgatggtgcagtgctttgactggagaatcgaaggagagaaggtcaacatgaaagaggctgttaaagggaccatccttaccatggctcatcctcttaagttaactcctgtcactcgacaaccacccttgacttggatatga

SEQ ID NO: 12703 - protein, 487 aa, Arabidopsis thaliana
MEAVISFDFQNCFIFILIFLLTFLCFFFFFKKPKDSRVNFDLPPSPPSLPIIGHVHLLLSTLTHKSLQKLSSRTQDVNISSRGVTAVDESLVFGSSSFVTAPYGDYWKFMKKLTVMKLLGPQAQEQSRDIRADDIKRFCRNLLDKARKKESVEIGKEAMNLMNNILCKMSMGRSFSEENGETEKLRGLVTESIGLMKKMFLAVLLRRQLQKLGISLFKKDIMGVSNKFDVLLEKVLVEHREKPEKDQGTVMLDVLLAAYGDENAEYKITKNHIKAFFVDLFIGATDTSVQTIQWTMAEIMNNTHILERMREEIDSVVGKSRLIQETDLPNLPYLHAVIKEALRLHPPGPLLPREFQQGCKIGGFYIPEKTTLLINAYVVMRDPNVWEDPEEFKPERFLASSRSGQEDERREQALKFLPFGSGRRGCPGSNLAYMIVGSAIGMMVQCFDWRIEGEKVNMKEAVKGTILTMAHPLKLTPVTRQPPLTWI

SEQ ID NO: 12704 - DNA, 1578 bp, Zea mays
  CDS (1)..(1578)
atggagctaccagcaccgtcctccgcatccttcttcctcgtcgccgttgtggctggtgccactctctttctcgtaaccgttctccggctccgcgcgcgatcgacgcgcaagtacaggctcccaccaggcccacggccatggccggtgatcggcaacctgaacctgatcggcccgctgcctcaccactccgtccacgagctctccaagaggtacggcccgctcatgtccctgcggttcggctcctttcccgtcgtcgtcgcgtcgtcggtcgacacggcgaggctcatcctcaagacccacgacctggccttcatcgaccgtcctcagacggcggccggcaggtacaccacctataactgcgctggcctcttctaccagccctacggcgcgtactggcgtcaggcgcgcaggctttgccaggccgagctctttagcgcgaggcggctcatgtcgctcgagcacgtccgcagcgacgaggtgcgcgccatgctgagcgacctgcgtgcggcgtcgtcggcgccggccggcggccacgacgcggtgacgctcagggagcacctctacatggtgaacctcagcgtcgtctcgcgcatgctgctgggcaagaagtacgtcgtcgaggggtctagctcgccggcgacgcccgaggagttcaggtggctgatcgacgagcacttctttctcaacggcgtgctcaacgtcgcggacatgatcccgtggctcagccccctggacccgcaagggtacgtcaagaggatgaagaggtcggccaagatgctggaccggttcctggagcacgtggtggacgagcacaacgagcggcggcgccgagaaggagaggatttcgtcgccatggacatgatggacgtgctcttggagctcgctgacgaccccagccagctcgaggtccccatcacgcgggataatgtgaaggggttcactctagacctgatgggcggcggcaccgacacctcggcggtgactgtggagtgggccatgtcagagctcctgaggaacccagaggtcctcgccaaggccaccgaggagctggaccgtgtcgtcggccgcgaccgtcttgtggcagagggggacatcccaagcctcccgtacctggacgccgtcgtgaaggagaccttgcgcctgcacccagtcgcgccgctcctgactccgcggctgtgtcgggaggacgtgtccgtgggcggctacgacatcccggcgggcgcgcgcgtcttcgtcaacgcctgggccatcggccgtgacccggcggtgtgggaagctcccctggagttccggccggagcggttcgccgggagcagcgtggacgtaaaagggcagcacttcgagctgctgccgttcggctccggccgccgtatgtgccccggcatgggcctcgccctcaggatggtgcctacgatcctgggcaacctgctgcacgccttcgcttggcggctccccgacggcgtggcggccgaggagctgggcatggaagaaacgttcgggctcaccgtgccgcgcttggttccgctccaggccgtcgctgagcccaagcttcctgctcgcctgtatgctgccctgtga

SEQ ID NO: 12705 - protein, 525 aa, Zea mays
MELPAPSSASFFLVAVVAGATLFLVTVLRLRARSTRKYRLPPGPRPWPVIGNLNLIGPLPHHSVHELSKRYGPLMSLRFGSFPVVVASSVDTARLILKTHDLAFIDRPQTAAGRYTTYNCAGLFYQPYGAYWRQARRLCQAELFSARRLMSLEHVRSDEVRAMLSDLRAASSAPAGGHDAVTLREHLYMVNLSVVSRMLLGKKYVVEGSSSPATPEEFRWLIDEHFFLNGVLNVADMIPWLSPLDPQGYVKRMKRSAKMLDRFLEHVVDEHNERRRREGEDFVAMDMMDVLLELADDPSQLEVPITRDNVKGFTLDLMGGGTDTSAVTVEWAMSELLRNPEVLAKATEELDRVVGRDRLVAEGDIPSLPYLDAVVKETLRLHPVAPLLTPRLCREDVSVGGYDIPAGARVFVNAWAIGRDPAVWEAPLEFRPERFAGSSVDVKGQHFELLPFGSGRRMCPGMGLALRMVPTILGNLLHAFAWRLPDGVAAEELGMEETFGLTVPRLVPLQAVAEPKLPARLYAAL

SEQ ID NO: 12706 - DNA, 1566 bp, Arabidopsis thaliana
  CDS (1)..(1566)
atgacagtaatggtcagctttgatcttctaaattgtttcatctttaccctcatattcctcatctcaactctctttctctttgttttattctataagaaaccaaacgatggatttgatgtacctccaagccctccttctcttcccatcattggtcatcttcatcttctcctctttgcttcaatccacaagtgttttcaaaaaatctcatccaaatacggaccttttctccatcttcgcattttccatgtccccattgttcttgtatcctctgcctcaacggcttacgatatcttcaagacaaacgacattaatgtctcttatcgtggtgatgttgcaatcgatgaatgcattgtgtttggttcttttggatatttccgagctccatgtgaagattactggaaattcatgagaaagctcatcatggccagggcactcggaccccaagcgctagagcggacacgtggtgttcgtgcagctgagctagagaggtttcatagaaaattactcgataaggctatgaaaaaacaaagccttaagatcggtgaagaagcaaggatactcgttaacaacaccctcggaaaaatgagcctaggaagtagtttttcaatagagaacaatgatgggacaaaagtttcagaatattctatcaagttagctgatttgtctcaaatgttttgtgtggcacaaatatttcataagccgcttgagaagctagggatctctcttttaaagaagcagattatggatgtttcacacaaatttgaggagttgctagaaaatattgttgtgaagtacgaggaaaaaatggacaaccatcaaagtactgaattcatggatgcattattggcagcttatcaagacgaaaacgcagagtataagatcactagaaaccatatcaaggcactactagcggagcttttctttggagccggtgaatcatcttcttcaacaacaaggtgggcaatgggagaaattttcaacaatcctaggatctttgagaaactaagaacagaaatcgattcagtggtggggacaacaaggttgattcaagaaagtgatctaccaaaacttccttacttgcaagcagtcgtgaaagaatctctaagattacacccggtgggagcggtcttgccaagagaatttacgcaagattgtaacattggagggttctatatacatgagggaacatcacttgtcgttaatgcttatgctgtgatgagagatcctgatatttgggaagatcctaatgagtttaagccggaaaggtttctagatgcctcaagattagggcaagaggaggagaaaaaggagaaaacactaaagttcctcccatttggcgctggaaggagaggatgtcctggattatatcttggttataccttagtagaaaccacaattggagtgatggtgcaatgctttgactgggaaatcgaaggagataaagtcaacatgcaagaaggttccggattaagatttttcttggatttggctcatccccttaagtgcactcctattcctcgaatcataaatcatgaaccttctaatacgcagattccaaattcgtga

SEQ ID NO: 12707 - protein, 521 aa, Arabidopsis thaliana
MTVMVSFDLLNCFIFTLIFLISTLFLFVLFYKKPNDGFDVPPSPPSLPIIGHLHLLLFASIHKCFQKISSKYGPFLHLRIFHVPIVLVSSASTAYDIFKTNDINVSYRGDVAIDECIVFGSFGYFRAPCEDYWKFMRKLIMARALGPQALERTRGVRAAELERFHRKLLDKAMKKQSLKIGEEARILVNNTLGKMSLGSSFSIENNDGTKVSEYSIKLADLSQMFCVAQIFHKPLEKLGISLLKKQIMDVSHKFEELLENIVVKYEEKMDNHQSTEFMDALLAAYQDENAEYKITRNHIKALLAELFFGAGESSSSTTRWAMGEIFNNPRIFEKLRTEIDSVVGTTRLIQESDLPKLPYLQAVVKESLRLHPVGAVLPREFTQDCNIGGFYIHEGTSLVVNAYAVMRDPDIWEDPNEFKPERFLDASRLGQEEEKKEKTLKFLPFGAGRRGCPGLYLGYTLVETTIGVMVQCFDWEIEGDKVNMQEGSGLRFFLDLAHPLKCTPIPRIINHEPSNTQIPNS

SEQ ID NO: 12708 - DNA, 1602 bp, Arabidopsis thaliana
  CDS (1)..(1602)
atggcagcaatcaccgttgactttcagctctgcttcatcttcatcctcctaggaatcttctcactcttctgtctctctgctttcttcttcaagaaaccaaaagacccacaacttcaaggctgtggtctacctccgagcccaccctctctaccggtcataggtcatcttcaccttctcctctctgttccatgtctcaaatcctttcagaaactctcctccaagtatggtcccctccttcaccttcgtgcattcaatatcccaatagttatagtctcttccggctccatggccaacgaagttttgaggacccaagacctgaactttgctacccgtcaacgtgaggtttctataatggaaaaatcattactttttggatcttttggctttgtctcagctccttatggagattactggagattcatgaagaagctcttagtcacaaaccttttcgggtctcattccctcgagcagacacggctcattcgtgagaaagaactcaagactttccgtactatgttgttcgataaggcggcaaagaaggggacagttgatgttggtaaagagatgatgaagctaacgaataacagcatttgcaggatgataatggggaggaggtgttcagaggagaacagtgaagcagagaaagtcgaagacttggtgatcaaatcatttagtttggtgaagaaggtccttatagctaacacggttggtcgacttctcaagaagtttgggatctctctgtttgagaaggaaatcatggaggtctcgcagaggtacgatgaattgctggaaaaaattattaaagaacacgaagaggatccgaacaagaaagaggatagagacatgatggatgttctgttggaagtttgtgcagacgacaaggctgaggttaagattaccaggaaccaaatcaaagcgcttattgtggagcttttccttggaggcactgatacttcagcacaaacaatacagtggataatggccgaactcattaaccatcccgagattcttaaaatattaagagaagagatagaatctgttgtcggaacaacgaggtttattcaagaaacagatctctcaaacctgccgtatttgcaggctgtgatgaaagaaggacaaagactacacccacattcgccaatgttggtgaggaatgcaaccaaaggatgcaagattggagggtactacataccgcagaacacaacgatgctaataaacacctatgcgatgatgatagatccagattcatgggaaaatccagacaagtttcagcccgagaggttcatggtgtctccttcaaaagggaaagacgatgagagagaacagctagctttgaacttcattcctttcgggagcggaagaagagcatgtccaggagaaaaattgggctatctcttcactggagtagccattggaacaatggtacagtgttttgactggataatcgatggagataaggttaacgtggaagaggctggagaaatgacgctgaccatggctcatccacttaaatgcactcctgtgactcgagttaacccattagctagctttgaatctgaagatcctaagtggttgatggaggagtttgatatgtattgttga

SEQ ID NO: 12709 - protein, 533 aa, Arabidopsis thaliana
MAAITVDFQLCFIFILLGIFSLFCLSAFFFKKPKDPQLQGCGLPPSPPSLPVIGHLHLLLSVPCLKSFQKLSSKYGPLLHLRAFNIPIVIVSSGSMANEVLRTQDLNFATRQREVSIMEKSLLFGSFGFVSAPYGDYWRFMKKLLVTNLFGSHSLEQTRLIREKELKTFRTMLFDKAAKKGTVDVGKEMMKLTNNSICRMIMGRRCSEENSEAEKVEDLVIKSFSLVKKVLIANTVGRLLKKFGISLFEKEIMEVSQRYDELLEKIIKEHEEDPNKKEDRDMMDVLLEVCADDKAEVKITRNQIKALIVELFLGGTDTSAQTIQWIMAELINHPEILKILREEIESVVGTTRFIQETDLSNLPYLQAVMKEGQRLHPHSPMLVRNATKGCKIGGYYIPQNTTMLINTYAMMIDPDSWENPDKFQPERFMVSPSKGKDDEREQLALNFIPFGSGRRACPGEKLGYLFTGVAIGTMVQCFDWIIDGDKVNVEEAGEMTLTMAHPLKCTPVTRVNPLASFESEDPKWLMEEFDMYC

SEQ ID NO: 12710 - DNA, 1560 bp, Arabidopsis thaliana
  CDS (1)..(1560)
atggcagcaatcagcgttgactttcagctctgcttcatcttcatcctcctagcaatcttctcactcttctgtttctctgctttcttcttcaagaaaccaaaagacccacaacttcaaggctgcggtctacctccgagcccaccgtctctaccgatcattggtcatcttcactttctcctctctgttccatgttacaaatcctttcagaaactctcctccaagtatggtcccttccttcacctccgcgctttcaatatccctatagttctagtctcgtcgggctccatggccaacgaagttttgaggatccaagacctgaactttgctagccgtgatagcgggcagactcctataatggaaaaatcattactttttggatcttttggctttgtctcagttccttatggagattactggagattcatgaagaagctcttagtcaaaaaacttctcgggtctcattccctcgagcagacacggctcctccgtgggaaagaactccaaactttccgtgctatgttgtttgataaggcggcaaagaatgagactgttgacgttggtaaagagatgatgaagctaacgaacaacagcatttgcaggatgacaatggggaggagctgttcagaggagaacggtgaagcagagcaagtcaggggtttggtgaccaaatcacttagtttgacgaagaagttcctcatagctagcattgttggtcaattttccaagctggtcgggatctctttgtttgggaaggaaatcatggaggtctcgcagaggtacgatgaattgctggagaaaattattaaggaacacgaagaaaatcccaacaatggagaggatagagacatgatggatgttctattggaagtttgtgcagatgacaacgccgagtttaagatttccaggaaccaaatcaaagcactttttgtggagattttccttgcaggcactgatacttcagcacaaacaatacagtggatattggcagaactcattaaccatcccgagattcttgaaaagttgagaaaagagatagaatctgttgttggggttaggagactgattcaagaaacagatctccccaacctgccgtatttacaggctgtgatgaaagaagggctaagactacacccgcatacgccaatcttggtgaggaatgcaacagaaggatgcaagatcggagggtattacatagggcagaacacaacaatgatggtaaacgcttatgcggtgctgagagatccggattcatgggaatatccagaagaatttcagcccgagaggttcatgacttctcctttaaaagggaaagaagatgagaaagcacagctagccttgaacttcattcctttcgggagtggaagaagaggatgtctcggaaaaaacttgggttatatcttcatgggagtagccattggaacaatggtgcagggttttgattggagaatcaatggagataaggttaacatggaagagactggagaaatgacgctgaccatggctcatccacttaaatgcattcctgttgctcgaatcaacccagctagctttgatccttag

SEQ ID NO: 12711 - protein, 519 aa, Arabidopsis thaliana
MAAISVDFQLCFIFILLAIFSLFCFSAFFFKKPKDPQLQGCGLPPSPPSLPIIGHLHFLLSVPCYKSFQKLSSKYGPFLHLRAFNIPIVLVSSGSMANEVLRIQDLNFASRDSGQTPIMEKSLLFGSFGFVSVPYGDYWRFMKKLLVKKLLGSHSLEQTRLLRGKELQTFRAMLFDKAAKNETVDVGKEMMKLTNNSICRMTMGRSCSEENGEAEQVRGLVTKSLSLTKKFLIASIVGQFSKLVGISLFGKEIMEVSQRYDELLEKIIKEHEENPNNGEDRDMMDVLLEVCADDNAEFKISRNQIKALFVEIFLAGTDTSAQTIQWILAELINHPEILEKLRKEIESVVGVRRLIQETDLPNLPYLQAVMKEGLRLHPHTPILVRNATEGCKIGGYYIGQNTTMMVNAYAVLRDPDSWEYPEEFQPERFMTSPLKGKEDEKAQLALNFIPFGSGRRGCLGKNLGYIFMGVAIGTMVQGFDWRINGDKVNMEETGEMTLTMAHPLKCIPVARINPASFDP

SEQ ID NO: 12712 - DNA, 1557 bp, Arabidopsis thaliana
  CDS (1)..(1557)
atggcaacaatcgtcgttgactttcaaaaaattcattttcatcctcagatcctcttatccatattcacagtcatttgcatctttgtattcttcttcaagaagccaaagggctcacgaggctgtgatctgcctccgagccctccttctcttccgataatcggacatcttcaccttttactctttgatctacctcacaaagcctttcagaaactctcctctaagtatggacctcttctctgtctccgcatcttcaatgtccccatagtcctggtctcctctgcctctgtggcctacgagatcttcaagacgcatgacgtgaacatctcatcccacggccaccctccgattgacgagtgtctcttttttgggtcttcaagctttgtaatggctccttatggagattactggaagttcatgaagaagctcatggtcacaaagctgttcggacctcaggcactcgagcagtcacgaggcgcccgtgcagatgaactagaacggtttcacgcaaacctgcttagtaaggaaatgaaaagcgagactgtcgagattgctaaggaagcaataaagctgactaacaatagcatctgcaagatgattatgggtaggggttgtttagaggagaacggtgaggcagagagagttaggggattggtcaccgagacatttgccttgtttaagaaacttttcttgacacaagtgttacgcaggctgtttgagatactcagaatctcaccgttcaaaaaagagacactggatgtttcccgcaaattcgacgagcttcttgaaaggattattgtggaacacgaagagaaaacggactatgatcatggtatggacctgatggatgtgctgttggctgtttatcgagatggaaaggcagagtataagatcactagggaccacctcaagtccttgttcgtggagcttatccttggaggcactgacacctcagcgcaaacaatcgagtggacaatggcaaagatcattaagaagcctaacattcttgagagattgagaaaagaaatcgattctgttgtaggcaaaacaaggttgattcaagagaaggatctaccgaacctcccttatttgcaagcggtcatcaaggaagggctaagattacacccaccagcacctctcttgggaaggaaagtcacagatggatgtacgattggaggctgttacgtaccaaagaacacaacacttgttgttaatgcttatgccgtgatgagagatcccgattcttgggaagatcctgatgagtttaagccagagaggtttctagcttcttcaagaggaaaagaagaggagagagagcaagaacttaagtacattccttttggcagcggaagaagaggatgtcctggagtaaatctaggttatatatttgtaggaaccgcaataggaatgatggtgcattgctttgactggagaaccaatggagataaggtcaacatggaagagactgttgctggaattaccttaaacatggctcatcctcttaggtgtactcctgtttctcgaatgcaactgcagaaatcgcagttcgtgagttcatga

SEQ ID NO: 12713 - protein, 518 aa, Arabidopsis thaliana
MATIVVDFQKIHFHPQILLSIFTVICIFVFFFKKPKGSRGCDLPPSPPSLPIIGHLHLLLFDLPHKAFQKLSSKYGPLLCLRIFNVPIVLVSSASVAYEIFKTHDVNISSHGHPPIDECLFFGSSSFVMAPYGDYWKFMKKLMVTKLFGPQALEQSRGARADELERFHANLLSKEMKSETVEIAKEAIKLTNNSICKMIMGRGCLEENGEAERVRGLVTETFALFKKLFLTQVLRRLFEILRISPFKKETLDVSRKFDELLERIIVEHEEKTDYDHGMDLMDVLLAVYRDGKAEYKITRDHLKSLFVELILGGTDTSAQTIEWTMAKIIKKPNILERLRKEIDSVVGKTRLIQEKDLPNLPYLQAVIKEGLRLHPPAPLLGRKVTDGCTIGGCYVPKNTTLVVNAYAVMRDPDSWEDPDEFKPERFLASSRGKEEEREQELKYIPFGSGRRGCPGVNLGYIFVGTAIGMMVHCFDWRTNGDKVNMEETVAGITLNMAHPLRCTPVSRMQLQKSQFVSS

SEQ ID NO: 12714 - DNA, 1545 bp, Arabidopsis thaliana
  CDS (1)..(1545)
atgggagagataatgaacgttgactttgtaaactgtttgatcttaatcctcctctgcctcctttcaatcctctgttactctttcttcttcaagaaaccaaaggatggtttcaatttgccaccgagccctccctctctaccgatcattggccatcttcatcatctcctctctctttttatgcacagatctttgcaaaaactctcctccaagtatggacctctcctctatcttcacgtcttcaatgttcccatactccttgtctcctctccctcaatagcctatgagatctttagggcacaagacgtaaacgtttccactcgcgacttccctacgaatgaggggtctctcttcctcggatcatttagcttcattaccgcaccttacggagaatactggaagttcatgaagaagctcatcgtcacaaagctcctcgggcctcaagcactcgagaggtcacaacgcatccgtgcaaatgaagtagagaggttttactcaaacctattagataaggcgatgaagaaagaaagtgttgagattgctgatgaagctatgaagctagtcaacaacataatctgcaagatgattatggggaggacctgttcagaagaaaatggtgaagcagagagaattagaggcttggtgaccaagtcagatgccttgttgaagaagtttttgctggcggccatcttgcggaaaccacttaagaagattgggatcacactgtttaaaaaggtgttcatggatatttctctcaagtttgacgaggtgttagagaagattcttgtggaaaacgaagagagacttgaggagaatcaacaaggtactgacataatggataagctcttagaagtttatggagacaaaacttccgagtataagatcactagagaccatatcaagtccttgtttgtggatcttttctttgcaggtactgacaccgcaacacacactatagagtggaccatggccgagatcatgaacaactctttgattcttgagagattgagagaagaaattgattctgttgtagggaaaacaaggttgattcaagaaactgatctaccgaatctcctttacttgcaagcaactgtcaaagaagggctaagattgcaccctacgatccctcttgtgttgaggacgtttcaagacgggtgtacgatcggaggcttttctatacctaagaagacaaaacttgttgttaatggttatgctataatgagagatcctgataactgggaagatccactggagtttaaaccagagaggtttctagcttcttcaagatcaagccaaaaagacgcaataaaagaagaagttctaaaatatctttcattcggaagcggaaggagaggatgtcctggagtgaatctagcttatgtgtctgtagaaaccgctattggagtgatggtgcaatgctttgattggaagatcgacggacataagatcaacatgaatgaggttgctggtaaaggaacgttgagcatggctcatcctcttaagtgcactcttgttcctcgaagtgtaaccccattaacttcaaagtag

SEQ ID NO: 12715 - protein, 514 aa, Arabidopsis thaliana
MGEIMNVDFVNCLILILLCLLSILCYSFFFKKPKDGFNLPPSPPSLPIIGHLHHLLSLFMHRSLQKLSSKYGPLLYLHVFNVPILLVSSPSIAYEIFRAQDVNVSTRDFPTNEGSLFLGSFSFITAPYGEYWKFMKKLIVTKLLGPQALERSQRIRANEVERFYSNLLDKAMKKESVEIADEAMKLVNNIICKMIMGRTCSEENGEAERIRGLVTKSDALLKKFLLAAILRKPLKKIGITLFKKVFMDISLKFDEVLEKILVENEERLEENQQGTDIMDKLLEVYGDKTSEYKITRDHIKSLFVDLFFAGTDTATHTIEWTMAEIMNNSLILERLREEIDSVVGKTRLIQETDLPNLLYLQATVKEGLRLHPTIPLVLRTFQDGCTIGGFSIPKKTKLVVNGYAIMRDPDNWEDPLEFKPERFLASSRSSQKDAIKEEVLKYLSFGSGRRGCPGVNLAYVSVETAIGVMVQCFDWKIDGHKINMNEVAGKGTLSMAHPLKCTLVPRSVTPLTSK

SEQ ID NO: 12716 - DNA, 1497 bp, Arabidopsis thaliana
  CDS (1)..(1497)
atgaacgttgactttcaaaactgtttgatcttaatcctcctctgcctcctttccttcctctgttactctttcttcttcaagaaaccaaaggatggtttcaatttgccaccgagccctccctctctaccgatcattggccatcttcatcatctcctctctctttttatgcacagatctttgcaaaaactctcctccaagtatggacctctcctctatcttcacgtcttcaatgttcccatactccttgtctcgtctccctcaatagcctatgagatctttaggacacaagacgtaaacgtttcctcgcgcgactttcctacgaacgaagggtctctcctcttcggatcctttggcttcggcaccgcaccttcctcgggcctcaagcactcgagaggtcacaaaaagtccgtgcagaggagttattacttaaacctattagataaggcggtgaagaaggagagcgttgagattgctgaggaagctatgaagctggtcaacaataccgtttgccagatgattatggggaggagttgttcagaggaaaacggtgaagcagagagagtcagaggcttggtgaccaagacagatgccttgacgaagaagtttatcttggcaggcatcttgcggaaaccgcttcagaagattgggatctcactgttcaaaaaggagttaatggatgcttcctgcaagttcaacgaggtgttggagaagattcttgtagaatataaagagaaagttgaagagcatcatcaaggtactgacatgatggataagctcttagaagtttatggagacgaaaaagcagagtataagatcactagagaccatatcaagtccttgtttgtggatcttttctttgcaggcactgacacctggacgcacgctatacaatggattatggccgagatcattaacaactcgtacattcttgagagattgagagaagaaattgattctgttgtaggaaaaacaaggttgattcaagaaactgatctaccgaacctcccgtgcttgcaagcaaccgtcaaagaagggctaaggttgcaccctccggttcctcttgtgttaagaacgtttaaagaagggtgtacgattggaggcttttatgttccggagaagacaacacttgttgttaatgggtatgctatgatgagagatcctgaatactgggaagatcctcaagaatttaagccagagagatttctagcttcttcaagatcaagccaaaatgatgagataagagacgaactcctaaaataccttcctttcgggaatggaagaagagcctgtccaggagctaacctagcttatatctctgtaggaaccgcgattggagtgatggttcagtgctttgactgggagatcaaaggagataagatcaacatggatgaggctcctggaaaaataacgttgaccatggctcatcctcttaactgcactcttgttcctcgaaccctaatccctgttacttcaactgtacagattcctagttcttga

SEQ ID NO: 12717 - protein, 498 aa, Arabidopsis thaliana
MNVDFQNCLILILLCLLSFLCYSFFFKKPKDGFNLPPSPPSLPIIGHLHHLLSLFMHRSLQKLSSKYGPLLYLHVFNVPILLVSSPSIAYEIFRTQDVNVSSRDFPTNEGSLLFGSFGFGTAPSSGLKHSRGHKKSVQRSYYLNLLDKAVKKESVEIAEEAMKLVNNTVCQMIMGRSCSEENGEAERVRGLVTKTDALTKKFILAGILRKPLQKIGISLFKKELMDASCKFNEVLEKILVEYKEKVEEHHQGTDMMDKLLEVYGDEKAEYKITRDHIKSLFVDLFFAGTDTWTHAIQWIMAEIINNSYILERLREEIDSVVGKTRLIQETDLPNLPCLQATVKEGLRLHPPVPLVLRTFKEGCTIGGFYVPEKTTLVVNGYAMMRDPEYWEDPQEFKPERFLASSRSSQNDEIRDELLKYLPFGNGRRACPGANLAYISVGTAIGVMVQCFDWEIKGDKINMDEAPGKITLTMAHPLNCTLVPRTLIPVTSTVQIPSS

SEQ ID NO: 12718 - DNA, 1545 bp, Arabidopsis thaliana
  CDS (1)..(1545)
atggatttaaaactaaacactaaactaattattctcatcacatccttagcttttcctttcatgctttatgctctcttcaaatggttcttgaaagagcaaggttcattggctgctacgaagctgccacagagccctccagctttaccattcattggccaccttcatttgataggcaaagtattgcctgtctcattccaaagtttagctcacaagtatggcccactcatggagatacgtctcggtgcttctaagtgcgttgtggtctcaagctcttcggtggcgagagagattttcaaggagcaagagcttaatttctcctcgagacctgagtttggttctgcagagtatttcaagtatagagggtccaggtttgtccttgcgcagtatggagattactggaggttcatgaagaagctgtgcatgactaagcttcttgctgttccacagctggagaaattcgctgacatccgtgaggaggagaaactgaagctggtcgattctgtggctaagtgttgcagagaagggttgccttgtgacttgagtagccagttcataaaatacaccaacaatgtaatctgcaggatggcgatgagcaccaggtgttcaggtactgataatgaagcagaagagataagggagctggtgaagaaaagtttggagcttgcggggaagatcagtgtaggagatgtgttggggccattgaaagtaatggacttttctgggaacgggaagaagttagtggctgtaatggagaaatatgacctgcttgtagagagaattatgaaggaacgtgaggcaaaggcaaagaagaaagatggtaccagaaaggatattttggatatattgttggaaacttacagagatcccactgctgaaatgaagataacgaggaatgacatgaaatctttcctgctggatgttttcatggcgggaacagatacatcagcagcagcaatgcagtgggcaatggggcaactaataaaccatccacaagcgttcaacaagttacgagaagagatcaataacgttgttggaagtaaaagactggtgaaagaatcagatgttcctaaccttccttacctccgagctgtcctaagggaaactctgaggctccacccttcagctcctctgatcataagagaatgcgcagaagactgccaggtgaacgggtgccttgtcaagtcaaaaacccgtgtactcgtaaatgtttatgcaatcatgcgagattcagaactatgggcagatgcagacagattcatccccgagagatttctagagagctctgaagagaagataggtgaacaccagatgcagttcaaggggcagaatttccgttaccttccatttgggagtggaaggagaggatgtccaggagcatcccttgccatgaatgtgatgcatataggtgtgggttcattggtgcagcgcttcgactggaagagtgttgatggacagaaggtcgatctgagccaaggttctggtttttctgctgagatggctcgaccacttgtgtgcaatcctgtggatcactttaacaccttctaa

SEQ ID NO: 12719 - protein, 514 aa, Arabidopsis thaliana
MDLKLNTKLIILITSLAFPFMLYALFKWFLKEQGSLAATKLPQSPPALPFIGHLHLIGKVLPVSFQSLAHKYGPLMEIRLGASKCVVVSSSSVAREIFKEQELNFSSRPEFGSAEYFKYRGSRFVLAQYGDYWRFMKKLCMTKLLAVPQLEKFADIREEEKLKLVDSVAKCCREGLPCDLSSQFIKYTNNVICRMAMSTRCSGTDNEAEEIRELVKKSLELAGKISVGDVLGPLKVMDFSGNGKKLVAVMEKYDLLVERIMKEREAKAKKKDGTRKDILDILLETYRDPTAEMKITRNDMKSFLLDVFMAGTDTSAAAMQWAMGQLINHPQAFNKLREEINNVVGSKRLVKESDVPNLPYLRAVLRETLRLHPSAPLIIRECAEDCQVNGCLVKSKTRVLVNVYAIMRDSELWADADRFIPERFLESSEEKIGEHQMQFKGQNFRYLPFGSGRRGCPGASLAMNVMHIGVGSLVQRFDWKSVDGQKVDLSQGSGFSAEMARPLVCNPVDHFNTF

SEQ ID NO: 12720 - DNA, 1542 bp, Arabidopsis thaliana
  CDS (1)..(1542)
atgaccaccactgagtttcaaagctgcttcatcttcctcctcttatgtctcttctcactcgtctgttactctctctttttcaggaaaccaagctcaagacgggacgcccatggctgtgatctgcctccgagccctccttctttgccagtcatcggccatcttcaccttatcctctcttcccttgtccacaagtcttttcaaaagatctcctccaactacggacctctcctccatctccgcatcttcaacgttcccatagtcctcgtctcctctgcgtcagtggcctacgatatcttcagggtgcatgacttgaacgtctcttctcgcggctcccctccgtttgaggagtcactgttgttcggatctaccggcttcattagtgctccctatggagattatttcaagttcatgaagaaacacctggtcacaaagctccttggaccacaggcactcgagcgctcacgcctcatccggacaaatgaactagaacggttttacataaacctgcttgataaggcgacgaagaaggagagcgttgaaattggtaaggaagcgatgaagctcagtaacaacagcatctgcaagatgatcatggggaggagttgtttagaggaaaagggtgaggcagagagagtcaggggtttgattatcgagtcgttttacttgacgaagaaatttttcttggcattcactttgcgcgggctgctcgagaagcttggaatctcgctgttcaaaaaagaaataatgggagtttcccgcagatttgatgatttgctcgaaaggtatcttagggaacatgaagagaaaccagataatgagcatcaagatacggacatgattgatgcactattggcagcttatcgagacgaaaaggccgagtataagatcactaggaaccagatcaaggcgtttttagtggatattttcattgcgggcactgacatctcggcgctaacaacgcagggaacaatggctgagatcattaacaaccctaacatatttgtgagaattagagaagaaatcgattctgttgtagggaaatcaaggctgattcaagaaacggatctaccaaagctcccttacttgcaagcggtagtcaaagaagggcttagattgcacccgcctacgcctctcatggtaagggagttccaagaagggtgtaaggtcaaaggtttctacataccagcgagcacaacccttgttgttaatggttatgctgtgatgagagatccaaatgtctgggaagaccctgaggagttcaagccggagaggtttttagcttcttcaagattaatgcaagaggacgagataagagagcaagccctcaagtacatcgctttcggtagtggaaggagaggctgcccaggagcaaatgtagcttatatctttgtaggaaccgcgattggaatgatggtgcaatgctttgactggagaatcaatggagaaaaggttgacatgaaagaggccattggaggactgaacctgaccttggctcatccccttaagtgcactcctgttgctcgattcccaaaacctttttaa

SEQ ID NO: 12721 - protein, 513 aa, Arabidopsis thaliana
MTTTEFQSCFIFLLLCLFSLVCYSLFFRKPSSRRDAHGCDLPPSPPSLPVIGHLHLILSSLVHKSFQKISSNYGPLLHLRIFNVPIVLVSSASVAYDIFRVHDLNVSSRGSPPFEESLLFGSTGFISAPYGDYFKFMKKHLVTKLLGPQALERSRLIRTNELERFYINLLDKATKKESVEIGKEAMKLSNNSICKMIMGRSCLEEKGEAERVRGLIIESFYLTKKFFLAFTLRGLLEKLGISLFKKEIMGVSRRFDDLLERYLREHEEKPDNEHQDTDMIDALLAAYRDEKAEYKITRNQIKAFLVDIFIAGTDISALTTQGTMAEIINNPNIFVRIREEIDSVVGKSRLIQETDLPKLPYLQAVVKEGLRLHPPTPLMVREFQEGCKVKGFYIPASTTLVVNGYAVMRDPNVWEDPEEFKPERFLASSRLMQEDEIREQALKYIAFGSGRRGCPGANVAYIFVGTAIGMMVQCFDWRINGEKVDMKEAIGGLNLTLAHPLKCTPVARFPKPF

SEQ ID NO: 12722 - DNA, 1533 bp, Arabidopsis thaliana
  CDS (1)..(1533)
atgttgaccgttgactctcaacactgtttcagtttcatactcctctgcttcttctcactcctctgttactctctcttgttcaagaaactaaaggactcacatgttggccgtgatttgcttcagagccctccatctcttccgatcataggccatcttcatcatctcctctcttctctagcacacaaatctttgcagcaactctcatccaagtatggacctctcctacatctcagcatcttcaacttccctgtagtcctcgtctcctcggcctctgtggcttacgagatcttcaaggctcatgacttgaacatctcgtctcgcgacaatcctccaatcaatgagtccctcttggtcggttcttctgtgttcgtcggcgccccctatggagattattggaagttcatgaagaagctcttggttacaaagctgctgggaccacaggcactcgagcggtcaagaagcatccgtgcagatgagctagagcggttttacagaagcttgctcgataaggcgatgaagaaggagagtgttgagattggtaaggaagcaacgaagctaagtatcaacagcatatgcaggatgagcatggggaggagtttttcagaagagagtggtgaggctgagagagttagaggtttggttaccgagttagatggcttgacgaagaaggttttgttggtaaacatattgcgctggccgcttgagaagctcagaatctctctgttcaaaaaagagataatgtatgtttcgaacagctttgatgagctgctggagaggattattgtggaacgtgaaaagaaaccgaatgaacatcagggtacatacttgatggacgtgttgttggaagcttatgaagacgaaaaagcagagcataagatcactaggaaccatatcaagtcgttgttcgtggagcttttacttggaggcactgatacctcggcgcaaacaatacagtggacaatggccgagctcatcaacaaccgtaacgttcttaagagattgagagaagaaattgattcggttgtaggagaaacaaggttgattcaagaaaaggatctaccaaagctaccttatttacaatctgtagtcaaagaagggctaagattgcacccgccattgcctctcatggtaaggacgttccaaagaagttgtgagatgaaagggttctacatagcggaaaagacaacacttgtagttaatgcttatgctgtgatgagagatcctactacttgggaagatcctgatgagtttaagccagagaggtttctaaggcaagaggaggagagaagagcactgaagcacattgcttttggaagtggaaggagaggctgtccaggatcaaacctagctactattttcataggaactgcaattggaacaatggtgcagtgttttgacttgagcatcaaaggagacaaggtcaaaatggatgaggttggaggactcaacttgaccatggctcatccccttgagtgcattcttgttcctcgaacccaacctttcatttctaaccagcagattccaagtttgtaa

SEQ ID NO: 12723 - protein, 510 aa, Arabidopsis thaliana
MLTVDSQHCFSFILLCFFSLLCYSLLFKKLKDSHVGRDLLQSPPSLPIIGHLHHLLSSLAHKSLQQLSSKYGPLLHLSIFNFPVVLVSSASVAYEIFKAHDLNISSRDNPPINESLLVGSSVFVGAPYGDYWKFMKKLLVTKLLGPQALERSRSIRADELERFYRSLLDKAMKKESVEIGKEATKLSINSICRMSMGRSFSEESGEAERVRGLVTELDGLTKKVLLVNILRWPLEKLRISLFKKEIMYVSNSFDELLERIIVEREKKPNEHQGTYLMDVLLEAYEDEKAEHKITRNHIKSLFVELLLGGTDTSAQTIQWTMAELINNRNVLKRLREEIDSVVGETRLIQEKDLPKLPYLQSVVKEGLRLHPPLPLMVRTFQRSCEMKGFYIAEKTTLVVNAYAVMRDPTTWEDPDEFKPERFLRQEEERRALKHIAFGSGRRGCPGSNLATIFIGTAIGTMVQCFDLSIKGDKVKMDEVGGLNLTMAHPLECILVPRTQPFISNQQIPSL

SEQ ID NO: 12724 - DNA, 1548 bp, Arabidopsis thaliana
  CDS (1)..(1548)
atggaggcagtgatcagctttgactttcagaactgcttcatcttcatcctcatatttctcttaacgttcctatgcttctttttcttcttcaagaaaccaaaggattcacgagttaacttcgatttgcctccgagccctccttctctaccaatcattggtcatgttcaccttctcctctctactctaacccacaagtcattacagaaactctcctccaggtatggacctctcctctatctccggatttttaatgtccccatcatcctcgtttcctcggcctcagtggcctacgagatcttcaggacacaagacgtgaacatctcctctcgcggtgtcaccgcggttgatgagtccctcgtgtttggatcttccagtttcgtcactgctccttacggagattactggaagttcatgaagaagcttactgtcatgaagcttctcggaccgcaggcacaagagcagtcacgagacatccgtgcagatgacataaagcggttttgcaggaatctgctcgataaagcaaggaagaaggagagcgttgagattggtaaagaagcaatgaatctcatgaacaacattttgtgcaagatgagcatgggaaggagtttttcagaggagaatggtgagacagagaaactaaggggattagttaccgagtcgattggcttgatgaaaaagatgttcttggcagttttgttgcgcagacagcttcagaaacttggaatctcactattcaagaaggatatcatgggcgtttccaacaaatttgatgtgctgctagagaaagttcttgtggaacatagagagaaaccggagaaggatcaaggtacggttatgttggacgtgttgttggcagcttatggagacgaaaatgcagagtacaagatcactaagaatcacatcaaggcttttttcgtggaccttttcattggagccactgatacctctgtgcaaacaatacagtggacaatggccgagatcatgaacaatactcacattcttgagagaatgagagaagaaattgattctgtcgtagggaaatcaaggttgattcaagaaacggatttaccgaacctcccttacttgcacgctgtcattaaggaagcactaagactgcacccaccggggcctctcttgccaagggaatttcaacaagggtgtaagatcggagggttctacataccggagaagacaacacttttgattaatgcctatgttgtgatgagagatccgaatgtctgggaagaccctgaggagtttaaaccagagagatttctagcttcttcaaggtcagggcaagaggacgagagaagagagcaagctcttaagtttcttcctttcggcagtggaaggagaggatgtcctggatcaaatctagcttatatgattgtaggaagtgcaataggaatgatggtgcagtgctttgactggagaatcgaaggagagaaggtcaacatgaaagaggctgttaaagggaccatccttaccatggctcatcctcttaagttaactcctgtcactcgacaaccacccttgacttggatatga

SEQ ID NO: 12725 - protein, 515 aa, Arabidopsis thaliana
MEAVISFDFQNCFIFILIFLLTFLCFFFFFKKPKDSRVNFDLPPSPPSLPIIGHVHLLLSTLTHKSLQKLSSRYGPLLYLRIFNVPIILVSSASVAYEIFRTQDVNISSRGVTAVDESLVFGSSSFVTAPYGDYWKFMKKLTVMKLLGPQAQEQSRDIRADDIKRFCRNLLDKARKKESVEIGKEAMNLMNNILCKMSMGRSFSEENGETEKLRGLVTESIGLMKKMFLAVLLRRQLQKLGISLFKKDIMGVSNKFDVLLEKVLVEHREKPEKDQGTVMLDVLLAAYGDENAEYKITKNHIKAFFVDLFIGATDTSVQTIQWTMAEIMNNTHILERMREEIDSVVGKSRLIQETDLPNLPYLHAVIKEALRLHPPGPLLPREFQQGCKIGGFYIPEKTTLLINAYVVMRDPNVWEDPEEFKPERFLASSRSGQEDERREQALKFLPFGSGRRGCPGSNLAYMIVGSAIGMMVQCFDWRIEGEKVNMKEAVKGTILTMAHPLKLTPVTRQPPLTWI

SEQ ID NO: 12726 - DNA, 1533 bp, Arabidopsis thaliana
  CDS (1)..(1533)
atggcagcaatgttgactgttgagtttcaaaactgcttgatctttatcctcctctgcatccttttactcctatgttaccctctctttttcaagaaaccaaaggtctcacaagatggatttggtttgcctccaagccctctatctctgccaatcattggtcatcttcacctgcttttctctaatctaactcacaagtccttacagaaactctcctccaagtatggacctctcctctatctccgcatcttcaatgtcccgataatctttgtttcctcggcctcagtggcatatgagatcttcaggggacatgatgtgaacatctcttttcgagggaaccctcctatcgaggagtcccttttggtcggatcttttggatttttcaccgctccttatggagactattggaaattcatgaagaaggtcatggtcacgaaactgctcggaccgcaggcactacaaaggtctcgaggcatccgtgcagatgcgctagaacggttttacatgaacctgcttgataaggcgatgaagaaggaaagtgttgagattggtaaggaaacaatgaagctcatttacgacagcatctgcaagatgattatggggaggaatttttctgaggagaatggtgaggcggagagagtcagaggcttggtgaccgaatcgactgccttgacgaagaagatttttatggcaaacgtgttgcacaagccccttaagaagctcggaatctcattgttcaaaaaggagataatggatgtttccaacagtttcgatgaactgctagaaagatttcttgtggaacacgaagagaaacttaacgaagatcaagatatggacatgatgggcgtgttgttggcagcttgccgagacaaaaatgcagagtgtaaaatcactaggaaccacattaagtcgttgttcgtggatcttgttgttgcaggcaccgacacttcgagacatgcaacacagtggacaatggcagagataattaacaagcctaaggttcttgaaaaggtaagagaagaaatttattcagttgtaggaagaacaaggttggttcaagaaacagatttaccgagcctaccttatttgcaagctactgtcaaggaaggactgagattgcaccctcccgggcctctctttgcaaggacagcccgagaagggtttagtgtcggaggattttatgtaccagagaacacaccacttgttgttaatgcttatgctatgatgagagatcctggttcttgggaagatcccaatgagtttaagccagagaggtttctaggttcaggaaaagaagacgagagagagcacggacttaagtacattccttttggtagcggaaggagaggctgtcctggaataaatctagcttacattcttgttggaaccgcgattggagtgatggtacagtgctttgactggaaaatcaaaggaaataaggttaacatggaagaagctcgtggatcactggtattaaccatggctcatccacttaagtgcattccggttgctcgaacccagattcccagttgctaa

SEQ ID NO: 12727 - protein, 510 aa, Arabidopsis thaliana
MAAMLTVEFQNCLIFILLCILLLLCYPLFFKKPKVSQDGFGLPPSPLSLPIIGHLHLLFSNLTHKSLQKLSSKYGPLLYLRIFNVPIIFVSSASVAYEIFRGHDVNISFRGNPPIEESLLVGSFGFFTAPYGDYWKFMKKVMVTKLLGPQALQRSRGIRADALERFYMNLLDKAMKKESVEIGKETMKLIYDSICKMIMGRNFSEENGEAERVRGLVTESTALTKKIFMANVLHKPLKKLGISLFKKEIMDVSNSFDELLERFLVEHEEKLNEDQDMDMMGVLLAACRDKNAECKITRNHIKSLFVDLVVAGTDTSRHATQWTMAEIINKPKVLEKVREEIYSVVGRTRLVQETDLPSLPYLQATVKEGLRLHPPGPLFARTAREGFSVGGFYVPENTPLVVNAYAMMRDPGSWEDPNEFKPERFLGSGKEDEREHGLKYIPFGSGRRGCPGINLAYILVGTAIGVMVQCFDWKIKGNKVNMEEARGSLVLTMAHPLKCIPVARTQIPSC

SEQ ID NO: 12728 - DNA, 1572 bp, Arabidopsis thaliana
  CDS (1)..(1572)
atggcagcaatgatcacctttgactttcaaaacagcttcatcttcatcctcttttttctcttctctctcctttgttactctctcttcttcaggaaaccaaagggctcacgagctggccgtgatcttcctccgagccctccttcttttcctgtaattggtcatcttcaccttcttctctctgctcttgttcacaagtcttttcaaaacatctcctctaagtatggacctcttctccatctccgcgtcttccacattcccatagtcctcgcctcctcggcctcagtggcctacgagatcttcaaggcccaagatgtgaatgtctcctctcgcggtcacgctccagtcggggagtctctctggtttggatcgtctagcttcttcttcgctccctatggagattactttaaatttatgaggaagctcatagccacaaagcttcttggaccacaggcactcgagcgttcacgaaaaatccgtgcagatgagctagatcggttttacaaaaccttgcttgacaaggcgatgaagaaggagagtgttgagatcggtgaggaagcagcgaagctcaataacaatatcatctgcaagatgatcatggggaggagttgttcagaggagaatggtgaggcggagaaattcagacacttggtgatcgagtcgatggctttgacaaagcaaatcttctttggtatgatctttcacaaaccgcttaaaaagctcgggatctcactgttccaaaaggatatactaagtctttcccgcaagttcgacgagttgctggagaagattctttttgaacacgaagagaaaaaggcggagcacaatcaagctaatgacatgatggattttttgttggaagcttatggagacgaaaatgcagagtataaaatcacaagaaaccatatcaagtccttgttcgtggatcttgtcattgcagggactgacacctcggtgcaagcaacacagtggacaatgggggagctcattaacaaccctaagattcttcagagattgagagaagaaatcgaatcggttgtagggaacacaagattaattcaagaaaatgatttaccaaacctcccttacttgcaagcggtagtcaaagaagggctaagattgcatccgccggggtctatctcggtaaggatgtttcaagaaaggtgtgaactcaaagggttctacataccggagaagacattacttgttgttaatacttatgctataatgagagatcctaatttctgggaagatcctgaggagtttaaacctgagaggtttatagcatcttcaagatcagagcaagaggacgaggtaagagaggaagtcttgaaatacattcctttctccgcgggaaggagaggctgtcctggatcaaatctagcttatatctctctaggaatcgtgattggggtaatggtgcagtgctttgattggagaattgaaggagagaaagtaaacatgaatgaggctgctgaaacaactgcgttgtccatggctcagcctcttaagtgcactcctgtttctcgaaccaaaaaccctttgccatcaagtctacatattcccagttcttga

SEQ ID NO: 12729 - protein, 523 aa, Arabidopsis thaliana
MAAMITFDFQNSFIFILFFLFSLLCYSLFFRKPKGSRAGRDLPPSPPSFPVIGHLHLLLSALVHKSFQNISSKYGPLLHLRVFHIPIVLASSASVAYEIFKAQDVNVSSRGHAPVGESLWFGSSSFFFAPYGDYFKFMRKLIATKLLGPQALERSRKIRADELDRFYKTLLDKAMKKESVEIGEEAAKLNNNIICKMIMGRSCSEENGEAEKFRHLVIESMALTKQIFFGMIFHKPLKKLGISLFQKDILSLSRKFDELLEKILFEHEEKKAEHNQANDMMDFLLEAYGDENAEYKITRNHIKSLFVDLVIAGTDTSVQATQWTMGELINNPKILQRLREEIESVVGNTRLIQENDLPNLPYLQAVVKEGLRLHPPGSISVRMFQERCELKGFYIPEKTLLVVNTYAIMRDPNFWEDPEEFKPERFIASSRSEQEDEVREEVLKYIPFSAGRRGCPGSNLAYISLGIVIGVMVQCFDWRIEGEKVNMNEAAETTALSMAQPLKCTPVSRTKNPLPSSLHIPSS

SEQ ID NO: 12730 - DNA, 1581 bp, Arabidopsis thaliana
  CDS (1)..(1581)
atggcagcaatgatcactgttgactttcaaaatagcttcatcttcatcctcttttgtctcttctctctcatttgttactctctcttcttcaggaaaccaaaagattcacgagctggtcgtgatcttcctccgagccctccttcttttccggttggaagcccacagtctaataatcttcaccttcttctctctgctcttgttcacaagtcttttcaaaaaatctcctacaagtatggacctctcctccatctccgtgtctttcatgttcccatagtcctagcctcctcggcctcagtggcctacgaaattttcaaggcccaagatgtgaatgtctcctctcgcggtcacgctccagccggggagtctctcttgtttggatcttctagcttcttcttcgctccctatggagattactttaaatttatgaggaagctcatagccacaaagcttcttggaccgcaggcactcgagcgttcaagaaaaatccgtgcagatgagctagatcggttttacagaaatctgcttgacaaggcgatgaagaaggagagtgtcgatatcgttgaggaagcagcgaagcttaataacaatatcatctgcaagatgatcatggggaggagttgttctgaggacaacggtgaggcggagagagtcagaggcttggtgattgagtctacggccttgacaaagcaaatcttcttgggtatgatctttgataaaccgcttaagaagcttgggatctcattgttccaaaaggatataaaaagtgtttcccgcttcgacgagctgctggagaagattcttgttgaacacgaagagagaatggggaagcattataaagctaatgacatgatggatttgttgttggaagcttatggagatgaaaatgcagagtataaaatcacaagaaaccatatcaagtccttgttcgtggatcttgtcattgccggcactgacacctcggcgcaaacaatagagtggacaatggcggagcttattaacaaccctaacattcttgagagattgagagaagaaatagaatcggttgtagggaacacaaggttagttcaagaaaccgatctaccaaacctcccttacttgcaagcggtagtcaaagaagggctaaggttgcatccgccaggggctgtgttcttaagaacgttccaagaaaggtgtgaactcaaagggttctacataccggaaaagacattgcttgttgttaatgtttatgctataatgagagatcctaagctttgggaagatcctgaggagtttaaacctgagaggtttatagcatcttcaagatcagggcaagaggacgagataagagaggaagtcctgaaatacatgcctttctcaactggaaggagaggctgtcctggatccaatctagcttatgtctctgtaggaaccgcgattggagtaatggcgcaatgctttgattggagaatcaaaggagagaaagtaaacatgaacgaggctgctggaacattggtgttgactatggctcagcctcttatgtgcactcctggtcctcgaaccctaaaccctttaccttcaagtctgcatgtacccatttcttga

SEQ ID NO: 12731 - protein, 526 aa, Arabidopsis thaliana
MAAMITVDFQNSFIFILFCLFSLICYSLFFRKPKDSRAGRDLPPSPPSFPVGSPQSNNLHLLLSALVHKSFQKISYKYGPLLHLRVFHVPIVLASSASVAYEIFKAQDVNVSSRGHAPAGESLLFGSSSFFFAPYGDYFKFMRKLIATKLLGPQALERSRKIRADELDRFYRNLLDKAMKKESVDIVEEAAKLNNNIICKMIMGRSCSEDNGEAERVRGLVIESTALTKQIFLGMIFDKPLKKLGISLFQKDIKSVSRFDELLEKILVEHEERMGKHYKANDMMDLLLEAYGDENAEYKITRNHIKSLFVDLVIAGTDTSAQTIEWTMAELINNPNILERLREEIESVVGNTRLVQETDLPNLPYLQAVVKEGLRLHPPGAVFLRTFQERCELKGFYIPEKTLLVVNVYAIMRDPKLWEDPEEFKPERFIASSRSGQEDEIREEVLKYMPFSTGRRGCPGSNLAYVSVGTAIGVMAQCFDWRIKGEKVNMNEAAGTLVLTMAQPLMCTPGPRTLNPLPSSLHVPIS

SEQ ID NO: 12732 - DNA, 1542 bp, Arabidopsis thaliana
  CDS (1)..(1542)
atggatgcaatcgtcgttgactctcaaaactgcttcatcatcattcttctatgttccttctcactcatctcctactttgtcttcttcaaaaaaccaaaggttaactttgatttgcttccgagccctccttcacttccaatcattggtcatcttcacctcttgctctctactcttatccacaagtctcttcagaaactctcctccaagtatggacctcttctccatctccgcatctttaacatccccttcatcctcgtctcctcggactcactggcctatgagatcttcagggatcacgacgtgaacgtctcctctcgcggtgttggagcgatcgacgagtccctggcgtttggatcttctggtttcatacaggctccctatggagattactggaaattcatgaagaagctcatcgcaactaagttgctgggaccccaaccactggtgcggtcacaggattttcgttctgaagagctagagaggttctacaaaaggctgttcgataaggccatgaagaaggaaagcgttatgattcataaggaagcgtccagattcgttaacaatagcctttacaagatgtgcacgggaaggagcttttcagtggagaataatgaagtggagagaataatggaacttactgccgacttaggtgccttgtcacagaagtttttcgtgtcaaagatgtttcgtaagctgcttgagaagctcggtatctcacttttcaaaacggagataatggttgtttcacgtagatttagtgagctggttgaaaggattcttattgaatatgaagagaaaatggacgggcatcaaggcacacagtttatggatgccttgttggcagcttatcgagatgaaaatacagaatataaaatcactaggagccatatcaagtcgcttctcacggagtttttcattggagccgctgacgcctcatcaatagcaatacagtgggcaatggcagatatcataaacaaccgtgagattcttgagaaattgagagaagaaattgattcggttgtaggaaaaacaagattggttcaagaaacagatttaccaaaccttccttatttgcaagctgtagttaaggaagggctaagattgcacccgcctacacctctggttgtaagggagttccaagaagggtgtgagattggagggttctttgtaccaaagaacacaacacttattgttaattcttatgctatgatgagagatcctgattcatggcaagatcctgatgagtttaaaccagagaggtttctagcttccttaagtagagaggaggataaaaaagagaaaatccttaacttccttccttttgggagcggaaggagaatgtgtcctggatcaaatcttggttatatatttgtaggaaccgcgattgggatgatggtccagtgctttgactgggaaatcaatggagacaagattaatatggaagaggctactggagggtttctcatcaccatggctcatccccttacatgcactcctattcctcttccccgaacccaaaactctttaatttcccatctttaa

SEQ ID NO: 12733 - protein, 513 aa, Arabidopsis thaliana
MDAIVVDSQNCFIIILLCSFSLISYFVFFKKPKVNFDLLPSPPSLPIIGHLHLLLSTLIHKSLQKLSSKYGPLLHLRIFNIPFILVSSDSLAYEIFRDHDVNVSSRGVGAIDESLAFGSSGFIQAPYGDYWKFMKKLIATKLLGPQPLVRSQDFRSEELERFYKRLFDKAMKKESVMIHKEASRFVNNSLYKMCTGRSFSVENNEVERIMELTADLGALSQKFFVSKMFRKLLEKLGISLFKTEIMVVSRRFSELVERILIEYEEKMDGHQGTQFMDALLAAYRDENTEYKITRSHIKSLLTEFFIGAADASSIAIQWAMADIINNREILEKLREEIDSVVGKTRLVQETDLPNLPYLQAVVKEGLRLHPPTPLVVREFQEGCEIGGFFVPKNTTLIVNSYAMMRDPDSWQDPDEFKPERFLASLSREEDKKEKILNFLPFGSGRRMCPGSNLGYIFVGTAIGMMVQCFDWEINGDKINMEEATGGFLITMAHPLTCTPIPLPRTQNSLISHL

SEQ ID NO: 12734 - DNA, 1530 bp, Arabidopsis thaliana
  CDS (1)..(1530)
atggcagtattgatcatcttcatcctcttatgtctcttgtcattcctatgttactctctcttcttcatgaaacctaaagattcacgagatggccgtgaccttcctccgagccctccttctcttccaatcatcggtcatcttcacctaattcttctgtctactttaacccacaagtcttttcagagactctcatcaaagtatgggcctcttctccatctccgcatcttccacgtacctatagtcctcgcctcctcagcctcagtggcctacgaaatcttcagggaccaagacgtgaatgtatcatttcggcattcgcctccgattgaagagtctctctttttggggtcgtatagcttcattagcgccccctatggagattactggaaattcatgaggaagctcatggttaccaagattcttggaccgcaggcactcgagcggtcacgaagattccgtgaagatgagcttgataggttttataaaactctgctcgacaaggcgatgaagaaggagagtgttgagattgttgaggaagcagcgaagctcaataacaacaccatctgcaagatgatcatggggaggagttgttctgaggagaccggtgaggcggagagaatcagaggcttggtgactgaatcaatggctttgacaaagaaaattttcttggcgaccatctttcacaaaccgcttaagaagctcgggatctcacttttcaaaaaggagataatgagtgtttcccgcaagttcgatgagctactagagaagattcttgtggaacacgaagagaaaatggaggagcatcatcaaggtactgatatgatggatgtgttgttggaagcttatcgagacgaaaacgctgagtataagatcacaagaaaccatatcaagtcaatgtttgtggatcttttcattgctggtactgatacatcatcaaccactatacaatggatcatggcggagatcattaaccatcccaagattcttgagaggctaagagaagaaatcgattttgttgtagggaaaacaaggttgattcaagaaactgacctaccgaacctcctttacttgcaagcgataatcaaagaagggctaagattgcatccgccggggccactcttaccaagaacggtccaagaaaggtgtgaaattaaagggttccacataccagagaagactatacttgttgtcaattcttatgctataatgagagatcctgatttttgggaagatcctgacgagtttaagccagagagatttttatctatttcaagatcagggcaagaggacgagataagagataaattcctaaaatacattccttttgccagcggcaggagaggttgtccaggaacaaatctagcttatgcttctgtaggaaccgcggttggagtgatggtgcaatgctttgattggaaaattgaaggagagaatgtcaacatgaatgaggctgctggaacaatggtgttgaccatggctcaccctcttaagtgcactcctgttcctcgaaccctaaaccttttacctccctag

SEQ ID NO: 12735 - protein, 509 aa, Arabidopsis thaliana
MAVLIIFILLCLLSFLCYSLFFMKPKDSRDGRDLPPSPPSLPIIGHLHLILLSTLTHKSFQRLSSKYGPLLHLRIFHVPIVLASSASVAYEIFRDQDVNVSFRHSPPIEESLFLGSYSFISAPYGDYWKFMRKLMVTKILGPQALERSRRFREDELDRFYKTLLDKAMKKESVEIVEEAAKLNNNTICKMIMGRSCSEETGEAERIRGLVTESMALTKKIFLATIFHKPLKKLGISLFKKEIMSVSRKFDELLEKILVEHEEKMEEHHQGTDMMDVLLEAYRDENAEYKITRNHIKSMFVDLFIAGTDTSSTTIQWIMAEIINHPKILERLREEIDFVVGKTRLIQETDLPNLLYLQAIIKEGLRLHPPGPLLPRTVQERCEIKGFHIPEKTILVVNSYAIMRDPDFWEDPDEFKPERFLSISRSGQEDEIRDKFLKYIPFASGRRGCPGTNLAYASVGTAVGVMVQCFDWKIEGENVNMNEAAGTMVLTMAHPLKCTPVPRTLNLLPP

SEQ ID NO: 12736 - DNA, 1584 bp, Arabidopsis thaliana
  CDS (1)..(1584)
atgatagcaatcatcgttgagttccaaaacttctttatcttcatccttctatgcctcttctcactcctctgtcactctctcttcttcaagaaaccaaaagactcacgaagctttgttctgccttcaagccctccttctcttccaatcatcggccatcttcaccttctcctctctgtcctaactcacaagtctcttcagaaactctcctccaagtacggacctcttctccttatccgcatcttctatgtacccatcattcttgtctcctcttcctctatggcctacgagatcttcaaggcccatgacgtgaacgtctcttctcgcggtattattgctcttgatgagtctctcatgtttggggcttctggcatcttgaacgctccctatggagattactggaagttcatgaagaagctcatggccactaagctactccgaccgcaagtgctggagcggtcacgaggtgttcgtgttgaagagctacatagattttacaggagcattcttgataaggcgacgaagaatgagagcgttgagatcggtaaggaagcgatgaagctcatgaacaacaccttgtgtaaactgatcatgggaaggagtttttcagaggacaacggtgaatcaaatagagtcaggggcttggttgatgaaacctatgccttgtccgagaagatattcttggcagctatattgcgcagacctcttgcaaaacttcggatctcactattcaagaaagagataatgggtgtctccaacaaattcgatgagctactagagaggatccttcaggaacgcaaagagaatttggaagagaagaataatgaaggtatggatatgatggacgtgttgttggaagcttatggagatgaaaacgctgagtataagatcacatggaagcatatcaaggcatttttcgtggagtttttcattggagggactgatacctcagtgcaaacaacacaatgggcaatggccgagatgatcaataacgctaacgttcttgagagactgagagaagaaatcgtctccgttgtaggggaaacaaggttgatccaagaaacagatttaccaaacctaccttatttgcaagcagtggttaaggaagttctaagattgcacccaccatcaccggtcttaatacggaagttccaagaaaaatgtgaggtcaaaggattttacataccggagaagacaacactcattgttaatgtttacgctataatgagagattctgattcttgggaagatcctgagaaatttaagccagagaggtttctaacttcttcaagatcaggggaagaggatgaaaaagagcttaagtttcttccttttggcagcggaaggagaggatgtcctggagcaaaccttggttctatatttgtaggaaccgcaataggagtgatggtgcagtgctttgactggaaaatcaaagaagataaggtcaacatggaagagacttttgaaggaatgaccctgaaaatggttcatccgcttacttgcactccgttcttcgaacccaacctttatcttttgcttttaatctctaaatttccgtgtctgatacttagctttggagcttgttaa

SEQ ID NO: 12737 - protein, 527 aa, Arabidopsis thaliana
MIAIIVEFQNFFIFILLCLFSLLCHSLFFKKPKDSRSFVLPSSPPSLPIIGHLHLLLSVLTHKSLQKLSSKYGPLLLIRIFYVPIILVSSSSMAYEIFKAHDVNVSSRGIIALDESLMFGASGILNAPYGDYWKFMKKLMATKLLRPQVLERSRGVRVEELHRFYRSILDKATKNESVEIGKEAMKLMNNTLCKLIMGRSFSEDNGESNRVRGLVDETYALSEKIFLAAILRRPLAKLRISLFKKEIMGVSNKFDELLERILQERKENLEEKNNEGMDMMDVLLEAYGDENAEYKITWKHIKAFFVEFFIGGTDTSVQTTQWAMAEMINNANVLERLREEIVSVVGETRLIQETDLPNLPYLQAVVKEVLRLHPPSPVLIRKFQEKCEVKGFYIPEKTTLIVNVYAIMRDSDSWEDPEKFKPERFLTSSRSGEEDEKELKFLPFGSGRRGCPGANLGSIFVGTAIGVMVQCFDWKIKEDKVNMEETFEGMTLKMVHPLTCTPFFEPNLYLLLLISKFPCLILSFGAC

SEQ ID NO: 12738 - DNA, 1554 bp, Arabidopsis thaliana
  CDS (1)..(1554)
atggcagcaatgaacatgattgactttcaaaactgcttcatctttatcctcctatgtctcttctcacgactctgttattctcacttcttcaagaaaccaaaggaccctcgccttcactttgatttacctccgagccctccgtctcttcccatcatcggtcatctgcaccttcttctctctgttctactccacagatctttacaaaaactctccaccaagtacggatctattctctatctccgagtctttaggttccctgtagtcctcatctcgtcagcctcaattgcatatgagatcttcagggcacacgacctgaacatctcgtaccgcggtttcactccgaccgatgattcactttttgccggatctttcagctttatctctgctccctatggagattattggaagttcatgaagaaggtcctagttacaaacgtttttgggccccaagcacacgagcagtcacgaggtgtccgtgcagatgtgctagagcggttttatgggaatctgttcgataaagcgataaagaagcagagcgtggagatatgtgctgaagcgttgaagttatctaactccagcatctgcaagatgatcatggggaggagttgttcagaggagagattcagggctttggctaccgagttagatgttttgacaaagaagctcttctttgcaaacatgttgcgagcatggtttaagaagcttgttgtctctctgtttaaaaaagaaactacagttatttcctacagattcgatgagctgctcgaaagcattcttgtggaacacgaaaagaaactggacgtgcatcatcaacgtacggacttgatggacgcattgttggcagcttatcgggatgaaaatgcagagtataagatcacaaggaaccatatcaagtcaattattgcggatcttttatttgcaggcactgaaaaccaagtgcagacaatacaatgggcaatggcagagatcattaacaaccctaacgttcttgagagactgagaggagaaatcgatagcgtggtaggaaagtcaaggttgattcaagaaacggatttaccaaagctcccttatttgcaagctgtggttaaggaaacgataagactgcacccgccggggcctttcttcttaaggttcacaaaagaagggtgtaggatcagagggttctatgtaccagagaacacgtcagtcgttgttaacgtttatgctgtgatgagggatcctgatgcttgggaggatcctcttgtgtttaagccagagaggttcttagcttcttcaagagcagaacaagaggaggagagaagagagaaagaaattaagtaccttccttttggaagcggaagaagaagttgtcccggagaaaatctagcttatgtcattatgggaactgcaattggagtgatggtgcagggttttgagtggagaaccacagaagagaaaattaacatggacgaggctgttgtaggactgagcttgaccatggctcatcctcttaagatcattcctgttgctcgaacctcaaactctttaacttcgagtttgcaaaaatgtttgtga

SEQ ID NO: 12739 - protein, 517 aa, Arabidopsis thaliana
MAAMNMIDFQNCFIFILLCLFSRLCYSHFFKKPKDPRLHFDLPPSPPSLPIIGHLHLLLSVLLHRSLQKLSTKYGSILYLRVFRFPVVLISSASIAYEIFRAHDLNISYRGFTPTDDSLFAGSFSFISAPYGDYWKFMKKVLVTNVFGPQAHEQSRGVRADVLERFYGNLFDKAIKKQSVEICAEALKLSNSSICKMIMGRSCSEERFRALATELDVLTKKLFFANMLRAWFKKLVVSLFKKETTVISYRFDELLESILVEHEKKLDVHHQRTDLMDALLAAYRDENAEYKITRNHIKSIIADLLFAGTENQVQTIQWAMAEIINNPNVLERLRGEIDSVVGKSRLIQETDLPKLPYLQAVVKETIRLHPPGPFFLRFTKEGCRIRGFYVPENTSVVVNVYAVMRDPDAWEDPLVFKPERFLASSRAEQEEERREKEIKYLPFGSGRRSCPGENLAYVIMGTAIGVMVQGFEWRTTEEKINMDEAVVGLSLTMAHPLKIIPVARTSNSLTSSLQKCL

SEQ ID NO: 12740 - DNA, 1524 bp, Arabidopsis thaliana
  CDS (1)..(1524)
atggtggatttacaatacttctccgtaatcatccttgtatgtcttggaatcacagtcttgatccaagctattactaacagattacgtgacagacttccactcccaccaagcccaacagctttaccgatcatcggtcacattcacctccttggtcccatagctcaccaagcacttcacaagctctcaatccgctacggacctttgatgtatctcttcattggctctattcctaatcttattgtctcatcagccgagatggcgaatgagattctcaaatccaatgaactcaacttcctgaaccgtcccacaatgcaaaacgttgactaccttacttatggctcagccgattttttctcagcgccttacgggcttcactggaagttcatgaagagaatttgtatggtggagctcttcagcagcagagctttagatagctttgtttccgtaagaagcgaggagttaaagaagcttctaatacgagttctgaagaaagcagaagcagaagagagtgttaatcttggtgaacagctaaaggaattgacaagcaacatcataacgagaatgatgttcaggaaaatgcaatcggatagtgacggtggcgaaaaatcagaggaggttatcaaaatggtggtggagttaaatgaactagccggatttttcaacgtttctgaaacgttttggttcttgaaaaggcttgacttgcaaggactgaagaaaaggctcaagaatgctcgagacaaatatgatgtgatcatagaaagaataatggaagagcatgagtctagtaagaagaatgctacaggagaaagaaacatgctagacgttttgctcgacatatatgaagacaaaaacgcagagatgaagctgacaagagaaaacattaaggccttcatcatgaatatttatgggggtggaacagatacatctgccataacagtagaatgggcactagcagagctgataaaccatccagagatcatgaagaaagcacaacaagagatagagcaagtggtgggaaacaagagagtagttgaagaatcggatttgtgtaatcttagttacacccaagcagtggtgaaggagacaatgaggttacaccctggaggaccaatattcgtgagagaatctgatgaagaatgcgcggtggctggattcagaatcccggctaaaacaagagtgatagttaacgtgtgggcgattgggagagactcaaatcaatgggaagatccattggagtttaggcctgagagatttgaagggagtgaatggaaggtcatgagtgagaagatgatgtcttttggagctgggagaagaagttgtcctggagagaaaatggtgtttagattcgttccaataattttagctgcaataatacagtgttttgagctgaaagtgaagggaagtgtggatatggatgaagggactggatcatctttgcctagagctacacctttagtgtgtgttcctgttgctaaagaggctacacaatcattttctctactagaaccaaatgtcaacttctag

SEQ ID NO: 12741 - protein, 507 aa, Arabidopsis thaliana
MVDLQYFSVIILVCLGITVLIQAITNRLRDRLPLPPSPTALPIIGHIHLLGPIAHQALHKLSIRYGPLMYLFIGSIPNLIVSSAEMANEILKSNELNFLNRPTMQNVDYLTYGSADFFSAPYGLHWKFMKRICMVELFSSRALDSFVSVRSEELKKLLIRVLKKAEAEESVNLGEQLKELTSNIITRMMFRKMQSDSDGGEKSEEVIKMVVELNELAGFFNVSETFWFLKRLDLQGLKKRLKNARDKYDVIIERIMEEHESSKKNATGERNMLDVLLDIYEDKNAEMKLTRENIKAFIMNIYGGGTDTSAITVEWALAELINHPEIMKKAQQEIEQVVGNKRVVEESDLCNLSYTQAVVKETMRLHPGGPIFVRESDEECAVAGFRIPAKTRVIVNVWAIGRDSNQWEDPLEFRPERFEGSEWKVMSEKMMSFGAGRRSCPGEKMVFRFVPIILAAIIQCFELKVKGSVDMDEGTGSSLPRATPLVCVPVAKEATQSFSLLEPNVNF

SEQ ID NO: 12742 - DNA, 1542 bp, Arabidopsis thaliana
  CDS (1)..(1542)
atggcaactctatttctcacaatcctcctagccactgtcctcttcctcatcctccgtatcttctctcaccgtcgcaaccgcagccacaacaaccgtcttccaccggggccaaacccatggcccatcatcggaaacctccctcacatgggcactaagcctcatcgaaccctttccgccatggttactacttacggccctatcctccacctccgactagggttcgtagacgtcgtggtcgccgcttctaaatccgtggccgagcagttcttgaaaatacacgacgccaatttcgctagccgaccaccaaactcaggagctaaacacatggcatataactatcaagatcttgtctttgcaccttacggacaccgatggagactgttgagaaagattagttctgttcatctattttcagctaaagctctcgaagatttcaaacatgttcgacaggaagaggttggaacgctaacgcgggagctagtgcgtgttggcacgaaacccgtgaatttaggccagttggtgaacatgtgtgtagtcaacgctctaggacgagagatgatcggacggcgattgttcggcgccgacgccgatcataaagctgacgagtttcgatcaatggtgacggaaatgatggctctcgccggagtattcaacatcggagacttcgtgccgtcacttgattggttagatttacaaggcgtcgctggtaaaatgaaacggcttcacaagagattcgacgcttttctatcgtcgattttgaaagagcacgaaatgaacggtcaagatcaaaagcatacagatatgcttagcactttaatctcccttaaaggaactgatcttgacggtgacggaggaagcttaacggatactgagattaaagccttgctattgaacatgttcacagctggaactgacacgtcagcaagtacggtggactgggctatagctgaacttatccgtcacccggatataatggttaaagcccaagaagaacttgatattgttgtgggccgtgacaggcctgttaatgaatcagacatcgctcagcttccttaccttcaggcggttatcaaagagaatttcaggcttcatccaccaacaccactctcgttaccacacatcgcgtcagagagctgtgagatcaacggctaccatatcccgaaaggatcgactctattgacgaacatatgggccatagcccgtgacccggatcaatggtccgacccgttagcatttaaacccgagagattcttacccggtggtgaaaaatccggcgttgatgtgaaaggaagcgatttcgagctaataccgttcggagctgggaggagaatctgtgccggtttaagtttagggttacgtacgattcagtttcttacggcgacgttggttcaaggatttgattgggaattagctggaggagttacgccggagaagctgaatatggaggagagttatgggcttacactgcaaagagcggttcctttggtggtacatcctaagccaaggttggctccgaacgtttatggactcgggtcgggttaa

SEQ ID NO: 12743 - protein, 513 aa, Arabidopsis thaliana
MATLFLTILLATVLFLILRIFSHRRNRSHNNRLPPGPNPWPIIGNLPHMGTKPHRTLSAMVTTYGPILHLRLGFVDVVVAASKSVAEQFLKIHDANFASRPPNSGAKHMAYNYQDLVFAPYGHRWRLLRKISSVHLFSAKALEDFKHVRQEEVGTLTRELVRVGTKPVNLGQLVNMCVVNALGREMIGRRLFGADADHKADEFRSMVTEMMALAGVFNIGDFVPSLDWLDLQGVAGKMKRLHKRFDAFLSSILKEHEMNGQDQKHTDMLSTLISLKGTDLDGDGGSLTDTEIKALLLNMFTAGTDTSASTVDWAIAELIRHPDIMVKAQEELDIVVGRDRPVNESDIAQLPYLQAVIKENFRLHPPTPLSLPHIASESCEINGYHIPKGSTLLTNIWAIARDPDQWSDPLAFKPERFLPGGEKSGVDVKGSDFELIPFGAGRRICAGLSLGLRTIQFLTATLVQGFDWELAGGVTPEKLNMEESYGLTLQRAVPLVVHPKPRLAPNVYGLGSG

SEQ ID NO: 12744 - DNA, 1500 bp, Arabidopsis thaliana
  CDS (1)..(1500)
atggcagaactcatcatcgttgactttcaaaacatatctatcttcatcctcttatgtctcttctcattcctttgttacgctctcttcttcaagaaaccaaaaggctttgacctgcctccgagccctccttctctaccaatcatcggtcatcttcaccatcttctctcatcatctctaccacacaagtcctttcaaaaactctccttcaagtatggacctcttctccatctccgcatctttaatttccccatggtcctcgtctcatcagcctcaatggcctacgaggtcttcaggacaaacgacgtaaacgtctcgtatcgctttgtcccagtcaacaaagactctctagtgttcggatcttcaggattcgtaaccgctccttatggagattactggaagttcatgaagaagctcatatccacgaaactactccgaccacatgcactcgagctgtcgaaaggtaaccgtgcagaggagctacgtcggttttgccttgatctgcaaggtaaggcgaggaagaaggagagcgttgagatcggtaaagtagcactaaagctcactaacaacatcatatgtaggatgagcatgggaaggagttgttcagagaagaacggtgtagcggagagagcaagggaattggttaacaaatcctttgccttatcagtgaagctcttcttttcaaacatgttcagaaaagatataatgggagtttctcgtgaattcgacgagtttcttgagaggattctagtggaacacgaggagaaccttgagggggatcaagatagggacatgattgatcatttgttggaagcttatagaaacgaagaagcagaatataagatcactagaaaacagatcaagtctttaattgtggaaatttttcttggaggcactgacagctcggcgcagacgatacaatggactatggcggagatacttaacaaccccggcgttctcgagaaattaagagcagaaatcgattccgttgtggggggaaaaaggttgattcaagaatcagatcttccaaacctcccttatttgcaagctgttgttaaagaagggctaagattgcatccctcggctcctgtcttgttaagggtatttggagaaagttgcgaggtcaaagagttctacgtaccggagaaaacaacacttgttgttaatctctatgctgtgaatagagatcctgattcttgggaagatcctgatatgtttaagccagagaggtttttagtttcttcgatatcaggagatgaagaaaagataagagagcaagccgtgaagtatgttacttttggaggtggaaggaggacatgtcccgcggtaaaactagctcatatctttatggaaactgcgattggagcgatggtgcagtgttttgactggagaattaaaggagagaaagtatacatggaagaggctgtttcaggacttagtttgaaaatggctcatccgcttaagtgcactcctgttgttcggttcgaccctttcagcttttga

SEQ ID NO: 12745 - protein, 499 aa, Arabidopsis thaliana
MAELIIVDFQNISIFILLCLFSFLCYALFFKKPKGFDLPPSPPSLPIIGHLHHLLSSSLPHKSFQKLSFKYGPLLHLRIFNFPMVLVSSASMAYEVFRTNDVNVSYRFVPVNKDSLVFGSSGFVTAPYGDYWKFMKKLISTKLLRPHALELSKGNRAEELRRFCLDLQGKARKKESVEIGKVALKLTNNIICRMSMGRSCSEKNGVAERARELVNKSFALSVKLFFSNMFRKDIMGVSREFDEFLERILVEHEENLEGDQDRDMIDHLLEAYRNEEAEYKITRKQIKSLIVEIFLGGTDSSAQTIQWTMAEILNNPGVLEKLRAEIDSVVGGKRLIQESDLPNLPYLQAVVKEGLRLHPSAPVLLRVFGESCEVKEFYVPEKTTLVVNLYAVNRDPDSWEDPDMFKPERFLVSSISGDEEKIREQAVKYVTFGGGRRTCPAVKLAHIFMETAIGAMVQCFDWRIKGEKVYMEEAVSGLSLKMAHPLKCTPVVRFDPFSF

SEQ ID NO: 12746 - DNA, 1536 bp, Arabidopsis thaliana
  CDS (1)..(1536)
atggcatcaatgatcactgttgactttgaaaactgcttcatcttcctcctcttatgtcttttctcacgcctctcttacgatcttttcttcaggaaaacaaaagactcacgagctggctgtgctcttcctccgagccctccttcattaccaatcattggtcatcttcaccttatactctttgtcccaatccaccagtctttcaagaacatctcatctaaatatggacctctcctccacctccgcttctttaacttccccatagtcctcgtctcctcggcctcaacggcctacgagatcttcaaggcccaagacgtgaatgtctcctctcgccctccccctcctatcgaggagtctctcattttaggatcttccagcttcatcaacactccctatggagattactcgaagttcatgaagaagttcatggtccaaaagctgcttggaccacaagcactccaacggtcccgaaatatccgtgcagatgagctggaacggttctacaaaaccctgcttgataaggcgatgaagaagcagactgttgagattcgtaatgaagcaatgaagctcactaacaacaccatttgcaagatgattatggggaggagttgttcagaggagaacggtgaggctgagacagtcagaggcttggtgaccgagtcgattttcttgacaaagaaacatttcttgggagccatgtttcacaaaccacttaagaagctcgggatctcattattcgcaaaggaattgatgaatgtttccaacaggtttgatgagctactggagaagattcttgttgaacatgaagagaaattgcaggagcatcatcaaactagtgacatgttggatatgttgttggaagcttatggagacgaaaacgcagagtataagatcactagagaccaaatcaagtctttgttcgtggatctgttcagtgcaggcactgaagcctcggcgaacactatacagtggaccatggcggagatcattaagaatcctaagatttgtgagagactgagagaagaaattgattctgttgtagggaaaacaaggttggttcaagagactgatctaccaaatctcccttacttgcaagcaatagttaaagaagggctaagattgcatcctccgggaccagtggtaaggacgttcaaagagacatgtgaaatcaaaggattctacataccggagaagacaagactttttgttaatgtttatgcgataatgagagatcctgatttctgggaagaccctgaggagtttaagccagagaggtttttagcttcttcaagattaggggaagaggatgagaaaagagaggacatgctaaaatacattcctttcggtagcggaaggagagcttgtcctggatcacatctagcttataccgttgtaggaagtgtaattggaatgatggtgcaacactttgactggataatcaaaggagaaaaaatcaacatgaaggagggtggaacaatgaccttgaccatggctcaccctcttaagtgcactcctgttcctcgaaacctaaacacttaa

SEQ ID NO: 12747 - protein, 511 aa, Arabidopsis thaliana [sequence omitted]

SEQ ID NO: 12748 - DNA, 1572 bp, Arabidopsis thaliana
  CDS (1)..(1572)
atggcagcaatgaacatcgttgactttcaaaactgcttcttttttgtcctcttaagcctcttctcacttctctgttactctctcttcttcaggaaaccaaaggaacctcgacttcactatgatttacctccgagccctccgactcttcccatcattggtcatcttcaccttcttctctctgttctagtccacagatctttacagacactctccaccaagtatgggtctattctctatcttcgcgtcttcagtttccctgtagccctcgtctcctcagcatctattgcttatgagatcttcagggaacacgacgtgaacatctcgtctcgtggtttccctcctaccgatgattccctttttgctggatctttcagcttcacctctgctccctatggagattactggaagttcatgaagaagctcctggtcacgaacttgcttggaccccaggcactcgagcggtcacgaggattccgtgcagatgagctagatctgttttacgagaacctgttggataaagcgatgaagaaggagagcgtggatatctgtgtggaggcgttgaagctcagtaacaacagcatctgcaagatgatcatggggaggagttgttcagaggagaatggtgaggcagagagagttagggctttggctacccagttagatggcttgacgaagaagatcttattggcgaacatgttgcgtgcggggtttaaaaagcttgttgtctcactgtttagaaaggaaatgatggatgtttccagcagatttgatgagctgctcgaaaggatccttgtggaacatgaagataaactggacatgcatcatcaaggtacagacttagtggacgcgttgttggcagcttgtcgggacaaaaatgcagagtataagatctctaggaaccatatcaagtcgtttttcgcggatctcttatttgcaagcactgacacctttgtgcaaacaacacagtggacagtggcggagatcattaataaccctaatgttcttgagagattgagaggagaaatcgattccgtggtcgggaaagcaaggttgattcaagaaactgatttgccaaacctcccttatttgcaagcggtggtcaaggaagggctaagactgcatccgccggggcctctctttgcaaggttctcccaagaagggtgtaggatcggagggttctatgtaccggagaaaacaacattaatgattaatgcttatgctgtgatgagagattctgattcttgggaagatcctgatgagtttaaaccagagaggtttctagcttcgtcaagatcagagcaggaaaaggagagaagagagcaagcaattaagtacattgctttcggaagcggacgaagaagctgtcctggagaaaatctagcatatatctttttaggaactgcaattggagtgatggtacagggatttgagtggagaatcaaagaagagaaagttaacatggaagaggctaatgtaggactgagcttgaccatggcttatcctcttaaggtcactcctgttcctcgaaccctagtccccttaactcagaatccactgaaccggagttcatga

SEQ ID NO: 12749 - protein, 523 aa, Arabidopsis thaliana
MAAMNIVDFQNCFFFVLLSLFSLLCYSLFFRKPKEPRLHYDLPPSPPTLPIIGHLHLLLSVLVHRSLQTLSTKYGSILYLRVFSFPVALVSSASIAYEIFREHDVNISSRGFPPTDDSLFAGSFSFTSAPYGDYWKFMKKLLVTNLLGPQALERSRGFRADELDLFYENLLDKAMKKESVDICVEALKLSNNSICKMIMGRSCSEENGEAERVRALATQLDGLTKKILLANMLRAGFKKLVVSLFRKEMMDVSSRFDELLERILVEHEDKLDMHHQGTDLVDALLAACRDKNAEYKISRNHIKSFFADLLFASTDTFVQTTQWTVAEIINNPNVLERLRGEIDSVVGKARLIQETDLPNLPYLQAVVKEGLRLHPPGPLFARFSQEGCRIGGFYVPEKTTLMINAYAVMRDSDSWEDPDEFKPERFLASSRSEQEKERREQAIKYIAFGSGRRSCPGENLAYIFLGTAIGVMVQGFEWRIKEEKVNMEEANVGLSLTMAYPLKVTPVPRTLVPLTQNPLNRSS

SEQ ID NO: 12750 - DNA, 1566 bp, Arabidopsis thaliana
  CDS (1)..(1566)
atgaattatacttcttgttcatatctcttcttcacacttgtaaccatcttccttctccatagactcttcagctcctctagccgcagaggtcttcctccaggtcctcgaggacttcccgttcttggtcatatgcatctcctccggtctagcctaccacgatctcttcaagccttggctcatacttacggtcctctcatgaccatacgcatcggatcattacgagtcctcgttgtctcagattccgacacagctaagctaatcctcaagactcacgaccctgatttcgcttccaagtttgtgtttggtccgagacagttcaatgtttataaaggatcagagttctttaatgcaccttatggatcttactggaggttcatgaagaagctatgcatgactaagctattcgcgggttatcagcttgatcgatttgtcgacataagagaagaggaaacgttagctttactgagcacgctggttgagaggtcgcgaaacggagaggcttgcgatctcggtttggagttcactgctttgaccacaaagatcttatcaaagatggttatggggaaaaggtgccgccaaaactcgaatattcccaaagagatcaggaagatagtgagtgatattatggcttgcgccacaaggtttggattcatggagctatttggaccattgcgggatctggatttgtttgggaatggtaagaagcttagatcctctatttggcggtatgatgagttggttgagaagatactgaaggaatatgaaaacgataagagcaatgaggaagaagagaaagataaagatatcgtcgatatcttgttggacacgtataatgacccaaaagccgaactcagattgactatgaatcagatcaagttcttcattcttgagttgttcatggcgagcttagacacgacttctgcagctttacaatggacaatgactgagctaatcaaccatccggatatcttcgcgaagatcagagacgagatcaaatcggttgtaggaacaacgaaccggttaatcaaagaatcagatttgcagaagcttccttacctacaagcagctatcaaggagacattgagacttcatccagtaggaccattactacgcagagaaagcaacacagacatgaagatcaacgggtacgatgtaaaatccgggacaaagatcttcatcaatgcttacgggataatgcgtgatccgaccacatacaaagaccctgacaagtttatgccagagaggtttcttgtggtggaacaagatacagagagaaagatgggttactaccagcaatatatgttggaattaaaaggccaagatgtgaattatcttgcgtttgggagcggaagacgaggatgtcttggagcttctcacgcttctctggtgttgagtctcacaattgggtcactcgtgcagtgttttaattggacggtgaagggagatgaagacaaaatcaagatcaagttacctaccggcttttcggcttcagggactgctggaggaagctcacttatgtgttctcctgaattatgttttgatccatttggataccaaactaagtga

SEQ ID NO: 12751 - protein, 521 aa, Arabidopsis thaliana
MNYTSCSYLFFTLVTIFLLHRLFSSSSRRGLPPGPRGLPVLGHMHLLRSSLPRSLQALAHTYGPLMTIRIGSLRVLVVSDSDTAKLILKTHDPDFASKFVFGPRQFNVYKGSEFFNAPYGSYWRFMKKLCMTKLFAGYQLDRFVDIREEETLALLSTLVERSRNGEACDLGLEFTALTTKILSKMVMGKRCRQNSNIPKEIRKIVSDIMACATRFGFMELFGPLRDLDLFGNGKKLRSSIWRYDELVEKILKEYENDKSNEEEEKDKDIVDILLDTYNDPKAELRLTMNQIKFFILELFMASLDTTSAALQWTMTELINHPDIFAKIRDEIKSVVGTTNRLIKESDLQKLPYLQAAIKETLRLHPVGPLLRRESNTDMKINGYDVKSGTKIFINAYGIMRDPTTYKDPDKFMPERFLVVEQDTERKMGYYQQYMLELKGQDVNYLAFGSGRRGCLGASHASLVLSLTIGSLVQCFNWTVKGDEDKIKIKLPTGFSASGTAGGSSLMCSPELCFDPFGYQTK

SEQ ID NO: 12752 - DNA, 1524 bp, Nematostella vectensis
  CDS (1)..(1524)
atgatcgagctatgcgtgcctgctttgctgatatctctggctttaatatatattttctactctcgcaaggaacggcttccacccggaccagcaccatggccgattatcggcaatctcgatttactcatccgtaaagaagctctctataaaaccttcaccaacctgagccataaatatggaggtgtctttcgcctgtatttgggaagcaagcctgttgtggttttgaatggaaaagcaatatacgattccttggctcgacagccgagcgtgtttgcaggcaggcctacccttcccccatcattagattttggaatggatcccgattatggcgtgcttgattatgggcctttatggaaattttacaagaaactcggacacagcgctgtccgagtacatgggacagaccgcttgaatgaggcaatccgcgtggaagtagatgaagtttgccgcaggcttgactccctagatggtcaacctgtggatatttctaaagagtttggaatcgctacaacaaatgtgatatgcgctcggttgtttggatcacgttatgatgttcacgatcccgagttcttgcgaatctacgagattcacaataagatttcccgcgttgtaatgagtagtcggtcgctgtcggatgtatttccctttctcgtgaacatccttccagaaagcaaagaaaggcgggagctgagagaactactccaggagagatacaccataatttggcgaaaatacaaagagcatgaacaaacattcacacccggagtgataagggactacactgatctacttatagacgctaaactcagcgaaaaaaacagccacaagttaacagaaaatggcatcatttcaacaggcctggcttctcagtttttagcaggttctgaaacaaccgcttcgacgttgtcatggtcagtggtctacctcctaaatgactcggatgtccaagaacgcattcataatgaattagatgacgtcataggcaaaggccagctaccgcaattatcccacaagaagaagttacctgttctagaagcatttacagctgaaacactccgtctgtcctgcataggaccacttggtatgccgcataagaccacgagggacacttttctacgggggcacgcaatccccaagggcactacggtagttcctaatttgtggtcccttcatcacgactcaactgaatggaaggacccttttaaatttgatatcaataggtttctagaagatggtgttttcagggcgccagctaatgatgcttacctcccgtttagtgctggtccaagggtgtgtctaggggaggagcttgcgcggtccgagctcttcctattcctcgcacggctgctgcagaaattcgactttgtgacgccattggggttggaggtaccctcgttggatgcggaagactcaggaattgtacttcacccaaagcctttcttggcatgcgctaggcgaagaaaattctcaaccaccaatgaaaataagctgctccctaccaataaccaatctagaacaaactag

SEQ ID NO: 12753 - protein, 507 aa, Nematostella vectensis
MIELCVPALLISLALIYIFYSRKERLPPGPAPWPIIGNLDLLIRKEALYKTFTNLSHKYGGVFRLYLGSKPVVVLNGKAIYDSLARQPSVFAGRPTLPPSLDFGMDPDYGVLDYGPLWKFYKKLGHSAVRVHGTDRLNEAIRVEVDEVCRRLDSLDGQPVDISKEFGIATTNVICARLFGSRYDVHDPEFLRIYEIHNKISRVVMSSRSLSDVFPFLVNILPESKERRELRELLQERYTIIWRKYKEHEQTFTPGVIRDYTDLLIDAKLSEKNSHKLTENGIISTGLASQFLAGSETTASTLSWSVVYLLNDSDVQERIHNELDDVIGKGQLPQLSHKKKLPVLEAFTAETLRLSCIGPLGMPHKTTRDTFLRGHAIPKGTTVVPNLWSLHHDSTEWKDPFKFDINRFLEDGVFRAPANDAYLPFSAGPRVCLGEELARSELFLFLARLLQKFDFVTPLGLEVPSLDAEDSGIVLHPKPFLACARRRKFSTTNENKLLPTNNQSRTN

SEQ ID NO: 12754 - DNA, 1500 bp, Physcomitrella patens subsp. patens
  CDS (1)..(1500)
atgactacatgttctgtgttggtggcgctggtgagctcagttttcctattttcgcggttccggaagccattgcaacttccacctggtcccaaaggactgccgtttgtggggaatttgctgcagttgggatcgctcccccacaagaccgtcactgaattgcataaaaaatacggccaccttgtgtacctacgtctgggcagcgtccaaaccattgtgatggacagtcccgagctctttagggagatcaccagggaacaggacaatgtgttttcatcgcgaccgcatttgacgttcacggagcttgtggcctacgatgcccacgattttgcaatggcgccgtatggtccccactggcggcatgttaggaaaatctgcgtgcatgaacttctgacgaacaagcggcttgagagcactgcgggagagcgcaaggaggagtggagatgcatggtaaaggccattttagaagcggccaacagtggcgacgttgtagacatgagggatgtctttgcgggcgtgtcgatgacggtgatgtgtagaatgttggtagggaggcgggacttttctgctagagaagataagccgcgggattttaagcatcttatccatgaattgtttcgattgatgggagtgttgaacctaagggattttgtgccagctcttgggtggctggacttgcaaggtttcgagagagatatgcgcaagttgcggcgtgaatttgatgaggtgtttgacgccgtcattcaagagcatagagacctggcatctggcaagctgccaggaggaaagccgaacgacttcatcagcgtcctgctggaccttccaggcgagaatggagagccgcacctggacgagaaaaccatcaaagctctcctacaagacatgctagcgggcgcaacggacacatccgcagtgacaaacgagtgggccatggcggaaatcatccgcaaccaggagattcagcgcaagctccagaacgagctcgactcagtggtaggccgcgaccgtaacgtgcaggaatccgaccttccaaacatgccatacctcatgtgcataacgaaggagaccttccgactccacccagcgggtcccttcggcatcccccgcgagacgatggccgatactaagctgaacggttaccacgtgccgaagggcactcgagtcctcatgaacttctactcgttgggtcgaaaccccgagatttgggcggatcctttggaattcaaaccggagcgatgggagcgagaaaacttggcccaggtccaggaccccgaattccgcatcttccccttcggcaatggccgtcgccagtgccccggctacatcttaggcagcagcatggtactctcgacgctggcgacgctctaccacggattcaactggtctctcccacccgacgttgcccgcatcgacatggacgaagccttcggctgcacgttgccgatgagaactcgtctccgcgcagtcgcgacgccccggctcccgccatacttgtatgcctag

SEQ ID NO: 12755 - protein, 499 aa, Physcomitrella patens subsp. patens
MTTCSVLVALVSSVFLFSRFRKPLQLPPGPKGLPFVGNLLQLGSLPHKTVTELHKKYGHLVYLRLGSVQTIVMDSPELFREITREQDNVFSSRPHLTFTELVAYDAHDFAMAPYGPHWRHVRKICVHELLTNKRLESTAGERKEEWRCMVKAILEAANSGDVVDMRDVFAGVSMTVMCRMLVGRRDFSAREDKPRDFKHLIHELFRLMGVLNLRDFVPALGWLDLQGFERDMRKLRREFDEVFDAVIQEHRDLASGKLPGGKPNDFISVLLDLPGENGEPHLDEKTIKALLQDMLAGATDTSAVTNEWAMAEIIRNQEIQRKLQNELDSVVGRDRNVQESDLPNMPYLMCITKETFRLHPAGPFGIPRETMADTKLNGYHVPKGTRVLMNFYSLGRNPEIWADPLEFKPERWERENLAQVQDPEFRIFPFGNGRRQCPGYILGSSMVLSTLATLYHGFNWSLPPDVARIDMDEAFGCTLPMRTRLRAVATPRLPPYLYA

SEQ ID NO: 12756 - DNA, 1563 bp, Coprinopsis cinerea okayama7#130
  CDS (1)..(1563)
atgaccacttcctcaacgatgtcttctactctgtcgctcgacgttctgagtggcaggacaattttgttggacactttggctgtcgccctgtttctatactatctcatcaaactcttgggccgtggtcgacttcctgctcccttgccgcccggccccagacgcctacctctgctgggaaacatcctcgacatgccccccagccaggaatggcttacctttgctgaatggggtcgcaaatggggagacatgacttccatctcaatcttcggacaggagataatcattctcaactcaatcaagctggctgtagacatactggagaagaagggctcaatttactctgatcggcctgtcatggaaatgggcggcgaactcgtgggctggaagaacactctggtactcatcccgtatggggatcgctttcgcagttttcgaaagatgttccaccaggttattgggacccacgcgtcaatgtccaacttccactccgtcgaagaagaagaaactcggaagttcctcaaagctttgctgaaggacccgagcaacttcgtccagcacgttcggagcactgcaggcgcgattattctccggatatcccatgggtacagagttaaggaacaccaggatcctttcgtggccgttgcggaagaggcgacagagcaattttctctcgcgactgcaccgggtggcttccttgtcaatcttatccctccgttgaagcaccttcctgactggtttcctggagcaggattcaaacagacagctagggagtggcgcaacacgatcaatcgcatggcagatggaccctatcgctacgtgaaagaacaaatggcggctggtaatgccgaaccttcgtttacgtcgaagcttctcgaggagccagacatatcccaagaccgcgaattcgacatcaaatggtcctccgcatcgctgtattctggaggagcagacacgaccgtatcctctatacattccgtgtttttggccctctcccttttcccagaagtccaggcgaaagcgcaagcagaaatagatgccgtgattgggggtgatcgtttgccaacattcgaagatcgacgaaatctgccatatatcaatgccgtagtttcggaggtactgcggtggcatgcagtcgttcccacaagtgtccctcacagagtttctgaagacgatgtccataatggctacttcatccccaaaggatcgttggtgattgcgaacatctggtacctgttacacgaccccagtgtttatcatgacccgatggtattcaagccggaaagattcctgggtcccgttcccgagcctgatccgcgtaacgcttgcttcggttttggaaggcgaatctgtccaggtcgaatccttgctgatgcctcggtttacatctctgttgcgatgcttgtcgctacattcaatatttccaaagctatgaaggacggtgagatcgtggagccgtctgtcggccaaacaagcggaactatcagtcacccgcaaagctttgaatgcaccatcaagccacgaagccagaaagcagtagatctcatcctcagcgttggttgctga

SEQ ID NO: 12757 - protein, 520 aa, Coprinopsis cinerea okayama7#130
MTTSSTMSSTLSLDVLSGRTILLDTLAVALFLYYLIKLLGRGRLPAPLPPGPRRLPLLGNILDMPPSQEWLTFAEWGRKWGDMTSISIFGQEIIILNSIKLAVDILEKKGSIYSDRPVMEMGGELVGWKNTLVLIPYGDRFRSFRKMFHQVIGTHASMSNFHSVEEEETRKFLKALLKDPSNFVQHVRSTAGAIILRISHGYRVKEHQDPFVAVAEEATEQFSLATAPGGFLVNLIPPLKHLPDWFPGAGFKQTAREWRNTINRMADGPYRYVKEQMAAGNAEPSFTSKLLEEPDISQDREFDIKWSSASLYSGGADTTVSSIHSVFLALSLFPEVQAKAQAEIDAVIGGDRLPTFEDRRNLPYINAVVSEVLRWHAVVPTSVPHRVSEDDVHNGYFIPKGSLVIANIWYLLHDPSVYHDPMVFKPERFLGPVPEPDPRNACFGFGRRICPGRILADASVYISVAMLVATFNISKAMKDGEIVEPSVGQTSGTISHPQSFECTIKPRSQKAVDLILSVGC

SEQ ID NO: 12758 - DNA, 1182 bp, Branchiostoma floridae
  CDS (1)..(1182)
atgctgttaatcaccactaacgttatatggaacatttcaggcgtcgtgcaagaaccgtacggcaccacatggaaggagcaccgtaagttcaccttgatgagtctgcgagatttcggcgtcggaaagcggagtttggaagggaaaattcttgaagaaacgagggctctcagtgacgaaatattgaagaaagaaaaccaaggcttttgcatctcaaacatgatgcaagttaccgtttcaaacgtgatctgctcaatcgtgtttggctctcgctacgagtacgacgacccgaaattcatacgactgatagaagctatcgaccactttttctcgatcccgagaagtggtagcgctttgctaccgtcattaatccccattcttcgctacattcctgcagtaaatcgaaatttcttaaaggtacgtgcgtacatcggcactcacatcctggagcagatccaagaacacgaggcgacctttgacccgaacgacatccgggacctcatcgacgcctttctcctggagaaacgacggagacaagaagacgagaacacgacatttacggaacagcagaacattttggttgtgatggacctattcctggccggtacggagaccacgtccaccacactccgctgggccctgctctacatgattctccatccggacatgcaggagaaagtgcagcaggagatagacagcgtcatcgggcagagccaggacccttcaatggcgcatcgcactcaaatgccgtacacggaggcgacccttaccgaggtgagccggctggcaagcatcgctcccctctccgtgccgcacgccgcaagcaacgacgtcacattccggggctaccacattcctaagggcaccgttgtacaggctaacctgtgggcggtgcaccacgacccccagctctggccggacccgcaccgcttcgaccccgcccgtttccttgacgacgccgggaagttcgtgaagagagacgaagtcattccgttctcgatcggtcgtcgcgtttgccttggagagcagctggccaggatggagctcttcctgttcttcacctccctgctgcagcgctttagcttcaaactgccagagggcgcaccagtaccgtctgaagaaggggtgttcggagccacgcattctcccgtgccgttcaaacttgtggcggtagcgagggactag

SEQ ID NO: 12759 - protein, 393 aa, Branchiostoma floridae
MLLITTNVIWNISGVVQEPYGTTWKEHRKFTLMSLRDFGVGKRSLEGKILEETRALSDEILKKENQGFCISNMMQVTVSNVICSIVFGSRYEYDDPKFIRLIEAIDHFFSIPRSGSALLPSLIPILRYIPAVNRNFLKVRAYIGTHILEQIQEHEATFDPNDIRDLIDAFLLEKRRRQEDENTTFTEQQNILVVMDLFLAGTETTSTTLRWALLYMILHPDMQEKVQQEIDSVIGQSQDPSMAHRTQMPYTEATLTEVSRLASIAPLSVPHAASNDVTFRGYHIPKGTVVQANLWAVHHDPQLWPDPHRFDPARFLDDAGKFVKRDEVIPFSIGRRVCLGEQLARMELFLFFTSLLQRFSFKLPEGAPVPSEEGVFGATHSPVPFKLVAVARD

SEQ ID NO: 12760 - DNA, 1566 bp, Branchiostoma floridae
  CDS (1)..(1566)
atggggcctgtcctggacgctccttctcgtcctgagctgcctgacagcggtgcagtatctacagcgccccgccaacctgcctcccggtcccaggggctggcctgtaatcgggaacctctacagcttgagaaagacgtctctgtcccccatagcgttcttcaggtcttcgacccgaagccccacatcacgggcaagctggtctatgaaacacccctagttttgactgaatgggcgaaagaatatggagacatcgtaagctatcacactggttcccagcttcgaatcgtactaaacagttacgacgtagtgcccgaagcctttgtgaagaaatttggcatcttttccggcaggcccaaacctttaacatctttaatggcacaaagaaaggaaaaaggtattgtatgtgagagctacggacctaccttaaaagaacatcggaagttcagcatgaaaagtcttcgagacttcggcgtcggcaagagtagtctggaaggaaaaattgtcgaagaagcacgagctcttgcggataaaatctcaaaacatgagcatcaagagttccgcattcaccggatgacacgagctgccgtgtcaaacgtgattgcgtcgatcgtatttggctcccggtacgagtatgacgatcccgagttccaagcccttctgtactctgtatctgaatcattttcaatctctttattatcccttctacctgcaatattccccacccttcagtacatacctggcgcgaacaatggtctaaaaaggtatgaaaagatccttatgaaagtcttcaaacatgttcacgaagagattaatgagcacaagaaggatttcaacccacatgaaatcagggacttcatcgatgcgtttcttctagagataaagaacagagaaaatgaagaggacacggcatttacagaagagcagcttgtcacgatcgtggtagatcttttctttgctggattcgacaccacgtccaacactctccaatgggccctgctttacatgatcctccatccggacatccaggagaaagtacagcaggagatagacagcgtcatcgggaggaaccaggacccctcaatggtgcatcgcaatcaaacaccctatacggcagcaactctggcagaagtagagcggttggtgaccgttgcacccctggccttagcgcacacttgtaccgaggagacaacttttaggggctacaatatcccaaagggcaccgtcgtagaacccaacatctgggctattcaccacgatcctcagctctggccacacccgcacaagttcgaccccacccgtttccttgacgacaccgggaagtttgtaaagagggaagaactcattccgttttcaatcggacgccgtgcctgcctgggagaacagctggcaaggatggagctctacctgttctttacctaccttctgcagcgcttcagcttcaaactgccagagggcgcacctgtaccatctgcaaaaggagagtttggattaactcacgctcctattacttatgaactggtggctatgccaagacatttaccatctgaaacatgtccgacttactaa

SEQ ID NO: 12761 - protein, 521 aa, Branchiostoma floridae
MGPVLDAPSRPELPDSGAVSTAPRQPASRSQGLACNREPLQLEKDVSVPHSVLQVFDPKPHITGKLVYETPLVLTEWAKEYGDIVSYHTGSQLRIVLNSYDVVPEAFVKKFGIFSGRPKPLTSLMAQRKEKGIVCESYGPTLKEHRKFSMKSLRDFGVGKSSLEGKIVEEARALADKISKHEHQEFRIHRMTRAAVSNVIASIVFGSRYEYDDPEFQALLYSVSESFSISLLSLLPAIFPTLQYIPGANNGLKRYEKILMKVFKHVHEEINEHKKDFNPHEIRDFIDAFLLEIKNRENEEDTAFTEEQLVTIVVDLFFAGFDTTSNTLQWALLYMILHPDIQEKVQQEIDSVIGRNQDPSMVHRNQTPYTAATLAEVERLVTVAPLALAHTCTEETTFRGYNIPKGTVVEPNIWAIHHDPQLWPHPHKFDPTRFLDDTGKFVKREELIPFSIGRRACLGEQLARMELYLFFTYLLQRFSFKLPEGAPVPSAKGEFGLTHAPITYELVAMPRHLPSETCPTY

SEQ ID NO: 12762 - DNA, 1308 bp, Branchiostoma floridae
  CDS (1)..(1308)
atgtcttcattacccagtgtctggctaggcccacgcccagcagtcgtgctgagcggacaggacgctgtgaaagaggctctgcagaaacatggcgacgtcttttcgtcccgtccggacttgttcgtgtggagacggacaatagggacaagaggaaaaggtgttgtcacggccccttacggccccgagtggaaggagacccgaaaggtggcgctgacttggctcaacaccttcggggccgggaagcagagtctggagccgaccatcgtgcaagaggcgcaggatctggttcaagtattcaaggataaacgtggccaaccgttcgaccccacggtgtctctaggcctgtcggtttccaacgtgatctgttccgtagtgttcggccggagattcgaccatgacgatgatcgtttctcgcgcctgatggggcttatcaatcggtatctccacacgaatacgtcttctcaggcattgaacatctatccaatactgcggcacgtcccgtctttccgccggaagctggaggaggtggtgacgtgcagtgacgagattcgcagcttcgtcatcgacgtcatccaggagcacagggagacctttgacccgaacaacatcagggacgtcatcgatggttttctactggaggagcaccaagggaacagaatactgtctgaactgccagagaacaacattttcaacgtcatcaggaacctgttcttggcgggaaccgacaccaccgccagcacgctccgctgggccctgctgtacctggtcatgaacccggatgtgcagcgcaaggtgcaggaggagattgatgagtcgctcggaaaacagactccatctatgctgctgcgagaacaccttccctacacggaggcgaccatacgtgaggcccagcggatccggaccatcgttcccttgtctgctcctcacgagaccacagctcctgctacagtcctgggccatcagatccccgccggcaccttcatcctgcccaacctgtggtctctccacatggacccgaagtactggcccgatccggagcggttcgaccccacccgattcctggacagtgacggtcagctggtacagaggacggagtcctttctgccgttcagcacaggcatggcagttctcactttgtgcctcggagaacagctggccaagttcgagctgttccttttcttcacctctctgctgcagcagttcaccttcaagctgccagagggcgctccaccgccagacacggaggggattttcgggctcgtgttttctccgaagccgtttaaaatctgtgcagtcccgcgattttag

SEQ ID NO: 12763 - protein, 435 aa, Branchiostoma floridae
MSSLPSVWLGPRPAVVLSGQDAVKEALQKHGDVFSSRPDLFVWRRTIGTRGKGVVTAPYGPEWKETRKVALTWLNTFGAGKQSLEPTIVQEAQDLVQVFKDKRGQPFDPTVSLGLSVSNVICSVVFGRRFDHDDDRFSRLMGLINRYLHTNTSSQALNIYPILRHVPSFRRKLEEVVTCSDEIRSFVIDVIQEHRETFDPNNIRDVIDGFLLEEHQGNRILSELPENNIFNVIRNLFLAGTDTTASTLRWALLYLVMNPDVQRKVQEEIDESLGKQTPSMLLREHLPYTEATIREAQRIRTIVPLSAPHETTAPATVLGHQIPAGTFILPNLWSLHMDPKYWPDPERFDPTRFLDSDGQLVQRTESFLPFSTGMAVLTLCLGEQLAKFELFLFFTSLLQQFTFKLPEGAPPPDTEGIFGLVFSPKPFKICAVPRF

SEQ ID NO: 12764 - DNA, 1371 bp, Branchiostoma floridae
  CDS (1)..(1371)
atggcagacttcccccgttctcgaccgagaggactgccgattgtcgggaacgccataagtctgatcaagaagtacggtgacgtgtttaccgtgtattttggaccctcgcggacggtagttctgaacggttacgccgccatccacgaggcactggtgaagaacgcggagaacttctcaagccgttcgccgaatcaagcaatgaggactccagatggaaagacacacggaatagctgctgaaccttatggtcccaagttgaaggaacaccgtaagtttgccatgatgagtctgcgtgacttcggagttgggaagagaagtcttgaggggaagattctcgaagaggcacgaggtctcggtgatgagatctgcaaaacagaaagccgagccttttgtatctctcagatgatgcagaatgctgtttctaacgtcatctgttcaattgtgttcggccgccgttatgagtatgacgacacggcattcaaagatcttctaaaggcaataaatggagtattctctcgaagctttgcagtgatatttgcgcaagttgttcgtccaatgaggatcctgccaggagttcggaagccgtttcaagaacttaaacggaaccaggcaaaactcattaaccacattagggacagaatcaaagaacacgaagacacgtttgaccctaatgatatccgtgattttattgacgcatttctcttggagtctaaaaaacgacagggagacgagaactctacatttactgatcaggaacatgccgcgatcgtctatcaactgttcctgggaggaactgacacaacagctatcaccttacgtttggccctgctctacatgatcctccatccggacatccaggagaaagtacagcaggagatagacagcgtgctgggacctaaccaggagccggcaatggcacatcgtagccaaatgccattcacggaggccacactggcagaagtgagccgactggcaactgtgacgccgatgaccatccctcacgccacgagcaacgatacagcattcagggggtacaacatcccaaagaacacgtcggtaacagtaaacatctggtccgtgcaccatgacccaaatctgtggccggagccggacaagtttgaccccactcgctttattaatgacgagggcaaatatttcaagaagaatgaggttattgctttctccatgggccgacgtgtctgtcttggtgaacagctagccaggatggagctcttcctcttctttacatctctgctgcagcgcttcaccttcaagctgccagagggcgctcctaaaccttctgagaaaggaatccatgcagcattgcatcaccctgtgcccttcaagctaattgctgaaccaagggaatga

SEQ ID NO: 12765 - protein, 456 aa, Branchiostoma floridae
MADFPRSRPRGLPIVGNAISLIKKYGDVFTVYFGPSRTVVLNGYAAIHEALVKNAENFSSRSPNQAMRTPDGKTHGIAAEPYGPKLKEHRKFAMMSLRDFGVGKRSLEGKILEEARGLGDEICKTESRAFCISQMMQNAVSNVICSIVFGRRYEYDDTAFKDLLKAINGVFSRSFAVIFAQVVRPMRILPGVRKPFQELKRNQAKLINHIRDRIKEHEDTFDPNDIRDFIDAFLLESKKRQGDENSTFTDQEHAAIVYQLFLGGTDTTAITLRLALLYMILHPDIQEKVQQEIDSVLGPNQEPAMAHRSQMPFTEATLAEVSRLATVTPMTIPHATSNDTAFRGYNIPKNTSVTVNIWSVHHDPNLWPEPDKFDPTRFINDEGKYFKKNEVIAFSMGRRVCLGEQLARMELFLFFTSLLQRFTFKLPEGAPKPSEKGIHAALHHPVPFKLIAEPRE

SEQ ID NO: 12766 - DNA, 1404 bp, Branchiostoma floridae
  CDS (1)..(1404)
atgcggcgacccccaaacttccccccaggtccacggggctggccgctgtttggcgtgtcaaaggcaggccagttagccgtcaccgagtggatcccgaagtacggagacatcatcggctactaccgcgggccggttcgggtggtctcgctcggcagttacgatgtgatccgggaggccttcgtcaagaacgctgaacatttctccagcagacccagacccttgaacccaaccttggcaacttacaagactaaaggcgtcgtgcaagagccgtacggcaccacatggaaggagcaccgcaagttcaccttgatgagtctgcgagacttcggcgtcggaaagcggagcttggaaggaaagattcttgaagaagtgagggctctcagtgacgagatactgaagaaagaaaacaaaggcttctgtatctcaaacatgatgcaagttaccgtttcaaacgtgatctgctcaatcgtgtttggctctcgctacgagtacgacgacccgaaattcatacgactgattgaggctatcgaccactttttctcgatccctagaagtggtagcgctttgctaccgtcattaatccccattcttcgctacattcctgcagtaaatcaaaagttcttaaagttacgtgaagtcgaggcgtacatcggcactcacatcttggagcagatccaagatcacgaggcgacctttgacccgaacgacatccgggacctcatcgacgcctttctcctggagaaacgacggagacaaggagacgagaacacgacatttacggaacagcagaacatcttggttgtgatggacctgttccttgccggtactgagaccacgtccaccactctccgctgggccctgctctacatgatcctccatccggatatgcaggagaaagtgcagcaggagatagacagcgtcatcgggcagaaccaggacccctccatggcgcatcgcactcagatgccgtacacagaggcgacacttaccgaggtgagccggctggcaagcatcgctcccctctccgtgccgcatgcaacaagcaacgatgttacattccggggctacaacattcctaaggacaccgttgtacaggctaacctgtgggcggtgcaccacgacccccagctctggccggacccgcaccgcttcgaccccgcccgtttccttgacgacgccgggaagttcgtgaagagagacgaagtcattccgttctcgatcggtcgtcgcgtttgccttggagagcagctggccaggatggagctcttcctgttcttcacctccctgctgcagcgcttcagcttcaagctgccagatggcgctcctgtaccgtctgaagaaggggtgttcggagccacgcattctcccgtgcccttcaaacttgtggcggtagcgagaaactag

SEQ ID NO: 12767 - protein, 467 aa, Branchiostoma floridae
MRRPPNFPPGPRGWPLFGVSKAGQLAVTEWIPKYGDIIGYYRGPVRVVSLGSYDVIREAFVKNAEHFSSRPRPLNPTLATYKTKGVVQEPYGTTWKEHRKFTLMSLRDFGVGKRSLEGKILEEVRALSDEILKKENKGFCISNMMQVTVSNVICSIVFGSRYEYDDPKFIRLIEAIDHFFSIPRSGSALLPSLIPILRYIPAVNQKFLKLREVEAYIGTHILEQIQDHEATFDPNDIRDLIDAFLLEKRRRQGDENTTFTEQQNILVVMDLFLAGTETTSTTLRWALLYMILHPDMQEKVQQEIDSVIGQNQDPSMAHRTQMPYTEATLTEVSRLASIAPLSVPHATSNDVTFRGYNIPKDTVVQANLWAVHHDPQLWPDPHRFDPARFLDDAGKFVKRDEVIPFSIGRRVCLGEQLARMELFLFFTSLLQRFSFKLPDGAPVPSEEGVFGATHSPVPFKLVAVARN

SEQ ID NO: 12768 - DNA, 1548 bp, Vitis vinifera
  CDS (1)..(1548)
atgggcacctttactgatctccaatactataccatcttcttcatcctctccttcatttcaaccctcctgctaagatccttcctaaacagaatcacaacaccaactacccgtcttcgcctcccacctagcccaccggctcttcccatcatcggccacctccgcctccacttcctttcttcatccatatacaaatccttccacagcctctccacccagtatggccccctcctttatctccattttggggcctccaggtgcctacttgtttcttcagcagcaatggctgctgagatcttcaaaacaaacgatctcgcctttgctagtcgccctaggttagcttttgccgataaactaccttatggaacctctagttttatcacagctgagtatggagattactggaggttcatgaagaaactgtgcgtgacggagctgcttggagtcaagcaacttgaacgctcacgggtagttagaagagaagaactggattgtttcttgaagaaattggtggagagtggtgagaatggtgaggctgtggatgttagggctgaggtgatgaagctcacaaaccacagtacatgccgggtgattctgagcgcaaggtgttcagaggacaatgatgaagctgaaaggttgatagagatggtgacggagtgggttgagttggctgtaaagatgtcttttggggatgtgtttggccctctgaagaggttgggtttctggatctatgggaggaaagccgtagagctgacactgaggtatgatgagattctggagaagatgttgaaggagcacgaagagaggggaaagagagaagacaaggatttgatggatgttctcttagaggtttatcaagatgataaggctgggatgaagctcaccagaacccatatcaaggctttcattctggatctctttatggcaggcaccaatacctcagcagaaagcatgcaatggacaatagccgagctcattaaccatcctgatgtgttcaagaaggtccgggaagagatagatttagcagtcggacgcactagacttgttgaggaatcagacatcccaaaccttccctacttgcaagcagttgttaaggaaacactgagactacaccctccagcgccagtggccacaagagaatgccgcaaaaactgtaaaattggtggattcaatatacccgaaaaaactgcagtagcaatcaatctgtatgctattatgagggatccagagatatgggatgatcctactgagtttaggccagagaggttcttggttccctcaaaagaacaagtggatttagaccaaactaaggggcaaaacttcaattttgtcccatttgggggtggaagaagagggtgtccagggactctgttggcgtttgccatgatgaatactacagtagcagctatagttcaatgctttgattggaagcttggtggagatggagatggtggtaaggttgatatgcagtcaggaccaggcctgaccttgagcatgcttcacccactcaaatgccatcctatagttcactttaacccatttgagggatag

SEQ ID NO: 12769 - protein, 515 aa, Vitis vinifera
MGTFTDLQYYTIFFILSFISTLLLRSFLNRITTPTTRLRLPPSPPALPIIGHLRLHFLSSSIYKSFHSLSTQYGPLLYLHFGASRCLLVSSAAMAAEIFKTNDLAFASRPRLAFADKLPYGTSSFITAEYGDYWRFMKKLCVTELLGVKQLERSRVVRREELDCFLKKLVESGENGEAVDVRAEVMKLTNHSTCRVILSARCSEDNDEAERLIEMVTEWVELAVKMSFGDVFGPLKRLGFWIYGRKAVELTLRYDEILEKMLKEHEERGKREDKDLMDVLLEVYQDDKAGMKLTRTHIKAFILDLFMAGTNTSAESMQWTIAELINHPDVFKKVREEIDLAVGRTRLVEESDIPNLPYLQAVVKETLRLHPPAPVATRECRKNCKIGGFNIPEKTAVAINLYAIMRDPEIWDDPTEFRPERFLVPSKEQVDLDQTKGQNFNFVPFGGGRRGCPGTLLAFAMMNTTVAAIVQCFDWKLGGDGDGGKVDMQSGPGLTLSMLHPLKCHPIVHFNPFEG

SEQ ID NO: 12770 - DNA, 1575 bp, Vitis vinifera
  CDS (1)..(1575)
atggacactggtactaccttctacttcgtcccatacatcctttgtatcattccaagtctcctcctcctctccttcctcaaaaccctagtaaaacctcccactgcatctcgacctccacccagccccccgacgctccccatcatcggtcacgtccatcttctcacctccatccttcccaaatgcttccaaaccctagcctcccgttacggtccccttatgcagcttcgtctcggttcatcaacttgtatcgttgtatccaacgctgccgttgctaaagaagtcatgaaaacccatgaactagccttcgcctctcgccctgaattcgggtcctcagaacacttcatctacaaaggatccaggttcatcatggcggagtacggcccatactggcgcttcatgaagaaactgtgtctgacaaagcttctcgcggctcccaccctcgatcgactaatccatatccgagaggaagagatgggaaagctcatggacacactgattcagaggtcgaggaaaggggaagcttcagatttgagcaaggagctgacaacgttgacaagcaatatcatatgcaggatggcgatgagcacaaggtgcagtagaaacggtaatgaagctgaggagatgatggagttggtgaagggggtggtggagcttggagggaagctgtctataggagatgctttgggggctttggggagactagacttattgggatatgggaaaaagcttgaagcaaagctgaggaaatttgacagtttggtggagaagatcatggaggagcatcagaggaaaaatgggatggtgaaaggtaacggaagagaagggagagatcttatggatattctactggagatccatgaagacccttctgctgaattgaagttgaccaggactgacatcaagtctttcttccttgacatattactggcaggaactgacactcaatcagtggccacacaatgggccatggcggagctcatcaaccgtccacgtgtcttcaacaagctcagagaggaaattgattcaattgtggggtccactaggctggtcaaagaatcggacgtcccaaatctcccctacctccaagcggttgtcaaagaaacccttagactccacacatcagcaccgttcatcctcagacagtgcattcaagattgcaagattgacggctatgatatcaaggccaatacacgtgtcatgattagcgcctttgccatcatgcaggacccgaactcgtgggaagatccaagtgagtttatacccgagaggttcttggtcaactcgggtgagaacatggttgaccatgtgactgaaatcaagggccaggattttaggtatgtcccatttgggagtggaaggagaggatgccctggtgctgcacttgcaatgatggtgatgcagatgacaatcggacggttggttcaatgctttgactggagagtcaaagatggggaaaaggttgatttgaatgtaggcccaggattttcagctgaaatgaaaaccccacttgtgtgttttacaagcatacactttgatccccttggcgaagtatatgcaaggcacgtggaagggtga

SEQ ID NO: 12771 - protein, 524 aa, Vitis vinifera
MDTGTTFYFVPYILCIIPSLLLLSFLKTLVKPPTASRPPPSPPTLPIIGHVHLLTSILPKCFQTLASRYGPLMQLRLGSSTCIVVSNAAVAKEVMKTHELAFASRPEFGSSEHFIYKGSRFIMAEYGPYWRFMKKLCLTKLLAAPTLDRLIHIREEEMGKLMDTLIQRSRKGEASDLSKELTTLTSNIICRMAMSTRCSRNGNEAEEMMELVKGVVELGGKLSIGDALGALGRLDLLGYGKKLEAKLRKFDSLVEKIMEEHQRKNGMVKGNGREGRDLMDILLEIHEDPSAELKLTRTDIKSFFLDILLAGTDTQSVATQWAMAELINRPRVFNKLREEIDSIVGSTRLVKESDVPNLPYLQAVVKETLRLHTSAPFILRQCIQDCKIDGYDIKANTRVMISAFAIMQDPNSWEDPSEFIPERFLVNSGENMVDHVTEIKGQDFRYVPFGSGRRGCPGAALAMMVMQMTIGRLVQCFDWRVKDGEKVDLNVGPGFSAEMKTPLVCFTSIHFDPLGEVYARHVEG

SEQ ID NO: 12772 - DNA, 1539 bp, Vitis vinifera
  CDS (1)..(1539)
atggctgacttccaaggttacatcactctcttcctaatttggttagtctccaccatcctgattcgagccatcttcaccaaatggcgaacaaccgttcatcttccaccaagcccactagccctgccaatcattggtcacctccatctccttgctcctatacctcaccaagcttttcacaagctctcacaccgctatggaccattaattcatctcttcctcggatctgtcccctgtgttgttgcttcctccccagaaatggccaaagagttcctcaaaactcatgaaacttcattctctaatcgacccaaaattgctgctgttgatttcttgacatatggctcagctgacttttcctttgctccctatgggctctactggaagttcatgaagaaactttgcatgtcagaacttctttctggtcgaaggctagaccagttctatcacattagatgtacagagataaaatggtttatgcagtcaataatggaaaaagctgaagccggtgaggaaattgatgttcgagaagaacttataagggtgactaacaatgtgatatcaacaatgaccatgagtctaaggtgttctgatagtgaaaatgaagctggtgaagtaaagagattggtgcaagaagtagctgagctcactggaaagtttaatttgtcagattttatttggttttgtaagaatttagatttgcaaggatttgggaaaaggctcaaggaagttcatgagaggtttgactcaatgatagagaagattatgagggagcatgaggaggcaaggaagaaggagatgggtggtggaggcgatgcagcaaaggatgtacttgatattttacttgacatatcagaagatcaaagctcagaaataaaattaacaagagagaacatcaaggccttcatcctggatatatttgcagcagggactgacacatctgccattacaaccgaatgggcactagcagagctgatcaacaacccaaatattatggagaaagcaagacaagagatagattccgtggttggcaaaaacaaactagtagaagaatcagatatcgcaaaccttccctacctccaagccattgttaaggaaacactaaggctacatcccacgggtccattgattgttagagagtcatctgaggactgcaccattgggggttatgatattcccgcaggaacccggctatttgttaatgtgtgggctataggaagggatccaaaccactgggagaacccacttgagttccagcctgagaggtttgttaatgaagacgggactttaaagagccagttggaagttaggggacaacatttttatctgctgccatttggaagtggaagaagaggttgccctggaacttcactagcactacaggtcgtccaaacaagccttgctgctatgattcagtgctttgagtggaaggtgagggacgggggcaatggaactcttaacatggaagagggaccagggctcactcttccaagggctcatcctttgatttgtgtcccagtggctagactccacctatttccatag

SEQ ID NO: 12773 - protein, 512 aa, Vitis vinifera
MADFQGYITLFLIWLVSTILIRAIFTKWRTTVHLPPSPLALPIIGHLHLLAPIPHQAFHKLSHRYGPLIHLFLGSVPCVVASSPEMAKEFLKTHETSFSNRPKIAAVDFLTYGSADFSFAPYGLYWKFMKKLCMSELLSGRRLDQFYHIRCTEIKWFMQSIMEKAEAGEEIDVREELIRVTNNVISTMTMSLRCSDSENEAGEVKRLVQEVAELTGKFNLSDFIWFCKNLDLQGFGKRLKEVHERFDSMIEKIMREHEEARKKEMGGGGDAAKDVLDILLDISEDQSSEIKLTRENIKAFILDIFAAGTDTSAITTEWALAELINNPNIMEKARQEIDSVVGKNKLVEESDIANLPYLQAIVKETLRLHPTGPLIVRESSEDCTIGGYDIPAGTRLFVNVWAIGRDPNHWENPLEFQPERFVNEDGTLKSQLEVRGQHFYLLPFGSGRRGCPGTSLALQVVQTSLAAMIQCFEWKVRDGGNGTLNMEEGPGLTLPRAHPLICVPVARLHLFP

SEQ ID NO: 12774 - DNA, 1542 bp, Vitis vinifera
  CDS (1)..(1542)
atggctgatttccagaactacatcccttacattctcatcgggctcctatcagccatcatggtccggcctttcttcaccaaatatcgaagaacaaaacttcgtcttccacccggccccgttgccctacctatcattggacacctccaccttcttcttcctgtctcgaacgttcatgtagtctatcagaagctctcatggcgctatggacccctaatgcacttcttctttggctctgtcccttgtgttgttgtgtcctctccagagatggcaaaagagttacttcaaaaccaagatgttgtattctccaaccggcccaaaaaggtcgttgctgaacttgtagcctatggcgacgctgaccttacatatgctccatatggagcaaagtggagattcatgaagaaactgtgtatgaccgaactacttggcatgcagacgatacaccactttggtcccattaggcgcgaggagaggaaccgactcttacagagactactaaaaaaggccaaagctggtgaggcggttgatgttaaagctgagcttttgaggctaaccggtgacatagtgtcaagaatgagtatgagccgaagatgctcagacaatgaagatgaggctgccggggtgaagaagtcgatactagaaatggccagtatggcaatgaagcttaatgtgacagattttatctggttctgtaagaaattagatattcagggtttcttaaagaaggcaaaggcagctcgtgataaatacgactccatgatcgagaggattataagcgagcatgaagaggcgaggaggaagaaggaagcaggtgatgggaatggtgaagtgaaggatttgattgatatgttacttgatacaacagaagacgagaaggctgagatgagattgacaagagagaacattaaggccttgatgctgaatatgattggaggagggacaacttcacctgctcatgcgatggaatgggcactcgcagaactaattaaccgcccaaatcttatggagaaagcaagacatgaaattgattctgtcgtcggaaaggacagactggtggaagaatcagatattaccaaccttccctatgttgaggccattgtgagggaaacgctaaggcttcaccctccgggtcatttcattgttagggaatcaattgaagactgcaaagttggaggctatgacattcctgcgaagacccagctaattgttaatgtgtgggctatcggaagggatccaaattcctgggagaacccactcgagttccagcctgagagatttctcaacgagggaggtataaacaggcgattgaatgtaagaggacagcagttccatctgctgccctttggtagtggaagaagactttgccccggaactacactagcactgcaggttctccatacaaccattgctgctctcattcagtgctttgactggaaagtaaacggcaatattgatatgaaagagggatttggctcaacccgagcaacccccttggtctgcgtcccagtggtcaggctgaacccactaccaatatatacaagttga

SEQ ID NO: 12775 - protein, 513 aa, Vitis vinifera
MADFQNYIPYILIGLLSAIMVRPFFTKYRRTKLRLPPGPVALPIIGHLHLLLPVSNVHVVYQKLSWRYGPLMHFFFGSVPCVVVSSPEMAKELLQNQDVVFSNRPKKVVAELVAYGDADLTYAPYGAKWRFMKKLCMTELLGMQTIHHFGPIRREERNRLLQRLLKKAKAGEAVDVKAELLRLTGDIVSRMSMSRRCSDNEDEAAGVKKSILEMASMAMKLNVTDFIWFCKKLDIQGFLKKAKAARDKYDSMIERIISEHEEARRKKEAGDGNGEVKDLIDMLLDTTEDEKAEMRLTRENIKALMLNMIGGGTTSPAHAMEWALAELINRPNLMEKARHEIDSVVGKDRLVEESDITNLPYVEAIVRETLRLHPPGHFIVRESIEDCKVGGYDIPAKTQLIVNVWAIGRDPNSWENPLEFQPERFLNEGGINRRLNVRGQQFHLLPFGSGRRLCPGTTLALQVLHTTIAALIQCFDWKVNGNIDMKEGFGSTRATPLVCVPVVRLNPLPIYTS

SEQ ID NO: 12776 - DNA, 1548 bp, Vitis vinifera
  CDS (1)..(1548)
atggttgatgtccaagactatatcattctcttcctcatttggctcgtatctgtcgtcgtggttcatgccttgttcaccaagtaccggaccagggtgcgacgaccaccgggcccactagccctacctatcatcggacacttccacctcctcggctcaaaacctcaccaatcccttcacaagctctcgctccgctatggaccgctatttcaactcttccttggttccatcccttgtgtggtagtttcctctccggagatggcaaaagagtttctccaaacccatgatatttcattctccaaccgacccaaactcagcaatgctgattacctaacctacggctcggttgatcttgccttttcttcatatgggccctattggaaattcatgaagaaactttgcatgaccaaacttctcggcctccaaacactagagaaatttgtcccagttatgagagaagagagacatctatttttgcaaacactattgggaaaagctgaagcaggtgagacagttgatgttaaaggagagattatgaggctaacaaacaacttagtaacaagaattcttctgaggcacaggtgttctgggaatgaggatgatgctagcgaagtgagagagtttatgaaagagatagtacagctcacaggcagttttaacttggcagattttatctggttttgtaagaatttggatctgcaaggatttaagaagagagtcaaagaagctcgtggaaggtttgatacaatgatggaaaggattatgaaggctcatgaagaagaaaggaggaagaaaagggatccgaataatggaggagacacagtgaatgacttgcttgatattttacttgatataatcgaagatgagaaagaggagatgagactgacaagagagaacgtcaaggccatcatcctgaatatttttggagggggaacggatacatctgctgcagcagcagtatgggcagtagcagagctaattaaccacccaaacattatggagaaagcaagacaagagatagattctgtagtgggaaaggatagacttgtggaagaatcagatatcgcaaaccttccttatcttcaagccattgttaaggagacacttaggctccatcctcctggtgcagtgatcgctagagaatctattgaagattgcaccatcagaggttatgatattcctacaaagacacaattatttgttaacttgtgggctattggaagggacccaaattactgggagaacccacttgagttctggcctgagaggttcctgagagaggatgggagtttaaagagtcagttggatgtaaaggggcaacattttcatctactgccatttgggagtggaaggagaatatgccctggaatttcactagcactacaggttgttcagacaagcttggctgctatgattcaatgttttgaatggagggttggtggaggaaatggaaatgttgatatggaagagggacctgatgcagccctcgcacaccctttggtttgtgtcccagtggccaggttgaatccatttccaaattatacaatgtaa

SEQ ID NO: 12777 - protein, 515 aa, Vitis vinifera
MVDVQDYIILFLIWLVSVVVVHALFTKYRTRVRRPPGPLALPIIGHFHLLGSKPHQSLHKLSLRYGPLFQLFLGSIPCVVVSSPEMAKEFLQTHDISFSNRPKLSNADYLTYGSVDLAFSSYGPYWKFMKKLCMTKLLGLQTLEKFVPVMREERHLFLQTLLGKAEAGETVDVKGEIMRLTNNLVTRILLRHRCSGNEDDASEVREFMKEIVQLTGSFNLADFIWFCKNLDLQGFKKRVKEARGRFDTMMERIMKAHEEERRKKRDPNNGGDTVNDLLDILLDIIEDEKEEMRLTRENVKAIILNIFGGGTDTSAAAAVWAVAELINHPNIMEKARQEIDSVVGKDRLVEESDIANLPYLQAIVKETLRLHPPGAVIARESIEDCTIRGYDIPTKTQLFVNLWAIGRDPNYWENPLEFWPERFLREDGSLKSQLDVKGQHFHLLPFGSGRRICPGISLALQVVQTSLAAMIQCFEWRVGGGNGNVDMEEGPDAALAHPLVCVPVARLNPFPNYTM

SEQ ID NO: 12778 - DNA, 1551 bp, Vitis vinifera
  CDS (1)..(1551)
atggctgatgtccaagaccacgtcattctgttcctcatctggctcatatctttcatcctggcccgagccttgttcacaaaataccggaccagggtgcgacgtccaccgggcccactagcactacctatcatcggacacttccacctccttggctcaaaaccttaccaatcccttcacaaactctcactccgctatggaccgctttttcaattctactttggttccatccctagtgtggtagtttcctccggggagatggcaaaagagtttctccaaacccatgacatttcatttgccaaccgacccaaactcagcaatattgattatctattctatggctcaaatgatattgcctttgcttcatatggaccctattggaaattcatgaaaaaactttctatgaccaaacttctaggtgtccaaacactagataaatttgtcccagttatgagagaagagagacatctatttttgcagacactactgggaaaagctgaagcaggtgaggcggttgatgtaaagaaagagattatgaggctaacaaacaacttaataacaaaaatgatcatgagacacagatgttctgacagcgaagatgatgctactgaagtgaaggagttgatgacagagatgatgaagctcataggcagttttaacttgtcggattttgtctggttttgtaagaatttagacctacaggggtttaagaagagggtcaaagaagctcgtgcaaggtttgatgcaataatggaaagggtcatgaaggctcgtgaagaagaaaggaggaagaagagggacatgaatgatgcaggagtcgcaatgaatgactttcttgatattttacttgatatcatggaaaatgagaaagaggagatgagactgacaagagagaacgtcaagggcatcattttggatatttttggagggggaacagaaacatctggtaccgcagcaatatgggcagtagcggagctaattaaccacccaaacattatggagaaagcgagacaagagatcgattctgtagtgggaaaggacagacttgtggaagaatcagatatcgcaaaccttccttatcttcaagccattgttaaggagatacttaggctccatcctcctggcgcattaatcgctagagaatctacagaagattgcaccattggaggttatcatattcctgcaaagacccaactatttgttaaccgttgggctattggaagggacccaaactactgggagaacccacttcagttcttgcccgagagattcctgacagaagatgggagtctaaagagtcacttggatgtaaggggccaacattttcatctgctgccatttgggagtggaaggagaatttgccctggagtttcactagcactgcaggtaattcagacaagcctggctgctatgatccagtgttttgaatggagagttggtgatggaggaaatggaaatgttgatatggaagaggggcctaacgcagtccttgtacaccctttgatttgtgtcccagtggctagggtcaatccatttccaaaatatacaatgtaa

SEQ ID NO: 12779 - protein, 516 aa, Vitis vinifera
MADVQDHVILFLIWLISFILARALFTKYRTRVRRPPGPLALPIIGHFHLLGSKPYQSLHKLSLRYGPLFQFYFGSIPSVVVSSGEMAKEFLQTHDISFANRPKLSNIDYLFYGSNDIAFASYGPYWKFMKKLSMTKLLGVQTLDKFVPVMREERHLFLQTLLGKAEAGEAVDVKKEIMRLTNNLITKMIMRHRCSDSEDDATEVKELMTEMMKLIGSFNLSDFVWFCKNLDLQGFKKRVKEARARFDAIMERVMKAREEERRKKRDMNDAGVAMNDFLDILLDIMENEKEEMRLTRENVKGIILDIFGGGTETSGTAAIWAVAELINHPNIMEKARQEIDSVVGKDRLVEESDIANLPYLQAIVKEILRLHPPGALIARESTEDCTIGGYHIPAKTQLFVNRWAIGRDPNYWENPLQFLPERFLTEDGSLKSHLDVRGQHFHLLPFGSGRRICPGVSLALQVIQTSLAAMIQCFEWRVGDGGNGNVDMEEGPNAVLVHPLICVPVARVNPFPKYTM

SEQ ID NO: 12780 - DNA, 1551 bp, Populus trichocarpa
  CDS (1)..(1551)
atggctgccatgactgccattcaatatgtcattgccctctttgtcctctggtttatcaccgtctttcttcaatacattttcaagagacccggcaagaaacctgccggttattgcccccctccaagcccaccaacacttcctttgatcggtcacctccatttactaaccccagtagcatacaaaggcttccatgctctcaacaacaaatatggccctctcctctatctccgtttggccacgtatcctgctgttcttgtctcatcagctccagtggccactgagatcttcaaggcacaagatgtccattttgcctctagaataaaatccccctttgaggataatttactatttggaagctcaacaagctttttcaatgccccatatggggattactggaaattcatgaagaagatttgcatgacagaattgttggggagcagccagatgaagaagttaaagaatgttaggcatgaagaagttgtgagatttttgtctaaaatgttggagataggtcaaaaaaatgatgttgcagatttgagtgctgaggtattaacactagcaaacaatgctacttgcaggatgatcatgagtgctaggtgttcgggggaagataatcaggctgatcagtgtagagggctggtgagtgaatcctttgatctggctgcaaagcttgctgtatgtaacttgtttggtcccttgaaaaggataggtacttggtacttaagaaagaaaattgctgctgtgcccaaaaggtatgatgaattgtttgagaacatcttggtagagcatgaggaaaaagcaaagagaggaggtccacacatggagaataaagacttgatggatattctcttggaagtttatcatgataaaaatgctgaaatgaggataaccaggaagcaaatgaagactttctttctggatcttttcactggaggtacgagtactacagcagatgccgtactatggatcttaggggagcttgtcaaccatcctgcatcattcaagaagctgagagaggagatagattcagttgtcgggacagagagacttgcagatgaagcagatatcccaaatatgccttattttcaagcatgtgtgaaggaggcaatgagactacatccaccagtgcctttatttgatagagtatgccgtgaagattgcaaacttgcaggacatgacatccccaaaggaattacaatgataatgaatgcatactctatcatgagggatccaaagatatgggataaccccaacgacttcattccagagaggttcttgacagaacatgacagcaccaaggggccgcaaaacctacagatttacgtcccttttggcgggggaaggagaatgtgccctgggactaacatgtcctcaagtttgatcaattgcagtgtttcagctatggttcaatgttttgattggaaggtggtcggaggagatggcccagatggatcaaaagttaacatggacactaaagcaggtgtgactatgagcctggataaaccattcatgtccactcctgttctccaccgcaatttattttctgcctga

SEQ ID NO: 12781 - protein, 516 aa, Populus trichocarpa
MAAMTAIQYVIALFVLWFITVFLQYIFKRPGKKPAGYCPPPSPPTLPLIGHLHLLTPVAYKGFHALNNKYGPLLYLRLATYPAVLVSSAPVATEIFKAQDVHFASRIKSPFEDNLLFGSSTSFFNAPYGDYWKFMKKICMTELLGSSQMKKLKNVRHEEVVRFLSKMLEIGQKNDVADLSAEVLTLANNATCRMIMSARCSGEDNQADQCRGLVSESFDLAAKLAVCNLFGPLKRIGTWYLRKKIAAVPKRYDELFENILVEHEEKAKRGGPHMENKDLMDILLEVYHDKNAEMRITRKQMKTFFLDLFTGGTSTTADAVLWILGELVNHPASFKKLREEIDSVVGTERLADEADIPNMPYFQACVKEAMRLHPPVPLFDRVCREDCKLAGHDIPKGITMIMNAYSIMRDPKIWDNPNDFIPERFLTEHDSTKGPQNLQIYVPFGGGRRMCPGTNMSSSLINCSVSAMVQCFDWKVVGGDGPDGSKVNMDTKAGVTMSLDKPFMSTPVLHRNLFSA

SEQ ID NO: 12782 - DNA, 1536 bp, Populus trichocarpa
  CDS (1)..(1536)
atggcaacagctgatgttctgttcttgttttgtttcctcatttccagttggttcctttccactatcctttgtaaatccatcaaaaactatgtacattttggaaccaagttgcgacccccaccaagtccaccagctctgcctatcattggcaaccttcacttaacaggctcggttttgtccaagtccttgcacaacctagctcataaacatggtccaattattcaactccatttgggcgcatcgacatgctatgttgtttcagatgccatgattgccaaagaaatcttgaaaaccaatgagctcaatttcatttctcgtccagaatttgattgctcggataacaacatatacagggggtctggttttgtcactgcaccatacaacacctattggcggttcatgaagaaactatgcatgaccaggcttcttgccacttcacagcttaatcagcttgtgcatgtaagagaggaagagattatgaaacttgtggactcgttaattaatatttcaagagaagggaagtcttgtaatttaaagcaggagttcatcaccatgacaaataatgtcatttgtcgaatggctatgagcactagatgcgtagaggatgatgctaatgaagctaaggaggtaaaggaattggttaatcaaattgtggtgcttggaggcaagttgagtgcagacttgttcggacatggaagaatgcttcgaaatgcactggagaaattcgatcgtttagtagaaaagatcatcaaggagcatgaagatcagagggagatgaaagacatggaaggatcaggatggagggatttgatggatattctattagcaatatctggagactcgaatgctgaaatgaacttgactagaaaggatatcaaggctttcttcctagacatcatcatggctggcactgatacatcagcactcaccattcaatggatcatggctgagctaatcaaccatcagaagattttcaacagactgagggaagaaattgatttagcggttgggacgaaaaggctagtcaaagaatcagatatcttaaatcttccatacttacaagctgttgtgaaggaaacgctcagactacaccctccatctcccataatcctaagacaatgtgctgaagattgcaagattaatggctttgatttaaagggtaagactaggatgctaatcaacctttacagtatccaacgagatccgaattcatggacagatcctgaagaattcaacccagatagattcatggttgactctaacataaatcatttacagaatcaaatggaagtgaaagggcaaatgttcaattatctcccatttgggagtgggaggcgaggatgccctgcctcatcacttgctttagtggttgttcaagctgctattggagccttggtccaatgctttgactgggaagtcataggtgaagggaagattaatttgcaagaggattcaggatttagcatggggatggcaagcccacttgtgtgctaccccatcacccgttttaatccattaagttttaataagagatga

SEQ ID NO: 12783 - protein, 511 aa, Populus trichocarpa
MATADVLFLFCFLISSWFLSTILCKSIKNYVHFGTKLRPPPSPPALPIIGNLHLTGSVLSKSLHNLAHKHGPIIQLHLGASTCYVVSDAMIAKEILKTNELNFISRPEFDCSDNNIYRGSGFVTAPYNTYWRFMKKLCMTRLLATSQLNQLVHVREEEIMKLVDSLINISREGKSCNLKQEFITMTNNVICRMAMSTRCVEDDANEAKEVKELVNQIVVLGGKLSADLFGHGRMLRNALEKFDRLVEKIIKEHEDQREMKDMEGSGWRDLMDILLAISGDSNAEMNLTRKDIKAFFLDIIMAGTDTSALTIQWIMAELINHQKIFNRLREEIDLAVGTKRLVKESDILNLPYLQAVVKETLRLHPPSPIILRQCAEDCKINGFDLKGKTRMLINLYSIQRDPNSWTDPEEFNPDRFMVDSNINHLQNQMEVKGQMFNYLPFGSGRRGCPASSLALVVVQAAIGALVQCFDWEVIGEGKINLQEDSGFSMGMASPLVCYPITRFNPLSFNKR

SEQ ID NO: 12784 - DNA, 1539 bp, Populus trichocarpa
  CDS (1)..(1539)
atgatcgccatccaatatgtcctagccatctttgtactatgggttatcacagtcttccttcaattcatcttcaagaggcccggcaagaaacctgccggttattgcccccctccaagcccacccacacttcctttgatcggccacctccatttattaaccccagttgcatacaaaggattccatgctctcaacaataaatatggccctctcctctatctccgcttggccacttatcctgctgttcttgtctcatccgctccactggccacagaaatcttcaaagcactagatgtccattttacctctagaataaaatccccttttgaggataatttactatttggaagctcaacaagctttttcaatgccccgtatggggattactggaaattcatgaagaaaatttgtaccacagaattgttggggactagacagatgaagaagttaaagaatgttagacgcgaagaagttgtgaggtttttgagtaaaatgttggagataggtcagaaacatgaggttgcaaatgtgagtgctgaggtattaacactagcaaacaatagtacttgcaggatgattatgagtgctaggtgttcaggggaagataatcaggctgagaagtgtagagggctggtgagtgaatcctttgatctggctgcaaagcttgctttatttagcgtgtttggtcccttgaaaaggataggtacttggtacttaagaaagaaaattgccgacgtgccccgaaggtatgatgaattgtttgagaacgtcctggtagagcatgaggagaaagcgaagagagaaggtcctcacatggagaataaagacttgatggatattcttttggaagtgtatcatgacaaaaatgctgaaataaggataaccaggaagcaaatgaagactttctttctggatcttttcacaggaggtaccaatactacatcagatgccatactgtggatcttagcagagcttgtcaaccatcctgcagcgttcaagaagctgagagaggagatagattcagctgttgggacagagagacttgtggatgaagaagatatcccaaacctgccttattttcaagcatgtgttaaggaagcaatgaggctaaatccaccagtgcctttatttgatagaatatgcggtgaaaattgcaaacttggaggatatgatatacccaaaggaatcacaatgataatgaacgcatactctattatgagggatccaaagatatgggaaaaccccaacgattttattccagagaggttcttgactgaacaggacaacgccgaggggcaaaacttacaggtttacgtcccttttggtggaggaaggagaatgtgccctgggaccaacatgacctcaagtttgattaactgtagtgttacagctatggttcagtgttttgattggaaagttctcggtggagatggaccagatggatcgaaggttaacatggactccaaatcaggcgtggtaaagagcatggataaaccatttgtggccattcctgttctccgcagaaacctgttttctgcttaa

SEQ ID NO: 12785 - protein, 512 aa, Populus trichocarpa
MIAIQYVLAIFVLWVITVFLQFIFKRPGKKPAGYCPPPSPPTLPLIGHLHLLTPVAYKGFHALNNKYGPLLYLRLATYPAVLVSSAPLATEIFKALDVHFTSRIKSPFEDNLLFGSSTSFFNAPYGDYWKFMKKICTTELLGTRQMKKLKNVRREEVVRFLSKMLEIGQKHEVANVSAEVLTLANNSTCRMIMSARCSGEDNQAEKCRGLVSESFDLAAKLALFSVFGPLKRIGTWYLRKKIADVPRRYDELFENVLVEHEEKAKREGPHMENKDLMDILLEVYHDKNAEIRITRKQMKTFFLDLFTGGTNTTSDAILWILAELVNHPAAFKKLREEIDSAVGTERLVDEEDIPNLPYFQACVKEAMRLNPPVPLFDRICGENCKLGGYDIPKGITMIMNAYSIMRDPKIWENPNDFIPERFLTEQDNAEGQNLQVYVPFGGGRRMCPGTNMTSSLINCSVTAMVQCFDWKVLGGDGPDGSKVNMDSKSGVVKSMDKPFVAIPVLRRNLFSA

SEQ ID NO: 12786 - DNA, 1539 bp, Populus trichocarpa
  CDS (1)..(1539)
atgactgccattcaatatgttcttgccatctttatcctcttgtttatcacagtcttccttcaattcatcttcaagaggcccggcaagaaacctgccggttattgcccccctccaagcccacccacacttcctttgatcggccacctccatttattaaccccagttgcatacaaaggattccatgctctcaacaataaatatggccctctcctctatctccgcttggccacttatcctgctgttcttgtctcatccgctccactggccacagaaatcttcaaagcactagatgtccattttacctctagaataaaatccccttttgaggataatttactatttggaagctcaacaagctttttcaatgccccgtatggggattactggaaattcatgaagaaaatttgtaccacagaattgttggggactagacagatgaagaagttaaagaatgttagacgcgaagaagttgtgaggtttttgagtaaaatgttggagataggtcagaaacatgaggttgcaaatgtgagtgctgaggtattaacactagcaaacaatagtacttgcaggatgattatgagtgctaggtgttcaggggaagataatcaggctgagaagtgtagagggctggtgggtgaatcctttgatctggcagcaaagcttgctttatttagcgtgtttggtcccttgaaaaggataggtatatggtacttaagaaagaaaattgccgacgtgccccgaaggtatgatgaattgtttgagaacgtcttggtagagcatgaggagaaagcgaagagagaaggtcctcacatggagaataaagacttgatggatattcttttggaagtgtatcacgataaaaatgctgaaataaggataaccaggaagcaaatgaagactttctttctggatcttttcacaggaggtaccaatactacatcagatgccatactgtggatcttagcagagcttgtcaaccatcctgccgcgttcaagaagctgagagaggagatagattcagctgttgggacagagagacttgtggatgaagaagatatcccaaacctgccttattttcaagcatgtgttaaggaagcaatgcgactaaatccaccagtgcctttatttgatagaatatgcggtgaaaattgcaaacttggaggatatgatatacccaaaggaatcacaatgataatgaacgcatactctattatgagggatccaaagatatttgaaaaccccaacgattttattccagagaggttcttgactgaacaggacaacgccaaggagcaaaacttacaggtttacgtcccttttggtggaggaaggagaatgtgccctgggaccaacatgacctcaagtttgattaactgtagtgttacagctatggttcagtgttttgattggaaagttctcagtggagatggaccagatggatcgaaggttaacatggactctaaatcaggcgtggtaaagagcatggataaaccatttgtggccattcctgttctccacagtaacctgttttctgcttaa

SEQ ID NO: 12787 - protein, 512 aa, Populus trichocarpa
MTAIQYVLAIFILLFITVFLQFIFKRPGKKPAGYCPPPSPPTLPLIGHLHLLTPVAYKGFHALNNKYGPLLYLRLATYPAVLVSSAPLATEIFKALDVHFTSRIKSPFEDNLLFGSSTSFFNAPYGDYWKFMKKICTTELLGTRQMKKLKNVRREEVVRFLSKMLEIGQKHEVANVSAEVLTLANNSTCRMIMSARCSGEDNQAEKCRGLVGESFDLAAKLALFSVFGPLKRIGIWYLRKKIADVPRRYDELFENVLVEHEEKAKREGPHMENKDLMDILLEVYHDKNAEIRITRKQMKTFFLDLFTGGTNTTSDAILWILAELVNHPAAFKKLREEIDSAVGTERLVDEEDIPNLPYFQACVKEAMRLNPPVPLFDRICGENCKLGGYDIPKGITMIMNAYSIMRDPKIFENPNDFIPERFLTEQDNAKEQNLQVYVPFGGGRRMCPGTNMTSSLINCSVTAMVQCFDWKVLSGDGPDGSKVNMDSKSGVVKSMDKPFVAIPVLHSNLFSA

SEQ ID NO: 12788 - DNA, 1353 bp, Populus trichocarpa
  CDS (1)..(1353)
atggccaacgaaatcttcaagacacacgatctcaattttgcatacaaaccaaaatctcctttcgaggatagtatactatttggaacctcaagttttcgtcatgccccgtatggagattactggagattcatgaagaaactttgtctaacagaattgcttggagcgcgacagctagaaaggtcgcggggcgttagaagagaagaacttgttcgctttttgagaaaagcgttcgagaaagctaaaaaaaaggaggtcgtagatttgagcaaagagataatgacactaacaaacaatattacgtacaggatggtgatgagtgcgaggtgttcaggacaagataatgatgttgaaaagtgtgtggggctggtgcgagaatcctttcagctagtagctaagatgactttagcaaatcttttaggccctttaagaaaagtaggtgttttctttttcggggagcagctcttggatgtaccaagaaggtttgatgagttgttggagaggatcatggaagagcatgaagagagggcaagaagagatggcggtgagatagaaaataaagatttgatggatattgtcttggaagcacatcacgacaaagatgcagaggttaagataagcaggactcaaatgaaatctttctttctggatctcttctttggaggcactagtaccacagcacattcgatgcaatggttaatggcagagatgatcaatcatcctcaagtgttcaagaagcttagagaggagatagactctcttgttggaagaaatagactagtggaagattcagacatcccaagtctccattatttgcaagctgttgtgaaagaaacacttagactacacccacctgttaagagattgtcattattgtggcaaatgtcccacccaccactatgcttagtggaattcttagtggtagctccattcatgccacaattggtggcatactttaaggcttgcttgtcccaccaaatagtcaattcgcattccgtgatgagggatccagaggtatgggataatccagacgagttctatcctgagagattcttgttggccatccccaaagaggaggccgatgacaaaatgggaagaaaagggcaagacctcaatttttggtccttcggtgggggaaggagaaagtgccctggtgtaaacttggccttcagtttgattaatgctactgttgctgccatggttcaatgctttgactggaagcttgatggagctgaatacatggctagggctaacatggaagttacatcaggggtgactatgagcatggcccatccacttttatgtcttcctgtggttcatttcaacccgtttaatactcctactaaagataattag

SEQ ID NO: 12789 - protein, 450 aa, Populus trichocarpa
MANEIFKTHDLNFAYKPKSPFEDSILFGTSSFRHAPYGDYWRFMKKLCLTELLGARQLERSRGVRREELVRFLRKAFEKAKKKEVVDLSKEIMTLTNNITYRMVMSARCSGQDNDVEKCVGLVRESFQLVAKMTLANLLGPLRKVGVFFFGEQLLDVPRRFDELLERIMEEHEERARRDGGEIENKDLMDIVLEAHHDKDAEVKISRTQMKSFFLDLFFGGTSTTAHSMQWLMAEMINHPQVFKKLREEIDSLVGRNRLVEDSDIPSLHYLQAVVKETLRLHPPVKRLSLLWQMSHPPLCLVEFLVVAPFMPQLVAYFKACLSHQIVNSHSVMRDPEVWDNPDEFYPERFLLAIPKEEADDKMGRKGQDLNFWSFGGGRRKCPGVNLAFSLINATVAAMVQCFDWKLDGAEYMARANMEVTSGVTMSMAHPLLCLPVVHFNPFNTPTKDN

SEQ ID NO: 12790 - DNA, 1539 bp, Populus trichocarpa
  CDS (1)..(1539)
atgactgtcattcaatattttcttgccttctttgtcctctggtttatcacaatcttccttcaatacatcttcaagagaaccggcaagaaacctgccggctattgcccccctccaagcccccccacacttcctttgatcggccacctccatttactaacccctgtagcatacaaaggattccatgctctcaacaataaatatggccctctcctctatctccgtttggtcacatatcctgctgttcttgtctcatcagctccggtggctacagaaatcttcagagcacaagatgtccattttgcctctagaataaaatccccctttgaggataatttactatttggaagctcaacaagctttttcaatgccccgtatggggattactggaaattcatgaagaaaatttgcatgacagaattgttggggaccagccagatgaagaagttaaagaatcttagacgcgaagaagttgtgaggtttttgagtaaaatgttggagatgggtaaaaaaaatgagggtgcagatttgagtgctgaggtattaacactagcaaacaatagtacttgcaggatgattatgagtgctaggtgttcaggggaagataatcaggctgataagtgtagagagctggtgagtgaatccttcgatctggctgcaaagcttgctgtatgtaacttgttcggtcccttgaaaaggataggtatctggttcttgagaaagaaaattgctgacgtgcctagaaggtatgatgaattgtttgaaaacgtcatggtagagcatgaggagaaagcaaagagagaaggtcctcacttggagaataaagacctgatggatattcttttggaggtgtatcatgataaaaatgctgaaatgaggataaccaggaagcaaatgaagactttctttctggatctcttcaccggaggtaccagtactacagcagatgccatactatggattttaggggagcttgtcaaccatcctgcagcgttcaagaagctgagagaggagatagattcagttgttgggacagagagacttgtggacgaagcagatatcccaaacctgccttatttccaagcgtgcgtgaaggaagcaatgagactacatccaccagtgcctttattcgatagagtatgccgtgaagactgcaaacttgcaggatatgatatacccaaaggaatcacaatgataatgaacgcatactctatcatgagggatccaaagatatgggacaacccaaatgatttcattccagagaggttcttgaaagaagaagaaaacactaagggccaaaacctacaggtttacgtcccttttggcgggggaaggagaatgtgccctgggaccaacatgtcctcaagtttgatcaatggtagtgttacagctatggttcaatgttttgattggaaggttgttggtggagatggcccagatggatcaaaagttaacatggacactaaagctggtgtgactatgagcttggataaaccattcttgtccaaccctgttctccaccgcaacctgttttctgcttaa

SEQ ID NO: 12791 - protein, 512 aa, Populus trichocarpa
MTVIQYFLAFFVLWFITIFLQYIFKRTGKKPAGYCPPPSPPTLPLIGHLHLLTPVAYKGFHALNNKYGPLLYLRLVTYPAVLVSSAPVATEIFRAQDVHFASRIKSPFEDNLLFGSSTSFFNAPYGDYWKFMKKICMTELLGTSQMKKLKNLRREEVVRFLSKMLEMGKKNEGADLSAEVLTLANNSTCRMIMSARCSGEDNQADKCRELVSESFDLAAKLAVCNLFGPLKRIGIWFLRKKIADVPRRYDELFENVMVEHEEKAKREGPHLENKDLMDILLEVYHDKNAEMRITRKQMKTFFLDLFTGGTSTTADAILWILGELVNHPAAFKKLREEIDSVVGTERLVDEADIPNLPYFQACVKEAMRLHPPVPLFDRVCREDCKLAGYDIPKGITMIMNAYSIMRDPKIWDNPNDFIPERFLKEEENTKGQNLQVYVPFGGGRRMCPGTNMSSSLINGSVTAMVQCFDWKVVGGDGPDGSKVNMDTKAGVTMSLDKPFLSNPVLHRNLFSA

SEQ ID NO: 12792 - DNA, 1536 bp, Populus trichocarpa
  CDS (1)..(1536)
atggctgatatccaaggctatatcatacttttcctattatggctactctccaccattttggtcagagcaatactaaacaagactcgagccaaacctcgccttccaccgagcccattggccttaccaatcattggacacctccatctccttgccccaataccccaccaagctcttcataagctctcaacccggtatggaccattgattcatttattccttggttctgtcccttgtgttgttgcttctacacctgagactgcaaaggagttcctcaaaactcatgaaaattctttctgcgatcgtcctaagtcaaccgcagtcgattttctaacatatggatcagctgatttctcatttgccccttatggaccttactggaaattcatgaagaaaatttgtatgactgaacttcttggaggtcgaatgttagaccagcttcttccagttaagcatgaagagattaggcagtttttacagttcttgctaaagaaagcaaatgcaagagagtcaattgatgttggaagtcaacttataaggctaactaataatgttatatcgagaatggcaatgagccaaaggtgttcagataatgatgatgaagcagatgaggtcaggaatttggtgcatgaggtagctgatcttacagggaagtttaatttgtcagattttatttggttttgcaagaacttggatttgcagggatttggaaaaaggctgaaggaagtccgcaaaaggttcgacacgatgacggaaaggatcataatggagcatgaagaggcgaggaagaaaaagaaagaaactggtgaaggtgaccccgtgaaggatctacttgatattttacttgatatatcagaagatgatagctcagaaatgaaattgaccagagaaaatatcaaggcgttcatactggacatattcgcggcggggacagacacctctgctgttaccatggaatgggcactagcagagctcatcaataacccaaacatcttggagagagcaagagaagagatagattctgttgtaggacaaagcagactagtacaagaatcagacatcgctaacctgccctacgttcaagctatactaaaggaaacactgaggcttcaccccactggtccaataattctgagggaatcaagtgaaagctgcaccatcaatggctatgaaattccagcaagaaccaggctattcgttaacgtgtgggctattaatagagatccaaactactgggagaacccacttgagttcgaaccggaaaggtttctttgcgcaggagaaaatggaaagagtcagctggatgtgaggggtcagcattttcactttcttccatttgggagtggaagaagagggtgccctggaactacactggcacttcaaatggttcaaacaggccttgctgctatgattcaatgctttgattggaaagttaatggcactgttgacatgcaagaaggaactggtataacacttccaagggcccatcccttaatttgtgtcccagtggcaaggctcaatccatttccatcgttctga

SEQ ID NO: 12793 - protein, 511 aa, Populus trichocarpa
MADIQGYIILFLLWLLSTILVRAILNKTRAKPRLPPSPLALPIIGHLHLLAPIPHQALHKLSTRYGPLIHLFLGSVPCVVASTPETAKEFLKTHENSFCDRPKSTAVDFLTYGSADFSFAPYGPYWKFMKKICMTELLGGRMLDQLLPVKHEEIRQFLQFLLKKANARESIDVGSQLIRLTNNVISRMAMSQRCSDNDDEADEVRNLVHEVADLTGKFNLSDFIWFCKNLDLQGFGKRLKEVRKRFDTMTERIIMEHEEARKKKKETGEGDPVKDLLDILLDISEDDSSEMKLTRENIKAFILDIFAAGTDTSAVTMEWALAELINNPNILERAREEIDSVVGQSRLVQESDIANLPYVQAILKETLRLHPTGPIILRESSESCTINGYEIPARTRLFVNVWAINRDPNYWENPLEFEPERFLCAGENGKSQLDVRGQHFHFLPFGSGRRGCPGTTLALQMVQTGLAAMIQCFDWKVNGTVDMQEGTGITLPRAHPLICVPVARLNPFPSF

SEQ ID NO: 12794 - DNA, 1527 bp, Populus trichocarpa
  CDS (1)..(1527)
atgttctattacctcatcttccttctttggtttgtcactgcgctactagcacacttcttcatcaaaatattcttaagatcccgtagtcaaaacaacctcccaccgagcccgccagctctacctgtcattggccacctacacctaattgggtcggtccttgcaaaatctttccaaacccttgccgttcgttatggtccactcatgcagatccgtctaggggcatcaacatgtgttgttgcttctaatgctgtggtggccaaagaaatatttaagacccaagatatcaatttttcctctagacctgaatttggctcctccgaatacttcatttatagaggatcaagattcgtcactgcccaatatggtgattattggaggttcatgaaaaaactatgcatgacaaggctcctttctgtccctcaacttgagaaattcaccgacatccttgatgaagagaaggtcaagcttgtcgaatcggtgatggggtgtgctagggaagggaaattgtgtgatttgagtggtgagtttacagccttgacaaacaatactatttgtcggatgacaatgagcactcgatgctcaggcagtaataatgatgctgataagattgagcggttggttaagacatgtttacagcttgcagggaagttaagtttaggggatgttttgggtcctttcaagatttttgacttctctgggaatgggaaaaagctagttggtgcactacaagcctatgataggttagtggagaggatattcaaggagcatgaagagaaggcagataaaggtttcaaggaaggggagaggaaggatttgatggacatattgttggagatatataatgatccaactgctgaaattaaattatctaaaaatgacatcaagtcctttttgcttgacttattctttgccgggacagacacatcagcaacagccatgcaatgggccatgggagagctcatcaacaatcccaaggcattcaagaggcttagagatgagatcaacacagttgttgggcctaatagacttgttaaggaatcagatgtcccaaacctcccttaccttaaagcagtcatgagagaaacactaagacttcacccttcagcacctttaatcatcagagaatgcgctgaagattgcaaggtcaacggctctgtcgttaaggccaagacaagagttcttgtcaatgtctatgcagtcatgagggacccggaatcatgggctaatcccgacgaattcatgcctgaaaggtttttggagagctccgaggagaaaattggcgagcatcagatggaattcaagggtcaaaatttccggttccttccatttgggagtggaagaagaggatgccctggtgcatcccttgctatgatgatcatgcatgctgcagtaggggccttggttcagtgctttgattggaaaatcaaggatgggaaggaggtggatttaaccttaggacctggctttgcagcagaaatggctcatccactcgtgtgctaccctattaagcacatgaacgcatattag

SEQ ID NO: 12795 - protein, 508 aa, Populus trichocarpa
MFYYLIFLLWFVTALLAHFFIKIFLRSRSQNNLPPSPPALPVIGHLHLIGSVLAKSFQTLAVRYGPLMQIRLGASTCVVASNAVVAKEIFKTQDINFSSRPEFGSSEYFIYRGSRFVTAQYGDYWRFMKKLCMTRLLSVPQLEKFTDILDEEKVKLVESVMGCAREGKLCDLSGEFTALTNNTICRMTMSTRCSGSNNDADKIERLVKTCLQLAGKLSLGDVLGPFKIFDFSGNGKKLVGALQAYDRLVERIFKEHEEKADKGFKEGERKDLMDILLEIYNDPTAEIKLSKNDIKSFLLDLFFAGTDTSATAMQWAMGELINNPKAFKRLRDEINTVVGPNRLVKESDVPNLPYLKAVMRETLRLHPSAPLIIRECAEDCKVNGSVVKAKTRVLVNVYAVMRDPESWANPDEFMPERFLESSEEKIGEHQMEFKGQNFRFLPFGSGRRGCPGASLAMMIMHAAVGALVQCFDWKIKDGKEVDLTLGPGFAAEMAHPLVCYPIKHMNAY

SEQ ID NO: 12796 - DNA, 1545 bp, Populus trichocarpa
  CDS (1)..(1545)
atggctgatattcaagactatgcaataccattccttatcttcctagcttccatcctgctggtgcaaatcatcctggccaagatccgtcgcaacgctggcctccctccaagccccagagccctgccaatcattggacatatgcacctccttagtcgtatccctcaccaagccttccacaagctatcagcccgctatggacctttggtttacttcttcattggctcaaaaccttgtcttcttgcttctaccccagaggttgcaaaagaaatcctcaaaatcaatgaagctaatttcttgaaccgtcctaaagtagccaaccttgattaccttacatatggctcagctgattttgctaccatatattatggacctcattggaagttcatgaagaaactttgcatgactgaaattctagggagtagaacattaacccagttccttccgattagatgcgaagagagagaacggttcttgaagttagtgttaaagagagctgaggctaaagaagctgttgatgttgggggagagttgatgagattgacaaataacatcatatcaagaatgttactacgaacaaggtgttctgatactgaaaatgaagctgatgatgtaagagagttggtgaaagagttaaatactctaggtgccaagtttaatctttcagattcaatttggttctgcaagaacttcgatttgcagggatttgataaaaggcttaaggatgctcgggaccggtatgatgccatgatggagaggatcatgaaggagcatgaagatgcaaggaaaagaaagaaagagacaggtgatgaagatgatacagtgaaggatttgcttgatattttacttgacatatatgaagatgagaacgcagagaagagattaaccagagagaacattaaggccttcatcatgaacatatttggtgctgggacagacacatcttccattacagtagaatggggactagcagagctcattaaccacccgattatgatggagaaagttagacaagaaattgactctgttgtgggaaggagcaggctagtacaggaatcagacatagcaaaccttccatacctccaggctatcgtaaaagaaacactaaggctccaccctactggcccattaatagtcagagaatcattagaagactgcaccattgctggctacagaattccagcaaagaccagactgtttgttaatatctggtcacttgggagggatccaaatcactgggaaaatccacttgaatttaggccagagagatttaccagtgaagagtggagtgcaaacagtaacatgatggatgtgagagggcaacattttcatctattgccatttgggtctggaagaagaagctgccctggagcttcatttgcactgcagtttgttccaacaactcttgctgctttgatccagtgctttgagtggaaggttggtgatggagagaatggtactgttgacatggacgagggacctgggctaacccttcctagggctcattccctggtttgcattccagtctccaggccctgtccattttag

SEQ ID NO: 12797 - protein, 514 aa, Populus trichocarpa
MADIQDYAIPFLIFLASILLVQIILAKIRRNAGLPPSPRALPIIGHMHLLSRIPHQAFHKLSARYGPLVYFFIGSKPCLLASTPEVAKEILKINEANFLNRPKVANLDYLTYGSADFATIYYGPHWKFMKKLCMTEILGSRTLTQFLPIRCEERERFLKLVLKRAEAKEAVDVGGELMRLTNNIISRMLLRTRCSDTENEADDVRELVKELNTLGAKFNLSDSIWFCKNFDLQGFDKRLKDARDRYDAMMERIMKEHEDARKRKKETGDEDDTVKDLLDILLDIYEDENAEKRLTRENIKAFIMNIFGAGTDTSSITVEWGLAELINHPIMMEKVRQEIDSVVGRSRLVQESDIANLPYLQAIVKETLRLHPTGPLIVRESLEDCTIAGYRIPAKTRLFVNIWSLGRDPNHWENPLEFRPERFTSEEWSANSNMMDVRGQHFHLLPFGSGRRSCPGASFALQFVPTTLAALIQCFEWKVGDGENGTVDMDEGPGLTLPRAHSLVCIPVSRPCPF

SEQ ID NO: 12798 - DNA, 1527 bp, Populus trichocarpa
  CDS (1)..(1527)
atgttctattacctcatcttccttctttggtttgtcactgcgctactagcacacttcttcatcaaaatattcttaagatcccgtagtcaaaacaacctcccaccgagcccgccagctctacctgtcattggccacctacacctaattgggtcggtccttgcaaaatctttccaaacccttgccgttcgttatggtccactcatgcagattcgtctaggggcatcaacatgtgttgttgcttctaatgctgtggtggccaaagaaatatttaagacccaagatatcaatttttcctctagacctgaatttggctcctccgaatacttcatttatagaggatcaagattcgtcactgcccaatatggtgattattggcggttcatgaaaaaactatgcatgacaaggctcctttctgtccctcaacttgagaaattcaccgacatccttgatgaagagaaggtcaagcttgtcgaatcggtgatggggtgtgctagggaagggaaattgtgtgatttgagtggtgagtttacagccttgacaaacaatactatttgtcggatgacaatgagcactcgatgctcaggcagtaataatgatgctgataagattgagcggttggttaagacatgtttacagcttgcagggaagttaagtttaggggatattttgggtcctttcaagatttttgacttctctgggaatgggaaaaagctagttggtgcactacaagcctatgataggttagtggagaggatattcaaggagcatgaagagaaggcagataaaggtttcaaggaaggggagaggaaggatttgatggacatattgttggagatatataatgatccaactgctgaaattaaattatctaaaaatgacatcaagtcctttttgcttgacttattctttgccgggacagacacatcagcaacagccatgcaatgggctatgggagagctcatcaacaatcccaaggcattcaagaggcttagagatgagatcaacacagttgttgggcctaatagacttgttaaggaatcagatgtcccaaacctcccttaccttaaagcagtcatgagagaaacactaagacttcacccttcagcacccttaatcatcagagaatgcgctgaagattgcaaggtcaacggctctgtcatcaaggccaagacaagagttcttgtcaatgtctatgcagtcatgagggacccggaatcatgggctaatcccgacgaattcatgcctgaaaggtttttggagagctccgaggagaaaattggcgagcatcagatggaattcaagggtcaaaatttccgtttccttccatttgggagtggaagaagaggatgccccggtgcatcccttgctatgatggtcatgcatgctgcagtaggggccttggttcagtgctttgattggaaaatcaaggatgggaaggaggtggatttaaccctaggacctggctttgcagcagaaatggctcatccaatcgtgtgctaccctattaagcacatgaacgcatattag

SEQ ID NO: 12799 - protein, 508 aa, Populus trichocarpa
MFYYLIFLLWFVTALLAHFFIKIFLRSRSQNNLPPSPPALPVIGHLHLIGSVLAKSFQTLAVRYGPLMQIRLGASTCVVASNAVVAKEIFKTQDINFSSRPEFGSSEYFIYRGSRFVTAQYGDYWRFMKKLCMTRLLSVPQLEKFTDILDEEKVKLVESVMGCAREGKLCDLSGEFTALTNNTICRMTMSTRCSGSNNDADKIERLVKTCLQLAGKLSLGDILGPFKIFDFSGNGKKLVGALQAYDRLVERIFKEHEEKADKGFKEGERKDLMDILLEIYNDPTAEIKLSKNDIKSFLLDLFFAGTDTSATAMQWAMGELINNPKAFKRLRDEINTVVGPNRLVKESDVPNLPYLKAVMRETLRLHPSAPLIIRECAEDCKVNGSVIKAKTRVLVNVYAVMRDPESWANPDEFMPERFLESSEEKIGEHQMEFKGQNFRFLPFGSGRRGCPGASLAMMVMHAAVGALVQCFDWKIKDGKEVDLTLGPGFAAEMAHPIVCYPIKHMNAY

SEQ ID NO: 12800 - DNA, 1668 bp, Sorghum bicolor
  CDS (1)..(1668)
atggcggccatggaagagcagccgctgagctccagcagtaccagcatggccatcgtcctgtcgctcttgaagaacaacccagctgatgccgtcctgctggcactggtcgccgtcgtggccttgcgccattacttgatctcgtcatggcggcagcaggagcaggcccgccggctgcccccgggcccaaggaggctcccggtgatcgggcacctgcacctgctccggccgccggtgcaccgcaccttccaggagctggcgtcccggatgggtcccctgatgcacatccagctggggtccacgcactgcgtggtggccagctccccggaggtggccagcgagctgatccgcggccacgagggcagcatctcggagcggccgctcacggcggtggcccggcagttcgcctacgactcggcgggcttcgccttcgcgccctacaacacgcactggcgcttcatgaagcgcctctgcatgtcggagctgctcggcccgcgcaccgtcgagcagctgcgccccatccgccgtgccggcaccgtgtccctgctgggggacctgctgctggcggcggcgtcgtcggagacggagacggagacggtggtggacctcacccgccacctcatccgcctgtccaacacctccatcatccggatggtggccagcaccgtccccggcagcgtcaccgacgaggcgcaggagctggtcaaggccgtggccgagttggtcggcgccttcaacgccgacgactacatcgcggtgatccgtggctgggacctccagggcctccgcaggagagctgccgacgtccaccgccgcttcgacgccctgctggaggacatcctcaagcacaaggaggaggcaagggcggcgcgacgaaggctcgacgacgacgacggccatcgagtcagcaagaagcaggcgacggcgccgcacagcaaggacctgctcgacatcctcatggacaaggcggaggacccggcggcggaggtcaagctcaccagggaaaacataaaggccttcatcatcgacgtcgtgacggctggctccgatacgtcggcggccatggtggagtggatgctggcggagctgctgaaccatccggagacgctgcgcaaggtggtggaggagatcgacgcggtggtcggcggcgacaggatcgccagcgaggcggacctgccgcagctgccgtacctgatggcggcgtacaaggagacgctgcggctgcacccggcggcgccgatcgcgcaccggcagtcgacggacgagatggtggtgcgcggcttcacggtgccgcctcagacagcggtgttcatcaacgtgtgggccatcgggcgcgacccggcctactgggaggagcccctggcgttccggccggagcggttcatgcccggcggcgccgccgacagcctcgagccccgcggccagcacttccagtacatgccattcggcagcggccgccggggatgccccggcatgggcctcgcgctgcagtccgtgccggctgtgctggcggcgctcgtgcagtgcttccactgggccaccgtcgacggcgacggcgacggcgactccaagatcgacatgtcggagtcggacgggctggtgtgcgctcgcaagaagccgctcctgctccgccctacacctcgcctcagccccttcccggccgtcgtctag

SEQ ID NO: 12801 - protein, 555 aa, Sorghum bicolor
MAAMEEQPLSSSSTSMAIVLSLLKNNPADAVLLALVAVVALRHYLISSWRQQEQARRLPPGPRRLPVIGHLHLLRPPVHRTFQELASRMGPLMHIQLGSTHCVVASSPEVASELIRGHEGSISERPLTAVARQFAYDSAGFAFAPYNTHWRFMKRLCMSELLGPRTVEQLRPIRRAGTVSLLGDLLLAAASSETETETVVDLTRHLIRLSNTSIIRMVASTVPGSVTDEAQELVKAVAELVGAFNADDYIAVIRGWDLQGLRRRAADVHRRFDALLEDILKHKEEARAARRRLDDDDGHRVSKKQATAPHSKDLLDILMDKAEDPAAEVKLTRENIKAFIIDVVTAGSDTSAAMVEWMLAELLNHPETLRKVVEEIDAVVGGDRIASEADLPQLPYLMAAYKETLRLHPAAPIAHRQSTDEMVVRGFTVPPQTAVFINVWAIGRDPAYWEEPLAFRPERFMPGGAADSLEPRGQHFQYMPFGSGRRGCPGMGLALQSVPAVLAALVQCFHWATVDGDGDGDSKIDMSESDGLVCARKKPLLLRPTPRLSPFPAVV

SEQ ID NO: 12802 - DNA, 1641 bp, Ricinus communis
  CDS (1)..(1641)
atggaggagtcctcaacaatccttccatctatagactacgcacagtatcaaaccgagaaaatggcagaactccaagaatataccactctctttcttttatggctggtctcaacgttcctggtccgagccatcttatcaagaacacgttcaaaagctcaactcccacctagtcctatatcacttccgatcataggacaccttcatcttctccggccgatccctcaccaggcacttcataagttatcacaacgatttggccccttgtttcacctgtcttttggttctgttccttgtgttgttgcctcttctcctgaaatggcaaaagagttccttaaaactcatgaaatgtccttctgcaatcgcccatcaaccgcggcggttcgctgcttgacttatggcgcatctggctttagctttgctccttatggaccttactggaagtttatgaagcaaatatgcatgacacagcttcttggcggtcgaacactcgacagtttttctgatgtcaggcgtcaagaaatcggaactttcttgaaactaatgttgcagaagagtcaacaaggtaaagaggttaatcttggtgaagagctgatgaattttgcaaacaatataatctcaagaatgacaatgggcaagaggtgttcgacaacggatgatgaggctggagatgtgaggaaattaattgaagaggttggtgtgcttactggggaattcaactttcaagattatatttggttttgcaagaacatagatatacaaggatttggtaagagacttaagaaagtacaagtaagattggacgcaatgatggaaagtgtcctgaaagagcacgaagaggtcaggacgatgatgaagaatagtgaattgggtgataacgatgctaagaaggatctggttgatattttgctggatatcatggaagatgagagttcagaaatgagactgtcgagagaaagtgtcaaagcttttatcctggaaatgttcacaacgggcacaggcacatctgcaggagtaatacaatgggcaatggcagagctaataaaccatccaaacatattcaagaaagcaagagaagagattgactctgttgttggaaagaatagactgattaaagaattagatattcaaagtctaccttatctccaagcaattattaaagagaccttgagattacatccatcgggcccattattcacaagagaatcaagccaagattgcaatatcggaggctatcagattcctgctaaaacaagactcattgtcaatgtatgggcaattggaagagatcccaattactgggaaaatccaatggagttcaagccagaaagattcatgagtgaagaggattgtaccatgagtagtccattaacagatgtcagaggccaacattaccatcttttgccatttgggagtggaagaagaagttgtcctggaacttctttggcattacaagttatccaaactacactagggagcatggtacagtgctttgattggaaaattattaatggagataataataatagtaatggtaataatattgatatgagtgaagctgctgggatctctctcgagatggcaaatcccttgatgtgtgaacctgtgacccgtttacagtactatgagaacatcatttgttga

SEQ ID NO: 12803 - protein, 546 aa, Ricinus communis
MEESSTILPSIDYAQYQTEKMAELQEYTTLFLLWLVSTFLVRAILSRTRSKAQLPPSPISLPIIGHLHLLRPIPHQALHKLSQRFGPLFHLSFGSVPCVVASSPEMAKEFLKTHEMSFCNRPSTAAVRCLTYGASGFSFAPYGPYWKFMKQICMTQLLGGRTLDSFSDVRRQEIGTFLKLMLQKSQQGKEVNLGEELMNFANNIISRMTMGKRCSTTDDEAGDVRKLIEEVGVLTGEFNFQDYIWFCKNIDIQGFGKRLKKVQVRLDAMMESVLKEHEEVRTMMKNSELGDNDAKKDLVDILLDIMEDESSEMRLSRESVKAFILEMFTTGTGTSAGVIQWAMAELINHPNIFKKAREEIDSVVGKNRLIKELDIQSLPYLQAIIKETLRLHPSGPLFTRESSQDCNIGGYQIPAKTRLIVNVWAIGRDPNYWENPMEFKPERFMSEEDCTMSSPLTDVRGQHYHLLPFGSGRRSCPGTSLALQVIQTTLGSMVQCFDWKIINGDNNNSNGNNIDMSEAAGISLEMANPLMCEPVTRLQYYENIIC

SEQ ID NO: 12804 - DNA, 1521 bp, Ricinus communis
  CDS (1)..(1521)
atgatattcgagctcttatcttcctttgctttcatccttttcattgttatttacttcatacagaaaaagcaatggcagaatcttcctccaagtcctacagccttaccaataataggtcatcttcatcttcttagacctttaatccaccattcttttcgtgacatatcttcgcgttatggtccattaatctatctcaagctcggttctgttccatgtgttgtagcttcaacacctgaactagctaaagaattcttgaagacacatgagcttacgttttccgcaagaaaacgttccattgccattgaccatcttacctataattcttcttttgcattttcaccctatggtccttactggagatttattaaaaagattagtgcttttgagcttcttggaaatagaatgctgaatcagtttcttcctattagaaggaaagaattactccattttcttcaagggttttacgccaaatccaaagctggtgaaagtgttaatgtaacccacgagttggtcaagttatctaataacataatctctcaaatgatgcttagtatgagttcttgtgaaacagaaagtgaagctgagattgcaagaactgttattcgcgagggttttcgaaagagaattgatcacacttttaacaagtatgatggactgctcgagaagttaattacagaacgtgaaaaacaaaggaagaaaaataaaagtgatggagtaaagcatgaagccatgaattttcttgacataatgcttgacgttatggaggatgagactgctgagatgaagttaactagagatcatatcaaggctttattattggcaagtttattcttttatctcgattttttaacagcggctactgatacaacagctgttacactggaatgggcattggcagagcttatcaatcagccacaagttcttgcaaaagctagagaggaaatcaatagagtaattggaaatgagaggattgttcaggaatcagacaatccaaatcttccatatatccaagccattttaaaagaaacttttaggctacacccaccaatccctatggtggcaagaaaatcaatacaggattgcaagattagtggctataaaattcctgcaaactgtttgctatttgttaacatgtggtctattggtagagatcccaagtactggaaaaaccctttacaatttgaacctgaaagattcttgcaatccagtaaggaggacagcttgacaagctgtattgatattagagggcagcattatcaattgttgcctttcggcactggaaggaggagttgtcctggaattgctttagccatgcaagaattgcctacaacacttgctgctatgattcagtgctttgattggaaggtgattaatcctcctggaatgaagaacaatggtgatggtaacgttgttgatatgactgaacggcctggattgactgctccaagggttcatgatcttgtttgcactcctgtgcctctccttccaaatctcattgatccatcatgtgaaaactactga

SEQ ID NO: 12805 - protein, 506 aa, Ricinus communis
MIFELLSSFAFILFIVIYFIQKKQWQNLPPSPTALPIIGHLHLLRPLIHHSFRDISSRYGPLIYLKLGSVPCVVASTPELAKEFLKTHELTFSARKRSIAIDHLTYNSSFAFSPYGPYWRFIKKISAFELLGNRMLNQFLPIRRKELLHFLQGFYAKSKAGESVNVTHELVKLSNNIISQMMLSMSSCETESEAEIARTVIREGFRKRIDHTFNKYDGLLEKLITEREKQRKKNKSDGVKHEAMNFLDIMLDVMEDETAEMKLTRDHIKALLLASLFFYLDFLTAATDTTAVTLEWALAELINQPQVLAKAREEINRVIGNERIVQESDNPNLPYIQAILKETFRLHPPIPMVARKSIQDCKISGYKIPANCLLFVNMWSIGRDPKYWKNPLQFEPERFLQSSKEDSLTSCIDIRGQHYQLLPFGTGRRSCPGIALAMQELPTTLAAMIQCFDWKVINPPGMKNNGDGNVVDMTERPGLTAPRVHDLVCTPVPLLPNLIDPSCENY

SEQ ID NO: 12806 - DNA, 1482 bp, Ricinus communis
  CDS (1)..(1482)
atggctgatatactgcaagattacgccttacaactacttatcttcctgggctctctcttcttgcttcagactatctttgccaaaactcgtaacaaagctcacctcccaccaagtcctagggccctgccaatcatagggcatatgcacctcctaggtcctattcctcaccaagcttttcacaagctctcaactcgctatggacctctgctttacttcttcattggctcaaaaccttgtgttcttgcttccactccagaaattgcaagagaaatccttaaaaataatgaatctaatttcatgaaccgccctaaagtagccaatcttcattatcttacttatggctcagctgattttgccaccataccatatggaccccattggaagttcatgaagaaactctgcatgaccgagttgttgggcagtcgaacgctagaccagttcctgccgatcagacagcaagagacaatgcggttcttgaaggtagtattgagtaaagctgcagcaaaagatgcagttaacattggtggagagctgatgagattgaccaataacataatgtcgagaatggtgcttagaacaaggtgttctggaaaagacgatgaagccgatgaggtgagaaagctagtgaaagagttgaacgagttaggagcaaagtttaacttgtcagattcaatttggttctgcaagaatttggatttgcagggttttgagaaaaggcttaaggatgctcgagataggtatgacagtatgatcgaaaggatcattaaggaacatgaagaggcaaggaaaaagaaggaaatggatgatggagataccgcagttaacttttcaatttcacagaacatatttggagctggaacagacacatcttccattacggtggagtggggactagcagagctcatcaatcatccacatgtgatggagaaagcaagactagagattgactctgttgtgggaaataccagactagtggaggaatcagatatagctaaccttccctatcttcaagctatagtcaaggaagtactaaggcttcaccccactgggccattaattgtgagagaatcatctgaagattgcactattgctggctacacaattccagcaaagaccagactattcgttaacatctggtcacttggcagggatccaaaccactgggaaaacccacttgagtttaagccggagaggtttactggtgaagaatggagcgcaaagaataatatgcttgacgtgagggggcagcattttcatctcttgccatttgggacaggaagaagaagttgccctggtgcatcatttgcactgcaatttgttccaacaactcttgctgctatgatccaatgctttgaatggagagttggtgacagtgagaatggtactgttgacatggaagagggaccagggctaacacttcccagagcccattctctggtgtgtttccccgcggttaggctcagtccattgttgtcaatctga

SEQ ID NO: 12807 - protein, 493 aa, Ricinus communis
MADILQDYALQLLIFLGSLFLLQTIFAKTRNKAHLPPSPRALPIIGHMHLLGPIPHQAFHKLSTRYGPLLYFFIGSKPCVLASTPEIAREILKNNESNFMNRPKVANLHYLTYGSADFATIPYGPHWKFMKKLCMTELLGSRTLDQFLPIRQQETMRFLKVVLSKAAAKDAVNIGGELMRLTNNIMSRMVLRTRCSGKDDEADEVRKLVKELNELGAKFNLSDSIWFCKNLDLQGFEKRLKDARDRYDSMIERIIKEHEEARKKKEMDDGDTAVNFSISQNIFGAGTDTSSITVEWGLAELINHPHVMEKARLEIDSVVGNTRLVEESDIANLPYLQAIVKEVLRLHPTGPLIVRESSEDCTIAGYTIPAKTRLFVNIWSLGRDPNHWENPLEFKPERFTGEEWSAKNNMLDVRGQHFHLLPFGTGRRSCPGASFALQFVPTTLAAMIQCFEWRVGDSENGTVDMEEGPGLTLPRAHSLVCFPAVRLSPLLSI

SEQ ID NO: 12808 - DNA, 1551 bp, Ricinus communis
  CDS (1)..(1551)
atggcagctactagtgatgactccatttctgattgctgcctcttgttcttgttgtctctgatttccatatttgtagtgcgtaatctcatcagaacttacataaaacctagcaccgcaatccgatgcccacctagtccaccggctctacctatcatcggccaccttcatctagttggcgctccattcccactatcctttcagaccctagctcgccgctatggaaacctaatgcaactacgcttagtttcctcaaccttcgttgttgcttcaagtgctgccatagctaatgagatcttcaaaacccatgatctaaattttgcctctagatttgaaatgggtccaacagaatacaatatatatagaggaacagggtttatcgtcagtccatacggtgcatattggcggttcatgagaaagctgtgcatgacagagctctttggaggttcacaatttgatcggttcaaccatattcaggagaaggaggttagaaatctcttaaaattgctcaccaagttagcgagagaaggagagccatgcgacttgaatgtggagttggaaaccttaacaaacaatttgatatgcaagatggcactgagcaagagattctccaacaatgatactgaagctaagaagatgaggaagttggtgtccgatattatggatacgggagccaagctaggtgttagtgaagtgtttggacttctcaagaagattgatttacttggacatggaaaaaagcttgaagaggcactttggagatatgatggagtaatggagcagatcatgaaggattatgaagaaaatttggtgaatggtggagaaaataaagagaaagatgtgatggatattttgttgcagatttacaggaacccaaatgctgaagtgaagttaacaagaattcagatcaagcatttcattctagagctgtttatggcaagtattgacacagaatcagcagcaatacaatggacaatggcagagctaatcaaccgtcccaaggttctcaacaggctaagggaagaaattgactcagttgtgagttccagcaggctagtcaaagaatcggacatcccagatcttccttacctgcaagccattgttaaagaatctctaagactgcaccctccatcagctatgataagcagagaatgcacccacgattgcaagatcgatggatttgatataaaagccaagactagaatgctgatcaatacctatgctataatgcgtgatccagacatgtggcctgatcccgacgagtacatgccagagaggtttctgatcaacgccactggcaagtttgatcgacatcagatggaaatgaaaaggcgcgaatgcagctaccttccattcggaggtggaaggagagcatgcattggttttgcacatgcttataccctgatgcacaccacaattgcagttttggtgcaatgctttgattggaaagttaaagatggggaaaagattgatataaatgtctccaatggattctcaggaactatggcacctcctctactgtgttatcctataacacatttcaatccattttag

SEQ ID NO: 12809 - protein, 516 aa, Ricinus communis
MAATSDDSISDCCLLFLLSLISIFVVRNLIRTYIKPSTAIRCPPSPPALPIIGHLHLVGAPFPLSFQTLARRYGNLMQLRLVSSTFVVASSAAIANEIFKTHDLNFASRFEMGPTEYNIYRGTGFIVSPYGAYWRFMRKLCMTELFGGSQFDRFNHIQEKEVRNLLKLLTKLAREGEPCDLNVELETLTNNLICKMALSKRFSNNDTEAKKMRKLVSDIMDTGAKLGVSEVFGLLKKIDLLGHGKKLEEALWRYDGVMEQIMKDYEENLVNGGENKEKDVMDILLQIYRNPNAEVKLTRIQIKHFILELFMASIDTESAAIQWTMAELINRPKVLNRLREEIDSVVSSSRLVKESDIPDLPYLQAIVKESLRLHPPSAMISRECTHDCKIDGFDIKAKTRMLINTYAIMRDPDMWPDPDEYMPERFLINATGKFDRHQMEMKRRECSYLPFGGGRRACIGFAHAYTLMHTTIAVLVQCFDWKVKDGEKIDINVSNGFSGTMAPPLLCYPITHFNPF

SEQ ID NO: 12810 - DNA, 1542 bp, Ricinus communis
  CDS (1)..(1542)
atggccctaagtgaaatgtcgtattaccttctgttccttatttggttcatcactgcccttctagtccactatttcatcaaacatgcattcttcaaacctcctaccaaactccacactccacctagcccaccagctctacctcttatcggccacctccatctaatcggctcagtcctacccagttctttccaagcactagctcgtcgctatggtccactcatgcaaatccgtttaggggcatcaacatgtgttgttgcctccagtgctgctgtagccaaagaaattttcaaaacccaagatctcaatttctcttccagacctgaatttggctcctctgaatacttcatctatagaggatcaagatttgtcactgctcaatacggtgattattggaggttcatgaagaagctatgcatgacaaggctacttgctgttcctcaacttgacaaattttctgatatccgtgatcaggaaaagatcaagcttgtcgaatcggtgatgagatgtgctacagagggaaaaatatgtgatttgaccagtgaatttactactttaacaaacaatactatttgtaggatggcaatgagcacaaggtgttcaggtagtgataatgatgctgaagagattaaggggttggttaaaacttgtttagagcttgcagggaagttaagcttaggtgatgttttaggtcctttcaagatttttgatttctctggaactgggaagaagctagttggggcattgaagaagtatgatagactagtagagaggataattaaggaacatgaagagaaggttttgaaaggtcttgttggggacagaaaggatttaatggatatattgttggagatatataatgacccaactgctgaaattagattgtctaaaaatgacatcaagtctttcttgcttgacatattctttgcaggcacagacacatcgtcagcagccatgcaatgggccatgggggagcttataaacagtccaagagcattcaagatactaagagatgagatcaatacagtagtgggatcgaacaggctagtcaaagaatcagacgtcccaaatcttccatacctaagagcagtcgtaagagaaactctaaggcttcatccatcagcaccattgatcattagagaatgtggagaagactgcaaggtaaacggatcaattattaagaataaaacaagagttcttgtcaatgtttttgcagttatgagggacgaagattcttggactaacccagatgagttcttgcctgaaagatttatggaaagttctgaagagaaaattggtgagcatcaaatggaatttaaaggtcagaattttcgttaccttccatttggaagtggaagaagaggatgtcctggtgcatcacttgccatgctggttatgcatgcagctgttggagcattggttcagtgcttcgattggaaagttaaggatggtgatagagttgatttgagcttagggtctggatttgctgcagaaatggctacccctcttgtttgttaccctattaaacatatgaatccattttaa

SEQ ID NO: 12811 - protein, 513 aa, Ricinus communis
MALSEMSYYLLFLIWFITALLVHYFIKHAFFKPPTKLHTPPSPPALPLIGHLHLIGSVLPSSFQALARRYGPLMQIRLGASTCVVASSAAVAKEIFKTQDLNFSSRPEFGSSEYFIYRGSRFVTAQYGDYWRFMKKLCMTRLLAVPQLDKFSDIRDQEKIKLVESVMRCATEGKICDLTSEFTTLTNNTICRMAMSTRCSGSDNDAEEIKGLVKTCLELAGKLSLGDVLGPFKIFDFSGTGKKLVGALKKYDRLVERIIKEHEEKVLKGLVGDRKDLMDILLEIYNDPTAEIRLSKNDIKSFLLDIFFAGTDTSSAAMQWAMGELINSPRAFKILRDEINTVVGSNRLVKESDVPNLPYLRAVVRETLRLHPSAPLIIRECGEDCKVNGSIIKNKTRVLVNVFAVMRDEDSWTNPDEFLPERFMESSEEKIGEHQMEFKGQNFRYLPFGSGRRGCPGASLAMLVMHAAVGALVQCFDWKVKDGDRVDLSLGSGFAAEMATPLVCYPIKHMNPF

SEQ ID NO: 12812 - DNA, 1497 bp, Branchiostoma floridae
  CDS (1)..(1497)
atggctgctgtcgtcagctggatagctgggtctgtccaggagattctgctgatctctggactgactgcgcagacctgtcttgtcttttgtgcggcttttctcctggcatatgttctcttgaaacgcccccaaaacctgcctccctacccggcaggacgcgtgcctgttctcgggcacctcctcgccttgggccgagcgcctcacctgaagctgacggcgtggaggcggcagtacggggacgtcttcaccgtcaggatggggatggaagatgtggtggttctgaacggctacactgccgtcaaggacgcgctcgtggacaggtccgagctgttcgcgtccaggccgccagtctacctgttcgatgcgtttggaaaaaacaaaggattcaaacaaaggaagaggttttccactaccgtcctgaagaacctgggtatgaaggtcggacgtggtagcatcgaggagaaaatcgtagaagaagccaagtttcttcacaacagggtggcagaatacgaaggaaagccatttgacatcgcccatgacgtcaccgtaacggtcgcaaacgtcatttgcaccatgacgttcgggaggcgctacgactacgaggatgagtcgttccaggtgctctcggaggccgttacagccgtagggactgaacttgcggctggccaaatcatcagcgtcttcccttccctgcgctttgttcctggagttaacagggttggtacaaatttggtcgaacacctctcgaagctgcagagggtgctgtgggaggagctctcgcgccatcgcgaacacctggatcgcgagaatccgcgagactttctggatttcggtctgctggaggttgaacggcaggagaaggtggacggtctcacagaggagattgtcatctacctgacccagaacatctttgtggccgggacagaaacgacggcagacactctgttgtgggctcttctctacttaacccagaatccagccattcaacataagatacacgaggagcttgatgccgttgttggcgcgagtctgcccgccctgtcccaccgttcccagctgccctacgtgaacgcctgcctgctggagaccatgaggatccgcactcttgttcccctatcggccccccacgccaccacacaggacgtcaaagtccagcagtttgacatccccaaaggaacccaggtactacctaacctgcactcactccacacggaccccgcctactggcctgacccggaccggtttgaccccgaaaggtttctggacgcggaagggaacgtcatcaacaagcccgagtccttcatgcccttttcaggaggccgccgtgtgtgtctgggtgagcaactggccaggatggagcttttcctgttcttctcgaccctgctgcagtccttcaccttcaagacgccagagggcgctcctcctccaaacactgacggcgtcgttggaataacgctgaccccgcatccgttcaagctctgtgcgatacctcgttag

SEQ ID NO: 12813 - protein, 498 aa, Branchiostoma floridae
MAAVVSWIAGSVQEILLISGLTAQTCLVFCAAFLLAYVLLKRPQNLPPYPAGRVPVLGHLLALGRAPHLKLTAWRRQYGDVFTVRMGMEDVVVLNGYTAVKDALVDRSELFASRPPVYLFDAFGKNKGFKQRKRFSTTVLKNLGMKVGRGSIEEKIVEEAKFLHNRVAEYEGKPFDIAHDVTVTVANVICTMTFGRRYDYEDESFQVLSEAVTAVGTELAAGQIISVFPSLRFVPGVNRVGTNLVEHLSKLQRVLWEELSRHREHLDRENPRDFLDFGLLEVERQEKVDGLTEEIVIYLTQNIFVAGTETTADTLLWALLYLTQNPAIQHKIHEELDAVVGASLPALSHRSQLPYVNACLLETMRIRTLVPLSAPHATTQDVKVQQFDIPKGTQVLPNLHSLHTDPAYWPDPDRFDPERFLDAEGNVINKPESFMPFSGGRRVCLGEQLARMELFLFFSTLLQSFTFKTPEGAPPPNTDGVVGITLTPHPFKLCAIPR

SEQ ID NO: 12814 - DNA, 1527 bp, Branchiostoma floridae
  CDS (1)..(1527)
atgaccggtgctgtccagtggatagctgactccgtccaggagattttgcagatttctgagctgactctgcagacgtttcttgtcctctgttcgactttcctcctggcatgtgtcgtcttcaatcgttcacggtcccgaaacctacctccctacccggcaggacgtgtgcctgttctcgggcacctcctcgccttgggccgagcacctctcctcaagctgacggcgtggaggcggcagtacggggacgtcttcaccgtcaggatggggatggaagatgtggtggttctgaacggctacactgccgtcaaggacgcgctcgtggacaggtccgagctgttcgcgtccaggtcgccattttactacctgtttgatgccatatttggtttcggaaaagacattatttctgcacgttggggttccgggttcagacagaagaagaggtttgctaccaccgtcctgaagaacctgggcatgagggtcggccgtggcagcatcgaggacagcatccgagaggaagcgagctgtctcagaaacaggattgcagaaaacaacggacagccctttgacattgctcatgacgtcgcagtggcggttgcaaacatcatctgctccatggcgttcgggaagcgctacgactacgaggatgaaacgttccgagagctcactaaagcgattgccacgatatcaattgaactcggagcagggcacatcacctccgttttccccttgctacggtttgttcctgtcgtgaatagacctatcatcaaagcgttggaagctagctccaaggtcaaaaatgtaatgagggaggagatatctcgccatcgcgaacacctggatcgcgagaacccacgagacttcctcgacttatgcttactggagctggaacagcaggaaaaggtggagggtctgacggaggagaatgtttttcacatggcgcaggatctcttcctcggaggaactgacacaaccgccaacacactgacctggagtctactctacatgaccttgaaccccgacgtccaaaataaggtccatgaggagcttgatgccgttgttggtgagagtctgcccgccctgtcccaccgttcccagctgccctacgtgaatgcctgcctgctggagaccatgcggatccgcacgattgttcctcttgcaagtcacgccaccacgcaggaggtcaaagtgcagggttatgacattcctaagggaactcagctaatgcttacgtcaccccacatggaccccgcctactggcctgacccggaccggtttgaccccgaaaggtttctggacgcagaagggaacgtcatcaagaagcccgagtcgttcatgcccttttcaggaggccgccgcgtgtgtcttggtgagcagctggccaggatggagcttttcctgttcttctcgaccctgctgcagtccttcaccttcaagacgccagtgggcgctcctcccccaaacactgacgggatacctgggctgacgtttatgccgcatccgttccagcttcttgcaatagagcgttag

SEQ ID NO: 12815 - protein, 508 aa, Branchiostoma floridae
MTGAVQWIADSVQEILQISELTLQTFLVLCSTFLLACVVFNRSRSRNLPPYPAGRVPVLGHLLALGRAPLLKLTAWRRQYGDVFTVRMGMEDVVVLNGYTAVKDALVDRSELFASRSPFYYLFDAIFGFGKDIISARWGSGFRQKKRFATTVLKNLGMRVGRGSIEDSIREEASCLRNRIAENNGQPFDIAHDVAVAVANIICSMAFGKRYDYEDETFRELTKAIATISIELGAGHITSVFPLLRFVPVVNRPIIKALEASSKVKNVMREEISRHREHLDRENPRDFLDLCLLELEQQEKVEGLTEENVFHMAQDLFLGGTDTTANTLTWSLLYMTLNPDVQNKVHEELDAVVGESLPALSHRSQLPYVNACLLETMRIRTIVPLASHATTQEVKVQGYDIPKGTQLMLTSPHMDPAYWPDPDRFDPERFLDAEGNVIKKPESFMPFSGGRRVCLGEQLARMELFLFFSTLLQSFTFKTPVGAPPPNTDGIPGLTFMPHPFQLLAIER

SEQ ID NO: 12816 - DNA, 1437 bp, Aspergillus nidulans FGSC A4
  CDS (1)..(1437)
atgtctaatggtgcacctttcccccttgattaccgcggcactcgcaactacgggcctcgttttatacctgatcgctactcgacttttgtttcatccgctcgcaaaagtccccggaccccgcctggcggctctgaccaagtggtgcacgtcaacgatgctggggtctacaagagaacttttgccgttgcatcgccctttcctaagtccgagtttttctactcatctgtcggagtcggggacgcgattggagccatgacagacacgaagaaacatcgcgtccgccggtcaattctgggtccgcggttacgagccaaggcaattgccccttatacaccaagtttgcaaaagttggtcatcgcctgtatggatatcatggctggcaaggcgcgccagggcaaggtgatcaatctgttgcggtacacgcgtgccctaacggtagatgtgatttccgatttcacatttggacgcccgatgggtgtcgtcaatgaagcagaggaaatgccagacctgctaaatgatttggaggtgtttgggcggcacttccacatcctgaagcattttccgataagtcgcaagttgctagatatcatccctgaatcatttgcgcgcaagttgatgccactgccgggattcttcgagcttcgtgagaaagccaccactgccgtcaacgaagccgtggtagagagacaagctggcaagaccataagcaacaacaccgatggggcaagctttctagacctgcttcttaaccagatcgacgagaatcccagcgtgctggtcgatgaaggttgtgcattcatcaccggcgggagcgacaccacgggcttcaccatggagaacgcaacgtatcttatcctgagccatccacatattttgcagagtcttctccaggaactcgacactagcccacatatcagagatacctttgacctcgaccacatcctacgcctcccgtttctgactgctatcattaaagaaaccctccgtttatacactccggccccaagcccgttgccgcgcaccgtgcctgcagagggcatcgatgttcatggccacttcctccccggcggtacaatcctcacccactccctctacctaatccaccataacccggtgctcttcgcggacccgaaaagcttcaaaccagagcgatggctcgggacgcagggtaaggtgctggagcagtactatgtaccgtttagcaagggttcgcgttcgtgtattggcatggcgcttgcatatcacgaggtttacacctacctttcgcttctgttctcgcgattcgagatggagatcttcgagacaagtcagtcggacatggactggcgggaacatttttttgtcaagcgcaacgggcaactgaggattcggattgtgcgggatagatggactggcgaggctttcccaacaagggcagttgaggctgatttgagataa

SEQ ID NO: 12817 - protein, 478 aa, Aspergillus nidulans FGSC A4
MSNGAPFPLDYRGTRNYGPRFIPDRYSTFVSSARKSPRTPPGGSDQVVHVNDAGVYKRTFAVASPFPKSEFFYSSVGVGDAIGAMTDTKKHRVRRSILGPRLRAKAIAPYTPSLQKLVIACMDIMAGKARQGKVINLLRYTRALTVDVISDFTFGRPMGVVNEAEEMPDLLNDLEVFGRHFHILKHFPISRKLLDIIPESFARKLMPLPGFFELREKATTAVNEAVVERQAGKTISNNTDGASFLDLLLNQIDENPSVLVDEGCAFITGGSDTTGFTMENATYLILSHPHILQSLLQELDTSPHIRDTFDLDHILRLPFLTAIIKETLRLYTPAPSPLPRTVPAEGIDVHGHFLPGGTILTHSLYLIHHNPVLFADPKSFKPERWLGTQGKVLEQYYVPFSKGSRSCIGMALAYHEVYTYLSLLFSRFEMEIFETSQSDMDWREHFFVKRNGQLRIRIVRDRWTGEAFPTRAVEADLR

SEQ ID NO: 12818 - DNA, 1356 bp, Haliangium ochraceum DSM 14365
  CDS (1)..(1356): transl_table=11
atggcgtcggtagctggacttccgcccgccgcacctctcgcgcgctcgctagcgcaactggcgcgagatccgctggcgtttttgaccgagggccgagagcgctacggcgacatctaccggctagggttaggaggcatgcacgttgtgctgctccatcacccccgccacgcacaccacgtcttccgagagcactacaagaactacggaaagggcggcgcgctctgggaggccctgcgcgattacctgggcaatggtctgctagtgaccgagggcgatctctggctgcgccagcgccggcttctacaaccgctcttcaagcgcacgaacatcgacatgcgcatgtcgtcgatgtacgaaattgtcacgcgcgtcctggatagctggggcgaggagtgtgcgcaaaccggctcgctcgacctggtttccgcctgtgcgcggctcagcatgggcgtgagcacaggctccatgtttgggtcggcgttgacccacgaggacacccacgcgctgatggaagaggtgcgcgtggtggttgactccatggtgtggaacatgctcaccaggcgcattccgcaacgcctgcggcccggctatgcgcgctaccgcaaagcgatggatcatatccactcagccctcgacggactgatcgaccattaccaacgctccgaggacggtgacgacgggttgctcgcgatgttttcgtacatcgaggacagcgcgaccggcgcgcgcatgagccgagagttgatgcgcgatgagaccttggatctcctgctcggagcctacgagacgaccgcgcaagcgctggcctggacgttctactgtatcctccagcacgccgaggtcgagcggcgcttgcgcgccgagatcggtgcggtgctgggcgcgcgcagaccggagctcgaggatctaaaacaactgccctatgtggtccgcgtgattcgcgaggcgctgcgcgtctaccctccaggcgcctggatcacgcgcacgacgcgcgaagacgacgagatcgacgggcaccacatcgccgcagggacgacggtcgccgtcgtcacttacgccattcaccaccaccccgcgatctgggagcagcccgagcggtttgagcccgagcgcttcctgccggaggcggacgcggcacgcgagcgctgcgcgtggatcccctttggcagcggtcctcgcgtctgcatgggcatggacttcgccatgctcgagttggccctggccgtgatcctcgcgctccagcgctatgatattcagcgggtcacgagcggcccgatcgcgccccgcttgcgaactacccttacgcccgccgagcccctcgaggtccgcctgcacctccgacctggcgacgcgtga

SEQ ID NO: 12819 - protein, 451 aa, Haliangium ochraceum DSM 14365
MASVAGLPPAAPLARSLAQLARDPLAFLTEGRERYGDIYRLGLGGMHVVLLHHPRHAHHVFREHYKNYGKGGALWEALRDYLGNGLLVTEGDLWLRQRRLLQPLFKRTNIDMRMSSMYEIVTRVLDSWGEECAQTGSLDLVSACARLSMGVSTGSMFGSALTHEDTHALMEEVRVVVDSMVWNMLTRRIPQRLRPGYARYRKAMDHIHSALDGLIDHYQRSEDGDDGLLAMFSYIEDSATGARMSRELMRDETLDLLLGAYETTAQALAWTFYCILQHAEVERRLRAEIGAVLGARRPELEDLKQLPYVVRVIREALRVYPPGAWITRTTREDDEIDGHHIAAGTTVAVVTYAIHHHPAIWEQPERFEPERFLPEADAARERCAWIPFGSGPRVCMGMDFAMLELALAVILALQRYDIQRVTSGPIAPRLRTTLTPAEPLEVRLHLRPGDA

SEQ ID NO: 12820 - DNA, 1335 bp, Kordia algicida OT-1
  CDS (1)..(1335): transl_table=11
atgtataactatccaaatacaattccattcttcaagctattcttaaaatcgtcttccatcacgcgaaacccaattccgtttcacaaaagtggttttgaaaaacatggaaattcatttgcaattgcgccaccatttgcaaaaaaagttatgctaacacgcgatgctgaaatcacaaaacacttactacgtaaaaatcatcggaactacaacaaatctaaaattcaaacgaaattcctctcaaaatacgttgggaaaggattgttgacttctagtggtgattattggttaaaacaacgacgactcattcaacctgcatttcatagagaaaaactgcaaaaattagtcgcgatcatggaaggcactatcgaaaaacaactcgaaaacattcaacgaaacaaagtgatcgattcgtatccaatcatgaacgaattggcgtttcacgtcgtagcaaaatcactattcaattattcttcggatgacaataccatgcatcgactgcaagaaattatagaaactttgcaagattttatcatccgagaaattcgtcagccacacaaaaaatggtggtatcaaatcagtggtttggtcaaaaaacacatggaattggttaaggaaagtagagacattatcaacaaagttattgatgaacgtcgtgtgtccgacaaagaacatgacgatttattagacatgctactcaaagcaaaatacgaagacgatggaacttcaatgaccaacgaacaacttattgatgaaatactaatcttctttgtagcaggacacgaaactacagcaaatgcgctcacgtttacctttcatctcattgcgagaaattctgaagtatataaaaaagttgttgccgaaattgatacaattgacgatggcttaccgccgatggaaaaaatagcaaaactcaattatgtaaaaaactgtgtggaagaagccttgcgcttatatccgccagcgtggattacagatcgagttgcaatagaagatgacgaatttgcaggtttcaagattgaaaaaggaacgatgattggaatctcgttctatgaattgcatcgaaatccaacctattggaaaaatccgaatgacttcattcctgaacgtttctccgatgaaaaccgaaaagaaaccgcaggctattactttccatttggcgccggaccgcgaatgtgtatcggaaatagttttgcactttacgaaatgatgttaactgtctatcaaatgctaaaaaaatatcgcatagaaaccgatcaggaaacggttgaaatcgcaccattaattacgctaaaaccgatcaatgttacgctgaaattcaacaaaagaaacgcttga

SEQ ID NO: 12821 - protein, 444 aa, Kordia algicida OT-1
MYNYPNTIPFFKLFLKSSSITRNPIPFHKSGFEKHGNSFAIAPPFAKKVMLTRDAEITKHLLRKNHRNYNKSKIQTKFLSKYVGKGLLTSSGDYWLKQRRLIQPAFHREKLQKLVAIMEGTIEKQLENIQRNKVIDSYPIMNELAFHVVAKSLFNYSSDDNTMHRLQEIIETLQDFIIREIRQPHKKWWYQISGLVKKHMELVKESRDIINKVIDERRVSDKEHDDLLDMLLKAKYEDDGTSMTNEQLIDEILIFFVAGHETTANALTFTFHLIARNSEVYKKVVAEIDTIDDGLPPMEKIAKLNYVKNCVEEALRLYPPAWITDRVAIEDDEFAGFKIEKGTMIGISFYELHRNPTYWKNPNDFIPERFSDENRKETAGYYFPFGAGPRMCIGNSFALYEMMLTVYQMLKKYRIETDQETVEIAPLITLKPINVTLKFNKRNA

SEQ ID NO: 12822 - DNA, 1221 bp, Haliangium ochraceum DSM 14365
  CDS (1)..(1221): transl_table=11
atgcacgttgtgctgctccatcacccccgccacgcacaccacgtcttccgagagcactacaagaactacggaaagggcggcgcgctctgggaggccctgcgcgattacctgggcaatggtctgctagtgaccgagggcgatctctggctgcgccagcgccggcttctacaaccgctcttcaagcgcacgaacatcgacatgcgcatgtcgtcgatgtacgaaattgtcacgcgcgtcctggatagctggggcgaggagtgtgcgcaaaccggctcgctcgacctggtttccgcctgtgcgcggctcagcatgggcgtgagcacaggctccatgtttgggtcggcgttgacccacgaggacacccacgcgctgatggaagaggtgcgcgtggtggttgactccatggtgtggaacatgctcaccaggcgcattccgcaacgcctgcggcccggctatgcgcgctaccgcaaagcgatggatcatatccactcagccctcgacggactgatcgaccattaccaacgctccgaggacggtgacgacgggttgctcgcgatgttttcgtacatcgaggacagcgcgaccggcgcgcgcatgagccgagagttgatgcgcgatgagaccttggatctcctgctcggagcctacgagacgaccgcgcaagcgctggcctggacgttctactgtatcctccagcacgccgaggtcgagcggcgcttgcgcgccgagatcggtgcggtgctgggcgcgcgcagaccggagctcgaggatctaaaacaactgccctatgtggtccgcgtgattcgcgaggcgctgcgcgtctaccctccaggcgcctggatcacgcgcacgacgcgcgaagacgacgagatcgacgggcaccacatcgccgcagggacgacggtcgccgtcgtcacttacgccattcaccaccaccccgcgatctgggagcagcccgagcggtttgagcccgagcgcttcctgccggaggcggacgcggcacgcgagcgctgcgcgtggatcccctttggcagcggtcctcgcgtctgcatgggcatggacttcgccatgctcgagttggccctggccgtgatcctcgcgctccagcgctatgatattcagcgggtcacgagcggcccgatcgcgccccgcttgcgaactacccttacgcccgccgagcccctcgaggtccgcctgcacctccgacctggcgacgcgtga

SEQ ID NO: 12823 - protein, 406 aa, Haliangium ochraceum DSM 14365
MHVVLLHHPRHAHHVFREHYKNYGKGGALWEALRDYLGNGLLVTEGDLWLRQRRLLQPLFKRTNIDMRMSSMYEIVTRVLDSWGEECAQTGSLDLVSACARLSMGVSTGSMFGSALTHEDTHALMEEVRVVVDSMVWNMLTRRIPQRLRPGYARYRKAMDHIHSALDGLIDHYQRSEDGDDGLLAMFSYIEDSATGARMSRELMRDETLDLLLGAYETTAQALAWTFYCILQHAEVERRLRAEIGAVLGARRPELEDLKQLPYVVRVIREALRVYPPGAWITRTTREDDEIDGHHIAAGTTVAVVTYAIHHHPAIWEQPERFEPERFLPEADAARERCAWIPFGSGPRVCMGMDFAMLELALAVILALQRYDIQRVTSGPIAPRLRTTLTPAEPLEVRLHLRPGDA

SEQ ID NO: 12824 - DNA, 1587 bp, Triticum monococcum subsp. aegilopoides
  CDS (1)..(1587)
atggctcacgtacatgtagacgagctgctccacgaagcagcagcggcagctccacgatctctcttgatcgcgagtgcggtgctcttctcccttgtggttgtgccgctcctactccgcattattagcaagcagggagcggcaagcgatgccatgctgctgagcctgctcccatctcccccgacgaagctccccatcatcgggcacctgcacctaatgggcgatctcccctacgtctccctggccggcctggccgccaagtacggcccggaactcatgctggtacacctcggtgccgtgcccaccgccgtcgtgtcctcgccgcgcactgccgaggccgtcctgcgcacccacgaccacatcttcgcgtcacggccgcggtcgatggtcttcgacatcatcatgtacgggcagacggactcgtgcttcgcgccctacggcgagcacttccggaaggccaggaagctggtgacggtgcacatgctcaacgccaggaagatacggtcccagcgcccggcccgggaagaggaggtccagctagtgattgtaaagatcgccaaggccgcggccgcgcgcgaggccgtggacatgagcgagctcctgcactcgtacgtcaatgacctcgtttgccgtgctgtgtcgggcaagttctcccaggaggaggggcggaacaagctgttccgtgagctcaccgacatcaacgcggcgctcctgggagggttcaacatcctcgactacttcccgagcctggggaggttcgagttggtctgcaagatggcctgcgccaaggcccgacgggtgaggaagcggtgggacctgctcctcgacaagctaattgacgaccatgcagcaaggatggtaagccgtgaggatgaggcccagcccgcgcaagaagaagacaaagacttcatcgacgtatccctatctcttcagcaggagtatggtctcaccagggaccatatcaaggccatcttgatagacatgtttgaggccggcacggacacctcgtatatgacgctggagtttgccatggcggagctcatacggaagccacaccttatgaagaagctgcaggaagaggtaaggaggaatgtaccaaacgggcaagagatggtcgccgaagacgatctccccaacatgacctacctcaaggctgtcatcaaggagacactccgtctgcacccgccggtacctctcatgattccacacttctccctagacgcctgcaccgttgatggctacacgatcccagcaaacactcgtgtcgttatcaacgcctgggcactccgcaggcacagtagctactgggaaaatgaaaatgaattccaacctgagagatttatgaatggagccggcgttgatctgaagccaaatgagttccattacttgccatttgggtttggacgtagaatgtgccctggggttcactcagcatcagcaacggtcgagacaatgctggcaaacctcatgtaccgtttcgattggaagcttccacccggattgaaggaagaggacatagatatgactgaagtgtttggaataacagtttcaagaaaggaaaagctcatcttagtccccgtgaccgcatga

SEQ ID NO: 12825 - protein, 528 aa, Triticum monococcum subsp. aegilopoides
MAHVHVDELLHEAAAAAPRSLLIASAVLFSLVVVPLLLRIISKQGAASDAMLLSLLPSPPTKLPIIGHLHLMGDLPYVSLAGLAAKYGPELMLVHLGAVPTAVVSSPRTAEAVLRTHDHIFASRPRSMVFDIIMYGQTDSCFAPYGEHFRKARKLVTVHMLNARKIRSQRPAREEEVQLVIVKIAKAAAAREAVDMSELLHSYVNDLVCRAVSGKFSQEEGRNKLFRELTDINAALLGGFNILDYFPSLGRFELVCKMACAKARRVRKRWDLLLDKLIDDHAARMVSREDEAQPAQEEDKDFIDVSLSLQQEYGLTRDHIKAILIDMFEAGTDTSYMTLEFAMAELIRKPHLMKKLQEEVRRNVPNGQEMVAEDDLPNMTYLKAVIKETLRLHPPVPLMIPHFSLDACTVDGYTIPANTRVVINAWALRRHSSYWENENEFQPERFMNGAGVDLKPNEFHYLPFGFGRRMCPGVHSASATVETMLANLMYRFDWKLPPGLKEEDIDMTEVFGITVSRKEKLILVPVTA

SEQ ID NO: 12826 - DNA, 1536 bp, Brassica napus
  CDS (1)..(1536)
atgactaatctttacctcacaatccttctccctactttcatattccttatcgttctcgtcttatctcgccgccgcaataaccgtctccctccaggtccaaacccatggcccatcatcggaaacctccctcacatgggccctaaaccccatcaaacactagccgccatggtaaccacatacggacctatcctccacctacggctagggttcgccgacgttgtggttgccgcctctaaatccgtggccgaacagttcttgaaagttcatgatgccaatttcgctagccgaccacctaactccggagccaaacacatggcgtataactatcaagatcttgtctttgcgccttatggacaacgatggagaatgttgaggaagattagttctgttcatttattttcagctaaagctcttgaagatttcaaacatgttcgacaggaagaggttggaacactcatgcgcgagctagcgcgtgcaaacacgaaaccagtgaacctaggccagttggtaaacatgtgcgtactcaacgcccttggacgagagatgatcggacggcgactgttcggcgccgatgccgatcacaaagcggaggagtttcgatcaatggttacagaaatgatggctctcgccggagtattcaacatcggagatttcgtgcccgcacttgattgtttagatttacaaggcgtcgctggtaaaatgaaacgtctacacaagaggttcgacgcttttctatcgtcgatcttggaagaacacgaggcgatgaagaacggccaggatcaaaagcacacggacatgcttagcactttaatctcgcttaagggaactgattttgatggtgagggtggaactctaactgatacagagatcaaagccttgctattgaacatgtttacggctggaactgacacgtcagcaagtacggtggactgggccatagctgaactgatccgtcacccggagataatgagaaaagcccaagaagagcttgactccgtcgtcggacgtggaaggcccattaacgagtcggacctttctcagcttccttaccttcaggcggttatcaaagagaatttcaggctccatccaccaacaccactctcgttaccacacatcgcatcagagagctgtgagatcaacggctaccatatcccgaaaggatcaacccttttgacaaacatatgggccatagcccgtgacccggaccaatggtctgacccgttaacgtttcgacccgagagatttttacccggtggtgaaaaagctggcgttgatgtgaaaggaaacgatttcgagcttataccgttcggagccgggaggagaatctgcgccgggttgagtttagggttacggacgattcagttactgacggcgacgctggtgcacggatttgaatgggaactggccggaggagttacgccggagaagctgaacatggaggagacttatgggattactctacaaagagcggttcctttggttgtgcatcctaagctaaggttggatatgagtgcttatggactcgggtcggcttaa

SEQ ID NO: 12827 - protein, 511 aa, Brassica napus
MTNLYLTILLPTFIFLIVLVLSRRRNNRLPPGPNPWPIIGNLPHMGPKPHQTLAAMVTTYGPILHLRLGFADVVVAASKSVAEQFLKVHDANFASRPPNSGAKHMAYNYQDLVFAPYGQRWRMLRKISSVHLFSAKALEDFKHVRQEEVGTLMRELARANTKPVNLGQLVNMCVLNALGREMIGRRLFGADADHKAEEFRSMVTEMMALAGVFNIGDFVPALDCLDLQGVAGKMKRLHKRFDAFLSSILEEHEAMKNGQDQKHTDMLSTLISLKGTDFDGEGGTLTDTEIKALLLNMFTAGTDTSASTVDWAIAELIRHPEIMRKAQEELDSVVGRGRPINESDLSQLPYLQAVIKENFRLHPPTPLSLPHIASESCEINGYHIPKGSTLLTNIWAIARDPDQWSDPLTFRPERFLPGGEKAGVDVKGNDFELIPFGAGRRICAGLSLGLRTIQLLTATLVHGFEWELAGGVTPEKLNMEETYGITLQRAVPLVVHPKLRLDMSAYGLGSA

SEQ ID NO: 12828 - DNA, 1533 bp, Ageratina adenophora
  CDS (1)..(1533)
atgaccatactaaccctactgctctacacctccatcagtgcgttagcattctatctcctgcttaacctgcgcacacgccaccctaaacgtctcccccctggcccaaccccctggccgattgtcggaaaccttccgcacctcggtacggttccgcatcactcgctggcagccttggctacaaagtacggcccgttgatgcacctacgactcggtttcgtggacgtggtggttgccgcgtctgcatcagtcgcttcacagtttttgaagagtcatgacgccaatttcgctagcagaccgccaaactccggagcgaagcatatcgcgtataattatcatgatctggtgtttgcaccgtacggtccgcgatggcggatgcttcggaagatctgctcggtgcaccttttttctgccaaatcactcgatgattttcgtcatgttcgacaggaggaggtggcaatactcacacgtgttttgatcagtgccggagaaaccacagttaaacttggtcaactgcttaacgtatgcaccacaaacgcattagcacgtgtgctgttagggcggagagtgttcggcgatggaagtagagatagtgatccaaaggctgatgagttcaaagatatggtcgttgaaatgatggtgttggctggggaatttaacatcggtgacttcattccggcgcttgactggcttgacctacaaggcgtgacgaagaaaatgaagaaactacatactcgattcgattcgttctttaacttgatccttgaagaacataagtcgtatggtaacagtggtgacttgttgagcacgttgatcggactcaaggacgatgcggatgcggatggagagggagtgaagcttacagacatcgaaattaaagctttgctactgaacctattcactgcaggaacagacacatcatcgagtacagtggaatgggcaatagcggaactcattcgccatcctcgactactaaagcaagcccaagaagaaatagacaccgtagttggtcgagaccggcttgtaaccgaattagacctaaaccaactaacattcatccaagccattgtaaaagaaacctttagactccacccttcaacaccactctccctgccaagaatttcatccgaggcttgtgaagttgatgggtattacattccaaagggatccacacttcttgttaacgtttgggccattgcacgcgatccggaaatgtggacagacccgcttgaattccggcccagtcggttcttgcctggaggcgaaaaacccaatgttgatgttcggggaaacgactttgaagttataccatttggggctggacgaaggatttgtgtgggtatgaccctaggattgagaatggtccaattgcttgttgcaacattggtccaaacatttgattgggaattggctaaagggttagagcccgagaagctcaacatggatgaagcctatgggctaacccttcagagggccgagcagttgattgtgcacccaaagccgaggctagctcctggcgtatacgaaagttgttaa

SEQ ID NO: 12829 - protein, 510 aa, Ageratina adenophora
MTILTLLLYTSISALAFYLLLNLRTRHPKRLPPGPTPWPIVGNLPHLGTVPHHSLAALATKYGPLMHLRLGFVDVVVAASASVASQFLKSHDANFASRPPNSGAKHIAYNYHDLVFAPYGPRWRMLRKICSVHLFSAKSLDDFRHVRQEEVAILTRVLISAGETTVKLGQLLNVCTTNALARVLLGRRVFGDGSRDSDPKADEFKDMVVEMMVLAGEFNIGDFIPALDWLDLQGVTKKMKKLHTRFDSFFNLILEEHKSYGNSGDLLSTLIGLKDDADADGEGVKLTDIEIKALLLNLFTAGTDTSSSTVEWAIAELIRHPRLLKQAQEEIDTVVGRDRLVTELDLNQLTFIQAIVKETFRLHPSTPLSLPRISSEACEVDGYYIPKGSTLLVNVWAIARDPEMWTDPLEFRPSRFLPGGEKPNVDVRGNDFEVIPFGAGRRICVGMTLGLRMVQLLVATLVQTFDWELAKGLEPEKLNMDEAYGLTLQRAEQLIVHPKPRLAPGVYESC

SEQ ID NO: 12830 - DNA, 1584 bp, Oryza sativa subsp. indica
  CDS (1)..(1584)
atggatcatcagctggtagctcgaggtctcttcaagcctctcctcctcttcgtcgccggcctgattgttctctacgcgctccgccgccgccgccaccgccggagcagcgacctgcgcctcccgccgagcccgttcgggctgcccatcctgggccacctccacctgctcgcgccgctgccgcaccaggcgctccaccgcctcgccgcgcgccacggcccgctcctcttcctccgcctcggctccgtcccctgcgtcgccgcctgctcgccggacgccgcccgcgaggtgctcaagacccacgaggccgcgttcctcgaccgccccaagcccgccgccgtccaccgcctcacctacggcggccaggacttctccttctcggcgtacgggccctactggcgcttcatgaagcgcgcgtgcgtgcacgagctcctcgccggacgaacgctcgaccggctccgccacgtccgccgcgaggaggtggcgcgcctcgtcggctcgctccgcgcgagcgccgacggcggcgagcgcgtcgacgtcgacgccgcgctcatgggcctcaccggcgacatcgtctcccgcatggtgatgggccggcggtggaccggcgacgacaacgacgcggaggagatgcggagcgtggtcgccgagacggcggagctcaccggcacgttcaacctgcaggactacatcggcgtcttcaagtactgggacgtgcaggggctcggcaagcgcatcgatgcggtgcaccgcaagttcgacgccatgatggagcggatactgacgccgagggaagccaagaggaagctacgccggcaagcggcggccgacggcgaggacgacgagaaggacctccttgacatgctcttcgacatgcacgaagacgaagccgccgagatgcgtctcaccagagacaacatcaaggcgttcatgctggacatcttcgcggcggggacggacacgacgacgatcacgctggagtgggcgctgtcagagctaatcaacaacccgcccgtcctccgcaagctacaggcggagctcgacgcggtggtcggcggcgcgcggctcgccgacgagtcggacatcccgagcctcccgtacctgcaggccgtggcgaaggagacgctgcggctgcacccgacgggcccgctcgtggtgcggcgctcgctggagcgcgccacggtggccggctacgacgtcccggcgggcgccacggtgttcgtgaacgtgtgggcgatcggccgcgacgcggcgtggtggccggagccgacggcgttccggccggagaggttcgtctccggcggcggcggcggcgggacggcggcggacgtgcgcgggcagcacttccacctgctgccgttcgggtcggggcggcggatctgccccggcgcgtcgctggcgatgctggtggtgcaggcggcgctggccgccatggtgcagtgcttcgagtggagccccgtcggcggcgcgccggtggacatggaggaggggcccgggctgacgctgccgcggaagcgcccgctcgtctgcaccgtctcgccgcggatacacccgctgccggctgctgcgtcagcatcgctgacgtga

SEQ ID NO: 12831 - protein, 527 aa, Oryza sativa subsp. indica
MDHQLVARGLFKPLLLFVAGLIVLYALRRRRHRRSSDLRLPPSPFGLPILGHLHLLAPLPHQALHRLAARHGPLLFLRLGSVPCVAACSPDAAREVLKTHEAAFLDRPKPAAVHRLTYGGQDFSFSAYGPYWRFMKRACVHELLAGRTLDRLRHVRREEVARLVGSLRASADGGERVDVDAALMGLTGDIVSRMVMGRRWTGDDNDAEEMRSVVAETAELTGTFNLQDYIGVFKYWDVQGLGKRIDAVHRKFDAMMERILTPREAKRKLRRQAAADGEDDEKDLLDMLFDMHEDEAAEMRLTRDNIKAFMLDIFAAGTDTTTITLEWALSELINNPPVLRKLQAELDAVVGGARLADESDIPSLPYLQAVAKETLRLHPTGPLVVRRSLERATVAGYDVPAGATVFVNVWAIGRDAAWWPEPTAFRPERFVSGGGGGGTAADVRGQHFHLLPFGSGRRICPGASLAMLVVQAALAAMVQCFEWSPVGGAPVDMEEGPGLTLPRKRPLVCTVSPRIHPLPAAASASLT

SEQ ID NO: 12832 - DNA, 1569 bp, Lotus japonicus
  CDS (1)..(1569)
atgttggtggaacttgcattagcattactggccatagctctgttcttacatttacgtcccacaccaactgccaaatccaaggcccttcgtcaccttccaaaccctccaagtcccaagcctcgtcttccattcgttggacaccttcaccttttggaccaaccacttctccaccactccctcatcaaactcggcgagcgatatgggcctttgtactctctctattttggatccatgcccaccgttgttgcctcaacccctgaactcttcaaactcttccttcagacccatgaggcctcttccttcaacacaaggttccaaacctctgccattaggcgcctcacctatgacaactctgttgccatggtcccttttgctccttattggaagttcatcaggaagatcatcatgaacgacctcctcaacgccaccaccgtcaacaagttgaggcctttgaggagccaagagattcgtaaggttctgaaggctatggcacatagtgcggaatctcaacaaccccttaatgtcactgaggagcttctcaagtggacaaacaacaccatctctcgaatgatgttgggggaggctgaagaggtcagagatattgctcgtgaggtgcttaagatcttcggggaatatagtctcacagacttcatttggccattgaagaagctcaaggttggacagtatgaaaagagaatagatgagatatttaacaaattcgaccccgtcattgagaaggtcatcaagaaacgccaagagataataaagaggagaaaagagagagatggagaacttgaggagggtgagcaaagtgtagttttcctcgatactttgcttgaatttgctgaagatgagaccatggaaatcaaaatcacaaaggaacaaattaagggtcttgtagtggatttcttctctgcagggacagattcgacagctgtggcaacagactgggctctatcagagctcatcaacaacccgagggtgctgaagaaagcaagagaggaagttgaaagtgttgttggaaaagatagacttgttgatgaagcagatattcaaaatcttccatacattagagccatcgtgaaggagacattccgcatgcatcctccactccctgttgttaagagaaagtgtgtacaagaatgtgagctcaacggttacgtgatcccagagggagcactgatactcttcaacgtgtgggccgtgcaaagagatcccaaatactgggagggcccatccgaattccgtcctgagaggtttttaactgctgaagggggagcaacctccattgatcttagaggccagaatttcgagcttctcccatttgggtctggaaggaggatgtgtccaggtgtgaatttggcaactgcaggaatggccacattgcttgcatctgttatccaatgctttgatttacaggttgtgggtcaaaagggcaaattattgaaaggaagtgatgccaaagttagcatggaagagagtcctggtctcactgttccaagggcacataatctgatgtgcgttccacttgcaagaaccaacgtcacatctgaactcctttcctcataa

SEQ ID NO: 12833 - protein, 522 aa, Lotus japonicus
MLVELALALLAIALFLHLRPTPTAKSKALRHLPNPPSPKPRLPFVGHLHLLDQPLLHHSLIKLGERYGPLYSLYFGSMPTVVASTPELFKLFLQTHEASSFNTRFQTSAIRRLTYDNSVAMVPFAPYWKFIRKIIMNDLLNATTVNKLRPLRSQEIRKVLKAMAHSAESQQPLNVTEELLKWTNNTISRMMLGEAEEVRDIAREVLKIFGEYSLTDFIWPLKKLKVGQYEKRIDEIFNKFDPVIEKVIKKRQEIIKRRKERDGELEEGEQSVVFLDTLLEFAEDETMEIKITKEQIKGLVVDFFSAGTDSTAVATDWALSELINNPRVLKKAREEVESVVGKDRLVDEADIQNLPYIRAIVKETFRMHPPLPVVKRKCVQECELNGYVIPEGALILFNVWAVQRDPKYWEGPSEFRPERFLTAEGGATSIDLRGQNFELLPFGSGRRMCPGVNLATAGMATLLASVIQCFDLQVVGQKGKLLKGSDAKVSMEESPGLTVPRAHNLMCVPLARTNVTSELLSS

SEQ ID NO: 12834 - DNA, 1515 bp, Dendrobium hybrid cultivar
  CDS (1)..(1515)
atgtctatcttcctcatcacctcactcctcctctgcctttccctccacctcctcctccgccgccgccaccgcagccgcttccccctccctcccggaccccccaacctccccatcctcggcgccctccccttcatcggccccatgccccactccggcctcgccctcctcgcccgccgctacggccccatcatgttcctcaagatgggcatccgccgcgtcgtcgtagcatcctcagccaccgccgctcgatcctttctcaaaaccttcgactctcacttctcagaccgcccctccggcgtcatctccaaggaaatcagctacaacggccagaacatggtcttcgccgactacggccctaagtggaagctcctccgcaaagtctccagcctccatctcctcggctccaaggccatgtctcgctgggccggcgtgcggcgcgacgaggccttctccatgattcaattcttgaagaaacacagcgatacggaaaagccagttttgcttccgaatttgttggtttgtgccatggcgaatgtgattgggaggatcgcgatgagtaaaagagtgtttgacgaggagggggaggaggcgaaggagtttaaggagatgatcaaggagctgttggttgggcagggggcttcgaatattggggatttggtgccgtcgatcgggtggttggatccgatgggagtgaagaagaggatgctgggattgaatcggaggtttgataggatggtgagtaagctgttggtggagcatgccgagactgcaggggagaggcaggggaacccggatctgcttgatcttgttgttggtagtgagcttacaggtgaggatggggagggactttgtgaagataatataaagggcttcatctctgacctattcgtcgcggggacggacacctccgccatagtcatcgagtgggcgatggccgaaatgcttaaaaacccatcaatcctccaacgagcacaacaggaaaccgatcgcgtcgtcggccgccaccgtcttctcgacgaatccgacataccaaagctcccctacctccaagccatctgcaaggaagctctccgaaaacaccctccaacacctctcagcatacctcactacgcctccgagccctgcgaggtagaaggctaccacattcccgggaagacttggctgctcgtcaacatatgggccatcgggcgggacccggacgtgtgggagaacccgttgctgttcgacccggagaggtttctgcaagggaagatggcgagaatcgatccgatgggaaacgacttcgagctcataccgtttggagccgggaggaggatttgcgccgggaagttagcggggatgctgatggtgcagtattatttgggaacgctggtgcatgcctttgactggagtttgccggaaggagttggggagctggacatggaggaagggccggggttggtgttgccgaaggctgtgccgctctcggtgatggcgaggccgaggctggcgccggcggcttatggccttctttaa

SEQ ID NO: 12835 - protein, 504 aa, Dendrobium hybrid cultivar
MSIFLITSLLLCLSLHLLLRRRHRSRFPLPPGPPNLPILGALPFIGPMPHSGLALLARRYGPIMFLKMGIRRVVVASSATAARSFLKTFDSHFSDRPSGVISKEISYNGQNMVFADYGPKWKLLRKVSSLHLLGSKAMSRWAGVRRDEAFSMIQFLKKHSDTEKPVLLPNLLVCAMANVIGRIAMSKRVFDEEGEEAKEFKEMIKELLVGQGASNIGDLVPSIGWLDPMGVKKRMLGLNRRFDRMVSKLLVEHAETAGERQGNPDLLDLVVGSELTGEDGEGLCEDNIKGFISDLFVAGTDTSAIVIEWAMAEMLKNPSILQRAQQETDRVVGRHRLLDESDIPKLPYLQAICKEALRKHPPTPLSIPHYASEPCEVEGYHIPGKTWLLVNIWAIGRDPDVWENPLLFDPERFLQGKMARIDPMGNDFELIPFGAGRRICAGKLAGMLMVQYYLGTLVHAFDWSLPEGVGELDMEEGPGLVLPKAVPLSVMARPRLAPAAYGLL

SEQ ID NO: 12836 - DNA, 1536 bp, Brassica rapa subsp. campestris
  CDS (1)..(1536)
atgactaatctttacctcacaatccttctccctactttcatattccttatcgttcttgtcttatctcgccgccgcaataaccgtctccctccaggtccaaacccatggcccatcatcggaaacctccctcacatgggccctaaaccccatcaaacactagccgccatggtaaccacatacggacctatcctccacctacggctagggttcgccgacgttgtggttgccgcctctaaatccgtggccgaacagttcttgaaagttcatgatgccaatttcgctagccgaccacctaactccggagccaaacacatggcatataactatcaagatcttgtctttgcgccttatggacaacgatggagaatgttgaggaagattagttctgttcatttattttcagctaaagctcttgaagatttcaaacatgttcgacaggaagaggttggaacactcatgcgcgagctagcgcgtgcaaacacgaaaccagtgaacctaggccagttggtaaacatgtgcgtactcaacgcccttggacgagagatgatcggacggcgactgttcggcgccgatgccgatcacaaagcggaggagtttcgatcaatggttacagaaatgatggctctcgccggagtattcaacattggagatttcgtgcccgcactcgattgtttagatttacaaggcgtcgctggtaaaatgaaacgtctacacaagaggttcgacgcttttctatcgtcgatcttggaagaacacgaggcgatgaagaacggccaggatcaaaagcacacggacatgcttagcactttaatctcgcttaagggaactgattttgatggtgagggtggaactctaactgatacagagatcaaagccttgctattgaacatgtttacggccggaactgacacgtcagcaagtacggtggactgggccatagctgaattaatccgtcacccggagatgatgagaaaagcccaagaagagcttgactccgtcgtgggacgtggaaggcccattaacgagtcggacctttctcagcttccttaccttcaggcggttatcaaagagaatttcaggctccatccaccaacaccactctcgttaccacacatcgcatcagagagctgtgagatcaacggctatcatatccccaaaggatcaacccttttgacaaacatatgggccatagcccgtgacccggaccaatggtccgacccgttaacgtttcgacccgagagatttttacccggtggtgaaaaagccggcgtggatgtgaaaggaaacgatttcgagcttataccgttcggagccgggaggagaatctgcgccgggttgagtttatggttacggacgattcagttactgacggcgacgctggtgcacggatttgaatgggaactggccggaggagttacgccggagaagctgaacatggaagagacttatgggattactctgcagagagcggttcctttggttgtgcatcctaagccaaggttggataggagtgcttacggactcgggtcggcttaa

SEQ ID NO: 12837 - protein, 511 aa, Brassica rapa subsp. campestris
MTNLYLTILLPTFIFLIVLVLSRRRNNRLPPGPNPWPIIGNLPHMGPKPHQTLAAMVTTYGPILHLRLGFADVVVAASKSVAEQFLKVHDANFASRPPNSGAKHMAYNYQDLVFAPYGQRWRMLRKISSVHLFSAKALEDFKHVRQEEVGTLMRELARANTKPVNLGQLVNMCVLNALGREMIGRRLFGADADHKAEEFRSMVTEMMALAGVFNIGDFVPALDCLDLQGVAGKMKRLHKRFDAFLSSILEEHEAMKNGQDQKHTDMLSTLISLKGTDFDGEGGTLTDTEIKALLLNMFTAGTDTSASTVDWAIAELIRHPEMMRKAQEELDSVVGRGRPINESDLSQLPYLQAVIKENFRLHPPTPLSLPHIASESCEINGYHIPKGSTLLTNIWAIARDPDQWSDPLTFRPERFLPGGEKAGVDVKGNDFELIPFGAGRRICAGLSLWLRTIQLLTATLVHGFEWELAGGVTPEKLNMEETYGITLQRAVPLVVHPKPRLDRSAYGLGSA

SEQ ID NO: 12838 - DNA, 1542 bp, Hieracium pilosella
  CDS (1)..(1542)
atgaatatatttgtactgttccaaagtctttctccggccgtcatcgctgccgtagtccttccatcactcttcctctatttactctccaagagcaaacaaaaccaccgtcttccaccgagccctccgtcattaccgatcatcggccaccttcaccacctcggcccactcatccaccagtctttccacaacctctccacccgctacggccctctcatccacctccgtctcggttccgtcccttgcgtcgtcgcctccacgccggatctcgcgcgtgacttcctcaaaacgaacgaactcgcattctcttcaagaaaacactccttagccatcgaccatattacttacggcgtcgccttcgccttcgccccgtacggaccttactggaaattcatcaagaaattgtctacggtcgagcttttgggcaaccaaaatctcggtcatttcctcccgattcgaacccaagaaatccatgagcttcttcacacgttgatggagaaatcgaagcgaaaagagagcgtgaacttgactgaagagttgttgaagctaaccaacaacgtgatatgccaaatgatgatgagcattcgatgttcgggaacgaacagcgaggctgatgaagccaagaatctcgtgcgagaggtgacaacgatcttcggacagtttaatgtttcggattttatatggttctgcaagaacttggatttgcaagggtttaagaagaggtacgaggatacacatagaaggtacgatgctttgcttgaaaaaatcatatctgagagggaagaaaagagaagaaaaggagggaagagagatgatgtcaaaggtacggattttcttgatatgttgcttgatgttttggaggatggaaaagctgagattaagattacaagagatcacatcaaagccctgattttggacttttttacagctgcaacagatacaactgcaatagctgtcgaatggacaatggtagaactaattaataaccctaaggtgctcgagaaagcaaaaaaagaggttgataacgttatcggaaattcccggctagttcaagaatcagatgcacctaacctcccatatatccaagcaatcataaaggaaaccctacgacttcatccaccaattccaatgttgattcgcaagtccattgaaaaagtcaccgttcaaggatatgagatccccgctggcaccatgttattcgtcaacatttggtcaattggaagaaatgctcaatattgggaatccccattagagttcgaaccagatcggttttttgaaggtgatacattaaaaagctctctagatatcaagggacaaagttttcaacttttgccttttggaacgggtaggagagggtgtcccggcattaatttggccatgagagaacttccggtggtgattgccggcctcattcaatgctttgaatgggatgttaacaacaaggaagcattaattacggatgaacgggctggattgaccgctccaagggctgtggattttgtgtgtgttccatcgatgcgagaaaattgtcccaaggttttttga

SEQ ID NO: 12839 - protein, 513 aa, Hieracium pilosella
MNIFVLFQSLSPAVIAAVVLPSLFLYLLSKSKQNHRLPPSPPSLPIIGHLHHLGPLIHQSFHNLSTRYGPLIHLRLGSVPCVVASTPDLARDFLKTNELAFSSRKHSLAIDHITYGVAFAFAPYGPYWKFIKKLSTVELLGNQNLGHFLPIRTQEIHELLHTLMEKSKRKESVNLTEELLKLTNNVICQMMMSIRCSGTNSEADEAKNLVREVTTIFGQFNVSDFIWFCKNLDLQGFKKRYEDTHRRYDALLEKIISEREEKRRKGGKRDDVKGTDFLDMLLDVLEDGKAEIKITRDHIKALILDFFTAATDTTAIAVEWTMVELINNPKVLEKAKKEVDNVIGNSRLVQESDAPNLPYIQAIIKETLRLHPPIPMLIRKSIEKVTVQGYEIPAGTMLFVNIWSIGRNAQYWESPLEFEPDRFFEGDTLKSSLDIKGQSFQLLPFGTGRRGCPGINLAMRELPVVIAGLIQCFEWDVNNKEALITDERAGLTAPRAVDFVCVPSMRENCPKVF

SEQ ID NO: 12840 - DNA, 1527 bp, Selaginella moellendorffii
  CDS (1)..(1527)
atggaacacttcgatcttgccctctacctgggcttgatcctcctggctggagcgctatggaggcaataccgctctttcaaggtacgactaccaccaggtccgcggggcttgcctttgatcggccatctccatctcctgagcacactgccacaccgatccttgcaaaagctgtcgcaagcccacgggccactcatgcacctccgatttggcacagtaccagtgattgtggcgtccagtccagccatggccaaggaagttctcaagacccacgacctcgcatttgcgtcgaggccatacctcctcgtcggtgagtacgctgcttacaacttccacaacattggcctcgccccctatggcgatcactggaagatgatgaggaagctgtgctccaccgagctcttcacggccaagcggatcgactccttctcgtgggtgagagtggaggagctgtccggcatggtatctggattgctggcgaaatcggcgagcaaggaggtggtgcaaatcaagagcttcctcaccgactttactttcaatgtcatgacgcgaatcctgatggaccgggccttcttcgggccggctggcgcggactcacagggcaaggcacgggagtttcgggggattgtggaggagatcttgcaggtggccgggagtttcaacgtgagcgagtacattcccagtgcattcaagtggatcgactggaacatccctcgtttcaagaggcttcatgctcgccaggacaggttcctccaggagatcatcgacgaacacaaggttggtcacgatgctctagccaagcctagagatttcatagacatccttctctcctatttcaaccatggagactctcgaatcgacttggacaacatcaaagctgtgctttcagatttgctgccagggggaaccgacacatccatcacaacagtggagtggatcctggcggagctacttcgaaacccacttgcattgaagaaggcccaagacgagctcgacgcggtggtagggaaagatcgcatggtaaacgaatcggatttccccaagctccactacctgcacgcgatcatcaaggagacctttcgtctccaccccccgatcgcgctgctcgtcccacacatgtcaagatacgagtgcaaggtggccggctacgacgttccaaagggggctaccacgctcgtcaatgtctacgcgattgggagagacccaacggtgtgggaggatcccactcggttctctcccgataggttcctggagggggcggggaagggcatggacgtccgaggccaggacttcgagctccttccattcggctcggggcgacgttcgtgtcctgggcttcagctgggactgaaaacggtcgagttggctttgtcaaatctcgtccatggcttcgactggagctttcccaacggcggcggtggcaaagatgcttccatggacgaggctttcggcttggtcaattggatggcgactccattgcgagctgtggttgctcctcggctaccacctcatgcttatgagaaagtttga

SEQ ID NO: 12841 - protein, 508 aa, Selaginella moellendorffii
MEHFDLALYLGLILLAGALWRQYRSFKVRLPPGPRGLPLIGHLHLLSTLPHRSLQKLSQAHGPLMHLRFGTVPVIVASSPAMAKEVLKTHDLAFASRPYLLVGEYAAYNFHNIGLAPYGDHWKMMRKLCSTELFTAKRIDSFSWVRVEELSGMVSGLLAKSASKEVVQIKSFLTDFTFNVMTRILMDRAFFGPAGADSQGKAREFRGIVEEILQVAGSFNVSEYIPSAFKWIDWNIPRFKRLHARQDRFLQEIIDEHKVGHDALAKPRDFIDILLSYFNHGDSRIDLDNIKAVLSDLLPGGTDTSITTVEWILAELLRNPLALKKAQDELDAVVGKDRMVNESDFPKLHYLHAIIKETFRLHPPIALLVPHMSRYECKVAGYDVPKGATTLVNVYAIGRDPTVWEDPTRFSPDRFLEGAGKGMDVRGQDFELLPFGSGRRSCPGLQLGLKTVELALSNLVHGFDWSFPNGGGGKDASMDEAFGLVNWMATPLRAVVAPRLPPHAYEKV

SEQ ID NO: 12842 - DNA, 1545 bp, Glycyrrhiza uralensis
  CDS (1)..(1545)
atgcttgacatccaaggctacctcgtgctattcctcttatggttcatctcaaccattttgattagatccatcttcaaaaaatcccagtgttataaactaccaccaggacccccaatctctttaccactcattggacacgctccttaccttagatcactcctccaccaagcactctacaaactctccacccgatatgggcccttgatgcacgtcctcatcggttcgcaacatgtcatcgttgcgtcctctgcagaaatggctaagcaaatcctaaaaacctacgaggagtcgttttgcaaccgtccgatcatgatcgcgagcgagaatttgacttacggcgccgccgattacttcttcattccatatggaacctactggaggttccttaagaagctctgcatgacagagcttcttagtgggaagacgcttgagcactttgtcaatatccgcgaggatgagattcagtgcttcttgaggaatgttctggagatatcgaagaccgggaaaggggtggagatgaggcaggagttgataaggcacacaaacaacatcatttctaggatgactatggggaagaagagtaatgggacaaatgatgaggttggtcaggtgaggaagttggttagggagattggggaacttcttggtgcttttaacttgggtgacattattgggttcatgaggccttttgatctgcaagggtttgggaagaagaatagggatgcacaccataatatggatgtgatgatggagaaggtgctcaaggagcatgaagaggccagggcaaaggagaagggtggtgctgagagtgataggaagaaggatctatttgacattctgttgaacttgattgaagctgatggtgctgacaataaactcactagagaaagtgccaaagcctttgcactggacatgttcattgctgggacaaacggaccagcaagtgtgttagaatggtcactggcagaactgattagaaatccacaagttttcaagaaggcaagagaagagattgactctgttgttggaaaggaaaggctagtcaaagaatcagacataccaaacctaccttacctccaagcagtggtcaaagaaaccctgaggatgcacccaccaaccccaatctttgcaagggaagccataaggggttgccaagttgatggctatgacatcccagcaaactcaaagatcttcatcaatgcatgggccattggaagggatccaaagtattgggacaacccacaagtttatagccctgaaaggttcttaatcactgatgaacctggaaagagtaaaattgatgttagggggcaatactaccaattgttgccatttgggagtgggagaagaagctgccctggatcctcacttgcattgcttgtcatccaagcaacacttgcaagtttggtacagtgctttgattgggttgttaatgatggtaagaatagtgagattgacatgtcagaggaaggaagggtaactgtgtttttggctaagcctctcaagtgcaagcctgttcctcgttttgttccattctctgcctga

SEQ ID NO: 12843 - protein, 514 aa, Glycyrrhiza uralensis
MLDIQGYLVLFLLWFISTILIRSIFKKSQCYKLPPGPPISLPLIGHAPYLRSLLHQALYKLSTRYGPLMHVLIGSQHVIVASSAEMAKQILKTYEESFCNRPIMIASENLTYGAADYFFIPYGTYWRFLKKLCMTELLSGKTLEHFVNIREDEIQCFLRNVLEISKTGKGVEMRQELIRHTNNIISRMTMGKKSNGTNDEVGQVRKLVREIGELLGAFNLGDIIGFMRPFDLQGFGKKNRDAHHNMDVMMEKVLKEHEEARAKEKGGAESDRKKDLFDILLNLIEADGADNKLTRESAKAFALDMFIAGTNGPASVLEWSLAELIRNPQVFKKAREEIDSVVGKERLVKESDIPNLPYLQAVVKETLRMHPPTPIFAREAIRGCQVDGYDIPANSKIFINAWAIGRDPKYWDNPQVYSPERFLITDEPGKSKIDVRGQYYQLLPFGSGRRSCPGSSLALLVIQATLASLVQCFDWVVNDGKNSEIDMSEEGRVTVFLAKPLKCKPVPRFVPFSA

SEQ ID NO: 12844 - DNA, 1566 bp, Glycine soja
  CDS (1)..(1566)
atgttgctggaacttgcacttggtttgtttgtgttagctttgtttctgcacttgcgtcccacaccaagtgcaaaatcaaaagcacttcgccacctcccaaaccctccaagcccaaagcctcgtcttcccttcattggccaccttcacctcttaaaagataaacttctccactatgcactcatcgatctctccaaaaagcatggccccttattctctctctccttcggctccatgccaaccgtcgttgcctccacccctgagttgttcaagctcttcctccaaacccacgaggcaacttccttcaacacaaggttccaagcctctgccataagacgcctcacttacgacaactctgtggccatggttccattcggaccttactggaagttcgtgaggaagctcatcatgaacgaccttctcaacgccaccaccgtcaacaagctcaggcctttgaggacccaacagatccgcaagttccttagggttatggcccaaagcgcagaggcccagaagccccttgacgtcaccgaggagcttctcaaatggaccaacagcaccatctccatgatgatgctcggcgaggctgaggagatcagagacatcgctcgcgaggttcttaagatcttcggcgaatacagcctcactgacttcatctggcctttgaagtatctcaaggttggaaagtatgagaagaggattgatgacatcttgaacaagttcgaccctgtcgttgaaagggtcatcaagaagcgccgtgagatcgtcagaaggagaaagaacggagaagttgttgagggcgaggccagcggcgtcttcctcgacactttgcttgaattcgctgaggacgagaccatggagatcaaaattaccaaggagcaaatcaagggccttgttgtcgactttttctctgcagggacagattccacagcggtggcaacagagtgggcattggcagagctcatcaacaatcccagggtgttgcaaaaggctcgtgaggaggtctacagtgttgtgggcaaagatagactcgttgacgaagttgacactcaaaaccttccttacattagggccattgtgaaggagacattccgaatgcacccaccactcccagtggtcaaaagaaagtgcacagaagagtgtgagattaatgggtatgtgatcccagagggagcattggttcttttcaatgtttggcaagtaggaagggaccccaaatactgggacagaccatcagaattccgtcccgagaggttcttagaaactggtgctgaaggggaagcagggcctcttgatcttaggggccagcatttccaactcctcccatttgggtctgggaggagaatgtgccctggtgtcaatttggctacttcaggaatggcaacacttcttgcatctcttatccaatgctttgacctgcaagtgctgggccctcaaggacaaatattgaaaggtgatgatgccaaagttagcatggaagagagagctggcctcacagttccaagggcacatagtctcgtttgtgttccacttgcaaggatcggcgttgcatctaaactcctttcttaa

SEQ ID NO: 12845 - protein, 521 aa, Glycine soja
MLLELALGLFVLALFLHLRPTPSAKSKALRHLPNPPSPKPRLPFIGHLHLLKDKLLHYALIDLSKKHGPLFSLSFGSMPTVVASTPELFKLFLQTHEATSFNTRFQASAIRRLTYDNSVAMVPFGPYWKFVRKLIMNDLLNATTVNKLRPLRTQQIRKFLRVMAQSAEAQKPLDVTEELLKWTNSTISMMMLGEAEEIRDIAREVLKIFGEYSLTDFIWPLKYLKVGKYEKRIDDILNKFDPVVERVIKKRREIVRRRKNGEVVEGEASGVFLDTLLEFAEDETMEIKITKEQIKGLVVDFFSAGTDSTAVATEWALAELINNPRVLQKAREEVYSVVGKDRLVDEVDTQNLPYIRAIVKETFRMHPPLPVVKRKCTEECEINGYVIPEGALVLFNVWQVGRDPKYWDRPSEFRPERFLETGAEGEAGPLDLRGQHFQLLPFGSGRRMCPGVNLATSGMATLLASLIQCFDLQVLGPQGQILKGDDAKVSMEERAGLTVPRAHSLVCVPLARIGVASKLLS

SEQ ID NO: 12846 - DNA, 1566 bp, Glycine soja
  CDS (1)..(1566)
atgttgctggaacttgcacttggtttgtttgtgttagctttgtttctgcacttgcgtcccacaccaagtgcaaaatcaaaagcacttcgccacctcccaaaccctccaagcccaaagcctcgtcttcccttcattggccaccttcacctcttaaaagataaacttctccactatgcactcatcgatctctccaaaaagcatggccccttattctctctctccttcggctccatgccaaccgtcgttgcctccacccctgagttgttcaagctcttcctccaaacccacgaggcaacttccttcaacacaaggttccaagcctctgccataagacgcctcacttacgacaactctgtggccatggttccattcggaccttactggaagttcgtgaggaagctcatcatgaacgaccttctcaacgccaccaccgtcaacaagctcaggcctttgaggacccaacagatccgcaagttccttagggttatggcccaaagcgcagaggcccagaagccccttgacgtcaccgaggagcttctcaaatggaccaacagcaccatctccatgatgatgctcggcgaggctgaggagatcagagacatcgctcgcgaggttcttaagatcttcggcgaatacagcctcactgacttcatctggcctttgaagtatctcaaggttggaaagtatgagaagaggattgatgacatcttgaacaagttcgaccctgtcgttgaaagggtcatcaagaagcgccgtgagatcgtcagaaggagaaagaacggagaagttgttgagggcgaggccagcggcgtcttcctcgacactttgcttgaattcgctgaggacgagaccatggagatcaaaattaccaaggagcaaatcaagggccttgttgtcgactttttctctgcagggacagattccacagcggtggcaacagagtgggcattggcagagctcatcaacaatcccagggtgttgcaaaaggctcgtgaggaggtctacagtgttgtgggcaaagatagactcgttgacgaagctgacactcaaaaccttccttacattagggccattgtgaaggagacattccgaatgcacccaccactcccagtggtcaaaagaaagtgcacagaagagtgtgagattaatgggtatgtgatcccagagggagcattggttcttttcaatgtttggcaagtaggaagggaccccaaatactgggacagaccatcagaattccgtcccgagaggttcttagaaactggtgctgaaggggaagcagggcctcttgatcttaggggccagcatttccaactcctcccatttgggtctgggaggagaatgtaccctggtgtcaatttggctacttcaggaatggcaacacttcttgcatctcttatccaatgctttgacctgcaagtgctgggccctcaaggacaaatattgaaaggtgatgatgccaaagttagcatggaagagagagctggcctcacagttccaagggcacatagtctcgtttgtgttccacttgcaaggatcggcgttgcatctaaactcctttcttaa

SEQ ID NO: 12847 - protein, 521 aa, Glycine soja
MLLELALGLFVLALFLHLRPTPSAKSKALRHLPNPPSPKPRLPFIGHLHLLKDKLLHYALIDLSKKHGPLFSLSFGSMPTVVASTPELFKLFLQTHEATSFNTRFQASAIRRLTYDNSVAMVPFGPYWKFVRKLIMNDLLNATTVNKLRPLRTQQIRKFLRVMAQSAEAQKPLDVTEELLKWTNSTISMMMLGEAEEIRDIAREVLKIFGEYSLTDFIWPLKYLKVGKYEKRIDDILNKFDPVVERVIKKRREIVRRRKNGEVVEGEASGVFLDTLLEFAEDETMEIKITKEQIKGLVVDFFSAGTDSTAVATEWALAELINNPRVLQKAREEVYSVVGKDRLVDEADTQNLPYIRAIVKETFRMHPPLPVVKRKCTEECEINGYVIPEGALVLFNVWQVGRDPKYWDRPSEFRPERFLETGAEGEAGPLDLRGQHFQLLPFGSGRRMYPGVNLATSGMATLLASLIQCFDLQVLGPQGQILKGDDAKVSMEERAGLTVPRAHSLVCVPLARIGVASKLLS

SEQ ID NO: 12848 - DNA, 1605 bp, Camellia sinensis
  CDS (1)..(1605)
atgtttgacttaatctccattgccaccttattctttgttattatctccaccaccatcctcctcctctccataaaccacttcaaaaaaccaccacatctccgccgccgtctcagcctcccaccaacccccttcgccctgccaatcatcggccacctccacctcctcggccccatcatccaccgctccttccatgacctctcctcccgctacggccccttgtttcacctccgcctcggctcagtcccatgcttcgtggtctccactccagagctcgcaaaagagttcctcttgacacatgagctcaagttctcatctcgcagggattccatcgccatccaacgcctcacctatgactctgcattcgccttcgccccttacggtccctactggaaattcctaaagaagctttgtacttgtgatcttctcggcgctcgtagtatcaatcattttcttcccacacggacccgtgaactacactgctttgttcgacttctcatcgacaaggccgtggcttgtgaacctgtcaacatcactaaagagctttcaacgctcgccaacaatatcatctctcaaatgatgattggtgtaaggtgttcggggacgacaggagaggctgaggaggctacaactcttgcccgcgaggtgacgaagatattcggagagtttaatgtgtcggattttatgtgggttatcaggaactttgatttgcaggggtttaggaagagagttgaggatatatacacaaggtatgatgcgttgctggaaaggattatcacaaacagggaagaagtcagagaaaagaacgtacaagaaagaaaattgggtgttggagaaggtcatcacgtcaaggattttcttgatctattgcttgatgttttggaagaggaccattcggagattaacttcagtagagataacattaagggcttgattttggatttcttcaccgcaggaacagatacatcatctattgcaattgaatgggcattagcagagctcatcaacaatccaagagtgctccaaaaagcacaagaggagattgataatgtggttgggaaacatcggttagtaagcgaatcagacggtccaaatcttccatacatccaagccatcataagggaagcacttcggcttcaccctccagtccccttgatcacaagaaaatcaatagaggactgcatgatccaaggatacaacatcccagccaactccatgctatttgtgaatgtttggtctcttgctagaaatcccaagtattgggatagcccactggacttcttgcctgagcgattcttaaggcccgaaaagggtggcccagtgggcccaacagatgttaagggccaacatttccagctattaccctttggtactgggaggagaggctgccctggtacttctttggccatgcaagagctgcctgctatgctagcggcaatgattcagtgtttcgagtggaaggttgtgaatcagagtggggatgtgatgaacggtgatggagcgcttgatatgactgaacaacccgggatgacagctccgagggcccatgatcttgtgtgcatgccgataccacgaatcgatcaactttatgcccttcttgatccatag

SEQ ID NO: 12849 - protein, 534 aa, Camellia sinensis
MFDLISIATLFFVIISTTILLLSINHFKKPPHLRRRLSLPPTPFALPIIGHLHLLGPIIHRSFHDLSSRYGPLFHLRLGSVPCFVVSTPELAKEFLLTHELKFSSRRDSIAIQRLTYDSAFAFAPYGPYWKFLKKLCTCDLLGARSINHFLPTRTRELHCFVRLLIDKAVACEPVNITKELSTLANNIISQMMIGVRCSGTTGEAEEATTLAREVTKIFGEFNVSDFMWVIRNFDLQGFRKRVEDIYTRYDALLERIITNREEVREKNVQERKLGVGEGHHVKDFLDLLLDVLEEDHSEINFSRDNIKGLILDFFTAGTDTSSIAIEWALAELINNPRVLQKAQEEIDNVVGKHRLVSESDGPNLPYIQAIIREALRLHPPVPLITRKSIEDCMIQGYNIPANSMLFVNVWSLARNPKYWDSPLDFLPERFLRPEKGGPVGPTDVKGQHFQLLPFGTGRRGCPGTSLAMQELPAMLAAMIQCFEWKVVNQSGDVMNGDGALDMTEQPGMTAPRAHDLVCMPIPRIDQLYALLDP

SEQ ID NO: 12850 - DNA, 1539 bp, Picea sitchensis
  CDS (1)..(1539)
atggcgaatgtgttttactctgagcgcccaattatggaatacgcagagttttataacaaatttgcctttgctttcctacttgcattcgcggcgtcatgcggattcttgatccgacggagaaaacggaggctgccacctgggccgtttccattgccgatcattggaaaccttcacctactcctgggagagcttccacaccaagccctggcagctctttctctgaaatgcgggcctctcatgtctctccgcctgggctcttctgccctcactttagttgtctcctctgcagatatggccaaggaatttctcaagaataatgatcgccttttcgccggcagacctcaatccatggctgctaagtatttgtcgtataatttctctaacgtcggctatgctccgtatggtgcttactggagacaaatgcgtaagatatgcgttttacagttgctgagctccaaacgcttagagtccttccgcttcataagagaagaggaagtctctactatgattcgttctattatatcagacagtgagggctctcttcccgtgagcattagcaaagccgtgtcaactcttgcgacttctattatctgcaggatggccttcggtagaaagtattccgaccaacagttaattgaaagcatcaaagaaagttttctgttagccggaactttcaatatcggagattatataccatacttggcatggttggatctgcaaggtctgaaacggcgattcaagaaaatacacaagactgtagaccacttcttcgacaatgtaatagaggaacacattgcgcggaatgaccccaacgtcacgccagatcttgtcgacgttttgcttgcaatctgtgcagataaagatacggagttccaaattaaacgaaaacatattaaaggcgtcatcgctgatatgttcgccgctggaacggacacgtcgtcgattggcatagagtgggcaatgtccgaagtgctgagaaaccccccagtgctgaagaagcttcaggacgagctggaacgcgtagttggtatggggcgtatggtacaagaatctgatcttccttctctcgtttatttacaagctgtggtgaaagaagcccttagactccacccaccggggcctcttgccattccccacttatctgtggaggattgcaccgtattgggttatgaaatccctggtggcacttgcgttctgctgaacctttgggccattggcaggaatccaaaatcatgggaggatgccgaaagtttcaagccagagagattcatggaagcaactgggtcagagctggatgcaaaagttcaaaaccttgagtggattccattcggagcaggcaggagaggatgccccggacagcaattgggaatgcttgttgtagagtttgggatggcgcagctgttgcactgtttcaactggaaactccccgacgagatcaatggccaggagttggatatggttgaaaggtttaatggactgacacttccccgggcgcatgaactcttggctgttccaactcctagactttcactacgatga

SEQ ID NO: 12851 - protein, 512 aa, Picea sitchensis
MANVFYSERPIMEYAEFYNKFAFAFLLAFAASCGFLIRRRKRRLPPGPFPLPIIGNLHLLLGELPHQALAALSLKCGPLMSLRLGSSALTLVVSSADMAKEFLKNNDRLFAGRPQSMAAKYLSYNFSNVGYAPYGAYWRQMRKICVLQLLSSKRLESFRFIREEEVSTMIRSIISDSEGSLPVSISKAVSTLATSIICRMAFGRKYSDQQLIESIKESFLLAGTFNIGDYIPYLAWLDLQGLKRRFKKIHKTVDHFFDNVIEEHIARNDPNVTPDLVDVLLAICADKDTEFQIKRKHIKGVIADMFAAGTDTSSIGIEWAMSEVLRNPPVLKKLQDELERVVGMGRMVQESDLPSLVYLQAVVKEALRLHPPGPLAIPHLSVEDCTVLGYEIPGGTCVLLNLWAIGRNPKSWEDAESFKPERFMEATGSELDAKVQNLEWIPFGAGRRGCPGQQLGMLVVEFGMAQLLHCFNWKLPDEINGQELDMVERFNGLTLPRAHELLAVPTPRLSLR

SEQ ID NO: 12852 - DNA, 1518 bp, Tricyrtis hirta
  CDS (1)..(1518)
atgtccattctcatcatcatcatcctcttcaccctcgtcttcgcctccctcctctaccacctcctctccgggccggcccaccgcctcccccccgggcccagaggctggcccatcctgggcaacctcccccagctcggcccaaaaccccaccaaaccctccacgccctctccaaagcccacggcccactcttccttctccgtctcggatccgtcgacgtcgtcgtcgccgcctccgccgccgtcgccgccgcctttctacgtcagcacgacgccatcttcagcaaccgccccccaaattctggcgcggagcacatcgcgtacaactaccaagatctggttttcgcgccatacggcccgcgttggcgccaccttcgcaagctctgctctctccatctcttctccagcaaggctctggacgatctccgcccgattcgggagcaggagatccaacggctgacgaggagtctcctggtcggccgaccggtcaaccttggggaggcggtgaacgtatgcgcgacgaacgcgctggcgagggcgacggtggggtggagagtctttgtgggggagggtgaggatactgcggcggaggagtttaaggagatggtgctggagattatgaaattggcgggagttttcaatattggggatttcgtgcctgggattgggtggatggatctgcagggggtggtgggtaagatgaagaagttgcataagaggatggatgcgtttcttgataagttaattaatgagcataagaggggatcgggcggtcgagatttgctgagcgtgcttgttagtttgaaggacgatgagggggaggatgaggcaaacaagctttctcatacagagatcaaggcgttactcctgaacttgttcacagcaggaacagacacgacctcgagcacagtagaatgggccctcgccgagttgatccgccacccaaccctcctccacaaggcccaacaggagctcgacaatgtcgtcggccgccaacgcctcgtctccgagactgacctccccaacctcccattcctacaagccatcatcaaagaaacatttcgcctacacccctccacccccctctctctcccccgcatatcctccgaaccctgcgagatcaatgggtactacatccccaaaaatgcaactctcctggttaacgtttgggccatcgctcgcgacccggcggtctggtcggacccgctcgagttcaagcccgagcgattcatgccaggcggggagaaggccaatgtggatgtgaaagggaatgactttgaggtgataccatttggagcgggaagaaggatttgcgcaggaatgagcttagggttgaggatggtgcagttcatgacggcaacgcttgttcatgggtttgagtgggggttgcctgagggagtgaacgctgagaagctggacatggaagagtcttatgggttgacattgcaaaggaaggtgcccttgacggtgcagcctattcctaggctcgttcgtggggcttatgaagtagtcgagtgttag

SEQ ID NO: 12853 - protein, 505 aa, Tricyrtis hirta
MSILIIIILFTLVFASLLYHLLSGPAHRLPPGPRGWPILGNLPQLGPKPHQTLHALSKAHGPLFLLRLGSVDVVVAASAAVAAAFLRQHDAIFSNRPPNSGAEHIAYNYQDLVFAPYGPRWRHLRKLCSLHLFSSKALDDLRPIREQEIQRLTRSLLVGRPVNLGEAVNVCATNALARATVGWRVFVGEGEDTAAEEFKEMVLEIMKLAGVFNIGDFVPGIGWMDLQGVVGKMKKLHKRMDAFLDKLINEHKRGSGGRDLLSVLVSLKDDEGEDEANKLSHTEIKALLLNLFTAGTDTTSSTVEWALAELIRHPTLLHKAQQELDNVVGRQRLVSETDLPNLPFLQAIIKETFRLHPSTPLSLPRISSEPCEINGYYIPKNATLLVNVWAIARDPAVWSDPLEFKPERFMPGGEKANVDVKGNDFEVIPFGAGRRICAGMSLGLRMVQFMTATLVHGFEWGLPEGVNAEKLDMEESYGLTLQRKVPLTVQPIPRLVRGAYEVVEC

SEQ ID NO: 12854 - DNA, 1527 bp, Echinops bannaticus
  CDS (1)..(1527)
atgaccattctaaccttcctcctgtacacctgcattactgggttagtcttctatgcattgcacttgtttaacctgcgcacacctcaccgtaaccgcctcccccccggcccaacaccatggccaatcgtcggcaacttaccacatctcggcagagttccgcaccattcgctggcggacttggcgacaaagtacggcccgttgctgcatctccggctcggatttgttgacgtggtggtggccggatcggcttctgtcgccgcacagtttttgaaggttcatgatgcgaatttcgctagcaggccgccgaactccggagcgaagcatatggcgtataattatcaggatatggtgttcgcaccgtacggtccgaaatggcggatgcttcggaagatttgctcggtgcaccttttctctaccaaagcactcgatgatttccgtcacgttcgtcaggaggaggtagcgatacttgctcgcgctttggtcggagccggagaatcaacggtgaaattaggtcagttacttaacgtgtgcaccacaaacgcgttagcacgagttatgttaggcaggagagtgtttggcgatggaagtggaggcggcgattcgaagtcggatgaatttaaggatatggtgatggagatgatggtgttggccggagaattcaacatcggcgacttcattccggctctggactggctggacctgcaatccgtgacgaaaaagatgaagaaactccatgttcggttcgattcgttccttaatacgatcctggaagagcataaaagtggtaatatggattttgtgagcaggttgatttccgtcaaggatgatgcagacggacagggagggaagctttcagacaccgaaatcaaagctttacttctgaatttgtttgccgcgggaacagacacatcatctagcactgttgaatgggcaatcgccgaactcattcgacatccacaactattgaagcaagcccaagaagaaatggacaccatagttggtcgagaccggctagttactgaagtggacctaagtagactaacattcctccaagccattgtgaaggagatatttaggctccatccgtcaacaccactctcattgccaaggattgcatcagacacttgtgaggttgacggatattatattcctaaaggatccacgctccttgttaatgtgtgggccatctctcgagacccaaaaatatggtccaatccacttgaattccaacccactcgattcttgcctggtggtgaaaagccagatgccgatgtcaagggaaatgattttgagctcataccatttggggctggacgaaggatttgtgcaggtatgagtctgggattaaagatggtccagttactcactgcaactctagtccatgcattcgattgggaattggctaacgggttagacccagataagctcaacatggaagaagcctatgggttaaccctccaaagggctacacccttgatggtgcacccaaggccaaggttagcccctcatgtataccaaagtggttaa

SEQ ID NO: 12855 - protein, 508 aa, Echinops bannaticus
MTILTFLLYTCITGLVFYALHLFNLRTPHRNRLPPGPTPWPIVGNLPHLGRVPHHSLADLATKYGPLLHLRLGFVDVVVAGSASVAAQFLKVHDANFASRPPNSGAKHMAYNYQDMVFAPYGPKWRMLRKICSVHLFSTKALDDFRHVRQEEVAILARALVGAGESTVKLGQLLNVCTTNALARVMLGRRVFGDGSGGGDSKSDEFKDMVMEMMVLAGEFNIGDFIPALDWLDLQSVTKKMKKLHVRFDSFLNTILEEHKSGNMDFVSRLISVKDDADGQGGKLSDTEIKALLLNLFAAGTDTSSSTVEWAIAELIRHPQLLKQAQEEMDTIVGRDRLVTEVDLSRLTFLQAIVKEIFRLHPSTPLSLPRIASDTCEVDGYYIPKGSTLLVNVWAISRDPKIWSNPLEFQPTRFLPGGEKPDADVKGNDFELIPFGAGRRICAGMSLGLKMVQLLTATLVHAFDWELANGLDPDKLNMEEAYGLTLQRATPLMVHPRPRLAPHVYQSG

SEQ ID NO: 12856 - DNA, 1545 bp, Centaurea cyanus
  CDS (1)..(1545)
atgacatttctacccctggttctatacacctctgtcgccctgttactcctctacgtattgcttaacctacgcacccctcgctcgaaccgccggcttccccccggcccgaccccgtggccgatagtcggaaacttgcctcatctcggcaagatgcctcaccatgcattggccgcaatggcggacaagtacggccccttgatgcatctacggttcggcgttgtggacgtcgtggtggccgcgtctgcttccgtggccgctcagtttttgaaggtccacgacgcgaacttcgcgagcaggccgcccaactccggggcgaagcatctcgcgtacgattatcaggatctcgtgtttgccccatacggtctgaagtggaggatgcttcggaagatctgctcggtgcatctgttctcgaataaggcactcgatgatttccgtcacgttcgtgaggaggaggtggcggttttgacccgtgctttggccggagccggaggatcgacggtggctttaggtcaattacttaacgtttgcaccacaaacgctttggcacgagtgatgttaggtaggagagtatttggtgacggtagcggaggcggagatcggaaggcggatgaattcaaggaaatggtggttgaaatgatggtattggccggagaattcaacatcggcgacttcattccggcgcttgattggctggacctgcaaggcgtaaccaaaaaaatgaaaaacctccatctccgatttgattcgtttcttaacgaaatcctcgaagaccataaaaatggcggtgacatcatcacttccggtaacgtggacttgctaaccacgttgatttcactcaaggacgacgccgatggggagggtgggaagctttcagacatcgaaatcaaagctatacttctgaatttatttactgctggaacagacacgtcatctagtacggtggaatgggcaatggcagaacttattcgatatccacaactaatgcaaaaagcccaagaagaaatagaaagcgtagtcggtagggaccgacttgtatctgaattggacctaccccgactaacgttccttgaagccgttgtgaaggaaacctttaggctccacccgtcgaccccactatccttgcctagaatggcattagagagttgtgaagtcgatgggtattacattcccaaaggatccacgcttcttgttaacgtgtgggccattgctcgagacccaaaaatgtgggatgacccgcttgaattccgacctagacgattcttgccaagaggtgaaaaaccgaatgctaatgtgaaaggaaatgatttcgaaatcataccgtttggggctggacgaagaatttgtgcaggcatgagcctagggttaaggatggtccagttgctcaccgcgacactggtccatgcctttgattggaaattggctaatgggttagactcagagaaattgaacatgaaagaagcttatgggttaacccttcaaagggatgtacctttgatggtacaccctagcccaaggttagctcccgagttatacaaaagtggttaa

SEQ ID NO: 12857 - protein, 514 aa, Centaurea cyanus
MTFLPLVLYTSVALLLLYVLLNLRTPRSNRRLPPGPTPWPIVGNLPHLGKMPHHALAAMADKYGPLMHLRFGVVDVVVAASASVAAQFLKVHDANFASRPPNSGAKHLAYDYQDLVFAPYGLKWRMLRKICSVHLFSNKALDDFRHVREEEVAVLTRALAGAGGSTVALGQLLNVCTTNALARVMLGRRVFGDGSGGGDRKADEFKEMVVEMMVLAGEFNIGDFIPALDWLDLQGVTKKMKNLHLRFDSFLNEILEDHKNGGDIITSGNVDLLTTLISLKDDADGEGGKLSDIEIKAILLNLFTAGTDTSSSTVEWAMAELIRYPQLMQKAQEEIESVVGRDRLVSELDLPRLTFLEAVVKETFRLHPSTPLSLPRMALESCEVDGYYIPKGSTLLVNVWAIARDPKMWDDPLEFRPRRFLPRGEKPNANVKGNDFEIIPFGAGRRICAGMSLGLRMVQLLTATLVHAFDWKLANGLDSEKLNMKEAYGLTLQRDVPLMVHPSPRLAPELYKSG

SEQ ID NO: 12858 - DNA, 1527 bp, Cosmos sulphureus
  CDS (1)..(1527)
atgactattctacccctactactctacccttccctaactgccttactactgtacgtacttcttaacctgcgcccccgtcaccctaaccgtctcccgccgggaccaagcccatggccgatcgtcggaaacctaccgcacctcggcacaactccgcatcactcgcttgcggcattggcggcaaagtacggcccgttgatgcacctccgactcggctttgttgacgtggtggtggccgcctctgcgtcagtcgcttcacagtttttgaaaactcatgacgcgaatttcgccagccggccgccgaactccggcgcggagcatatggcgtataattatcaggatctggtgtttgcgccgtacggtcctcggtggcggatgcttcggaagatatgctccgtgcacctattttccggcaaagcactcgatgacttccgtcatgttcggcaggaggaagtagcggtactgacgcgcgctttagccggtgcggggaaatcaccggtgaaattaggtcaactgcttagcgtgtgcaccaccaacgcattagcacgagtgatgttaggcaggagagtattcggtgagcgtgatgcgaaggcggatgagttcaaggatatggtggtggagatgatggtgttggcgggagaattcaatatcggtgactttatcccggcgcttgactggctggacctgcaaggcatcacgaaaaaaatgaagaagctgcacgctcaattcgattcgtttcttaacacgattcttgaagagcataaaaccggcaagggcggctcttcgagtcacagggatttgtcgagcacgctgattgcactcaaggatgatgccgatggagagggagggaaactttcagatattgaaatcaaagctttgcttctgaacttattcattgcgggaacagatacatcatctagcaccgtggaatgggcaatagctgaactaattcgctgtccacaaatactacggcaagcacacgaagaaatggacaatgttgttggtcgagagcggcttgtaaccgaatcagaccttggtaaactaacattcctccaagccattgtaaaggagacctttagactccacccgtctacaccactctcattgccaagaattgcgtccgagagttgtgaaattgatggctatttcattcctaaggggtccacacttcttgttaatgtgtgggccattgcccgtgacccaaaaatgtggacggatccacttgaatttaggcccacacggttcttgcccggaggtgaaaaacccaatgttgatgttaaaggaaatgacttcgaggttataccatttggggccggacgaaggatttgtgtgggtattagcctagggttgagaatggtccagttgcttgtcgctacgctagtccaaacctttgactgggaattggctaacggggtactacccgagaagctcaacatgaatgaagcgtttgggctaacccttcaaagagccgagcccttgatagtgtacccgaagccgaggctagctcctcacgtatatgaaagtggttaa

SEQ ID NO: 12859 - protein, 508 aa, Cosmos sulphureus
MTILPLLLYPSLTALLLYVLLNLRPRHPNRLPPGPSPWPIVGNLPHLGTTPHHSLAALAAKYGPLMHLRLGFVDVVVAASASVASQFLKTHDANFASRPPNSGAEHMAYNYQDLVFAPYGPRWRMLRKICSVHLFSGKALDDFRHVRQEEVAVLTRALAGAGKSPVKLGQLLSVCTTNALARVMLGRRVFGERDAKADEFKDMVVEMMVLAGEFNIGDFIPALDWLDLQGITKKMKKLHAQFDSFLNTILEEHKTGKGGSSSHRDLSSTLIALKDDADGEGGKLSDIEIKALLLNLFIAGTDTSSSTVEWAIAELIRCPQILRQAHEEMDNVVGRERLVTESDLGKLTFLQAIVKETFRLHPSTPLSLPRIASESCEIDGYFIPKGSTLLVNVWAIARDPKMWTDPLEFRPTRFLPGGEKPNVDVKGNDFEVIPFGAGRRICVGISLGLRMVQLLVATLVQTFDWELANGVLPEKLNMNEAFGLTLQRAEPLIVYPKPRLAPHVYESG

SEQ ID NO: 12860 - DNA, 1536 bp, Malus domestica
  CDS (1)..(1536)
atgtttgttctcatattcttcaccgttgtcttggccttcttcttataccggctcttcgcccccggcgggagccgccacgctctgcctcttccgccagggccgaaaccctggcctgtcgtgggaaacttgccccacttaggccccgttccccatcattctctggcggcgttggcccgtcagtatggaccccttatgcacctccgcttggggttcgttgacgtggttgttgcagcctctgcttcggtggcgtcacagttcttgaagacccacgacgccaatttctccagcagaccacccaactccggcgccaagcatctcgcttataactaccaggatttggtgttcgcgccgtacggtccacgatggcggatgttacggaagatcagctccgtccatttgttctccggcaaggctctcgatgatcttaaacatgttcgccaggaggaagtaggtgtgctggcacatggattagcaagtgcagggtcaaagccagtgagcttagggcagctactgaacgtgtgcacagtcaacgccctagggcgggtgatggtagggcggaggctcttcggagacggcggcgggcgcgaagaccagaaggccgacgagttcaaatccatggtggtggagatgatggtgttggctggcgttttcaacatcggcgacttcatcccggccctcgagtggctggacttgcagggggtggcgggaaagatgaagaagctgcacaagaggttcgatgccttcttgaccgccattgttgaagaccacaagaggagcggcgaagggaagcacgtggacatgctgacgacgttgctgtcgctcacggatgatgctgacggtgagggcgccaagctcacggacactgagattaaagctttgcttttgaacatgttcacagctggcactgacacgtcatcaagcacggtggaatgggccatagcagaactccttcgccaccccaagattctagcccaactccaacaagagctggaccaagtagtgggccgggaccggctcgtaaccgagtcggacctgcccaacttgacctacctccaagcagtaatcaaggaaacctttcggctacacccgtcaaccccgctctccctgcctcgaatggcgtccgagagttgcgaaatcaacgggttccacatccccaagggtgccactcttctggtcaacgtatgggccatatctcgcgacccggcccaatggtccgaaccgcttgagtttagacccgagcggttcttgccgggtggagagaagcccaatgtggacgtcaagggtaatgatttcgaggttataccgtttggggccgggcggagaatatgcgccgggatgacccttgggctgcgtatggtgtctctaatgatcgcgaccctggtccatggttttgattggaccttggctgatgggctcacacctgagaaattgaacatggacgaggcttatgggctcacactacaaagagccgcaccattaatggtgcacccacgtaacaggctagcccctcatgcatataatgcgtcatcaccttga

SEQ ID NO: 12861 - protein, 511 aa, Malus domestica
MFVLIFFTVVLAFFLYRLFAPGGSRHALPLPPGPKPWPVVGNLPHLGPVPHHSLAALARQYGPLMHLRLGFVDVVVAASASVASQFLKTHDANFSSRPPNSGAKHLAYNYQDLVFAPYGPRWRMLRKISSVHLFSGKALDDLKHVRQEEVGVLAHGLASAGSKPVSLGQLLNVCTVNALGRVMVGRRLFGDGGGREDQKADEFKSMVVEMMVLAGVFNIGDFIPALEWLDLQGVAGKMKKLHKRFDAFLTAIVEDHKRSGEGKHVDMLTTLLSLTDDADGEGAKLTDTEIKALLLNMFTAGTDTSSSTVEWAIAELLRHPKILAQLQQELDQVVGRDRLVTESDLPNLTYLQAVIKETFRLHPSTPLSLPRMASESCEINGFHIPKGATLLVNVWAISRDPAQWSEPLEFRPERFLPGGEKPNVDVKGNDFEVIPFGAGRRICAGMTLGLRMVSLMIATLVHGFDWTLADGLTPEKLNMDEAYGLTLQRAAPLMVHPRNRLAPHAYNASSP

SEQ ID NO: 12862 - DNA, 1557 bp, Camellia sinensis
  CDS (1)..(1557)
atgacttccttagcttttgttctctactctctgctcattgctgtctttctatattgcttgcttaacctacgcaccctcctctttaaccgtcacccgagaccacttccaccgggaccgacaccatggccggtgatcggaaacctgccccacctaggcaccatgcctcaccactcgatcgccaccatggctcgaacgtacgggccgctcatgcacctccggctggggctggtggacgtggtggtggcggcgtcggcatcggtggcagcgcagtttttgaagacacatgatgcgaatttttctagccggccacccaactccggtgccaaacatattgcctataattatcaggaccttgtttttgcaccgtacggtccgcggtggcgcatgcttcggaaaatctgctccgtccatctcttctccaccaaggccttggatgattttcgacacgtccgacaggaggagatagcgatattgacgcgcgcgttggagagtgcgggacaagcggcagcagtgaacctagggcaactactgaacgtgtgcacgacaaacgcgctagggcgggtgatgttgggtcacagggtgttcggtgacggtagcggtagcggcgatccaaaggccgatgaattcaaggagatggtagtggagctgatggtcctcgccggagtatttaacatcggcgattttgtcccggctcttgagtggctggatccccaaggtgttgcttccaaaatgaaaaaacttcacgctaggtttgactcatttcttaataagatccttgaagagcacaaggttaattattctagtagtggagcccagaaacatacagacttgttgagtacattgatttctctcaaggatgatgctgatggtgagggagggaagctcactgacatcgaaatcaaagccttgcttttggacttgttcacagcaggaactgatacatcatctagcacagttgagtgggccatcgcagaactcattcgcctctccaaaattctagcccaagctaaacaggagctagactcgatagtcggcccagatcgacgagtaactgaatcagacctagcccaattaacctttctccaagccatcatcaaggaaacctttcgacttcacccatcaaccccactctctctccctcgaatggcatctgacagttgtgaaatcaatggctacttcattccaaagggctcaactcttcttgtcaatgtatgggccatagcccgtgatccagatgcatgggccgagccattagagtttcgaccagaacgattcctacctggtggcgaaaagcccaatgctgatgttaggggaaatgattttgaggtcataccatttggtgcaggccgtcggatatgtgccgggatgagcttagggttgcgtatggtccagttattaactgcgaccttggtccatgccttcgactgggacttggccgatggacaatcgaccgagaagctcaacatggatgaagcctatgggctaaccttgcaacgggccgcaccacttatggtgcacccatggcctcggcttgcaccccatgtgtatcgggcctaa

SEQ ID NO: 12863 - protein, 518 aa, Camellia sinensis
MTSLAFVLYSLLIAVFLYCLLNLRTLLFNRHPRPLPPGPTPWPVIGNLPHLGTMPHHSIATMARTYGPLMHLRLGLVDVVVAASASVAAQFLKTHDANFSSRPPNSGAKHIAYNYQDLVFAPYGPRWRMLRKICSVHLFSTKALDDFRHVRQEEIAILTRALESAGQAAAVNLGQLLNVCTTNALGRVMLGHRVFGDGSGSGDPKADEFKEMVVELMVLAGVFNIGDFVPALEWLDPQGVASKMKKLHARFDSFLNKILEEHKVNYSSSGAQKHTDLLSTLISLKDDADGEGGKLTDIEIKALLLDLFTAGTDTSSSTVEWAIAELIRLSKILAQAKQELDSIVGPDRRVTESDLAQLTFLQAIIKETFRLHPSTPLSLPRMASDSCEINGYFIPKGSTLLVNVWAIARDPDAWAEPLEFRPERFLPGGEKPNADVRGNDFEVIPFGAGRRICAGMSLGLRMVQLLTATLVHAFDWDLADGQSTEKLNMDEAYGLTLQRAAPLMVHPWPRLAPHVYRA

SEQ ID NO: 12864 - DNA, 1527 bp, Cyclamen persicum
  CDS (1)..(1527)
  misc_feature (465)..(465): r is g or a
atggcactagacatggtcttgctcaaagaactcactgcagctgccctaatcttcatcatcacccacttctttatacggtcgctgttttcgaagtccacccgctcgttaccacccggcccgatagggttgccactaatcggctctctaccctccttaggcacaatgccgcacgtcgagctagcaaaaatggctaagaaatttgggccggtgatgtacctaaaaatgggcacttgtggcatggtggtagcgtctacgccagacgctgcccgtgcttttctcaagacgctggacataacgttctcgaaccggccaccgaatgctggggccacccacttggcgtacgatgctcaggacatggtgtttgcacattatgggtcgaggtggaagcttctcaggaaactgagcaacctccacatgctcggaggaaaagcactcgaggactgggcccaggtccgagccgcggarcttgggcacatgctcagggccatgtgcgactctggccaaaggtcggagccagtggtggttccggagatgttggcatactctatggcaaacatgattgggcaagtgatcctcagccgtcgtgtttttgagacaaagggtacggagtctaacgagtttaaggacatggttgtggaactcatgacctcggcggggtattttaatattggtgattttattccttctatcgcgtggatggacttgcaaggaatcgaacgtgggatgaagtttttacacaagaaattcgatgtgctgataacaaagatgatcgaagagcacaagtcgactgctcaccaaagaaggggaaaaccagatttccttgatgtggttatggctcagcaagaaaattctggtgaggagaagctcaatctcaccaatatcaaggcccttcttttgaacttatttacagctggtaccgacacgtcgtcgagcgtgattgagtggtcgctagccgaaatgatcgagaacccaaaaatcttggcccgggcccaggaggagatggaccgcgtgataggccgagagaggaggctacaagaatccgacctatcgaagctcccatacttacaagccatatgcaaagaaggtttccgaaagcacccttcaactcccctaaatctccccagagtctcgagtgaagcatgtgaagtgaacggctactacatcccaaagaacaccaggctcagtgtcaacatatgggcaatagggcgggacccggatgtctgggagaaccccctcgagttcaacccggacaggttcctgagcgggaagcacgcgaaggtggatcccagggggaatgatttcgagcttattccgtttggagctggaaggaggatctgtgcagggacgaggatggggatcgtgcttgtcgagtatatactggggagtttggttcactctttcgattggaaattgccagacggggttgagcttaacatggatgaggctttcgggttggctctacaaaaggccgtgccgcttgcggctattgttacaccaaggctcgtcccaagtgcttatgttgcttaa

SEQ ID NO: 12865 - protein, 508 aa, Cyclamen persicum
MALDMVLLKELTAAALIFIITHFFIRSLFSKSTRSLPPGPIGLPLIGSLPSLGTMPHVELAKMAKKFGPVMYLKMGTCGMVVASTPDAARAFLKTLDITFSNRPPNAGATHLAYDAQDMVFAHYGSRWKLLRKLSNLHMLGGKALEDWAQVRAAELGHMLRAMCDSGQRSEPVVVPEMLAYSMANMIGQVILSRRVFETKGTESNEFKDMVVELMTSAGYFNIGDFIPSIAWMDLQGIERGMKFLHKKFDVLITKMIEEHKSTAHQRRGKPDFLDVVMAQQENSGEEKLNLTNIKALLLNLFTAGTDTSSSVIEWSLAEMIENPKILARAQEEMDRVIGRERRLQESDLSKLPYLQAICKEGFRKHPSTPLNLPRVSSEACEVNGYYIPKNTRLSVNIWAIGRDPDVWENPLEFNPDRFLSGKHAKVDPRGNDFELIPFGAGRRICAGTRMGIVLVEYILGSLVHSFDWKLPDGVELNMDEAFGLALQKAVPLAAIVTPRLVPSAYVA

SEQ ID NO: 12866 - DNA, 1533 bp, Gossypium hirsutum
  CDS (1)..(1533)
atggccccctttgttctatattctattctctccgccgtattcctctatttcgttttcattacctcgaggaagcgccgccgtctgcctctccctcctggtcctaaaccatggcccagcattggcaacttgccacatatgagccctgtgcctcaccaaggtttagccgccatggccaaagtctacggccctctcatgcacctcaggttggggttcgtggatgttgtggtggcagcgtccgcctccatggcggctcaattcttgaaagtccatgactcgaacttctccagccgcccaccgaatgccggcgccaagtatgtggcttacaactatcaggaccttgtgtttgcgccgtacggaccgaggtggcggctgctacgtaaaatgagctcccttcatctcttctccggcaaggctttggacgactttagacagattcgcgaggaggagataagagtgttggtacgagctttggcaagcgctaaaacaaaggtgaatttagggcaacttttgaacgtatgcacagtgaatgccctggggcaagtgatgatggggaaaagggtgttcggagacggcagtggaggctccgatccagaagcggatgagttcaagtcgatggtggtggagctgatgcagttagccggggttttcaacatcggcgacttcattccggcgcttgaatggctggatctgcaaggggtgcaagctaaaacgaagaaactccataacaaattcgataggttcttgagtgccattcttgaagaacacaaaaccaaagctcgacaaagtaatgggcaagtgaaacacaaggattttttaagtacgttgatttcattggagaatgttgatggcgctgaaggtggaaagctctccgacactgagatcaaagcattacttttgaacatgttcacagcaggaactgatacatcttcaagcacagttgagtgggcaatggctgagctaatacggcatcccaacatcatggctcaagttcgtaaagaattggactcagtcgttggtcgagaccgcctcgtctccgacttggacttgcccaatctaacctacttccaagccgtcatcaaagaaaccttccgcctccacccgtccaccccgctctccctccctcgtatggcctccgacagctgcgacatcaacggctaccacatccccaagggcgccaccctcttggtcaacgtatgggccatttctcgagaccctaacgagtggaacaacccgcttgagtttcggcccgagaggttcttgcccggcggcgaaaggccgaacgctgatgttaggggcaatgattttgaggtcataccgttcggcgccgggcgtagaatctgtgccggaatgagcttgggattgcgcatggttcaactgttgacagcgacgttagcgcatgctttcgagtgggagttggctgatggattaatgcctgagaagctggacatggaggaagcttatgggttgactttacaacgtgcggcaccattgatggtgcatccaaggccaaggttatcaaagcatgcttattga

SEQ ID NO: 12867 - protein, 510 aa, Gossypium hirsutum
MAPFVLYSILSAVFLYFVFITSRKRRRLPLPPGPKPWPSIGNLPHMSPVPHQGLAAMAKVYGPLMHLRLGFVDVVVAASASMAAQFLKVHDSNFSSRPPNAGAKYVAYNYQDLVFAPYGPRWRLLRKMSSLHLFSGKALDDFRQIREEEIRVLVRALASAKTKVNLGQLLNVCTVNALGQVMMGKRVFGDGSGGSDPEADEFKSMVVELMQLAGVFNIGDFIPALEWLDLQGVQAKTKKLHNKFDRFLSAILEEHKTKARQSNGQVKHKDFLSTLISLENVDGAEGGKLSDTEIKALLLNMFTAGTDTSSSTVEWAMAELIRHPNIMAQVRKELDSVVGRDRLVSDLDLPNLTYFQAVIKETFRLHPSTPLSLPRMASDSCDINGYHIPKGATLLVNVWAISRDPNEWNNPLEFRPERFLPGGERPNADVRGNDFEVIPFGAGRRICAGMSLGLRMVQLLTATLAHAFEWELADGLMPEKLDMEEAYGLTLQRAAPLMVHPRPRLSKHAY

SEQ ID NO: 12868 - DNA, 1149 bp, Vitis vinifera
  CDS (1)..(1149)
atgaagaaactgtgtatgaccgaactacttggcatgcagacgatacaccactttggtcccattaggcgcgaggagaggaaccgactcttacagagactactaaaaaaggccaaagctggtgaggcggttgatgttaaagctgagcttttgaggctaaccggtgacatagtgtcaagaatgagtatgagccgaagatgctcagacaatgaagatgaggctgccggggtgaagaagtcgatactagaaatggccagtatggcaatgaagcttaatgtgacagattttatctggttctgtaagaaattagatattcagggtttcttaaagaaggcaaaggcagctcgtgataaatacgactccatgatcgagaggattataagcgagcatgaagaggcgaggaggaagaaggaagcaggtgatgggaatggtgaagtgaaggatttgattgatatgttacttgatacaacagaagacgagaaggctgagatgagattgacaagagagaacattaaggccttgatgctgaatatgattggaggagggacaacttcacctgctcatgcgatggaatgggcactcgcagaactaattaaccgcccaaatcttatggagaaagcaagacatgaaattgattctgtcgtcggaaaggacagactggtggaagaatcagatattaccaaccttccctatgttgaggccattgtgagggaaacgctaaggcttcaccctccgggtcatttcattgttagggaatcaattgaagactgcaaagttggaggctatgacattcctgcgaagacccagctaattgttaatgtgtgggctatcggaagggatccaaattcctgggagaacccactcgagttccagcctgagagatttctcaacgagggaggtataaacaggcgattgaatgtaagaggacagcagttccatctgctgccctttggtagtggaagaagactttgccccggaactacactagcactgcaggttctccatacaaccattgctgctctcattcagtgctttgactggaaagtaaacggcaatattgatatgaaagagggatttggctcaacccgagcaacccccttggtctgcgtcccagtggtcaggctgaacccactaccaatatatacaagttga

SEQ ID NO: 12869 - protein, 382 aa, Vitis vinifera
MKKLCMTELLGMQTIHHFGPIRREERNRLLQRLLKKAKAGEAVDVKAELLRLTGDIVSRMSMSRRCSDNEDEAAGVKKSILEMASMAMKLNVTDFIWFCKKLDIQGFLKKAKAARDKYDSMIERIISEHEEARRKKEAGDGNGEVKDLIDMLLDTTEDEKAEMRLTRENIKALMLNMIGGGTTSPAHAMEWALAELINRPNLMEKARHEIDSVVGKDRLVEESDITNLPYVEAIVRETLRLHPPGHFIVRESIEDCKVGGYDIPAKTQLIVNVWAIGRDPNSWENPLEFQPERFLNEGGINRRLNVRGQQFHLLPFGSGRRLCPGTTLALQVLHTTIAALIQCFDWKVNGNIDMKEGFGSTRATPLVCVPVVRLNPLPIYTS

SEQ ID NO: 12870 - DNA, 1527 bp, Chrysanthemum morifolium
  CDS (1)..(1527)
atgaacattttacctttcgtattttacgccctcatcctcgggtcagtactctatgtatttcttaacttaagttcacgtaaatccgccagactcccacccgggccaacaccatggcctatagtcgggaacttaccacaccttggcccaatcccacaccacgcactcgcggctttagccaagaagtacgggccattgatgcacctgcggctcgggtatgtggacgtggttgtggccgcgtctgcttccgtagctgcacagtttttaaaagttcatgacgcgaattttgctagcaggccgccaaattctggcgcgaaacatgtggcgtataattatcaggatcttgtgtttgcaccttatggtccgaggtggcgtttgttaaggaagatatgttcggtccatttgttttctgctaaagcacttgatgattttcgtcatgttcgacaggagaaggtagcagtcctaacccgcgtactagtgagtgctggaaactcacctgtacagcttggccaactacttaacgtgtgcgccacaaacgccttagcacgggtaatgttaggtaggagagtttccggagacggaattgacaggtcagccaatgagttcaaagatatggtagtagagttaatggtattagcaggagaatttaaccttggtgactttattcctgtacttgaccgatttgacctacaaggcattaccaaaaaattgaagaagcttcatgttcggttcgattcatttcttagtaagatcgttgaggagcataaaacgggtcatggtgggttgggtcatgctgacttgttgagcacgttgatttcacttaaagatgatgctgatattgaaggtgggaagcttacagatactgaaatcaaagctttgcttctgaacttattcactgcgggaacagacacatcctctagtacagtagaatgggcaatagccgaactcattcgtcatccacaaatattaaaacaagcccgagaagagatagacgctgtagttggtcaagaccggcttgtaacagaattggacttgagccaactaacatacctccaggctcttgtgaaagaggtgtttaggctccacccttcaacgccactctccttaccaagaatatcatccgagagttgtgaggtcgatgggtattatatccctaagggatccacactcctcgttaacgtgtgggccattgcgcgagacccaaaaatgtgggcggatcctcttgaatttaggccttctcggtttttacccgggggagaaaagcccggtgctgatgttaggggaaatgattttgaagttataccatttggggcaggacgaaggatttgtgcgggtatgagcctaggcttgagaatggtccagttgctcattgcaacattggtccaaacttttgattgggaactggctaacgggttagagccggagatgctcaacatggaagaagcgtatggattgacccttcaacgggctgcacccttgatggttcacccgaagccgaggttagctccccacgtatatgaaagtatttaa

SEQ ID NO: 12871 - protein, 508 aa, Chrysanthemum morifolium
MNILPFVFYALILGSVLYVFLNLSSRKSARLPPGPTPWPIVGNLPHLGPIPHHALAALAKKYGPLMHLRLGYVDVVVAASASVAAQFLKVHDANFASRPPNSGAKHVAYNYQDLVFAPYGPRWRLLRKICSVHLFSAKALDDFRHVRQEKVAVLTRVLVSAGNSPVQLGQLLNVCATNALARVMLGRRVSGDGIDRSANEFKDMVVELMVLAGEFNLGDFIPVLDRFDLQGITKKLKKLHVRFDSFLSKIVEEHKTGHGGLGHADLLSTLISLKDDADIEGGKLTDTEIKALLLNLFTAGTDTSSSTVEWAIAELIRHPQILKQAREEIDAVVGQDRLVTELDLSQLTYLQALVKEVFRLHPSTPLSLPRISSESCEVDGYYIPKGSTLLVNVWAIARDPKMWADPLEFRPSRFLPGGEKPGADVRGNDFEVIPFGAGRRICAGMSLGLRMVQLLIATLVQTFDWELANGLEPEMLNMEEAYGLTLQRAAPLMVHPKPRLAPHVYESI

SEQ ID NO: 12872 - DNA, 1527 bp, Dahlia variabilis
  CDS (1)..(1527)
atgtccattctaaccctactactctacgcctccataactgccttgccattgtacgtactgcttaacctgcgcacccgtcactctaaccgtctccctcccgggccaactccatggccaatcgtcggaaacctacctcacctcggcacaattccgcaccactcgctggcagccttggcggaaaagtacggcccgttgatgcacctccgattcggcttcgttgacgtggtggtggccgcctctgcgtcagtcgcttcacagtttttaaagactcacgacgcgaaattcgccagcaggccgccgaactccggcgcggagcatattgcgtataactaccaggatctggtgtttgcaccgtacggtccgcggtggcggatgcttcgtaagatctgctcggttcacctgttttccggcaaagcactcgatgatttccgtcatgttcggcaggaggaggtagcgatactgacgcgtgttctggccggtgccggaaactcaacggttaaattaggtcaattacttaacgtgtgcaccacaaacgcattagcacgagtgatgttaggcaggcgagtattcggcgacggagatccgaaggcggatgagttcaaggatatggtggttgagctgatggtgttggccggagaattcaacatcggtgacttcatcccggcgcttgcctggctggacctgcaaggcgttacgaaaaagatgaagaaacttcacgctagattcgattcgttccttaacacgattctcgaagagcataaatccggcaacggcggcgcctcgagtcacggtgacttgttgagcactctgatctcactcaaagatgacgccgacggtgagggagggaaactttcagatattgaaatcaaagctttgcttctgaacttattcgttgcgggaacagacacatcgtctagcacagtggaatgggcaatatccgagctcattcgcgatccagaactactaaaacaagcccaaaaggaaatggacaatgtagtcggtcgagaccggcttgtaaccgaatcagacctaggccaactaacactcctccaggccattgtaaaggagacctttagactccacccctcaacaccactctccctaccaagaattgcatctgacagttgtgaagttgatgggtattacattcccaaggggtccacactccttgttaacgtgtgggccatagcccgtgacccaaaaatgtggacggacccacttgaattccggcccacacggttcttgcctggaggtgaaaagcccaatgttgatgttaaaggaaatgactttgaagtgataccatttggagctggacgaaggatttgtgtgggtattagcctagggttgagaatggttcagttgcttgttgcgacattggtccaaacctttgactgggaattggctagcggattacaggcggagaagctcaacatgactgaagcctatggtctaacccttcaaagagccgagcccttgatggtgcacccaaagccgaggcttgctcctcacgtgtatgaaagtggttaa

SEQ ID NO: 12873 - protein, 508 aa, Dahlia variabilis
MSILTLLLYASITALPLYVLLNLRTRHSNRLPPGPTPWPIVGNLPHLGTIPHHSLAALAEKYGPLMHLRFGFVDVVVAASASVASQFLKTHDAKFASRPPNSGAEHIAYNYQDLVFAPYGPRWRMLRKICSVHLFSGKALDDFRHVRQEEVAILTRVLAGAGNSTVKLGQLLNVCTTNALARVMLGRRVFGDGDPKADEFKDMVVELMVLAGEFNIGDFIPALAWLDLQGVTKKMKKLHARFDSFLNTILEEHKSGNGGASSHGDLLSTLISLKDDADGEGGKLSDIEIKALLLNLFVAGTDTSSSTVEWAISELIRDPELLKQAQKEMDNVVGRDRLVTESDLGQLTLLQAIVKETFRLHPSTPLSLPRIASDSCEVDGYYIPKGSTLLVNVWAIARDPKMWTDPLEFRPTRFLPGGEKPNVDVKGNDFEVIPFGAGRRICVGISLGLRMVQLLVATLVQTFDWELASGLQAEKLNMTEAYGLTLQRAEPLMVHPKPRLAPHVYESG

SEQ ID NO: 12874 - DNA, 1563 bp, Cullen corylifolia
  CDS (1)..(1563)
atgttgctggaagttgcactgggtttgttggtgttggcactgtttgtgtacttgcgtcccacaccgactgcaaaatcaaaggcacttagacatcttccaaacccaccaagtccaactcgtcttccattaattggtcaccttcatctcttgaaagataaacttcttcactatgctctcatcgatctttctaaaaaacatggtcccttattctctctttactttagttccatgccaaccgttgttgcttccactcctgagttgttcaaactctttcttcaaacccacgaagccacttccttcaacaccagattccaaacatctgccattagacgcctcacttatgatgcttccgtcgccatggttccctttggaccttactggaagttcatcagaaagctcatcatgaacgatcttctcaacgccacaaccgtcgcaaagttgagacctttgaggacccaacagatccgcaagttccttggtgttatggcacaaagcgcagaggcccagaagccccttgatgtcaccgaggagcttcttaagtggacaaacagcacaatctccatgatgatgttgggtgaggctgaagagatcagagacatcgctcgtgaggttcttaagatttttggagagtacagtctcactgacttcatctggccattgaagtatctcaaggttggaaagtatgagaagaggattgatgatatcttgaacaagttcgatcctgttgttgaaagggttatcaagaaacgtagagagatcgtgagaaggagaaagaacggtgaggttattgagaatgaggccagtggagttttcctcgatacattgcttgaattcgctgaggatgagaccatggagatcaaaattaccaaggagcaaatcaagggtcttgttgtcgacttctactcagcagggacagattcaacagcagtggcaacagaatgggcattagcagagttgataaacaatcctagggtgttgcaaaaggcgcgtgatgaggtatacagtgttgtaggcaaagatagactcgttgatgaagttgacacacagaaccttccatacataagagctatagtgaaggagacattccgcatgcacccaccactcccagtggtaaaaagaaagtgcacagaagagtgtgaaattgatgggtttgtgattccagagggagcattgattcttttcaatgtatggcaagtgggaagagatcccaaatattgggtgaaaccattggaatttcgtccagaaaggttcttagaaagtggtggtgaaggagaggcagggcctcttgatcttaggggtcaacactttcaacttcttccatttgggtctggtagaagaatgtgtcccggtgtcaatttggctactaccggaatggcaacattgcttgcatctattatccagaactttgatttgcaagtaccgggcccacatggacaattattgaagggtgatgatgccaaagttagcatggaagaaagggctggtcttactgttccaagggcacatagtctcatcttagttccacttgcaaggacaagcgttacatccaaactcctttcctaa

SEQ ID NO: 12875 - protein, 520 aa, Cullen corylifolia
MLLEVALGLLVLALFVYLRPTPTAKSKALRHLPNPPSPTRLPLIGHLHLLKDKLLHYALIDLSKKHGPLFSLYFSSMPTVVASTPELFKLFLQTHEATSFNTRFQTSAIRRLTYDASVAMVPFGPYWKFIRKLIMNDLLNATTVAKLRPLRTQQIRKFLGVMAQSAEAQKPLDVTEELLKWTNSTISMMMLGEAEEIRDIAREVLKIFGEYSLTDFIWPLKYLKVGKYEKRIDDILNKFDPVVERVIKKRREIVRRRKNGEVIENEASGVFLDTLLEFAEDETMEIKITKEQIKGLVVDFYSAGTDSTAVATEWALAELINNPRVLQKARDEVYSVVGKDRLVDEVDTQNLPYIRAIVKETFRMHPPLPVVKRKCTEECEIDGFVIPEGALILFNVWQVGRDPKYWVKPLEFRPERFLESGGEGEAGPLDLRGQHFQLLPFGSGRRMCPGVNLATTGMATLLASIIQNFDLQVPGPHGQLLKGDDAKVSMEERAGLTVPRAHSLILVPLARTSVTSKLLS

SEQ ID NO: 12876 - DNA, 1554 bp, Arabidopsis thaliana
  CDS (1)..(1554)
atggatgcaatcgtcgttgactctcaaaactgcttcatcatcattcttctatgttccttctcactcatctcctactttgtcttcttcaaaaaaccaaaggttaactttgatttgcttccgagccctccttcacttccaatcattggtcatcttcacctcttgctctctactcttatccacaagtctcttcagaaactctcctccaagtatggacctcttctccatctccgcatctttaacatccccttcatcctcgtctcctcggactcactggcctatgagatcttcagggatcacgacgtgaacgtctcctctcgcggtgttggagcgatcgacgagtccctggcgtatggatcttctggtttcatacaggctccctatggagattactggaaattcatgaagaagctcatcgcaactaagttgctgggaccccaaccactggtgcggtcacaggattttcgttctgaagagctagagaggttctacaaaaggctgttcgataaggccatgaagaaggaaagcgttatgattcataaggaagcgtccagattcgttaacaatagcctttacaagatgtgcacgggaaggagcttttcagtggagaataatgaagtggagagaataatggaacttactgccgacttaggtgccttgtcacagaagtttttcgtgtcaaagatgtttcgtaagctgcttgagaagctcggtatctcacttttcaaaacggagataatggttgtttcacgtagatttagtgagctggttgaaaggattcttattgaatatgaagagaaaatggacgggcatcaaggcacacagtttatggatgccttgttggcagcttatcgagatgaaaatacagaatataaaatcactaggagccatatcaagtcgcttctcacggtaaatgtacatgagtttttcattggagccgctgacgcctcatcaatagcaatacagtgggcaatggcagatatcataaacaaccgtgagattcttgagaaattgagagaagaaattgattcggttgtaggaaaaacaagattggttcaagaaacagatttaccaaaccttccttatttgcaagctgtagttaaggaagggctaagattgcacccgcctacacctctggttgtaagggagttccaagaagggtgtgagattggagggttctttgtaccaaagaacacaacacttattgttaattcttatgctatgatgagagatcctgattcatggcaagatcctgatgagtttaaaccagagaggtttctagcttccttaagtagagaggaggataaaaaagagaaaatccttaacttccttccttttgggagcggaaggagaatgtgtcctggatcaaatcttggttatatatttgtaggaaccgcgattgggatgatggtccagtgctttgactgggaaatcaatggagacaagattaatatggaagaggctactggagggtttctcatcaccatggctcatccccttacatgcactcctattcctcttccccgaacccaaaactctttaatttcccatctttaa

SEQ ID NO: 12877 - protein, 517 aa, Arabidopsis thaliana
MDAIVVDSQNCFIIILLCSFSLISYFVFFKKPKVNFDLLPSPPSLPIIGHLHLLLSTLIHKSLQKLSSKYGPLLHLRIFNIPFILVSSDSLAYEIFRDHDVNVSSRGVGAIDESLAYGSSGFIQAPYGDYWKFMKKLIATKLLGPQPLVRSQDFRSEELERFYKRLFDKAMKKESVMIHKEASRFVNNSLYKMCTGRSFSVENNEVERIMELTADLGALSQKFFVSKMFRKLLEKLGISLFKTEIMVVSRRFSELVERILIEYEEKMDGHQGTQFMDALLAAYRDENTEYKITRSHIKSLLTVNVHEFFIGAADASSIAIQWAMADIINNREILEKLREEIDSVVGKTRLVQETDLPNLPYLQAVVKEGLRLHPPTPLVVREFQEGCEIGGFFVPKNTTLIVNSYAMMRDPDSWQDPDEFKPERFLASLSREEDKKEKILNFLPFGSGRRMCPGSNLGYIFVGTAIGMMVQCFDWEINGDKINMEEATGGFLITMAHPLTCTPIPLPRTQNSLISHL

SEQ ID NO: 12878 - DNA, 1554 bp, Arabidopsis thaliana
  CDS (1)..(1554)
atggcagcaatgaacatgattgactttcaaaactgcttcatctttatcctcctatgtctcttctcacgactctgttattctcacttcttcaagaaaccaaaggaccctcgccttcactttgatttacctccgagccctccgtctcttcccatcatcggtcatctgcaccttcttctctctgttctactccacagatctttacaaaaactctccaccaagtacggatctattctctatctccgagtctttaggttccctgtagtcctcatctcgtcagcctcaattgcatatgagatcttcagggcacacgacctgaacatctcgtaccgcggtttcactccgaccgatgattcactttttgccggatctttcagctttatctctgctccctatggagattattgggagttcatgaagaaggtcctagttacaaacgtttttgggccccaagcacacgagcagtcacgaggtgtccgtgcagatgtgctagagcggttttatgggaatctgttcgataaagcgataaagaagcagagcgtggagatatgtgctgaagcgttgaagttatctaactccagcatctgcaagatgatcatggggaggagttgttcagaggagagattcagggctttggctaccgagttagatgttttgacaaagaagctcttctttgcaaacatgttgcgagcatggtttaagaagcttgttgtctctctgtttaaaaaagaaactacagttatttcctacagattcgatgagctgctcgaaagcattcttgtggaacacgaaaagaaactggacgtgcatcatcaacgtacggacttgatggacgcattgttggcagcttatcgggatgaaaatgcagagtataagatcacaaggaaccatatcaagtcaattattgcggatcttttatttgcaggcactgaaaaccaagtgcagacaatacaatgggcaatggcagagatcattaacaaccctaacgttcttgagagactgagaggagaaatcgatagcgtggtaggaaagtcaaggttgattcaagaaacggatttaccaaagctcccttatttgcaagctgtggttaaggaaacgataagactgcacccgccggggcctttcttcttaaggttcacaaaagaagggtgtaggatcagagggttctatgtaccagagaacacgtcagtcgttgttaacgtttatgctgtgatgagggatcctgatgcttgggaggatcctcttgtgtttaagccagagaggttcttagcttcttcaagagcagaacaagaggaggagagaagagagaaagaaattaagtaccttccttttggaagcggaagaagaagttgtcccggagaaaatctagcttatgtcattatgggaactgcaattggagtgatggtgcagggttttgagtggagaaccacagaagagaaaattaacatggacgaggctgttgtaggactgagcttgaccatggctcatcctcttaagatcattcctgttgctcgaacctcaaactctttaacttcgagtttgcaaaaatgtttgtga

SEQ ID NO: 12879 - protein, 517 aa, Arabidopsis thaliana
MAAMNMIDFQNCFIFILLCLFSRLCYSHFFKKPKDPRLHFDLPPSPPSLPIIGHLHLLLSVLLHRSLQKLSTKYGSILYLRVFRFPVVLISSASIAYEIFRAHDLNISYRGFTPTDDSLFAGSFSFISAPYGDYWEFMKKVLVTNVFGPQAHEQSRGVRADVLERFYGNLFDKAIKKQSVEICAEALKLSNSSICKMIMGRSCSEERFRALATELDVLTKKLFFANMLRAWFKKLVVSLFKKETTVISYRFDELLESILVEHEKKLDVHHQRTDLMDALLAAYRDENAEYKITRNHIKSIIADLLFAGTENQVQTIQWAMAEIINNPNVLERLRGEIDSVVGKSRLIQETDLPKLPYLQAVVKETIRLHPPGPFFLRFTKEGCRIRGFYVPENTSVVVNVYAVMRDPDAWEDPLVFKPERFLASSRAEQEEERREKEIKYLPFGSGRRSCPGENLAYVIMGTAIGVMVQGFEWRTTEEKINMDEAVVGLSLTMAHPLKIIPVARTSNSLTSSLQKCL

SEQ ID NO: 12880 - DNA, 1563 bp, Medicago truncatula
  CDS (1)..(1563)
atggaacctctactattggccttcacattatttctttcatcactcatttgctacataattttccagccaattttaaaccgtcacaaaaacctccctccatcgcctctattcaaacttccgatcattggccacatgcacatgttaggtccccttctccaccactccttcgaccgcctctcccaaaaatacggaccaatattttcacttaactttggttccgtcctctgcgttgttgcatccactcctcactacgcaaaacaaatccttcaaatcaacgaacacgcctttaattgtcgtaatgaatcaactgcaattaaacgcctcacctatgaagcatctctagcttttgcaccctatggcgaatattggagatttattaaaaaacttagtatgaatgagcttttgggctctcgtagcattagtagcttccaacacttgcgtttacaagagactcacaacctccttaagcttttcgctgataaagcgaaaaactacgaggctgtgaatgtgacacaagagttgctaaagttgtcaaacaacgtcatttctaaaatgatgttgggggaagctgaggaggctagggatgttgtgcgagatgtgaccgagatttttggagagtttaatgtatcggattttatttggttgtttaagaaacttgatttgcaagggtttgggaagaggatagaggatttgtttatgaggtttgatacattggtggaaaggattattagtaaaagagaagagttgaggaagaacaaaggaaggaaagaaaataagggtgagcaaggtgctgaattcagagactttcttgatatattgcttgattgtgccgaggatcaaaattcagaaataaaagttcaaagggttcacatcaaggccttgattatggatttctttacagcaggaacagacacaacatcaatttcaacagaatgggcattagttgagctaatgaacaacccttcattgttacaaaaagctcgtgaagaaatagacaatgtagtagggaaaaacagactagtagatgaatctgacggaccaaatcttccttatattcaagccataataaaagaaacatttcgtctacacccaccggttcctatggtcactagaagatgtgtcacgcaatgcaaaattgaaaattatgtgatcccagaaaatagtttaatctttgtgaataattgggctatgggaagaaactcagcttattgggacaaaccattggaatttaatccagaaagatttctaaaaaattcaacaaattccaatggggttattgatgtgagggggcaaaattttcagattttgccatttgggtcaggaagaaggatgtgtcctggggttactttagcaatgcaagaagttccagctttgcttggtgccataattcaatgctttgattttaattttgtgggtcctaagggtgagattttgaagggtggtgatattgttattgatgtgaatgaaaggccaggattgactgctcctagggtgcatgatttggtttgtgttcctgttgaaaggtttgcttgtggtggacctcttcaaagccttggatgttga

SEQ ID NO: 12881 - protein, 520 aa, Medicago truncatula
MEPLLLAFTLFLSSLICYIIFQPILNRHKNLPPSPLFKLPIIGHMHMLGPLLHHSFDRLSQKYGPIFSLNFGSVLCVVASTPHYAKQILQINEHAFNCRNESTAIKRLTYEASLAFAPYGEYWRFIKKLSMNELLGSRSISSFQHLRLQETHNLLKLFADKAKNYEAVNVTQELLKLSNNVISKMMLGEAEEARDVVRDVTEIFGEFNVSDFIWLFKKLDLQGFGKRIEDLFMRFDTLVERIISKREELRKNKGRKENKGEQGAEFRDFLDILLDCAEDQNSEIKVQRVHIKALIMDFFTAGTDTTSISTEWALVELMNNPSLLQKAREEIDNVVGKNRLVDESDGPNLPYIQAIIKETFRLHPPVPMVTRRCVTQCKIENYVIPENSLIFVNNWAMGRNSAYWDKPLEFNPERFLKNSTNSNGVIDVRGQNFQILPFGSGRRMCPGVTLAMQEVPALLGAIIQCFDFNFVGPKGEILKGGDIVIDVNERPGLTAPRVHDLVCVPVERFACGGPLQSLGC

SEQ ID NO: 12882 - DNA, 1542 bp, Glycine max
  CDS (1)..(1542)
atgctagacatcaaaggctacctcgtactcttcttcctatggttcatatcaaccattctgatacgttccatcttcaagaaaccacagcgtctaagactcccaccgggtcctccaatttcagtacccttgctgggacacgcgccatatctccgttcactgctccaccaagccttgtacaagctatcactgcgctatggacccttgatccacgtcatgatcggttcgaagcacgtggtggtggcgtcgtcggcggagacggccaagcagatcctcaaaacctcggaggaggcattctgcaaccgtcccttaatgatagcgagcgagagcctaacctacggcgcggcggactacttcttcatcccctacggcacatactggcggttcctgaagaagctctgcatgacggagcttctgagcgggaagaccctggagcatttcgtgagaatccgcgagagcgaggtggaggcgttcctcaagagaatgatggagatttcaggcaatggaaattacgaggtggtgatgaggaaggagctcataacgcacacgaataacatcatcacgaggatgataatggggaagaagagtaatgcggaaaacgatgaggtggccaggttgaggaaggtggtgagggaggtcggggagttgcttggggcgtttaacttgggggatgttattgggttcatgaggcctttggatctgcaagggtttgggaagaagaacatggaaactcaccacaaggtggatgcgatgatggagaaggtgttgagggagcatgaggaggctagggctaaggaagatgctgactctgataggaagaaggatctttttgatattttgttgaacctcattgaagctgatggtgctgacaataagctcactagagagagtgccaaagcctttgctctggacatgttcatcgccggcacaaacggccccgcaagcgtcctagagtggtcactggcggagctggtgagaaacccccacgttttcaagaaggcaagagaagagattgagtcagtggtaggcaaagaaaggctggtcaaagaatcagacattcccaacctaccatacctacaagcattgctgaaggaaaccctaaggctgcacccgccaaccccaatattcgcaagagaagccatgcgaacatgccaggttgaaggctacgacattccggaaaattccactattttgatcagcacatgggccattggtagggatccaaattactgggatgacgcactcgagtacaagccggagaggttcttgttctccgacgacccgggcaagagcaagattgacgtgagggggcagtactatcagctcctgccctttgggagcgggagaagaagctgccccggagcctcgctagcgttgcttgtcatgcaagcaacgctagcgagtttgatccagtgcttcgactggatcgttaatgatggtaaaaaccatcatgttgacatgtctgaggaagggagggtgactgtgtttttggccaagccactcaagtgcaagcctgttccgcgtttcactccgttcgctgcctga

SEQ ID NO: 12883 - protein, 513 aa, Glycine max
MLDIKGYLVLFFLWFISTILIRSIFKKPQRLRLPPGPPISVPLLGHAPYLRSLLHQALYKLSLRYGPLIHVMIGSKHVVVASSAETAKQILKTSEEAFCNRPLMIASESLTYGAADYFFIPYGTYWRFLKKLCMTELLSGKTLEHFVRIRESEVEAFLKRMMEISGNGNYEVVMRKELITHTNNIITRMIMGKKSNAENDEVARLRKVVREVGELLGAFNLGDVIGFMRPLDLQGFGKKNMETHHKVDAMMEKVLREHEEARAKEDADSDRKKDLFDILLNLIEADGADNKLTRESAKAFALDMFIAGTNGPASVLEWSLAELVRNPHVFKKAREEIESVVGKERLVKESDIPNLPYLQALLKETLRLHPPTPIFAREAMRTCQVEGYDIPENSTILISTWAIGRDPNYWDDALEYKPERFLFSDDPGKSKIDVRGQYYQLLPFGSGRRSCPGASLALLVMQATLASLIQCFDWIVNDGKNHHVDMSEEGRVTVFLAKPLKCKPVPRFTPFAA

SEQ ID NO: 12884 - DNA, 1500 bp, Oryza sativa
  CDS (1)..(1500)
atgggcgccctggctctggctctcgtcgtcgttgtggttgtgcacgttgccgtgaacgcctttgggcggcggcggcttcccccgagtccggcgagcctaccggtgatcgggcaccttcacctgctccggccgccggtgcaccgcaccttccacgagctggcggcgaggctgggccccctgatgcacgtccggctggggtcgacgcactgcgttgtggcgagctcggcggaggtggcggcggagctgatccgcagccacgaggcgaagatatcggagcggccgctgacggcggtggcccggcagttcgcgtacgagtcggcggggttcgcgttcgcgccctacagcccgcactggcgcttcatgaagcggctgtgcatgtcggagctgctgggcccgcgcacggtggagcagctgcgccccgtgcgccgcgccgggctggtgtcgctgttgcgccacgtgttgtcgcagccggaggcggaggcggtggacctgacccgcgagctcatccgcatgtccaacacctccatcatccgcatggccgccagcacggtccccggcagcgtgacggaggaggcgcaggagctggtgaaggtggtggcggagctggtgggcgccttcaacgccgacgactacatcgccctgtgccgtggctgggacctgcagggcctcgggcgccgtgcggccgacgtgcacaagaggttcgacgcgctgctggaggagatgatcaggcacaaggaggaggctaggatgcggaagaagacagacacagacgtcggcagcaaggacctgcttgacatcctgctggacaaggcggaggacggcgcggcggaggtgaagctcaccagagacaacatcaaggccttcatcatcgacgttgttactgccgggtccgacacttcggccgccatggtggagtggatggtggcggagctgatgaaccacccggaggccctgcgcaaggtgcgggaggagatcgaggcggtggtggggcgggacaggatcgccggcgagggggacctgccgagactgccgtatctgcaggcggcatacaaggagacgctgcggctgaggccggcggcgccgatcgcgcacaggcagtcgacggaggagatccagatccgagggttcagggtgccggcgcagacggcggtgttcatcaacgtgtgggccatcgggcgagacccggcgtactgggaggagccgctggagttcaggccggagcggttcctcgccggcggcggcggcgagggcgtggagccgcgcgggcagcacttccagttcatgccgttcgggagcggccggcgcgggtgccccgggatggggcttgcgctgcagtcggtgccggcggtggtggcggcgctgctgcagtgcttcgattggcagtgcatggacaataagttgatagacatggaggaggcagacggcctggtttgcgctcggaagcatcgcctcctcctccacgcccacccgcgcctccaccctttcccgccgctcctctag

SEQ ID NO: 12885 - protein, 499 aa, Oryza sativa
MGALALALVVVVVVHVAVNAFGRRRLPPSPASLPVIGHLHLLRPPVHRTFHELAARLGPLMHVRLGSTHCVVASSAEVAAELIRSHEAKISERPLTAVARQFAYESAGFAFAPYSPHWRFMKRLCMSELLGPRTVEQLRPVRRAGLVSLLRHVLSQPEAEAVDLTRELIRMSNTSIIRMAASTVPGSVTEEAQELVKVVAELVGAFNADDYIALCRGWDLQGLGRRAADVHKRFDALLEEMIRHKEEARMRKKTDTDVGSKDLLDILLDKAEDGAAEVKLTRDNIKAFIIDVVTAGSDTSAAMVEWMVAELMNHPEALRKVREEIEAVVGRDRIAGEGDLPRLPYLQAAYKETLRLRPAAPIAHRQSTEEIQIRGFRVPAQTAVFINVWAIGRDPAYWEEPLEFRPERFLAGGGGEGVEPRGQHFQFMPFGSGRRGCPGMGLALQSVPAVVAALLQCFDWQCMDNKLIDMEEADGLVCARKHRLLLHAHPRLHPFPPLL

SEQ ID NO: 12886 - DNA, 1515 bp, Pericallis cuneata
  CDS (1)..(1515)
atgagcattctaaccctaatctgcaccttcatcactggtttgatgttctatgggttggttaatttgcttagccgtcgcgctagccgtcttcctccaggtccaaccccatggccaatcatcggcaacctaatgcaccttggtaaacttccacatcactcgctggcggacttggcgaaaaagtatggtccgttgatacatgtccgactagggtccgttgatgttgtggtggcctcgtctgcgtccgttgctgggcagtttttaaaggtgcatgatgcgaattttgccaacaggccaccaaattctggagctaaacatatggcgtataattatcatgatatggtgtttgcgccgtatggtccaaggtggcgaatgcttcgaaagatgtgctccatgcatctgttttctgccaaagcactcactgattttcgtcaagttcgacaggaggaggtaacgatactcacgcgcgttttggccaggactggacaatcggcagtgaaactagatcaacaacttaacgtgtgcttcgcaaacacattatcccgaatgatgttagacaggagagtatttggagacggtgatccaaaggcggacgactacaaggatatggtggttgagttgatgactttggccggacaattcaacatcggtgactacattccttggcttgacttgcttgacctacaaggcattgtcaaaaggatgaagaaagttcattctcaattcgattcgttccttgacaccatcattgatgaacatactattggcacgggccgtcatgttgacatgttaagcacaatgatttcactcaaagataatgccgatggagagggagggaagctttcgttcatcgagatcaaagctcttctactgaacttgttctcagcgggaacggacacgtcatctagtaccgtggaatggggaatagcggaactcattcgccacccacagctaatgaaacaagcgcaagaagaaatggacattgtagttggaaaaaaccggcttgtaacagaaatggacataagccaactaacattccttcaagccattgtgaaagaaacgtttaggctacaccccgcgacgccactttccctgccaaggattgcatcagaaagctgtgaggtcaaggggtatcatgttcctaagggatcgatactctttgttaacgtgtgggccattgctcgacaatcagaattgtggaccgacccacttgaatttcggcctggtcgtttcctaatcccaggagaaaaacctaatgttgaagtgaagccaaatgatttcgaaattgtaccatttggaggaggacgaaggatttgtgcgggtatgagcctcggattgagaatggtcaatttgcttattgcaacattggttcaagcctttgattgggaattggctaatgggttagagccagaaaagcttaacatggaagaagtgtttgggattagccttcaaagggttcaacccttgttggtgcacccgaggccaaggttagcccgtcacgtatacggaacgggttaa

SEQ ID NO: 12887 - protein, 504 aa, Pericallis cuneata
MSILTLICTFITGLMFYGLVNLLSRRASRLPPGPTPWPIIGNLMHLGKLPHHSLADLAKKYGPLIHVRLGSVDVVVASSASVAGQFLKVHDANFANRPPNSGAKHMAYNYHDMVFAPYGPRWRMLRKMCSMHLFSAKALTDFRQVRQEEVTILTRVLARTGQSAVKLDQQLNVCFANTLSRMMLDRRVFGDGDPKADDYKDMVVELMTLAGQFNIGDYIPWLDLLDLQGIVKRMKKVHSQFDSFLDTIIDEHTIGTGRHVDMLSTMISLKDNADGEGGKLSFIEIKALLLNLFSAGTDTSSSTVEWGIAELIRHPQLMKQAQEEMDIVVGKNRLVTEMDISQLTFLQAIVKETFRLHPATPLSLPRIASESCEVKGYHVPKGSILFVNVWAIARQSELWTDPLEFRPGRFLIPGEKPNVEVKPNDFEIVPFGGGRRICAGMSLGLRMVNLLIATLVQAFDWELANGLEPEKLNMEEVFGISLQRVQPLLVHPRPRLARHVYGTG

SEQ ID NO: 12888 - DNA, 1545 bp, Osteospermum hybrid cultivar
  CDS (1)..(1545)
atgaccattttaccccttgtactctacagttgcatcactggattagtgatctatgtactgcttaacctgcgcacccgtcactctaaccgcctgccccctgggcccacaccatggccgatcgtcggaaacctaccgcatctcggcgtagttccgcatcactcgctggcggcaatggcggaaaaatacggtccgttgatgcatctccggttaggttttgttgacgtggtggtggcggcgtctgctgccgttgctgctcagtttttgaaagttcatgatgcgaattttgcgagtagaccgcctaattccggtgcgaaacatatagcgtataattatcaagacttggtgtttgcgccgtactacggtccgcggtggcgtatgcttcggaagatttgctccgttcacctgttttcttctaaagcgcttgatgatttccggcatgtccgccaggaggaggtggcgatactgacgcgcgctttgatcggcgccggtgactcgccggtgaaactaggtcaattactgaacgtgtgcacaacaaacgcattggcgcgcgtgatgttaggtaagagagtattcggtgacagaagtggtggcggtgatccaaaggcggatgagttcaaggatatggtggttgaggtgatggagttggccggagaattcaatatcggtgattttataccggtgcttgattctctcgatctgcaaggaatcgcgaagaagatgaaggaacttcacgtgcgatttgattcgttccttggtaagatccttgaagaacataaaaccggcaacggtggcgcgtcgagtcaacacactgacttgttgactaccttgatttcactcaaggatgatactgatgaagagggtgggaagctttcagacattgaaatcaaagctttgcttctgaacttatttactgcgggaacagacacgtcatctagtaccgtggaatgggcaatagccgaactcattcgtcatccgcaactattgaaacaggcccaagaagaaatagacaatgtagtaggccgagaccacctagtaaccgaattggacctaacccaactaccattcctccaagccattgtgaaggagacctttaggctccacccatcaacaccactctcactaccaagaattgcatccgagagttgtgaggtcaacgggtaccatatccctaagggatccacactccttgttaacgtgtgggccatagcccgagacccaaaaatgtggtccgaaccacttgaattccgtccagcccgattcttacccgggggtgaaaagcccgatgctgatgttaagggcaacgattttgaagtcataccattcggggccggaaggaggagttgtgcgggtatgagtctaggattgagaatggttcaattactcgttgcaacgttggtacaaacctttgactgggaattggctaatgggttgaaacccgagaagcttaacatggaagaagcgtatgggctaactcttcaacgggctgcacccttgttggtacacccaaagccgaggttagcacctcatgtgtacggaagtaattaa

SEQ ID NO: 12889 - protein, 514 aa, Osteospermum hybrid cultivar
MTILPLVLYSCITGLVIYVLLNLRTRHSNRLPPGPTPWPIVGNLPHLGVVPHHSLAAMAEKYGPLMHLRLGFVDVVVAASAAVAAQFLKVHDANFASRPPNSGAKHIAYNYQDLVFAPYYGPRWRMLRKICSVHLFSSKALDDFRHVRQEEVAILTRALIGAGDSPVKLGQLLNVCTTNALARVMLGKRVFGDRSGGGDPKADEFKDMVVEVMELAGEFNIGDFIPVLDSLDLQGIAKKMKELHVRFDSFLGKILEEHKTGNGGASSQHTDLLTTLISLKDDTDEEGGKLSDIEIKALLLNLFTAGTDTSSSTVEWAIAELIRHPQLLKQAQEEIDNVVGRDHLVTELDLTQLPFLQAIVKETFRLHPSTPLSLPRIASESCEVNGYHIPKGSTLLVNVWAIARDPKMWSEPLEFRPARFLPGGEKPDADVKGNDFEVIPFGAGRRSCAGMSLGLRMVQLLVATLVQTFDWELANGLKPEKLNMEEAYGLTLQRAAPLLVHPKPRLAPHVYGSN

SEQ ID NO: 12890 - DNA, 1521 bp, Phalaenopsis hybrid cultivar
  CDS (1)..(1521)
atgtccatcttcctcatcgcaaccctcttcctctctctttccctccacctcctactccgccgcttccgccgccgccgccgcatcctccccctccctcccggacccctcaacttccccatcgtcggcgcactccccttcatcggctccatgccccactcaggcctcgccctcctctcccgccgctacggccccattatgttcctcaaaatgggcatccgccaagtggtcgtcgcctcctcctcctccgccgcacgctcctttctcaaaactcacgactcccgcttctccgaccgccctctcgacatcatctcgaagcaagtcagctacaacggccagaacatggtcttcgccgactacggtcccaagtggaagctcctccgcaaagtctccaatctccatctctttggccccaaggccatgtcccgttgggccgacgtgcggcgggacgaagctttctccatgtcccacttcctgaagaaacagagcgattccaaaaaccctgttttgctttccaacttgctggtttgttccatggcgaatgtgattgggagaatttcgatgagcaagagggtgttcgatgaggaggggaaggaggcgaaggagtttaaggagataattaaggagcttttggtcgggcagggggcttcgaatattggggatttggtgccggcgatgaggtggctggatccgcagggggcgaggaagaagctgctgggattgaatcagaggtttgttaggatgataagtaagttcttggcggagcacggtgagagtagaggggagcgggaggggaatcctgatctgcttgatcttattgtggctgataagatcgccggcgacgacggggaagggctttctgaggagaacatcaagggcttcatatctgatctattcgtggcgggcacagacacatccgctatggtcatcgagtgggcgatggctgagatgctaaaaaatccggcgatcctccgccgagtacaggaagaaaccgaccgcatcgtcggccgcgatcgccttctcgaagaatccgacataccaaatctcccctacctccaagccatatgcaaggaagctctgcgcaagcatcccccaactcctctcagcatacctcactacgctagcgagccctgcgaggtagaaggttaccacattcccggcaagacctggcttttggtcaacatatgggccatcgggcgagacccagaggtgtgggagaagccattggagttcgatccggagaggtttatggaagggaagatggcgaggattgatccgatggggaacgattttgagctgataccgttcggcgctgggaggaggatttgcgcggggaagttgatggggatggttatggtgcagtactttttgggagtgttggtgcagggttttgactggagtttgccggaaggggtggtggagctggacatggaggaggggccgggattggtgttgccgaaggcggtgccgctgttggtgacggcgaggccgcggctgccggcggcggcgtatggggttgtttga

SEQ ID NO: 12891 - protein, 506 aa, Phalaenopsis hybrid cultivar
MSIFLIATLFLSLSLHLLLRRFRRRRRILPLPPGPLNFPIVGALPFIGSMPHSGLALLSRRYGPIMFLKMGIRQVVVASSSSAARSFLKTHDSRFSDRPLDIISKQVSYNGQNMVFADYGPKWKLLRKVSNLHLFGPKAMSRWADVRRDEAFSMSHFLKKQSDSKNPVLLSNLLVCSMANVIGRISMSKRVFDEEGKEAKEFKEIIKELLVGQGASNIGDLVPAMRWLDPQGARKKLLGLNQRFVRMISKFLAEHGESRGEREGNPDLLDLIVADKIAGDDGEGLSEENIKGFISDLFVAGTDTSAMVIEWAMAEMLKNPAILRRVQEETDRIVGRDRLLEESDIPNLPYLQAICKEALRKHPPTPLSIPHYASEPCEVEGYHIPGKTWLLVNIWAIGRDPEVWEKPLEFDPERFMEGKMARIDPMGNDFELIPFGAGRRICAGKLMGMVMVQYFLGVLVQGFDWSLPEGVVELDMEEGPGLVLPKAVPLLVTARPRLPAAAYGVV

SEQ ID NO: 12892 - DNA, 1587 bp, Triticum aestivum
  CDS (1)..(1587)
atggctcacgtacatgtagacgagatgctccacgaagcagcagcggcagctccacgatctctcttgattgcgactgcggtgctcttctcccttgtggttgtgccgctcctgctccgcattattaccaagcagggagcggcaagcgacgccaagctgctgagcctgctcccatctcccccgacgaggctccccataatcgggcacctacacctaatgggcgatcttccctacgtctccctcgccggcctggccgccaagtacggcccggaactcatgctggtacacctcggtgccgtgcccaccgccgtcgtgtcctcgccgcgcactgccgaggccgtcctgcgcacccacgaccacatcttcgcgtcgcgaccgcggtcgatggtcttcgacatcatcatgtacgggcagacggactcgtgcttcgcgccctacggcgagcacttccggaaggccaggaagctcgtgacggtgcacatgctcaacgccaggaagatacggtcccagcgcccggcccgggaggaggaggtccggctagtgattggaaagatcgccaaggccgcggccgcgcgcgaggccgtagacatgagcgagctcctgcactcgtacgtcaacgacctcgtttgccgtgctgtgtcgggcaagttctcccaggaggaggggcggaacaagctgttccgtgagctcaccgacatcaacgcggcgctcctgggagggttcaacatcctcgactacttcccgagcctggggaggttcgagttggtctgcaaggtggcgtgcgccaaggcccgacgggtgaggaagcggtgggacctgctcctcgacaagctaattgacgaccatgcagcaaggatggtaagccgtgaggatgaggcccagccggagcaagaagaagacaaagacttcatcgacgtatccctctctcttcagcaggagtatggtctcaccaggcaccatatcaaggccatcttgatagacatgtttgaggccggcacggacacctcgtatatgacgctggagtttgccatggcggagctcatacggaagccacaccttatgaagaagctgcaggaagaggtaaggaggaatgtaaccaacgggcaagagatggtcgccgaagacgatctccccaacatgacctacctcaaggctgtcatcaaggagacactccgactgcatccgccggtacctctcatgattccacacttctccctagatgcctgcaccgttgatggctacacgatcccagcaaacactcgtgtcgttatcaacgcctgggcactcggcaggcacagtggctactgggaaaatgaaaatgaattccaacctgagagatttatgaatggagccggcgttgatctgaagccaaatgagttccattacttgccatttgggtttggacgaagaatgtgccctggggttcactcggcatcagcaacggtcgagacaatgctggcaaacctcatgtaccgattcgattggaagcttccacccggattgaaggaagaaaacatagatatgactgaggtgtttggaattacagtttcaagaaaggaaaagctcatcttagtccccgtgaccgcatga

SEQ ID NO: 12893 - protein, 528 aa, Triticum aestivum
MAHVHVDEMLHEAAAAAPRSLLIATAVLFSLVVVPLLLRIITKQGAASDAKLLSLLPSPPTRLPIIGHLHLMGDLPYVSLAGLAAKYGPELMLVHLGAVPTAVVSSPRTAEAVLRTHDHIFASRPRSMVFDIIMYGQTDSCFAPYGEHFRKARKLVTVHMLNARKIRSQRPAREEEVRLVIGKIAKAAAAREAVDMSELLHSYVNDLVCRAVSGKFSQEEGRNKLFRELTDINAALLGGFNILDYFPSLGRFELVCKVACAKARRVRKRWDLLLDKLIDDHAARMVSREDEAQPEQEEDKDFIDVSLSLQQEYGLTRHHIKAILIDMFEAGTDTSYMTLEFAMAELIRKPHLMKKLQEEVRRNVTNGQEMVAEDDLPNMTYLKAVIKETLRLHPPVPLMIPHFSLDACTVDGYTIPANTRVVINAWALGRHSGYWENENEFQPERFMNGAGVDLKPNEFHYLPFGFGRRMCPGVHSASATVETMLANLMYRFDWKLPPGLKEENIDMTEVFGITVSRKEKLILVPVTA

SEQ ID NO: 12894 - DNA, 1581 bp, Glycine max
  CDS (1)..(1581)
atgttgcttgaacttgcacttggtttattggttttggctctgtttctgcacttgcgtcccacacccactgcaaaatcaaaagcacttcgccaactcccaaacccaccaagcccaaagcctcgtcttcccttcataggacaccttcatctcttaaaagacaaacttctccactacgcactcatcgacctctccaaaaaacatggtcccttattctctctctactttggctccatgccaaccgttgttgcctccacaccagaattgttcaagctcttcctccaaacgcacgaggcaacttccttcaactcaaggttccaaacctcagccataagacgcctcacctatgatagctcagtggccatggttcccttcggaccttactggaagttcgtgaggaagctcatcatgaacgaccttctcaacgccaccactgtaaacaagttgaggcctttgaggacccaacagatccgcaagttccttagggttatggcccaaggcgcagaggcacagaagccccttgacttgaccgaggagcttctgaaatggaccaacagcaccatctccatgatgatgctcggcgaggctgaggagatcagagacatcgctcgcgaggttcttaagatctttggcgaatacagcctcactgacttcatctggccattgaagcatctcaaggttggaaagtatgagtcaagaagcgccgtgaagaggatcgacgacatcttgaacaagttcgaccctgtcgttgaaagggtcatcaagaagcgccgtgagatcgtgaggaggagaaagaacggagaggttgttgagggtgaggtcagcggggttttccttgacactttgcttgaattcgctgaggatgagaccatggagatcaaaatcaccaaggaccacatcaagggtcttgttgtcgactttttctcggcaggaacagactccacagcggtggcaacagagtgggcattggcagaactcatcaacaatcctaaggtgttggaaaaggctcgtgaggaggtctacagtgttgtgggaaaggacagacttgtggacgaagttgacactcaaaaccttccttacattagagcaatcgtgaaggagacattccgcatgcacccgccactcccagtggtcaaaagaaagtgcacagaagagtgtgagattaatggatatgtgatcccagagggagcattgattctcttcaatgtatggcaagtaggaagagaccccaaatactgggacagaccatcggagttccgtcctgagaggttcctagagacaggggctgaaggggaagcagggcctcttgatcttaggggacaacattttcaacttctcccatttgggtctgggaggagaatgtgccctggagtcaatctggctacttcgggaatggcaacacttcttgcatctcttattcagtgcttcgacttgcaagtgctgggtccacaaggacagatattgaagggtggtgacgccaaagttagcatggaagagagagccggcctcactgttccaaggtcacatagtcttgtctgtgttccacttgcaaggatcggcgttgcatctaaactcctttcttaa

SEQ ID NO: 12895 - protein, 526 aa, Glycine max
MLLELALGLLVLALFLHLRPTPTAKSKALRQLPNPPSPKPRLPFIGHLHLLKDKLLHYALIDLSKKHGPLFSLYFGSMPTVVASTPELFKLFLQTHEATSFNSRFQTSAIRRLTYDSSVAMVPFGPYWKFVRKLIMNDLLNATTVNKLRPLRTQQIRKFLRVMAQGAEAQKPLDLTEELLKWTNSTISMMMLGEAEEIRDIAREVLKIFGEYSLTDFIWPLKHLKVGKYESRSAVKRIDDILNKFDPVVERVIKKRREIVRRRKNGEVVEGEVSGVFLDTLLEFAEDETMEIKITKDHIKGLVVDFFSAGTDSTAVATEWALAELINNPKVLEKAREEVYSVVGKDRLVDEVDTQNLPYIRAIVKETFRMHPPLPVVKRKCTEECEINGYVIPEGALILFNVWQVGRDPKYWDRPSEFRPERFLETGAEGEAGPLDLRGQHFQLLPFGSGRRMCPGVNLATSGMATLLASLIQCFDLQVLGPQGQILKGGDAKVSMEERAGLTVPRSHSLVCVPLARIGVASKLLS

SEQ ID NO: 12896 - DNA, 1584 bp, Hordeum lechleri
  CDS (1)..(1584)
atggctcacgtacatgtagacgagatgctccacggagcagcagcagctccgcgatctctcctgattgcgactgcggtgctcttctcccttgtggttctgccgctcctactccgcattattaccaagcagggagcggcgagcgatgccaagctgctgagcctgctcccgtctcccccgagcaagctccccatcatcgggcacctgcacctaatgggcgatctcccctacgtctccctcgccggcctggctgcaaagtacggcccggaactcatgctggtacgcctcggtgccgtgcccactgccgtcgtgtcctccccgcgcactgcggaggccgtcctgcgcacccacgaccacgtcttcgcgtcgcggccgcggtcgatggtgttcgacatcatcatgtacgggcagacggactcgtgcttcgcgccctacggcgaccacttccggaaggccaggaagcttgtgacggtgcacatgctcaacgccaggaagataaggtcccaacgcccggcccgcgaagaggaggtccggctggtgattggaaagatcgccaaggccgcggccgcgcgcgaggccgtggacatgagcgagctcctgcactcgtacgtcaacgacctcgtttgccgtgctgtgtcgggtaagttctcacaggaggaggggcggaacaagctgttccgtgagctcaccgacatcaacgcggcgctcctgggagggttcaacatcctcgactacttcccgagcctggggaggttcgagttggtctgcaaggtggcgtgcgccaaggcccgacgggtgaggaagcggtgggacctgctcctcgacaagctaattgacgaccatgcagcaaggatggtaagccgtgaggatgaggcccagggggagcaagaagaagacaaagacttcatcgatgtctccctatctcttcagcaggagtatggtctcaccagggaccatatcaaggccatcttgatagacatgtttgaggccggcacggatacctcgtatatgacgctggagtttgccatggcggagctcatacggaagccacaccttctgaacaagctgcaggaagaggtaaggaggaatgtacccaacgggcaagagatggtcgccgaagacgatctccccaacatgacctacctcaaagctgttatcaaggaaacactccggctgcacccaccggtacctctcatgattccacacttctcccttgatgcctgcacggttgacggctacacgatcccagcaaacactcgtgtcgttatcaacgcctgggcactcggaaggcacagtagctactgggaaaatgaaaacgaattccaacctgagagattcatgaatggagccggcgttgatctcaagccaaatgagttccattacttgccatttgggtttggacgaagaatgtgccctggggttcactcggcatcagcaacggtcgagacaatgctggcaaacctcatgtaccgattcgactggaagctcccacccggattaaaggaagaggacatagatatgactgaggtgtttggaataacagtttcaagaaaggaaaagctcatattagtccccgtgaccgtgtga

SEQ ID NO: 12897 - protein, 527 aa, Hordeum lechleri
MAHVHVDEMLHGAAAAPRSLLIATAVLFSLVVLPLLLRIITKQGAASDAKLLSLLPSPPSKLPIIGHLHLMGDLPYVSLAGLAAKYGPELMLVRLGAVPTAVVSSPRTAEAVLRTHDHVFASRPRSMVFDIIMYGQTDSCFAPYGDHFRKARKLVTVHMLNARKIRSQRPAREEEVRLVIGKIAKAAAAREAVDMSELLHSYVNDLVCRAVSGKFSQEEGRNKLFRELTDINAALLGGFNILDYFPSLGRFELVCKVACAKARRVRKRWDLLLDKLIDDHAARMVSREDEAQGEQEEDKDFIDVSLSLQQEYGLTRDHIKAILIDMFEAGTDTSYMTLEFAMAELIRKPHLLNKLQEEVRRNVPNGQEMVAEDDLPNMTYLKAVIKETLRLHPPVPLMIPHFSLDACTVDGYTIPANTRVVINAWALGRHSSYWENENEFQPERFMNGAGVDLKPNEFHYLPFGFGRRMCPGVHSASATVETMLANLMYRFDWKLPPGLKEEDIDMTEVFGITVSRKEKLILVPVTV

SEQ ID NO: 12898 - DNA, 1533 bp, Allium cepa
  CDS (1)..(1533)
atgcctatccctgtattacttcttcttaccatatttcttgcactcctcctctatcttttcttcttcgttgcaaagaagcacgaaggcaaaagagtaccaggtcctaaagggtggcccatcctcgggaaccttccacagctcggagctaaacctcatcagtctctctgcgaactttctagaacttacggtcctttatttggtctacggtttggatacgtcgatgtcgtcgttgctgcttctgctgatgtcgccgaacagtttcttagggttcatgatgttaattttagtaaccggcctcctaactctggtgctgagcatatagcttataattaccaggatttggttttcgcaccgtacggaccacgttggagaatgctgcgaaagctctgcgcccttcatcttttctctccaaaagcactcgaagaccttagcccagtcagatcactagaagtggccaccctagccaacaccctataccttcgcgcacaaagcgatcaaccgaccgtaaacctagcccaaatgctcaccacatgcaccaccaacgccttgtcaaaagccatgatgggccgacgagtgttcgtcaacgaaacaaccgataccgaaacctccaagttcaaggacatggtcctcgaaataatgagcctggccggtgttttcaacgttggggacttcgtgccctggctacgtccttttgatcttcaacgcgtcgtccgaaagatgaaggacgtgcatgcccggttcgactcctttctcgataaagtcatcgctgagcaccggatggtggataacgcgcacgacttgctcagtttgcttatacggtcgaaggacgatgttgacaacgacggtgttaagctaaccaataccgatatcaaagctctactcctgaacctgttcacggctgggacggacacatcgtcgagcacggttgaatgggccttgtcggagatgatccgacatccggatgcgttgaaaagagctcagcgggagctcgatgaggtggtcggccgtgatcggcttgtctcggaaacggacatccggagccttccgtacatccaagccatagtgaaggagacgttccggcttcatccttcgacgcctttgtccctaccacgtatctcatcggaagcttgcactgttaatgggtacctgataccgaagaacacgacgcttttagttaacgtttgggcgatatcgagggaccctggagtttggaaggagccattggagttccgaccagaacggtttctaggaggaggaggttatgagacggtggacttgaaggggaatgactttgagttgataccgtttggggcgggacgtagggtatgtgctgggttgagtttgggactgagaatggtgcagtttctgactgcgacgctcgtgcatggctttgattggaagttggtggatgggcagagtgcggagaagttggacatggaagaggcttatgggttgcccttgcaaagggcagtgcccttgatggttcgccctgttcctaggttggatgagaaggcttatcatgttgtggtttag

SEQ ID NO: 12899 - protein, 510 aa, Allium cepa
MPIPVLLLLTIFLALLLYLFFFVAKKHEGKRVPGPKGWPILGNLPQLGAKPHQSLCELSRTYGPLFGLRFGYVDVVVAASADVAEQFLRVHDVNFSNRPPNSGAEHIAYNYQDLVFAPYGPRWRMLRKLCALHLFSPKALEDLSPVRSLEVATLANTLYLRAQSDQPTVNLAQMLTTCTTNALSKAMMGRRVFVNETTDTETSKFKDMVLEIMSLAGVFNVGDFVPWLRPFDLQRVVRKMKDVHARFDSFLDKVIAEHRMVDNAHDLLSLLIRSKDDVDNDGVKLTNTDIKALLLNLFTAGTDTSSSTVEWALSEMIRHPDALKRAQRELDEVVGRDRLVSETDIRSLPYIQAIVKETFRLHPSTPLSLPRISSEACTVNGYLIPKNTTLLVNVWAISRDPGVWKEPLEFRPERFLGGGGYETVDLKGNDFELIPFGAGRRVCAGLSLGLRMVQFLTATLVHGFDWKLVDGQSAEKLDMEEAYGLPLQRAVPLMVRPVPRLDEKAYHVVV

SEQ ID NO: 12900 - DNA, 1503 bp, Panax ginseng
  CDS (1)..(1503)
atgttccccttagcatatccccttcttttcgtcctccttggagctctctcatggtggatactccccatcatatctccactaaaacgccaccataaactaccaccaggtccccgaggtttaccaattatcggtagcctccacacgctaggcgccctcccccaccgcaccttgcagaccctagccaaaaagtacggtcctatcatgtccatgcggctaggctctgtgccaactattgtagtctcttcacctcaagctgccgagcttttcctcaagactcatgacaatattttcgctagccgccctaagctccaagcggcagagtacatgtcctatggtactaagggcatgtccttcaccgcatacggtccacattggcgcaacataagaaaatttgttgtgcttgaacttcttactcctgcaaaaattaattcctttgtggggatgagaagggaggagcttggcatggtggtgaagagtattaaggaagcttcggcggcgaatgaggtggtggatcttagtgcaaaggtggcgaatattattgagaacatgacttatcgtttacttttgggacgcacaaaagatgataggtatgatcttaaggggattatgaatgaggctttgactttggctggaaggtttaatattgcagactttgtacccttcctaggaccacttgacattcagggcttgactcgccagttcaaggataccggcaagagacttgacaaaatcttggagttcattattgatgagcatgaacaaaattcaagcaatggaaatgcaagcggtgactttattgatgatatgctgtcgttaaagaataagccttcaaacacccatgatgagctatcaaaagtaattgatagatcagtgattaaagctatcatgatagatattatctctgctgctattgatacttcagatacttcaattgaatggattttaacagaacttattaaacatccaagggccatgaaaaagtgccaagaagagatagatgccgttgtcggagttgatcgaatggtggaggagacagatttgcccaacttagaatatgtgtacatggtggttaaggaaggtttaaggctacaccctgttgcgccattactgggtcctcacgagtctatggaggatattactattaatggatattttatacctaagcagtcaagagtaatcgtaaattcctgggcactgggacgagatcccaatgtgtggtctgaagatgctgacgagtttcttccagagaggtttgaaggaagcaatatagatgttcgtggacgtgatttccagctcttaccatttggatcaggtagaagaggatgtcctggaatgcagctaggattaataactgttcaactagtggtagctcggttggtacattgctttgactggaacctacctaatgggatcacacctgataacttggatatgactgagaaatttggactgacgacaccacgagtcaagcacttgcttgccgtgcctaaatatcgcctttga

SEQ ID NO: 12901 - protein, 500 aa, Panax ginseng
MFPLAYPLLFVLLGALSWWILPIISPLKRHHKLPPGPRGLPIIGSLHTLGALPHRTLQTLAKKYGPIMSMRLGSVPTIVVSSPQAAELFLKTHDNIFASRPKLQAAEYMSYGTKGMSFTAYGPHWRNIRKFVVLELLTPAKINSFVGMRREELGMVVKSIKEASAANEVVDLSAKVANIIENMTYRLLLGRTKDDRYDLKGIMNEALTLAGRFNIADFVPFLGPLDIQGLTRQFKDTGKRLDKILEFIIDEHEQNSSNGNASGDFIDDMLSLKNKPSNTHDELSKVIDRSVIKAIMIDIISAAIDTSDTSIEWILTELIKHPRAMKKCQEEIDAVVGVDRMVEETDLPNLEYVYMVVKEGLRLHPVAPLLGPHESMEDITINGYFIPKQSRVIVNSWALGRDPNVWSEDADEFLPERFEGSNIDVRGRDFQLLPFGSGRRGCPGMQLGLITVQLVVARLVHCFDWNLPNGITPDNLDMTEKFGLTTPRVKHLLAVPKYRL

SEQ ID NO: 12902 - DNA, 1542 bp, Arabidopsis thaliana
  CDS (1)..(1542)
atgaccaccactgagtttcaaagctgcttcatcttcctcctcttatgtctcttctcactcgtctgttactctctctttttcaggaaaccaagctcaagacgggacgcccatggctgtgatctgcctccgagccctccttctttgccagtcatcggccatcttcaccttatcctctcttctcttgtccacaagtcttttcaaaagatctcctccaactacggacctctcctccatctccgcatcttcaacgttcccatagtcctcgtctcctctgcgtcagtggcctacgatatcttcagggtgcatgacttgaacgtctcttctcgcggctcccctccgtttgaggagtcactgttgttcggatctaccggcttcattagtgctccctatggagattatttcaagttcatgaagaaacacctggtcacaaagctccttggaccacaggcactcgagcgctcacgcctcatccggacaaatgaactagaacggttttacataaacctgcttgataaggcaacgaagaaggagagcgttgaaattggtaaggaagcgatgaagctcagtaacaacagcatctgcaagatgatcatggggacgagttgtttagaggaaaagggtgaggcagagagagtcaggggtttgattatcgagtcgttttacttgacgaagaaatttttcctggcattcactttgcgcgggctgctcgagaagcttggaatctcgctgttcaaaaaagaaataatgggagtttcccgcagatttgatgatttgctcgaaaggtatcttagggaacatgaagagaaaccagataatgagcatcaagatacggacatgattgatgcactattggcagcttatcgagatgaaaaggccgagtataagatcactaggaaccagatcaaggcgtttttagtggatattttcattgcgggcactgacatctcggcgctaacaacgcagggaacaatggctgagatcattaacaaccctaacatatttgtgagaattagagaagaaatcgattctgttgtagggaaatcaaggctgattcaagaaacggatctaccaaagctcccttacttgcaagcggtagtcaaagaagggcttagattgcacccgcctacgcctctcatggtaagggagttccaagaagggtgtaaggtcaaaggtttctacataccagcgagcacaacccttgttgttaatggttatgctgtgatgagagatccaaatgtctgggaagaccctgaggagttcaagccggagaggtttttagcttcttcaagattaatgcaagaggacgagataagagagcaagccctcaagtacatcgctttcggtagtggaaggagaggctgcccaggagcaaatgtagcttatatctttgtaggaacggcgattggaatgatagtgcaatgctttgactggagaatcaatggagaaaaggttgacatgaaagaggccattggaggactgaacctgaccttggctcatccccttaagtgcactcctgttgctcgattcccaaaacctttttaa

SEQ ID NO: 12903 - protein, 513 aa, Arabidopsis thaliana
MTTTEFQSCFIFLLLCLFSLVCYSLFFRKPSSRRDAHGCDLPPSPPSLPVIGHLHLILSSLVHKSFQKISSNYGPLLHLRIFNVPIVLVSSASVAYDIFRVHDLNVSSRGSPPFEESLLFGSTGFISAPYGDYFKFMKKHLVTKLLGPQALERSRLIRTNELERFYINLLDKATKKESVEIGKEAMKLSNNSICKMIMGTSCLEEKGEAERVRGLIIESFYLTKKFFLAFTLRGLLEKLGISLFKKEIMGVSRRFDDLLERYLREHEEKPDNEHQDTDMIDALLAAYRDEKAEYKITRNQIKAFLVDIFIAGTDISALTTQGTMAEIINNPNIFVRIREEIDSVVGKSRLIQETDLPKLPYLQAVVKEGLRLHPPTPLMVREFQEGCKVKGFYIPASTTLVVNGYAVMRDPNVWEDPEEFKPERFLASSRLMQEDEIREQALKYIAFGSGRRGCPGANVAYIFVGTAIGMIVQCFDWRINGEKVDMKEAIGGLNLTLAHPLKCTPVARFPKPF

SEQ ID NO: 12904 - DNA, 1563 bp, Arabidopsis thaliana
  CDS (1)..(1563)
atgaacatcgttgactttcaaaactgcttcttttttgtcctcttaagcctcttctcacttctctgttactctctcttcttcaggaaaccaaaggaacctcgacttcactatgatttacctccgagccctccgactcttcccatcattggtcatcttcaccttcttctctctgttctagtccacagatctttacagacactctccaccaagtatgggtctattctctatcttcgcgtcttcagtttccctgtagccctcgtctcctcagcatctattgcttatgagatcttcagggaacacgacgtgaacatctcgtctcgtggtttccctcctaccgatgattccctttttgctggatctttcagcttcacctctgctccctatggagattactggaagttcatgaagaagctcctggtcacgaacttgcttggaccccaggcactcgagcggtcacgaggattccgtgcagatgagctagatctgttttacgagaacctgttggataaagcgatgaagaaggagagcgtggatatctgtgtggaggcgttgaagctcagtaacaacagcatctgcaagatgatcatggggaggagttgttcagaggagaatggtgaggcagagagagttagggctttggctacccagttagatggcttgacgaagaagatcttattggcgaacatgttgcgtgcggggtttaaaaagcttgttgtctcactgtttagaaaggaaatgatggatgtttccagcagatttgatgagctgctcgaaaggatccttgtggaacatgaagataaactggacatgcatcatcaaggtacagacttagtggacgcgttgttggcagcttgtcgggacaaaaatgcagagtataagatctctaggaaccatatcaagtcgtttttcgcggatctcttatttgcaagcactgacacctttgtgcaaacaacacagtggacagtggcggagatcattaataaccctaatgttcttgagagattgagaggagaaatcgattccgtggtcgggaaagcaaggttgattcaagaaactgatttgccaaacctcccttatttgcaagcggtggtcaaggaagggctaagactgcatccgccggggcctctctttgcaaggttctcccaagaagggtgtaggatcggagggttctatgtaccggagaaaacaacattaatgattaatgcttatgctgtgatgagagattctgattcttgggaagatcctgatgagtttaaaccagagaggtttctagcttcgtcaagatcagagcaggaaaaggagagaagagagcaagcaattaagtacattgctttcggaagcggacgaagaagctgtcctggagaaaatctagcatatatctttttaggaactgcaattggagtgatggtacagggatttgagtggagaatcaaagaagagaaagttaacatggaagaggctaatgtaggactgagcttgaccatggcttatcctcttaaggtcactcctgttcctcgaaccctagtccccttaactcagaatccactgaaccggagttcatga

SEQ ID NO: 12905 - protein, 520 aa, Arabidopsis thaliana
MNIVDFQNCFFFVLLSLFSLLCYSLFFRKPKEPRLHYDLPPSPPTLPIIGHLHLLLSVLVHRSLQTLSTKYGSILYLRVFSFPVALVSSASIAYEIFREHDVNISSRGFPPTDDSLFAGSFSFTSAPYGDYWKFMKKLLVTNLLGPQALERSRGFRADELDLFYENLLDKAMKKESVDICVEALKLSNNSICKMIMGRSCSEENGEAERVRALATQLDGLTKKILLANMLRAGFKKLVVSLFRKEMMDVSSRFDELLERILVEHEDKLDMHHQGTDLVDALLAACRDKNAEYKISRNHIKSFFADLLFASTDTFVQTTQWTVAEIINNPNVLERLRGEIDSVVGKARLIQETDLPNLPYLQAVVKEGLRLHPPGPLFARFSQEGCRIGGFYVPEKTTLMINAYAVMRDSDSWEDPDEFKPERFLASSRSEQEKERREQAIKYIAFGSGRRSCPGENLAYIFLGTAIGVMVQGFEWRIKEEKVNMEEANVGLSLTMAYPLKVTPVPRTLVPLTQNPLNRSS

SEQ ID NO: 12906 - DNA, 1572 bp, Arabidopsis thaliana
  CDS (1)..(1572)
atggcagcaatgaacatcgttgactttcaaaactgcttcttttttgtcctcttaagcctcttctcacttctctgttactctctcttcttcaggaaaccaaaggaacctcgacttcactatgatttacctccgagccctccgactcttcccatcattggtcatcttcaccttcttctctctgttctagtccacagatctttacagacactctccaccaagtatgggtctattctctatcttcgcgtcttcagtttccctgtagccctcgtctcctcagcatctattgcttatgagatcttcagggaacacgacgtgaacatctcgtctcgtggtttccctcctaccgatgattccctttttgctggatctttcagcttcacctctgctccctatggagattactggaagttcatgaagaagctcctggtcacgaacttgcttggaccccaggcactcgagcggtcacgaggattccgtgcagatgagctagatctgttttacgagaacctgttggataaagcgatgaagaaggagagcgtggatatctgtgtggaggcgttgaagctcagtaacaacagcatctgcaagatgatcatggggaggagttgttcagaggagaatggtgaggcagagagagttagggctttggctacccagttagatggcttgacgaagaagatcttattggcgaacatgttgcgtgcggggtttaaaaagcttgttgtctcactgtttagaaaggaaatgatggatgtttccagcagatttgatgagctgctcgaaaggatccttgtggaacatgaagataaactggacatgcatcatcaaggtacagacttagtggacgcgttgttggcagcttgtcgggacaaaaatgcagagtataagatctctaggaaccatatcaagtcgtttttcgcggatctcttatttgcaagcactgacacctttgtgcaaacaacacagtggacagtggcggagatcattaataaccctaatgttcttgagagattgagaggagaaatcgattccgtggccgggaaagcaaggttgattcaagaaactgatttgccaaacctcccttatttgcaagcggtggtcaaggaagggctaagactgcatccgccggggcctctctttgcaaggttctcccaagaagggtgtaggatcggagggttctatgtaccggagaaaacaacattaatgattaatgcttatgctgtgatgagagattctgattcttgggaagatcctgatgagtttaaaccagagaggtttctagcttcgtcaagatcagagcaggaaaaggagagaagagagcaagcaattaagtacattgctttcggaagcggacgaagaagctgtcctggagaaaatctagcatatatctttttaggaactgcaattggagtgatggtacagggatttgagtggagaatcaaagaagagaaagttaacatggaagaggctaatgtaggactgagcttgaccatggcttatcctcttaaggtcactcctgttcctcgaaccctagtccccttaactcagaatccactgaaccggagttcatga

SEQ ID NO: 12907 - protein, 523 aa, Arabidopsis thaliana
MAAMNIVDFQNCFFFVLLSLFSLLCYSLFFRKPKEPRLHYDLPPSPPTLPIIGHLHLLLSVLVHRSLQTLSTKYGSILYLRVFSFPVALVSSASIAYEIFREHDVNISSRGFPPTDDSLFAGSFSFTSAPYGDYWKFMKKLLVTNLLGPQALERSRGFRADELDLFYENLLDKAMKKESVDICVEALKLSNNSICKMIMGRSCSEENGEAERVRALATQLDGLTKKILLANMLRAGFKKLVVSLFRKEMMDVSSRFDELLERILVEHEDKLDMHHQGTDLVDALLAACRDKNAEYKISRNHIKSFFADLLFASTDTFVQTTQWTVAEIINNPNVLERLRGEIDSVAGKARLIQETDLPNLPYLQAVVKEGLRLHPPGPLFARFSQEGCRIGGFYVPEKTTLMINAYAVMRDSDSWEDPDEFKPERFLASSRSEQEKERREQAIKYIAFGSGRRSCPGENLAYIFLGTAIGVMVQGFEWRIKEEKVNMEEANVGLSLTMAYPLKVTPVPRTLVPLTQNPLNRSS

SEQ ID NO: 12908 - DNA, 1521 bp, Perilla frutescens var. crispa
  CDS (1)..(1521)
atggcactgtacgccgccctcttcctcctgtccgccgccgtggtccgctccgttctggatcgaaaacgcgggcggccgccctaccctcccgggccgttccctcttcccatcatcggccacttacacctcctcgggccgagactccaccaaaccttccacgatctgtcccaacggtacgggcccttaatgcagctccgcctcgggtccatccgctgcgtcattgctgcctcgccggagctcgccaaggaatgcctcaagacacacgagctcgtcttctcctcccgcaaacactccaccgccattgatatcgtcacctacgattcatccttcgctttctctccctacgggccttactggaaattcatcaagaaattatgcacctacgagctgctcggggcccgaaatctcgcccactttcagcccatcaggactctcgaagtcaagtctttcctccaaattcttatgcgcaagggtgaatcgggggagagcttcaacgtgactgaggagctcgtgaagctgacgagcaacgtcatatcgcatatgatgctgagcatacggtgttcagagacggagtcggaggcggaggcggcgaggacggtgattcgggaggtcacgcagatatttggggagttcgacgtctccgacatcatatggctttgtaagaacttcgatttccaaggtataaggaagcggtccgaggatatccagaggagatatgatgctctgctggagaagatcatcaccgacagagagaagcagaggcggacccacggcggcggtggcggcggcggggaagccaaggattttcttgacatgttcctcgacataatggagagcgggaaagccgaagttaaattcacgagggagcatctcaaagctttgattctggatttcttcaccgccggcaccgacacgacggcgatcgtgtgtgaatgggcgatagcagaagtgatcaacaatccaaatgtgttgaagaaagctcaagaagagattgccaacatcgtcggattcgacagaattctgcaagaatccgacgccccaaatctgccctaccttcaagccctcatcaaagaaacattccggctccaccctccaatcccaatgctggcgaggaaatcgatctccgactgcgtcatcgacggctacatgattccggccaacacgctgctcttcgtcaacctctggtccatggggcggaaccctaaaatctgggactacccgacggcgttccagccggagaggtttctggagaaggaaaaggccgccatcgatgttaaagggcagcattttgagctgctaccgttcggaacgggcaggagaggctgcccagggatgcttttagccattcaggaggtggtcatcataattgggacgatgattcaatgcttcgattggaagctgcccgacggctccggccatgttgatatggcagaacggccagggctcacggcaccgcgagagaccgatttgttttgccgtgtggtgccgcgagttgatccgttggttgtttccacccagtga

SEQ ID NO: 12909 - protein, 506 aa, Perilla frutescens var. crispa
MALYAALFLLSAAVVRSVLDRKRGRPPYPPGPFPLPIIGHLHLLGPRLHQTFHDLSQRYGPLMQLRLGSIRCVIAASPELAKECLKTHELVFSSRKHSTAIDIVTYDSSFAFSPYGPYWKFIKKLCTYELLGARNLAHFQPIRTLEVKSFLQILMRKGESGESFNVTEELVKLTSNVISHMMLSIRCSETESEAEAARTVIREVTQIFGEFDVSDIIWLCKNFDFQGIRKRSEDIQRRYDALLEKIITDREKQRRTHGGGGGGGEAKDFLDMFLDIMESGKAEVKFTREHLKALILDFFTAGTDTTAIVCEWAIAEVINNPNVLKKAQEEIANIVGFDRILQESDAPNLPYLQALIKETFRLHPPIPMLARKSISDCVIDGYMIPANTLLFVNLWSMGRNPKIWDYPTAFQPERFLEKEKAAIDVKGQHFELLPFGTGRRGCPGMLLAIQEVVIIIGTMIQCFDWKLPDGSGHVDMAERPGLTAPRETDLFCRVVPRVDPLVVSTQ

SEQ ID NO: 12910 - DNA, 1587 bp, Arabidopsis thaliana
  CDS (1)..(1587)
atgtttacattgaatttggatatgaattatacttcttgttcatatctcttcttcacacttgtaaccatcttccttctccatagactcttcagctcctctagccgcagaggtcttcctccaggtcctcgaggacttcccgttcttggtcatatgcatctcctccggtctagcctaccacgatctcttcaagccttggctcatacttacggtcctctcatgaccatacgcatcggatcattacgagtcctcgttgtctcagattccgacacagctaagctaatcctcaagactcacgaccctgatttcgcttccaagtttgtgtttggtccgagacagttcaatgtttataaaggatcagagttctttaatgcaccttatggatcttactggaggttcatgaagaagctatgcatgactaagctattcgcgggttatcagcttgatcgatttgtcgacataagagaagaggaaacgttagctttactgagcacgctggttgagaggtcgcgaaacggagaggcttgcgatctcggtttggagttcactgctttgaccacaaagatcttatcaaagatggttatggggaaaaggtgccgccaaaactcgaatattcccaaagagatcaggaagatagtgagtgatattatggcttgcgccacaaggtttggattcatggagctatttggaccattgcgggatctggatttgtttgggaatggtaagaagcttagatcctctatttggcggtatgatgagttggttgagaagatactgaaggaatatgaaaacgataagagcaatgaggaagaagagaaagataaagatatcgtcgatatcttgttggacacgtataatgacccaaaagccgaactcagattgactatgaatcagatcaagttcttcattcttgagttgttcatggcgagcttagacacgacttctgcagctttacaatggacaatgactgagctaatcaaccatccggatatcttcgcgaagatcagagacgagatcaaatcggttgtaggaacaacgaaccggttaatcaaagaatcagatttgcagaagcttccttacctacaagcagctatcaaggagacattgagacttcatccagtaggaccattactacgcagagaaagcaacacagacatgaagatcaacgggtacgatgtaaaatccgggacaaagatcttcatcaatgcttacgggataatgcgtgatccgaccacatacaaagaccctgacaagtttatgccagagaggtttcttgtggtggaacaagatacagagagaaagatgggttactaccagcaatatatgttggaattaaaaggccaagatgtgaattatcttgcgtttgggagcggaagacgaggatgtcttggagcttctcacgcttctctggtgttgagtctcacaattgggtcactcgtgcagtgttttaattggacggtgaagggagatgaagacaaaatcaagatcaagttacctaccggcttttcggcttcagggactgctggaggaagctcacttatgtgttctcctgaattatgttttgatccatttggataccaaactaagtga

SEQ ID NO: 12911 - protein, 528 aa, Arabidopsis thaliana
MFTLNLDMNYTSCSYLFFTLVTIFLLHRLFSSSSRRGLPPGPRGLPVLGHMHLLRSSLPRSLQALAHTYGPLMTIRIGSLRVLVVSDSDTAKLILKTHDPDFASKFVFGPRQFNVYKGSEFFNAPYGSYWRFMKKLCMTKLFAGYQLDRFVDIREEETLALLSTLVERSRNGEACDLGLEFTALTTKILSKMVMGKRCRQNSNIPKEIRKIVSDIMACATRFGFMELFGPLRDLDLFGNGKKLRSSIWRYDELVEKILKEYENDKSNEEEEKDKDIVDILLDTYNDPKAELRLTMNQIKFFILELFMASLDTTSAALQWTMTELINHPDIFAKIRDEIKSVVGTTNRLIKESDLQKLPYLQAAIKETLRLHPVGPLLRRESNTDMKINGYDVKSGTKIFINAYGIMRDPTTYKDPDKFMPERFLVVEQDTERKMGYYQQYMLELKGQDVNYLAFGSGRRGCLGASHASLVLSLTIGSLVQCFNWTVKGDEDKIKIKLPTGFSASGTAGGSSLMCSPELCFDPFGYQTK

SEQ ID NO: 12912 - DNA, 1542 bp, Matthiola incana
  CDS (1)..(1542)
atgactactctcatcctcacaatcctactcgccactttcctctccctcttcatcttcttcttgctccgccgcaaccgcaaccgcaaccaccgtctcccaccaggcccaaacccatggcctatagtcggaaacctccctcacatgggacctaaacctcaccaaaccctagccgctatggtaaccacctacggcccaatcctccacctccgtctagggttcgtcaacgttgtcgtcgccgcctctaaatccgtggcagagcagttcttgaaaatccatgacgccaatttcgcaagccgaccaccaaactccggagccaaacacatagcttataactaccaagatcttgtctttgcgccttacggacaaagatggagaatgttgaggaagattagttctgttcatttattttcagctaaggccctagaagatttcaaacatgttcgacaggaagagattggaaggcttacgcgcgaggtagcgcgtgcagacacaaaacccgtgaacttaggccaattggtgaacatgtgtgtagttaacgcgcttggcagagagatgatcggacgtcgactattcggcgacggagccgatcacaaagcggaagaattccgatcaatggttaccgaaatgatggctctcgccggagtattcaacgtcggcgatttcgtgccggcgcttgattggttagatctacaaggcgtcgccggtaaaatgaaacggcttcacaagagattcgacgcttttctatcgtcgattttgaaagagcacgagattaataacggtggagatcaaaagcatacagatatgcttactactttaatctcacttaaaggaactgattttgacggtgacggagcaagtatcacggacactgagatcaaagccttgctattgaacatgttcacagctggaactgacacgtcagcaagtacggtagactgggcaatagctgaactcatccgtcatccgcatataatgaagcgaacccaagaagaacttgatgccgttgtgggccgtaataggcccattaacgagtcagacctttctcggcttccttaccttcaggcggttatcaaagagaatttcaggctacatccaccaacaccactctcgttaccacacatcgcagcagagagctgtgagatcaacggctatcatatcccgaaaggatcgacattgttaacgaacatatgggccatagcacgtgacccggaacaatggtccgacccgttagcgtttcgacccgagagattcttacccggtggagaaaaattcggagtcgatgtgaaaggaagcgatttcgaactaataccgttcggagcggggaggagaatctgtgcagggctgagtttagggttacggacgattcagttgctgacagcgacgctggttcatggatttgaatgggaattggccggaggagttacgccggagaagctgaatatggaggagacatatgggattactgtgcaaagagcggttcctttgattgtgcatcctaagcctaggttggctctgaatgtttatggagttggatcgggttaa

SEQ ID NO: 12913 - protein, 513 aa, Matthiola incana
MTTLILTILLATFLSLFIFFLLRRNRNRNHRLPPGPNPWPIVGNLPHMGPKPHQTLAAMVTTYGPILHLRLGFVNVVVAASKSVAEQFLKIHDANFASRPPNSGAKHIAYNYQDLVFAPYGQRWRMLRKISSVHLFSAKALEDFKHVRQEEIGRLTREVARADTKPVNLGQLVNMCVVNALGREMIGRRLFGDGADHKAEEFRSMVTEMMALAGVFNVGDFVPALDWLDLQGVAGKMKRLHKRFDAFLSSILKEHEINNGGDQKHTDMLTTLISLKGTDFDGDGASITDTEIKALLLNMFTAGTDTSASTVDWAIAELIRHPHIMKRTQEELDAVVGRNRPINESDLSRLPYLQAVIKENFRLHPPTPLSLPHIAAESCEINGYHIPKGSTLLTNIWAIARDPEQWSDPLAFRPERFLPGGEKFGVDVKGSDFELIPFGAGRRICAGLSLGLRTIQLLTATLVHGFEWELAGGVTPEKLNMEETYGITVQRAVPLIVHPKPRLALNVYGVGSG

SEQ ID NO: 12914 - DNA, 1566 bp, Arabidopsis thaliana
  CDS (1)..(1566)
atggcagcgtttatcagcgttgactttcagaactgtttcatcttcattctcctatgcttcttctccctcctctgttattctctcttcttcaagaaaccaaaggactcacgaggctgtgatctacctcccagccctccgtctcttccgattatcggtcatcttcaccttctcctctcttctctatcccacaagtctttacagaaaatctcctctaagtatggacctctcctccatctccggatctttaatgtccccatcatcctcgtttcatcggcttcagttgcagacgaggtcttcaggatccacgacatgaacatctcctctcgcggtgctgctgcgatcgatgagtccctcgtgtttggatcttctggtgtcgtctacgctccctatggagattacttgaagttcgtgaagaagatcattgccactaagctgcttcgacctcaggtgttggagcggtcacgaggtcttcgtgctgaagagctacaacgactttacaacagaattcttgataaggcgaagatgaatgagaacgttgagatcggtaaggaagcgacgatgctcatgaacaacatcttctgtaggatgagcatgggaaggagtttctcagaggagaatggtgaggcagagagagtcagaggcttggtggctgaatcatatgccttggcgaagaagattttcttcgcatctgtactgcgcagactgcttaagaagcttcggatcccactattcaagaaggatatcatggatgtttccaacagattcaatgagctgctagagaagattcttgtggaacacaatgagaaactggacgaggaacataaagacacggatatgatggacgtgttgttggcagcttatgcagatgaaaacgctgagtataagattactaggaatcatatcaagtcatttttcgtggagcttttcgtgggaggcactgatacctcggtgcaaacaacacaatggacaatggccgagatcattaataactctgacgttcttgagaggctgagagaagaaattgactctgttgtagggacatcaagaatgattcaagaaacagatataccaaaccttccttatttgcaagcggtggttaaggaaggactaagattgcacccaccatttcctctcttgacgaggaagtttgaagaaaggtgtgagatcaaagggttctacatcccggagaagacatttcttattataaatgcttacgcttggatgagagatcctgattcctgggaagatcctaatgagtttaagccggagaggtttttaggttcttcaagattaggacaagtagacgagagagaggaagctcagaagtacattcctttcggcggaggaaggagaggctgtcctggagcaaatctagcttctattttcgtaggaaccgcgattggagtgatggtgcagtgctttgactggggaatcaaaggagataagatcaacatggaagagacttttgaaggactgacccttaccatggttcatccaattaagtgcactccgattcctcgaacactgccttttgtaacttctaatctccagagtcctagctcttga

SEQ ID NO: 12915 - protein, 521 aa, Arabidopsis thaliana
MAAFISVDFQNCFIFILLCFFSLLCYSLFFKKPKDSRGCDLPPSPPSLPIIGHLHLLLSSLSHKSLQKISSKYGPLLHLRIFNVPIILVSSASVADEVFRIHDMNISSRGAAAIDESLVFGSSGVVYAPYGDYLKFVKKIIATKLLRPQVLERSRGLRAEELQRLYNRILDKAKMNENVEIGKEATMLMNNIFCRMSMGRSFSEENGEAERVRGLVAESYALAKKIFFASVLRRLLKKLRIPLFKKDIMDVSNRFNELLEKILVEHNEKLDEEHKDTDMMDVLLAAYADENAEYKITRNHIKSFFVELFVGGTDTSVQTTQWTMAEIINNSDVLERLREEIDSVVGTSRMIQETDIPNLPYLQAVVKEGLRLHPPFPLLTRKFEERCEIKGFYIPEKTFLIINAYAWMRDPDSWEDPNEFKPERFLGSSRLGQVDEREEAQKYIPFGGGRRGCPGANLASIFVGTAIGVMVQCFDWGIKGDKINMEETFEGLTLTMVHPIKCTPIPRTLPFVTSNLQSPSS

SEQ ID NO: 12916 - DNA, 1545 bp, Arabidopsis thaliana
  CDS (1)..(1545)
atggcagcaatcatcggtgactgcttcatatttatcctcttatgcctcttctcactccttttctactatctcatcttcaggaaacctaagaactcacggcttgtcgcttatggctgtgatctgcctccgagccctccatctcttccgattataggccatgttcaccttctcctctcttccctagctcataaatctttacagaaactctcatccaagtatggacctcttctctatctccgcgtcttcaacttccctgtagtcctcgtctcctcggcgtctgtggcctacgagatctttaaggctcatgacttgaacatctcatctcgtgacaacccttcaatcgatgattccctcttgattggatcttctgtctttggtagtgctccttatggagattactttaagttcatgaagaagctcctggttactaagctgcttggaccacaggcacttgagcggtcaagaggcatccgtgcagatgagcttgagcggtttcactcaagcctgcttgataaggcggtaaagaaggagatcgttgagattgggaaggaagcaacgaagcttagtaataacagcctctggaggatgagcattgggagaagtttttcagagaagaatggtgaggctgagagagtcaggggactggttactgagttagatggcttgacaaagaaggtcttgtttgcaactttgctgcacaggccccttgagaagcttggaatctctctgttcaaaaaggagatcatgtgtgtttctgacagcttcgatgaggtccttgagagggttcttgtggaacatgaacagaaactggacgatcatcaagatagggacatgatggacgtgttgttggcagcttatggagatgaaaacgcagagcataaaatcagcaggaaccacatcaaagcatttttcgtggagcttttctttgcgggtactgatacctcggcgcaatcaatacagtggacaatggcagagatcattaacaaccccaacattcttaaaagattgagagaagaaatcgattctgtggtagggaaaacaaggttgattcaagaaactgatctaccaaagctcccctatttgcaagctgtggttaaggaaggacttagattgcacccgccattgcctctctttgtaaggacgttccaagaagggtgtaagattggaggtttctatgtaccagaaaagacaacacttattggtaatgcttatgttatgatgagagatccgagtgtctgggaagaccctgaggagtttaaacctgagaggtttctatcttcttcaagatcaacgcaagaagaggaaagaagagagcaagcacttaagtacattcctttcggtagtggacggagaggctgtcctggatcaagtctgggttatatctttgttggcaccgcagttggaatgatggtgcaatgctttgactggagtatcaaaggagacaaggtccaaatggatgaggctggaggactaaacttgagtatggctcattccctgaagtgcactcctgttcctcgaaaccggcctttacttgctgatcagtag

SEQ ID NO: 12917 - protein, 514 aa, Arabidopsis thaliana
MAAIIGDCFIFILLCLFSLLFYYLIFRKPKNSRLVAYGCDLPPSPPSLPIIGHVHLLLSSLAHKSLQKLSSKYGPLLYLRVFNFPVVLVSSASVAYEIFKAHDLNISSRDNPSIDDSLLIGSSVFGSAPYGDYFKFMKKLLVTKLLGPQALERSRGIRADELERFHSSLLDKAVKKEIVEIGKEATKLSNNSLWRMSIGRSFSEKNGEAERVRGLVTELDGLTKKVLFATLLHRPLEKLGISLFKKEIMCVSDSFDEVLERVLVEHEQKLDDHQDRDMMDVLLAAYGDENAEHKISRNHIKAFFVELFFAGTDTSAQSIQWTMAEIINNPNILKRLREEIDSVVGKTRLIQETDLPKLPYLQAVVKEGLRLHPPLPLFVRTFQEGCKIGGFYVPEKTTLIGNAYVMMRDPSVWEDPEEFKPERFLSSSRSTQEEERREQALKYIPFGSGRRGCPGSSLGYIFVGTAVGMMVQCFDWSIKGDKVQMDEAGGLNLSMAHSLKCTPVPRNRPLLADQ

SEQ ID NO: 12918 - DNA, 1575 bp, Arabidopsis thaliana
  CDS (1)..(1575)
atggcaacacttatcagcgttgactttcagcactgtttcatgtacataatcctcctatgcctcttctcacttctctgttactctctcttcttcaggaaaccaaagggcacacgagttggctgtgatctgcctccgagccctccgtctcttcctatcattggtcatcttcaccatctcctctcttctctaactcacaagtctttacaaaaactctcctccaagtatggacctttcctccatctccggatctttagtgttcccatcatccttgtctcatctgcttcagtggcatatgagatctttaaggcccacgatgtgaacgtctcatctcgtggtgctgctgcgatcgatgagtccctcttgtttggatcttctagcttcatttacgctccctatggagattactggaagttcatgaagaagatcttcgccactaagctgctccgaccacaggtgctggagaattcacgtggtgttcgtgctgaagagttaaagcggttttacaggagaattctcgataaggcgaggaagaatgagaacatcgagatcagtaaggaatcggcgatgctcatgaacaacatcttatgcaggatgagcatgggaaggagtttttcagaggaaaatggtgaggcagagagagtcaggggcctggtgggtgaatcatatgccttggtgaagaagattttcttcgcagctacattgcgcagactgcttgagaagcttcggatcccactattcaggaaggagataatgggtgtgtccgacagatttgatgagctgctagagaggattattgtggaacacaaagacaaacttgaaaaggagcatcaagttatggatatgatggatgtgttgttggcagcttatcgagacaaaaacgcagagtataagatcactaggaatcatatcaagtcgttttttgtggaccttttcgttgggggcactgatacctcggtccaaacaacacaatggactatggctgagatcattaataaccctaacattcttcagacactgagaaaagaaatcgattcagttgtagggaaatcaaggttgattcacgaaacggatataccaaaccttccttatttgcaagcagtggttaaggaaggactaagattgcatcctccagggcccctcttgataaggacttttcaagaaagatgtgagatgaaagggttctacataccggagaagacaacactcgttatcaacgcttatgctgtgatgagagatcccgactcttgggaagatcctgacgagtttaagccagagaggtttctaagttattcaagatcagggcaagaagacgagaaagagcaaacacttaagtacctttcttttggtggcggaaggagaggatgtcctggagtaaatctaggttatatatttgttggaactgcaataggaatgatggtgcagtgctttgactggaaaatcgaaggagataaggtcaacatggaagagacttatggaggaatgaacctaaccatggttaacccgcttaagtgcactccagttcctcgaacccaacctttttcttttacttctaatctcgagattcttagttcctga

SEQ ID NO: 12919 - protein, 524 aa, Arabidopsis thaliana
MATLISVDFQHCFMYIILLCLFSLLCYSLFFRKPKGTRVGCDLPPSPPSLPIIGHLHHLLSSLTHKSLQKLSSKYGPFLHLRIFSVPIILVSSASVAYEIFKAHDVNVSSRGAAAIDESLLFGSSSFIYAPYGDYWKFMKKIFATKLLRPQVLENSRGVRAEELKRFYRRILDKARKNENIEISKESAMLMNNILCRMSMGRSFSEENGEAERVRGLVGESYALVKKIFFAATLRRLLEKLRIPLFRKEIMGVSDRFDELLERIIVEHKDKLEKEHQVMDMMDVLLAAYRDKNAEYKITRNHIKSFFVDLFVGGTDTSVQTTQWTMAEIINNPNILQTLRKEIDSVVGKSRLIHETDIPNLPYLQAVVKEGLRLHPPGPLLIRTFQERCEMKGFYIPEKTTLVINAYAVMRDPDSWEDPDEFKPERFLSYSRSGQEDEKEQTLKYLSFGGGRRGCPGVNLGYIFVGTAIGMMVQCFDWKIEGDKVNMEETYGGMNLTMVNPLKCTPVPRTQPFSFTSNLEILSS

SEQ ID NO: 12920 - DNA, 1602 bp, Arabidopsis thaliana
  CDS (1)..(1602)
atggcagcaatcaccgttgactttcagctctgcttcatcttcatcctcctaggaatcttctcactcttctgtctctctgctttcttcttcaagaaaccaaaagacccacaacttcaaggctgtggtctacctccgagcccaccctctctaccggtcataggtcatcttcaccttctcctctctgttccatgtcacaaatcctttcagaaactctcctccaagtatggtcccctccttcaccttcgtgcattcaatatcccaatagttatagtctcttccggctccatggccaacgaagttttgaggacccaagacctgaactttgctacccgtcaacgtgaggtttctataatggaaaaatcattactttttggatcttttggctttgtctcagctccttatggagattactggagattcatgaagaagctcttagtcacaaaccttttcgggtctcattccctcgagcagacacggctcattcgtgagaaagaactcaagactttccgtactatgttgttcgataaggcggcaaagaaggggacagttgatgttggtaaagagatgatgaagctaacgaataacagcatttgcaggatgataatggggaggaggtgttcagaggagaacagtgaagcagagaaagtcgaagacttggtgatcaaatcatttagtttggtgaagaaggtccttatagctaacacggttggtcgacttctcaagaagtttgggatctctctgtttgagaaggaaatcatggaggtctcgcagaggtacgatgaattgctggaaaaaattattaaagaacacgaagaggatccgaacaagaaagaggatagagacatgatggatgttctgttggaagtttgtgcagacgacaaggctgaggttaagattaccaggaaccaaatcaaagcgcttattgtggagcttttccttggaggcactgatacttcagcacaaacaatacagtggataatggccgaactcattaaccatcccgagattcttaaaatattaagagaagagatagaatctgttgtcggaacaacgaggtttattcaagaaacagatctctcaaacctgccgtatttgcaggctgtgatgaaagaaggacaaagactacacccacattcgccaatgttggtgaggaatgcaaccaaaggatgcaagattggagggtactacataccgcagaacacaacgatgctaataaacacctatgcgatgatgatagatccagattcatgggaaaatccagacaagtttcagcccgagaggttcatggtgtctccttcaaaagggaaagacgatgagagagaacagctagctttgaacttcattcctttcgggagcggaagaagagcatgtccaggagaaaaattgggctatctcttcactggagtagccattggaacaatggtacagtgttttgactggataatcgatggagataaggttaacgtggaagaggctggagaaatgacgctgaccatggctcatccacttaaatgcactcctgtgactcgagttaacccattagctagctttgaatctgaagatcctaagtggttgatggaggagtttgatatgtattgttga

SEQ ID NO: 12921 - protein, 533 aa, Arabidopsis thaliana
MAAITVDFQLCFIFILLGIFSLFCLSAFFFKKPKDPQLQGCGLPPSPPSLPVIGHLHLLLSVPCHKSFQKLSSKYGPLLHLRAFNIPIVIVSSGSMANEVLRTQDLNFATRQREVSIMEKSLLFGSFGFVSAPYGDYWRFMKKLLVTNLFGSHSLEQTRLIREKELKTFRTMLFDKAAKKGTVDVGKEMMKLTNNSICRMIMGRRCSEENSEAEKVEDLVIKSFSLVKKVLIANTVGRLLKKFGISLFEKEIMEVSQRYDELLEKIIKEHEEDPNKKEDRDMMDVLLEVCADDKAEVKITRNQIKALIVELFLGGTDTSAQTIQWIMAELINHPEILKILREEIESVVGTTRFIQETDLSNLPYLQAVMKEGQRLHPHSPMLVRNATKGCKIGGYYIPQNTTMLINTYAMMIDPDSWENPDKFQPERFMVSPSKGKDDEREQLALNFIPFGSGRRACPGEKLGYLFTGVAIGTMVQCFDWIIDGDKVNVEEAGEMTLTMAHPLKCTPVTRVNPLASFESEDPKWLMEEFDMYC

SEQ ID NO: 12922 - DNA, 1572 bp, Glycyrrhiza echinata
  CDS (1)..(1572)
atggaacctcaactcgtagcagtgtctgtgttggtttcagcacttatctgctacttctttttccggccatatttccaccgttacggaaaaaaccttccaccatctccttttttccggcttccaataattggccacatgcacatgttaggtccccttcttcaccaatccttccacaacctctcccaccgttacggtcctctgttttcacttaactttggctctgttctctgtgtcgttgcttcaacccctcactttgccaaacaactccttcaaaccaacgaactcgcctttaactgtcgcattgaatcaaccgccgttaaaaaactcacttacgagtcttccttggccttcgcaccttacggtgattactggaggttcattaagaagctgagcatgaacgagcttttgggctctcgtagcataaacaacttccaacacctacgagcacaagagacccatcaattgttaaggcttttgtccaacagggcaagagcgtttgaggccgtgaatatcaccgaggagcttcttaagttgaccaacaacgttatttctataatgatggttggggaggcagaggaggcaagggatgtggtgcgtgatgtgacggagatctttggagagtttaatgtttcggattttatttggttgtttaagaagatggacttgcaggggtttgggaagaggattgaggatttgtttcagaggtttgatacgttggtggaaaggattattagcaagcgggagcagacgaggaaagacagaaggaggaatgggaagaagggtgagcaggagagtggtgatgggatcagagactttcttgatatcttgcttgactgtactgaggatgagaattccgagattaaaatccaaagggttcacattaaggccttgattatggatttcttcactgcagggacggataccacagcgatttcaacagagtgggcattagtggagctcgtcaagaaaccctccgtgctacaaaaagttcgtgaagagatagacaatgtcgtaggaaaagacagacttgttgaggaatctgattgtcctaatctcccatatctccaagccattcttaaagaaacattccgtttgcacccaccggttcctatggttacaagaagatgcgtggcagagtgcacggttgagaattacgtcatcccagaagactcacttctctttgtgaatgtttggtccatcggaagaaacccaaagttttgggacaacccattggagttttgccccgaacgattcttaaaactagaaggagattccagtggagttgttgatgtgaggggaagccattttcagcttctgccatttgggtctggaaggaggatgtgccctggtgtgtccttggctatgcaagaggtgccagcactacttggtgctataatccagtgctttgatttccaagttgtgggtcccaaaggtgagattttgaagggtgatgacatagtcattaatgtggatgaaaggccaggattgacggctccaagggcacataaccttgtgtgtgttcccgttgaaaggagaagtggcggtggacccctcaaaatcattgaatgttga

SEQ ID NO: 12923 - protein, 523 aa, Glycyrrhiza echinata
MEPQLVAVSVLVSALICYFFFRPYFHRYGKNLPPSPFFRLPIIGHMHMLGPLLHQSFHNLSHRYGPLFSLNFGSVLCVVASTPHFAKQLLQTNELAFNCRIESTAVKKLTYESSLAFAPYGDYWRFIKKLSMNELLGSRSINNFQHLRAQETHQLLRLLSNRARAFEAVNITEELLKLTNNVISIMMVGEAEEARDVVRDVTEIFGEFNVSDFIWLFKKMDLQGFGKRIEDLFQRFDTLVERIISKREQTRKDRRRNGKKGEQESGDGIRDFLDILLDCTEDENSEIKIQRVHIKALIMDFFTAGTDTTAISTEWALVELVKKPSVLQKVREEIDNVVGKDRLVEESDCPNLPYLQAILKETFRLHPPVPMVTRRCVAECTVENYVIPEDSLLFVNVWSIGRNPKFWDNPLEFCPERFLKLEGDSSGVVDVRGSHFQLLPFGSGRRMCPGVSLAMQEVPALLGAIIQCFDFQVVGPKGEILKGDDIVINVDERPGLTAPRAHNLVCVPVERRSGGGPLKIIEC

SEQ ID NO: 12924 - DNA, 1545 bp, Callistephus chinensis
  CDS (1)..(1545)
atgaacatattcgaagtgttccaaagtgtttccccggcgatcatcgccattttcttcatctcatcactcttcatctatctagtcttgataagaaaccaaaagagcctcagtcttccaccaagccctccggcattaccgatcattgggcacctccaccacctcggcccactcatccaccactcattccacgacctctccactcgctacgggcctctcattcaccttcgccttgggtctgtcccttgcgtcgtggcgtccacccctgaccttgctcgtgacttcctaaaaacgaatgagcttgccttttcatcacgaaaacactcattagccatcgaccatgttacttatggagtttcctttgcttttgcaccatatggaccttactggaagttcatcaagaaaacatcgattgttgagcttctaggcaaccaaaatctcagcaatttccttcccattcgaactcaagaagttcacgagcttcttcaaactttaatggtgaaatcaaagaaaaatgagagtgttaatctttctgaagaacttttgaagctaactaataatgtgatatgtcaaatgatgatgagcattcgatgttctgggacgaacaatgaggctgatgaagccaagaatcttgttcgggaggtgacaaagatcttcggtgaatttaatatttcagatttcatatgtttattcaagaacatagatttgcaagggtttaagaagaggtatgtcgatacacacacgaggtacaatgctttgctcgaaaagatgatatttgagagggaagaaaagagaaaacaaaagaagagcgaagacggtaaaggcaaagattttcttgatatattgcttgatgttttggaggatgagaatgctgagattaagattaccagagatcacattaaagcactgattttggacttttttaccgctgcaactgatacaactgctatatcaatcgaatggactctagttgaacttaccaataacccgaaagtgctagaaaatgcaagaaaagagatagctgaggttgtcggagatgagcggctggttcaagaatcagatattcctaacctcccttacatccaagcaatcataaaggaaactctacgaatgcacccaccaattcctatggtgatccgcaagtcaattgacaatgtcaccgttcaaggatatgacatccgagcgggcaccatgttgttcgtcaacatttggtcaattgggagaaacccgctttactgggaatccccattagagttcaagccacatagatttttggatggtcatgctcgaaacttagatgttaaaggacaatgttttcaacttttgccatttggcacggggaggagaggttgtcctggcattagcttggccatgagagaactccctgttgtcattgcaggcctcattcaatgctttgaatggaatgccaatgacaaagaagtattgagtatggatgaacgggctggattgaccgctccaagagctgtggatcttgagtttgttccactgatgcgacaaaactgtccaaatatctttgtttcagcctaa

SEQ ID NO: 12925 - protein, 514 aa, Callistephus chinensis
MNIFEVFQSVSPAIIAIFFISSLFIYLVLIRNQKSLSLPPSPPALPIIGHLHHLGPLIHHSFHDLSTRYGPLIHLRLGSVPCVVASTPDLARDFLKTNELAFSSRKHSLAIDHVTYGVSFAFAPYGPYWKFIKKTSIVELLGNQNLSNFLPIRTQEVHELLQTLMVKSKKNESVNLSEELLKLTNNVICQMMMSIRCSGTNNEADEAKNLVREVTKIFGEFNISDFICLFKNIDLQGFKKRYVDTHTRYNALLEKMIFEREEKRKQKKSEDGKGKDFLDILLDVLEDENAEIKITRDHIKALILDFFTAATDTTAISIEWTLVELTNNPKVLENARKEIAEVVGDERLVQESDIPNLPYIQAIIKETLRMHPPIPMVIRKSIDNVTVQGYDIRAGTMLFVNIWSIGRNPLYWESPLEFKPHRFLDGHARNLDVKGQCFQLLPFGTGRRGCPGISLAMRELPVVIAGLIQCFEWNANDKEVLSMDERAGLTAPRAVDLEFVPLMRQNCPNIFVSA

SEQ ID NO: 12926 - DNA, 1539 bp, Torenia hybrid cultivar
  CDS (1)..(1539)
atggacacagtcttaatcacactctacaccgccctgttcgtcatcaccaccaccttcctcctcctcctccgccgaaggggaccaccgtctccgcccggtcctctctccctacccataattggccacctccacctcctcggcccaagactccaccacacgttccatgaattctcactcaaatacggcccattgatccagctcaagctcggctcgatcccgtgcgtcgtggcctcgacgcccgagctcgcgagagagtttcttaagacgaacgagctcgcgttctcctctcgcaagcactctacggccatagacatcgtcacctacgactcgtcctttgctttctctccgtacggaccctactggaagtacatcaagaaactgtgtacctacgagctgctcggagcgaggaacctcggacactttcagcccattaggaatctcgaggtcaggtcctttctgcagcttctgatgcacaagagctttaagggcgagagtgtgaatgtgacagacgagctggtgaggctgacgagcaatgtgatatcccacatgatgctgagcataaggtgctcggaagatgaaggcgatgctgaggcggcgagaacagtgatacgcgaggtgacgcagatatttggggaattcgatgttacggacataatatggttttgcaagaaattcgatctgcaggggataaagaagaggtcagaggatattcagaggaggtatgatgctttgctcgagaagattattagtgatagagagagatcgaggaggcaaaatcgtgataagcatggtggcggtaacaatgaggaggccaaggattttcttgatatgttgcttgatgtgatggagagtggggacacggaggtcaaattcactagagagcatctcaaggctttgattctggatttcttcacggccggtacggacacaacagccatagccaccgagtgggccatcgccgagctcatcaacaacccgaacgtcttgaagaaggcccaagaagaaatatcccggatcatcggaaccaagcggatcgtacaagaatccgacgccccagacctaccctacctccaggccatcatcaaggagacgttccggctccacccaccgatcccgatgctctcgcgtaagtccacctccgattgcacggtcaacggctacaaaatccaagccaagagcctcttgttcgtgaacatatggtccatcggtcgaaaccctaattactgggaaagccctatggagttcaggcccgagcggttcttggagaagggacgcgagtccatcgacgtcaagggccagcactttgagctcttgccttttgggacgggccgcaggggctgtcccggtatgttgctggctatacaagaggtggtcagcatcattgggaccatggttcagtgcttcgactggaaattggcagatggttcgggcaataatgtggacatgaccgaacggtctggattgaccgctccgagagcgttcgatctggtttgccggttgtatccacgggttgacccggccacaatatcgggtgcttga

SEQ ID NO: 12927 - protein, 512 aa, Torenia hybrid cultivar
MDTVLITLYTALFVITTTFLLLLRRRGPPSPPGPLSLPIIGHLHLLGPRLHHTFHEFSLKYGPLIQLKLGSIPCVVASTPELAREFLKTNELAFSSRKHSTAIDIVTYDSSFAFSPYGPYWKYIKKLCTYELLGARNLGHFQPIRNLEVRSFLQLLMHKSFKGESVNVTDELVRLTSNVISHMMLSIRCSEDEGDAEAARTVIREVTQIFGEFDVTDIIWFCKKFDLQGIKKRSEDIQRRYDALLEKIISDRERSRRQNRDKHGGGNNEEAKDFLDMLLDVMESGDTEVKFTREHLKALILDFFTAGTDTTAIATEWAIAELINNPNVLKKAQEEISRIIGTKRIVQESDAPDLPYLQAIIKETFRLHPPIPMLSRKSTSDCTVNGYKIQAKSLLFVNIWSIGRNPNYWESPMEFRPERFLEKGRESIDVKGQHFELLPFGTGRRGCPGMLLAIQEVVSIIGTMVQCFDWKLADGSGNNVDMTERSGLTAPRAFDLVCRLYPRVDPATISGA

SEQ ID NO: 12928 - DNA, 1521 bp, Antirrhinum majus
  CDS (1)..(1521)
atgtctacacttgtctacagcacactcttcatcctctcaaccctcctcctcaccctcctaacccgcacccgccgcaagacccgcccgcccggcccattagccctccccttaataggccacttacacctcctcggcccaaagctccaccacaccttccaccaattctcccaacgctacggcccgctcatccagctctacctcggctccgtcccatgcgtcgtcgcttccacgcccgaactcgcccgcgaattcctcaagacgcacgaactcgacttctcgtcccgcaagcactccaccgccatcgacatcgtcacgtacgactcctcgttcgccttcgcgccgtacgggccgtactggaaattcatcaagaaattatgtacttacgagctactgggtgcccggaacttgagccatttccagcccattagagctttggaggtcaacagtttcttgagaattttgtacgagaaaacagagcagaaacagagtgttaatgtgactgaggagcttgtgaagctgacgagtaatgtgatcagtaacatgatgttggggatcaggtgttcggggacggaaggggaggcggaggtggcgaggacggtgataagggaggtgacgcagatatttggggagtttgatgtgtcggagattgtttggttttgtaagaatttggatctgcaggggattaggaagaggtcggaggatattaggaggaggtatgatgctttgttggagaagattattagtgatagggagaggttgaggttgagggggggtggtggtggagggggtggagaggtgaaggattttttggatatgttgttggatgtgatggagagtgagaaatcggaggtggagtttacgagggagcatctcaaagctttgattctggatttcttcactgccggtacagacacaacagcaatcacaacagaatgggcaatagcagaactcattagcaatccaaatgtactcaaaaaagctcaagaagagatggacaaagtcataggatcacaaaggttgttgcaagaatccgacgcccctaacttgccttacctcaacgcgatcataaaagaaacgttccgtctccaccctccaatccccatgctcactagaaaatcaatttctgacgttgtggtcaacgggtacacgatccctgccaaaacgctattgtttgtcaacctttggtccatgggaaggaatcctaactactgggaaaatccgatggagttccgacccgagaggtttctcgagaaagggaccgggtcgatagacgttaaagggcagcatttcgagttgctgccgtttggcacgggcaggcggggctgcccggggatgttgttaggcatgcaggagttgtttagtattatcggggctatggtgcagtgcttcgattggaaactgcccgatggtgtgaagtcggtcgacatgaccgagcggcccgggttgacggctccacgtgccaatgatttggtgtgccaattggtgccacggattgacccggtcgttgtctccggaccgtga

SEQ ID NO: 12929 - protein, 506 aa, Antirrhinum majus
MSTLVYSTLFILSTLLLTLLTRTRRKTRPPGPLALPLIGHLHLLGPKLHHTFHQFSQRYGPLIQLYLGSVPCVVASTPELAREFLKTHELDFSSRKHSTAIDIVTYDSSFAFAPYGPYWKFIKKLCTYELLGARNLSHFQPIRALEVNSFLRILYEKTEQKQSVNVTEELVKLTSNVISNMMLGIRCSGTEGEAEVARTVIREVTQIFGEFDVSEIVWFCKNLDLQGIRKRSEDIRRRYDALLEKIISDRERLRLRGGGGGGGGEVKDFLDMLLDVMESEKSEVEFTREHLKALILDFFTAGTDTTAITTEWAIAELISNPNVLKKAQEEMDKVIGSQRLLQESDAPNLPYLNAIIKETFRLHPPIPMLTRKSISDVVVNGYTIPAKTLLFVNLWSMGRNPNYWENPMEFRPERFLEKGTGSIDVKGQHFELLPFGTGRRGCPGMLLGMQELFSIIGAMVQCFDWKLPDGVKSVDMTERPGLTAPRANDLVCQLVPRIDPVVVSGP

SEQ ID NO: 12930 - DNA, 1536 bp, Gerbera hybrida
  CDS (1)..(1536)
atgaatacactccaactcatcttcctcctcttcttcttcccaaccttactcttcctctactgtctcccctacaaaagaaaccaaaaccaccgccgtcttccgccgtccccgccatcttttccgatcatcggccacctccaccatctcggcccactcatccaccaatccttccacgctctctccactcgctacggctctctaatccacctccgtctcggctcagtcccatgcgtcgtcgtttcaaccccagacctcgccaaagacttcctcaaaacaaacgaactcgcgttctcatcaagaaaacactccttagccatcgaccacatcacctatggcgtagcatttgcattcgcaccatatggaacttactggaagttcatcaagaaactcttcacagtggagcttttgggcacccagaatctcagccatttcctacccattcgaacccatgaaattcgcgagcttcttcgaacgttaatggtgaaatctagggcaaaggagagagtaaacttgacggaagagttgttgaagttgaccaacaatgtgataagtcaaatgatgatgagcattaggtgttcggggacgaatagtgaggctgatgaagcaaagaatcttgttcgggaagtgaccaaaatttttggacagtttaatgtttcagatttcatatggttttgtaagaacatagatttgcaagggtttaagaagaggtacgagggtacacatagaagatatgatgctttgcttgaaaggattataatggggagggaagaaaatagaagaagagggaagataaaagatggtgaagggaaagattttcttgatatgttacttgatgttttggaggatggtaaggcagagattaaaattactagagaccacatcaaagccttgattttggactttcttacagctgggacggataccaccgcgattgcaattgaatgggcactagtcgaattgataaacaacccgaacgctctcgagaaagcaagacaagagattgatcaggtcatcggtgatgagaggctagttcaagaatcagacacgcctaacctcccttatatccaagctatcataaaggaagccctacgacttcacccaccaatcccaatgttgattcgcaagtcaacagaaaatgtaattgttcaggggtatgacatcccagccggcaccttgttgtttgtcaatatttggtccattggaagaaaccctcaatgttgggaaacccctttagagttcaagcctcatcggtttttggatggtggtgaccttaaaagctctttagatattaaaggccacaattttcaactattgccttttgggacggggaggagagggtgtcctggtgttaatttggccatgagagaactctcagtggtgattgcaaacctcatacaatgctttgattgggatgttgtaggtgaacgactattgaatacagatgaacgtgctggattgacggctccaagggcggtagattttgtgtgtgttccattggaacgaggaaacactttgaagattcttggttcaaactaa

SEQ ID NO: 12931 - protein, 511 aa, Gerbera hybrida
MNTLQLIFLLFFFPTLLFLYCLPYKRNQNHRRLPPSPPSFPIIGHLHHLGPLIHQSFHALSTRYGSLIHLRLGSVPCVVVSTPDLAKDFLKTNELAFSSRKHSLAIDHITYGVAFAFAPYGTYWKFIKKLFTVELLGTQNLSHFLPIRTHEIRELLRTLMVKSRAKERVNLTEELLKLTNNVISQMMMSIRCSGTNSEADEAKNLVREVTKIFGQFNVSDFIWFCKNIDLQGFKKRYEGTHRRYDALLERIIMGREENRRRGKIKDGEGKDFLDMLLDVLEDGKAEIKITRDHIKALILDFLTAGTDTTAIAIEWALVELINNPNALEKARQEIDQVIGDERLVQESDTPNLPYIQAIIKEALRLHPPIPMLIRKSTENVIVQGYDIPAGTLLFVNIWSIGRNPQCWETPLEFKPHRFLDGGDLKSSLDIKGHNFQLLPFGTGRRGCPGVNLAMRELSVVIANLIQCFDWDVVGERLLNTDERAGLTAPRAVDFVCVPLERGNTLKILGSN

SEQ ID NO: 12932 - DNA, 1530 bp, Glycine max
  CDS (1)..(1530)
atggcttatcaagtgttgctaatttgtttggtctccaccatagtgtttgcatacatactatggagaaaacaaagcaagaaaaaccttccaccaagtccaaaggcccttcccataattggccacctccaccttgtgtccccaattccccaccaagatttttacaagctctcaacccgccacggacccatcatgcaacttttccttggctcagtcccttgtgtggtggcttccaccgcagaagccgccaaagagttccttaaaacccacgaaatcaacttctccaaccgccccggccaaaacgtcgccgttaagggcttagcctacgattcccaagacttccttttcgcgtttgcacccttcggaccctactggaagttcatgaagaaactctgcatgtccgagcttctcagcggccgaatgatggaccagttccttcccgtgaggcagcaagagaccaagagattcatcagccgcgtgttccgaaaaggagtcgccggcgaggccgtggatttcggagacgagctcatgacactctccaacaacatcgtatccagaatgacgctgagtcagaagacttctgagaacgacaaccaggctgaggagatgaagaagctcgtgtcgaatatcgcggagctcatggggaagttcaacgtttcggacttcatttggtacctgaagcctttcgatttgcaggggttcaacagaaaaatcaaggagactcgggacaggtttgacgttgtggtggacggaatcataaagcagcgtcaagaggaaagaaggaaaaacaaagaaacgggcacagcaaaacagtttaaggacatgcttgatgttttattggacatgcacgaagatgagaatgctgaaatcaaattagacaaaaaaaacattaaggccttcatcatggacatatttgttgctgggactgacacgtcagctgtaagcatagaatgggctatggcagagttaatcaacaatccagatgtgttggagaaggcaaggcaagagatagatgcggtggttggaaaaagtagaatggtagaagaatcagatattgccaaccttccttacttgcaagccattgttagagaaacacttaggcttcacccaggtggtccattggttgttagagaatcatcaaaaagtgcggtggtttgtgggtatgatattccagcaaagactcgattatttgtcaatgtttgggctattggtagggatcccaatcactgggagaaaccttttgagtttaggccagagaggtttatcagagatgggcaaaatcaattggatgttaggggacaacattatcattttattccattcgggagtggaagaagaacgtgccctggtgcttctctagcgtggcaggttgtgcctgtgaatctggctataattattcaatgtttccaatggaagcttgttggtggcaatggcaaggtggacatggaagagaagtctggcatcactcttccgagggctaaccccataatttgtgtccctgttccaaggattaacccattccctactatttga

SEQ ID NO: 12933 - protein, 509 aa, Glycine max
MAYQVLLICLVSTIVFAYILWRKQSKKNLPPSPKALPIIGHLHLVSPIPHQDFYKLSTRHGPIMQLFLGSVPCVVASTAEAAKEFLKTHEINFSNRPGQNVAVKGLAYDSQDFLFAFAPFGPYWKFMKKLCMSELLSGRMMDQFLPVRQQETKRFISRVFRKGVAGEAVDFGDELMTLSNNIVSRMTLSQKTSENDNQAEEMKKLVSNIAELMGKFNVSDFIWYLKPFDLQGFNRKIKETRDRFDVVVDGIIKQRQEERRKNKETGTAKQFKDMLDVLLDMHEDENAEIKLDKKNIKAFIMDIFVAGTDTSAVSIEWAMAELINNPDVLEKARQEIDAVVGKSRMVEESDIANLPYLQAIVRETLRLHPGGPLVVRESSKSAVVCGYDIPAKTRLFVNVWAIGRDPNHWEKPFEFRPERFIRDGQNQLDVRGQHYHFIPFGSGRRTCPGASLAWQVVPVNLAIIIQCFQWKLVGGNGKVDMEEKSGITLPRANPIICVPVPRINPFPTI

SEQ ID NO: 12934 - DNA, 1533 bp, Glycine max
  CDS (1)..(1533)
  misc_feature (449)..(449): n is a, g, c or t
atggcttttcaagtgttgttcatttgtttgatctcaaccatcgtgtttgcatccatactatggagaaaacaaaacaaaaacaagacccttcttccaccgagtccaatgcccctacccatcattggacacctccaccttctttctccaacacctcaccaagattttcacaagctctcactccgctatggacccataatacacctttttcttggttcagtcccctgtgtggtggcttccacagcagaagccgccaaagagttcctcaaaactcacgaacccgccttctccaaccgccccgctaacactgtcgccgtcgaaaccttaacctacggtttccaagacttcttgttcgcaccctacggaccctattggaagttcatgaagaaactctgcatgtccgaactcctcggtggccacatgctggaccagtttcttcccgtgagacagcnagagacaaaaaaattcatcaaacgtgtcctccaaaagggtatttctggtgaggccgtggattttgggggagagttcatcacgctctcgaacaacatcgtgtcgagaatgatcgtgagtcagacgagtactactgaggacgagaacgaagttgaagagatgaggaagctggtgaaggatgccgcagagctctcggggaagttcaacatatcggacttcgtttcgttcttgaagcgctttgatttgcaggggttcaacaagaggctcgagaagattcgggactgctttgacaccgtgttggacagaatcataaagcaacgtgaagaggaaagaaggaacaagaatgaaaccgttggaaaacgagaatttaaggatatgcttgatgttttgtttgacatatctgaagatgagagttctgaaattaaattaaacaaagaaaacattaaggccttcatcttggacatattaattgctgggactgacacctcagctgtaacgatggaatgggctatggcagagttaatcaacaatccaggtgtgttggagaaggcaagacaagaaatggatgcagtggttggaaagagtagaatagtagaagaatcagatattgccaaccttccttacttgcaaggcattgttagagaaacattaagacttcacccagctggtccattgctttttagagagtcatctagaagagctgtggtttgtgggtatgatattccagcaaagactcgattatttgtcaatgtttgggctattggtagggaccccaatcactgggagaaccctcttgagtttaggccagagaggtttgttgaaaatgggaagagtcaattggatgttaggggacaacattatcatctacttccgttcggtagtggaagaagagcatgtcctggtacttctttggcattgcaagttgtgcatgtgaatttggcagttctaattcagtgtttccaatggaaggttgactgtgacaatggcaaggtgaacatggaagaaaaggctggcatcactcttccgagggctcaccccataatttgtgtccctattcgaagacttaacccattccctgttgtgtga

SEQ ID NO: 12935 - protein, 510 aa, Glycine max
  misc_feature (150)..(150): The Xaa at location 150 stands for Arg, Gln, Leu, or Pro.
MAFQVLFICLISTIVFASILWRKQNKNKTLLPPSPMPLPIIGHLHLLSPTPHQDFHKLSLRYGPIIHLFLGSVPCVVASTAEAAKEFLKTHEPAFSNRPANTVAVETLTYGFQDFLFAPYGPYWKFMKKLCMSELLGGHMLDQFLPVRQXETKKFIKRVLQKGISGEAVDFGGEFITLSNNIVSRMIVSQTSTTEDENEVEEMRKLVKDAAELSGKFNISDFVSFLKRFDLQGFNKRLEKIRDCFDTVLDRIIKQREEERRNKNETVGKREFKDMLDVLFDISEDESSEIKLNKENIKAFILDILIAGTDTSAVTMEWAMAELINNPGVLEKARQEMDAVVGKSRIVEESDIANLPYLQGIVRETLRLHPAGPLLFRESSRRAVVCGYDIPAKTRLFVNVWAIGRDPNHWENPLEFRPERFVENGKSQLDVRGQHYHLLPFGSGRRACPGTSLALQVVHVNLAVLIQCFQWKVDCDNGKVNMEEKAGITLPRAHPIICVPIRRLNPFPVV

SEQ ID NO: 12936 - DNA, 1539 bp, Petunia hybrida
  CDS (1)..(1539)
atggaaatcttaagcctaattctgtacaccgtcattttctcatttcttctacaattcattcttagatcatttttccgtaaacgttaccctttaccattaccaccaggtccaaaaccatggccaattataggaaacctagtccatcttggacccaaaccacatcaatcaactgcagccatggctcaaacttatggaccactcatgtatcttaagatggggttcgtagacgtggtggttgcagcctcggcatcggttgcagctcagttcttgaaaactcatgatgctaatttctcgagccgtccaccaaattctggtgcagaacatatggcttataattatcaggatcttgtttttgcaccttatggacctagatggcgtatgcttaggaaaatttgctcagttcaccttttctctaccaaggctttagatgacttccgccatgtccgccaggatgaagtgaaaacactgacgcgcgcactagcaagtgcaggccaaaagccagtcaaattaggtcagttattgaacgtgtgcacgacgaacgcactcgcgcgagtaatgctaggtaagcgagtatttgccgacggaagtggcgatgttgatccacaagcggcggagttcaagtcaatggtggtggaaatgatggtagtcgccggtgtttttaacattggtgattttattccgcaacttaattggttagatattcaaggtgtagccgctaaaatgaagaagctccacgcgcgtttcgacgcgttcttgactgatatacttgaagagcataagggtaaaatttttggagaaatgaaagatttgttgagtactttgatctctcttaaaaatgatgatgcggataatgatggagggaaactcactgatacagaaattaaagcattacttttgaacttgtttgtagctggaacagacacatcttctagtacagttgaatgggccattgctgagcttattcgtaatccaaaaatactagcccaagcccagcaagagatcgacaaagtcgttggaagggaccggctagttggcgaattggacctagcccaattgacatacttggaagctatagtcaaggaaacctttcggcttcatccatcaacccctctttcacttcctagaattgcatctgagagttgtgagatcaatggctatttcattccaaaaggctcaacgcttctccttaatgtttgggccattgctcgtgatccaaatgcatgggctgatccattggagtttaggcctgaaaggtttttgccaggaggtgagaagcccaaagttgatgtccgtgggaatgactttgaagtcataccatttggagctggacgtaggatttgtgctggaatgaatttgggtatacgtatggtccagttgatgattgcaactttaatacatgcatttaactgggatttggtcagtggacaattgccggagatgttgaatatggaagaagcatatgggctgaccttacaacgggctgatccattggttgtgcacccaaggcctcgcttagaagcccaagcgtacattgggtga

SEQ ID NO: 12937 - protein, 512 aa, Petunia hybrida
MEILSLILYTVIFSFLLQFILRSFFRKRYPLPLPPGPKPWPIIGNLVHLGPKPHQSTAAMAQTYGPLMYLKMGFVDVVVAASASVAAQFLKTHDANFSSRPPNSGAEHMAYNYQDLVFAPYGPRWRMLRKICSVHLFSTKALDDFRHVRQDEVKTLTRALASAGQKPVKLGQLLNVCTTNALARVMLGKRVFADGSGDVDPQAAEFKSMVVEMMVVAGVFNIGDFIPQLNWLDIQGVAAKMKKLHARFDAFLTDILEEHKGKIFGEMKDLLSTLISLKNDDADNDGGKLTDTEIKALLLNLFVAGTDTSSSTVEWAIAELIRNPKILAQAQQEIDKVVGRDRLVGELDLAQLTYLEAIVKETFRLHPSTPLSLPRIASESCEINGYFIPKGSTLLLNVWAIARDPNAWADPLEFRPERFLPGGEKPKVDVRGNDFEVIPFGAGRRICAGMNLGIRMVQLMIATLIHAFNWDLVSGQLPEMLNMEEAYGLTLQRADPLVVHPRPRLEAQAYIG

SEQ ID NO: 12938 - DNA, 1563 bp, Brassica napus
  CDS (1)..(1563)
atggagtcttctatatcacaaacactaagccaagtattagatcccaccacgggtattctcatcgttgtctcacttttcatcttcatcggcctcatcacacggcgacgaaggcctccgtacccacccggtccacgtggttggcccatcataggcaatatgtcaatgatggaccaactcactcaccgtggtttagccaacttagctaaaaagtacggtggcctgtgccatctccgcatgggatttctccacatgtacgccgtttcctcgccagacgtggctaagcaagtccttcaagtccaggacagcgtcttctcaaaccgaccagcaactatagctataagctatttgacttatgaccgagccgacatggcgtttgctcactacggaccgttttggagacagatgaggaaagtttgtgtcatgaaggtgtttagccgtaaacgagccgagtcatgggcttctgttcgtgatgaagtggacaaaatgatccggtcggtttctagtaacgttggtaagtctatcaacgttggtgagcaaatttttgcactgacccgaaacataacttaccgggcagcgttcgggtcagcatgtgaaaagggacaagacgagttcataagaattttacaagagttctctaagctttttggagccttcaacgtagcggatttcataccgtatttcgggtggatcgatccgcaaggaataaacaagcggctcgtgaaggcccgtaatgacctagacggatttattgacgatatcatcgatgaacacataaagaagaaagagaatcaaaacagtgttgatgctggagatgttgttgataccgatatggttgatgatcttcttgctttttacagtgaagaggcgaaattagtgagcgagacagcggatcttcagaactccatcaaacttacccgtgacaatatcaaagcaatcatcatggacgttatgtttggaggaacggaaacggtagcgtcagcgatagagtgggcattgactgagttattacggagcccagaggatctaaaacgagtccaacaagaactcgctgaagttgtcggacttgaccgacgtgtggaagaatcagacatcgagaagttgacttttttgaaatgcacactcaatgaaaccctaaggctacacccaccgatcccactcctcctccacgaaaccgcagaggacactgagatcgacggttacttcgttcccaagaaatctcgcgttatgatcaacgcgtttgcgattggacgcgacaagaactcttgggttgatcccgaaacgtttagaccgtccaggtttttggaaccgggcgtaccagatttcaaagggagtaacttcgagtttataccattcgggtcgggtcgtcggtcgtgcccgggtatgcagctcgggttatacgcgcttgaactagccgtggcccatatattacattgcttcacgtggaaattacctgatggcatgaaaccaagcgagcttgatatgagcgacgtgtttggtctgacggctcctaaagccacgcgtctctacgctgtcccgtgcacgcgccttatttgttctgtttaa

SEQ ID NO: 12939 - protein, 520 aa, Brassica napus
MESSISQTLSQVLDPTTGILIVVSLFIFIGLITRRRRPPYPPGPRGWPIIGNMSMMDQLTHRGLANLAKKYGGLCHLRMGFLHMYAVSSPDVAKQVLQVQDSVFSNRPATIAISYLTYDRADMAFAHYGPFWRQMRKVCVMKVFSRKRAESWASVRDEVDKMIRSVSSNVGKSINVGEQIFALTRNITYRAAFGSACEKGQDEFIRILQEFSKLFGAFNVADFIPYFGWIDPQGINKRLVKARNDLDGFIDDIIDEHIKKKENQNSVDAGDVVDTDMVDDLLAFYSEEAKLVSETADLQNSIKLTRDNIKAIIMDVMFGGTETVASAIEWALTELLRSPEDLKRVQQELAEVVGLDRRVEESDIEKLTFLKCTLNETLRLHPPIPLLLHETAEDTEIDGYFVPKKSRVMINAFAIGRDKNSWVDPETFRPSRFLEPGVPDFKGSNFEFIPFGSGRRSCPGMQLGLYALELAVAHILHCFTWKLPDGMKPSELDMSDVFGLTAPKATRLYAVPCTRLICSV

SEQ ID NO: 12940 - DNA, 1560 bp, Brassica napus
  CDS (1)..(1560)
atggagtcttctgtatcacaaacattaagtcaagtattagatcccacaacggctattctcatcatcgtctcacttttcatattcatcggcgtcatcacacgacggcgaaggtcttacccacccggtccacgtggttggcccatcataggcaatatgttaatgatggaccaactcacccaccgtggtttagccaacttaactaaaaaatatggcggcttgtgccatctccgcatgggcttcctccatatgtatgccgtctcatcacctgatgtggctcgacaagtcctccaagtccaagacagcatcttctcgaaccggccggcaacgatagctataagctatttgacttatgaccgagccgacatggcgttcgctcactacggaccgttttggagacagatgaggaaagtgtgtgtcatgaaggtgtttagccgtaaacgtgcggagtcatgggcttctgttcgagatgaagtggacaaaatgatccggtcggtatctagtaacgttggtaagtctataaacgtccgggagcaaattttcgccctgacccgaaacataacttaccgggcagcgttcgggtcagcttgcgaaaagggacaagatgagttcataagaatcttacaagagttctctaagctttttggagccttcaacgtagcagatttcataccatatttcgggtggatcgatccacaagggataagcaagcggctcgtgaaggcccgtaatgatctagacggatttattgacgatatcatcgacgaacatatgaagaagaaagagaatcaaaacactgttgatgatggagatgttggtgataccgatatggttgatgatcttcttgctttttacagtgaagaggccaaattagtgagcgagacaatggatcttcagaattctatcaaacttacccgtgacaatatcaaagcaatcatcatggacgtcatgttcggaggaacggaaacggtagcttctgcaatagagtgggccttaacggagttattacggagccccgaggatctaaaacgggtccaacaagaactcgctgaagttgtcggacttgaccgacgtgtggaagaatcagacatcgagaagttgacttttctgaaatgcacactcaaagaaaccctaaggctacatccaccgatcccactcctcctccacgaaaccgcagaggacactgagatcgacggttacttcgttcccaagaaatcgcgagttatgatcaacgcgtttgccattggacgtgaccctaaatcttggcctgacgccgaaacgtttagaccgtcgaggtttttagaaccgggagtagcggatttcaaaggaagtaacttcgagtttataccattcgggtcgggtcgtagatcgtgtcccggtatgcaactcgggttatacgcgcttgagttagccgttgctcatatattacattgcttcacatggaaattacctgatgggatgaaagcgagcgagcttgacatgaacgacgtgtttggtctcacggctcctaaagccactcgtcttttcgccgtgcctagcacacgcctgatttgtgctgtctaa

SEQ ID NO: 12941 - protein, 519 aa, Brassica napus
MESSVSQTLSQVLDPTTAILIIVSLFIFIGVITRRRRSYPPGPRGWPIIGNMLMMDQLTHRGLANLTKKYGGLCHLRMGFLHMYAVSSPDVARQVLQVQDSIFSNRPATIAISYLTYDRADMAFAHYGPFWRQMRKVCVMKVFSRKRAESWASVRDEVDKMIRSVSSNVGKSINVREQIFALTRNITYRAAFGSACEKGQDEFIRILQEFSKLFGAFNVADFIPYFGWIDPQGISKRLVKARNDLDGFIDDIIDEHMKKKENQNTVDDGDVGDTDMVDDLLAFYSEEAKLVSETMDLQNSIKLTRDNIKAIIMDVMFGGTETVASAIEWALTELLRSPEDLKRVQQELAEVVGLDRRVEESDIEKLTFLKCTLKETLRLHPPIPLLLHETAEDTEIDGYFVPKKSRVMINAFAIGRDPKSWPDAETFRPSRFLEPGVADFKGSNFEFIPFGSGRRSCPGMQLGLYALELAVAHILHCFTWKLPDGMKASELDMNDVFGLTAPKATRLFAVPSTRLICAV

SEQ ID NO: 12942 - DNA, 1536 bp, Helianthus annuus
  CDS (1)..(1536)
atggattcactttcttacccttactacgccgtagcatggctagccacggtggtcctcctcctcctatcgcgtcgtctccgtcgtcgccgcaacctcaacccaccaccgggccctaaaccatggccaataattggaaaccttaacctcataggcaccctcccccaccgttccatccatgatctctcccaaaaatatggagagatcatgcaacttaaattcggctcgtttaacgtcgtagttggatcctcggtcgaaatggccaaggtgtttttaaagacacaggatcttaactttgcttgtcgtccaaaaaccgcagcgggtaaatacacaacttataattactctgatattacatggtccccatacggggcgtattggagacaagcgcgtaaaatgtgtgttatggagttgtttagcgcgaagcgactcgaatcgtacgagtatattcgagtggaggagacatattcattaataaaaactatatttaaatcttctagacaagagattctgttgaaggatcttttgtcaaccgtgagtttgaatgttattagtaggatggtgttggggaagaggtatttggacgagtcggagaactcggttgtgagtccggacgagtttaagaagatgttggatgagttgtttttgttgaatggtgtgtttaatattggtgattcgataccgtggattgatttcatggatctacaagggtatgtgaagcggatgaagacggttagcaagaagtttgatcggtttttggagcatgttttggatgagcataacgcgcggcgaaaagcagaaggggagaagtttgtcgcgacggatatggttgatttgttgttgcagcttgctgatgatccgaatcttgatgtcaagcttgaaagacatggcgttaaggcttttacacaggacttgcttgccggtggaaccgagagctcggctgttactgtcgaatgggcgatttccgaaatctttaaaaaacccgagatattcaaaaaggcaaccgaagagctcgatcgagtcataggcaagaacagatgggttcaagaaaaggacatgcctaacctaccttacatcgaggcgattgctaaggagacaatgaggttgcaccccgtggcaccaatgttggtcccaagaagagctcgtgaggattgtaaagtagccggttatgacattaccgaaggaacccgagtgttggttagcgtttggaccatcgggagagatcctaaactgtgggataaccccgaagagttttgtcctgaaagattcactggaaaggaaattgatgtcaagggtcatgactttgagttgttaccatttggtgcgggccgaaggatgtgccccgggtatagcttaggatataaggttatcgaagcgacattggctaacttacttcacgggtttaactggaaattgccgggtacaatgaccaacgacgacttgaacatggaggagattttcgggctatcgacaccaaagaaatttccacttgtcacagtggctgaaccaaggcttccacttgaaatgtaccatctttag

SEQ ID NO: 12943 - protein, 511 aa, Helianthus annuus
MDSLSYPYYAVAWLATVVLLLLSRRLRRRRNLNPPPGPKPWPIIGNLNLIGTLPHRSIHDLSQKYGEIMQLKFGSFNVVVGSSVEMAKVFLKTQDLNFACRPKTAAGKYTTYNYSDITWSPYGAYWRQARKMCVMELFSAKRLESYEYIRVEETYSLIKTIFKSSRQEILLKDLLSTVSLNVISRMVLGKRYLDESENSVVSPDEFKKMLDELFLLNGVFNIGDSIPWIDFMDLQGYVKRMKTVSKKFDRFLEHVLDEHNARRKAEGEKFVATDMVDLLLQLADDPNLDVKLERHGVKAFTQDLLAGGTESSAVTVEWAISEIFKKPEIFKKATEELDRVIGKNRWVQEKDMPNLPYIEAIAKETMRLHPVAPMLVPRRAREDCKVAGYDITEGTRVLVSVWTIGRDPKLWDNPEEFCPERFTGKEIDVKGHDFELLPFGAGRRMCPGYSLGYKVIEATLANLLHGFNWKLPGTMTNDDLNMEEIFGLSTPKKFPLVTVAEPRLPLEMYHL

SEQ ID NO: 12944 - DNA, 1479 bp, Brassica napus
  CDS (1)..(1479)
atggaaactttctacatcatcctatctctactcttcctcttcctctctctgacattattgttcggaacacgacggcgcaaattaaacctaccgccgagtccagctcggccatttccggttatcggacacctccacctcctaaagatgccgctccaacggagttttctatctctctccaaatcactaggcggcgcctccatattctcactccgcctaggcaatcgtctcgttttcgttgtttcttctcactccgtcgccgaggaatgtttcaccaaaaacgacatcgttttcgccaaccggccggagtttattttcgcgaaacacatagggtacaactcaaccaccatggtcagtgcgccttatggtgacaactggcgcaacctccgtcgtattggcaccattgagatcttctcgtctattaggctcgatagcttcttatccatccgtaaagacgagatccgacggctgatattctgtttatcgaaaaactctcaacaagaatctgcgaaggtggagatgggatcgttgtttatgagcttgactataaacaacatcattaggatgttggctggaaagagattttacggcgatggaacagaggacgacgatgaggcaagacacgttagacacttgatcgccgatgctgtttattccgcagatgcaggcaatgctgctgactacttcccgatcctttgttggataactgattatgagaaacgggtgaagaagttagccggtcgggttgacaagtttttgcaaagtctggtggatgaaaaacgtgcagagaaagaaaagggcaacacaatgatcgatcgcttgctttctctccaagaaactcagcctgattactacactgatgttatcatcaaaggaatcatacttgttatgataattgctgggactgatacatcaggaggaacgttagaatgggcgatggcgaacttgttgaaccatccagaagtattgaaaaaggcaaggaccgagatcgaggagcaaatcggttcagaccggttaatagaggaacaagacattgtgaaacttccttatctacagaacattatgtcagagacattacggctatatcctgtggttccaatgcttctccctcatatggcgtcagaagactgcatcgtggcagggtacgacgtcccacgtggcacgatggtaatggtgaacgcatgggccattcatagagacccaaatatgtgggaagagccggagaagttcaagccagagaggtttgagaaagaaggtgaggataagaagataatgtcatttgggatgggacgacgagcttgtcctggatcagggctagctcagcggctagtaacgttggctctgggttcgttggtccaatgtttcgagtgggagagaaacggagaaaaatatgtggacatgacagaagctgagaaaggaatcacaatgcataagtctacgtcgttggaagctatgtgtagagactcgccccattgtggataa

SEQ ID NO: 12945 - protein, 492 aa, Brassica napus
METFYIILSLLFLFLSLTLLFGTRRRKLNLPPSPARPFPVIGHLHLLKMPLQRSFLSLSKSLGGASIFSLRLGNRLVFVVSSHSVAEECFTKNDIVFANRPEFIFAKHIGYNSTTMVSAPYGDNWRNLRRIGTIEIFSSIRLDSFLSIRKDEIRRLIFCLSKNSQQESAKVEMGSLFMSLTINNIIRMLAGKRFYGDGTEDDDEARHVRHLIADAVYSADAGNAADYFPILCWITDYEKRVKKLAGRVDKFLQSLVDEKRAEKEKGNTMIDRLLSLQETQPDYYTDVIIKGIILVMIIAGTDTSGGTLEWAMANLLNHPEVLKKARTEIEEQIGSDRLIEEQDIVKLPYLQNIMSETLRLYPVVPMLLPHMASEDCIVAGYDVPRGTMVMVNAWAIHRDPNMWEEPEKFKPERFEKEGEDKKIMSFGMGRRACPGSGLAQRLVTLALGSLVQCFEWERNGEKYVDMTEAEKGITMHKSTSLEAMCRDSPHCG

SEQ ID NO: 12946 - DNA, 1623 bp, Brassica napus
  CDS (1)..(1623)
atgaacacatttacctcaaactcttcggatctcacttccactacaacgcaaacgtctccgttcagcaacatgtatctcctcacaacgctccaggcctttgtggctataaccttggtgatgcttctcaagaaagtcttcaccacggataaaaagaaattgtctctcccgccgggtcccaccggatggccgatcatcggaatggttccaacgatgctaaagagccgtcccgttttccggtggctccacagcatcatgaagcagctaaacaccgagatagcatgcgtgaggctaggaaacactcacgtgatcaccgtcacatgcccgaagatagcacgtgagatactcaagcaacaagacgctctcttcgcctcgagacccatgacttacgcacagaatgtcctctctaacggatacaaaacatgcgtgatcactcccttcggggaacaattcaagaaaatgaggaaagtcgtgatgactgaactcgtttgtcccgcgaggcacaggtggcttcaccagaagagagctgaagagaacgaccatttaaccgcttgggtatacaacttggtcaagaactctggctcagtcgattttcggtttgtcacgaggcattactgtggaaatgctatcaagaagcttatgttcgggacaagaacgttctctgaaaacaccgcacctgacggtggaccaaccgctgaggatatcgagcatatggaagctatgttcgaagcattagggtttactttctccttttgtatctctgattatctacctatgctcactggacttgatcttaacggccacgagaagatcatgagggattcgagtgctattatggacaagtatcacgatcctatcgtcgatgcaaggatcaagatgtggagagaaggaaagagaactcaaatcgaggattttctagacatttttatttctatcaaggatgaacaaggcaacccattgcttaccgccgatgaaatcaaacccaccattaaggaacttgtaatggcggcgccagacaatccatcaaacgccgtcgaatgggccatggcggagatggtgaacaaaccggagatactccataaagcaatggaagaaatagacagagttgtcggaaaagaaagacttgtccaagaatccgacatcccaaaactaaactacgtcaaagctattctccgtgaagccttccgtctccatcccgtcgccgcctttaacctcccacacgtggcactttccgacgcaaccgtcgccggatatcacatccctaaaggaagtcaagtccttctcagccgatatgggctgggccgtaacccgaaagtttgggctgacccactgagctttaaaccggagagacatctcaacgaatgctcggaagttactttgacggagaacgatctccggtttatctcgtttagtaccgggaaaagaggttgtgctgctccggctttaggtacggcgttgactacgatgatgctcgcaagacttcttcaaggtttcacttggaagctaccggagaatgagacacgtgttgagctgatggagtctagccatgatatgtttttggctaaaccattggttatggtaggtgagttgagactcccagagcatctttacccgacggtgaagtaa

SEQ ID NO: 12947 - protein, 540 aa, Brassica napus
MNTFTSNSSDLTSTTTQTSPFSNMYLLTTLQAFVAITLVMLLKKVFTTDKKKLSLPPGPTGWPIIGMVPTMLKSRPVFRWLHSIMKQLNTEIACVRLGNTHVITVTCPKIAREILKQQDALFASRPMTYAQNVLSNGYKTCVITPFGEQFKKMRKVVMTELVCPARHRWLHQKRAEENDHLTAWVYNLVKNSGSVDFRFVTRHYCGNAIKKLMFGTRTFSENTAPDGGPTAEDIEHMEAMFEALGFTFSFCISDYLPMLTGLDLNGHEKIMRDSSAIMDKYHDPIVDARIKMWREGKRTQIEDFLDIFISIKDEQGNPLLTADEIKPTIKELVMAAPDNPSNAVEWAMAEMVNKPEILHKAMEEIDRVVGKERLVQESDIPKLNYVKAILREAFRLHPVAAFNLPHVALSDATVAGYHIPKGSQVLLSRYGLGRNPKVWADPLSFKPERHLNECSEVTLTENDLRFISFSTGKRGCAAPALGTALTTMMLARLLQGFTWKLPENETRVELMESSHDMFLAKPLVMVGELRLPEHLYPTVK

SEQ ID NO: 12948 - DNA, 1509 bp, Brassica napus
  CDS (1)..(1509)
atgttttactatgtgatcctccctttagctctccttctcattgcttacaaattcatcttcagctataaaacgaagcgtctcaacctccctccctctccgcctcactctctccccattattggccaccatcgcctcatcaaaccgccagtccaccgtctcttccaccgactcgccaaagcacacggcccaatattctacctccgactcggtacccgccgtgccgtagtcatctcttcctccgcactcgcaaaagaatgcttcacgggtcacaacgacgtcgtagtatcaaaccgccctcgtttcctaacctccaaatacatcgcttacaactacaccaccattgcaaccacaccttacggtgaccactggcgcaacctccgcaagatctgctccctcgaaatcgtctcctcgaaacgtctcgccaactttctccacatccgcaaagaggaaatccaccgcatgctcacgagactctcacgtgacgcgctcatcaacaacgaggtcgagctagagtcacttttttacgatctaacgttcaacaacatcgtgaggatggttacagggaaaatctactacggagaagatgctagtgacaaagcagaagcagatacgttcaagaaactcatcgcttatattaccagcactagtggcgcgaggcaccctggcgaatacttaccattcctgaaaatattcggaaggagttttgaaaagaaagtgaaagctgtaggagaagccatggatgcaatcttgcagcgtctacttgatgagtgtagaggaaataaagacggtaacacaatggttaatcacttgctctctttgcaacaacaagacccagagtattacagtgaggtcatcatcaaaggcctaatgctgggtatcatgtttgccgcatcagaaacatcggccgtgacaatagagtgggcgatggcgagtttgttgaatcatccagagttgttggaaaagttgaaactagagattgacgagaaaatcggacaagatcgtttgatcgaggaaacagacattccaaacctgccttacctccaaaacgtagtgtcggagacactcaggctatatccagcaacgccgcttcttgggccaagattaacagtacaggacatcaagatcggaggctacgacgtgcctcgtgagacgatggtcatggtgaacgcgtggactatacacagagatccagaactgtggaccgaaccagagaggtttaacccagataggtttaacggtgaaagaagggaaggagaaaaagacgatgtccgtacgctgataacctttggaagtggacggagaatgtgtccaggcgcaggactagcgaacaagattgtgaccttggcgttaggatcattgattcaatgctttgattggggaagagtcaatggcaaaaagattgatatgactgaaggtccagagatggcaatgcgtaaggtggtgccgttacgagccatgtgtcaccttcgacccgttatgaataagcttcttaccgagtcaaaagtttag

SEQ ID NO: 12949 - protein, 502 aa, Brassica napus
MFYYVILPLALLLIAYKFIFSYKTKRLNLPPSPPHSLPIIGHHRLIKPPVHRLFHRLAKAHGPIFYLRLGTRRAVVISSSALAKECFTGHNDVVVSNRPRFLTSKYIAYNYTTIATTPYGDHWRNLRKICSLEIVSSKRLANFLHIRKEEIHRMLTRLSRDALINNEVELESLFYDLTFNNIVRMVTGKIYYGEDASDKAEADTFKKLIAYITSTSGARHPGEYLPFLKIFGRSFEKKVKAVGEAMDAILQRLLDECRGNKDGNTMVNHLLSLQQQDPEYYSEVIIKGLMLGIMFAASETSAVTIEWAMASLLNHPELLEKLKLEIDEKIGQDRLIEETDIPNLPYLQNVVSETLRLYPATPLLGPRLTVQDIKIGGYDVPRETMVMVNAWTIHRDPELWTEPERFNPDRFNGERREGEKDDVRTLITFGSGRRMCPGAGLANKIVTLALGSLIQCFDWGRVNGKKIDMTEGPEMAMRKVVPLRAMCHLRPVMNKLLTESKV

SEQ ID NO: 12950 - DNA, 1563 bp, Brassica napus
  CDS (1)..(1563)
atggagtcttctatatcacaaacactaagccaagtaatagatcccaccacgggtattctcatcgtcgtctcacttttcatcttcatcggcctcatcacacgacgacgaaggcctccgtatccacccggtccacgtggttggcccatcataggcaatatgtcaatgatggaccaactcacccaccgtggtttagccaacttagctaaaaagtacggtggcttgtgccatctccgcatgggatttctccacatgtacgccgtttcatcaccagacgtggctaaacaagtccttcaagtccaagacagcgtcttctcgaaccgaccagctactatagctataagctatttgacttatgaccgagccgacatggcgtttgctcactacggaccgttttggagacagatgaggaaagtttgcgtcatgaaggtgtttagccgtaaacgagccgagtcatgggcttctgttcgtgatgaagtggacaaaatgatccggtcggtttctagtaacgttggtaagtctatcaacgttggtgagcaaatttttgcactgacccgaaacataacttaccgggcagcgttcgggtcagcatgtgaaaagggacaagacgagttcataagaattttacaagagttctctaagctttttggagccttcaacgtagcggatttcataccgtatttcgggtggatcgatcctcaaggaataaacaagcggctcgtgaaggcccgtaatgacctagacggatttattgacgatatcatcgatgaacacatgaagaagaaagagaatcaaaacagtgttgatgctggagatgttgttgataccgatatggttgatgatcttcttgctttttacagtgaagaggcgaaattagtgagcgagacagcggatcttcagaactctatcaaacttacccgtgacaatatcaaagcaatcatcatggacgttatgtttggaggaacggaaacggtagcgtcagcgatagagtgggcattgactgaattactacggagccccgaggatctaaaccgagtccaacaagaactcgctgaagtcgtcggacttgaccgacgtgtggaagaatcagacatcgagaagttgacttttctgaaatgcacactcaaagaaaccctaaggctacacccaccgatcccactcctcctacacgaaaccgcagaggacactgagatcgacggttacttcgttcccaagaaatctcgcgttatgatcaacgcgtttgcgattgggcgcgacaagaactcttgggttgaccccgaaacgtttagaccgtctaggtttttggaaccgggcgtaccagatttcaaagggagtaacttcgagtttataccattcgggtcgggtcgtaggtcgtgcccgggtatgcaactcgggttatacgcgcttgaactagccgtggcccatatattacattgcttcacgtggaaattacctgatggcatgaaaccaagcgagcttgatatgagcgacgtgtttggtctgacggctcctaaagccacgcgtctctatgctgtcccgagcacgcgccttatttgttctgtttaa

SEQ ID NO: 12951 - protein, 520 aa, Brassica napus
MESSISQTLSQVIDPTTGILIVVSLFIFIGLITRRRRPPYPPGPRGWPIIGNMSMMDQLTHRGLANLAKKYGGLCHLRMGFLHMYAVSSPDVAKQVLQVQDSVFSNRPATIAISYLTYDRADMAFAHYGPFWRQMRKVCVMKVFSRKRAESWASVRDEVDKMIRSVSSNVGKSINVGEQIFALTRNITYRAAFGSACEKGQDEFIRILQEFSKLFGAFNVADFIPYFGWIDPQGINKRLVKARNDLDGFIDDIIDEHMKKKENQNSVDAGDVVDTDMVDDLLAFYSEEAKLVSETADLQNSIKLTRDNIKAIIMDVMFGGTETVASAIEWALTELLRSPEDLNRVQQELAEVVGLDRRVEESDIEKLTFLKCTLKETLRLHPPIPLLLHETAEDTEIDGYFVPKKSRVMINAFAIGRDKNSWVDPETFRPSRFLEPGVPDFKGSNFEFIPFGSGRRSCPGMQLGLYALELAVAHILHCFTWKLPDGMKPSELDMSDVFGLTAPKATRLYAVPSTRLICSV

SEQ ID NO: 12952 - DNA, 1509 bp, Brassica napus
  CDS (1)..(1509)
atggaagataataggggagttgttctctattctatattccccctcatattattgattatctttctcaagttcttgaaaccaaacaagcagaatcttccgccatctccgccgggatggttgccagtgataggccatctccgcctcctgaaaccccccatccaccgcaccctccgcttcctcactgagtccctccacggcggcggaggcggcgtgatgtcactccgacttggatcccgcctagtatacgtggtgtcttcacataggatcgcagcggaggagtgctttgggaagaacgacgtcgttctagctaaccggcctcaggtgatcattggaaagcacgttgggtacaacaacacaaacataatcgccgcaccttacggtgatcactggcgcaacctccgtcgcctctgcaccattgagatcttctccacccaccgtctaaactgcttcctttatgtccgtaccgacgaagtacgccgtctcataagccgcctcttccgtagagcaggttctgaaaaaatggttgtcgaaatgaaacccatgctaacggacttgacgttcaacaacataatgagaatgatgacaggaaaacgatactacggcgaagaaacaacggatgaggaagaagcaaaacgtgtccgtcagttagtggcagatgtcggagccaacacgagttctggcaatgctgttgactatgttccgatcttgagattgttctcaaactatgagaaaagggtaaaagaattagggaaaaagacagataagttcttacaaggtcttatcgacgaaaaacgtgaacaacaagacgcgggtaatacgatgatcgatcatttgcttgttctccaaaaatctgatactgagtattacactgatcaaatcatcaaaggcatcttactggttatggtaatagcagggactaacacatcagctgtcactttagaatgggcactttctaatttgcttaaccatcctgacgttatacgtaaagctagaaccgaaatcgataaacaagttggcttagaccggcttattgaagaatcagatctcagcgagctaccatatctcaagaacatcgtcctagagacactccggctacatccggcaacaccattgttggttccacacatggcatcagaagattgcaaggtggggtcgtacgatatgccacgtaacacaacgttgttggtgaatgcgtgggccatacatagggatccaaacttgtggtatgatccggattgctttaaaccagagcggtttgagaaagtagaggaagcacaaaagcttctggcgtttggattagggagaagggcatgtcctggatcgggtttggcccagagaattgtagggcttgctctcgggtcattgatacaatgctttgaatgggagagagttggagaagaggaagtggatatgaaggaaggaactggtaatacagtacccaaagcagttccgctgcaagccgtttgcaaggctcgtccatttctacataaaattctcttgaagttttaa

SEQ ID NO: 12953 - protein, 502 aa, Brassica napus
MEDNRGVVLYSIFPLILLIIFLKFLKPNKQNLPPSPPGWLPVIGHLRLLKPPIHRTLRFLTESLHGGGGGVMSLRLGSRLVYVVSSHRIAAEECFGKNDVVLANRPQVIIGKHVGYNNTNIIAAPYGDHWRNLRRLCTIEIFSTHRLNCFLYVRTDEVRRLISRLFRRAGSEKMVVEMKPMLTDLTFNNIMRMMTGKRYYGEETTDEEEAKRVRQLVADVGANTSSGNAVDYVPILRLFSNYEKRVKELGKKTDKFLQGLIDEKREQQDAGNTMIDHLLVLQKSDTEYYTDQIIKGILLVMVIAGTNTSAVTLEWALSNLLNHPDVIRKARTEIDKQVGLDRLIEESDLSELPYLKNIVLETLRLHPATPLLVPHMASEDCKVGSYDMPRNTTLLVNAWAIHRDPNLWYDPDCFKPERFEKVEEAQKLLAFGLGRRACPGSGLAQRIVGLALGSLIQCFEWERVGEEEVDMKEGTGNTVPKAVPLQAVCKARPFLHKILLKF

SEQ ID NO: 12954 - DNA, 1506 bp, Brassica napus
  CDS (1)..(1506)
atgttttactatgtgatcctccctgtagctctccttctcattgcttacaaattcatcttcagctataaaacgaagcgtctcaacctccctccctctccgcctcactctctccccattatcggccaccaccgcctcatcaaaccgccagtccaccgtctcttccaccgactcgccaaaacacacggcccaatattctacctccgactaggtacccgccgtgccgtcgtcatctcttcctccgcactcgcaaaagaatgcttcacgggtcacaacgacgtagtagtatcaaaccgccctcgtttcctaacctccaaatacatcgcttacaactacacaaccatagcaaccacaccttacggtgaccactggcgcaacctccgcaaaatatgctccctcgaaatcgtttcctcgaaacgtctcgccaactttctccacatccgcaaagaggaaatccaccgcatgctcacgagactctcacgtgacgcgctcatcaacaacgaggtcgagctagagtcacttttttacgatctaacgttcaacaacatcgtgaggatggttacagggaaaatctattacggagaagatgctagtgacaaagcagaagcagatacgttcaagaaactcattgcttatattaccagtactagtggcgcgaggcaccctggtgaatacttgccattcttgaaaatattcggaaggagttttgagaagaaagtgaaagctgtaggagaagccatggatgcgatcttgcagcgtctgcttgatgagtgtagaggaaataaagacggtaacacaatggttaatcacttgctctctttgcaacaacaagacccagagtattacagtgaggtcatcatcaaaggcctaatgctgggtatcatgtttgccgcatcagaaacatcggccgtgacaatagagtgggcgatggcgagtttgttgaatcatccagagttgttggaaaagttgaaattagagattgacgagaaaatcggacaagatcgtttgatcgaggaaacagacattccaaacctgccttacctccaaaacgtagtgtcggagacactcaggctatatccagcaacgccgcttcttgggccaagattaacagtacaggacatcaagatcggaggctacgacgtgcctcgtgagacgatggtcatggtgaacgcgtggagtatacacagagatccagaactgtggacggaaccagagaggtttaatccagataggtttaacggtggaggagaaggagaaaaggacgatgtccgtatgctgataacctttggaagtggacggagaatgtgtccaggcgcaggattagcgaacaagattgtgacgttggcgttaggatctttgattcaatgctttgattggggaagagtcaatggcaaaaagattgatatgactgagggtccagagatggcaatgcgtaaggtggtgccgttacgagccatgtgtcagcttcgacccgttatgaataagcttcttaccgagtcaaaggtttag

SEQ ID NO: 12955 - protein, 501 aa, Brassica napus
MFYYVILPVALLLIAYKFIFSYKTKRLNLPPSPPHSLPIIGHHRLIKPPVHRLFHRLAKTHGPIFYLRLGTRRAVVISSSALAKECFTGHNDVVVSNRPRFLTSKYIAYNYTTIATTPYGDHWRNLRKICSLEIVSSKRLANFLHIRKEEIHRMLTRLSRDALINNEVELESLFYDLTFNNIVRMVTGKIYYGEDASDKAEADTFKKLIAYITSTSGARHPGEYLPFLKIFGRSFEKKVKAVGEAMDAILQRLLDECRGNKDGNTMVNHLLSLQQQDPEYYSEVIIKGLMLGIMFAASETSAVTIEWAMASLLNHPELLEKLKLEIDEKIGQDRLIEETDIPNLPYLQNVVSETLRLYPATPLLGPRLTVQDIKIGGYDVPRETMVMVNAWSIHRDPELWTEPERFNPDRFNGGGEGEKDDVRMLITFGSGRRMCPGAGLANKIVTLALGSLIQCFDWGRVNGKKIDMTEGPEMAMRKVVPLRAMCQLRPVMNKLLTESKV

SEQ ID NO: 12956 - DNA, 1560 bp, Brassica napus
  CDS (1)..(1560)
atggagtcttctgtatcacaaacactaagtcaattattagatcccacaacggctattctcatcatcgtctcacttttcatattcatcggcctcatcacacgacggcgaaggtcttacccacccggtccacgtggttggcccatcataggcaatatgttaatgatggaccaactcacccaccgtggtttagccaacttagctaaaaaatatggcggcttgtgccatctccgcatgggcttcctccatatgtatgccgtctcatcacctcatgtggctcgacaagtcctccaagtccaagacagcatcttctcgaaccggccggcaacgatagctataagctatttgacttatgaccgagccgacatggcgttcgctcactacggaccgttttggagacagatgaggaaagtgtgtgtcatgaaggtgtttagccgtaaacgtgcggagtcatgggcttctgttcgagatgaagtggacaaaatgatccggtcggtatctagtaacgttggtaagtctataaacgtcggggagcaaattttcgccctgacccgaaacataacttaccgggcagcgttcgggtcagcttgcgaaaagggacaagatgagttcataagaatcttacaagagttctctaagctttttggagccttcaacgtagcagatttcataccatattttgggtggatcgatccacaagggataagcaagcggctcgtgaaggcccgtaatgatctagacggatttattgacgatatcatcgacgaacatatgaagaagaaagagaatcaaaacactgttgatgatggagatgttggtgataccgatatggttgatgatcttcttgctttttacagtgaagaggccaaattagtgagcgagacaacggatcttcagaattctatcaaacttacccgtgacaatatcaaagcaatcatcatggacgtcatgttcggaggaacggaaacggtagcttctgcaatagagtgggccttaacggagttattacggagccccgaggatctaaaacgggtccaacaagaactcgctgaagttgtcggacttgaccgacgtgtggaagaatcagacatcgagaagttgacttttctgaaatgcacactcaaagaaaccctaaggttacacccaccgatcccactcctcctccacgaaaccgcagaggacactgagatcgacggttacttcgttcccaagaaatcgcgcgttatgatcaacgcgtttgccattggacgtgaccctaaatcttggcctgacgccgaaacgtttagaccgtcgaggtttttagaaccgggagtagcggatttcaaaggaagtaacttcgagtttataccattcgggtcgggtcgtaaatcgtgcccgggtatgcaactcgggttatacgcgcttgagttagccgttgctcatatattacattgcttcacatggaaattacctgatgggatgaaagcgagcgagcttgacatgaacgacgtgtttggtctcacggctcctaaagccactcgtcttttcgccgtgcctagcacacgcctgatttgtgctgtctaa

SEQ ID NO: 12957 - protein, 519 aa, Brassica napus
MESSVSQTLSQLLDPTTAILIIVSLFIFIGLITRRRRSYPPGPRGWPIIGNMLMMDQLTHRGLANLAKKYGGLCHLRMGFLHMYAVSSPHVARQVLQVQDSIFSNRPATIAISYLTYDRADMAFAHYGPFWRQMRKVCVMKVFSRKRAESWASVRDEVDKMIRSVSSNVGKSINVGEQIFALTRNITYRAAFGSACEKGQDEFIRILQEFSKLFGAFNVADFIPYFGWIDPQGISKRLVKARNDLDGFIDDIIDEHMKKKENQNTVDDGDVGDTDMVDDLLAFYSEEAKLVSETTDLQNSIKLTRDNIKAIIMDVMFGGTETVASAIEWALTELLRSPEDLKRVQQELAEVVGLDRRVEESDIEKLTFLKCTLKETLRLHPPIPLLLHETAEDTEIDGYFVPKKSRVMINAFAIGRDPKSWPDAETFRPSRFLEPGVADFKGSNFEFIPFGSGRKSCPGMQLGLYALELAVAHILHCFTWKLPDGMKASELDMNDVFGLTAPKATRLFAVPSTRLICAV

SEQ ID NO: 12958 - DNA, 1551 bp, Brassica napus
  CDS (1)..(1551)
atgtctccgatctcaaacctcttcaccgacaacacaatgaacgttcctccttacgcaattctcgttctcactactatcattacagttttctggttccttctcaaacgctcgccgcaaccgcctctaccacctggaccccgagggctacctatcgtcggaaacctcccgtttcttaaaccggaccttcacacctacttcaaagacctccctcaagaatacggtccaatcttcaaactcaaccttggctcaaaactaactgtcgtggtcaacactccatcgctagctcgagagatcttcaaagaacaagacatcaacttctcaaaccatgacgtcccactcacggcaagaaccattacctacggtggcctcgacattgtatggctaccatacagggcggaatggagaatgcttagaaaagtttgtgttctcaaactacttaaccgcaaaactttggattcattctacgagctacggcgcaaagagatccgagagagaacgaggtttttatacgagaaaagtcaagaagaatcggcggtgaacgttggtgatcagttgttcgtgacgatgatgaatctaacgatgaatatgttgtggggaggttcggtgaaagccgaggagatggagagtgttggaacagaatttaaaggagtggtttctgagataactaggcttttgggtgagcctaatgtttcggatttttttccgtggctagcgagattcgatcttcaagggctcgtgaagcagatgcgcgtgtatgctcgtgagctcgatgccatattcgacggagccattgagaagatgccaaatctaggaagtaaggatgatggtgagtgcaaagactttttgcaacagttgatgaagctaaaggaccaagaagccaactcggagactcccattacagttaaccatgtcaaagccgtactcacggatatggtggttggtggtactgatacctctacaaacacaatagagtttgcgatggccgagcttataagcaacccaaagttgatgaagagagcgcaacaagagctagacgaagttgtaggaaaagaaaacattgttgaagaatcacacatcactaaacttccttacatactagccataatgaaagaaacacttagacttcacccaaccattcctttgttagtccctcaccgtccagctgaaactgccgtggtgggcggttacaccatccctaaagacactaaagtcttcatcaatgtttggtctatccaaagagacccaaacgtgtgggaaaatccgaccgaatttcgtcccgagaggtttcttgataagaagtcttgtgatttccatggaactgactatagctttcttccttttggatctggccggagaatctgcgccggtgtagcactcgcagagaggatggttcagtacactcttgcaacgctgttgcattcattcgattggaaggttccagaaggccatgagttaaatgtggaagataagtttggtattgtcttgaagctcaaaaaccctcttattgccatgcccgttccgaggttgtctgatcctaatctttatctgtag

SEQ ID NO: 12959 - protein, 516 aa, Brassica napus
MSPISNLFTDNTMNVPPYAILVLTTIITVFWFLLKRSPQPPLPPGPRGLPIVGNLPFLKPDLHTYFKDLPQEYGPIFKLNLGSKLTVVVNTPSLAREIFKEQDINFSNHDVPLTARTITYGGLDIVWLPYRAEWRMLRKVCVLKLLNRKTLDSFYELRRKEIRERTRFLYEKSQEESAVNVGDQLFVTMMNLTMNMLWGGSVKAEEMESVGTEFKGVVSEITRLLGEPNVSDFFPWLARFDLQGLVKQMRVYARELDAIFDGAIEKMPNLGSKDDGECKDFLQQLMKLKDQEANSETPITVNHVKAVLTDMVVGGTDTSTNTIEFAMAELISNPKLMKRAQQELDEVVGKENIVEESHITKLPYILAIMKETLRLHPTIPLLVPHRPAETAVVGGYTIPKDTKVFINVWSIQRDPNVWENPTEFRPERFLDKKSCDFHGTDYSFLPFGSGRRICAGVALAERMVQYTLATLLHSFDWKVPEGHELNVEDKFGIVLKLKNPLIAMPVPRLSDPNLYL

SEQ ID NO: 12960 - DNA, 1509 bp, Brassica napus
  CDS (1)..(1509)
atgtcaactttcctctgtttcatcttcctcttacccattttcttcatcttcttgaaaaatctcaaaccttcttctagatggaaccttcctccaggaccaaagaagcttcccatcatcggaaacttacacaacctccaaggaatgcttcatctctgtcttcgagacctttcccaaacgtacggtccagtgatgcttctcaagttcgggttcgtgcgtatggtcgtgatcacgtcgaaagaagcagcagaggaagtcctcaagacactagatctcgaatgttgcagccgaccagagacggtttcgagcagaaccgtctcttacaacttcaaagacataggctttgctccatacggtgaagaatggaaggccctgcggaagctctcggtggtggagatcttcagcacgaagaagattcagtcgttcaggtacataagagaagaagaaaacgatctgttggttaaaaagctctctgaatctgcttcaacacgttccactgtgaatctgaagaagacgctgttcacattagtagcgagtatagtctgtagacttgccttcgggcaagatctccataagtgtgagttcatcgacgagcatagcatcgcagagcttgttcaaaagtctgagatggttcttgcgagctctgcgttctccgatttcttccctggaggaaccggttggcttttggataagatcatgggacagaacaagaagctgaacagtgttttctcggagcttgacgctttcttccaaaacattctcgatgatcatctaaggcctgggagaacggtgcttgacagtccagatgtagtcgatgtgatgattgatatgatgaagaagcaagagagagatggtgactctttcaagctcacaacggatcatctcaaaggaatcatctcagacatttttcttgcgggagtgaacacaagtgcgatgactttgatatggggaatgaccgagctgatcaggaaccctagagtgatgaagaaggtgcaagaagagatacggacaacgcttggaaacaagaaggagaaagttacagaagaagatgtcaacaagcttcactacttcaagctcatggtgaaggagttattcaggttacatccagcagctccgcttttactcccaagagaaacaatgtctaaaatcaagatccaaggctacgacatccccgaaaaaacacagatcatgatcaacatttactcgatagcacgcgatccaaaactgtggacaaacccggatgagttcaaccctgacaggtttctagacatgtctgtagattacaggggactgaactttgagcttttgccgtttggttctggtcggagaatctgtcctgggatgacaatgggggttgctactgtggaattgggtttgttaaacttgctctacttctttgattgggcgttgcctgaaggtaagacggtgaaggacattgacttggaagaagcaggggctattgttatcggcaagaaagtcagccttgagcttgttccacttcatcctaactga

SEQ ID NO: 12961 - protein, 502 aa, Brassica napus
MSTFLCFIFLLPIFFIFLKNLKPSSRWNLPPGPKKLPIIGNLHNLQGMLHLCLRDLSQTYGPVMLLKFGFVRMVVITSKEAAEEVLKTLDLECCSRPETVSSRTVSYNFKDIGFAPYGEEWKALRKLSVVEIFSTKKIQSFRYIREEENDLLVKKLSESASTRSTVNLKKTLFTLVASIVCRLAFGQDLHKCEFIDEHSIAELVQKSEMVLASSAFSDFFPGGTGWLLDKIMGQNKKLNSVFSELDAFFQNILDDHLRPGRTVLDSPDVVDVMIDMMKKQERDGDSFKLTTDHLKGIISDIFLAGVNTSAMTLIWGMTELIRNPRVMKKVQEEIRTTLGNKKEKVTEEDVNKLHYFKLMVKELFRLHPAAPLLLPRETMSKIKIQGYDIPEKTQIMINIYSIARDPKLWTNPDEFNPDRFLDMSVDYRGLNFELLPFGSGRRICPGMTMGVATVELGLLNLLYFFDWALPEGKTVKDIDLEEAGAIVIGKKVSLELVPLHPN

SEQ ID NO: 12962 - DNA, 1503 bp, Brassica napus
  CDS (1)..(1503)
atgtccatctttctctatttcatcttactcttacctctccttttaatcttcttgaaacacctctcaccctctaaagggaagcttcctccaggacctataggccttcccctcatcggaaacttgcatcaacttggaaaatctctccacagatcgttccataaactctctcaaaattatggacccgtgatgtttcttcgattcggcgtggtccctgtggttgtcttctccacaagagaagcagctgaagaagttctcaagactcatgatctcgagacttgtactcgaccaaagctatctgcgaccaagttgttctcttacaactacaaagacattggttttgctcagtacggtgatgactggagagagatgaggaagcttgcgatgctcgagctcttcagctccaaaaaactaaaagcattcaggtatatcagagaagaagagagtgaattgctcgtcaagaaaatctcgaaatctgccgagacacaaactctggtggatttgagaaaagctcttttctctcttacagcgagtatcatatgtagactcgcttttggacagaacttccacgagtgcgattttgtcgatatggacaaagttgaggagctggtgctcgagtctgagaccaatcttggctcattcgcgttcaccgacttcttccccacgggccttgggtggattatagaccggatctctggccaacattcggagctgcacaaagcctttgcaagacttagcaatttctttcaacatgtgatcgatgatcatttgaagcctggacaacctcaagatcattcagacataattggtgtcatgttggatatgatcaataaagagagaaaagtcggatcttttaaagtcacctatgatcatctaaaaggagttatgtcggatgtgtttctagcgggagtaaacgcaggagccatcaccatgatatgggccatgacggaattcaccagacacccaaaggtgatgaagaaactccaacaggagatccgagtaacccttggtgacaacaaagaaaaaatcactgaacaagatctagagaaggttcactacttgaaacttgtgatccaagaaacatttagattacacccaccagctcctctcttactcccaagagagaccatgtctgatatcaagatacaaggctacaacattcccaaaaacacaatgatcgagatcaacacttacgcaatagggcgtgatcccaactgttgggaaaaccctaatgatttcgtccccgagaggtttatcgatagtcctgtcgaatataagggtcaacattacgagttgttgccatttggtgctggtcgcaggatttgtccagggatggccacggggataactatcgtcgaactaggtttacttaacgttctctacttctttgattggagtttgcctgatggaatgaccattgaagacatagacatggaagaagctggagctttcgtcatcgccaagaaaattccccttgagctaataccaactccacataaatggtga

SEQ ID NO: 12963 - protein, 500 aa, Brassica napus
MSIFLYFILLLPLLLIFLKHLSPSKGKLPPGPIGLPLIGNLHQLGKSLHRSFHKLSQNYGPVMFLRFGVVPVVVFSTREAAEEVLKTHDLETCTRPKLSATKLFSYNYKDIGFAQYGDDWREMRKLAMLELFSSKKLKAFRYIREEESELLVKKISKSAETQTLVDLRKALFSLTASIICRLAFGQNFHECDFVDMDKVEELVLESETNLGSFAFTDFFPTGLGWIIDRISGQHSELHKAFARLSNFFQHVIDDHLKPGQPQDHSDIIGVMLDMINKERKVGSFKVTYDHLKGVMSDVFLAGVNAGAITMIWAMTEFTRHPKVMKKLQQEIRVTLGDNKEKITEQDLEKVHYLKLVIQETFRLHPPAPLLLPRETMSDIKIQGYNIPKNTMIEINTYAIGRDPNCWENPNDFVPERFIDSPVEYKGQHYELLPFGAGRRICPGMATGITIVELGLLNVLYFFDWSLPDGMTIEDIDMEEAGAFVIAKKIPLELIPTPHKW

SEQ ID NO: 12964 - DNA, 1575 bp, Brassica napus
  CDS (1)..(1575)
atggaagcgacttcgtctaacttcactctctccacaatcctcaacacagaggatccatacagctccctcatgctcgccgtagctgctctcgtcgccatcttctgctacttttggattcaaggaaaggctaaatccaagaacggcccaccattgcctccaggaccatggccacttcccatcgtgggaaacctcccgttcctaaactccgacatcctccacacacagttccaagccctaactcaaaaacacggccctctcatgaaaattcacctcggctccaaactcgctatcgtcgtctcttccccagaaatggctcgcgaggttctcaaaacccacgacataaccttcgcgaaccatgacctccccgaagtagggaagatcaacacttacggtggagaagacatcctctggtctccttacggcacccactggaggagactacgtaagctctgcgtcatgaagatgttcaccacgccgacactcgaagcttcttactccactcgccgcgaagaaacccgacaaaccgttgtttacatgtcggaaatggctcgcgacgggtctcccgtgaacctcggagagcagatcttcctctctatcttcaacgtcgtgacgaggatgatgtggggagctaccgttgaaggagaagagagaacgagcttaggaaacgagctcaaaaccctaatctctgatatctccgacatcgaagggattcagaactactccgacttcttccccatgttcgcgagatttgacttccaaggacttgttaagaagatgaaggtccacgtgaagaagctagatcttttgttcgatcgtgtcatggagagtcatgtcaagatggtggggaaaaaaagcgaagacgaagaagattttttacaatatttgattagggttaaagacgacgatgagaaagctcctctctcgttgacacacgtaaagtcactgcttatggacatggttcttggcggtgtggacacatcggttaacgcatcggagttcgcaatggcggagatcgttagtagaccagaagttttcaagaaaatccgacaagaactagatcaagttgttggtaaagacagtatcgttgaagagtcgcatttaccaaagcttccttatctacaagctgttatgaaagagactcttaggcttcaccctacgcttcctcttcttgtgcctcatcggaacagcgagacctctgtggttgcggggtacactgtgcctaaagactcgaagatattcatcaacgtttgggcgattcatagagatcctaagcattgggatgaaccaaacgagtttaaacctgagaggtttttggagaactcgcttgatttcaatggtggtgattttaagtatttgccttttggatctgggaggaggatttgcgcggcgattaacatggctgagaggcttgttctgttcaacattgcgtcgcttcttcactcttttgactggaaagctcctaaaggacagaagtttgaggttgaagagaagtttgggcttgttcttaagttgaagagtccacttgtggctattcctgttccaaggttgtctgatcccaaactctacacagcttaa

SEQ ID NO: 12965 - protein, 524 aa, Brassica napus
MEATSSNFTLSTILNTEDPYSSLMLAVAALVAIFCYFWIQGKAKSKNGPPLPPGPWPLPIVGNLPFLNSDILHTQFQALTQKHGPLMKIHLGSKLAIVVSSPEMAREVLKTHDITFANHDLPEVGKINTYGGEDILWSPYGTHWRRLRKLCVMKMFTTPTLEASYSTRREETRQTVVYMSEMARDGSPVNLGEQIFLSIFNVVTRMMWGATVEGEERTSLGNELKTLISDISDIEGIQNYSDFFPMFARFDFQGLVKKMKVHVKKLDLLFDRVMESHVKMVGKKSEDEEDFLQYLIRVKDDDEKAPLSLTHVKSLLMDMVLGGVDTSVNASEFAMAEIVSRPEVFKKIRQELDQVVGKDSIVEESHLPKLPYLQAVMKETLRLHPTLPLLVPHRNSETSVVAGYTVPKDSKIFINVWAIHRDPKHWDEPNEFKPERFLENSLDFNGGDFKYLPFGSGRRICAAINMAERLVLFNIASLLHSFDWKAPKGQKFEVEEKFGLVLKLKSPLVAIPVPRLSDPKLYTA

SEQ ID NO: 12966 - DNA, 1509 bp, Glycine max
  CDS (1)..(1509)
atgcatgctatggagttcctcaccctttcagttactgtggccgcagctgctttttctatcctcttcttcttcctgcgacatgcgggagccggagcaggatcactccccccagtaccagctgttccaggattaccagtgattgggaatctgctccaattgaaggagaagaaaccttacaagaccttcacccagatggctcacaaacatgggcccatctattccatccgaaccggtgcttccactctcattgttctcaactctcccctccttgctaaggaggccatggtcactagattttcatcaatttcaacaaggaagctatccaatgccctcaagattctcacttctgataaatgtatggttgccactagtgactacaatgaatttcataaaactgtcaaaagacatattcttactaacttcttgggtgccaatgcacagaagcgacaccatatccaccgagaagccatgatggaaaatattttgagccagtttagtgaacatgtcaagaccttctctgatttggcagttaattttaggaaaatattcgtaactcaactttttggattagcactgaagcaagctctgggaagtaatgtagagaccatttatgtggaggagcttgggagtacattatcaaaagaggacatatataagattctagtggttgatataatggagggtgcaattgaggtggattggcgagatttctttccatacctgaagtggattccaaataggaggctggagatgaaaattcagaatctttatgtgcgcagaaaagctgtcatgaaggccttgatgaatgagcagaagaacagaatggcttcaggaaaggaagtaaattgttattttgactacctggtatcggaagctaaagaactgactgaagatcaaatttccatgctaatctgggagaccattattgagacatctgatactacattagttacaactgaatgggctatgtatgaacttgctaaagacaaaactcgtcaggaccgtctttatgaggagctccaatatgtatgtggacatgaaaatgttatagaagaccaattatctaagctaccatacttgggggcagtattccatgaaactttaaggaagcatagtccagctccgattgtgccactaagatatgctcatgaagatacacaattgggaggatatcatattcctgcaggaagcgagatcgcaataaatatatacggatgcaacatggacaacaatctgtgggaaaatcctaatgagtggatgccagagagatttctagatgagaaatatgaccacatggatttatacaagaccatggcctttggagcagggaagagggtgtgtgcgggctctcttcaggccatgttgatagcttgcactgcaattggcagattggttcagcaatttgagtgggagctgggacaaggggaggaagagaatgtggatacaatgggccttaccacccgcaagctccatcccctgctagtaaaactcaagccaagaatcaagtaa

SEQ ID NO: 12967 - protein, 502 aa, Glycine max
MHAMEFLTLSVTVAAAAFSILFFFLRHAGAGAGSLPPVPAVPGLPVIGNLLQLKEKKPYKTFTQMAHKHGPIYSIRTGASTLIVLNSPLLAKEAMVTRFSSISTRKLSNALKILTSDKCMVATSDYNEFHKTVKRHILTNFLGANAQKRHHIHREAMMENILSQFSEHVKTFSDLAVNFRKIFVTQLFGLALKQALGSNVETIYVEELGSTLSKEDIYKILVVDIMEGAIEVDWRDFFPYLKWIPNRRLEMKIQNLYVRRKAVMKALMNEQKNRMASGKEVNCYFDYLVSEAKELTEDQISMLIWETIIETSDTTLVTTEWAMYELAKDKTRQDRLYEELQYVCGHENVIEDQLSKLPYLGAVFHETLRKHSPAPIVPLRYAHEDTQLGGYHIPAGSEIAINIYGCNMDNNLWENPNEWMPERFLDEKYDHMDLYKTMAFGAGKRVCAGSLQAMLIACTAIGRLVQQFEWELGQGEEENVDTMGLTTRKLHPLLVKLKPRIK

SEQ ID NO: 12968 - DNA, 1548 bp, Glycine max
  CDS (1)..(1548)
atggccaacctcgacctcgacccattccagacaagcatcttaatcctcgtcccaatagcactcctggtggcgttactatctcgtactcgtcgaagagcaccctacccaccaggcccaaagggtttaccaatcataggaaacatgttaatgatggagcagctaacccaccgcggcctcgccaacctggccaaacactacggcggcatcttccacctccgcatggggttcctccacatggtcgccatctccgaccccgtcgccgcgcgtcaggttctccaagtccaagacaacatcttctccaaccgcccagccaccatcgccatcagctaccttacctacgaccgcgccgacatggcttttgcccactacggccccttctggcgccagatgcggaaactctgcgtcatgaagctcttcagccgcaagcgcgccgagtcctggcagtcagtccgcgatgaggtcgacgccgccgttcgcgccgtcgctagcagcgtcggaaaacccgtcaacattggagaattagtgtttaacctcaccaagaacatcatctaccgcgccgcgttcgggtcgagttcccaagaaggccaagacgagttcattaaaatattgcaggagttctccaagctctttggcgcgtttaatattgcggattttataccctatctcgggtgcgtggatccacaaggtttgaactcgagactcgctagggcacgtggcgcgctcgatagcttcattgataagatcatcgacgagcacgtgcataagatgaagaatgataagagcagtgaaattgttgatggagaaacggacatggtggatgagttgctggcgttctacagcgaagaggcgaagttgaacaatgaatcggacgatttgcagaactctatcagactcactaaggataacatcaaggctatcattatggacgtgatgttcggaggcacggaaacggtagcgtcagcgatcgagtgggccatggcggagctcatgagaagcccagaagatcaaaagcgggtccaacaagagctggcggatgtagtgggcctggaccgtcgggccgaagagtccgatttcgagaaactcacttatctcaaatgtgccctcaaagagaccctccgcctccaccctccgatcccgctcctcctccacgagacggcggaggacgcgacggtcggcggctacttcgtccccaggaaggcgcgtgttatgatcaacgcgtgggccattgggagggacaagaattcctgggaggaacccgaaacttttaagcccgcccggttccttaaaccgggcgtgcccgatttcaaggggagcaacttcgagttcattccattcgggtcgggtcgaagatcctgccccggaatggtgttggggctctacgcgcttgaattggcggtggctcatcttcttcactgcttcacgtgggaattgccagatggaatgaaaccaagtgagatggacatgggtgacgtgttcggactcaccgctccaaggtccacgcgactcattgctgtaccaaccaagcgcgtggtgtgccctctcttttaa

SEQ ID NO: 12969 - protein, 515 aa, Glycine max
MANLDLDPFQTSILILVPIALLVALLSRTRRRAPYPPGPKGLPIIGNMLMMEQLTHRGLANLAKHYGGIFHLRMGFLHMVAISDPVAARQVLQVQDNIFSNRPATIAISYLTYDRADMAFAHYGPFWRQMRKLCVMKLFSRKRAESWQSVRDEVDAAVRAVASSVGKPVNIGELVFNLTKNIIYRAAFGSSSQEGQDEFIKILQEFSKLFGAFNIADFIPYLGCVDPQGLNSRLARARGALDSFIDKIIDEHVHKMKNDKSSEIVDGETDMVDELLAFYSEEAKLNNESDDLQNSIRLTKDNIKAIIMDVMFGGTETVASAIEWAMAELMRSPEDQKRVQQELADVVGLDRRAEESDFEKLTYLKCALKETLRLHPPIPLLLHETAEDATVGGYFVPRKARVMINAWAIGRDKNSWEEPETFKPARFLKPGVPDFKGSNFEFIPFGSGRRSCPGMVLGLYALELAVAHLLHCFTWELPDGMKPSEMDMGDVFGLTAPRSTRLIAVPTKRVVCPLF

SEQ ID NO: 12970 - DNA, 1530 bp, Glycine max
  CDS (1)..(1530)
atggctctgcttctgatagtacccatttcactggtaaccctctggctcggttacaccctataccagcggctacgcttcaagctccctcctggcccacggccctggccggtagtcggtaacctctacgacataaaacccgtccggttccggtgcttcgctgagtgggcgcagtcttacggccctatcatatcggtctggttcggttcgaccctaaacgtcatcgtttcaaactcggagttggccaaggaggttctgaaggagcacgatcagcagctggcggaccggcaccggagccggtcggcggcgaagttcagccgcgacgggaaggatctcatttgggccgattatgggccgcactacgtgaaggtgaggaaggtttgcacgctcgagcttttctcgccgaagcgcctcgaggccctgaggcccattagggaggacgaggtcacctccatggttgactccgtttacaatcactgcaccagcactgaaaatttggggaaaggaatattgttgaggaagcacttgggggttgtggcattcaacaacataaccaggttggcatttgggaaaagatttgtgaactcagaaggtgttatggatgagcaaggagtagaattcaaggccattgtggaaaatgggttaaagctaggagcatctctagccatggcagaacacatcccttggctgcgctggatgttcccactggaagaaggagcttttgccaagcatggagcccgccgcgaccgactcaccagagccatcatgacggagcacactgaagcacgcaagaaatctggtggtgccaagcaacattttgttgatgccctcctcacattgcaagacaagtatgaccttagtgaagacaccatcattggtctcctttgggatatgatcacagcagggatggacacaactgcaatttcagttgagtgggccatggctgagttgataagaaacccaagggtgcaacaaaaggtccaagaggagctagacagggtaattgggcttgaaagggtgatgactgaagcagacttctcaaacctgccttatctacaatgtgtgatcaaagaagcaatgaggcttcacccaccaaccccactaatgctcccacaccgtgccaatgccaatgtcaaagttggaggctatgacattcccaaagggtccaatgtgcatgtgaatgtgtgggcggtggcccgtgacccggccgtgtggaaggatccgttggagttccgacccgaaaggttccttgaggaggatgtagacatgaagggccatgactttaggctacttccattcgggtcgggtcgacgagtatgcccgggtgcccaacttggtatcaacttggcagcatccatgttgggccacctcttgcaccatttctgttggaccccacctgaaggaatgaagcctgaggaaattgacatgggagagaatccagggctagtcacatacatgaggactccaatacaagctgtggtttctcctaggctcccctcacatttatacaaacgtgtgcctgctgagatctaa

SEQ ID NO: 12971 - protein, 509 aa, Glycine max
MALLLIVPISLVTLWLGYTLYQRLRFKLPPGPRPWPVVGNLYDIKPVRFRCFAEWAQSYGPIISVWFGSTLNVIVSNSELAKEVLKEHDQQLADRHRSRSAAKFSRDGKDLIWADYGPHYVKVRKVCTLELFSPKRLEALRPIREDEVTSMVDSVYNHCTSTENLGKGILLRKHLGVVAFNNITRLAFGKRFVNSEGVMDEQGVEFKAIVENGLKLGASLAMAEHIPWLRWMFPLEEGAFAKHGARRDRLTRAIMTEHTEARKKSGGAKQHFVDALLTLQDKYDLSEDTIIGLLWDMITAGMDTTAISVEWAMAELIRNPRVQQKVQEELDRVIGLERVMTEADFSNLPYLQCVIKEAMRLHPPTPLMLPHRANANVKVGGYDIPKGSNVHVNVWAVARDPAVWKDPLEFRPERFLEEDVDMKGHDFRLLPFGSGRRVCPGAQLGINLAASMLGHLLHHFCWTPPEGMKPEEIDMGENPGLVTYMRTPIQAVVSPRLPSHLYKRVPAEI

SEQ ID NO: 12972 - DNA, 1566 bp, Glycine max
  CDS (1)..(1566)
atgttgctggaacttgcacttggtttgtttgtgttagctttgtttctgcacttgcgtcccacaccaagtgcaaaatcaaaagcacttcgccacctcccaaaccctccaagcccaaagcctcgtcttcccttcattggccaccttcacctcttaaaagataaacttctccactatgcactcatcgatctctccaaaaagcatggccccttattctctctctccttcggctccatgccaaccgtcgttgcctccacccctgagttgttcaagctcttcctccaaacccacgaggcaacttccttcaacacaaggttccaaacctctgccataagacgcctcacttacgacaactctgtggccatggttccattcggaccttactggaagttcgtgaggaagctcatcatgaacgaccttctcaacgccaccaccgtcaacaagctcaggcctttgaggacccaacagatccgcaagttccttagggttatggcccaaagcgcagaggcccagaagccccttgacgtcaccgaggagcttctcaaatggaccaacagcaccatctccatgatgatgctcggcgaggctgaggagatcagagacatcgctcgcgaggttcttaagatcttcggcgaatacagcctcactgacttcatctggcctttgaagtatctcaaggttggaaagtatgagaagaggattgatgacatcttgaacaagttcgaccctgtcgttgaaagggtcatcaagaagcgccgtgagatcgtcagaaggagaaagaacggagaagttgttgagggcgaggtcagcggggttttccttgacactttgcttgaattcgctgaggatgagaccatggagatcaaaatcaccaaggaccacatcaagggtcttgttgtcgactttttctcggcaggaacagactccacagcggtggcaacagagtgggcattggcagaactcatcaacaatcctaaggtgttggaaaaggctcgtgaggaggtctacagtgttgtgggaaaggacagacttgtggacgaagttgacactcaaaaccttccttacattagagcaatcgtgaaggagacattccgcatgcacccgccactcccagtggtcaaaagaaagtgcacagaagagtgtgagattaatggatatgtgatcccagagggagcattgattctcttcaatgtatggcaagtaggaagagaccccaaatactgggacagaccatcggagttccgtcctgagaggttcctagagacaggggctgaaggggaagcagggcctcttgatcttaggggacaacattttcaacttctcccatttgggtctgggaggagaatgtgccctggagtcaatctggctacttcgggaatggcaacacttcttgcatctcttattcagtgcttcgacttgcaagtgctgggtccacaaggacagatattgaagggtggtgacgccaaagttagcatggaagagagagccggcctcactgttccaagggcacatagtcttgtctgtgttccacttgcaaggatcggcgttgcatctaaactcctttcttaa

SEQ ID NO: 12973 - protein, 521 aa, Glycine max
MLLELALGLFVLALFLHLRPTPSAKSKALRHLPNPPSPKPRLPFIGHLHLLKDKLLHYALIDLSKKHGPLFSLSFGSMPTVVASTPELFKLFLQTHEATSFNTRFQTSAIRRLTYDNSVAMVPFGPYWKFVRKLIMNDLLNATTVNKLRPLRTQQIRKFLRVMAQSAEAQKPLDVTEELLKWTNSTISMMMLGEAEEIRDIAREVLKIFGEYSLTDFIWPLKYLKVGKYEKRIDDILNKFDPVVERVIKKRREIVRRRKNGEVVEGEVSGVFLDTLLEFAEDETMEIKITKDHIKGLVVDFFSAGTDSTAVATEWALAELINNPKVLEKAREEVYSVVGKDRLVDEVDTQNLPYIRAIVKETFRMHPPLPVVKRKCTEECEINGYVIPEGALILFNVWQVGRDPKYWDRPSEFRPERFLETGAEGEAGPLDLRGQHFQLLPFGSGRRMCPGVNLATSGMATLLASLIQCFDLQVLGPQGQILKGGDAKVSMEERAGLTVPRAHSLVCVPLARIGVASKLLS

SEQ ID NO: 12974 - DNA, 1524 bp, Glycine max
  CDS (1)..(1524)
atgtcggttcacactcaagcttcaagcatgactcctttttacttcctcctatttgccttcatccttttcctctccataaacttcttgatccaaacaagaaggttcaaaaaccttcctccgggaccattttctttccctataatcggaaacctccaccaactcaagcaacccctccaccgcacgttccatgccttatcacaaaaatatggccctattttctccctctggttcggctcccgttttgtcgtcgtcgtttcgtcgccgctcgcggtgcaagaatgcttcaccaagaacgacatcgtcttggccaaccgccctcacttcctcaccggcaagtatatagggtacaacaacaccaccgtcgccgtttccccctacggcgaccactggcgcaacctccgccgcatcatggcgctcgaggttctctccacccaccggataaactccttcttggaaaatcggagggacgagatcatgcggctcgagcaaaagcttgctcgggactcgcgcaatggcttcaccaaagtagaacttaaatccaggttttcggagatgacatttaacactataatgaggatggtgtcagggaagaggtactatggtgaagactgtgatgtgagtgatgtacaggaagcaaggcaatttagagagatcattaaagagttggtgacgttaggaggggctaataaccctggggacttcttggctttgcttaggtggtttgattttgatggtttggagaagagactaaagaggattagtaagagaaccgatgcgtttttacaaggactcattgatcagcatcgtaatggaaagcatcgtgccaatactatgatagatcatcttcttgctcaacagcaatcacaacctgaatattacaccgatcaaatcatcaaaggacttgcactggtaatgctacttgcaggaacagatacatcagcagtaactttagaatgggcaatgtctaatttattaaaccatccagaaatattaaagaaggcaaaaaatgaattagacactcatataggacaagatcgtctagtagatgagcctgacattccaaaactcccttaccttcaaagcattgtttatgagacacttcgtttgcatcctgctgctccaatgttggtaccccatttgtcttcagaagattgcaccataggagaatataatatcccacaaaacacaattttgttggtgaatgcttgggccattcatagagatcccaagttgtggagtgacccaacacactttaagcctgagaggtttgagaatgaaagtgaagcaaacaagttacttccatttgggttagggaggagggcttgccctggagctaacttggctcaacgcacactgagcttaactctggccttattaatccaatgttttgagtggaaaaggactactaaaaaagaaattgatatgactgaaggaaagggacttactgtgtcaaaaaaatatcccttagaagctatgtgccaagtgtgccaatcactgacagttaaggatatttataacttctag

SEQ ID NO: 12975 - protein, 507 aa, Glycine max
MSVHTQASSMTPFYFLLFAFILFLSINFLIQTRRFKNLPPGPFSFPIIGNLHQLKQPLHRTFHALSQKYGPIFSLWFGSRFVVVVSSPLAVQECFTKNDIVLANRPHFLTGKYIGYNNTTVAVSPYGDHWRNLRRIMALEVLSTHRINSFLENRRDEIMRLEQKLARDSRNGFTKVELKSRFSEMTFNTIMRMVSGKRYYGEDCDVSDVQEARQFREIIKELVTLGGANNPGDFLALLRWFDFDGLEKRLKRISKRTDAFLQGLIDQHRNGKHRANTMIDHLLAQQQSQPEYYTDQIIKGLALVMLLAGTDTSAVTLEWAMSNLLNHPEILKKAKNELDTHIGQDRLVDEPDIPKLPYLQSIVYETLRLHPAAPMLVPHLSSEDCTIGEYNIPQNTILLVNAWAIHRDPKLWSDPTHFKPERFENESEANKLLPFGLGRRACPGANLAQRTLSLTLALLIQCFEWKRTTKKEIDMTEGKGLTVSKKYPLEAMCQVCQSLTVKDIYNF

SEQ ID NO: 12976 - DNA, 1572 bp, Glycine max
  CDS (1)..(1572)
atgacaagccacattgacgacaacctctggataatagccctgacctcgaaatgcacccaagaaaaccttgcatgggtccttttgatcatgggctcactctggttaaccatgactttctattactggtcacaccccggtggtcctgcctggggcaagtactacacctactctccccccctttcaatcattcccggtcccaaaggcttccctcttattggaagcatgggcctcatgacttccctggcccatcaccgtatcgcagccgcggccgccacatgcagagccaagcgcctcatggcctttagtctcggcgacacacgtgtcatcgtcacgtgccaccccgacgtggccaaggagattctcaacagctccgtcttcgccgatcgtcccgtcaaagaatccgcatacagcctcatgtttaaccgcgccatcggcttcgcctcttacggagtttactggcgaagcctcaggagaatcgcctctaatcacttcttctgcccccgccagataaaagcctctgagctccaacgctctcaaatcgccgcccaaatggttcacatcctaaataacaagcgccaccgcagcttacgtgttcgccaagtgctgaaaaaggcttcgctcagtaacatgatgtgctccgtgtttggacaagagtataagctgcacgacccaaacagcggaatggaagaccttggaatattagtggaccaaggttatgacctgttgggcctgtttaattgggccgaccaccttccttttcttgcacatttcgacgcccaaaatatccggttcaggtgctccaacctcgtccccatggtgaaccgtttcgtcggcacaatcatcgctgaacaccgagctagtaaaaccgaaaccaatcgtgattttgttgacgtcttgctctctctcccggaacctgatcaattatcagactccgacatgatcgctgtactttgggaaatgatattcagaggaacggacacggtagcggttttgatagagtggatactcgcgaggatggcgcttcatcctcatgtgcagtccaaagttcaagaggagctagatgcagttgtcggaaaagcacgcgccgtcgcagaggatgacgtggcagtgatgacgtacctaccagcggtggtgaaggaggtgctgcggctgcacccgccgggcccacttctatcatgggcccgcttgtccatcaatgatacgaccattgatgggtatcacgtacctgcggggaccactgctatggtcaacacgtgggctatttgcagggacccacacgtgtggaaggacccactcgaatttatgcccgagaggtttgtcactgcgggtggagatgccgaattttcgatactcgggtcggatccaagacttgctccatttgggtcgggtaggagagcgtgcccagggaagactcttggatgggctacggtgaacttttgggtggcgtcgctcttgcatgagttcgaatgggtaccgtctgatgagaagggtgttgatctgacggaggtgctgaagctctctagtgaaatggctaaccctctcaccgtcaaagtgcgccccaggcgtggataa

SEQ ID NO: 12977 - protein, 523 aa, Glycine max
MTSHIDDNLWIIALTSKCTQENLAWVLLIMGSLWLTMTFYYWSHPGGPAWGKYYTYSPPLSIIPGPKGFPLIGSMGLMTSLAHHRIAAAAATCRAKRLMAFSLGDTRVIVTCHPDVAKEILNSSVFADRPVKESAYSLMFNRAIGFASYGVYWRSLRRIASNHFFCPRQIKASELQRSQIAAQMVHILNNKRHRSLRVRQVLKKASLSNMMCSVFGQEYKLHDPNSGMEDLGILVDQGYDLLGLFNWADHLPFLAHFDAQNIRFRCSNLVPMVNRFVGTIIAEHRASKTETNRDFVDVLLSLPEPDQLSDSDMIAVLWEMIFRGTDTVAVLIEWILARMALHPHVQSKVQEELDAVVGKARAVAEDDVAVMTYLPAVVKEVLRLHPPGPLLSWARLSINDTTIDGYHVPAGTTAMVNTWAICRDPHVWKDPLEFMPERFVTAGGDAEFSILGSDPRLAPFGSGRRACPGKTLGWATVNFWVASLLHEFEWVPSDEKGVDLTEVLKLSSEMANPLTVKVRPRRG

SEQ ID NO: 12978 - DNA, 1575 bp, Glycine max
  CDS (1)..(1575)
atgttgcacatggaaaaccccctcctgcagtcaacaaactcaattaccttcacattctttgggctgttgttatttctctttgttctttcatccatattcagaaaccgcggtgctgcaacaagaaaagcaccaccagaagcaagaggcgcgtggcctttaattggtcacatccacctcttaggtggctcaaaaccaccccatgtcacgttgggccacatggcggacaaatatggtcccgtcttcaccttgcgtctgggtgctcacaaaacgttggttgtgagcaattgggaaatggccaaacagtgctttaccgtcaacgacaaagcgtttgctagccgtcctaaatcagtgtcctttgaattgttgggatacaactattccatgattgggttcatcccttacggttcttattggcgtcacgtgcgcaaaattatcacgctggagcttctctctactcactgcatagacatgctcaagcacgtgatggtggccgaggttaaggcggcagtgaaagagacttacaagaacctaaagggttccgaaaaggcaacaactgaaatgaagaggtggttcggggacataacgttaaacgttatgttcagaacggtggtaggaaaacgttttgttggtgagaatgaagagaacgaacggatccgaaaggcgctgagagaattttttgacctgacgggggcgttcaatgtgtctgatgctcttccttatttgagatggttggatttggatggtgcagagaagaaaatgaaaaagacggcgaaagagttagatgggtttgttcaagtttggctggaagaacacaaaagtaaaaggaatagtgaagctgaacccaaaagtaaccaggacttgatggacgtgcttcttagccttgttgaggagggtcaagagtttgacggccaggatgctgacaccacaatcaaagctacttgcctgggcttaattttagctggctctgatacgacaacaacaacattgtcttgggctctctcattacttctcaataatcgtgaagtcctaaataaggcaatccacgaattagacacacaaattgggagtgaaaaaattgtagagatatcagacttaaaaaagctagaatatctccaatctatcatcaaggaaacattacgtttgtacccagctgcaccacttaatgtgccacacgagtccttagaagattgcaccgtgggtggatatcatgtaccaactggcacgcgtctgttgactaatatttcaaaacttcaacgagacccttcattataccctaatccattagaattttggccagagagattcttgacaacccacaaggatgtagacatcaaaggtcaacattttgaattaattccatttggtgcaggtagaagaatgtgccctggactttctttcggtcttcaagtaatgcaactaacgcttgctactctattgcatgggtttgacattgtaactagtgatggggaacatgtcgatatgcttgaacaaattggactaaccaacattaaggcctctccactccaagtcattcttacaccacgtctttctggtcatatttatgatgaaatttaa

SEQ ID NO: 12979 - protein, 524 aa, Glycine max
MLHMENPLLQSTNSITFTFFGLLLFLFVLSSIFRNRGAATRKAPPEARGAWPLIGHIHLLGGSKPPHVTLGHMADKYGPVFTLRLGAHKTLVVSNWEMAKQCFTVNDKAFASRPKSVSFELLGYNYSMIGFIPYGSYWRHVRKIITLELLSTHCIDMLKHVMVAEVKAAVKETYKNLKGSEKATTEMKRWFGDITLNVMFRTVVGKRFVGENEENERIRKALREFFDLTGAFNVSDALPYLRWLDLDGAEKKMKKTAKELDGFVQVWLEEHKSKRNSEAEPKSNQDLMDVLLSLVEEGQEFDGQDADTTIKATCLGLILAGSDTTTTTLSWALSLLLNNREVLNKAIHELDTQIGSEKIVEISDLKKLEYLQSIIKETLRLYPAAPLNVPHESLEDCTVGGYHVPTGTRLLTNISKLQRDPSLYPNPLEFWPERFLTTHKDVDIKGQHFELIPFGAGRRMCPGLSFGLQVMQLTLATLLHGFDIVTSDGEHVDMLEQIGLTNIKASPLQVILTPRLSGHIYDEI

SEQ ID NO: 12980 - DNA, 1551 bp, Glycine max
  CDS (1)..(1551)
atggcgtggacttcagaacatccttcactctttctcctactcctgtctctgcctctacacctcttcctcttactcctccgccgccgcaacagcaaaacctcatcctcaaaccatcgtcttccgccgggaccaccgggctggccagtcttcggaaacatgttccagctcggagacatgcctcaccgcaccctcaccaatctaagggacaagttcggccccgtggtgtggctcaaaatcggcgccatgaacaccatggcgattctctccgccgaagccgccaccgtgttcttcaagcaccacgaccacgccttcgcggaccgaaccataaccgaaatcatgcgtgtccacaactacgacaagtcatccctggccctcgccccttatggcccttactggcgcctcatgcggcgcctcgtgaccgtggacatgctcgttccaaaacgcataaacgacaccgcatccatccgtcggaaatgcgtaaacgacatgatcaactgggtggcgaaagaagcgagcaagtcagaacatggtcgtggggtccacgtgtcgcgttttgttttcctgatgacgtttaacttgttcgggaacctgatgctgtcacgggacttgtttgacccggaatccgaagacgggtcggagtttttcagcgcgatgatggggctgatggagtggacggggcacgctaacgtgaccgacctgtttccgtggctgagttggctggatccgcagggactgaggaggaagatggacagggacatggggaaggcgctgggaatcgcgtccaggttcgtgaaacagcgtttggaacagcagctgcaccgtggcaccaacaagtcaagggacttcttggatgtcttgattgactttcaaagcaccaacagtcaagaagcactcaacgtttcagataaagatctcaacattttcatattggaaatgttcttggctgggtcagaaacaacgagcagcacaatagagtgggccatgacggagcttctgtgcaaccgggagtgtctgttgaaggtgaaaagggagctgagttgggtggttgggtgcggaagaaaagttgaagagagcgacatagacaagcttccgtacctgcaaggtgtggttaaggaaacacttcgcttacatcctccgattccgttgcttgtccctcgcaaggccacggaggacacagagttcatgggatattacatacccaaagacacgcaggttttcgtgaacgcgtgggcgattgggagagaccccagcgcctgggatgaaccattggtcttcaagcccgagcgattttctgagaataataatattgattacaaggggcaccacttcgagtttattccgttcggggctggaagaagaatgtgtgcgggtgtgcctttggcgcatagagtgcttcacttggtgctgggatcattgcttcaccgtttcgattgggaacttgactgccacgtcacgccctccaccatggacatgagggacaagctcggcataaccatgcgaaagtttcagcccttgctcgccgtcccaaaattaattgtctcttcctcctga

SEQ ID NO: 12981 - protein, 516 aa, Glycine max
MAWTSEHPSLFLLLLSLPLHLFLLLLRRRNSKTSSSNHRLPPGPPGWPVFGNMFQLGDMPHRTLTNLRDKFGPVVWLKIGAMNTMAILSAEAATVFFKHHDHAFADRTITEIMRVHNYDKSSLALAPYGPYWRLMRRLVTVDMLVPKRINDTASIRRKCVNDMINWVAKEASKSEHGRGVHVSRFVFLMTFNLFGNLMLSRDLFDPESEDGSEFFSAMMGLMEWTGHANVTDLFPWLSWLDPQGLRRKMDRDMGKALGIASRFVKQRLEQQLHRGTNKSRDFLDVLIDFQSTNSQEALNVSDKDLNIFILEMFLAGSETTSSTIEWAMTELLCNRECLLKVKRELSWVVGCGRKVEESDIDKLPYLQGVVKETLRLHPPIPLLVPRKATEDTEFMGYYIPKDTQVFVNAWAIGRDPSAWDEPLVFKPERFSENNNIDYKGHHFEFIPFGAGRRMCAGVPLAHRVLHLVLGSLLHRFDWELDCHVTPSTMDMRDKLGITMRKFQPLLAVPKLIVSSS

SEQ ID NO: 12982 - DNA, 1530 bp, Glycine max
  CDS (1)..(1530)
atggctctattattcttctactttttggttcttatttcctttgccttcacaaccattatagtacaaaaaataagaaagaaacccaagaaaactgatgacacaacttgtaaaataccccatggtcctagaaagctacctattataggaaatatatacaatctgctatgctctcaaccccatagaaaattaagagacctggccataaaatatggacccgtgatgcatcttcaacttggacaggtttcaactattgtcatttcatcccctgagtgtgctagggaagtgatgaaaacccatgacattaactttgccacaaggcctaaagttctagctattgaaataatgtcttacaattccacaagtatagcttttgctggctatggaaattattggaggcagctaagaaaaatatgcacattggagcttttaagcctaaaacgcgtcaactcattccagccaattagagaagatgagctcttcaatcttgtcaaatggattgattcaaagaaaggatcccccatcaacctcactgaagcagtacttacatcaatttacacaattgcttcaagggctgcctttggcaagaattgcaaagaccaagaaaaatttatatcagtggttaaaaaaacatcaaaacttgctgcaggttttggcattgaagatttgtttccttctgttacttggcttcaacatgtcactggcttgagggctaagcttgagaggttgcatcaacaggctgatcagataatggaaaacatcatcaatgagcataaagaggcaaattcgaaagccaaggatgaccaaagtgaagcagaagaagatcttgtggatgttctcatacaatatgaggatgggagcaagaaggatttttccttaactagaaacaagatcaaggccataattctggacatttttgctgctggaggtgagacaacagcaacaaccatagattgggcaatggctgaaatggtaaagaatccaacagtaatgaagaaagcacaatctgaggtgagagaggtatgcaatatgaaagcaagggttgatgaaaattgcatcaatgaacttcaatatttgaaactaattgtgaaagagaccttgaggttgcaccctccagctcctcttttgctgccaagagaatgtggtcaaacatgtgagatacatggttatcacataccagccaaaaccaaggtcatagtcaatgcctgggcaattggaagagatccaaactattggactgaatcagagaggttttatcctgagaggttcattgatagcactattgactacaaagggagtaattttgagttcattccttttggtgctggaagaaggatatgcgcaggaagcacatttgctttgagagctgcggaactagcccttgcaatgttgttgtatcactttgattggaagcttccaagtggaatgagaagtggagaactggacatgagtgaggattttggagtcacaactataagaaaagataatctattcttggttccttttccatatcatcctttgcctgtctcatga

SEQ ID NO: 12983 - protein, 509 aa, Glycine max
MALLFFYFLVLISFAFTTIIVQKIRKKPKKTDDTTCKIPHGPRKLPIIGNIYNLLCSQPHRKLRDLAIKYGPVMHLQLGQVSTIVISSPECAREVMKTHDINFATRPKVLAIEIMSYNSTSIAFAGYGNYWRQLRKICTLELLSLKRVNSFQPIREDELFNLVKWIDSKKGSPINLTEAVLTSIYTIASRAAFGKNCKDQEKFISVVKKTSKLAAGFGIEDLFPSVTWLQHVTGLRAKLERLHQQADQIMENIINEHKEANSKAKDDQSEAEEDLVDVLIQYEDGSKKDFSLTRNKIKAIILDIFAAGGETTATTIDWAMAEMVKNPTVMKKAQSEVREVCNMKARVDENCINELQYLKLIVKETLRLHPPAPLLLPRECGQTCEIHGYHIPAKTKVIVNAWAIGRDPNYWTESERFYPERFIDSTIDYKGSNFEFIPFGAGRRICAGSTFALRAAELALAMLLYHFDWKLPSGMRSGELDMSEDFGVTTIRKDNLFLVPFPYHPLPVS

SEQ ID NO: 12984 - DNA, 1560 bp, Glycine max
  CDS (1)..(1560)
atgggtatccttgttcttctttctctattgtctatagtcatctccattgttctcttcattacccacacacacaaaagaaacaacactccaagaggaccaccaggtcctccacctcttcctctcatcggcaaccttcaccaactccacaactcatccccacatctctgcctatggcaactcgccaaactccacggtcctctcatgtcgtttcgcctcggcgccgtgcaaaccgtcgtggtttcatcggccagaatcgccgaacaaatcttgaaaacccacgacctcaacttcgcttccaggcctctcttcgtgggcccgagaaagctctcttacgacgggttggacatgggcttcgcaccgtacggcccgtactggagagaaatgaagaaactctgcatcgttcacctcttcagcgcgcaacgcgttcggtcctttcgaccaattcgagagaacgaggttgcaaaaatggttcggaaactgtcggaacacgaagcttcgggtactgtcgtgaacttgaccgaaactttgatgtctttcacgaactctttgatatgcagaatcgcgttggggaaaagttacggttgtgagtacgaggaagtagttgttgatgaggtactgggaaaccggaggagcaggttgcaggttctgctcaacgaggctcaagcgttgctttcggagtttttcttttcggattattttccgcctataggaaagtgggttgatagagtgacgggaattctatcgcggcttgataaaacgttcaaggagttggacgcgtgctacgaacgattcatctatgatcacatggattcggcaaagagtggtaaaaaagataatgacaacaaagaagtcaaagatattattgatattcttctccagctacttgatgatcgttccttcacctttgatctcactctcgaccacataaaagccgtgctcatgaacatctttatagcaggaacagacccgagttccgcgacaatagtttgggcaatgaatgcactgttgaagaatcccaatgtgatgagcaaggttcaaggagaagtgagaaatctattcggtgacaaagatttcataaacgaagatgatgtcgaaagccttccttatctcaaagcagtggtgaaggagacattaagattattcccaccttcaccactacttttgccaagggtaacaatggaaacatgcaacatagaagggtacgaaattcaagccaaaactatagtgcatgttaatgcatgggccatagcaagggaccctgagaattgggaagagcctgagaaatttttccccgaaaggttccttgagagttcgatggagttaaaggggaatgatgagtttaaggtgatcccgtttggttctggaaggagaatgtgtcctgcgaagcacatgggaattatgaatgttgagctttctcttgctaatctcattcacacgtttgattgggaagtggctaaagggttcgacaaggaagaaatgttggacacgcaaatgaaaccaggaataacgatgcacaagaaaagtgatctttacctagtggcaaagaaaccgacaacgtag

SEQ ID NO: 12985 - protein, 519 aa, Glycine max
MGILVLLSLLSIVISIVLFITHTHKRNNTPRGPPGPPPLPLIGNLHQLHNSSPHLCLWQLAKLHGPLMSFRLGAVQTVVVSSARIAEQILKTHDLNFASRPLFVGPRKLSYDGLDMGFAPYGPYWREMKKLCIVHLFSAQRVRSFRPIRENEVAKMVRKLSEHEASGTVVNLTETLMSFTNSLICRIALGKSYGCEYEEVVVDEVLGNRRSRLQVLLNEAQALLSEFFFSDYFPPIGKWVDRVTGILSRLDKTFKELDACYERFIYDHMDSAKSGKKDNDNKEVKDIIDILLQLLDDRSFTFDLTLDHIKAVLMNIFIAGTDPSSATIVWAMNALLKNPNVMSKVQGEVRNLFGDKDFINEDDVESLPYLKAVVKETLRLFPPSPLLLPRVTMETCNIEGYEIQAKTIVHVNAWAIARDPENWEEPEKFFPERFLESSMELKGNDEFKVIPFGSGRRMCPAKHMGIMNVELSLANLIHTFDWEVAKGFDKEEMLDTQMKPGITMHKKSDLYLVAKKPTT

SEQ ID NO: 12986 - DNA, 1530 bp, Glycine max
  CDS (1)..(1530)
atggcgctgcttctgataattcccatctcactggtcaccctctggctcggttacaccctataccagcgattaagattcaagctccctccgggtccacggccctggccggtagtcggtaacctctacgacataaaacccgtccgcttccggtgcttcgcggagtgggcgcagtcttacggccccataatatcggtttggttcggttcgaccctaaacgtcatcgtttcgaactcggagctggcgaaggaggtgctgaaggagcacgatcagctgctggcggaccgccaccggagccggtcggcggcgaagttcagccgcgacgggaaggatctaatttgggccgattatgggccgcactacgtgaaggtgaggaaggtttgcacgctcgagcttttctcgccgaagcgcctcgaggccctgaggcccattagggaggacgaggtcacctccatggttgactccgtttacaatcactgcaccagcactgaaaatttggggaaaggaatattgttgaggaagcacttgggggttgtggcattcaacaacataaccaggttggcatttgggaaaagatttgtgaactcagaaggtgtgatggatgagcaaggagtagaattcaaggccattgtggaaaatgggttaaagctaggagcatctctagccatggcagaacacatcccttggctgcgctggatgttcccactggaagaaggagcttttgccaagcatggagcccgccgcgaccgactcaccagagccatcatgacggagcacactgaagcacgcaagaaatctggtggtgccaagcaacattttgttgatgccctcctcacattgcaagacaaatatgaccttagtgaagacaccatcattggtctcctttgggatatgatcacagcagggatggacacaactgcaatttcagttgagtgggccatggctgagttgataagaaacccaagggtgcaacaaaaggtccaagaggagctagacagggtaattgggcttgaaagggtgatgactgaagcagacttctcaaatctcccttacctacaatgtgtgaccaaagaagcaatgaggcttcacccaccaaccccactaatgctcccacaccgtgccaatgccaatgtcaaagttggaggctatgacattcccaaagggtccaatgtgcatgtgaatgtgtgggcggtggcccgcgacccggccgtgtggaaggatccattggagttccgacccgaaaggttccttgaggaggatgtagacatgaagggccatgactttaggctacttccattcgggtcgggtcgacgagtatgcccgggtgcccaacttggtatcaacttggcagcatccatgttgggccacctcttgcaccatttctgttggaccccacctgaaggaatgaagcctgaggaaattgacatgggagagaatccagggctagtcacatacatgaggactccaatacaagctgtggtttctcctaggctcccctcacatttatacaaacgtgtgcctgctgagatctaa

SEQ ID NO: 12987 - protein, 509 aa, Glycine max
MALLLIIPISLVTLWLGYTLYQRLRFKLPPGPRPWPVVGNLYDIKPVRFRCFAEWAQSYGPIISVWFGSTLNVIVSNSELAKEVLKEHDQLLADRHRSRSAAKFSRDGKDLIWADYGPHYVKVRKVCTLELFSPKRLEALRPIREDEVTSMVDSVYNHCTSTENLGKGILLRKHLGVVAFNNITRLAFGKRFVNSEGVMDEQGVEFKAIVENGLKLGASLAMAEHIPWLRWMFPLEEGAFAKHGARRDRLTRAIMTEHTEARKKSGGAKQHFVDALLTLQDKYDLSEDTIIGLLWDMITAGMDTTAISVEWAMAELIRNPRVQQKVQEELDRVIGLERVMTEADFSNLPYLQCVTKEAMRLHPPTPLMLPHRANANVKVGGYDIPKGSNVHVNVWAVARDPAVWKDPLEFRPERFLEEDVDMKGHDFRLLPFGSGRRVCPGAQLGINLAASMLGHLLHHFCWTPPEGMKPEEIDMGENPGLVTYMRTPIQAVVSPRLPSHLYKRVPAEI

SEQ ID NO: 12988 - DNA, 1497 bp, Glycine max
  CDS (1)..(1497)
atgactcctttttacttcctcctatttgccttcatccttttcctctccataaacttcttgatccaaacaagaaggttcaaaaaccttcctccgggaccattttctttccctataatcggaaacctccaccaactcaagcaacccctccaccgcacgttccatgccttatcacaaaaatatggccctattttctccctctggttcggctcccgttttgtcgtcgtcgtttcgtcgccgctcgcggtgcaagaatgcttcaccaagaacgacatcgtcttggccaaccgccctcacttcctcaccggcaagtatatagggtacaacaacaccaccgtcgccgtttccccctacggcgaccactggcgcaacctccgccgcatcatggcgctcgaggttctctccacccaccggataaactccttcttggaaaatcggagggacgagatcatgaggctcgtgcaaaagcttgctcgggactcgcgcaatggcttcaccaaagtagaacttaaatccaggttttcggagatgacatttaacactataatgaggatggtgtcagggaagaggtactatggtgaagactgtgatgtgagtgatgtacaggaagcaaggcaatttagagagatcattaaagagttggtgacgttaggaggggctaataaccctggggacttcttggctttgcttaggtggtttgattttgatggtttggagaagagactaaagaggattagtaagagaaccgatgcgtttttacaaggactcattgatcagcatcgtaatggaaagcatcgtgccaatactatgatagatcatcttcttgctcaacagcaatcacaacctgaatattacaccgatcaaatcatcaaaggacttgcactggtaatgctacttgcaggaacagatacatcagcagtaactttagaatgggcaatgtctaatttattaaaccatccagaaatattaaagaaggcaaaaaatgaattagacactcatataggacaagatcgtctagtagatgagcctgacattccaaaactcccttaccttcaaagcattgtttatgagacacttcgtttgcatcctgctgctccaatgttggtaccccatttgtcttcagaagattgcaccataggagaatataatatcccacaaaacacaattttgttggtgaatgcttgggccattcatagagatcccaagttgtggagtgacccaacacactttaagcctgagaggtttgagaatgaaagtgaagcaaacaagttacttccatttgggttagggaggagggcttgccctggagctaacttggctcaacgcacactgagcttaactctggccttattaatccaatgttttgagtggaaaaggactactaaaaaagaaattgatatgactgaaggaaagggacttactgtgtcaaaaaaatatcccttagaagctatgtgccaagtgtgccaatcactgacagttaaggatatttataacttctag

SEQ ID NO: 12989 - protein, 498 aa, Glycine max
MTPFYFLLFAFILFLSINFLIQTRRFKNLPPGPFSFPIIGNLHQLKQPLHRTFHALSQKYGPIFSLWFGSRFVVVVSSPLAVQECFTKNDIVLANRPHFLTGKYIGYNNTTVAVSPYGDHWRNLRRIMALEVLSTHRINSFLENRRDEIMRLVQKLARDSRNGFTKVELKSRFSEMTFNTIMRMVSGKRYYGEDCDVSDVQEARQFREIIKELVTLGGANNPGDFLALLRWFDFDGLEKRLKRISKRTDAFLQGLIDQHRNGKHRANTMIDHLLAQQQSQPEYYTDQIIKGLALVMLLAGTDTSAVTLEWAMSNLLNHPEILKKAKNELDTHIGQDRLVDEPDIPKLPYLQSIVYETLRLHPAAPMLVPHLSSEDCTIGEYNIPQNTILLVNAWAIHRDPKLWSDPTHFKPERFENESEANKLLPFGLGRRACPGANLAQRTLSLTLALLIQCFEWKRTTKKEIDMTEGKGLTVSKKYPLEAMCQVCQSLTVKDIYNF

SEQ ID NO: 12990 - DNA, 1539 bp, Glycine max
  CDS (1)..(1539)
atggaagaagcctggttcataatcctagtctctctctgtgtctgcgttctcataagagtcatattattattcttccttcacaaaaaaaccctagccaccccaccaggccctcctcacatcccaatcatcacaagctttctatggctcaaaaaatccttcatagaactcgagccattcctccgaaccctcgccgccaaacacggtcctatcttcactctccgcataggatcacgccccgtcatattcatcgccaacagagccctggcccaccaagccctaatccaaaacggttccattttctccgatcgccccaaggccctccccgccgccaaaatcgtcagcagcaaccaacacaacatcaactccgccccctacggcgccacctggcgcgccctacgccgcaacctcgcctccgagatgctccacccctcacgcgtcatgtccttctccggtacccgcaagtgggtcctacacaccctcctcacgcgcctcaaatcagattcacaatccaacgattcaataaaagtcattaaccacttccaatactccatgttctgcttgcttgtgtttatgtgcttcggggaaagactcgacgatgggaaagtcagagacatcgagcgcgtgcagcgacaaatgctcctgcggtttagaaggttcaatgtcctcaatttctggcccagagtcacgcgcgttttgttcttcaaactatgggaggagttgctgagggttaggaaggagcaagaggacgtgttggttccgcttatcagagccaggaagcaaaggcgaggcactgaaggtggcggattaagagacgatgatggcttcgttgtttcctatgttgacacgttgttggatttggaattgcctgaggagaaacggaagctgaatgaagaggaactcgtgacgttgtgtagcgagtttttgaatgcgggtacggacacgacttcgacggcgttgcagtggataatggctaatttggtgaagtacccgcacgtgcaagagagggtggtggaggagattaaggaggtggttggtgagagagtgagagaagagagggaggtgaaagaagaagatttgcagaaactaccttatctgaaagctgtgattttggaagggttgaggcgtcacccacctggccactttgttttgccgcatgctgtcaccgaggacgtggtttttaatgattatttggttcctaagaatgggacagtgaatttcatggtggcggagatagggtgggaccctaaggtttgggaagatccaatggcgtttaagccagagaggtttatgaatgatgaagggtttgattttgatataactgggagtaaagagattaagatgatgccctttggtgcagggagaagaatttgccctggctataacttggctttgcttcatttggaatacttcgtggctaatttggtttggaattttgagtggaaggttcctgagggaggggatgtggatttttcggagaaacaggagtttactactgtcatgaaaaatgcattgcaggttcagctttctcctaggatatga

SEQ ID NO: 12991 - protein, 512 aa, Glycine max
MEEAWFIILVSLCVCVLIRVILLFFLHKKTLATPPGPPHIPIITSFLWLKKSFIELEPFLRTLAAKHGPIFTLRIGSRPVIFIANRALAHQALIQNGSIFSDRPKALPAAKIVSSNQHNINSAPYGATWRALRRNLASEMLHPSRVMSFSGTRKWVLHTLLTRLKSDSQSNDSIKVINHFQYSMFCLLVFMCFGERLDDGKVRDIERVQRQMLLRFRRFNVLNFWPRVTRVLFFKLWEELLRVRKEQEDVLVPLIRARKQRRGTEGGGLRDDDGFVVSYVDTLLDLELPEEKRKLNEEELVTLCSEFLNAGTDTTSTALQWIMANLVKYPHVQERVVEEIKEVVGERVREEREVKEEDLQKLPYLKAVILEGLRRHPPGHFVLPHAVTEDVVFNDYLVPKNGTVNFMVAEIGWDPKVWEDPMAFKPERFMNDEGFDFDITGSKEIKMMPFGAGRRICPGYNLALLHLEYFVANLVWNFEWKVPEGGDVDFSEKQEFTTVMKNALQVQLSPRI

SEQ ID NO: 12992 - DNA, 1542 bp, Glycine max
  CDS (1)..(1542)
atgtctccattgattgttgccttggctacaatcgcagcagcaatcctcatatatcgtataataaagttcataacacgcccatccctccccctcccaccgggccctaaaccatggcccatagtgggaaacttgccacacatgggcccggtgccgcaccactccctcgcggcgttggcccgcatccacggcccgttgatgcacctccgcctcggcttcgtcgatgtcgtggttgccgcgtcggcctcggtggcggaacagttcttgaagattcatgactctaatttcagcagccggccaccgaacgccggcgcgaaatatatagcttataactaccaagatctggtgtttgctccctacggcccacgctggcgattgctccggaaactcacctccgttcacctcttctccggcaaggccatgaatgaatttagacacttgcgtcaggaagaggtagctagattgacatgcaacttggcaagttcagacacaaaagcagtgaatttgggacaattattgaatgtatgcaccaccaacgcattagcgagggcaatgattggacgaagagtgtttaacgatggcaatggagggtgtgatcctagggctgatgagtttaaggctatggtgatggaggtgatggtgttggctggagttttcaacattggtgactttattccttccttggagtggctagaccttcaaggggtgcaagctaagatgaaaaaattacacaaaagatttgatgcatttttaaccagcattattgaggagcacaataacagttcttccaagaatgagaatcataagaatttcttgagtatcttattgtcacttaaagatgtgagggatgatcatggaaaccatctcactgataccgagattaaagcactacttctgaacatgtttacggcaggaactgacacatcatcaagcaccacagaatgggccattgcggaactaataaaaaacccacaaattttggccaaactccaacaagagttggacaccgttgtgggtcgagataggagtgtcaaagaagaggacttggcccacctcccatacttacaagctgttatcaaggaaaccttcagactccacccatcaacccctctttctgtgccacgtgctgctgccgagagttgtgagatatttggctaccacatccccaagggtgctacactcttggtgaacatttgggccatagcccgagacccaaaagagtggaatgacccattggagtttaggcccgaaaggtttcttctaggtggtgagaaggccgatgttgatgttaggggcaatgactttgaggtgataccttttggtgctggacgaagaatttgtgctggacttagtcttgggcttcaaatggttcaacttctcactgcagccttggcccattcatttgattgggaactagaagattgcatgaacccagaaaagttgaacatggatgaagcgtatgggctaaccctacaacgggccgtgcctctttcagtgcaccctaggcccaggctcgcaccacatgtgtactcaatgtcttcctaa

SEQ ID NO: 12993 - protein, 513 aa, Glycine max
MSPLIVALATIAAAILIYRIIKFITRPSLPLPPGPKPWPIVGNLPHMGPVPHHSLAALARIHGPLMHLRLGFVDVVVAASASVAEQFLKIHDSNFSSRPPNAGAKYIAYNYQDLVFAPYGPRWRLLRKLTSVHLFSGKAMNEFRHLRQEEVARLTCNLASSDTKAVNLGQLLNVCTTNALARAMIGRRVFNDGNGGCDPRADEFKAMVMEVMVLAGVFNIGDFIPSLEWLDLQGVQAKMKKLHKRFDAFLTSIIEEHNNSSSKNENHKNFLSILLSLKDVRDDHGNHLTDTEIKALLLNMFTAGTDTSSSTTEWAIAELIKNPQILAKLQQELDTVVGRDRSVKEEDLAHLPYLQAVIKETFRLHPSTPLSVPRAAAESCEIFGYHIPKGATLLVNIWAIARDPKEWNDPLEFRPERFLLGGEKADVDVRGNDFEVIPFGAGRRICAGLSLGLQMVQLLTAALAHSFDWELEDCMNPEKLNMDEAYGLTLQRAVPLSVHPRPRLAPHVYSMSS

SEQ ID NO: 12994 - DNA, 1596 bp, Glycine max
  CDS (1)..(1596)
atgcttcagtgtcaacccaaccaaactgaaccaaatcatcacacacacatactaagaagcaacaattcttctacaatggatctcctccttctggaaaagaccctcataggtctcttcctcgctgcggtggtcgccatcgccgtctccaccctccgcggccggaaattcaagctcccaccgggcccactccccgtcccaatcttcggcaactggctccaagtcggcgacgacctcaaccaccgcaacctcaccgatttggccaaaaaattcggtgacatcttcctcctccgcatggggcagcgcaacctcgtcgtggtttcttcccctgagctcgccaaagaggttctccacacgcagggcgtggagttcggctcccgcacccgcaacgtcgtcttcgacatcttcaccggaaagggccaagacatggtcttcaccgtctacggcgagcactggcgcaaaatgcgccgcatcatgaccgtccccttcttcaccaacaaggttgtgcaacaataccgccatggatgggaatcggaggctgccgccgtcgtcgaggacgtcaagaaaaaccccgacgccgccgtctccggcaccgtcatccgccgccgccttcagctcatgatgtacaacaacatgtaccgcataatgttcgaccggaggttcgagagcgaggaggatcccatcttccagaggctaagagccttgaacggagagaggagtcgcttggcgcagagctttgagtataactatggtgattttattcccatcttgagacccttcttgaagggttacttgaagatttgcaaggaggtgaaggagacgaggttgaagcttttcaaggattacttcgttgacgagaggaagaagcttggaagcaccaagagcaccaacaacaataatgaacttaaatgcgctattgaccacattttggatgcccagagaaaaggcgagatcaacgaagacaacgtcctctacattgttgaaaacatcaacgttgctgcaattgaaacaactctatggtcgattgagtggggcattgctgagcttgtgaaccacccagagatccagcaaaagttaagggatgagattgacagagttcttggagcagggcaccaagtgactgagccagacatccaaaagctcccatacctccaagcagtggtcaaggaaactcttcgtcttagaatggcaatccctctccttgtaccacacatgaacctccacgacgcaaagcttgggggctatgatatcccagctgagagcaagatcttggtgaatgcatggtggctggccaacaaccctgcacactggaagaagccagaggagttccggcctgagaggttcttcgaggaggagtcgcttgttgaagccaatggcaatgactttaggtaccttccctttggtgttggcagaagaagctgccctggaatcattcttgcattgccaattcttggcatcactttgggacgtttggtccaaaactttgagctcttgcctccccctggccagtcacagattgacactagtgagaaaggagggcaatttagcttgcacatactcaagcattccaccattgtggcaaagccaaggtcattttag

SEQ ID NO: 12995 - protein, 531 aa, Glycine max
MLQCQPNQTEPNHHTHILRSNNSSTMDLLLLEKTLIGLFLAAVVAIAVSTLRGRKFKLPPGPLPVPIFGNWLQVGDDLNHRNLTDLAKKFGDIFLLRMGQRNLVVVSSPELAKEVLHTQGVEFGSRTRNVVFDIFTGKGQDMVFTVYGEHWRKMRRIMTVPFFTNKVVQQYRHGWESEAAAVVEDVKKNPDAAVSGTVIRRRLQLMMYNNMYRIMFDRRFESEEDPIFQRLRALNGERSRLAQSFEYNYGDFIPILRPFLKGYLKICKEVKETRLKLFKDYFVDERKKLGSTKSTNNNNELKCAIDHILDAQRKGEINEDNVLYIVENINVAAIETTLWSIEWGIAELVNHPEIQQKLRDEIDRVLGAGHQVTEPDIQKLPYLQAVVKETLRLRMAIPLLVPHMNLHDAKLGGYDIPAESKILVNAWWLANNPAHWKKPEEFRPERFFEEESLVEANGNDFRYLPFGVGRRSCPGIILALPILGITLGRLVQNFELLPPPGQSQIDTSEKGGQFSLHILKHSTIVAKPRSF

SEQ ID NO: 12996 - DNA, 1569 bp, Glycine max
  CDS (1)..(1569)
atggagttagttctaaacagcacaacaattggagttggagttgtttctctgatcctcctcttgtacttgtttttgcgtggtggttcatggaagagtggggaagagggtcctccaacagttgcaggtgcatggccaataattggtcacctcccattgttgcttggttcaaagacacctcataaaacattgggtgacttggctgacaagtatggacccatattctcgatcaagattggtgccaaaaacgcagtggttgttagcaactgggaaatggctaaagaatgctacaccacaaacgacatcgccgtttcctccctccccgatcttatctccgctaacctcttgtgctacaaccgatccatgatagtcgtagcaccctacggtccctattggcgccaacttcgaaagattttaatgtctgagttcctatctccttcccgagtagagcaactacaccatgttcgcgtctctgaagttcaaagttccatcacggagctcttccgtgattggcgtagcaataagaatgtccagtctggctttgccactgtggagttgaagcaatggttctctcttcttgtcttcaacatgattctgcggatggtctgtgggaagcgctatttcagcgcttctacttcggatgatgagaaggcaaacagatgcgttaaggctgtggatgagttcgtgcgtctcgccgccaccttcaccgtgggagatgccattccttatcttagatggtttgactttggtggctatgagaatgatatgagagaaactgggaaggaattggacgagattattggcgagtggttagatgagcatcgacaaaaaagaaaaatgggtgagaacgttcaagacctcatgagcgtgttgctttccttgcttgaaggaaaaactattgagggcatgaatgttgatattgtcatcaaatcctttgtattgacagtaattcaagcaggaactgaggcaagcattactactcttatatgggcaacaagtttgatattgaataatcctagtgtactagaaaaacttaaagcagaactagacatccaagttggaaaagagagatacatatgtgagtctgatttaagtaagttaacatatcttcaagctgtagtcaaagaaactttaagattgtaccctccagctcctctctcaagacctcgtgagtttgaagaggattgcactataggtggctacactgtcaaaaagggaactcgtctaattacaaatctttccaagatccacacagatcataacgtttggtcaaatccattagagtttaaaccagaaaggttccttacgactgataaagatatagacatgaagggtcaacattttcagctattaccatttggaggtggtaggaggatttgtcctggaataaacttaggccttcaaacagttcgtttgacacttgctagttttttgcattcctttgaaatcttaaatccatcaactgagcctcttgatatgactgaagtctttagagcaaccaacactaaagccactccacttgagattcttattaaaccacgcctatctcctagttgttatgaaagtatctaa

SEQ ID NO: 12997 - protein, 522 aa, Glycine max
MELVLNSTTIGVGVVSLILLLYLFLRGGSWKSGEEGPPTVAGAWPIIGHLPLLLGSKTPHKTLGDLADKYGPIFSIKIGAKNAVVVSNWEMAKECYTTNDIAVSSLPDLISANLLCYNRSMIVVAPYGPYWRQLRKILMSEFLSPSRVEQLHHVRVSEVQSSITELFRDWRSNKNVQSGFATVELKQWFSLLVFNMILRMVCGKRYFSASTSDDEKANRCVKAVDEFVRLAATFTVGDAIPYLRWFDFGGYENDMRETGKELDEIIGEWLDEHRQKRKMGENVQDLMSVLLSLLEGKTIEGMNVDIVIKSFVLTVIQAGTEASITTLIWATSLILNNPSVLEKLKAELDIQVGKERYICESDLSKLTYLQAVVKETLRLYPPAPLSRPREFEEDCTIGGYTVKKGTRLITNLSKIHTDHNVWSNPLEFKPERFLTTDKDIDMKGQHFQLLPFGGGRRICPGINLGLQTVRLTLASFLHSFEILNPSTEPLDMTEVFRATNTKATPLEILIKPRLSPSCYESI

SEQ ID NO: 12998 - DNA, 1548 bp, Glycine max
  CDS (1)..(1548)
atggcaatagaattggcatctcccaattgggttccaaccgcagccgcatgtttggcagccttggccgccctcctcctcttcctcctccgcggtctccgccgccgtaaatacaatctccccccaggccccaagccctggcccatcataggcaacctaaacttaatcggctccctcccacaccagtcgattcacgcgctgagtaaaacatacgggcccatcatgcacgtgtggttcgggtcgaaccccgtcgtggtgggctcatccgtggacatggcgaaggccatcctcaaaacccacgatgccaccctcgccggcaggcccaaattcgcggcgggcaaatacacaacctacaactactcggacatcacttggtcccagtacggcccatactggcgccaggcccgtagaatgtgcctgatggaattattcagtgctaaacgcttagaagaatacgaatacattagaaaacaagagcttcgtggccttcttaacgaactcttcaattccgcaaacaaaacaattttactaaaagaccacctttccaaccttagcctcaacgttataagccgcatggtgttgggaaaaaagtaccttgaggaatccgaaaacgccgtcgtttcgcccgatgatttcaagaagatgcttgatgagttgtttttgcttaatggggtgtataacatcggggactttattccttggatggatttcttggacctgcagggttacataaagaggatgaaggctttgagcaagaagtttgatatgttcatggagcacgtcttggatgaacatattgagaggaagaaaggggttgaggattacgtggcaaaggacatggttgatgttcttttgcaacttgccgaggatcctactcttgaggtcaagcttgagaggcatggagtcaaggcttttacacaggatctaatagcaggtgggactgagagttcagcagtaacagtggaatgggcaatcacagagctattgagaaggccagagattttcaagaaggcaacagaggagctagacagggtaataggtagagaaagatgggttgaagagaaggacattgtaaatttgccttatgtgaatgccattgcaaaggaagcaatgaggctgcaccctgtggcaccaatgttggtgccaagactagccagagaggattgccaagttggagggtatgacatccccaaagggacacaagtgcttgtgaatgtgtggactattgggagagacccttcaatttgggacaaccctacagagttccaaccagagaggtttcttactaaggagattgatgttaaaggacatgactatgagctattgccatttggtgctgggagaaggatgtgccctggctaccctcttggccttaaggtcattcaagcaagtttggccaatttgttgcatggatttaactggagactgcctgataatgtcaagaatgaggatttgaatatggatgagatttttgggctctctacacctaagaaaataccactggaaactgttgttgagcctaggcttccacaccatctttattctctctga

SEQ ID NO: 12999 - protein, 515 aa, Glycine max
MAIELASPNWVPTAAACLAALAALLLFLLRGLRRRKYNLPPGPKPWPIIGNLNLIGSLPHQSIHALSKTYGPIMHVWFGSNPVVVGSSVDMAKAILKTHDATLAGRPKFAAGKYTTYNYSDITWSQYGPYWRQARRMCLMELFSAKRLEEYEYIRKQELRGLLNELFNSANKTILLKDHLSNLSLNVISRMVLGKKYLEESENAVVSPDDFKKMLDELFLLNGVYNIGDFIPWMDFLDLQGYIKRMKALSKKFDMFMEHVLDEHIERKKGVEDYVAKDMVDVLLQLAEDPTLEVKLERHGVKAFTQDLIAGGTESSAVTVEWAITELLRRPEIFKKATEELDRVIGRERWVEEKDIVNLPYVNAIAKEAMRLHPVAPMLVPRLAREDCQVGGYDIPKGTQVLVNVWTIGRDPSIWDNPTEFQPERFLTKEIDVKGHDYELLPFGAGRRMCPGYPLGLKVIQASLANLLHGFNWRLPDNVKNEDLNMDEIFGLSTPKKIPLETVVEPRLPHHLYSL

SEQ ID NO: 13000 - DNA, 1515 bp, Glycine max
  CDS (1)..(1515)
atgggaatgttgttggtggtggtctcacctttcttatcttactctgtccttttcctggttctattcctcactctgaagttccttttccaaagcagaaaattgagaaacctaccaccaggtcctcctcctcttcccataataggaaaccttaacctcctcgaacaacctatacaccgtttcttccaacgcatgtccaaacaatatggaaacatcgtttccctttggttcggttcacgtcttgccgttgtcatttcctcaccaacagcataccaagaatgcttcaccaaacacgacgttgccttggccaaccggctaccttctctctcgggaaaatacatattctacaacaacaccaccgtagggtcctgctcccacggcgagcactggcgcaacctccgccgcatcaccgccctggacgtcctctccacgcagcgcgtccactccttctccggaatccggagcgacgagacgaaaaggttgatacacaggctggccagggactccgggaaagattttgcgcgcgtggagatgacctccaagtttgctgacttgacgtacaacaacatcatgaggatgatttcggggaagcggttttacggagaagagagtgaacttaacaacgttgaggaagcgaaggagttcagagacactgtgaatgagatgctgcaactcatggggttggctaacaagggagatcacttacctttcctaaggtggttcgattttcagaacgtggagaagaggttgaagaatatcagtaagaggtatgataccatcttgaataagatccttgatgagaaccgtaacaacaaggaccgcgagaattccatgattggtcatctcctcaaactgcaagagacacagcctgactattataccgaccaaatcatcaaaggacttgctttggctatgctctttggcggaacagactcgtcaactggaactttagagtgggcattatctaatttagtgaatgacccagaggtgctgcagaaggcaagagatgagttggacgctcaagtaggaccagatcggctgttaaatgagtcagaccttccaaaacttccttatctcaggaagatagtccttgaaacacttaggttgtaccctccggctccaattctaataccacacgtggcttcagaagacatcaatatcgaaggattcaatgttccacgagacacaattgtgattattaatggttgggccatgcaaagagatcctaagatatggaaagatgcgacaagctttaaacctgagaggtttgatgaagaaggagaggagaagaagttggtagcatttggtatgggaagaagggcttgcccaggagaacccatggctatgcaaagtgttagctatactttgggattaatgattcaatgttttgactggaaacgagtaagtgagaagaagcttgatatgacagagaataattggatcaccttgtcaaggttaattccattggaggctatgtgtaaagcccgcccactcgccagcaaagttggaagttattaa

SEQ ID NO: 13001 - protein, 504 aa, Glycine max
MGMLLVVVSPFLSYSVLFLVLFLTLKFLFQSRKLRNLPPGPPPLPIIGNLNLLEQPIHRFFQRMSKQYGNIVSLWFGSRLAVVISSPTAYQECFTKHDVALANRLPSLSGKYIFYNNTTVGSCSHGEHWRNLRRITALDVLSTQRVHSFSGIRSDETKRLIHRLARDSGKDFARVEMTSKFADLTYNNIMRMISGKRFYGEESELNNVEEAKEFRDTVNEMLQLMGLANKGDHLPFLRWFDFQNVEKRLKNISKRYDTILNKILDENRNNKDRENSMIGHLLKLQETQPDYYTDQIIKGLALAMLFGGTDSSTGTLEWALSNLVNDPEVLQKARDELDAQVGPDRLLNESDLPKLPYLRKIVLETLRLYPPAPILIPHVASEDINIEGFNVPRDTIVIINGWAMQRDPKIWKDATSFKPERFDEEGEEKKLVAFGMGRRACPGEPMAMQSVSYTLGLMIQCFDWKRVSEKKLDMTENNWITLSRLIPLEAMCKARPLASKVGSY

SEQ ID NO: 13002 - DNA, 1533 bp, Glycine max
  CDS (1)..(1533)
atggcttttcaagtgttgttcatttgtttgatctcaaccatcgtgtttgcatccatactatggagaaaacaaaacaaaaacaagacccttcttccaccgagtccaatgcccctacccatcattggacacctccaccttctttctccaacacctcaccaagattttcacaagctctcactccgctatggacccataatacacctttttcttggttcagtcccctgtgtggtggcttccacagcagaagccgccaaagagttcctcaaaactcacgaacccgccttctccaaccgccccgctaacactgtcgccgtcgaaaccttaacctacgcgtcccaagacttcttgttcgcaccctacggaccctattggaagttcatgaagaaactctgcatgtccgaactcctcggtggccacatgctggaccagtttcttcccgtgagacagcaagagacaaaaaaattcatcaaacgtgtcctccaaaagggtatttctggtgaggccgtggattttgggggagagttcatcacgctctcgaacaacatcgtgtcgagaatgatcgtgagtcagacgagtactactgaggacgagaacgaagttgaagagatgaggaagctggtgaaggatgccgcagagctctcggggaagttcaacatatcggacttcgtttcgttcttgaagcgctttgatttgcaggggttcaacaagaggctcgagaagattcgggactgctttgacaccgtgttggacagaatcataaagcaacgtgaagaggaaagaaggaacaagaatgaaaccgttggaaaacgagaatttaaggatatgcttgatgttttgtttgacatatctgaagatgagagttctgaaattaaattaaacaaagaaaacattaaggccaacatcttggacatattaattgctgggactgacacctcagctgtaacgatggaatgggctatggcagagttaatcaacaatccaggtgtgttggagaaggcaagacaagaaatggatgcagtggttggaaagagtagaatagtagaagaatcagatattgccaaccttccttacttgcaaggcattgttagagaaacattaagacttcacccagctggtccattgctttttagagagtcatctagaagagctgtggtttgtgggtatgatattccagcaaagactcgattatttgtcaatgtttgggctattggtagggaccccaatcactgggagaaccctcttgagtttaggccagagaggtttgttgaaaatgggaagagtcaattggatgttaggggacaacattatcatctacttccgttcggtagtggaagaagagcatgtcctggtacttctttggcattgcaagttgtgcatgtgaatttggcagttctaattcagtgtttccaatggaaggttgactgtgacaatggcaaggtgaacatggaagaaaaggctggcatcactcttccgagggctcaccccataatttgtgtccctattcgaagacttaacccattccctgttgtgtga

SEQ ID NO: 13003 - protein, 510 aa, Glycine max
MAFQVLFICLISTIVFASILWRKQNKNKTLLPPSPMPLPIIGHLHLLSPTPHQDFHKLSLRYGPIIHLFLGSVPCVVASTAEAAKEFLKTHEPAFSNRPANTVAVETLTYASQDFLFAPYGPYWKFMKKLCMSELLGGHMLDQFLPVRQQETKKFIKRVLQKGISGEAVDFGGEFITLSNNIVSRMIVSQTSTTEDENEVEEMRKLVKDAAELSGKFNISDFVSFLKRFDLQGFNKRLEKIRDCFDTVLDRIIKQREEERRNKNETVGKREFKDMLDVLFDISEDESSEIKLNKENIKANILDILIAGTDTSAVTMEWAMAELINNPGVLEKARQEMDAVVGKSRIVEESDIANLPYLQGIVRETLRLHPAGPLLFRESSRRAVVCGYDIPAKTRLFVNVWAIGRDPNHWENPLEFRPERFVENGKSQLDVRGQHYHLLPFGSGRRACPGTSLALQVVHVNLAVLIQCFQWKVDCDNGKVNMEEKAGITLPRAHPIICVPIRRLNPFPVV

SEQ ID NO: 13004 - DNA, 1566 bp, Glycine max
  CDS (1)..(1566)
atgttgctggaacttgcacttggtttgtttgtgttagctttgtttctgcacttgcgtcccacaccaagtgcaaaatcaaaagcacttcgccacctcccaaaccctccaagcccaaagcctcgtcttcccttcattggccaccttcacctcttaaaagataaacttctccactatgcactcatcgatctctccaaaaagcatggccccttattctctctctccttcggctccatgccaaccgtcgttgcctccacccctgagttgttcaagctcttcctccaaacccacgaggcaacttccttcaacacaaggttccaaacctctgccataagacgcctcacttacgacaactctgtggccatggttccattcggaccttactggaagttcgtgaggaagctcatcatgaacgaccttctcaacgccaccaccgtcaacaagctcaggcctttgaggacccaacagatccgcaagttccttagggttatggcccaaagcgcagaggcccagaagccccttgacgtcaccgaggagcttctcaaatggaccaacagcaccatctccatgatgatgctcggcgaggctgaggagatcagagacatcgctcgcgaggttcttaagatcttcggcgaatacagcctcactgacttcatctggcctttgaagtatctcaaggttggaaagtatgagaagaggattgatgacatcttgaacaagttcgaccctgtcgttgaaagggtcatcaagaagcgccgtgagatcgtcagaaggagaaagaacggagaagttgttgagggcgaggccagcggcgtcttcctcgacactttgcttgaattcgctgaggacgagaccatggagatcaaaattaccaaggagcaaatcaagggccttgttgtcgactttttctctgcagggacagattccacagcggtggcaacagagtgggcattggcagagctcatcaacaatcccagggtgttgcaaaaggctcgtgaggaggtctacagtgttgtgggcaaagatagactcgttgacgaagttgacactcaaaaccttccttacattagggccattgtgaaggagacattccgaatgcacccaccactcccagtggtcaaaagaaagtgcacagaagagtgtgagattaatgggtatgtgatcccagagggagcattggttcttttcaatgtttggcaagtaggaagggaccccaaatactgggacagaccatcagaattccgtcccgagaggttcttagaaactggtgctgaaggggaagcagggcctcttgatcttaggggccagcatttccaactcctcccatttgggtctgggaggagaatgtgccctggtgtcaatttggctacttcaggaatggcaacacttcttgcatctcttatccaatgctttgacctgcaagtgctgggccctcaaggacaaatattgaaaggtgatgatgccaaagttagcatggaagagagagctggcctcacagttccaagggcacatagtctcgtttgtgttccacttgcaaggatcggcgttgcatctaaactcctttcttaa

SEQ ID NO: 13005 - protein, 521 aa, Glycine max
MLLELALGLFVLALFLHLRPTPSAKSKALRHLPNPPSPKPRLPFIGHLHLLKDKLLHYALIDLSKKHGPLFSLSFGSMPTVVASTPELFKLFLQTHEATSFNTRFQTSAIRRLTYDNSVAMVPFGPYWKFVRKLIMNDLLNATTVNKLRPLRTQQIRKFLRVMAQSAEAQKPLDVTEELLKWTNSTISMMMLGEAEEIRDIAREVLKIFGEYSLTDFIWPLKYLKVGKYEKRIDDILNKFDPVVERVIKKRREIVRRRKNGEVVEGEASGVFLDTLLEFAEDETMEIKITKEQIKGLVVDFFSAGTDSTAVATEWALAELINNPRVLQKAREEVYSVVGKDRLVDEVDTQNLPYIRAIVKETFRMHPPLPVVKRKCTEECEINGYVIPEGALVLFNVWQVGRDPKYWDRPSEFRPERFLETGAEGEAGPLDLRGQHFQLLPFGSGRRMCPGVNLATSGMATLLASLIQCFDLQVLGPQGQILKGDDAKVSMEERAGLTVPRAHSLVCVPLARIGVASKLLS

SEQ ID NO: 13006 - DNA, 1566 bp, Glycine max
  CDS (1)..(1566)
atgttgcttgaacttgcacttggtttattggttttggctctgtttctgcacttgcgtcccacacccactgcaaaatcaaaagcacttcgccatctcccaaacccaccaagcccaaagcctcgtcttcccttcataggacaccttcatctcttaaaagacaaacttctccactacgcactcatcgacctctccaaaaaacatggtcccttattctctctctactttggctccatgccaaccgttgttgcctccacaccagaattgttcaagctcttcctccaaacgcacgaggcaacttccttcaacacaaggttccaaacctcagccataagacgcctcacctatgatagctcagtggccatggttcccttcggaccttactggaagttcgtgaggaagctcatcatgaacgaccttctcaacgccaccactgtaaacaagttgaggcctttgaggacccaacagatccgcaagttccttagggttatggcccaaggcgcagaggcacagaagccccttgacttgaccgaggagcttctgaaatggaccaacagcaccatctccatgatgatgctcggcgaggctgaggagatcagagacatcgctcgcgaggttcttaagatctttggcgaatacagcctcactgacttcatctggccattgaagcatctcaaggttggaaagtatgagaagaggatcgacgacatcttgaacaagttcgaccctgtcgttgaaagggtcatcaagaagcgccgtgagatcgtgaggaggagaaagaacggagaggttgttgagggtgaggtcagcggggttttccttgacactttgcttgaattcgctgaggatgagaccatggagatcaaaatcaccaaggaccacatcaagggtcttgttgtcgactttttctcggcaggaacagactccacagcggtggcaacagagtgggcattggcagaactcatcaacaatcctaaggtgttggaaaaggctcgtgaggaggtctacagtgttgtgggaaaggacagacttgtggacgaagttgacactcaaaaccttccttacattagagcaatcgtgaaggagacattccgcatgcacccgccactcccagtggtcaaaagaaagtgcacagaagagtgtgagattaatggatatgtgatcccagagggagcattgattctcttcaatgtatggcaagtaggaagagaccccaaatactgggacagaccatcggagttccgtcctgagaggttcctagagacaggggctgaaggggaagcagggcctcttgatcttaggggacaacattttcaacttctcccatttgggtctgggaggagaatgtgccctggagtcaatctggctacttcgggaatggcaacacttcttgcatctcttattcagtgcttcgacttgcaagtgctgggtccacaaggacagatattgaagggtggtgacgccaaagttagcatggaagagagagccggcctcactgttccaagggcacatagtcttgtctgtgttccacttgcaaggatcggcgttgcatctaaactcctttcttaa

SEQ ID NO: 13007 - protein, 521 aa, Glycine max
MLLELALGLLVLALFLHLRPTPTAKSKALRHLPNPPSPKPRLPFIGHLHLLKDKLLHYALIDLSKKHGPLFSLYFGSMPTVVASTPELFKLFLQTHEATSFNTRFQTSAIRRLTYDSSVAMVPFGPYWKFVRKLIMNDLLNATTVNKLRPLRTQQIRKFLRVMAQGAEAQKPLDLTEELLKWTNSTISMMMLGEAEEIRDIAREVLKIFGEYSLTDFIWPLKHLKVGKYEKRIDDILNKFDPVVERVIKKRREIVRRRKNGEVVEGEVSGVFLDTLLEFAEDETMEIKITKDHIKGLVVDFFSAGTDSTAVATEWALAELINNPKVLEKAREEVYSVVGKDRLVDEVDTQNLPYIRAIVKETFRMHPPLPVVKRKCTEECEINGYVIPEGALILFNVWQVGRDPKYWDRPSEFRPERFLETGAEGEAGPLDLRGQHFQLLPFGSGRRMCPGVNLATSGMATLLASLIQCFDLQVLGPQGQILKGGDAKVSMEERAGLTVPRAHSLVCVPLARIGVASKLLS

SEQ ID NO: 13008 - DNA, 1530 bp, Glycine max
  CDS (1)..(1530)
atggctctgcttctgataatacccatttcactggtaaccctctggctcggttacaccctataccagcgactaagattcaagctccctcctggcccacggccctggccggtagtcggtaacctctacgacataaaacccgtccggttccggtgcttcgctgagtgggcgcagtcttacggccctatcatatcggtctggttcggttcgaccctaaacgtcatcgtttcaaactcggagttggccaaggaggttctgaaggagcacgatcagcagctggcggaccggcaccggagccggtcggcggcgaagttcagccgcgacgggaaggatctcatttgggccgattatgggccgcactacgtgaaggtgaggaaggtttgcacgctcgagcttttcacgccgaagcgcctcgagtccctcaggcccattagggaggacgaggtcaccaccatggttgagtccgtttacaatcactgcaccaccactggaaatttagggaaagcaatattggtgaggaagcacttggggtctgtggcattcaacaacatcaccaggttggcatttggaaaaagatttgtgaactcagaaggtgttatggatgagcaaggagtagaattcaaggccattgtggaaaatgggttaaagctaggagcatctctagccatggcagaacacatcccttggctgcgctggatgttcccactggaagaaggagcttttgccaagcatggagcccgccgcgaccgactcaccagagccatcatgacggagcacactgaagcacgcaagaaatctggtggtgccaagcaacattttgttgatgccctcctcacattgcaagacaagtatgaccttagtgaagacaccatcattggtctcctttgggatatgatcacagcagggatggacacaactgcaatttcagttgagtgggccatggctgaattgataagaaacccaagggtgcaacaaaaggtccaagaagagctagacagggtaattgggcttgaaagggtgatgactgaagctgacttctcaagcctgccttatctacaatgtgtgatcaaggaagcaatgaggcttcacccaccaaccccactaatgctcccacaccgtgccaatgccaatgtcaaagttggaggctatgatattccaaaagggtccaatgtgcatgtgaatgtgtgggccgtggcccgtgacccggcagtgtggaaggatccgttggagttccgacccgagaggttccttgaggaggatgtggacatgaagggccatgactttaggctacttccattcggggcgggtcgccgggtatgcccgggtgcccaacttggtatcaacttggtaacatccatgttgggccacctcttgcaccatttttgttggaccccacctgaaggaatgaagcctgaggaaattgacatgggagagaatccagggttagtcacatacatgaggactccaatacaagctttggcttctcctaggctcccctcacatttgtacaaacgtgtgcctgctgagatctaa

SEQ ID NO: 13009 - protein, 509 aa, Glycine max
MALLLIIPISLVTLWLGYTLYQRLRFKLPPGPRPWPVVGNLYDIKPVRFRCFAEWAQSYGPIISVWFGSTLNVIVSNSELAKEVLKEHDQQLADRHRSRSAAKFSRDGKDLIWADYGPHYVKVRKVCTLELFTPKRLESLRPIREDEVTTMVESVYNHCTTTGNLGKAILVRKHLGSVAFNNITRLAFGKRFVNSEGVMDEQGVEFKAIVENGLKLGASLAMAEHIPWLRWMFPLEEGAFAKHGARRDRLTRAIMTEHTEARKKSGGAKQHFVDALLTLQDKYDLSEDTIIGLLWDMITAGMDTTAISVEWAMAELIRNPRVQQKVQEELDRVIGLERVMTEADFSSLPYLQCVIKEAMRLHPPTPLMLPHRANANVKVGGYDIPKGSNVHVNVWAVARDPAVWKDPLEFRPERFLEEDVDMKGHDFRLLPFGAGRRVCPGAQLGINLVTSMLGHLLHHFCWTPPEGMKPEEIDMGENPGLVTYMRTPIQALASPRLPSHLYKRVPAEI

SEQ ID NO: 13010 - DNA, 1506 bp, Glycine max
  CDS (1)..(1506)
atggaccaaaatatgttaccattatttgttcttttagcttttcccattttgctattattcttcagaaaacgcaaaacatctaagaagccaacctttccaccaggccctagaggccttccctttattggcaatctttatcaactcgatggttctactctttgtttgaaactctatgaactctcaaaaaaatatggtcccatcttttcccttcaactaggttcaaggccagccctcgttgtttcctcaccaaaactggccaaggaggtaatgaaaacccatgaccttgagttctgtgggcgaccctccctcataagcacaatgaagttttcatataatgggctagacatggcattttcaccctatagagattattggagacacactagaaaaatttccatcatccatttccttagcctcaagcgtgtcttaatgttttcctcaataagaaaatacgaggttacccaattggtcaaaaagataacggaacatgcttcttgttccaaggttaccaacttgcatgagttgctcacgtgtcttacgagcgctgtagtgtgtagaactgctttgggtagaaggtacgaagaggaagggatcgagagaagcatgttccatggcttgcttaaagaagctcaagaattgacagcttccaccttctacacagattatattcctcttgttggaggagtggttgataaactcactgggttgatgggtcgtcttgagaaaatgttcaaggtgttggatgggttttatcagaatgctattgatgaacaccttgatcctgaaaggaagaaactcactgatgaacaggatataatcgatgccttgcttcaattgaagaatgatcgttcgttctcaatggatctcactcccgctcacatcaaacccttgatgatgaatataattttggcagggacagatacaagtgcagctgcagtagtttgggcaatgacggcactgatgaagagcccgatagtaatgaagaaagcccaagaagagattagaaatgtgtttggtgagaaagattttataggggaagatgatattcaaaagcttccttatcttaaggcagttataaaagaaacaatgagaatgtacccaccactgcctcttcttatacatagggaaacgattaaaaagtgtagcattgcagggtacgaaattccagagaagacattggtgtatgtgaatgcttgggcagtgcatagagacccagaaacttgggaggagccagaagagttttatcctgagagattcctagacagcaaaattgattttaggggttatgatttcgagttgattccatttggcgcaggacgaaggatttgcccgggcataaatatgggaattatcacagtggaacttgtgcttgctaatcttctgtattcatttgattgggaaatgcctcaagggatgaaaagggaagacatagacactgatatgcttccaggacttatccaacacaagaaaaatcctctctgcctagttgctaagaagcaagggtga

SEQ ID NO: 13011 - protein, 501 aa, Glycine max
MDQNMLPLFVLLAFPILLLFFRKRKTSKKPTFPPGPRGLPFIGNLYQLDGSTLCLKLYELSKKYGPIFSLQLGSRPALVVSSPKLAKEVMKTHDLEFCGRPSLISTMKFSYNGLDMAFSPYRDYWRHTRKISIIHFLSLKRVLMFSSIRKYEVTQLVKKITEHASCSKVTNLHELLTCLTSAVVCRTALGRRYEEEGIERSMFHGLLKEAQELTASTFYTDYIPLVGGVVDKLTGLMGRLEKMFKVLDGFYQNAIDEHLDPERKKLTDEQDIIDALLQLKNDRSFSMDLTPAHIKPLMMNIILAGTDTSAAAVVWAMTALMKSPIVMKKAQEEIRNVFGEKDFIGEDDIQKLPYLKAVIKETMRMYPPLPLLIHRETIKKCSIAGYEIPEKTLVYVNAWAVHRDPETWEEPEEFYPERFLDSKIDFRGYDFELIPFGAGRRICPGINMGIITVELVLANLLYSFDWEMPQGMKREDIDTDMLPGLIQHKKNPLCLVAKKQG

SEQ ID NO: 13012 - DNA, 1521 bp, Glycine max
  CDS (1)..(1521)
atggaagctcaagcgtcgttcttgtttattagcttgtttttctctctggtgttgcatttgcttgcaaagcattattacaagccaaaaaccaccctttctcacaaactacccccgggaccaaagaagctacctctgatagggaacctgcatcaactagcaatggctggttcacttccacatcgtactctccgagaccttgcccttaaatacggacctctcatgcatctccaacttggtgaaatttcttccgtggttgtatcctcccccaacatggccaaggagataatgaaaacccatgatcttgcttttgtgcagaggccacaatttcttcctgctcaaattttgacctatgggcaaaatgatattgtttttgctccatatggggattattggagacaaatgaagaaaatatgtgtctcggagcttctaagtgccaagagagttcagtctttctctcatattagagaagacgagacatccaaatttatagaatcaattcgaatatcagaaggttcaccaatcaatcttactagtaaaatttactccttggtaagttcttctgtttccagggtagcatttggcgacaaatctaaggaccaggaagagtttttgtgtgtgcttgaaaaaatgatattagcggggggaggatttgaacctgacgatttgtttccttcgatgaaacttcatctcataaatggaaggaaggccaaattggagaagatgcatgagcaggttgacaagatcgcagacaacattctcagagagcatcaagaaaagcgccaaagggcactacgagaaggcaaggttgacctagaggaggaggatcttgttgatgttcttttgagaatccaacaaagtgacaacctcgagatcaaaattagtaccacaaacatcaaagctgttatattggacgtatttactgctggaacggatacttcagcatcaacacttgaatgggctatggcagaaatgatgagaaacccaagagtgagggagaaagcacaggctgaagtaagacaagcatttagggaattgaaaataatccatgaaacagatgtagggaaacttacatacttaaagttggtgatcaaagagacattaaggttacacgctccttctcctttattggtccctagagaatgctctgaactaaccatcattgatggatatgaaatacctgtcaagactaaagtcatgataaacgtgtgggcaattggaagagatccccaatattggactgatgctgagaggtttgtcccagagagattcgatggtagttctatcgatttcaaagggaataactttgagtatcttccttttggggcaggaaggagaatgtgcccaggaatgacatttggtttagccaacattatgcttccactcgctctattactctatcacttcaattgggaacttccaaatgagatgaaacctgaggatatggatatgtctgaaaactttggattgacagttacaaggaaaagcgagttgtgtttgattcccattgttaatgatctttga

SEQ ID NO: 13013 - protein, 506 aa, Glycine max
MEAQASFLFISLFFSLVLHLLAKHYYKPKTTLSHKLPPGPKKLPLIGNLHQLAMAGSLPHRTLRDLALKYGPLMHLQLGEISSVVVSSPNMAKEIMKTHDLAFVQRPQFLPAQILTYGQNDIVFAPYGDYWRQMKKICVSELLSAKRVQSFSHIREDETSKFIESIRISEGSPINLTSKIYSLVSSSVSRVAFGDKSKDQEEFLCVLEKMILAGGGFEPDDLFPSMKLHLINGRKAKLEKMHEQVDKIADNILREHQEKRQRALREGKVDLEEEDLVDVLLRIQQSDNLEIKISTTNIKAVILDVFTAGTDTSASTLEWAMAEMMRNPRVREKAQAEVRQAFRELKIIHETDVGKLTYLKLVIKETLRLHAPSPLLVPRECSELTIIDGYEIPVKTKVMINVWAIGRDPQYWTDAERFVPERFDGSSIDFKGNNFEYLPFGAGRRMCPGMTFGLANIMLPLALLLYHFNWELPNEMKPEDMDMSENFGLTVTRKSELCLIPIVNDL

SEQ ID NO: 13014 - DNA, 1566 bp, Glycine max
  CDS (1)..(1566)
atgttgcttgaacttgcacttggtttattggttttggctctgtttctgcacttgcgtcccacacccactgcaaaatcaaaagcacttcgccatctcccaaacccaccaagcccaaagcctcgtcttcccttcataggacaccttcatctcttaaaagacaaacttctccactacgcactcatcgacctctccaaaaaacatggtcccttattctctctctactttggctccatgccaaccgttgttgcctccacaccagaattgttcaagctcttcctccaaacgcacgaggcaacttccttcaacacaaggttccaaacctcagccataagacgcctcacctatgatagctcagtggccatggttcccttcggaccttactggaagttcgtgaggaagctcatcatgaacgaccttctcaacgccaccactgtaaacaagttgaggcctttgaggacccaacagatccgcaagttccttagggttatggcccaaggcgcagaggcacagaagccccttgacttgaccgaggagcttctgaaatggaccaacagcaccatctccatgatgatgctcggcgaggctgaggagatcagagacatcgctcgcgaggttcttaagatctttggcgaatacagcctcactgacttcatctggcctttgaagtatctcaaggttggaaagtatgagaagaggattgatgacatcttgaacaagttcgaccctgtcgttgaaagggtcatcaagaagcgccgtgagatcgtcagaaggagaaagaacggagaagttgttgagggcgaggccagcggcgtcttcctcgacactttgcttgaattcgctgaggacgagaccatggagatcaaaattaccaaggagcaaatcaagggccttcgggtcgactttttctctgcagggacagattccacagcggtggcaacagagtgggcattggcagagctcatcaacaatcccagggtgttgcaaaaggctcgtgaggaggtctacagtgttgtgggcaaagatagactcgttgacgaagttgacactcaaaaccttccttacattagggccattgtgaaggagacattccgaatgcacccaccactcccagtggtcaaaagaaagtgcacagaagagtgtgagattaatgggtatgtgatcccagagggagcattggttcttttcaatgtttggcaagtaggaagggaccccaaatactgggacagaccatcagaattccgtcccgagaggttcttagaaactggtgctgaaggggaagcagggcctcttgatcttaggggccagcatttccaactcctcccatttgggtctgggaggagaatgtgccctggtgtcaatttggctacttcaggaatggcaacacttcttgcatctcttatccaatgctttgacctgcaagtgctgggccctcaaggacaaatattgaaaggtgatgatgccaaagttagcatggaagagagagctggcctcacagttccaagggcacatagtctcgtttgtgttccacttgcaaggatcggcgttgcatctaaactcctttcttaa

SEQ ID NO: 13015 - protein, 521 aa, Glycine max
MLLELALGLLVLALFLHLRPTPTAKSKALRHLPNPPSPKPRLPFIGHLHLLKDKLLHYALIDLSKKHGPLFSLYFGSMPTVVASTPELFKLFLQTHEATSFNTRFQTSAIRRLTYDSSVAMVPFGPYWKFVRKLIMNDLLNATTVNKLRPLRTQQIRKFLRVMAQGAEAQKPLDLTEELLKWTNSTISMMMLGEAEEIRDIAREVLKIFGEYSLTDFIWPLKYLKVGKYEKRIDDILNKFDPVVERVIKKRREIVRRRKNGEVVEGEASGVFLDTLLEFAEDETMEIKITKEQIKGLRVDFFSAGTDSTAVATEWALAELINNPRVLQKAREEVYSVVGKDRLVDEVDTQNLPYIRAIVKETFRMHPPLPVVKRKCTEECEINGYVIPEGALVLFNVWQVGRDPKYWDRPSEFRPERFLETGAEGEAGPLDLRGQHFQLLPFGSGRRMCPGVNLATSGMATLLASLIQCFDLQVLGPQGQILKGDDAKVSMEERAGLTVPRAHSLVCVPLARIGVASKLLS

SEQ ID NO: 13016 - DNA, 1521 bp, Glycine max
  CDS (1)..(1521)
atggatctcctccttctggaaaagaccctcataggtctcttcctcgctgcggtggtcgccatcgccgtctccaccctccgcggccggaaattcaagctcccaccgggcccactccccgtcccaatcttcggcaactggctccaagtcggcgacgacctcaaccaccgcaacctcaccgatttggccaaaaaattcggtgacatcttcctcctccgcatggggcagcgcaacctcgtcgtggtttcttcccctgagctcgccaaagaggttctccacacgcagggcgtggagttcggctcccgcacccgcaacgtcgtcttcgacatcttcaccggaaagggccaagacatggtcttcaccgtctacggcgagcactggcgcaaaatgcgccgcatcatgaccgtccccttcttcaccaacaaggttgtgcaacaataccgccatggatgggaatcggaggctgccgccgtcgtcgaggacgtcaagaaaaaccccgacgccgccgtctccggcaccgtcatccgccgccgccttcagctcatgatgtacaacaacatgtaccgcataatgttcgaccggaggttcgagagcgaggaggatcccatcttccagaggctaagagccttgaacggagagaggagtcgcttggcgcagagctttgagtataactatggtgattttattcccatcttgagacccttcttgaagggttacttgaagatttgcaaggaggtgaaggagacgaggttgaagcttttcaaggattacttcgttgacgagaggaagaagcttggaagcaccaagagcaccaacaacaataatgaacttaaatgcgctattgaccacattttggatgcccagagaaaaggcgagatcaacgaagacaacgtcctctacattgttgaaaacatcaacgttgctgcaattgaaacaactctatggtcgattgagtggggcattgctgagcttgtgaaccacccagagatccagcaaaagttaagggatgagattgacagagttcttggagcagggcaccaagtgactgagccagacatccaaaagctcccatacctccaagcagtggtcaaggaaactcttcgtcttagaatggcaatccctctccttgtaccacacatgaacctccacgacgcaaagcttgggggctatgatatcccagctgagagcaagatcttggtgaatgcatggtggctggccaacaaccctgcacactggaagaagccagaggagttccggcctgagaggttcttcgaggaggagtcgcttgttgaagccaatggcaatgactttaggtaccttccctttggtgttggcagaagaagctgccctggaatcattcttgcattgccaattcttggcatcactttgggacgtttggtccaaaactttgagctcttgcctccccctggccagtcacagattgacactagtgagaaaggagggcaatttagcttgcacatactcaagcattccaccattgtggcaaagccaaggtcattttag

SEQ ID NO: 13017 - protein, 506 aa, Glycine max
MDLLLLEKTLIGLFLAAVVAIAVSTLRGRKFKLPPGPLPVPIFGNWLQVGDDLNHRNLTDLAKKFGDIFLLRMGQRNLVVVSSPELAKEVLHTQGVEFGSRTRNVVFDIFTGKGQDMVFTVYGEHWRKMRRIMTVPFFTNKVVQQYRHGWESEAAAVVEDVKKNPDAAVSGTVIRRRLQLMMYNNMYRIMFDRRFESEEDPIFQRLRALNGERSRLAQSFEYNYGDFIPILRPFLKGYLKICKEVKETRLKLFKDYFVDERKKLGSTKSTNNNNELKCAIDHILDAQRKGEINEDNVLYIVENINVAAIETTLWSIEWGIAELVNHPEIQQKLRDEIDRVLGAGHQVTEPDIQKLPYLQAVVKETLRLRMAIPLLVPHMNLHDAKLGGYDIPAESKILVNAWWLANNPAHWKKPEEFRPERFFEEESLVEANGNDFRYLPFGVGRRSCPGIILALPILGITLGRLVQNFELLPPPGQSQIDTSEKGGQFSLHILKHSTIVAKPRSF

SEQ ID NO: 13018 - DNA, 1491 bp, Glycine max
  CDS (1)..(1491)
atggaaggcaaccttatcaacatcctttacctcttaatttttctcatcagtttaaaactactattcttcagaaaaaggttaaaaaacccagcaccaagtccaccatctcttccaataatcggaaacctccatcagctgaagaaacagccacttcaccgagccttgtacgacctctcacagaaatatggccctaataatatcctctctctgcggttcgggtcccaacccgtcctcgtcgtttcgtccgcatccgcagcggaagaatgtttcaccaaaaacgacatcatcttcgcgaaccgttttcgctcttcattgacaaagtacatcggcttcaaccacaccattattacagcatcatcgtacggcgaccactggcgcaacttacgtcgtataagctcgctcgagattctctccaaccaccgtctcaactcctttttaggggtccgaaaggacgagaccatgaagttgcttcgaaagctggctaagggttctgataaagacttcaggagagtggagctgaggccaatgttttcggagttaacgttcaacattatcataaaaatggtgtgtggcaaacgctactacggcgaggaatacgatgggaccaacgccgaggaggctaagaggtttagagagatcatgaatgagatatcgcagtttgggttggggtccaaccttgcagattttgtgccgcttttcagattgtttagtagtcgcaaaaagttacgaaaggttggagagaagctagacgcgttcttccaaggactcattgatgagcatcggaataagaaggaaagttcaaataccatgatcggccatctgctttcctcacaagagtcacagccagagtattatactgaccaaactatcaagggccttataatggcgttatatgtggctggcacagagacttccgctgtagcattagagtgggcaatgtccaatttactgaacagtccagaagtgttggagaaagcaagggttgaattggacactcaagttggacaagaccgtttgatagaggaagcagatgttactaaattacagtaccttcagaacattatctccgagactctgcgattgcatccaccactgtcaatgttgttgccgcatttatcatctgaagactgcaccgtgggaagttatgacgtgccacgtaacacaatgttaatggtgaatgcatgggccattcatagggacccaaaaatatgggctgatccaacgagctttaagcccgagaggtttgagaatggaccagtagatgctcacaagctaatctcttttggattggggaggagagcgtgtcctggtgcaggcatggcccaaagaactctgggcttgactttaggttcgttgattcaatgttttgagtggaaaaggattggtgaggaaaaagtagatatgaccgaaggggggggaactatagtgcccaaggccattccattggatgcccaatgtaaagcacgtccgatcattagcaagattttctaa

SEQ ID NO: 13019 - protein, 496 aa, Glycine max
MEGNLINILYLLIFLISLKLLFFRKRLKNPAPSPPSLPIIGNLHQLKKQPLHRALYDLSQKYGPNNILSLRFGSQPVLVVSSASAAEECFTKNDIIFANRFRSSLTKYIGFNHTIITASSYGDHWRNLRRISSLEILSNHRLNSFLGVRKDETMKLLRKLAKGSDKDFRRVELRPMFSELTFNIIIKMVCGKRYYGEEYDGTNAEEAKRFREIMNEISQFGLGSNLADFVPLFRLFSSRKKLRKVGEKLDAFFQGLIDEHRNKKESSNTMIGHLLSSQESQPEYYTDQTIKGLIMALYVAGTETSAVALEWAMSNLLNSPEVLEKARVELDTQVGQDRLIEEADVTKLQYLQNIISETLRLHPPLSMLLPHLSSEDCTVGSYDVPRNTMLMVNAWAIHRDPKIWADPTSFKPERFENGPVDAHKLISFGLGRRACPGAGMAQRTLGLTLGSLIQCFEWKRIGEEKVDMTEGGGTIVPKAIPLDAQCKARPIISKIF

SEQ ID NO: 13020 - DNA, 1506 bp, Hordeum vulgare
  CDS (1)..(1506)
atggacgtcctcctcctggagaaggccctgctgggcctcttcgcggcggcggtgctcgccatcgcggtagccaagctcaccggcaagcgcttccggctgccaccgggcccctccggcgcccccatcgtcggcaactggctgcaggtcggcgacgacctcaaccaccgcaacctgatgggcatggccaagcggttcggcgaggtgttcctcctccgcatgggcgaccgcaacctggtggtcgtctccagccccgagctcgccaaggaggtcctccacacccagggcgtcgagttcggctcccgcacccgcaacgtcgtcttcgacatcttcaccggcaagggccaggacatggtgttcaccgtgtacggcgaccactggcgcaagatgcggcgcatcatgacggtgcccttcttcaccaacaaggtggtgcagcagaaccgccccgggtgggaggacgaggcccccctcgtggtggacaacctcagggccgaccccacggccgccaccaagggcgtcgtgctccgacgcaggctgcagctcatgatgtacaacgacatgttccgcatcatgttcgaccgccggttcgagaccgtggccgacccgctcttcaaccagctcaaggcgctcaacgccgagcgcagcatcctctcccagagcttcgactacaactacggcgacttcatccccgtcctccgccccttcctccgccgctacctcaaccgctgcaccaacctcaagaccaagcgcatgaaggtgttcgaagaccacttcgtccagcagcgcaaggaggcgttggagaagacgggtgagatcaagtgcgccatggaccacatcctggaagccgaaaggaagggcgagatcaaccacgacaacgtcctctacatcgtcgagaacatcaacgtcgcagccattgagacgacgctgtggtcgatcgagtggggcctcgcggagctggtgaaccacccggagatccagcagaagctgcgcgaggagatcgtcgccgtgctgggccctggcacgccggtgacggagccggacctggagcgcctcccctacctgcagtccgtcgtgaaggagacgctccgcctccgcatggccatcccgctcctggtgccgcacatgaacctcagcgatgccaagctcgccggttacgacatccccgccgaatccaagatcctcgtcaacgcctggttcctcgccaacgaccccaagcggtgggtgcgcgccgacgagttcaggcccgagcgcttcctcgaggaggagaagtccgtcgaggcccacggcaacgacttccggttcgtgcccttcggcgtcggccgccggagctgccccgggatcatcctcgcgctgcccatcatcggcatcacgctcggacgcctggtgcagaacttcgagctgctgccgccgccggggcaggacaagatcgacaccaccgagaagccagggcagttcagcaaccagatcctcaagcacgccaccatcgtctgcaagccactcgaggcttga

SEQ ID NO: 13021 - protein, 501 aa, Hordeum vulgare
MDVLLLEKALLGLFAAAVLAIAVAKLTGKRFRLPPGPSGAPIVGNWLQVGDDLNHRNLMGMAKRFGEVFLLRMGDRNLVVVSSPELAKEVLHTQGVEFGSRTRNVVFDIFTGKGQDMVFTVYGDHWRKMRRIMTVPFFTNKVVQQNRPGWEDEAPLVVDNLRADPTAATKGVVLRRRLQLMMYNDMFRIMFDRRFETVADPLFNQLKALNAERSILSQSFDYNYGDFIPVLRPFLRRYLNRCTNLKTKRMKVFEDHFVQQRKEALEKTGEIKCAMDHILEAERKGEINHDNVLYIVENINVAAIETTLWSIEWGLAELVNHPEIQQKLREEIVAVLGPGTPVTEPDLERLPYLQSVVKETLRLRMAIPLLVPHMNLSDAKLAGYDIPAESKILVNAWFLANDPKRWVRADEFRPERFLEEEKSVEAHGNDFRFVPFGVGRRSCPGIILALPIIGITLGRLVQNFELLPPPGQDKIDTTEKPGQFSNQILKHATIVCKPLEA

SEQ ID NO: 13022 - DNA, 1548 bp, Hordeum vulgare
  CDS (1)..(1548)
atggcggagctcatgcagaaactcatgctagggacgcttccacgggcatgcttgtttctcttcctcttcttccttgtgtttgtgtgttactggttcaccggaaagttcagtgcaaaaaggaggcagcgcctcccaccttcgccgccggcgctgcccatcatcgggcacctgcacctcgtcggctccctcccgcacgtatccctccgcggcctcgccaggaaacacggccccgacgtgatgctcctccgcctgggcgccgtgccgaccctcgtcgtgtcatcgccacgcgccgctgaggcggtgctgcgcacgcatgaccacgtcctggcgtcacggccacgctccctcgtcaccgacatcatcatgtacggctcctccgacatcggcttcgcgccatacggcgagtactggcggcaggcgaggaagctcgtcaccacgcacatgctgagcgtaaagaaggtgcagtctttccgcagcgccgccatggaggagaccagcatagccatggccaagatcaacgaggcagcaacagccgacgctaaagtcgacatgagcgagctgctcaacacattcgcaaatgacatggcgtgccgcatcgtatcaggcaagttcttcctgcaaaatggacgaagcaagttgttccgggaactcatcgaggactcctcgcggcttctcggcgggttcaacttggaggagtacttcccagcattgggtagggtaggagtgcttaagagggcggtttgtgccaaggccgaaagagtgagggacagatgggccgatctgttggacaaggtgatcgacgatcgtgtgagcaagctcaagtcagcgtcggatcacaataaggatggcgacttcgtagatattctgctgtctgttcagcaggagtatgatctcacaagagagcacatgaaagctctcctcacagatgtattttttggtgcaacagacacatcatctaacgtcctcgaattcaccttggctgagctcatgaggaggccacacttgatggggaagctacaagacgaagtgaggagtattgtaccccggggacaagaaattgtcagcgaaaccgacatgaacaacatggtgtacctaagagcagtaataaaagagtcactccggctgtatcctgttgcgcctctccttgctccgcaccttgccatggctgattgcaacatcgatggatacatggttcctgctgggacacgtgtcgtcgtcaatgcatgggccattggtagggattcgagctcctgggaggacgcagaagagttcatacctgaaagatttatagatgaaggcaacgctaggaatgtcaacttcaaggggaatgattttcagttcttgccgttcggggcaggacgaaggatgtgccctggtatgaacctcggaatcgccaatgtcgagcttatgttggcaaacctcgtgaaccattttgactgggaacttcccattggagttgagagaaaagatattgatatgacagaggtgtttgggataaccatccgtaggaaggagaaactattgttgattccaaaatcacgcttgtaa

SEQ ID NO: 13023 - protein, 515 aa, Hordeum vulgare
MAELMQKLMLGTLPRACLFLFLFFLVFVCYWFTGKFSAKRRQRLPPSPPALPIIGHLHLVGSLPHVSLRGLARKHGPDVMLLRLGAVPTLVVSSPRAAEAVLRTHDHVLASRPRSLVTDIIMYGSSDIGFAPYGEYWRQARKLVTTHMLSVKKVQSFRSAAMEETSIAMAKINEAATADAKVDMSELLNTFANDMACRIVSGKFFLQNGRSKLFRELIEDSSRLLGGFNLEEYFPALGRVGVLKRAVCAKAERVRDRWADLLDKVIDDRVSKLKSASDHNKDGDFVDILLSVQQEYDLTREHMKALLTDVFFGATDTSSNVLEFTLAELMRRPHLMGKLQDEVRSIVPRGQEIVSETDMNNMVYLRAVIKESLRLYPVAPLLAPHLAMADCNIDGYMVPAGTRVVVNAWAIGRDSSSWEDAEEFIPERFIDEGNARNVNFKGNDFQFLPFGAGRRMCPGMNLGIANVELMLANLVNHFDWELPIGVERKDIDMTEVFGITIRRKEKLLLIPKSRL

SEQ ID NO: 13024 - DNA, 1608 bp, Oryza sativa
  CDS (1)..(1608)
atggaggtcgccgccatggagatctctacctcattgctcctcaccaccgtggctctctccgtcatcgtgtgctacgccctggtcttctcccgcgccgggaaggcgcgtgcgccgctgccgctgccgcctggccccaggggatggccggtgctgggcaacctgccgcagctgggcgggaagacgcaccagacgctgcacgagatgaccaaggtgtacggcccgctgatccggctccggttcgggagctccgacgtggtggtcgccggctcggcgccggtggcggcgcagttcctccgcacccacgatgccaacttcagcagccggccacgcaactccggcggcgagcacatggcgtacaacggccgggacgtcgtgttcgggccgtacgggccgcggtggcgcgccatgcggaagatttgcgccgtcaacctcttctccgcgcgcgcgctcgacgacctgcgcgctttccgggagcgggaggccgtgctgatggttaggtcgctggcggaggcgagcgccgcccctgggtcgtcgtctccagcggcggtggtcctgggaaaggaggtgaatgtctgcacgacgaacgcgctgtcgcgcgccgcggtcgggcgccgcgtgttcgccgccggcgcgggcgagggcgcgagggagttcaaagagatcgtgctggaggtgatggaggtgggtggtgtgctgaacgtcggcgacttcgtgccggcgctccggtggctggacccgcagggcgtggtagcgaggatgaaaaagctgcaccaccggttcgacgacatgatgaacgcgatcatcgcggagaggagggccggatcactactcaaaccaaccgacagtcgtgaggaaggtaaggacttgcttggcttgctcctggctatggtgcaggagcaggagtggctcgccgccggcgaggacgacaggatcaccgacacggaaatcaaggcccttatcctgaatctattcgtggcgggcacagacacaacatcaaccatagttgagtggacaatggcagagctgattcgacacccagatatcctcaagcaggcccaagaggagctagatgttgttgtgggtcgtgataggctcctctcagagtcggatctatcacatctcaccttcttccatgctatcatcaaggagacattccgtctacatccatcaacaccgctctcgctgccacgcatggcatctgaggagtgtgagatcgcaggctaccgtatccccaagggtgcagagttgctggtcaatgtgtgggggatcgcccgtgacccagccatatggcctgacccactagagtacaagccctctcggttcctccccggtgggacgcacactgatgtggatgtcaagggaaatgatttcggacttataccattcggtgcagggcgaaggatatgcgccggcctcagttggggcctgcggatggtcaccatgacagcggccacgctggtgcatgcattcgactggcagctaccagcggaccagacgccagacaagctcaatatggatgaggcgtttaccctcctgctgcaaagggcagagccattggtggttcacccggtaccaaggcttctcccatccgcttacaatattgcataa

SEQ ID NO: 13025 - protein, 535 aa, Oryza sativa
MEVAAMEISTSLLLTTVALSVIVCYALVFSRAGKARAPLPLPPGPRGWPVLGNLPQLGGKTHQTLHEMTKVYGPLIRLRFGSSDVVVAGSAPVAAQFLRTHDANFSSRPRNSGGEHMAYNGRDVVFGPYGPRWRAMRKICAVNLFSARALDDLRAFREREAVLMVRSLAEASAAPGSSSPAAVVLGKEVNVCTTNALSRAAVGRRVFAAGAGEGAREFKEIVLEVMEVGGVLNVGDFVPALRWLDPQGVVARMKKLHHRFDDMMNAIIAERRAGSLLKPTDSREEGKDLLGLLLAMVQEQEWLAAGEDDRITDTEIKALILNLFVAGTDTTSTIVEWTMAELIRHPDILKQAQEELDVVVGRDRLLSESDLSHLTFFHAIIKETFRLHPSTPLSLPRMASEECEIAGYRIPKGAELLVNVWGIARDPAIWPDPLEYKPSRFLPGGTHTDVDVKGNDFGLIPFGAGRRICAGLSWGLRMVTMTAATLVHAFDWQLPADQTPDKLNMDEAFTLLLQRAEPLVVHPVPRLLPSAYNIA

SEQ ID NO: 13026 - DNA, 1557 bp, Oryza sativa
  CDS (1)..(1557)
atggaggaaggcgtcgtcggtgggggcggcgctgccgttcttgttgccttgctcgtgaccgtggtgttggcggtgatgaggtcagctggaagcagaagcagcaagcgcggtcggctgcccccgagtcccatggcgctgcccatcatcggccacctccacctcatccggccgccaccccaccgcgccttcgaccgcatcctcgcccgccacgggcccctcgtctacctccgcctcgggccctccacgcactgcgtcgtgatcggctcggccgacgtggcgcgcgacttcctcaagttcgaggccagcatcccagagcggccgcccacggcggtgacgcgacagctggcgtacggcaaggccgggttcgcgttcgcgccctacggggcctactggcggttcgtgaagcggctgtgcatgtctgagctgctgggcccgcgcaccgtggagctgctccgccccgtccgtgccgcggagctggcggacgtgctgcgcgcggcgcagtcggcggcggagaggggcgagggcgtcgacatgagccacgagctggtccgcatggcgaacaacagcatcatgaggatggtggcgagcgctctgcctggcgagatggcggaggcggcgagggactgcgccaagcaggtggcggagctggtgggggcgttcaacgcggaggacttcgtggcggtgtgccggggctgggacctgcaggggatcgggcggaggaccaacgaggtgcacgccaggttcgacgcgctgctggagaccatcatcgaggccaaggaggaggcgcggaggcggagcctaaggctgggccggcgggagagtagcagcaaggacctgctggacatgctcatggacgcggcggaggacgacaccgcggaggtcaagctcaccagggacaacatcaaggccttcgtcctcgacatcttcaccgccgggtcggacacgacggccaccaccgtggagtggatgctggcggagctggttaaccacccggagtgcatggcgaagctgcggggcgagctggacgcggtggtgggcaggtcgcgtctggtgggagagcaggacgtggccaggctgccctacctgcaggcggtgctcaaggagacgttgcgcctccgcccccccgcggtgtttgcgcagcgcgtcactgtggagcccgtccaggtgcgcggctacaccatccccaccgacacccaggtcttcttcaacatcttctccattggccgcgacgccacctactgggaccaaccgctccacttccgccccgaccgcttccttcccgacggcgccggcgccaccgtcgaccccaagggccagcacccgcagctcatgcccttcgggagcggccgccgcgcctgccccggtatgggcctcgccatgcaggccgtcccggcgttcctggccgcgcttgtgcagtgctttgactgggcgccgccgccgtcgcagccgctgccgcttgacatggaggaggcggcggggctcgtgtccgcccgcaagcacccgctcctcctcctcccaacgccgcgcatccaaccgctcccttccttctactcctga

SEQ ID NO: 13027 - protein, 518 aa, Oryza sativa
MEEGVVGGGGAAVLVALLVTVVLAVMRSAGSRSSKRGRLPPSPMALPIIGHLHLIRPPPHRAFDRILARHGPLVYLRLGPSTHCVVIGSADVARDFLKFEASIPERPPTAVTRQLAYGKAGFAFAPYGAYWRFVKRLCMSELLGPRTVELLRPVRAAELADVLRAAQSAAERGEGVDMSHELVRMANNSIMRMVASALPGEMAEAARDCAKQVAELVGAFNAEDFVAVCRGWDLQGIGRRTNEVHARFDALLETIIEAKEEARRRSLRLGRRESSSKDLLDMLMDAAEDDTAEVKLTRDNIKAFVLDIFTAGSDTTATTVEWMLAELVNHPECMAKLRGELDAVVGRSRLVGEQDVARLPYLQAVLKETLRLRPPAVFAQRVTVEPVQVRGYTIPTDTQVFFNIFSIGRDATYWDQPLHFRPDRFLPDGAGATVDPKGQHPQLMPFGSGRRACPGMGLAMQAVPAFLAALVQCFDWAPPPSQPLPLDMEEAAGLVSARKHPLLLLPTPRIQPLPSFYS

SEQ ID NO: 13028 - DNA, 1506 bp, Triticum aestivum
  CDS (1)..(1506)
atggagctcctcttcttttgcacaatagttctcatcctcatggtctcctctgtgtacctcctaggcctcttaacccacagtggtcgcaacctacccccgggtcctcgctcgctaccactcgtgggcaacctcctctcactgggcgccctaccacaccgctccctcgcgggcctcgtggagcgccatggccctatcatggcgctccgcctaggcacggtcaccaccgtggtcgcctcctcagcagacgccgcccgtgacatcctccagcgccatgacgccgctttctcggggcgcttcgtcctcgatggcacccacgtgtccgcgcactacacacactcgatggtctggctcccggctagcagcccccggtggcgcgcgctacgcaaggtgtgctcgggtgagctcttcgcgccacaccgcctcgacatgcaccagtccctgcgccaggagaaggtgcaccaactcgtctcccacgtgacgcagctggcacgagagggcgtcccagttcacgtcggccacctggcctttacgacagcgcttaacctactctcctccaccatcttctccaccgacttggccgacctcgacgaccgccatgtcaagcctggggagttcaaggacgtgctcgcagagctaaacgtgaccgtcggattgccaaacctatcagacttcatccctgaagtggcgtggctagacctgcagggcttgaggagacgcatcgagggcttgttcacgcggctgcatgccatgatcggcgagcggatcgagagtcagatgcgagaccgcgccgccgccgcaggtgagccgaccaagaaaaacttcctggacgtgttgctcgactaccgcaacaccgacgatgaccagggcttcgagcgccagacgatcctctcattgatttcggacttgttcagcgcggggacggatacaagctcagccaccgtagaatgggcgatggcggagctgctactgaatccatcatccatgtcgagagctcgtcaagagctcgaccaagtgatcggctctaaagagcaggttgaggagtccgacattggacagctcaagtacctccaagccatcgtgaaggagacgttccggctccatcctccggcgccgttcctgctgccacacgtggcggagacgacgacacaagtccaaggatacacaattcccaagggcacacgccttctggtgaacgtgtgggccatagggcacgacggcaaggtatggccagaaccggagaagtttatgccggagaggttcctggagaaggaggtggacttcaagggccgagacttcgagctcctgccctttgggtccgggaggaggatgtgtcccgggacgacgctggccgctcgcatggttcatctcatgctcgcgtccttgctgcatcgctttgagtggaggcttcccgtagatgtggagaagaaggggctggacatgggtgaaaggcttggggtcaacttgtccatggctacgccccttgaggctatagccacgccagtttga

SEQ ID NO: 13029 - protein, 501 aa, Triticum aestivum
MELLFFCTIVLILMVSSVYLLGLLTHSGRNLPPGPRSLPLVGNLLSLGALPHRSLAGLVERHGPIMALRLGTVTTVVASSADAARDILQRHDAAFSGRFVLDGTHVSAHYTHSMVWLPASSPRWRALRKVCSGELFAPHRLDMHQSLRQEKVHQLVSHVTQLAREGVPVHVGHLAFTTALNLLSSTIFSTDLADLDDRHVKPGEFKDVLAELNVTVGLPNLSDFIPEVAWLDLQGLRRRIEGLFTRLHAMIGERIESQMRDRAAAAGEPTKKNFLDVLLDYRNTDDDQGFERQTILSLISDLFSAGTDTSSATVEWAMAELLLNPSSMSRARQELDQVIGSKEQVEESDIGQLKYLQAIVKETFRLHPPAPFLLPHVAETTTQVQGYTIPKGTRLLVNVWAIGHDGKVWPEPEKFMPERFLEKEVDFKGRDFELLPFGSGRRMCPGTTLAARMVHLMLASLLHRFEWRLPVDVEKKGLDMGERLGVNLSMATPLEAIATPV

SEQ ID NO: 13030 - DNA, 1539 bp, Triticum aestivum
  CDS (1)..(1539)
atggacgtggcgtcgctgctcccgttcgccatcgcgctggtggcgatcccgatctcgctggcgctgctggaccggctgcggctggggcggctgccgccgggcccgcgcccgtggccggtggtgggcaacctgcggcagatcaagccggtgcggtgccgctgcttccaggagtgggcggcgcggtacgggcccatcatctccgtctggttcggctcctcgctcaccgtcgtcgtctccacctccgagctggccaaggaggtgctcaaggagcacgaccagcagctcgccgaccggccccgcaaccgctccacccagcgcttcagccgcaacggccaggacctcatctgggccgactacggcccgcactacatcaaggtgcgcaagctctgcaacctcgagctcttcacccagaagcgcctcgaggcgctgcgccccatccgcgaggacgaggtcaccgccatggtcgagtccgtccaccgcgccgccgccggccccggtaatgaaggaaagccattggtagtgaggaatcaccttgctatggtgtccttcaacaatataacaaggctagcttttgggaagcggttcatgaatgcaaatggtgacattgacgaagaagggcaggaattcaagattattgtcaacaatggaatcaaaattggtgcatctctctctgttgctgaatacatttggtacttgagatggctgtgtccacttaatgaggagctttacaagacccacaatgagaggagggatcgtctgaccaagaagatcattgaagagcatgcacaggccctcaaggagagaggtgccaaacagcactttgtggatgcactgttcactctcagagagaagtatgaccttagtgatgacacagttttcggacttctatgggacatgatcaccgccggaatggacacgacagtcatatcagtcgagtgggccatggcagagctggtcaggaaccccagggtgcagaagaagctgcaggaggagctggacagcgtggtcggccgcgaccgcgtcatgtccgagaccgacttccagaacctgccctacctgatggccgtcgtgaaggagtccctccgcctgcacccgccgacgccgctcatgctgccccacaaggccagcgcgagcgtcaaggtcggcggctacagcatccccaagggcgccaacgtgatggtgaacgtgtgggcggtggcccgggaccccaaggtgtggagcagcccgctggagttccggccggagcggttcctggaggagagcatcgacatcaagggcagcgacttcagggtgctgcccttcggcgcgggccggagggtgtgccccggcgcgcagctcgggatcaacctcgtcgcctccatgatcgggcacatgctgcaccacttcgagtggtctctgccggagggcgccaggccggaggacatcagcatgatggagtcccccgggctcgtcaccttcatgggcacgccgctgcaggccgtcgccacgccgcgcctggagaatgaggagctgtacaagagggtcccggtcgagatctga

SEQ ID NO: 13031 - protein, 512 aa, Triticum aestivum
MDVASLLPFAIALVAIPISLALLDRLRLGRLPPGPRPWPVVGNLRQIKPVRCRCFQEWAARYGPIISVWFGSSLTVVVSTSELAKEVLKEHDQQLADRPRNRSTQRFSRNGQDLIWADYGPHYIKVRKLCNLELFTQKRLEALRPIREDEVTAMVESVHRAAAGPGNEGKPLVVRNHLAMVSFNNITRLAFGKRFMNANGDIDEEGQEFKIIVNNGIKIGASLSVAEYIWYLRWLCPLNEELYKTHNERRDRLTKKIIEEHAQALKERGAKQHFVDALFTLREKYDLSDDTVFGLLWDMITAGMDTTVISVEWAMAELVRNPRVQKKLQEELDSVVGRDRVMSETDFQNLPYLMAVVKESLRLHPPTPLMLPHKASASVKVGGYSIPKGANVMVNVWAVARDPKVWSSPLEFRPERFLEESIDIKGSDFRVLPFGAGRRVCPGAQLGINLVASMIGHMLHHFEWSLPEGARPEDISMMESPGLVTFMGTPLQAVATPRLENEELYKRVPVEI

SEQ ID NO: 13032 - DNA, 1581 bp, Zea mays
  CDS (1)..(1581)
atggtgaccgtggccaagatcgccatggagtggctccaagaccctctgagctgggtgttcctgggcacgctggccttggtggtcctgcagctgcgacgacggggcaaagcgccgctgccgcccgggccgaagccgctgccgatcgtgggcaacatggcgatgatggaccagctgacccaccgcgggctggcggcgctggccgagaggtacggcgggctgctgcacctccgcctgggccggctgcacgcgttcgcggtgtcgacgcccgagtacgcgcgcgaggtgctgcaggcgcaggacggcgcgttctcgaaccggccggccactatcgccatcgcgtacctgacgtacgaccgcgccgacatggcgttcgcgcactacgggcccttctggcgccagatgcgcaagctgtgcgtgatgaagctgttcagccggcgccgcgccgagacgtgggtggccgtgcgcgacgagtgcgcggcgctggtccgcgccgtggcgtccggcggcggcggcggcggcgaggccgtgaacctgggcgagctcatcttcaacctgaccaagaacgtgacgttccgcgccgccttcggcacccgcgacggcgaggaccaggaggagttcatcgccatcctgcaggagttctcgaagctgttcggcgccttcaacgtcgtcgacttcctgccgtggctgagctggatggacctgcagggcatcaaccgccgcctccgcgccgcacgatccgcgctggaccggttcatcgacaagatcatcgacgagcacgtgaggcgggggaagaaccccgacgacgccgacgccgacatggtcgacgacatgctcgccttcttcgccgaggccaagccgcccaagaaggggcccgccgccgccgcggacggtgacgacctgcacaacaccctccggctcacgcgcgacaatatcaaggctatcatcatggacgtgatgtttggcgggacggagacggtggcgtcggcgatcgagtgggcgatggcggagatgatgcacagccccgacgacctgcgccggctgcagcaggagctcgccgacgtcgtgggcctggaccggaacgtgaacgagtcggacctggacaagctccccttcctcaagtgcgtcatcaaggagacgctccggctgcacccgccgatcccgctgctcctgcacgagaccgccggcgactgcgtcgtgggcggctactccgtgcccaggggctcccgcgtcatggtcaacgtgtgggccatcggccgccaccgcgcctcgtggaaggacgccgacgcgttccggccgtcgcgcttcacgcccgagggcgaggccgcggggctcgacttcaagggcggctgcttcgagttcctgcccttcggctccggccgccgctcgtgccccggcacggcgctgggcctgtacgcgctggagctcgccgtcgcccagctcgcgcacggcttcaactggtcgctgcccgacggcatgaagccctcggagctggacatgggcgacgtcttcggcctcaccgcgccgcgcgccacgaggctctacgccgtgcctacgccccggctcaactgccccttgtactga

SEQ ID NO: 13033 - protein, 526 aa, Zea mays
MVTVAKIAMEWLQDPLSWVFLGTLALVVLQLRRRGKAPLPPGPKPLPIVGNMAMMDQLTHRGLAALAERYGGLLHLRLGRLHAFAVSTPEYAREVLQAQDGAFSNRPATIAIAYLTYDRADMAFAHYGPFWRQMRKLCVMKLFSRRRAETWVAVRDECAALVRAVASGGGGGGEAVNLGELIFNLTKNVTFRAAFGTRDGEDQEEFIAILQEFSKLFGAFNVVDFLPWLSWMDLQGINRRLRAARSALDRFIDKIIDEHVRRGKNPDDADADMVDDMLAFFAEAKPPKKGPAAAADGDDLHNTLRLTRDNIKAIIMDVMFGGTETVASAIEWAMAEMMHSPDDLRRLQQELADVVGLDRNVNESDLDKLPFLKCVIKETLRLHPPIPLLLHETAGDCVVGGYSVPRGSRVMVNVWAIGRHRASWKDADAFRPSRFTPEGEAAGLDFKGGCFEFLPFGSGRRSCPGTALGLYALELAVAQLAHGFNWSLPDGMKPSELDMGDVFGLTAPRATRLYAVPTPRLNCPLY

SEQ ID NO: 13034 - DNA, 1599 bp, Zea mays
  CDS (1)..(1599)
atggcggcggccgtggccaagatcagcatggagtggctccaagaccctctgagctgggtgttcctgggcacggtgtgcttggtggtcctgcagcagctgcgacgtcggcggggcaaagcgccgctgccgcccgggcctcagccgctgccgatcgtgggcaacatggggatgatggaccagctgacgcaccgcgggctggcggcgctggcggagacgtacggcgggctgctgcacctccggctggggcggctgcacgcgttcgcggtgtcgacgcccgagtacgcgcgcgaggtgctgcaggcgcaggacggcgcgttctcgaaccggccggcgaccgcggccatcgcgtacctgacgtacgaccgcgcggacatggcgttcgcgcactacgggcccttctggcggcagatgcgcaagctgtgcgtgatgaagctgttcagccggcggcgcgccgagacgtgggcggccgtgcgcgacgagtgcgcggcgctggtccgggccgtggccgtgggcggcgggagcgggggcgaagccgtgaacctgggcgagctcatcttcagcctgacgaagaacgtgacgttccgcgcggcgttcggcacccgcgacggcgagggccaagaggagttcatcgccatcctgcaggagttctccaagctgttcggcgccttcaacgtgggcgacttcctaccgtggctgggttggatggacctgcagggcatcaaccggcgcttgcgcgccgcccgctccgcgctggaccggttcatcgacaagatcatcgacgagcacgtgaggcgcgggaagagccccgacgacgccgacgccgacatggtcgacgacatgctcgcgttcttcgtcgaggccacgcccggcaaggcgacgggcgccgccgccgctgctgacggcggcgacgacctgcacaacaccctccggctcacgcgcgacaacatcaaggccatcatcatagacctgatgttcggcgggacagaaaccgcggcgtcagcgatcgagtgggccatggcggagatgatgcacagccccgacgacatgcgccgggtgcagcaggagctcgccgacgtcgtgggcctcgaccgcaacgtgagcgagtcggacctggacaggctccccttcctcaggtgcgtcatcaaggagacgctccggctgcacccgcccatcccgctgctcctccacgagaccgccgacgactgcgtcgtggccgggtactccgtgcccaggggctcccgcgtcatggtcaacgtctgggccatcggccgccaccgcgcctcgtggaaggacgccgacgcgttccgcccgtcgcggttcgcggcgcccgagggggaggccgcggggctcgacttcaagggcgggtgcttcgagttcctgccgttcgggtcgggccgccggtcctgccccgggatggcgctcggcctgtacgcgctggagctcgccgtcgcccagctcgcgcacgccttcaactggtcgctgcccgacggaatgaagccctcggagatggacatgggcgacatcttcggccttaccgcgccgcgcgccacgcggctctacgccgtgcctacgccccggctcaactgccccttgtactga

SEQ ID NO: 13035 - protein, 532 aa, Zea mays
MAAAVAKISMEWLQDPLSWVFLGTVCLVVLQQLRRRRGKAPLPPGPQPLPIVGNMGMMDQLTHRGLAALAETYGGLLHLRLGRLHAFAVSTPEYAREVLQAQDGAFSNRPATAAIAYLTYDRADMAFAHYGPFWRQMRKLCVMKLFSRRRAETWAAVRDECAALVRAVAVGGGSGGEAVNLGELIFSLTKNVTFRAAFGTRDGEGQEEFIAILQEFSKLFGAFNVGDFLPWLGWMDLQGINRRLRAARSALDRFIDKIIDEHVRRGKSPDDADADMVDDMLAFFVEATPGKATGAAAAADGGDDLHNTLRLTRDNIKAIIIDLMFGGTETAASAIEWAMAEMMHSPDDMRRVQQELADVVGLDRNVSESDLDRLPFLRCVIKETLRLHPPIPLLLHETADDCVVAGYSVPRGSRVMVNVWAIGRHRASWKDADAFRPSRFAAPEGEAAGLDFKGGCFEFLPFGSGRRSCPGMALGLYALELAVAQLAHAFNWSLPDGMKPSEMDMGDIFGLTAPRATRLYAVPTPRLNCPLY

SEQ ID NO: 13036 - DNA, 1605 bp, Zea mays
  CDS (1)..(1605)
atggcactccaggcagcctacgagtacctgcagcaggccgtcggccatggcgcgtggtcgtccacgcagacgctgacgctgctgctcatcgccgtacccaccgtactactgctgctagcgtccctcgccaagagcacgtcgtcgtccggtaggggcaagccgccgctccctccctcgccgccgggcaccctccccatcgtggggcacctacaccacatcgggccccagacccacatctcgctccaggagctggtggccaagtacgggcacaacgggttcctgttcctccgcgccggcgccgtgcccaccctgatcgtgtcgtcgcccagcgccgccgaggccgtgatgcgcacccacgaccacatcttcgcgtcccggccgtggtccatggcctcccacatcctccgctacaacacctgcgacgtggccttctcgccgctcggcgaatactggcagcagaccaggaagctgatgaacacgcacctgctcagcaacaagaaggtctactccttccgccatggccgcgaggaagaggtgtgcctcgtcgtggacaacctccgcgaggcggccgccaagtcgccgtcgacggccgtggacatgagcgaggtgctggcggcgtacaccaacgacgtggtgagccggtcggtgctgggctcgacgcaccggaagaaaggccggaacacgctgttcagggagatgaccatgaccaacgtggacctcctggtggggttcaacctggagtactacatcccgcggtggccgctgacggacctgctcttcaggctcgtgtgctggaaggtcacgcgccacctcaagcgctgggacgccctgctggaggaggtgatccacgagcacgtggagatgaggaagctgtccggcgacaaggagaaggagtcggacgacttcatcgacatcttcctctccagatacgaggagtacggcttcaccatggataacgtcaagtccctcctcatgaacgtgttcgaggcagccatcgagacctcatatctggtgctggagtccgccatggccgagctcatgaaccacaggcgcgtcatgaagaagctgcaagcggaggtacgggcgtacggagcggagaagaagctggacatgatcagggaggacgacctgagcagcctgccgtacctaaaggcgtccatgaaggaagcgctgcggctgcacccaccggggcccctgctgctgccgcactactccaccgccgactgccagatcgacgggtaccacatccccgccaacacgcgcgtcctcgtgaacggctgggccatcggcagagacccggcggtctgggagaagcccgaggagttcatgccggagaggttcatgcgggacggctgggacaagtccaacagctacagcggccaggacttcaggtacctgccgttcgggtctgggcgccggatctgccccggggccaacttcgcgctcgcgaccatggagatcatgctcgccaacctcatgtaccatttcgactgggaggtccccaatgagaaggaagacggtggcgggaaggtgagcatggacgagacgttcgggctgatgcttcgcaggaacgagccgctctaccttgttcctagggccgtctag

SEQ ID NO: 13037 - protein, 534 aa, Zea mays
MALQAAYEYLQQAVGHGAWSSTQTLTLLLIAVPTVLLLLASLAKSTSSSGRGKPPLPPSPPGTLPIVGHLHHIGPQTHISLQELVAKYGHNGFLFLRAGAVPTLIVSSPSAAEAVMRTHDHIFASRPWSMASHILRYNTCDVAFSPLGEYWQQTRKLMNTHLLSNKKVYSFRHGREEEVCLVVDNLREAAAKSPSTAVDMSEVLAAYTNDVVSRSVLGSTHRKKGRNTLFREMTMTNVDLLVGFNLEYYIPRWPLTDLLFRLVCWKVTRHLKRWDALLEEVIHEHVEMRKLSGDKEKESDDFIDIFLSRYEEYGFTMDNVKSLLMNVFEAAIETSYLVLESAMAELMNHRRVMKKLQAEVRAYGAEKKLDMIREDDLSSLPYLKASMKEALRLHPPGPLLLPHYSTADCQIDGYHIPANTRVLVNGWAIGRDPAVWEKPEEFMPERFMRDGWDKSNSYSGQDFRYLPFGSGRRICPGANFALATMEIMLANLMYHFDWEVPNEKEDGGGKVSMDETFGLMLRRNEPLYLVPRAV

SEQ ID NO: 13038 - DNA, 1587 bp, Zea mays
  CDS (1)..(1587)
atggagtcttttccccgcagcaatagactggtcaccactcacgagagcagaaaacaaacaacgcctccttacctgctcgctgccggcgcgctgtatcgtcttcctgtacatcatcaagaaccgcacgagcacaaagctcccgccatccccgacgacggctaccgctgcataagacaccttcacctcatcggccgcggcccgcaacgatccttgctaaaactgcagagtacgctagggcgacgacggcggtcgcctcttcctgcaactgcgggcgcagacacgaccttggtcgcgtacactgcggacgcggacgaggatctgttcaagaaccacgacctcgctttcgcctcccgcccacgcagcgtgggaggggataagctgatgtatgagtgcagcaacgtgtcgttcgcgccttacggcgagaactggcgccggggcaagaagatcgctgtggtccacctcctctctccacggcgcgtggaatcgttcgcgcccgtaagggccgccgaggtagccgcgctcgtcgcacggacacgccgcaccgcggaggctggggaggccgtggagttgagggagctcctgaacggctacgccaacgcggtggccacccgcgcggccaccggtgccgctggggcgacagcagagaagctgaaagagctgatggggaactccgagcccgaggcgctgatggcgggcttccaacccgaagacgtgctgccggacgcaccggcgaggttcgtgagatgggtgacgggcctcaataagaagctcgaagacttggtggagtcgtgggacaagttcctgtccgatatagtggccgcacacaaggagaaggggggtggcgacgcagaggaggatgaggacttcttggatgtcttgcttcggctgcgggaagaaggcgcagatgggctcgagctcacagacgatcgcatcaaagctaccgtcaaggacatgatagcggctgcaactgaaacatcgtcccaaacgctggaatggaccatggccgaactcattgccaacccgcgggtgatgagcaagctccaaggcgagatagcgcgagtcgtcagcgccgatcagacgaccatcgctgaaccggacctgaacaaaatggagtacctgagggcagtgttcaaagaggtgcttcggctccacccaccagcgccgctcctcgtcccgcacgaatcaacaacgcccgcggttgtgcagggctacgagatcccggccaagacggctctcttcgtcaacgtgtgggccatcgggcgggaccctgctgtgtgggacgcaccggacgagttccgcccagagcggttcgtgggcggcagtccctcggtggacttcagaggtaccgactaccagctcatcccgttcggcgccggccggaggatctgccccggcatcaacttcgcgctgccggtcttggagctcgcgcttgtcagccttctgcaccacttcgaatgggagctccccgccggcgtgggaaaagcggacctcgacgtgggcgaggcgccggggatgacgacgccgcggcggattccgctcgtccttgtccccaagtgcaggacgctcgttcagccagcgctgcagtag

SEQ ID NO: 13039 - protein, 528 aa, Zea mays
MESFPRSNRLVTTHESRKQTTPPYLLAAGALYRLPVHHQEPHEHKAPAIPDDGYRCIRHLHLIGRGPQRSLLKLQSTLGRRRRSPLPATAGADTTLVAYTADADEDLFKNHDLAFASRPRSVGGDKLMYECSNVSFAPYGENWRRGKKIAVVHLLSPRRVESFAPVRAAEVAALVARTRRTAEAGEAVELRELLNGYANAVATRAATGAAGATAEKLKELMGNSEPEALMAGFQPEDVLPDAPARFVRWVTGLNKKLEDLVESWDKFLSDIVAAHKEKGGGDAEEDEDFLDVLLRLREEGADGLELTDDRIKATVKDMIAAATETSSQTLEWTMAELIANPRVMSKLQGEIARVVSADQTTIAEPDLNKMEYLRAVFKEVLRLHPPAPLLVPHESTTPAVVQGYEIPAKTALFVNVWAIGRDPAVWDAPDEFRPERFVGGSPSVDFRGTDYQLIPFGAGRRICPGINFALPVLELALVSLLHHFEWELPAGVGKADLDVGEAPGMTTPRRIPLVLVPKCRTLVQPALQ

SEQ ID NO: 13040 - DNA, 1518 bp, Zea mays
  CDS (1)..(1518)
atggaggacaaggtgctcatcgccgtgggaacggtggcggtggtcgccgtcctctccaagctcaagtcggccgtgaccaagccgaagctgaaccttcctccagggccatggacgctgccgttgattggcagcatccaccacatcgtcagcaacccgctgccctaccgggcgatgcgcgagctcgcgcacaagcacgggccgctcatgatgctgtggctgggcgaggtgcccacgctggtggtgtcgtcgccggaggccgcgcaggcgatcaccaagacgcacgacgtgtcgttcgccgaccgtcacatcaacagcaccgtcgacatactcaccttcaacggcatggacatggttttcgggtcctacggcgagcagtggcggcagctccgcaagctcagcgtgctggagctgctgagcgccgcgcgggtgcagtcgttccagcgcatccgcgaggaggaggtggcgcggttcatgcggagcctcgccgcgtccgccagcgccggcgccaccgtcgacctgtccaagatgatctcaagcttcatcaacgacaccttcgtcagggagtccatcggcagccggtgcaagtatcaggacgagtacctggctgccctggacactgccattcgggtggccgcggagctaagcgtaggtaacatcttcccgtcgtctaggctgttgcagagtcttagcacggcgcgacgcaaggcgatagcgtcccgcgacgagatggcgcgcatcctcgggcagatcatccgcgagaccaaggaatccatggatcagggtgacaagacttcaaacgagagcatgatctccgtcctgctcaggcttcagaaagacgccggcttgcccatcgagctcaccgacaacgtcgtcatggcgctcatgtttgacttgtttggcgcgggcagcgacacctcgtcgacaacgctgacctggtgcatgacagagctggtccggtacccggcaacgatggccaaagcgcaggccgaggtccgggaggctttcaaggggaagaccacgatcacggaggacgacctgtccacggcaaatcttaggtacctgaagctcgtggtgaaggaagcgctcaggttgcactgcccggtgccgctcctgctcccacgcaaatgccgggaggcgtgccaggtgatgggctacgacatccctaaaggcacatgcgtgttcgtcaatgtctgggcgatctgtagggaccctaggtactgggaagacgccgaggaattcaagccggagcggttcgagaactccaacctagactacaagggaacatactacgagtacctcccgttcgggtctggccgtcgcatgtgcccgggagcaaaccttggagtggccaacttggagcttgcactggccagccttctgtaccatttcgattggaagctaccaagtggacaggagcctaaggatgtcgatgtttgggaggctgcaggactggttgcgaagaaaaacacaggcctggttctgcaccctgtcagccacattgctccggttaatgcctaa

SEQ ID NO: 13041 - protein, 505 aa, Zea mays
MEDKVLIAVGTVAVVAVLSKLKSAVTKPKLNLPPGPWTLPLIGSIHHIVSNPLPYRAMRELAHKHGPLMMLWLGEVPTLVVSSPEAAQAITKTHDVSFADRHINSTVDILTFNGMDMVFGSYGEQWRQLRKLSVLELLSAARVQSFQRIREEEVARFMRSLAASASAGATVDLSKMISSFINDTFVRESIGSRCKYQDEYLAALDTAIRVAAELSVGNIFPSSRLLQSLSTARRKAIASRDEMARILGQIIRETKESMDQGDKTSNESMISVLLRLQKDAGLPIELTDNVVMALMFDLFGAGSDTSSTTLTWCMTELVRYPATMAKAQAEVREAFKGKTTITEDDLSTANLRYLKLVVKEALRLHCPVPLLLPRKCREACQVMGYDIPKGTCVFVNVWAICRDPRYWEDAEEFKPERFENSNLDYKGTYYEYLPFGSGRRMCPGANLGVANLELALASLLYHFDWKLPSGQEPKDVDVWEAAGLVAKKNTGLVLHPVSHIAPVNA

SEQ ID NO: 13042 - DNA, 1554 bp, Zea mays
  CDS (1)..(1554)
atggaaccagcaacatgggctgtgttcctcggcattgccctctgcgcagcggcagcgctcttcctttcgcgcggccggcgcccggtctacaaccccccgccgggccccaagccatggccgatcatcggcaaccttaacctcatgggcgagctgccccaccgctccatgaacgagctgtccaagcggtacggtccgctcatgcagctccggttcgggtcgttgcctgttctcgtcggcgcgtcggttgagatggcaaagctcttcctcaagaccaacgacgcggcgttctccgaccggccgaggttcgcaatcggcaagtacaccgcgtacgacttctccgaccttctatgggctccttccgggccgtacctgcgccaggcacgcaggatctgcgccaccgagctcttcagcgccacgcggctcgagtccttcgagcacatccgcgacgaggaggtgcgcgtgatgctgcgacagctgcgccaagcggctgggcgcaccgtgcggctcagggactacctgcagatgttggcgctcggcgtgatctcgcgcatagttctgggcaagaagtacgtcatggaggaggcggcggacggtgagggggactcagcgccggcgataacgcctgccgagttcagggagatggtggacgagttcttcgcgcttcacggtgcgtttaacattggtgattacatcccttggctagattggctggacctgcagggctacgttgctaggatgaagagaatgaaggcgaggtttggtcgattcctggaacgagtcttggacgtgcacaacgagcggcgactacgcgagggagggaactttgtggcaaaggatatgttggacgtgctgctgcagctggccgatgacactagtcttgaagtccagctcagcagggacaatgttaaggctatcacacaggacctaatcatcgcaggcacggatagtaatgcaaacacgctggagtgggctgtctcggagctcctcaagaaccctaagatcttagccaaggccatggaggagctgaaccatgtcatagggccggaccgactggtgacggaaagcgacctccctcgcctcccctacatcgaggctgtgctcaaggagaccatgcgcgtgcaccctgccgcgccgatgctggcaccccacgtggcccgcgaggacacatccgtggacggatacgacgtgctcgctggcacggtcttgttcatcaacgtgtgggcaatcggccgcgaccctggactgtgggacgcgccggaggagttccggccggagcggttcgtcgagagcaagatcgacgtgaggggccatgacttccagctgctgccgttcggctctggccggcgaatgtgccccgggatcaacctcgcgctaaaggtgatggctttgagtcttgccaatctgctacacggcttcgagtggaggcttccggacggcgtgacggcagaggagctgagcatggatgaggccttcaagctcgcggtaccgcgtaaattcccgctcatggtcgtggccgagcccaggttgccagctcgcctgtatactggcgcttga

SEQ ID NO: 13043 - protein, 517 aa, Zea mays
MEPATWAVFLGIALCAAAALFLSRGRRPVYNPPPGPKPWPIIGNLNLMGELPHRSMNELSKRYGPLMQLRFGSLPVLVGASVEMAKLFLKTNDAAFSDRPRFAIGKYTAYDFSDLLWAPSGPYLRQARRICATELFSATRLESFEHIRDEEVRVMLRQLRQAAGRTVRLRDYLQMLALGVISRIVLGKKYVMEEAADGEGDSAPAITPAEFREMVDEFFALHGAFNIGDYIPWLDWLDLQGYVARMKRMKARFGRFLERVLDVHNERRLREGGNFVAKDMLDVLLQLADDTSLEVQLSRDNVKAITQDLIIAGTDSNANTLEWAVSELLKNPKILAKAMEELNHVIGPDRLVTESDLPRLPYIEAVLKETMRVHPAAPMLAPHVAREDTSVDGYDVLAGTVLFINVWAIGRDPGLWDAPEEFRPERFVESKIDVRGHDFQLLPFGSGRRMCPGINLALKVMALSLANLLHGFEWRLPDGVTAEELSMDEAFKLAVPRKFPLMVVAEPRLPARLYTGA

SEQ ID NO: 13044 - DNA, 1524 bp, Zea mays
  CDS (1)..(1524)
atggacgagtacatctaccagtcgctcttcctctccgtccttgctgtggcactgctgcagctggtgaagatggccctcaagccgaggccacggctgccgccagggccttggaagctgcccgtcatcggcagcatgcaccacctcgtgaacgtgctgccgcaccgggcgctgcgggacctggcggacgtccacggcccgctcatgatgctgcagctcggccagacgccgctcgtcgtcgcctcttccaaggagacggcgcgcgccgtgctcaggacgcacgacaccaacttcgccacacgccccaagctcctcgccggcgagatcgtcggctatgagtgggtcgacatcctcttcgccccctccggcgactactggcgcaagctccgccagctctgcgccgccgagatcctgagccccaagcgcgtgctctcgtttcgtcacatccgggaggaggaggtgatgctgcgggtggaggagatccgcgcggcgggcccgtcgacgccggtgaacctgagcgtgatgttccacagcatcacaaacagcgtcgtgtcgcgggccgcattcgggaagaagcggaagaacgcggcggagttcctggcggctaccaaggccgtcgtcggcctgtcgagcggcttcaacatcccggacttgttcccggcgtggaccacagtcctggccaagctcaccggcatgacgcgcagcctcaaggagatccacaagacggtggacaccatcctcgaggaaattatcgaggagcgcaagcgcatccgcgacgaaaagatcatgggcggcgccgccgccgaggacgtcgacgagaacctcgtcgacgtactcatcggcctgcaggagaaaggcggcttcggcttccaacttaccaacagcatcatcaaggccatcatactggacatgttcgcgggcgggacggggacgtcggggtcggccatggagtgggggatgtcggagctgatgcggaacccaccagtgatgaagaagatgcaggcgctgatcagggaggcgttccgtgggaagacggctgtgacagagggcgacctacaggcgagcaacctccagtacctgaagctggtgatcaaagaggccctccggctgcatccgccggcaccgctgctggtgccccgggagagcatcgaggagtgcgagctggacgggtacacgattccagccaagtcacgggtcatcatcaacgcgtgggccatcggccgtgaccccaagtactggaatgacgccgacgagttcaagccggagcggttcgaggacggctcccgagacttcacgggcagcagctacgagttcttgcccttcggctccggccgaaggatgtgccccgacttcaactacggcctcgccagcatggagctcgcctttgtcggcctgctctaccacttcgactcgtcgctgcccgatggcgtcaaggaggtcaacatgggggaggtgcctggactcggcgtctgccgccgcacgccactaatgctttgcgcaaccccgttcgtcccggtccccgcctag

SEQ ID NO: 13045 - protein, 507 aa, Zea mays
MDEYIYQSLFLSVLAVALLQLVKMALKPRPRLPPGPWKLPVIGSMHHLVNVLPHRALRDLADVHGPLMMLQLGQTPLVVASSKETARAVLRTHDTNFATRPKLLAGEIVGYEWVDILFAPSGDYWRKLRQLCAAEILSPKRVLSFRHIREEEVMLRVEEIRAAGPSTPVNLSVMFHSITNSVVSRAAFGKKRKNAAEFLAATKAVVGLSSGFNIPDLFPAWTTVLAKLTGMTRSLKEIHKTVDTILEEIIEERKRIRDEKIMGGAAAEDVDENLVDVLIGLQEKGGFGFQLTNSIIKAIILDMFAGGTGTSGSAMEWGMSELMRNPPVMKKMQALIREAFRGKTAVTEGDLQASNLQYLKLVIKEALRLHPPAPLLVPRESIEECELDGYTIPAKSRVIINAWAIGRDPKYWNDADEFKPERFEDGSRDFTGSSYEFLPFGSGRRMCPDFNYGLASMELAFVGLLYHFDSSLPDGVKEVNMGEVPGLGVCRRTPLMLCATPFVPVPA

SEQ ID NO: 13046 - DNA, 1677 bp, Zea mays
  CDS (1)..(1677)
atggacgcctccctcctcctctccgtaggcctcgcgctggtgctgatcccgctctccctctcgctcctcaaccggctgcgccgggaaaacatgggggccctcgaggcgggccggaccaacccccggcgccgagcagccatggacgcctccctcctcctctccgtcggcctcgcgctggtgctgatcccgctctccctctcgctcctcaaccggctgcgcgtcggccgcctgccgcccggcccgcggccgtggcccgtcctgggcaacctgcgccagatcaagcccgtccggtgccggtgcttccaggagtgggcggagcggtacgggcccatcatctccgtctggttcgggtccggcctcaccgtcgtcgtctccacctcggagctggccaaggaggtgctcaaggagaacgaccagcagctcgcggaccggccgcggaaccgctccacccagcggttcagccgcaacgggcaggacctcatctgggccgactacggcccgcactacatcaaggtgcgcaagctctgcaacctcgagctcttcacgcccaggaggctcgaggcgctgcgccccatcagggaggacgaggtcaccgccatggtcgagtccgtgcaccgcgccgccactgccccgggtaatgaaggaaagccaatggtagtgaggaagcacctttctatggtggccttcaacaacataacaaggctggcatttgggaagcggttcatgaatgcaaacggtgatgttgacgaacaagggcgtgagtttaagactattgtgaacaacgggatcaagattggtgcatctctctctgttgctgagttcatttggtatttgagatggttgtgtccacttaatgaggagctttacaaaactcacaatgagagaagggaccgcctgacaatgaagatcattgatgagcacgctaagtctctcaaggagagtggtgccaagcagcactttgtggatgcacttttcactctcaaacaacagtatgaccttagtgaagacacagttattggacttctatgggatatgatcactgctggaatggacacaacagtcatctcagtcgagtgggcgatggcagaactggtcaggaaccctagggtgcagaagaagctgcaagaggagctcgaccgtgtggttggccgtgaccgcgtcatgctagagaccgacttccagaacctcccctacctacaggccgttgtcaaggaatcactccggctgcacccgccgacgccactcatgctcccgcacaaggccagctcgaacgtcaagatcggaggttacaacatccccaagggcgccaacgtgatggtgaacgtgtgggcggtggcgcgtgatcccaaggtctggagcaacccgctggagtacagaccggagcgcttcctggaggagaacatcgacatcaagggcagcgacttcagggtgctgccgttcggtgctggccggcgtgtgtgcccgggcgcgcagctcggcatcaacctcgtggcctccatgatcggacaccttctgcatcacttcgagtggtccctgccggagggcactagaccagaggacgtcaacatgatggagtcccccggtctcgtcacgttcatgggcacaccgctgcaagctgtcgtcaagccgcgcctggagaaggaggagctgtacaatagggtcccagttgagatgtga

SEQ ID NO: 13047 - protein, 558 aa, Zea mays
MDASLLLSVGLALVLIPLSLSLLNRLRRENMGALEAGRTNPRRRAAMDASLLLSVGLALVLIPLSLSLLNRLRVGRLPPGPRPWPVLGNLRQIKPVRCRCFQEWAERYGPIISVWFGSGLTVVVSTSELAKEVLKENDQQLADRPRNRSTQRFSRNGQDLIWADYGPHYIKVRKLCNLELFTPRRLEALRPIREDEVTAMVESVHRAATAPGNEGKPMVVRKHLSMVAFNNITRLAFGKRFMNANGDVDEQGREFKTIVNNGIKIGASLSVAEFIWYLRWLCPLNEELYKTHNERRDRLTMKIIDEHAKSLKESGAKQHFVDALFTLKQQYDLSEDTVIGLLWDMITAGMDTTVISVEWAMAELVRNPRVQKKLQEELDRVVGRDRVMLETDFQNLPYLQAVVKESLRLHPPTPLMLPHKASSNVKIGGYNIPKGANVMVNVWAVARDPKVWSNPLEYRPERFLEENIDIKGSDFRVLPFGAGRRVCPGAQLGINLVASMIGHLLHHFEWSLPEGTRPEDVNMMESPGLVTFMGTPLQAVVKPRLEKEELYNRVPVEM

SEQ ID NO: 13048 - DNA, 1548 bp, Zea mays
  CDS (1)..(1548)
atggacgtgccgctcccgctgctgctcggctccgtggccgtttccctcgtcgtgtggtgccttctgctccgccgcggcggggccgggaaggggaagctgccgctgccgcccggtccccggggctggccggtgctgggcaacctgccgcaggtcggcgccaagccgcaccacaccatgtgtgctatggcgcgggagtacggcccgctgttccggctccggttcggcagcgccgaggtggtggtggccgcgtcggcgcgggtggcggcccagttcctgcgcgcccacgacgccaacttcagcaaccgcccgcccaactccggggccgagcacgtggcgtacaactaccaggacctggtgttcgccccgtacggctcccggtggcgcgcgctacggaagctgtgcgcgctccacctcttctccgccaaggccctggacgacctgcgcggcgtcagagagggcgaggtagcgctcatggtgagggagctcgcccggcagggagagcgaggacgggccgccgtggcgctgggccaggtggccaacgtctgcgcgaccaacacgctggcccgggcgaccgtgggccggcgcgtgttcgccgtcgacggaggggagggcgccagggagttcaaggagatggtggtggagctgatgcagctcgccggggtcttcaacgtcggggacttcgtgccggcgctcgcgtggctcgacccgcagggcgtggtcggcaggatgaagcggctgcaccgcaggtacgacgacatgatgaacgggatcatcagggagaggaaggccgccgaggaaggcaaggacctgctcagcgtgctgctggccaggatgcgggagcagcagccgctagcggagggcgacgacactaggttcaacgagactgacatcaaggcacttctcctgaacctcttcacggctgggacggacacgacatccagcacggtggagtgggcgctggccgagctgatccggcatccggacgtgctcaggaaggcccagcaggagctcgacgccgtcgtcggccgcgaccgcctcgtctccgagtcggacctcccgcgcctcacgtacctcacggcggtgatcaaggagacgttccgtctgcacccgtccacgccgctgtcgctgccccgcgtcgccgccgaggagtgcgaggtggacgggttccgcatccccgccggcaccacgctgctggtgaacgtgtgggcgatcgcccgagacccggaggcgtggcccgagcctctcgagttccggcccgcccgcttcctcccgggcggctcgcacgcgggagtcgatgtcaaagggagcgacttcgagctcatcccgttcggcgccggccggagaatctgcgcgggcctcagctggggtctgcggatggtcacgctcatgacggccacgctggtgcacgccctggactgggacctcgccgacggcatgaccgcggacaagctggacatggaggaggcctacgggctcaccctgcagcgcgccgtgccgttaatggtccgcccagcacccagactgctgccgtctgcttacgcagagtag

SEQ ID NO: 13049 - protein, 515 aa, Zea mays
MDVPLPLLLGSVAVSLVVWCLLLRRGGAGKGKLPLPPGPRGWPVLGNLPQVGAKPHHTMCAMAREYGPLFRLRFGSAEVVVAASARVAAQFLRAHDANFSNRPPNSGAEHVAYNYQDLVFAPYGSRWRALRKLCALHLFSAKALDDLRGVREGEVALMVRELARQGERGRAAVALGQVANVCATNTLARATVGRRVFAVDGGEGAREFKEMVVELMQLAGVFNVGDFVPALAWLDPQGVVGRMKRLHRRYDDMMNGIIRERKAAEEGKDLLSVLLARMREQQPLAEGDDTRFNETDIKALLLNLFTAGTDTTSSTVEWALAELIRHPDVLRKAQQELDAVVGRDRLVSESDLPRLTYLTAVIKETFRLHPSTPLSLPRVAAEECEVDGFRIPAGTTLLVNVWAIARDPEAWPEPLEFRPARFLPGGSHAGVDVKGSDFELIPFGAGRRICAGLSWGLRMVTLMTATLVHALDWDLADGMTADKLDMEEAYGLTLQRAVPLMVRPAPRLLPSAYAE

SEQ ID NO: 13050 - DNA, 1560 bp, Zea mays
  CDS (1)..(1560)
atggaacaagctacatgggccgcgttcctcggcattgtcctttgcgcagcgctcttccacaggaccttccttgcgcgcggccggcgccgggccaacaaccccccgcccggccccaagccatggccgatcatcggcaacctaaacctcgtgggcgagctcccccaccgctccatgaacgagctctccaagcggtacggtccgctcatgcagctccggttcgggtcgttgcctgttgtcgtcggcgcgtcggttgagatggcaaagctcttcctcaagaccaatgacgcggcgttctccgaccggccgaggttcgcagtcggcaagtacatcgcgtatgacttctccgaccttctatgggctccttccggaccgtgcctgcgccaggcacgcaggatctgcgccaccgagctcttcagcgccacgcggctcgagtcattcgagcacatccgcgacgaggaggtgcgcgtgatgctgcgacagctgcgccaagcggctgggcgcactgtgcggctcagggactacctgcagatgttgacgctcggcgtgatctcgcgcatagttctgggcaagaagtacgtccaggaggaggcggcggacggtgagggggactcagcgtcggcgatgacgcctgccgagttcggggagatggtggacgagttcttggtgcttcacggtgtgtttaacattggtgattacatcccgtggctagattggctggacctgcagggctacgttgctaggatgaagagaatgaaggcgaggtttggtcgattcctggaacgactcctggacgtgcacaacgagcggcggctacgcgagggagggaacttcgtggcaaaggatatgttggacgtgctgctgcagctggccgatgatactagtcttgaagtccagctcaacagggacaatgttaaggctatcacacaggacctaatcattggaggcacggatactagtgcaaaggccctggagtgggctgtctcggagctgctcaagaaccccaaggtcttagccaaggccacagaagagctggaccacgtcatagggccggaccgactggtgacagaaagcgacctccctcgcctcccctacatcgaggctgtgctcaaggagaccctgcgcctgcaccctgccgcgccgatgctggcaccccacgtggcccgcgaggacacatccgtggacggctacgacgtgctcgctggcacggtcgtgttcatcaacgtgtgggcaatcggccgcgaccctgcgctgtgggacgcgccggaggagttccggccggagcggttcttcgagagcaagatcggcgtgaggggccaggacttccagctgctgccgttcggctctggccggcgaatgtgccccgggatcaacctcgcgctaaaggtgatggctttgagccttgccaatctgcttcacggcttcaagtggaggcttccggacggcgtgacggcagaggagctgagcatggaggaggccttccagctcacggtaccgcgtaagttcccgctcgaggccgtggtcgagcccaggttgccagaccgcctgtatacgggcgcttga

SEQ ID NO: 13051 - protein, 519 aa, Zea mays
MEQATWAAFLGIVLCAALFHRTFLARGRRRANNPPPGPKPWPIIGNLNLVGELPHRSMNELSKRYGPLMQLRFGSLPVVVGASVEMAKLFLKTNDAAFSDRPRFAVGKYIAYDFSDLLWAPSGPCLRQARRICATELFSATRLESFEHIRDEEVRVMLRQLRQAAGRTVRLRDYLQMLTLGVISRIVLGKKYVQEEAADGEGDSASAMTPAEFGEMVDEFLVLHGVFNIGDYIPWLDWLDLQGYVARMKRMKARFGRFLERLLDVHNERRLREGGNFVAKDMLDVLLQLADDTSLEVQLNRDNVKAITQDLIIGGTDTSAKALEWAVSELLKNPKVLAKATEELDHVIGPDRLVTESDLPRLPYIEAVLKETLRLHPAAPMLAPHVAREDTSVDGYDVLAGTVVFINVWAIGRDPALWDAPEEFRPERFFESKIGVRGQDFQLLPFGSGRRMCPGINLALKVMALSLANLLHGFKWRLPDGVTAEELSMEEAFQLTVPRKFPLEAVVEPRLPDRLYTGA

SEQ ID NO: 13052 - DNA, 1593 bp, Zea mays
  CDS (1)..(1593)
atggctctcgaagcagcgtacgactacctgcacgtcgccgtcgtccagtgcacgcccacacaagcagcagcagtcctcggcgtcctcctcctcctcgccatccggctagccgcggcggcgaggagctcgtccgcgacgtcccccaaatggaagcagcacaggctgccgccgacgcctccggggaagctccccatcatcgggcacctccacctcatcggctcccacccgcacgtctccttccgcgacctccacgccaagtacggccacaacgggctgatgctggtgcaggtcggcgccgtgcccaccatcgtggtgtccacgccgcaggccgccgaggccgtgctccgcacgcacgaccacgtgctggcgtcccgcccgcggaaccccgtcgccgacatcatccgctacaactccacggacgtggccttcgcgccgtacggcgagtactggcgcacggcgcggaaggtggtcaacacgcacctgctcagcgccaagatggtcttctccaagcggcgggagcgggaggaggaggtgcgcctggtggtggcccggatccgcgacgccgccgaggcgtccccggggacggcgctcgacatgacggagctgctgggcggctacgccagcgacttcgtgtgccgcgccgtgctcggcgagtcccaccggaagcagggccggaacaagctgttccgggagctgacggagaccagcgccgccctcctgggcgggttcaacgtggaggactacttcccgaagctggcggacgtggacctgttcctccggatcatctgcgccaaggccaagggcgtcagcaagcggtgggacagcctcttcaacgagctgctgtccgagtacgcgctctccggcggcaagcagggcgaccacaactctgaagacttcgtgcacctcttgctgtcgctgcagaaagactacggtctcaccacggataacatcaagggcatacttgtgaacatgttcgaagcagccatcgagacatcattcctggtgctggagtactccatgagcgagctgatgaacaaccgccacgtcctggccaagctccagaaggaggtgaggacggcgacgcccgacggccgcatggtgatggaggaggacctgagccggatgccatacctgaaggccaccatcaaggagtccatgcgcatccacccgccggcgccgttcctcctgccgcacttctccacccacgactgcgagatcaacggctacaccatccccgccggcacgcgcgtcatcgtcaacgcgtgggcgctcgccagggacccgacgtgctgggacaaggccgaggagttcttcccggagcgcttcctggaacaaggccgcgacgccgaggtcgacatgtacggcaaggacatccggttcgtgccgttcggggcggggcgcaggatctgcgcgggggccacgttcgccatcgccaccgtcgagatcatgctcgcgaacctcatctaccatttcgactgggagatgcccgccgagatggagcgcaccggggccaaggtggacatgtccgatcagttcgggatgacgcttcgccggacgcagaaactttaccttgttcctagaattcccaaatga

SEQ ID NO: 13053 - protein, 530 aa, Zea mays
MALEAAYDYLHVAVVQCTPTQAAAVLGVLLLLAIRLAAAARSSSATSPKWKQHRLPPTPPGKLPIIGHLHLIGSHPHVSFRDLHAKYGHNGLMLVQVGAVPTIVVSTPQAAEAVLRTHDHVLASRPRNPVADIIRYNSTDVAFAPYGEYWRTARKVVNTHLLSAKMVFSKRREREEEVRLVVARIRDAAEASPGTALDMTELLGGYASDFVCRAVLGESHRKQGRNKLFRELTETSAALLGGFNVEDYFPKLADVDLFLRIICAKAKGVSKRWDSLFNELLSEYALSGGKQGDHNSEDFVHLLLSLQKDYGLTTDNIKGILVNMFEAAIETSFLVLEYSMSELMNNRHVLAKLQKEVRTATPDGRMVMEEDLSRMPYLKATIKESMRIHPPAPFLLPHFSTHDCEINGYTIPAGTRVIVNAWALARDPTCWDKAEEFFPERFLEQGRDAEVDMYGKDIRFVPFGAGRRICAGATFAIATVEIMLANLIYHFDWEMPAEMERTGAKVDMSDQFGMTLRRTQKLYLVPRIPK

SEQ ID NO: 13054 - DNA, 1539 bp, Zea mays
  CDS (1)..(1539)
atggagcaagcgtcccactatctgtgcctcttcctggctctgatcctaccgctcctgctcctcaggctactcagggggcgccgcagcgacagcggcgtccggctgccgcccggcccatggcggctgccggtgatcggcagcctacaccacctcgtgggcaagccgctggtgcaccgcgcgttcgccgacctcgcgcgccgtctggacgcgccgctcatgtacctcaggctcggcgaggtccccgtcgtggtggccacgtcccgggacgccgcgcgcgaggtcctgcggacgaacgacgtcacgttcgccacgcggccgtggagccccacgatgaagatcatgatgcaggacgggctgggcatggtgttcgcgccctacggcgaccactggcgccagctccggaagatcagcatcctggagctgctcagcgcccgccgcgtccagtcgtttcgccacgtccgggaggacgaggtggcgcgcctcgtcgccgcagtcgccgccaccgcaccaggccagcccgtcaacgtcagccaccggatcgccgtgctcgtcgccgattcggcggtgcgcgccatgatcggggacaggttcagcaggcgggacgagttcttggtgtcgctcgaggaggggctcaagctcgtctccgggttcagcctaggcgacctattcccgtcatcgccgtttatgaacttcctcagcgggacggcacggcgagcgcatgcgaaccataggaagaactttgagctcatggaatgcgccatcaagcagcacgaggaaaggagagcccaagcggcggtgaacggcgctgctgtccaggaggaggaagcagaggacctagtggacgtgctcttgaggatacaaaaggatggcggcctcgacatgcctctcacaatgggaataatcaaagccgttatacttgacttgttcagcgctggaagtgagacatcagcaactacactgaactgggcaatggcggagcttatgaggtgcccggatgtgatgaagaaagcacaagccgagctacgcgacagcctcaatggtaagccgaaagtgaccgaagatgacttggtagagatgaaatacttgaagctcatcatcaaggaaacgttgaggctgcatccagcggcgccattgcttgtgccaagggaagcaagggactcatgcaagatccttgggtacgacgtgccaaagggcaccacggtgttcgtgaacgcgtgggccattggcagggatcctgagtattgggatgatgctgaagagtttaagcctgagcgatttgagtgtggcacggtcgacttcaagggcatggactttgagtacataccgtttggtgccggtagaaggatatgccctgggatggtgtttgcacaggccaatatagagctcgcgctggctgcgctgctctaccacttcgactggaagctcgaagaggggctggagccaagtgagctggacatgactgaggacataggcctcactgttcgaaagaagaacgacatgcttttgcatcccagcgttagagtgccccataaatattga

SEQ ID NO: 13055 - protein, 512 aa, Zea mays
MEQASHYLCLFLALILPLLLLRLLRGRRSDSGVRLPPGPWRLPVIGSLHHLVGKPLVHRAFADLARRLDAPLMYLRLGEVPVVVATSRDAAREVLRTNDVTFATRPWSPTMKIMMQDGLGMVFAPYGDHWRQLRKISILELLSARRVQSFRHVREDEVARLVAAVAATAPGQPVNVSHRIAVLVADSAVRAMIGDRFSRRDEFLVSLEEGLKLVSGFSLGDLFPSSPFMNFLSGTARRAHANHRKNFELMECAIKQHEERRAQAAVNGAAVQEEEAEDLVDVLLRIQKDGGLDMPLTMGIIKAVILDLFSAGSETSATTLNWAMAELMRCPDVMKKAQAELRDSLNGKPKVTEDDLVEMKYLKLIIKETLRLHPAAPLLVPREARDSCKILGYDVPKGTTVFVNAWAIGRDPEYWDDAEEFKPERFECGTVDFKGMDFEYIPFGAGRRICPGMVFAQANIELALAALLYHFDWKLEEGLEPSELDMTEDIGLTVRKKNDMLLHPSVRVPHKY

SEQ ID NO: 13056 - DNA, 1644 bp, Zea mays
  CDS (1)..(1644)
atggcgatggcctccgcggcttgctcatgcacggacggcacgtggtgggtgtacgcgctcccggcgctgctcggctccgacaccctgtgcgcccacccggccctcctggctggcctgatctttctggccaccgtctcggtggctctgctggcgtgggccacgtcgccgggcggtccggcgtggacgaacggccgcggcgcctcggcgtcactcctatcgtgggaccccgtggtctgcccgtgttcggcagcatcttcgcgctgtcccggggctgccgcaccgcgccctcgccgagatggcccgcgccgcaggccccgggccaaggagctcatggcgttctccgtcggtgacacgcccgcggtcgtgtcgtcctgcccggccacggcacgtgaggtgctcgcgcacccgtcattcgccgaccgccctgtgaagcggtcggcccgggagctcatgttcgcgcgtgccatcgggttcgcgcccaacggcgagtactggcgccgcctccgccgcgtcgcgtccacgcacctattctccccgcgccgggtcgcctcgcacgagccgggacgccaaggtgacgcggaggccatgctccgctccatcgccgccgaacagtcggcctctggcgccgtcgccctccgcccgcacctccaggccgccgctctcaacaacatcatgggcagcgtcttcggcacgcggtacgacgtcacatcaggcgccggcgccgcggaggccgagcatctcaagagcatggtgcgcgaggggttcgagctcctcggcgccttcaactggtccgaccacctcccctggctcgcccacctgtacgacccaagcaacgtcacccgccggtgcgccgcgctcgtgccgcgcgtccagaccttcgtccgtggcgtcatcgacgagcaccggcgccgccgccaaaactccgccgccctcaacgacaatgctgacttcgtcgacgtgctcctctccctcgagggtgacgagaagctcggcgacgacgacatggtcgccatcctctgggagatggtcttccgcggtacggacacgacggcgcttctgaccgagtggtgcatggcggagctggtgcgccacccggcggtgcaggcgagggtgcgcgccgaggtcgacgcggctgtcggtgccggaggttgccccaccgacgccgacgtggcgcgcatgccgtacctgcaggcggttgtgaaggagacgctgcgcgcccacccgcctggcccgctgctgagctgggctcgcctcgccaccgccgacgtgccactctgcaacggcatggtggtcccggctggcaccacggcgatggtgaatatgtgggccataacccacgatgccgccgtgtgggccgacccggacgcgttcgcgccggagcggttcctgccctccgagggcggcgccgacgtggacgtccgcggcgtcgacctccgcctggccccgttcggcgccgggcgtcgcgtctgccccggcaagaacctgggcctcaccaccgtgggcctctgggttgcccgcctcgtgcacgccttccagtgggccctgcctgacggcgcggcggccgtttgcctcgacgaggtcctcaagctctccctggagatgaagacgccgctcgtcgccgcagccatcccccgcaccgcctga

SEQ ID NO: 13057 - protein, 547 aa, Zea mays
MAMASAACSCTDGTWWVYALPALLGSDTLCAHPALLAGLIFLATVSVALLAWATSPGGPAWTNGRGASASLLSWDPVVCPCSAASSRCPGAAAPRPRRDGPRRRPRAKELMAFSVGDTPAVVSSCPATAREVLAHPSFADRPVKRSARELMFARAIGFAPNGEYWRRLRRVASTHLFSPRRVASHEPGRQGDAEAMLRSIAAEQSASGAVALRPHLQAAALNNIMGSVFGTRYDVTSGAGAAEAEHLKSMVREGFELLGAFNWSDHLPWLAHLYDPSNVTRRCAALVPRVQTFVRGVIDEHRRRRQNSAALNDNADFVDVLLSLEGDEKLGDDDMVAILWEMVFRGTDTTALLTEWCMAELVRHPAVQARVRAEVDAAVGAGGCPTDADVARMPYLQAVVKETLRAHPPGPLLSWARLATADVPLCNGMVVPAGTTAMVNMWAITHDAAVWADPDAFAPERFLPSEGGADVDVRGVDLRLAPFGAGRRVCPGKNLGLTTVGLWVARLVHAFQWALPDGAAAVCLDEVLKLSLEMKTPLVAAAIPRTA

SEQ ID NO: 13058 - DNA, 1506 bp, Zea mays
  CDS (1)..(1506)
atggacctcgccctcctagagaaggccctgctgggcctgttcgccgcggctgtggtggccatcgccgtggccaagctgaccggcaagcggtaccgcctcccaccggggcccccgggcgcccccgtggtgggaaactggctgcaggtgggcgacgacctgaaccaccgcaacctgatggccatggcgaagcggttcggcgacatcttcctgctgcgcatgggcgtgcgcaacctggtggtggtgtcgaccccggagctggccaaggaggtgctccacacgcagggcgtggagttcggctcccgcacccgcaacgtggtgttcgacatcttcacgggcaaggggcaggacatggtgttcacggtgtacggcgaccactggcgcaagatgcggcgcatcatgaccgtccccttcttcaccaacaaggtggtggcccagaaccgcgccgggtgggaggaggaggcccggctggtggtggaggacgtgaggaaggaccccgaggccgcggccggcggcgtcgtgctccgccgccgcctccagctgatgatgtacaacgacatgttccgcatcatgttcgaccgccggttcgacagcgagcacgacccgctcttcaacaagctcaaggcgctcaacgcggagcgcagccgcctgtcgcagagcttcgagtacaactacggcgacttcatccccgtgctccgccccttcctccgcggctacctcaaccgctgccacgacctcaagacgcgccgcatgaaggtcttcgaggacaacttcgtacaggagcgcaagaaggtgatggctcagactggtgagatccggtgcgccatggatcacatcctcgaggccgagaggaagggcgagatcaaccacgacaacgtcctctacatcgtcgagaacatcaacgtcgcagcgatcgagacgacactgtggtcgatcgagtggggcatcgccgagctggtgaaccacccggccatccagcacaagctccgggaggagctcgcctcggtgctgggcgccggcgtgcctgtgacggagccggacctcgagcgcctcccctaccttcaggccatcgtcaaggagacgctccgcctgcgcatggccatcccgctgctggtcccccacatgaacctcaacgacggcaagctcgccggctacgacatccccgccgagtccaagatcctcgtcaatgcctggttcctcgccaacgaccccaagaggtgggtgcggcccgacgagttccggcccgagcgcttcctggaggaggagaagtccgtggaggcccacggcaacgacttccgcttcgtgccctttggggtcggccgccggagctgccctgggatcatcctcgcgctgcctatcatcggcatcaccctgggccggctggtgcagaacttccagctgctgccgccgccggggctggacaagatcgacaccacggagaagcccggccagttcagcaaccagatcgccaagcatgccaccatcgtctgcaagcccctcgaggcctag

SEQ ID NO: 13059 - protein, 501 aa, Zea mays
MDLALLEKALLGLFAAAVVAIAVAKLTGKRYRLPPGPPGAPVVGNWLQVGDDLNHRNLMAMAKRFGDIFLLRMGVRNLVVVSTPELAKEVLHTQGVEFGSRTRNVVFDIFTGKGQDMVFTVYGDHWRKMRRIMTVPFFTNKVVAQNRAGWEEEARLVVEDVRKDPEAAAGGVVLRRRLQLMMYNDMFRIMFDRRFDSEHDPLFNKLKALNAERSRLSQSFEYNYGDFIPVLRPFLRGYLNRCHDLKTRRMKVFEDNFVQERKKVMAQTGEIRCAMDHILEAERKGEINHDNVLYIVENINVAAIETTLWSIEWGIAELVNHPAIQHKLREELASVLGAGVPVTEPDLERLPYLQAIVKETLRLRMAIPLLVPHMNLNDGKLAGYDIPAESKILVNAWFLANDPKRWVRPDEFRPERFLEEEKSVEAHGNDFRFVPFGVGRRSCPGIILALPIIGITLGRLVQNFQLLPPPGLDKIDTTEKPGQFSNQIAKHATIVCKPLEA

SEQ ID NO: 13060 - DNA, 1575 bp, Zea mays
  CDS (1)..(1575)
atggaaatggaactagaccctttcctgggcgtcgtgctcgccaccgccgtcctcctcgtcgccgtcctccgccggaagcgcggctccagccgcaagtacaagatgccacccgggcctaggccgtggccggtgatcggcaacctcaacctgatcggcgcgctcccgcaccgctccatccacgcgctctccgcgcggcacggcgcgttcatgtcgctccgcttcggctccgtccccgtcgtcgtcggctcctccgtggaaacggccaggttcttcctcaggaccagcgacacgtcgttcatcgaccgccccaggatggcggccgggaagtacaccgcctacgactactccgacatcgtctggtcgccctgcggggcgtactggcgccaggcgcgcaagctctggaaggcccatctgttcagcgacaggcagctcaggtcgcaggagcacgtccgcagcgaggagctgcgcgtccttctgcacgctctgtcgtcgtcctcctccgcgggggtggccgggcgcggccggcgcgccatcgcgctcaaggagcacctgctcatgtacagcctcaacgtgatctcgcgcatggcgctgggcgggaagtacgtcggcgagggcggcaccacgggctcgccgatctcgccggccgagttcagctggatggtcgacgagctcttcctcctcaacggcgtgttctgcgtcggggacttcatcccgtggctcggctggctggacctccagggctacgtcgggaggatgaagaggctgggcaagatgttcgatcgcttcctggagcacgtggtggacgagcacgaccagcggcggcggcgggagggcggcgggttcgtccccgcggacatggtggacctgctgctggagctcgccgacgaccccaaactcgaggtccccatcgaacgggatggcgtcaagggattcgcgctggacctgatcgctggcggcacggactcgtcggcggtgaccatcgagtgggccatgtcggagctcctgcggaagcccgaggtcctcgccaaggtcaccgaggagctggacggcgtcatcgggcacggccgcctggtcaccgagcaggacatcccggacctgccgtacctggaggccgtcgtgaaggagaccctccgcctgcacccggtgacgccgctgctggcgccgcggctgtgccgcgaggacgcgtgcacgggcacctacgacatcccgcggggcacgctggtgttcgtcaacgtctgggccatcggccgcgaccccgccgtgtggggccacgacgcggaggagttccgcccggagaggttcgtcggcagcgccgtggacgtgaagggccacgacctggagctgctcccgttcgggtccggccgccggatgtgcccgggctacgtcctcgggctcaagatggtgcaggtcaccctggccaacctgctgcacgccttctcgtggaggctgcctgatagcgtggcgccggagaagctgaacatgcaggagaagttcgggctcgccgtgccgcgcttggtcccgctcgaggccgtcgccgtgcccaggctgccaccacacctgtatgccgggccatga

SEQ ID NO: 13061 - protein, 524 aa, Zea mays
MEMELDPFLGVVLATAVLLVAVLRRKRGSSRKYKMPPGPRPWPVIGNLNLIGALPHRSIHALSARHGAFMSLRFGSVPVVVGSSVETARFFLRTSDTSFIDRPRMAAGKYTAYDYSDIVWSPCGAYWRQARKLWKAHLFSDRQLRSQEHVRSEELRVLLHALSSSSSAGVAGRGRRAIALKEHLLMYSLNVISRMALGGKYVGEGGTTGSPISPAEFSWMVDELFLLNGVFCVGDFIPWLGWLDLQGYVGRMKRLGKMFDRFLEHVVDEHDQRRRREGGGFVPADMVDLLLELADDPKLEVPIERDGVKGFALDLIAGGTDSSAVTIEWAMSELLRKPEVLAKVTEELDGVIGHGRLVTEQDIPDLPYLEAVVKETLRLHPVTPLLAPRLCREDACTGTYDIPRGTLVFVNVWAIGRDPAVWGHDAEEFRPERFVGSAVDVKGHDLELLPFGSGRRMCPGYVLGLKMVQVTLANLLHAFSWRLPDSVAPEKLNMQEKFGLAVPRLVPLEAVAVPRLPPHLYAGP

SEQ ID NO: 13062 - DNA, 1560 bp, Zea mays
  CDS (1)..(1560)
atggatgaccactactacgtctacctcggactggcgctggtgtcgctgctcgttgtcgtgctcgcgaagcgccggcgcggcccggtggacggccacggcctgcggctcccgccggggccgtggcagctgccaatcatcggcagcatgcaccatctcgcgggccagctccctcaccgcgcgatgcgcgacctggcgcggcgccacggggccgtgatgctgctccgcgtcggcgaggtgccgacgctggtggtctcctcccgcgaggcggcgcgcgaggtgatgaagacgcacgacaccgcgttcgcgtcccggccgctgagcgccacggtgcgcgtgctgacgaacaacggccgggacatcatcttcgcgccctacggggagcactggcgccagctgcggaaggtggccatcacggagctcctgagcgcgcgccgggtgctctccttccgcgccatccgcgaggaggaggtcgcggccacgctgcgcgcgtgcgccgccgccgcggcggagtcgccgccgcgccccgtggagatgcgcgcgcggctgtccgcgctcgtggccgacgccacggtgcgcgccgtgatgggcgaccggtgcagggaccgcgacgtgttcctgcgggagctcgaccgctccatcgggctatcggcggggttcaacccggccgacctgtggccgtcctcccgcctcgtcggcctgctgagcggcgccgtgcggcgcgccgaggagtgccgggacacggtgttcgggatcctcgacggcatcatcaacgagcacctgcagaggatggacagcgccggcgccggcgccggcgccggcgaggctgcaggcgaggaccttctcgacgtgctgctcaagatacacaaggatggcagcctccaaatcccgctcgacatggacgtgcttaaagccgtcatctttgacatcttcggcgccggcagcgagacgtcggcgaccacgctggagtgggccatggcggagctgatccggaaccccaaggcgatgcagcgggcgacggccgaggtgcgcgaggccttcggcgcgcgcggcgcggtggccgagcacgagctgggcgagctgcggtacctgcacctcgtgatccgggagacgttccggctgcacccgccgctgccgctgctgctcccgcggcagtcccaggagccgcgccgcgtgctgggctacgacgtgcccgcgggcaccaccgtgctagtgaacgtctgggcgctgggccgcgacggcaggtactggccgggcgaccccgaggagttccggcccgagcggttcgaggccgaggccagcgaggtggagttcaagggcgccgacttcgagctcctgccgttcggcgccggccggaggatgtgcccgggcatggcgttcgggctcgccaacgtcgagctcgcgctcgccagcctgctgttccacttcgactgggaggcgcccggcgtgtctgaccccgccgagttcgacatggccgaggcgtttggcatcaccgcgagacggaaggccgacctcctactccgccccatcctccgcgtgcgcctccccgttcccggtgtctaa

SEQ ID NO: 13063 - protein, 519 aa, Zea mays
MDDHYYVYLGLALVSLLVVVLAKRRRGPVDGHGLRLPPGPWQLPIIGSMHHLAGQLPHRAMRDLARRHGAVMLLRVGEVPTLVVSSREAAREVMKTHDTAFASRPLSATVRVLTNNGRDIIFAPYGEHWRQLRKVAITELLSARRVLSFRAIREEEVAATLRACAAAAAESPPRPVEMRARLSALVADATVRAVMGDRCRDRDVFLRELDRSIGLSAGFNPADLWPSSRLVGLLSGAVRRAEECRDTVFGILDGIINEHLQRMDSAGAGAGAGEAAGEDLLDVLLKIHKDGSLQIPLDMDVLKAVIFDIFGAGSETSATTLEWAMAELIRNPKAMQRATAEVREAFGARGAVAEHELGELRYLHLVIRETFRLHPPLPLLLPRQSQEPRRVLGYDVPAGTTVLVNVWALGRDGRYWPGDPEEFRPERFEAEASEVEFKGADFELLPFGAGRRMCPGMAFGLANVELALASLLFHFDWEAPGVSDPAEFDMAEAFGITARRKADLLLRPILRVRLPVPGV

SEQ ID NO: 13064 - DNA, 1509 bp, Zea mays
  CDS (1)..(1509)
atgggtgcgctcttgccatggctggcatggttgctcgtctccctcgtcggcgtctacctcctcggccatctcgtgcaggcccgtcgtcgtcgtggtctaccgccgggaccccacccgctgcccatcatcggcagcctccacctgctcggtaaccaaccgcaccgctccctcgccaggctcgccaagacccacggcccgctcgtgtcgctccgcctgggctcggtgaccacggtggtcgcctcctccccggccgccgcccgggagatcctgcagcggcacgacgccgccttcagcaacaggtccgtgccggacgccccgggcgcccacgccaggaactccacggtgtggctgcccaacgcgccgcgctggcgcgcgctgcggaagatcatgggcacgcagctgttcgcgccgcacaggctggacgcgctccagcacctccggcgcgacaaggcgcgggagctcgtggaccacgtgcggcggctggcgcgcaggggcgagcccgtgaacgtcggccgcgtcgccttcaccaccagcctcaacctcgtctcgcgcaccatcttctcccgcgacctggccagcctcgaggacgacggcgcgtccaggaagttccaggaggtggtgacggacatcatggaggccgtgggcagccccaacgtctccgacttcttcccggcgctcgccgttgccgacctgcagggctgccggcggcggctggcgcggctgttcgcgcggctgcaccggatcttcgacgaagagatcgacgcgaggctgcgtggccgcgacgctggcgagcccaagaagaacgacttcctcgacctgctgctggacgccgcagaggacgatgacaacacggccggcctggatcgcgacacgctccgttcactcttcacggacttgttttctgctgggagtgacacaagctccagctcagtggaatgggcaatggtggagctgcttcgaagcccgggttcaatggctaaagcatgcgacgagcttgcaacagtcatcggcccaagaaaagacatcgaggaatctgatattgggcggctgccctacctccaagccgtggtgaaagagaccttcagactgcatcctgctgccccgctgttgctaccgcggcgtgcccaggccgacgtgaagatgatgggctacgtgattcccgaagggtctcgagtgttcgtaaacgtatgggcgatgggccgagacgaggagacgtggcctgagcctgagaagtttatgcccgagaggttcctggggaagaagaagacgcaggcggttgatctcaggggcggggacttcgatctcatcccgttcggtggaggacgccggatctgccctgggatgccgctggcgatcaggatggtgcatctgctgcttgcgtcgctcttgaatcagtttgcatggaggcttccggctgagctagagaggaatggagttgacatggctgagaatttcggcatcacgttgaccaaggccgtgcctctttgtgccatagccacagagatctga

SEQ ID NO: 13065 - protein, 502 aa, Zea mays
MGALLPWLAWLLVSLVGVYLLGHLVQARRRRGLPPGPHPLPIIGSLHLLGNQPHRSLARLAKTHGPLVSLRLGSVTTVVASSPAAAREILQRHDAAFSNRSVPDAPGAHARNSTVWLPNAPRWRALRKIMGTQLFAPHRLDALQHLRRDKARELVDHVRRLARRGEPVNVGRVAFTTSLNLVSRTIFSRDLASLEDDGASRKFQEVVTDIMEAVGSPNVSDFFPALAVADLQGCRRRLARLFARLHRIFDEEIDARLRGRDAGEPKKNDFLDLLLDAAEDDDNTAGLDRDTLRSLFTDLFSAGSDTSSSSVEWAMVELLRSPGSMAKACDELATVIGPRKDIEESDIGRLPYLQAVVKETFRLHPAAPLLLPRRAQADVKMMGYVIPEGSRVFVNVWAMGRDEETWPEPEKFMPERFLGKKKTQAVDLRGGDFDLIPFGGGRRICPGMPLAIRMVHLLLASLLNQFAWRLPAELERNGVDMAENFGITLTKAVPLCAIATEI

SEQ ID NO: 13066 - DNA, 1557 bp, Zea mays
  CDS (1)..(1557)
atggaccacagtgtgtactactgccttgtagctcttcttccacttgtgtacttccttctcaagtcgtcgtggaagaaagctcccttcggatctggtagccgccatggactaaagctccctccaggcccatggcagctccctgtcatcggcagcatccaccatctccgtggctttctcgcgcaccacgctctgagggacctatcgctccgctatgggcctctcatgttcctcaagctgggcgagctcccagtggtcgtagcatccacgccggaggctgcgaaagaggtgatgaagacccacgacgccatcttctcgaccaggccactgagctcaaccattaggacggtctccaaggatggcctaggcatcgtctgggctccgtacggcgaccactggcggcagctccgcaagatctgcaccatgcagctgctcggcgcgcggcgcgtccagtccctgcggcccgcgcgcgaggaggaggcgttccggctggtccgagccgtcatgtcctcgtccaccgcggcaggaggagctgcgccgccgccgctcgtggacctcggcaagctggccgccgtgtacgtcgccgaggcgtcgttgcgcgccatcttgggcagacggttcaaggtcgaggaccgggacacgctgctgcgctacgtggatgacggcgtccggctggccggcgggttcacgcccagagacctgttcccgtcgtcgtggctcgtccgcgccctgacccaccgggccgtgcgcgaggtggatgcctaccgagactccttgttcgccttcatggatgtagtggtaggtgagcgcttggatcgacgaaggtcaactgaagaagaggaggaggagggagaggatctgattgacgttctcctccggagccacaaggaaggaaacctcccgttccctctcaccatgaggacaatcgaagcggtcatatttgatctgatcggagggggtatcgagacagcaacaacaacgctgcagtgggcgatggcggagctgatgaggaatccaggcatcatggccaaggcacaggccgaggtcaggggattgttcatgggccaaaccaaggtaaccgaagaccggctaggcgagctaccctacctgcagctggtcatcaaggagacgctgaggctgcatgtcccggggccgctgctgatcccaagggagtgccaggagcagtgccggatactgggctacgacgtgcccaggggagccatggtgctcgtgaacgcctgggccatcgctcggagcccggatcactgggaggagccggacgcgttcgtccctgagaggttcgtcggtgacgcgagggatttcaagggcaacgacctggagttcatcccgtttggcgccgggaggaggatctgccctgggatgtcgttcgggctggccaacgtcgagctcggtctcgccagcttgctcttctacttcgactggagtctcccggcgggcgtccttcctgctgagatggacatggccgagaccatggggatcactgctaggaggaaagcagacctcttcttgtctgctactctgagtgtcaaactgccttaa

SEQ ID NO: 13067 - protein, 518 aa, Zea mays
MDHSVYYCLVALLPLVYFLLKSSWKKAPFGSGSRHGLKLPPGPWQLPVIGSIHHLRGFLAHHALRDLSLRYGPLMFLKLGELPVVVASTPEAAKEVMKTHDAIFSTRPLSSTIRTVSKDGLGIVWAPYGDHWRQLRKICTMQLLGARRVQSLRPAREEEAFRLVRAVMSSSTAAGGAAPPPLVDLGKLAAVYVAEASLRAILGRRFKVEDRDTLLRYVDDGVRLAGGFTPRDLFPSSWLVRALTHRAVREVDAYRDSLFAFMDVVVGERLDRRRSTEEEEEEGEDLIDVLLRSHKEGNLPFPLTMRTIEAVIFDLIGGGIETATTTLQWAMAELMRNPGIMAKAQAEVRGLFMGQTKVTEDRLGELPYLQLVIKETLRLHVPGPLLIPRECQEQCRILGYDVPRGAMVLVNAWAIARSPDHWEEPDAFVPERFVGDARDFKGNDLEFIPFGAGRRICPGMSFGLANVELGLASLLFYFDWSLPAGVLPAEMDMAETMGITARRKADLFLSATLSVKLP

SEQ ID NO: 13068 - DNA, 1578 bp, Zea mays
  CDS (1)..(1578)
atggcaaaccaagtgcagcaggtgttcatgcgtgagatgacgtctccacgagcatggtttctactactcatcccactcctgctcttcctcgtgcgctactcgttcggtgccaagagagagaggcagaggcaacctctgctggtagacgacgacgaccctctcccgccttcgcctccggcgctgcccgtccttgggcacctccacctggtcggctcgctccctcacctctccctctggaacctcgccaggaagcacggcacggacctcatgttcctccgcctcggcgccatgccggtcatcgtggtgtcgtcgccacgggccgccgaggcggtgctgcgcacgcacgaccacgtgttcgcgtcgcggccgcactccttagtcgctgagatcgtcctctacggcccgtccgatgtgggtttcgcgccgcacggggaatactggcggcaggcgaggaagctggtcaccacgcacatgctcagcgtcaagaaggtgcaggcgctgcgccttgcccgcgaggaggaggtgagagtggtgatggcccagattggcgaggcagccgcggcaggtgcggccgtggacatgagcgacctgctcggctcgttcgtcaacgacctgggctgccgcgccgtgatgggcaagtccttccggagcgagggccggaacaagctgctccggcagcttctcagtgacacctcgccgctgctggctggtttcaacgtggaggagttcttcccgttcttggctcggtttggcgtgctcagcaagatggttcgcgcgaaatccgagaggctgaaacggaggtgggaccatctgctggacaagctgatccaggaccacgagagggataacagcagcgatccgaaagataaagacgccaaattcatccatgttctgctgtccgttcgacatgagtacggcctcagcaggcagcagatgaaaggaatcctgcttgacgtatttttcgcaggaatagagacgtcgtcttcggtgctggacttcaccatgtcggagctcatgcggaggccgcgtctgatgaagaagcttcaagccgaggtggacagcagcgtccccgagggacaagaagccgtgagcgaagctgatctagccctagccgacatgacttacctgagagccgtcgtgaaggagtcgctccggctacaccccgtggcgcctctgctcccgcacttctccatggctccctgcagcatcgacggctacaccgtcccggctggggtgcgggtcttgatcaacgcgctggccatcggcagggacgcgcgctactgggaggacgccgaggagttcctccccgacaggttcgtcggccacggcagcgccgcgcacgtcggcttcaaggggaacgatttccagttcctgccttttgggtctggacggaggatgtgcgctggggtgaacatggggatagccagcgtcgagctgatgctggctaacctcgtgcgtcgttttgactgggagctgccggtggggaagaagagaggtgacatcggtatgtcggaggtgtttgggttagtagtgaacagaaaagacaaacttgtattggttccgaaattgcgcgtgtag

SEQ ID NO: 13069 - protein, 525 aa, Zea mays
MANQVQQVFMREMTSPRAWFLLLIPLLLFLVRYSFGAKRERQRQPLLVDDDDPLPPSPPALPVLGHLHLVGSLPHLSLWNLARKHGTDLMFLRLGAMPVIVVSSPRAAEAVLRTHDHVFASRPHSLVAEIVLYGPSDVGFAPHGEYWRQARKLVTTHMLSVKKVQALRLAREEEVRVVMAQIGEAAAAGAAVDMSDLLGSFVNDLGCRAVMGKSFRSEGRNKLLRQLLSDTSPLLAGFNVEEFFPFLARFGVLSKMVRAKSERLKRRWDHLLDKLIQDHERDNSSDPKDKDAKFIHVLLSVRHEYGLSRQQMKGILLDVFFAGIETSSSVLDFTMSELMRRPRLMKKLQAEVDSSVPEGQEAVSEADLALADMTYLRAVVKESLRLHPVAPLLPHFSMAPCSIDGYTVPAGVRVLINALAIGRDARYWEDAEEFLPDRFVGHGSAAHVGFKGNDFQFLPFGSGRRMCAGVNMGIASVELMLANLVRRFDWELPVGKKRGDIGMSEVFGLVVNRKDKLVLVPKLRV

SEQ ID NO: 13070 - DNA, 1665 bp, Zea mays
  CDS (1)..(1665)
atgtctgcggccgtggcattggcggtcatcttggccgtctacgtcgtcctcaggtatatagcctctccgagaggcaggtctaagcctctgaaccttccacctggcccgcgaggatggccggtgatcggaagcctcggcgcactggcaggcgcgcttccgccgcaccgagcgctggccgcgctagcggcgcgccacggcccgctcatgcacctgcgcctcggctcctaccacgcggtggtggcctcgtcggcggacaccgcccggctcgtcctcaaggtccacgacctcgccttcgccgaccggccgcgcacggccgccggcgaggtcgcctcctacggctacctcggcatcgtgcacaccccgtacggcgcctactggcgcatggcgcgcaagctctgcgccaccgagctcttctccgcgcgccgcgtggactcgttcgagcgcgtccgcgcccaggagatgcgcgcgctcgcgcgcggcctgttcgagtgcgccggccgcggcgccgtcgcggtcagggagcacgtggcgggcgccacgctgcggaacatcctccgcatggcggtcggggagaagtggtcgggctgctacggtagccccgagggcgaggcgttccggcgcacgctggacgaggcgttcgcggtcaccggcgcggtcagcaacgtcggcgagtgggtcccgtggctgggctggctcgacctgcagggctgcgtccgccggatgaagcgcctccgcgcgcagtacgaccgcttcttcgagcagatcctcgacgaccacgaccacaagaagacgcggcgggagcgaggccgacccggcgccggcgactccgcggcggacgatgacctggtcgacgtgctgctgcggctggtcgaggaggacgaggacaggccggagacgacggaggccagcaggctcacgcgcgacggcgtgaaagcgttcgtccaggacatcgtcgccggcggcacggagagctcggcggtcacgatcgagtgggccatgtcggagctcctccgccggccggacgccttgcgggctgccaccgccgagctcgaccgcgtgattgggcacggccgctgggtcacagagcgcgacctcccggacctcccctacatcgacgccgtcgtgaaggagacgatgcggctgcacccggtcggcccgctcctcgtcccgcaccacgcccgcgagcacacggtggtggccggctacgacgtccccgccggtgcgcgcgtgctggtgaacgtgtgggccatcgctcgcgaccccgcgtcatggcctgacgcgcctgacgcgttccggccggagcggttcttgaacggcagctccggcgccagcgtcgacgtgcgcggcgcgcactttgagctgctgccgttcggggccgggcggcggatgtgccccgcgcacggcctcgcgatgaagctggtgaccgctggcgtggcgaacctggtgcacgggttcgcgtggcggctgccggacggtatggcgccggaggatgtgagcatggaggagctatttgggctttccacgcgccggaaggtcccgctcgtcgccgtcgcggagcccaggctgccggcgcacctctacactaatgtcacgccgccacagcaggtcgcgggctccacgattgcgaacttgtccaccaggccggagtacaagctcgtgttctga

SEQ ID NO: 13071 - protein, 554 aa, Zea mays
MSAAVALAVILAVYVVLRYIASPRGRSKPLNLPPGPRGWPVIGSLGALAGALPPHRALAALAARHGPLMHLRLGSYHAVVASSADTARLVLKVHDLAFADRPRTAAGEVASYGYLGIVHTPYGAYWRMARKLCATELFSARRVDSFERVRAQEMRALARGLFECAGRGAVAVREHVAGATLRNILRMAVGEKWSGCYGSPEGEAFRRTLDEAFAVTGAVSNVGEWVPWLGWLDLQGCVRRMKRLRAQYDRFFEQILDDHDHKKTRRERGRPGAGDSAADDDLVDVLLRLVEEDEDRPETTEASRLTRDGVKAFVQDIVAGGTESSAVTIEWAMSELLRRPDALRAATAELDRVIGHGRWVTERDLPDLPYIDAVVKETMRLHPVGPLLVPHHAREHTVVAGYDVPAGARVLVNVWAIARDPASWPDAPDAFRPERFLNGSSGASVDVRGAHFELLPFGAGRRMCPAHGLAMKLVTAGVANLVHGFAWRLPDGMAPEDVSMEELFGLSTRRKVPLVAVAEPRLPAHLYTNVTPPQQVAGSTIANLSTRPEYKLVF

SEQ ID NO: 13072 - DNA, 1629 bp, Zea mays
  CDS (1)..(1629)
atggctgctcaactgcatcacgcactatacgagctgctgcacgaagcagcagcagcgcaacgagcgctgctgctcgcgatccccttctccctgctgctcctgccgctcctgctccgctacctcgcggcgtcggcgtcggcgtcggcgtcggcgacaaagaacgacggagcggcggcggtggcggccagcgaccccgacaagctcttgagcctgctgccgtcgccgcccatgaagctccccatcatcgggcacctgcacctgatgggggacatcccctacgtgtccctcgccgcgctcgccaccaggtacggcccggacctgatgctgctccgcctcggcgccgtgccgaccgtggtggtctcgtcgccgcgcgtcgccgaggccgtgctccgcacctacgaccacgtcttctcctcccgcccgcgctccctggtgtccgacatcatcatgtacggcgccaccgactcgtgcttcgcgccctacggcgaccacttccgcaaggcgcggaagctggtcaccgtgcacctgctcaacgccagcaaggtgcggtcgcagcggcccgcgcgggaggaggaggtgcgcggcgcgctcgacagggtgcgccgcgccgccgccgcgcgggagcccgtcgacatgagcgagctcctgcactccttcgtcaacaacctcgtctgccgcgccgtctcgggcaagttctccatggaggaaggccgcaacaggctgttccgggagctcaccgacatcaacgcgggcctcctcggagggttccacatccaggactacttccctagcctgggccggatcgagctcgtcaggaaggtggcgtgcgccaagaccaggcgcgtcaggaagcgctgggacgacctcctcgacaagctcatcgacgaccatgcggccaggatggcaacccatcaggacgaggacgacgataaggacttcatatacgtcttgctgtctcttcagaaggagtatggcctcaccagagaccatatcaaggctatcttgatagacatgttcgaggccggaaccgacacctcgtacatgacgttggagttcgccatgacggagctcatacggaagccacacctgatgaagaagctgcaggaagaagtgcggcggaacgtgccggcggggcaggagatggtcaccgaggacaacctccccggcatgacctacctcaaggccgtcatcaaggagacgctccgcctgcacccgccggtcccgctcctcctcccgcactactccctggacgcctgcgaggtcgccggctacaccatcccggccaacacccgcgtcgtcgtcaacgcctgggcgctcggccgccacagcggctactgggagcgcgagaacgagttcgtcccggagaggttcctcagcggggacgtggccggcggcgtcgacctcaagcccaacgagttccagttcctggcgttcgggtccggccggaggatgtgccccggggtccactcggcgtccgcgaccatcgaggcgatgctgtccaacctcatgtaccggttcgactggcagctgccggcggggatgaaggcggaggacgtggacatgaccgaggtgtttgggatcacggtctcgaggaaggagaagctgctcctagtcccacaggctgcgtga

SEQ ID NO: 13073 - protein, 542 aa, Zea mays
MAAQLHHALYELLHEAAAAQRALLLAIPFSLLLLPLLLRYLAASASASASATKNDGAAAVAASDPDKLLSLLPSPPMKLPIIGHLHLMGDIPYVSLAALATRYGPDLMLLRLGAVPTVVVSSPRVAEAVLRTYDHVFSSRPRSLVSDIIMYGATDSCFAPYGDHFRKARKLVTVHLLNASKVRSQRPAREEEVRGALDRVRRAAAAREPVDMSELLHSFVNNLVCRAVSGKFSMEEGRNRLFRELTDINAGLLGGFHIQDYFPSLGRIELVRKVACAKTRRVRKRWDDLLDKLIDDHAARMATHQDEDDDKDFIYVLLSLQKEYGLTRDHIKAILIDMFEAGTDTSYMTLEFAMTELIRKPHLMKKLQEEVRRNVPAGQEMVTEDNLPGMTYLKAVIKETLRLHPPVPLLLPHYSLDACEVAGYTIPANTRVVVNAWALGRHSGYWERENEFVPERFLSGDVAGGVDLKPNEFQFLAFGSGRRMCPGVHSASATIEAMLSNLMYRFDWQLPAGMKAEDVDMTEVFGITVSRKEKLLLVPQAA

SEQ ID NO: 13074 - DNA, 1542 bp, Zea mays
  CDS (1)..(1542)
atggagacggcctccttcctctcagtggcgctggccctggcggccctcgtccccgtctcgctgctccttgtgaaccggctcctctacggcaaactgcccccggggccgcggcggcgtcccgtggtgggtaacctgttcgacgtgcagcccgtgcggtgccggtgctaccaggagtgggcgcgccggtacgggcccatcatgacggtgtggctgggcacgtcgcccacggtggtggtgtccacgtcggagctggccaaggaggtgctcaagacccacgaccagcagctcgccgaccgctgccgggaccgctccaccgagagcttcagccgaggcggccaggacctcatctgggccgactacggcccccactacatcaaggtgcgcaagctctgcaacctcgagctcttcacgcagcgccgcctcgaggcgctcaggcccatccgcgaggacgaggtcaccgccatggtcgagtccgtctacaaagccgtcaccgcgcctggcagtgcagggaagccgttggttgtaaagaaccacctctcgatggtggccttcaacaacatcacgcggctggccttcgggaagcggttcgtggacgcggccggcgagctggacgagcaagggcgcgagttcaaggggatcgtccacaacggcatcaagatcggtgcgtccctctccatcgcgcagcacatcccgtggctacgctggctggccccggacgacgagcaggccttcaaagcccacggcgaacggcgcgaccgcctcaccgtgaagatcatggaggagcacgccagggccctcaagcagcgcggcgcccagcagcacttcgtcgacgcgctcttcactctcagggacaagtacgacctcagcgatgacaccgtcataggcctcctctgggacatgatcaccgccggcacggacacgacggtgatctcggtggagtgggcgatggcggagctgctgaggaaccccagagtgcaggagaagctgcaggaggagctggaccgtgtcgtcggccgcgaccgggtcctgtcggagacggacttcccgaacctgccttacctgcaggccgtcgtcaaggagtccctgcgcctgcacccgccgacgccgctgatgctcccccacagggccagcgccagcgtcaagatcgccggctacgacatccccaagggcgccaacgtcgtcgtcaacgtgtgggcggtggcgcgcgaccccgaggtgtgggacagcccgctcgagttccggccggagcggttcctccgggagaacatcgacatcaagggcgccgacttccgcgtgctgccgttcggcgccggccgccgggtgtgccccggcgcgcagctcgggatcaacctcgtggcgtccatgatcggccacatgctgcaccacttcacgtggacgctgccgagcgggacctgtcccgaggacgtgagcatgatggagtcccccgggctcgtcaccttcatggccacgccgctgcaggccgtcgccacgccgcgcctggacaaggaggaactgtacaggcgtgtcccttcggacgtgtga

SEQ ID NO: 13075 - protein, 513 aa, Zea mays
METASFLSVALALAALVPVSLLLVNRLLYGKLPPGPRRRPVVGNLFDVQPVRCRCYQEWARRYGPIMTVWLGTSPTVVVSTSELAKEVLKTHDQQLADRCRDRSTESFSRGGQDLIWADYGPHYIKVRKLCNLELFTQRRLEALRPIREDEVTAMVESVYKAVTAPGSAGKPLVVKNHLSMVAFNNITRLAFGKRFVDAAGELDEQGREFKGIVHNGIKIGASLSIAQHIPWLRWLAPDDEQAFKAHGERRDRLTVKIMEEHARALKQRGAQQHFVDALFTLRDKYDLSDDTVIGLLWDMITAGTDTTVISVEWAMAELLRNPRVQEKLQEELDRVVGRDRVLSETDFPNLPYLQAVVKESLRLHPPTPLMLPHRASASVKIAGYDIPKGANVVVNVWAVARDPEVWDSPLEFRPERFLRENIDIKGADFRVLPFGAGRRVCPGAQLGINLVASMIGHMLHHFTWTLPSGTCPEDVSMMESPGLVTFMATPLQAVATPRLDKEELYRRVPSDV

SEQ ID NO: 13076 - DNA, 1611 bp, Zea mays
  CDS (1)..(1611)
atggcccttggagctgcgtaccatcactacctgcagctcgccggcgaccatggcaccgccacacacgcactgctcctcggcgtacttatcttcctcgtcatccgcctagtatccgcaaggcgaaccggcacaacctcagccaacaaacgtaagcagcaacagcggcttccgctcccgccttcgcccccgggcaagctgcccatcatcggccacctccacctcatcggcgccgagacccacatctcgatccgggacctggacgccaagcacgggcgcaacggcctgctgctcctccgcatcggcgccgtgcccaccctgttcgtgtcctcgcccagcgccgccgacgccgtcctgcgcacccaggaccacatcttcgcgtcgcggccgccgtccatggccgccgagatcatccgctacgggccctcggacgtcgcgttcgtgccctacggcgagtactggcggcagggcaggaaactcctcaccacgcacatgctcagcaccaagaaggtgcagtccttccgccatggccgacaggaagaggtgcggctcgtcatggacaagatccgcgcggctgccaccgccgcgccgccggcggcggtggacctgagcgatctcctgtccgggtacaccaacgacgtggtgtgccgcgcggtgctgggcgcgtcgcaccggaaccaaggccggaacaggctgttcagcgagctgacagagatcaacgtgtccctcctcggcgggttcaacctcgaggactacttccccccgaatatggccatggcggacgtgctcctccggctggtgtccgtcaaggcccggcggctcaaccagaggtggaacgacgtgttcgacgagctcatccaggaacacgtgcagagcaggccctccggcgagagcgaggagagcgaggcggacttcatacacgttctgctctccatacagcaagagtacggcctcactacggacaatctcaaggccatcttggtggacatgttcgaggcaggtatagagacatcttacctgacgctagagtacggcatggccgagctcatcaacaacaggcacgtcatggagaagctacagacggaggtgaggacgacgatgcgctcgccggacggcaagaagctggacatgctagcggaggaggacctcggcagcatgccctacctcaaggcgaccatcaaggagacgctgcgcctgcacccgccggcgccgttcctcctcccgcactactccaccgccgactccgagatcgacggctacttcgtcccagccgggacgcgcgtcctcgtcaacgcctgggcgctcgggagggaccgcacgacgtgggagaagccggaggagttcatgccggagcggttcgcgcaggaaccgggcgccgtggacgtccacatgaagggcaaggacctcaggttcatcccgttcggctccggccggaggatctgccccgggatgaacttcggattcgcgaccatggagatcatgctggccaatctcatgtaccattttgattgggaggttccgggctctgcagcaggggtgtccatggacgagtcctttgggctgacgcttcgccggaaggagaagcttctccttgttccaaggattgcttcctga

SEQ ID NO: 13077 - protein, 536 aa, Zea mays
MALGAAYHHYLQLAGDHGTATHALLLGVLIFLVIRLVSARRTGTTSANKRKQQQRLPLPPSPPGKLPIIGHLHLIGAETHISIRDLDAKHGRNGLLLLRIGAVPTLFVSSPSAADAVLRTQDHIFASRPPSMAAEIIRYGPSDVAFVPYGEYWRQGRKLLTTHMLSTKKVQSFRHGRQEEVRLVMDKIRAAATAAPPAAVDLSDLLSGYTNDVVCRAVLGASHRNQGRNRLFSELTEINVSLLGGFNLEDYFPPNMAMADVLLRLVSVKARRLNQRWNDVFDELIQEHVQSRPSGESEESEADFIHVLLSIQQEYGLTTDNLKAILVDMFEAGIETSYLTLEYGMAELINNRHVMEKLQTEVRTTMRSPDGKKLDMLAEEDLGSMPYLKATIKETLRLHPPAPFLLPHYSTADSEIDGYFVPAGTRVLVNAWALGRDRTTWEKPEEFMPERFAQEPGAVDVHMKGKDLRFIPFGSGRRICPGMNFGFATMEIMLANLMYHFDWEVPGSAAGVSMDESFGLTLRRKEKLLLVPRIAS

SEQ ID NO: 13078 - DNA, 1524 bp, Zea mays
  CDS (1)..(1524)
atgcctccttacctgctcgctgccggcgcgcttatcgtcttcctgtacatcatcaagaaccgcaggagcagaaagctcccgccatccccgccgtcgctaccgctgatcggccaccttcacctcatcggccgcgtcgcgcaccgatccttgctagagctgcaggttcgctatggcggcggcggcggtctcctcttcctgcaactcgggcgcagaccgaccttggtcgtgtccactgcggccgcggccgcggatctgttcaagaaccacgacctcgctttcgcctcccgcccacgcagcgtgggaggggataagctgatgtatgagtgcagcaacgtgtcgttcgcgccttacggcgagaactggcgccggggcaagaagatcgctgtggtccacctcctctctccacggcgcgtggaatcgttcgcgcccgtaagggccgccgaggtagccgcgctcgtcgcacggacacgccgcaccgcggaggctggggaggccgtggagttgagggagctcctgaacggctacgccaacgcggtggccacccgcgcggccaccggtgccgctggggcgacagcagagaagctgaaagagctgatggggaactccgagcccgaggcgctgatggcgggcttcccacccgaagacgtgctgccggacgcaccggcgaggttcgtgagatgggtgacgggcctcgataagaagatcgaagacatggccgaggcgtgggacaagttcctgtccgatatagtggccgcacacaaggaaaaggggtgtggcgacgcaggggaggaggctgaggacttcttggatgtcttgctccggctgcgggaagaaggcgcagatgggctcgagctcacagacgatcgcatcaaagctaccatcgaggacatgatagctgctgcaactgaaacatcatcccaaacgctggaatggaccatggccgaactcattgccaacccgcgggtgatgagcaagctccaaggcgagatagcgcgagtcgtcagcgccgatcagacgaccatcgctgaaccggacctgaacaaaatggagtacctgagggcagtgttcaaagaggtgcttcggctccacccaccagcgccgctcctcgtcccgcacgaatcaacaacgcccgcggttgtgcagggctacgagattccggccaagacggcgctcttcgtcaacgtgtgggccatcgggcgggaccctgctgtgtgggacgcaccggacgagttccgcccagagcggttcgtgggcggcagtccctcggtggacttcagagggaccgactaccagttcatcccgttcggcgccggccggaggatctgccccggcatcaacttcgcgctgccagtcttggagctcgcgctcgtcagcctcctgcaccacttcgaatgggagctccccgccggcatgcgcctggaggacctcgacatgggcgaggcgccggggctgacgacgccgcggcggattccgctcgtcctagtccccaagcgcaggacgctcgttcagacattactgcagtag

SEQ ID NO: 13079 - protein, 507 aa, Zea mays
MPPYLLAAGALIVFLYIIKNRRSRKLPPSPPSLPLIGHLHLIGRVAHRSLLELQVRYGGGGGLLFLQLGRRPTLVVSTAAAAADLFKNHDLAFASRPRSVGGDKLMYECSNVSFAPYGENWRRGKKIAVVHLLSPRRVESFAPVRAAEVAALVARTRRTAEAGEAVELRELLNGYANAVATRAATGAAGATAEKLKELMGNSEPEALMAGFPPEDVLPDAPARFVRWVTGLDKKIEDMAEAWDKFLSDIVAAHKEKGCGDAGEEAEDFLDVLLRLREEGADGLELTDDRIKATIEDMIAAATETSSQTLEWTMAELIANPRVMSKLQGEIARVVSADQTTIAEPDLNKMEYLRAVFKEVLRLHPPAPLLVPHESTTPAVVQGYEIPAKTALFVNVWAIGRDPAVWDAPDEFRPERFVGGSPSVDFRGTDYQFIPFGAGRRICPGINFALPVLELALVSLLHHFEWELPAGMRLEDLDMGEAPGLTTPRRIPLVLVPKRRTLVQTLLQ

SEQ ID NO: 13080 - DNA, 1584 bp, Zea mays
  CDS (1)..(1584)
atggagctcacgtgggacgaatgggatgtcattatactggctgcctgcagcttcctcatccctctcgtgttcctctgcaatgctacgaagcggcggcggcggcgcgcgccccctggcccggccaccgtacccatcatcgggaacctggcgtggctaacgttgcgcgacgggttgggtgagctggacatcctgcgacgactgcactcgcgctttggcccgctgctgtcggtccgcttgggttcatcggagcaggtgaacgtggcggaccgccgtctcgcacacgccttgctcgtggagcgtggcgccgctgtggctgaccgctcgccgctgctggtgtccaccgagaggttcggggccttcggctctttcagcatacacgtgtccagctacggcccacgctggagtgttctccgccgcaacttcgcggcggaggtcgtgagcccagcgcggttccggcagatggcggcctcgcgggagctggcgcttgccgacctcatccggaagctgaagctgcaggagggcgtcgtcgtctgcagggacgcgttccagcacgccatgtccagcctcttcatcgccatgtgcttcggcaaggtcctcgacgactcgtccgtggacagcatcggcgtcgcgctgcgcgacttcgtcctccacggcggcgcgtcggggatggggatggcgctattcttgttcctccctgctctcaccacgcgactcttccgtggcctcctgcggtctaaggaggccaagcgccagaagctcgaaaacgtgtactgcctgccattgatccatgagcggagagagcgcaggaagacgaagcagctgacgcaggagcacccgcactgctacgttgacacgttgctcgacctcaggctcgacgaggaacaggatggtggccgccttctcacagaccacgagatagcaagcctgtgcatcgagatcctcatcgttggctcggagctaccggcgacggcgctggagtggatcatggcggagctagtaaagaacccaggcgtgcaggacaagctctacgaggagatgatggtgaaagccaaagccaccactgacgcttctgctggcgtgctcccgttctcggaggatgacttgcccaagataccctacctgagagcggtggtgctggagggtctccggcgccatccgccggggcaccagatgccgccacgcagggtgagggaggacgtggaggtgggtgactacgtggtgcccaagggctcagcgatcaacttcatgctgtacgacctgggcatggacgacgccacgtgggaccgcccagcagtgttcatgccggagaggttcctgcccggcggggaagccgaggcgctggacatcaccggcaccaaggagatgaagatgataccgtttggggcgggcagaaggatctgcccgggcctcaggatcgctctcctgctcctcgagtacttcgtcgccaacctcgtagcgaccttccactggaaagaggtggaagagggcgacgtcgatgtcaccaccgaggacgctcagctcaccgtcctcatggggaagccgctccgggcgcgcctgcttccaagactgcattcgtctgcttaa

SEQ ID NO: 13081 - protein, 527 aa, Zea mays
MELTWDEWDVIILAACSFLIPLVFLCNATKRRRRRAPPGPATVPIIGNLAWLTLRDGLGELDILRRLHSRFGPLLSVRLGSSEQVNVADRRLAHALLVERGAAVADRSPLLVSTERFGAFGSFSIHVSSYGPRWSVLRRNFAAEVVSPARFRQMAASRELALADLIRKLKLQEGVVVCRDAFQHAMSSLFIAMCFGKVLDDSSVDSIGVALRDFVLHGGASGMGMALFLFLPALTTRLFRGLLRSKEAKRQKLENVYCLPLIHERRERRKTKQLTQEHPHCYVDTLLDLRLDEEQDGGRLLTDHEIASLCIEILIVGSELPATALEWIMAELVKNPGVQDKLYEEMMVKAKATTDASAGVLPFSEDDLPKIPYLRAVVLEGLRRHPPGHQMPPRRVREDVEVGDYVVPKGSAINFMLYDLGMDDATWDRPAVFMPERFLPGGEAEALDITGTKEMKMIPFGAGRRICPGLRIALLLLEYFVANLVATFHWKEVEEGDVDVTTEDAQLTVLMGKPLRARLLPRLHSSA

SEQ ID NO: 13082 - DNA, 1584 bp, Zea mays
  CDS (1)..(1584)
atggccgcccaaactatactctcgctcgtgttcttggctctcctaaccttcgtgctgctgcggcgcatgggcgcgaggcgcagcggcaacggcatgcaccaccgtctcccgccatcgcctccggggctgcccgtcatcggccacctccacctgctgggatccaacccgcacatctccctccgagagatcgccggcaggcacggcgcgggcgacggcttcatgctgctccgcctcggccaggtcccggccctggtggtgtcgtccccgcgcgccgcggaggacgtgctgcgctcgcacgaccacgctttcgcgtcgcggccgccgtccgccgtggccgacatcctcctcagctactccgacgtggccctggccccctacggcgactactggcgcctggtgcggaggctggtgaccacgcacgtgctcagcgccagcaaggtgcagtccctgcgccgcgcgcgccaggaggaggtcgccctggtcgtcggccgtgtccggggtgccgcggccgccgcctccgccaccgcggtggacatgacggaactgttcagcgtgttcaccaacgacgtggtgtgccgcgccgtgtcgggcaggttcttccgccgggtggacggccggcatagcgcgttccaggagatcatcaacagccaggtggtgctcatcgcggggttcaacctggacgactgcttcccgtgcctggccagagttggcgtgctcgcgagggtgctgttcgccaaggtcttcagcttgaagaagaagtgggacgtgttgcttgatgagatcatcacagagcatgcggccaagctggcgtcagcgcaggaggaacgtcgcgacaagggtgacgacgacgatggacagatgagccaagaagaggacgacgctgacttcgtgcatggtctgctctcgctccagcaggagtaccgtctcacgagacagcaagtcaagtccatcttcttggtggacatgtttggagcgggaacagataaggcatccatcctgctggaatacgcgatgatcgacctgataagaaacccacgcatcatggccaaggtacgagacgagatcatcaagaacactcccaaggaccaaggaatggtgaaggaagaggacctagcgaacatggcctacctgagggccgtgatcaaggagacgctccgtctgtacccgccgacgccgctgctgctgccgcacttctgcatggaggactgcgaggtgggcgggtacacgatcgcggcggggacgcgcgttatcgtcaacgcgtgggcgctcggcagggacgccagcgcgtgggagaaggcggacgagttcgcgccggagaggttcctggacggcggcagcagcgcggatgccgacttcaggggcagggatttcaagttcgtgccgttcggggctgggaggaggatgtgccccgggatcaacttcgggatggccgtcgtcgagctcatgctggcgaaccttctctactgctttcgctgggagctcccgcctgggatgacgccacaggacgtggacatgtctgtcaggtacggactcacaagccgtcgcaaggagaagctcctgctcgtcccaaggctggccgtgtaa

SEQ ID NO: 13083 - protein, 527 aa, Zea mays
MAAQTILSLVFLALLTFVLLRRMGARRSGNGMHHRLPPSPPGLPVIGHLHLLGSNPHISLREIAGRHGAGDGFMLLRLGQVPALVVSSPRAAEDVLRSHDHAFASRPPSAVADILLSYSDVALAPYGDYWRLVRRLVTTHVLSASKVQSLRRARQEEVALVVGRVRGAAAAASATAVDMTELFSVFTNDVVCRAVSGRFFRRVDGRHSAFQEIINSQVVLIAGFNLDDCFPCLARVGVLARVLFAKVFSLKKKWDVLLDEIITEHAAKLASAQEERRDKGDDDDGQMSQEEDDADFVHGLLSLQQEYRLTRQQVKSIFLVDMFGAGTDKASILLEYAMIDLIRNPRIMAKVRDEIIKNTPKDQGMVKEEDLANMAYLRAVIKETLRLYPPTPLLLPHFCMEDCEVGGYTIAAGTRVIVNAWALGRDASAWEKADEFAPERFLDGGSSADADFRGRDFKFVPFGAGRRMCPGINFGMAVVELMLANLLYCFRWELPPGMTPQDVDMSVRYGLTSRRKEKLLLVPRLAV

SEQ ID NO: 13084 - DNA, 1521 bp, Zea mays
  CDS (1)..(1521)
atgcctccttacctgctcgctgccggcgcgcttatcgtcttcctgtacatcatcaagaaccgcaggagcagaaagctcccgccatccccgccgtcgctaccgctgatcggccaccttcacctcatcggccgcgtcgcgcaccgatccttgctagagctgcaggttcgctatggcggcggcggcggtctcctcttcctgcaactcgggcgcagaccgaccttggtcgtgtccactgcggccgcggccgcggatctgttcaagaaccacgacctcgctttcgcctcccgcccacgcagcgtgggaggggataagctgatgtatgagtgcagcaacgtgtcgttcgcgccttacggcgagaactggcgccggggcaagaagatcgctgtggtccacctcctctctccacggcgcgtggaatcgttcgcgcccgtaagggccgccgaggtagccgcgctcgtcgcacggacacgccgcaccgcggaggctggggaggccgtggagttgagggagctcctgaacggctacgccaacgcggtggccacccgcgcggccaccggtgccgctggggcgacagcagagaagctgaaagagctgatggggaactccgagcccgaggcgctgatggcgggcttccaacccgaagacgtgctgccggacgcaccggcgaggttcgtgagatgggtgacgggcctcaataagaagctcgaagacttggtggagtcgtgggacaagttcctgtccgatatagtggccgcacacaaggagaaggggggtggcgacgcagaggaggatgaggacttcttggatgtcttgcttcggctgcgggaagaaggcgcagatgggctcgagctcacagacgatcgcatcaaagctaccgtcaaggacatgatagcggctgcaactgaaacatcgtcccaaacgctggaatggaccatggccgaactcattgccaacccgcgggtgatgagcaagctccaaggcgagatagcgcgagtcgtcagcgccgatcagacgaccatcgctgaaccggacctgaacaaaatggagtacctgagggcagtgttcaaagaggtgcttcggctccacccaccagcgccgctcctcgtcccgcacgaatcaacaacgcccgcggttgtgcagggctacgagatcccggccaagacggctctcttcgtcaacgtgtgggccatcgggcgggaccctgctgtgtgggacgcaccggacgagttccgcccagagcggttcgtgggcggcagtccctcggtggacttcagaggtaccgactaccagctcatcccgttcggcgccggccggaggatctgccccggcatcaacttcgcgctgccggtcttggagctcgcgcttgtcagccttctgcaccacttcgaatgggagctccccgccggcgtgggaaaagcggacctcgacgtgggcgaggcgccggggatgacgacgccgcggcggattccgctcgtccttgtccccaagtgcaggacgctcgttcagccagcgctgcagtag

SEQ ID NO: 13085 - protein, 506 aa, Zea mays
MPPYLLAAGALIVFLYIIKNRRSRKLPPSPPSLPLIGHLHLIGRVAHRSLLELQVRYGGGGGLLFLQLGRRPTLVVSTAAAAADLFKNHDLAFASRPRSVGGDKLMYECSNVSFAPYGENWRRGKKIAVVHLLSPRRVESFAPVRAAEVAALVARTRRTAEAGEAVELRELLNGYANAVATRAATGAAGATAEKLKELMGNSEPEALMAGFQPEDVLPDAPARFVRWVTGLNKKLEDLVESWDKFLSDIVAAHKEKGGGDAEEDEDFLDVLLRLREEGADGLELTDDRIKATVKDMIAAATETSSQTLEWTMAELIANPRVMSKLQGEIARVVSADQTTIAEPDLNKMEYLRAVFKEVLRLHPPAPLLVPHESTTPAVVQGYEIPAKTALFVNVWAIGRDPAVWDAPDEFRPERFVGGSPSVDFRGTDYQLIPFGAGRRICPGINFALPVLELALVSLLHHFEWELPAGVGKADLDVGEAPGMTTPRRIPLVLVPKCRTLVQPALQ

SEQ ID NO: 13086 - DNA, 1584 bp, Zea mays
  CDS (1)..(1584)
atgcagctcgcggcgttgtgcactgaccccgtggtgctgtgcagcgccttcctctgcctcctcctccacgtggctctccgctcgctgctgcaccctccttctgccgcctcttcctccgggcgccgcgggcagctcccgccggggccaccgggcctgccgatcctcggcgcgctgccactcgtgggcccagccccgcacgccggcctggccgcgctggcgcgcaagtacggtcccatcatgtacctgaagatgggcacggccggcgtggtggtggcgtcgtccccgcgcgcggcgcggacgttcctcaaggcgctggacgcgcggtacgccaaccggccggccgtggcgagcgccgcggacatcacgtacgggcggcagaacatggtgttcgcggactacgggcccaagtggaagctgatgcggaagctcgccagcgtgcacctgctcggggcgcgcgcgctcgcggactgggcgtgcgtgcggcgcggcgaggccggccacgtgctgcgcggcgtggcggaggcggcggcggccggcaggcccgtcgtcgtgccggagctgctcgtgtgcgccctcgccaacatcgtcgggcagatcacagtgagcaagcgggtgttcgacgcgcagggggacgactcgaacagatacaaggacatgatcgtgtcgctgctgaccggcacgggcatgttcaacatcagcgacttcgtgccggcgctggcgcgtctggacctgcagggcgtgcaggcgaagctgcggcgcgtccaccgccagttcgacggcctcatcaccaagctgctggccgagcacgccgcgacggccgcggaccgcgcgcgccagggccgcccggacttcgtcgaccggctccgcgccacgatggacgccggcgccgccgccgacgacgagagcggcgagaccatcaccgaggtcaacatcaagggcctcatcttcgacatgttcacggcgggtacggacacgtcgtcgatcatcgtggagtgggcgatggcggagatgctcaagaacccgagcgtcatggcgcgcgcgcaggaggagctggaccgcgcggtgggccggggccggcgcctggaggagtcggacctgcccggcctcccctacctgcaggcggtgtgcaaggaggccatgcggctgcacccgtccacgccgctcagcctcccgcacttctccttggacgcctgcgacgacgtcgacggctaccgcgtcccggccaacacccgcctgctcgtcaacgtttgggccatcggccgggacccggaggcctgggagaggcccctcgacttccgccccgagcgcttcctgcccgggggcggcgcggagaaggtcgacccgctggggaactgcttcgagctcatcccgttcggcgccggccggaggatctgcgcggggaagctggcgggcatggtgttcgtgcagtacttcctgggcacgctgctgcacgcgttcgactggcgcctgcctgacggcgaggagaagctggacatgagcgagacgttcggcctcgcgctgcccaaggcagtgccgctccgcgccgtcgccacgccacggctcgtgccggaagcctatgcctga

SEQ ID NO: 13087 - protein, 527 aa, Zea mays
MQLAALCTDPVVLCSAFLCLLLHVALRSLLHPPSAASSSGRRGQLPPGPPGLPILGALPLVGPAPHAGLAALARKYGPIMYLKMGTAGVVVASSPRAARTFLKALDARYANRPAVASAADITYGRQNMVFADYGPKWKLMRKLASVHLLGARALADWACVRRGEAGHVLRGVAEAAAAGRPVVVPELLVCALANIVGQITVSKRVFDAQGDDSNRYKDMIVSLLTGTGMFNISDFVPALARLDLQGVQAKLRRVHRQFDGLITKLLAEHAATAADRARQGRPDFVDRLRATMDAGAAADDESGETITEVNIKGLIFDMFTAGTDTSSIIVEWAMAEMLKNPSVMARAQEELDRAVGRGRRLEESDLPGLPYLQAVCKEAMRLHPSTPLSLPHFSLDACDDVDGYRVPANTRLLVNVWAIGRDPEAWERPLDFRPERFLPGGGAEKVDPLGNCFELIPFGAGRRICAGKLAGMVFVQYFLGTLLHAFDWRLPDGEEKLDMSETFGLALPKAVPLRAVATPRLVPEAYA

SEQ ID NO: 13088 - DNA, 1593 bp, Zea mays
  CDS (1)..(1593)
atggatccatttgttctctccatcctcttatgctcatcgatctttgttgtagtgtactggagaaggctgaacagcatgaggctaagacttccaccgggacctccaacatggccaattttcggcaatcttctccagttgagccctcttccccacaaagactttgcccaattttgcaccaaatatggccctctcgtctatcttcgcctgggaaccatcgatgccatcaccactgatgaccccgaagtgatccgtgaaatactcatccggcaagatgaggtctttgcttcgcggcctcggacactggctgccgtccatctcgcctatgggtgtggtgatgtggctctagctccactgggacccaactggaaaaggatgaggagagtttgcatggagcacttgctgacgaccaggcggctcgagtctttcgctgctcaccgagctcaggaggccgagcacctctgccagtttgtgtgggctaaatctcagtccgggaagcccgtgaacctcagagaggttctcggtgccttctcgatgaacaacgtcacgcggatgctgctggggaagcagtactttgggatccagtcggcaggccccggcgaggcaatggagttcatgcacatcacccacgagctgttcttcctgctgggcctgatctatctcggggactacttgccggcttggaggtgggtcgacccgtacgggtgtgagaagaggatgagggaggtggagaagaaggtggacgacttccaccagaagatcattgatgagcacaggagagctagggaggccaggaagagtcgttcctccgttgaggaagatggcggcaacggcaaagatgagatggacttcgtcgatgtgctgttatctttgcctggtgagaacgggaaggagcacatggacgacatggagatcaaagcgttgatgcaggacatgatcgctgctgctactgatacttcatcggtgacgaacgagtgggtgatggcggaggtaatcaagaacccgcgcgtgctccggcgcgtccaggaggagctggacgcggtggtggggcgcgaccggatggtggcggagtcggacctggcccacctcccctacctccggtgcgtggtgcgcgagtcattccggatgcacccggcggggccgttccttatcccgcacgagtcgctgaaggcgacgaccatcatggggtaccacgtgccggcgcgcacgcgcgtgttcatcaacacgcacgcgctggggcggaacccgcgcgtgtgggactccgtgggcgagttccggccggagcggcacctgccggcggaggagggggcgcgggtggagatcagccacctgccggacttcaagatcctgccgttcagcgccgggaagcgcaagtgccccggcgcgccgctgggcgtggcgctggtgctcatggcgctcgccaggctcttccactgcttcgactggtccccgcccgacggcctccgccccgaggacgtggacacccgggaggtgtacggcatgaccatgcccaaggccacgcccctcgtcgccgtcgccactccgcgcctgccgccgcacttgtacggcggcggcggcggcagctcggctccttag

SEQ ID NO: 13089 - protein, 530 aa, Zea mays
MDPFVLSILLCSSIFVVVYWRRLNSMRLRLPPGPPTWPIFGNLLQLSPLPHKDFAQFCTKYGPLVYLRLGTIDAITTDDPEVIREILIRQDEVFASRPRTLAAVHLAYGCGDVALAPLGPNWKRMRRVCMEHLLTTRRLESFAAHRAQEAEHLCQFVWAKSQSGKPVNLREVLGAFSMNNVTRMLLGKQYFGIQSAGPGEAMEFMHITHELFFLLGLIYLGDYLPAWRWVDPYGCEKRMREVEKKVDDFHQKIIDEHRRAREARKSRSSVEEDGGNGKDEMDFVDVLLSLPGENGKEHMDDMEIKALMQDMIAAATDTSSVTNEWVMAEVIKNPRVLRRVQEELDAVVGRDRMVAESDLAHLPYLRCVVRESFRMHPAGPFLIPHESLKATTIMGYHVPARTRVFINTHALGRNPRVWDSVGEFRPERHLPAEEGARVEISHLPDFKILPFSAGKRKCPGAPLGVALVLMALARLFHCFDWSPPDGLRPEDVDTREVYGMTMPKATPLVAVATPRLPPHLYGGGGGSSAP

SEQ ID NO: 13090 - DNA, 1629 bp, Zea mays
  CDS (1)..(1629)
atggctgctcaactgcatcacgcactatacgagctgctgcacgaagcagcagcagcgcaacgagcgctgctgctcgcgatccccttctccctgctgctcctgccgctcctgctccgctacctcgcggcgtcggcgtcggcgtcggcgtcggcgacaaagaacgacggagcggcggcggtggcggccagcgaccccgacaagctcttgagcctgctgccgtcgccgcccatgaagctccccatcatcgggcacctgcacctgatgggggacatcccctacgtgtccctcgccgcgctcgccaccaggtacggcccggacctgatgctgctccgcctcggcgccgtgccgaccgtggtggtctcgtcgccgcgcgtcgccgaggccgtgctccgcacctacgaccacgtcttctcctcccgcccgcgctccctggtgtccgacatcatcatgtacggcgccaccgactcgtgcttcgcgccctacggcgaccacttccgcaaggcgcggaagctggtcaccgtgcacctgctcaacgccagcaaggtgcggtcgcagcggcccgcgcgggaggaggaggtgcgcggcgcgctcgacagggtgcgccgcgccgccgccgcgcgggaggccctggacatgagcgagctcctgcactccttcgtcaacaacctcgtctgccgcgccgtctcgggcaagttctccatggaggaaggccgcaacaggctgttccgggagctcaccgacatcaacgcgggactcctcggagggttccacatccaggactacttccctagcctgggccggatcgagctcgtcaggaaggtggcgtgcgccaagaccaggcgcgtcaggaagcgctgggacgacctcctcgacaagctcatcgacgaccatgcggccaggatggcaacccatcaggacgaggacgacgataaggacttcatatacgtcttgctgtctcttcagaaggagtatggcctcaccagagaccatatcaaggctatcttgatagacatgttcgaggccggaaccgacacctcgtacatgacgttggagttcgccatgacggagctcatacggaagccacacctgatgaagaagctgcaggaagaagtgcggcggaacgtgccggcggggcaggagatggtcaccgaggacaacctccccggcatgacctacctcaaggccgtcatcaaggagacgctccgcctgcacccgccggtcccgctcctcctcccgcactactccctggacgcctgcgaggtcgccggctacaccatcccggccaacacccgcgtcgtcgtcaacgcctgggcgctcggccgccacagcggctactgggagcgcgagaacgagttcgtcccggagaggttcctcagcggggacgtggccggcggcgtcgacctcaagcccaacgagttccagttcctggcgttcgggtccggccggaggatgtgccccggggtccactcggcgtccgcgaccatcgaggcgatgctgtccaacctcatgtaccggttcgactggcagctgccggcggggatgaaggcggaggacgtggacatgaccgaggtgtttgggatcacggtctcgaggaaggagaagctgctcctagtcccacaggctgcgtga

SEQ ID NO: 13091 - protein, 542 aa, Zea mays
MAAQLHHALYELLHEAAAAQRALLLAIPFSLLLLPLLLRYLAASASASASATKNDGAAAVAASDPDKLLSLLPSPPMKLPIIGHLHLMGDIPYVSLAALATRYGPDLMLLRLGAVPTVVVSSPRVAEAVLRTYDHVFSSRPRSLVSDIIMYGATDSCFAPYGDHFRKARKLVTVHLLNASKVRSQRPAREEEVRGALDRVRRAAAAREALDMSELLHSFVNNLVCRAVSGKFSMEEGRNRLFRELTDINAGLLGGFHIQDYFPSLGRIELVRKVACAKTRRVRKRWDDLLDKLIDDHAARMATHQDEDDDKDFIYVLLSLQKEYGLTRDHIKAILIDMFEAGTDTSYMTLEFAMTELIRKPHLMKKLQEEVRRNVPAGQEMVTEDNLPGMTYLKAVIKETLRLHPPVPLLLPHYSLDACEVAGYTIPANTRVVVNAWALGRHSGYWERENEFVPERFLSGDVAGGVDLKPNEFQFLAFGSGRRMCPGVHSASATIEAMLSNLMYRFDWQLPAGMKAEDVDMTEVFGITVSRKEKLLLVPQAA

SEQ ID NO: 13092 - DNA, 1710 bp, Zea mays
  CDS (1)..(1710)
atggcataccatctcatctcttcaccactgttccttctcgcacaattgctcgccgtcgccgtccctctccttctgctcctgcttcaccaacgctcatcaattcgccgccgtcgtcgcagcagcagcagcagatcggccaagcagggaggacagctcctgccgccttcgcccccggcgctgcccatcatcggccaccttcacctcgtcagcgacctcccgcacgtctccctccgtgacctcgccgccaagcatggtggggacgacggcctgatgctgctccgtctcggcgctgttcccaccctcgtcgtgtcatcgccgcgggccgcggaggcgatcacgcgcacgcacgaccacgtgttcgcgtcgcggcccacgtccactctcagcgacgagatcctgtacgggtcctccgacatcgccttctccccctacggcgagcactggcggcaggccagaaagctggtcaccgcgcacctcttcaccgtcaagagagtgcactcgtaccgccgcgcccgcaaggaggaggtgcgcctggtggtagccaaggtgcgggaggcggcggtggcgggcacggccacggacatgagccttgccatgaacacgttcgccaacgatatcatcagccgcgccgtgtccggcaagttcttccgggcggagggccggaacaagctcttccgggagctggtggaggccaactctgctctgttcggagggttcaacctggaagactacttcccggggctggcgagggcgttaggtttccttagcagaaggttgttgtttctgcgcaacaggcggcgggtccaggagacgcacaggagatgggacgagctgctcgaaaccatactgagcgaccacgagggaagaaggggctctgtctctgtggacggtggtggtgacttcaccgacgtgttgctctcggttcagacagagtacggcatgaccagagatcatctcaaggccatcttggtggacatgttcggtgcgggcactgacacgtcatccttggtcctagagctcgccatggccgagctgatgcgcaacccacagcagatggccaagctacaagctcaagttcggaggcacacaccggaggggcaggaaacggtggaggaagagaacctatccgacatgcccttcctgagagccgtggtgaaggagacgctgaggctgcacccacctgccccgctcctcgtccctcacctgtccctggcggactgcgtcgtcgatggctaccacgtcccctccggcacccgggtcatcatcaacgcgtgggctcttggcagagacccgggctcgtgggagaagccagaggagttcctgccggagaggttcatggacggcggcagcgctgctggcgtcgacatcaaggggaaccacttccacttgttgccgtttggagctggacgaaggatttgccctggcctcaactttgggatggctacggtcgagatcatgctagcaaacctcgtgtactgcttcgactggcagctgcccatgggcatggaggagaaggacattgacatgacggaggtgtttggactcacggtgcatcccaaggagaagctcatgcttgttcccaaagttgctcgtgtactgcaactgctcgtcaataattccatcgtccaagttgctgatcgaagggactcgagatcgatcatgcatgtatatggtttatttggagtagaaaactgcatgcagcgggtgtag

SEQ ID NO: 13093 - protein, 569 aa, Zea mays
MAYHLISSPLFLLAQLLAVAVPLLLLLLHQRSSIRRRRRSSSSRSAKQGGQLLPPSPPALPIIGHLHLVSDLPHVSLRDLAAKHGGDDGLMLLRLGAVPTLVVSSPRAAEAITRTHDHVFASRPTSTLSDEILYGSSDIAFSPYGEHWRQARKLVTAHLFTVKRVHSYRRARKEEVRLVVAKVREAAVAGTATDMSLAMNTFANDIISRAVSGKFFRAEGRNKLFRELVEANSALFGGFNLEDYFPGLARALGFLSRRLLFLRNRRRVQETHRRWDELLETILSDHEGRRGSVSVDGGGDFTDVLLSVQTEYGMTRDHLKAILVDMFGAGTDTSSLVLELAMAELMRNPQQMAKLQAQVRRHTPEGQETVEEENLSDMPFLRAVVKETLRLHPPAPLLVPHLSLADCVVDGYHVPSGTRVIINAWALGRDPGSWEKPEEFLPERFMDGGSAAGVDIKGNHFHLLPFGAGRRICPGLNFGMATVEIMLANLVYCFDWQLPMGMEEKDIDMTEVFGLTVHPKEKLMLVPKVARVLQLLVNNSIVQVADRRDSRSIMHVYGLFGVENCMQRV

SEQ ID NO: 13094 - DNA, 1593 bp, Zea mays
  CDS (1)..(1593)
atggctctcgaagcagcgtacgactacctgcacgtcgccgtcgtccagtgcacgcccacacaagcagcagcagtcctcggcgtcctcctcctcctcgccatccggctagccgcggcggcgaggagctcgtccgcgacgtcccccaaatggaagcagcacaggctgccgccgacgcctccggggaagctccccatcatcgggcacctccacctcatcggctcccacccgcacgtctccttccgcgacctccacgccaagtacggccacaacgggctgatgctggtgcaggtcggcgccgtgcccaccatcgtggtgtccacgccgcaggccgccgaggccgtgctccgcacgcacgaccacgtgctggcgtcccgcccgcggaaccccgtcgccgacatcatccgctacaactgcacggacgtggccttcgcgccgtacggcgagtactggcgcacggcgcggaaggtggtcaacacgcacctgctcagcgccaagatggtcttctccaagcggcgggagcgggaggaggaggtgcgcctggtggtggcccggatccgcgacgccgccgaggcgtccccggggacggcgctcgacatgacggagctgctgggcggctacgccagcgacttcgtgtgccgcgccgtgctcggcgagtcccaccggaagcagggccggaacaagctgttccgggagctgacggagaccagcgccgccctcctgggcgggttcaacgtggaggactacttcccgaagctggcggacgtggacctgttcctccggatcatctgcgccaaggccaagggcgtcagcaagcggtgggacagcctcttcaacgagctgctgtccgagtacgcgctctccggcggcaagcagggcgaccacaactctgaagacttcgtgcacctcttgctgtcgctgcagaaagactacggtctcaccacggataacatcaagggcatacttgtgaacatgttcgaagcagccatcgagacatcattcctggtgctggagtactccatgagcgagctgatgaacaaccgccacgtcctggccaagctccagaaggaggtgaggacggcgacgcccgacggccgcatggtgatggaggaggacctgagccggatgccatacctgaaggccaccatcaaggagtccatgcgcatccacccgccggcgccgttcctcctgccgcacttctccacccacgactgcgagatcaacggctacaccatccccgccggcacgcgcgtcatcgtcaacgcgtgggcgctcgccagggacccgacgtgctgggacaaggccgaggagttcttcccggagcgcttcctggaacaaggccgcgacgccgaggtcgacatgtacggcaaggacatccggttcgtgccgttcggggcggggcgcaggatctgcgcgggggccacgttcgccatcgccaccgtcgagatcatgctcgcgaacctcatctaccatttcgactgggagatgcccgccgagatggagcgcaccggggccaaggtggacatgtccgaccagttcgggatgacgcttcgccggacgcagaaactttaccttgttcctagaattcccaaatga

SEQ ID NO: 13095 - protein, 530 aa, Zea mays
MALEAAYDYLHVAVVQCTPTQAAAVLGVLLLLAIRLAAAARSSSATSPKWKQHRLPPTPPGKLPIIGHLHLIGSHPHVSFRDLHAKYGHNGLMLVQVGAVPTIVVSTPQAAEAVLRTHDHVLASRPRNPVADIIRYNCTDVAFAPYGEYWRTARKVVNTHLLSAKMVFSKRREREEEVRLVVARIRDAAEASPGTALDMTELLGGYASDFVCRAVLGESHRKQGRNKLFRELTETSAALLGGFNVEDYFPKLADVDLFLRIICAKAKGVSKRWDSLFNELLSEYALSGGKQGDHNSEDFVHLLLSLQKDYGLTTDNIKGILVNMFEAAIETSFLVLEYSMSELMNNRHVLAKLQKEVRTATPDGRMVMEEDLSRMPYLKATIKESMRIHPPAPFLLPHFSTHDCEINGYTIPAGTRVIVNAWALARDPTCWDKAEEFFPERFLEQGRDAEVDMYGKDIRFVPFGAGRRICAGATFAIATVEIMLANLIYHFDWEMPAEMERTGAKVDMSDQFGMTLRRTQKLYLVPRIPK

SEQ ID NO: 13096 - DNA, 1539 bp, Zea mays
  CDS (1)..(1539)
atggagacggccttcgttgtcgttctgtcgttcttcttcatcgttgctatccaccgccttctcaaccgcggcgaaagcaagaatatgagcaagcagccgctgccaccgggccctcgcgccatcccggttctcggccacttacacctcctcgagaagccgtaccacctggcgtttatgcgcctcgccgcgcgctacgggcctgtgttctccctccagctgggctcgcgcgccgccgtggtcgtgtccaccgcggactgcgccagggagtgcctcgcagagcacgacgcgacgttcgcgaaccggccgacctaccccacgctgcacctgatgacctacggcggcgccacgatcggccacagcgcctacggcgcgcactggcgccacgtccgccgcgtcgtatcgttgcacctcctgtccccgcaacgcgtgctgtcctccatggtccccaccatcaccgcggaggtgcgcgccatggcgcggaggatgtaccgcgccgccgcgggcggtgccgcgaggatcgagctcaaggggaggctgctcgagctctccctcagcaccctgatggagaccatcgcgcagaccaagacgtaccgtcccgcggacgacgcggacacggacatgtcgccggagacccaggagttcaagcagctgttggacgctatcatctcgcttctcgggctgaccaacgtgttggaattcctgccggtgctacagacgttcgacgttttgggactgaagaagaagatcgcggcggcggcgggcagaagggacgcgttcttccagcggctcattgacgcggagcggcgcaggctggacgacggcgtggagggccagaagaagagcatgctggccgtcctgctcgctctgcagaagtcggaaccggagaattacacggacgagaagatcatggctctatgcttctccatgttcattgccggaacggactccacggcgacggcgatggaatgggccatgtcgctgctgctgaaccaccccgaggtcttgaagaaagcgcgggaggaaatcgacgcgcacgtgggcagctcccgcctgctgggagcggacgacgtgccgagcctcggctacctccactgcgtcctcaacgagacgctccggctgtacccggtggggccgacgctgatcccgcacgagtccacggcggactgcacggtcggcggctaccacgtgccaagcggcacgatgctgctcaccaacgcatacgccatccacagagaccctgcggcgtggacggaaccggacgccttcaggcctgaacgattcgaggatggcagcgccgaagggaagctcctgataccgttcgggatggggcggcgcaagtgtcccggagagaccatggcgctgcggactctggggctggtgctggggactctgatccagtgcttcgactgggccactgtcggaggcgtccccaaagttgacatgacccaaggcggcgggctcactctcccgcgggccgttcccctggaggccatgtgcaaaccgcgccaagtcatgcttgatgtcctccagaagctgtga

SEQ ID NO: 13097 - protein, 512 aa, Zea mays
METAFVVVLSFFFIVAIHRLLNRGESKNMSKQPLPPGPRAIPVLGHLHLLEKPYHLAFMRLAARYGPVFSLQLGSRAAVVVSTADCARECLAEHDATFANRPTYPTLHLMTYGGATIGHSAYGAHWRHVRRVVSLHLLSPQRVLSSMVPTITAEVRAMARRMYRAAAGGAARIELKGRLLELSLSTLMETIAQTKTYRPADDADTDMSPETQEFKQLLDAIISLLGLTNVLEFLPVLQTFDVLGLKKKIAAAAGRRDAFFQRLIDAERRRLDDGVEGQKKSMLAVLLALQKSEPENYTDEKIMALCFSMFIAGTDSTATAMEWAMSLLLNHPEVLKKAREEIDAHVGSSRLLGADDVPSLGYLHCVLNETLRLYPVGPTLIPHESTADCTVGGYHVPSGTMLLTNAYAIHRDPAAWTEPDAFRPERFEDGSAEGKLLIPFGMGRRKCPGETMALRTLGLVLGTLIQCFDWATVGGVPKVDMTQGGGLTLPRAVPLEAMCKPRQVMLDVLQKL

SEQ ID NO: 13098 - DNA, 20 bp, Artificial sequence
  primer
atgaacatctcctctcgcgg

SEQ ID NO: 13099 - DNA, 21 bp, Artificial sequence
  primer
tcaagagctaggactctggag

SEQ ID NO: 13100 - protein, 577 aa, Artificial sequence
  consensus sequence
  Variant (2)..(6): Xaa in position 2 to 6 is any amino acid
  Variant (7)..(7): Xaa in position 7 is any or no amino acid
  Variant (9)..(10): Xaa in position 9 to 10 is any amino acid
  Variant (12)..(12): Xaa in position 12 is any amino acid
  Variant (13)..(38): Xaa in position 13 to 38 is any or no amino acid
  Variant (40)..(40): Xaa in position 40 is any amino acid
  Variant (41)..(65): Xaa in position 41 to 65 is any or no amino acid
  Variant (67)..(85): Xaa in position 67 to 85 is any amino acid
  Variant (86)..(103): Xaa in position 86 to 103 is any or no amino acid
  Variant (106)..(107): Xaa in position 106 to 107 is any amino acid
  Variant (109)..(110): Xaa in position 109 to 110 is any amino acid
  Variant (111)..(112): Xaa in position 111 to 112 is any or no amino acid
  Variant (114)..(122): Xaa in position 114 to 122 is any amino acid
  Variant (123)..(132): Xaa in position 123 to 132 is any or no amino acid
  Variant (134)..(134): Xaa in position 134 is any amino acid
  Variant (135)..(135): Xaa in position 135 is any or no amino acid
  Variant (137)..(206): Xaa in position 137 to 206 is any amino acid
  Variant (207)..(241): Xaa in position 207 to 241 is any or no amino acid
  Variant (243)..(262): Xaa in position 243 to 262 is any amino acid
  Variant (263)..(286): Xaa in position 263 to 286 is any or no amino acid
  Variant (288)..(291): Xaa in position 288 to 291 is any amino acid
  Variant (292)..(323): Xaa in position 292 to 323 is any or no amino acid
  Variant (325)..(329): Xaa in position 325 to 329 is any amino acid
  Variant (330)..(340): Xaa in position 330 to 340 is any or no amino acid
  Variant (342)..(343): Xaa in position 342 to 343 is any amino acid
  Variant (345)..(350): Xaa in position 345 to 350 is any amino acid
  Variant (352)..(354): Xaa in position 352 to 354 is any amino acid
  Variant (356)..(359): Xaa in position 356 to 359 is any amino acid
  Variant (361)..(368): Xaa in position 361 to 368 is any amino acid
  Variant (370)..(378): Xaa in position 370 to 378 is any amino acid
  Variant (379)..(386): Xaa in position 379 to 386 is any or no amino acid
  Variant (388)..(388): Xaa in position 388 is any amino acid
  Variant (390)..(392): Xaa in position 390 to 392 is any amino acid
  Variant (393)..(395): Xaa in position 393 to 395 is any or no amino acid
  Variant (397)..(397): Xaa in position 397 is any amino acid
  Variant (399)..(400): Xaa in position 399 to 400 is any amino acid
  Variant (402)..(403): Xaa in position 402 to 403 is any amino acid
  Variant (406)..(407): Xaa in position 406 to 407 is any amino acid
  Variant (412)..(413): Xaa in position 412 to 413 is any amino acid
  Variant (415)..(427): Xaa in position 415 to 427 is any amino acid
  Variant (428)..(435): Xaa in position 428 to 435 is any or no amino acid
  Variant (437)..(439): Xaa in position 437 to 439 is any amino acid
  Variant (441)..(446): Xaa in position 441 to 446 is any amino acid
  Variant (447)..(455): Xaa in position 447 to 455 is any or no amino acid
  Variant (457)..(461): Xaa in position 457 to 461 is any amino acid
  Variant (464)..(464): Xaa in position 464 is any amino acid
  Variant (466)..(467): Xaa in position 466 to 467 is any amino acid
  Variant (469)..(470): Xaa in position 469 to 470 is any amino acid
  Variant (471)..(471): Xaa in position 471 is any or no amino acid
  Variant (473)..(474): Xaa in position 473 to 474 is any amino acid
  Variant (476)..(476): Xaa in position 476 is any amino acid
  Variant (481)..(490): Xaa in position 481 to 490 is any amino acid
  Variant (491)..(509): Xaa in position 491 to 509 is any or no amino acid
  Variant (513)..(513): Xaa in position 513 is any amino acid
  Variant (516)..(518): Xaa in position 516 to 518 is any amino acid
  Variant (520)..(520): Xaa in position 520 is any amino acid
  Variant (522)..(522): Xaa in position 522 is any amino acid
  Variant (524)..(541): Xaa in position 524 to 541 is any amino acid
  Variant (543)..(543): Xaa in position 543 is any amino acid
  Variant (545)..(563): Xaa in position 545 to 563 is any amino acid
  Variant (564)..(576): Xaa in position 564 to 576 is any or no amino acid
PXXXXXXPXXGXXXXXXXXXXXXXXXXXXXXXXXXXXXGXXXXXXXXXXXXXXXXXXXXXXXXXXAXXXXXXXXXXXXXXXXXXXXXXXXXXXXXXXXXXXXXYGXXWXXXXKXXXXXXXXXXXXXXXXXXXRXXEXXXXXXXXXXXXXXXXXXXXXXXXXXXXXXXXXXXXXXXXXXXXXXXXXXXXXXXXXXXXXXXXXXXXXXXXXXXXXXXXXXXXXXXXXXXXXXXXXXXXXXXXXDXXXXXXXXXXXXXXXXXXXXXXXXXXXXXXXXXXXXXXXXXXXXLXXXXXXXXXXXXXXXXXXXXXXXXXXXXXXXXXXXXKXXXXXXXXXXXXXXXXGXXTXXXXXXWXXXEXXXXPXXXXXXXXEXXXXXXXXXXXXXXXXXEXDXXXXXXLXYXXAXXKEXXRLHPXXPXXXXXXXXXXXXXXXXXXXXXGXXXPXXXXXXXXXXXXXXXNXXXXXRDXPXXWXXXPXXFXPERFXXXXXXXXXXXXXXXXXXXXXXXXXXXXXPFGXGRXXXRXCXGXXXXXXXXXXXXXXXXXXFXWXXXXXXXXXXXXXXXXXXXXXXXXXXXXXXXXL

SEQ ID NO: 13101 - protein, 11 aa, Artificial sequence
  protein pattern
  Variant (4)..(4): Xaa in position 4 is any amino acid
  Variant (8)..(8): Xaa in position 8 is any amino acid
  Variant (10)..(10): Xaa in position 10 is Ala, Ile, Leu, Pro or Val
  Variant (11)..(11): Xaa in position 11 is Ala, Asp or Gly
PFGXGRRXCXX

SEQ ID NO: 13102 - DNA, 1230 bp, Arabidopsis thaliana
  CDS (1)..(1230)
atggctcaagcagcgagattaagcctgagaatgcagaaagagctaaagcttctcctctccgatccacctcacggcgcttcgtttccacatctctcttccgccgccaatggctccggcgatttctccactttctccaccatcgatgctcaaatcgaaggtcctgaagatactgtatatgctaatggaatcttcaatttgaagattcaaatccctgagagatatccatttcagccaccaattgtgtcgttcgctacaccgatttatcacccaaacatcgataacagtggccggatttgccttgacattctaaatctccctcccaagggagcttggcaaccatcgttgaatatctcgacagttttgacgagtatgagattgttgcttagtgaaccaaatcctgatgatggattgatgtgtgaagtaagcagggagtataaatacaatagacaaacttttgattataaggcacgagagatgactgagaagtatgctaaggttaaagctgatggatgcagcaccagcttacaaattaagaatcatggagatgagaagtctggtgaaagtggaaatagtgttaagcttaagttgacagtggaatcttctttaagcatagcacatacagtgaaacgtgagactgcagggagagatgaacaagaggatggcaatgggaaaagaaaagcagtggttggttttggcgaggggaattcgtttggaaacgatgggattaaaaggagtaggaagaagttatctcttgcattgccttctcaatctcaaaagaaagacttgtgtggtgaagaagagctcacacgtggtgtttcagctgcttgcaaagaaaacaaaaaaccaaatttgaatggaaagaagctttctctggggctgaagcagccatgtaatgatactttggcgagttttcgaacttctgctgcgaagagtgacaacaatagactaagccgaaaactgtccctgagatcaccacttggagagttgaatgaagttagcaaacctgaggtacttgcgcaaactgatatgaaactggagatgaatcaaaatgaagatgcaagaagtttgcgaggtgagtttgagaattcggtattggaagaaacatcaatggctgaatccattgttgttctagacagtgatgatagtggacaagaagaagaagaaagagtctcttcttcgaggtcaagattatcactggcaaagaggagagtcctcaaatgtagaccttga

SEQ ID NO: 13103 - protein, 409 aa, Arabidopsis thaliana
MAQAARLSLRMQKELKLLLSDPPHGASFPHLSSAANGSGDFSTFSTIDAQIEGPEDTVYANGIFNLKIQIPERYPFQPPIVSFATPIYHPNIDNSGRICLDILNLPPKGAWQPSLNISTVLTSMRLLLSEPNPDDGLMCEVSREYKYNRQTFDYKAREMTEKYAKVKADGCSTSLQIKNHGDEKSGESGNSVKLKLTVESSLSIAHTVKRETAGRDEQEDGNGKRKAVVGFGEGNSFGNDGIKRSRKKLSLALPSQSQKKDLCGEEELTRGVSAACKENKKPNLNGKKLSLGLKQPCNDTLASFRTSAAKSDNNRLSRKLSLRSPLGELNEVSKPEVLAQTDMKLEMNQNEDARSLRGEFENSVLEETSMAESIVVLDSDDSGQEEEERVSSSRSRLSLAKRRVLKCRP

SEQ ID NO: 13104 - DNA, 1671 bp, Oryza sativa
  CDS (1)..(1671)
atggctcaggctgcaagactgaatctgcgaatgcagaaagaggttaagcttcttctaaatgatccacctcatggggtctcccttaatctttctggggatgaaagtgccttgtcatcgttgttgagtttcgaggccagaatacagggacctgatgaaactgtttattcaaaaggagtttttgttctgaagatccaaattcctgaaagatatccttttcaacctcccaatgtgacatttgttactcctatttatcatcccaacatagacaatggaggacgaatttgccttgatatactaaatttaccaccaaagggtgcctggcaaccatcgctcaacattgctactgttttgacaagcattggtttgctgctaagtgacccaaaccctgacgatgggctgatggctgaaataagtcgagagtacaaatacaacagacaagtttttgacataaatgctcggtcctggactgaaaagtatgctaatccttcagcaattggcgctagtggttggagctctgtagatgtttcaaccctggcaccaaacatacaagaggagaagctaagcctggagcctttgccaaaagcttcaaataaaaattgtgatgggagtagaaagaagatgaggctacttagtcaaaagttatctctgaaatcagtacctgaagagaataccaccactggcaaaaaggacctggtgacaaaccacttatcatcgacagcaagacccactgatcctactgcatgcttgtctgatgtttcaggcaaactgaatgatacctcagaaagcatatctgtcatcgcagatagtgcagtgacttcaaagaaagaataccaaggaactagaaggaacttgcagttacttgggcaggggcttcctgttacatcagaaggtcctagcaagaacagtaatggcagtgtggaagataagttacctaatcatcttctagcatcagcatcatcgaacactaagcatcctgtcatgggatcttctgataatgctttagagaagagtagtgcaaagcgcattggtgagtcattagatagcttgtataaagcatcagaaggcgatggtacaaatgtgaggtcacttggtcagaagttgtcactgaaatcggcaaagcctgaaagcaagagcaatgttcagaaggaaaacatggctccaaatcatctgccttcattgtcaggcttcagtaatctggataaaagacaatcgcatgttatttcagggggaaattccattgggcatactaatctggttcaacaaaattctaacaacgaaaatgtacttccaagtacccagttgataccaagtaaagaatgcaatcaaggccgaaagaagctgcatttactaagtaagaggctgtcattgaaatctgagctgcctgcagacaagaccattgagaaggaatatatgcaaacagattgttctcaaaacaacaggaagcccaatgaacttccgttgtcagcgcctgtcctcaaaaatcagatcttgggtaccattgatccacagaaagatgccaggcaaagcaagtcttccatccaacaaaacacaactcctgtggagaggattgttgtttcagatagtgaagatagtgctgatgaatgtgaaagaccttcaagatcaaggctctcattgatgaggagacgattggctggaaaaccaagaagctaa

SEQ ID NO: 13105 - protein, 556 aa, Oryza sativa
MAQAARLNLRMQKEVKLLLNDPPHGVSLNLSGDESALSSLLSFEARIQGPDETVYSKGVFVLKIQIPERYPFQPPNVTFVTPIYHPNIDNGGRICLDILNLPPKGAWQPSLNIATVLTSIGLLLSDPNPDDGLMAEISREYKYNRQVFDINARSWTEKYANPSAIGASGWSSVDVSTLAPNIQEEKLSLEPLPKASNKNCDGSRKKMRLLSQKLSLKSVPEENTTTGKKDLVTNHLSSTARPTDPTACLSDVSGKLNDTSESISVIADSAVTSKKEYQGTRRNLQLLGQGLPVTSEGPSKNSNGSVEDKLPNHLLASASSNTKHPVMGSSDNALEKSSAKRIGESLDSLYKASEGDGTNVRSLGQKLSLKSAKPESKSNVQKENMAPNHLPSLSGFSNLDKRQSHVISGGNSIGHTNLVQQNSNNENVLPSTQLIPSKECNQGRKKLHLLSKRLSLKSELPADKTIEKEYMQTDCSQNNRKPNELPLSAPVLKNQILGTIDPQKDARQSKSSIQQNTTPVERIVVSDSEDSADECERPSRSRLSLMRRRLAGKPRS

SEQ ID NO: 13106 - DNA, 1767 bp, Vitis vinifera
  CDS (1)..(1767)
atggctcaagccgcgaggctcatcctccgaatgcaaaaggagctcaagcttcttctcaccgacccaccgccgggcgcctccttccctcaactctccggcgactccgacatctgctcttcttctttatcaagtattgacgcccagattgaaggacccgaagaaactgtatatgccaaagggatctttaaaattaagatccatatacctgaaaggtacccctttcagcctccgagtgtgacttttgcgacgcccatctaccatcccaatatcgacactggagggcgaatctgcctcgacattctcaatctacctcctaaaggtgcgtggcaaccatctctgaacatttcaactgtgttaacaagcattgggttgttactgagtgagcccaaccctgatgatggcctaatgtgtgaagcgagcaaggaatacaagtatgaccgacaagcttttgaccagaaggcacgatctatgactgaaaagtatgccaaagctggggctagtgggaacagcagcaaccaaatcattcaaacaaatacaaatccaagcatggtggacataaaaggaatggacatggttccaaaacatgacattcatgagtacactggcagtcatagcaagctaagtgggatttgccggaagttgtcatgggaattctcagactcaatgcagaacaaggaagtaactgaggtacctaatcagtgcctggaaaaccagttggtagtgaaacgaccaaagaaagagcccaaaggtggagtgcatgactgcaatccaagtcatgagaagctatgcatgagcaggcagaagttatcactggaatctatgcgtgaaactaagaagagagatggtggtgatgacaaagaaaatgaggtgccaaattacagctcatcactcttgaactcccaaagcccttctgtggcttcaaaatcattgccagttcctcctactagcaaccattatgagcaacaacctcaacaggatcaagacaataaacctataaatgactacttaagcattggttcagggaagcctcactggatatgtcggaaactatcattagaatcttcaaaaatgtccaatgtagatgatagtaatgacaagaaaatttctgggtcccctcaactatcatcctcccagattgaatccaatgtctcacacaaggcctcaccaattctccagactgttaaccataatggtttgcggatgaataagggctgtatagatgggacaggacatgaatttaccaacacaaagctgaagaagctgtgttcctcgggtaagaagctttctctgggactctcaggctcatcaaagacagaggaaagtgataataaggagaatttggtgccaactcatgaagtgcccctttcacaccctaaaggcccttctatggattcatcgaagtcctcccttatgccccaagccggtgaatgctatgactggaaatcagaaagatgtataataaatgccagcagtaagaagtgcagaattggtcagaaggcaatggaacctctgggtcaatggcaaaggagcaatgagaagcagcaatccctctccatacctcaaatctataaggatggtgagaagcagcaatccaatgaagatgaaggtgaagctgtggatgtctctggagcagaggaatcaccaatgcctgaaaccatcatcgtcttggatagcgaagatagcgatgaggaaaggaatgtatctcaaaggtctagattgccactagcatgcaagcgcttggcggggaagtggagagccaaagcatga

SEQ ID NO: 13107 - protein, 588 aa, Vitis vinifera
MAQAARLILRMQKELKLLLTDPPPGASFPQLSGDSDICSSSLSSIDAQIEGPEETVYAKGIFKIKIHIPERYPFQPPSVTFATPIYHPNIDTGGRICLDILNLPPKGAWQPSLNISTVLTSIGLLLSEPNPDDGLMCEASKEYKYDRQAFDQKARSMTEKYAKAGASGNSSNQIIQTNTNPSMVDIKGMDMVPKHDIHEYTGSHSKLSGICRKLSWEFSDSMQNKEVTEVPNQCLENQLVVKRPKKEPKGGVHDCNPSHEKLCMSRQKLSLESMRETKKRDGGDDKENEVPNYSSSLLNSQSPSVASKSLPVPPTSNHYEQQPQQDQDNKPINDYLSIGSGKPHWICRKLSLESSKMSNVDDSNDKKISGSPQLSSSQIESNVSHKASPILQTVNHNGLRMNKGCIDGTGHEFTNTKLKKLCSSGKKLSLGLSGSSKTEESDNKENLVPTHEVPLSHPKGPSMDSSKSSLMPQAGECYDWKSERCIINASSKKCRIGQKAMEPLGQWQRSNEKQQSLSIPQIYKDGEKQQSNEDEGEAVDVSGAEESPMPETIIVLDSEDSDEERNVSQRSRLPLACKRLAGKWRAKA

SEQ ID NO: 13108 - DNA, 1236 bp, Arabidopsis lyrata subsp. lyrata
  CDS (1)..(1236)
atggctcaagcagcgagactaagcatgagaatgcacaaagagctaaagcttctcctctccgatccacctcatggcgcttcgtttccacatctctcttccgccgcctctggctccggcgacttctccactttctccaccatcgatgctcaaatcgaaggtcctgaagatactgtatatgctaatggaatcttcaatgtgaagattcaaatccctgagagatatccatttcagcctccaattgtggcattttctacaccgatttatcacccaaacatcgataacagtggccggatttgccttgatattcttaatctccctcccaagggtgcttggcaaccatcgttgaatatctcgacagttttgacgagtatcggattgttgcttagtgaaccgaatccggatgatggattgatgtgtgaagtaagcagggagtataaatacaatagacaaactttcgattataaagcacgagagatgactgagaagtatgctaaggttaagcctgatggaagcagcaccagcttccaaattaagattcatggagatgagaaggcttgtgaaagtggaattagtgttttagctggtaatgacgatgggattgaatcttccttaagcatagcacatacagtgaaccgtgacactgcagcgaaagatcaacaagaggatagaaatgggaaaagaaaagcagtgattggttttggcgaggcgaattcatttggtaacgatgtgataaaaacgagcaggaagaagttatctcttgccttgcctcctcaatctcaaaagaaggacttgtgtggtgaagaactcacaaatgtagtttcggctgcttgcaaagaaaacaagaaaccaaattcaaatggaaagaagctttctctggggctgaagcagccatttaatgataacttggccttctcgagttttcgaacttctgctgcaaagagtgacaacaatagactaagcagaaaactgtccttgagacaaccacttagagagttgaatgaagttagcaaaaccgaggtacttgcgcaaactgatatgaaactggaaatgaatcaaaatgaagatgacagaagttggcgcggtgagtttgagaactcgggcttggaagaagcatcaatgcctgaatccattgttgttctagacagtgatgatagtggacaagaagaagaagaaacagtctctttgaggtcaagattatcactaccaaagagaagagtcctcaagtgtagaccttga

SEQ ID NO: 13109 - protein, 411 aa, Arabidopsis lyrata subsp. lyrata
MAQAARLSMRMHKELKLLLSDPPHGASFPHLSSAASGSGDFSTFSTIDAQIEGPEDTVYANGIFNVKIQIPERYPFQPPIVAFSTPIYHPNIDNSGRICLDILNLPPKGAWQPSLNISTVLTSIGLLLSEPNPDDGLMCEVSREYKYNRQTFDYKAREMTEKYAKVKPDGSSTSFQIKIHGDEKACESGISVLAGNDDGIESSLSIAHTVNRDTAAKDQQEDRNGKRKAVIGFGEANSFGNDVIKTSRKKLSLALPPQSQKKDLCGEELTNVVSAACKENKKPNSNGKKLSLGLKQPFNDNLAFSSFRTSAAKSDNNRLSRKLSLRQPLRELNEVSKTEVLAQTDMKLEMNQNEDDRSWRGEFENSGLEEASMPESIVVLDSDDSGQEEEETVSLRSRLSLPKRRVLKCRP

SEQ ID NO: 13110 - DNA, 1671 bp, Oryza sativa subsp. indica
  CDS (1)..(1671)
atggctcaggctgcaagactgaatctgcgaatgcagaaagaggttaagcttcttctaaatgatccacctcatggggtctcccttaatctttctggggatgaaagtgccttgtcatcgttgttgagtttcgaggccagaatacagggacctgatgaaactgtttattcaaaaggagtttttgttctgaagatccaaattcctgaaagatatccttttcaacctcccaatgtgacatttgttactcctatttatcatcccaacatagacaatggaggacgaatttgccttgatatactaaatttaccaccaaagggtgcctggcaaccatcgctcaacattgctactgttttgacaagcattggtttgctgctaagtgacccaaaccctgacgatgggctgatggctgaaataagtcgagagtacaaatacaacagacaagtttttgacataaatgctcggtcctggactgaaaagtatgctaatccttcagcaattggcgctagtggttggagctctgtagatgtttcaaccctggcaccaaacatacaagaggagaagctaagcctggagcctttgccaaaagattcaaataaaaattgtgatgggagtagaaagaagatgaggctacttagtcaaaagttatctaggaaatcagtacctgaagagaataccaccactggcaaaaaggacctggtgactaaccacttatcatcgacagcaagacccactgatcctactgcatgcttgtctgatgtttcaggcaaactgaatgatacctcagaaagcatatctgtcatcgcagatagtgcagtgacttcaaagaaagaataccaaggaactagaaggaacttgcagttacttgggcaggggcttcctgttacatcagaaggtcctagcaagaacagtaatggcagtgtggaagataagttacctaatcatcttctagcatcagcatcatcgaacactaagcatcctgtcatgggatcttctgataatgctttagagaagagtagtgcaaagcgcattggtgagtcattagatagcttgtataaagcatcagaaggcgatggtacaaatgtgaggtcacttggtcagaagttgtcactgaaatcggcaaagcctgaaagcaagagcaatgttcagaaggaaaacatggctccaaatcatctgccttcattgtcaggcttcagtaatctggataaaagacaatcgcatgttatttcagggggaaattccattgggcatactaatctggttcaacaaaattctaacaacgaaaatgtacttccaagtacccagttgataccaagtaaagaatgcaatcaaggccgaaagaagctgcatttactaagtaagagtctgtcattgaaatctgagctgcctgcagacaagaccattgagaaggaatatatgcaaacagattgttctcaaaacaacaggaagcccaatgaacttccgttgtcagcgcctgtcctcaaaaatcagatcttgggtaccattgatccacagaaagatgccaggcaaagcaagtcttccatccaacaaaacacaactcctgtggagaggattgttgtttcagatagtgaagatagtgctgatgaatgtgaaagaccttcaagatcaaggctctcattgatgaggagacgattggctggaaaaccaagaagctaa

SEQ ID NO: 13111 - protein, 556 aa, Oryza sativa subsp. indica
MAQAARLNLRMQKEVKLLLNDPPHGVSLNLSGDESALSSLLSFEARIQGPDETVYSKGVFVLKIQIPERYPFQPPNVTFVTPIYHPNIDNGGRICLDILNLPPKGAWQPSLNIATVLTSIGLLLSDPNPDDGLMAEISREYKYNRQVFDINARSWTEKYANPSAIGASGWSSVDVSTLAPNIQEEKLSLEPLPKDSNKNCDGSRKKMRLLSQKLSRKSVPEENTTTGKKDLVTNHLSSTARPTDPTACLSDVSGKLNDTSESISVIADSAVTSKKEYQGTRRNLQLLGQGLPVTSEGPSKNSNGSVEDKLPNHLLASASSNTKHPVMGSSDNALEKSSAKRIGESLDSLYKASEGDGTNVRSLGQKLSLKSAKPESKSNVQKENMAPNHLPSLSGFSNLDKRQSHVISGGNSIGHTNLVQQNSNNENVLPSTQLIPSKECNQGRKKLHLLSKSLSLKSELPADKTIEKEYMQTDCSQNNRKPNELPLSAPVLKNQILGTIDPQKDARQSKSSIQQNTTPVERIVVSDSEDSADECERPSRSRLSLMRRRLAGKPRS

SEQ ID NO: 13112 - DNA, 1641 bp, Oryza sativa subsp. japonica
  CDS (1)..(1641)
atgcagaaagaggttaagcttcttctaaatgatccacctcatggggtctcccttaatctttctggggatgaaagtgccttgtcatcgttgttgagtttcgaggccagaatacagggacctgatgaaactgtttattcaaaaggagtttttgttctgaagatccaaattcctgaaagatatccttttcaacctcccaatgtgacatttgttactcctatttatcatcccaacatagacaatggaggacgaatttgccttgatatactaaatttaccaccaaagggtgcctggcaaccatcgctcaacattgctactgttttgacaagcattggtttgctgctaagtgacccaaaccctgacgatgggctgatggctgaaataagtcgagagtacaaatacaacagacaagtttttgacataaatgctcggtcctggactgaaaagtatgctaatccttcagcaattggcgctagtggttggagctctgtagatgtttcaaccctggcaccaaacatacaagaggagaagctaagcctggagcctttgccaaaagcttcaaataaaaattgtgatgggagtagaaagaagatgaggctacttagtcaaaagttatctctgaaatcagtacctgaagagaataccaccactggcaaaaaggacctggtgacaaaccacttatcatcgacagcaagacccactgatcctactgcatgcttgtctgatgtttcaggcaaactgaatgatacctcagaaagcatatctgtcatcgcagatagtgcagtgacttcaaagaaagaataccaaggaactagaaggaacttgcagttacttgggcaggggcttcctgttacatcagaaggtcctagcaagaacagtaatggcagtgtggaagataagttacctaatcatcttctagcatcagcatcatcgaacactaagcatcctgtcatgggatcttctgataatgctttagagaagagtagtgcaaagcgcattggtgagtcattagatagcttgtataaagcatcagaaggcgatggtacaaatgtgaggtcacttggtcagaagttgtcactgaaatcggcaaagcctgaaagcaagagcaatgttcagaaggaaaacatggctccaaatcatctgccttcattgtcaggcttcagtaatctggataaaagacaatcgcatgttatttcagggggaaattccattgggcatactaatctggttcaacaaaattctaacaacgaaaatgtacttccaagtacccagttgataccaagtaaagaatgcaatcaaggccgaaagaagctgcatttactaagtaagaggctgtcattgaaatctgagctgcctgcagacaagaccattgagaaggaatatatgcaaacagattgttctcaaaacaacaggaagcccaatgaacttccgttgtcagcgcctgtcctcaaaaatcagatcttgggtaccattgatccacagaaagatgccaggcaaagcaagtcttccatccaacaaaacacaactcctgtggagaggattgttgtttcagatagtgaagatagtgctgatgaatgtgaaagaccttcaagatcaaggctctcattgatgaggagacgattggctggaaaaccaagaagctaa

SEQ ID NO: 13113 - protein, 546 aa, Oryza sativa subsp. japonica
MQKEVKLLLNDPPHGVSLNLSGDESALSSLLSFEARIQGPDETVYSKGVFVLKIQIPERYPFQPPNVTFVTPIYHPNIDNGGRICLDILNLPPKGAWQPSLNIATVLTSIGLLLSDPNPDDGLMAEISREYKYNRQVFDINARSWTEKYANPSAIGASGWSSVDVSTLAPNIQEEKLSLEPLPKASNKNCDGSRKKMRLLSQKLSLKSVPEENTTTGKKDLVTNHLSSTARPTDPTACLSDVSGKLNDTSESISVIADSAVTSKKEYQGTRRNLQLLGQGLPVTSEGPSKNSNGSVEDKLPNHLLASASSNTKHPVMGSSDNALEKSSAKRIGESLDSLYKASEGDGTNVRSLGQKLSLKSAKPESKSNVQKENMAPNHLPSLSGFSNLDKRQSHVISGGNSIGHTNLVQQNSNNENVLPSTQLIPSKECNQGRKKLHLLSKRLSLKSELPADKTIEKEYMQTDCSQNNRKPNELPLSAPVLKNQILGTIDPQKDARQSKSSIQQNTTPVERIVVSDSEDSADECERPSRSRLSLMRRRLAGKPRS

SEQ ID NO: 13114 - DNA, 1230 bp, Arabidopsis thaliana
  CDS (1)..(1230)
atggctcaagcagcgagattaagcctgagaatgcagaaagagctaaagcttctcctctccgatccacctcacggcgcttcgtttccacatctctcttccgccgccaatggctccggcgatttctccactttctccaccatcgatgctcaaatcgaaggtcctgaagatactgtatatgctaatggaatcttcaatttgaagattcaaatccctgagagatatccatttcagccaccaattgtgtcgttcgctacaccgatttatcacccaaacatcgataacagtggccggatttgccttgacattctaaatctccctcccaagggagcttggcaaccatcgttgaatatctcgacagttttgacgagtatgagattgttgcttagtgaaccaaatcctgatgatggattgatgtgtgaagtaagcagggagtataaatacaatagacaaacttttgattataaggcacgagagatgactgagaagtatgctaaggttaaagctgatggatgcagcaccagcttacaaattaagaatcatggagatgagaagtctggtgaaagtggaaatagtgttaagcttaagttgacagtggaatcttctttaagcatagcacatacagtgaaacgtgagactgcagggagagatgaacaagaggatggcaatgggaaaagaaaagcagtggttggttttggcgaggggaattcgtttggaaacgatgggattaaaaggagtaggaagaagttatctcttgcattgccttctcaatctcaaaagaaagacttgtgtggtgaagaagagctcacacgtggtgtttcagctgcttgcaaagaaaacaaaaaaccaaatttgaatggaaagaagctttctctggggctgaagcagccatgtaatgatactttggcgagttttcgaacttctgctgcgaagagtgacaacaatagactaagccgaaaactgtccctgagatcaccacttggagagttgaatgaagttagcaaacctgaggtacttgcgcaaactgatatgaaactggagatgaatcaaaatgaagatgcaagaagtttgcgaggtgagtttgagaattcggtattggaagaaacatcaatggctgaatccattgttgttctagacagtgatgatagtggacaagaagaagaagaaagagtctcttcttcgaggtcaagattattactggcaaagaggagagtcctcaaatgtagaccttga

SEQ ID NO: 13115 - protein, 409 aa, Arabidopsis thaliana
MAQAARLSLRMQKELKLLLSDPPHGASFPHLSSAANGSGDFSTFSTIDAQIEGPEDTVYANGIFNLKIQIPERYPFQPPIVSFATPIYHPNIDNSGRICLDILNLPPKGAWQPSLNISTVLTSMRLLLSEPNPDDGLMCEVSREYKYNRQTFDYKAREMTEKYAKVKADGCSTSLQIKNHGDEKSGESGNSVKLKLTVESSLSIAHTVKRETAGRDEQEDGNGKRKAVVGFGEGNSFGNDGIKRSRKKLSLALPSQSQKKDLCGEEELTRGVSAACKENKKPNLNGKKLSLGLKQPCNDTLASFRTSAAKSDNNRLSRKLSLRSPLGELNEVSKPEVLAQTDMKLEMNQNEDARSLRGEFENSVLEETSMAESIVVLDSDDSGQEEEERVSSSRSRLLLAKRRVLKCRP

SEQ ID NO: 13116 - DNA, 23 bp, Artificial sequence
  primer
atggctcaagcagcgagattaag

SEQ ID NO: 13117 - DNA, 21 bp, Artificial sequence
  primer
tcaaggtctacatttgaggac

SEQ ID NO: 13118 - protein, 614 aa, Artificial sequence
  consensus sequence
  Variant (8)..(9): Xaa in position 8 to 9 is any amino acid
  Variant (15)..(15): Xaa in position 15 is any amino acid
  Variant (20)..(20): Xaa in position 20 is any amino acid
  Variant (26)..(26): Xaa in position 26 is any amino acid
  Variant (28)..(29): Xaa in position 28 to 29 is any amino acid
  Variant (30)..(30): Xaa in position 30 is any or no amino acid
  Variant (33)..(38): Xaa in position 33 to 38 is any amino acid
  Variant (39)..(41): Xaa in position 39 to 41 is any or no amino acid
  Variant (43)..(48): Xaa in position 43 to 48 is any amino acid
  Variant (50)..(50): Xaa in position 50 is any amino acid
  Variant (52)..(52): Xaa in position 52 is any amino acid
  Variant (55)..(56): Xaa in position 55 to 56 is any amino acid
  Variant (60)..(61): Xaa in position 60 to 61 is any amino acid
  Variant (63)..(63): Xaa in position 63 is any amino acid
  Variant (65)..(66): Xaa in position 65 to 66 is any amino acid
  Variant (80)..(80): Xaa in position 80 is any amino acid
  Variant (82)..(82): Xaa in position 82 is any amino acid
  Variant (84)..(84): Xaa in position 84 is any amino acid
  Variant (95)..(95): Xaa in position 95 is any amino acid
  Variant (118)..(118): Xaa in position 118 is any amino acid
  Variant (124)..(125): Xaa in position 124 to 125 is any amino acid
  Variant (130)..(130): Xaa in position 130 is any amino acid
  Variant (139)..(139): Xaa in position 139 is any amino acid
  Variant (141)..(141): Xaa in position 141 is any amino acid
  Variant (151)..(151): Xaa in position 151 is any amino acid
  Variant (154)..(155): Xaa in position 154 to 155 is any amino acid
  Variant (158)..(159): Xaa in position 158 to 159 is any amino acid
  Variant (165)..(167): Xaa in position 165 to 167 is any amino acid
  Variant (169)..(169): Xaa in position 169 is any amino acid
  Variant (171)..(171): Xaa in position 171 is any amino acid
  Variant (173)..(173): Xaa in position 173 is any amino acid
  Variant (174)..(175): Xaa in position 174 to 175 is any or no amino acid
  Variant (177)..(192): Xaa in position 177 to 192 is any amino acid
  Variant (193)..(214): Xaa in position 193 to 214 is any or no amino acid
  Variant (216)..(216): Xaa in position 216 is any amino acid
  Variant (219)..(225): Xaa in position 219 to 225 is any amino acid
  Variant (226)..(242): Xaa in position 226 to 242 is any or no amino acid
  Variant (245)..(252): Xaa in position 245 to 252 is any amino acid
  Variant (253)..(280): Xaa in position 253 to 280 is any or no amino acid
  Variant (282)..(286): Xaa in position 282 to 286 is any amino acid
  Variant (288)..(300): Xaa in position 288 to 300 is any amino acid
  Variant (301)..(351): Xaa in position 301 to 351 is any or no amino acid
  Variant (354)..(355): Xaa in position 354 to 355 is any amino acid
  Variant (356)..(361): Xaa in position 356 to 361 is any or no amino acid
  Variant (363)..(363): Xaa in position 363 is any amino acid
  Variant (365)..(373): Xaa in position 365 to 373 is any amino acid
  Variant (374)..(374): Xaa in position 374 is any or no amino acid
  Variant (379)..(386): Xaa in position 379 to 386 is any amino acid
  Variant (387)..(391): Xaa in position 387 to 391 is any or no amino acid
  Variant (393)..(398): Xaa in position 393 to 398 is any amino acid
  Variant (399)..(399): Xaa in position 399 is any or no amino acid
  Variant (401)..(417): Xaa in position 401 to 417 is any amino acid
  Variant (418)..(423): Xaa in position 418 to 423 is any or no amino acid
  Variant (425)..(432): Xaa in position 425 to 432 is any amino acid
  Variant (433)..(445): Xaa in position 433 to 445 is any or no amino acid
  Variant (447)..(448): Xaa in position 447 to 448 is any amino acid
  Variant (450)..(451): Xaa in position 450 to 451 is any amino acid
  Variant (452)..(453): Xaa in position 452 to 453 is any or no amino acid
  Variant (455)..(468): Xaa in position 455 to 468 is any amino acid
  Variant (469)..(474): Xaa in position 469 to 474 is any or no amino acid
  Variant (477)..(478): Xaa in position 477 to 478 is any amino acid
  Variant (482)..(484): Xaa in position 482 to 484 is any amino acid
  Variant (486)..(492): Xaa in position 486 to 492 is any amino acid
  Variant (494)..(503): Xaa in position 494 to 503 is any amino acid
  Variant (504)..(519): Xaa in position 504 to 519 is any or no amino acid
  Variant (521)..(530): Xaa in position 521 to 530 is any amino acid
  Variant (531)..(542): Xaa in position 531 to 542 is any or no amino acid
  Variant (544)..(549): Xaa in position 544 to 549 is any amino acid
  Variant (550)..(556): Xaa in position 550 to 556 is any or no amino acid
  Variant (558)..(565): Xaa in position 558 to 565 is any amino acid
  Variant (566)..(576): Xaa in position 566 to 576 is any or no amino acid
  Variant (578)..(578): Xaa in position 578 is any amino acid
  Variant (582)..(582): Xaa in position 582 is any amino acid
  Variant (585)..(585): Xaa in position 585 is any amino acid
  Variant (588)..(588): Xaa in position 588 is any amino acid
  Variant (589)..(590): Xaa in position 589 to 590 is any or no amino acid
  Variant (592)..(592): Xaa in position 592 is any amino acid
  Variant (594)..(595): Xaa in position 594 to 595 is any amino acid
  Variant (597)..(597): Xaa in position 597 is any amino acid
  Variant (598)..(598): Xaa in position 598 is any or no amino acid
  Variant (603)..(603): Xaa in position 603 is any amino acid
  Variant (605)..(606): Xaa in position 605 to 606 is any amino acid
  Variant (607)..(607): Xaa in position 607 is any or no amino acid
  Variant (609)..(611): Xaa in position 609 to 611 is any amino acid
  Variant (613)..(613): Xaa in position 613 is any amino acid
MAQAARLXXRMQKEXKLLLXDPPHGXSXXXLSXXXXXXXXXSXXXXXXAXIXGPXXTVYXXGXFXXKIQIPERYPFQPPXVXFXTPIYHPNIDNXGRICLDILNLPPKGAWQPSLNIXTVLTSXXLLLSXPNPDDGLMXEXSREYKYNRQXFDXXARXXTEKYAXXXAXGXSXXXSXXXXXXXXXXXXXXXXXXXXXXXXXXXXXXXXXXXXXXSXKLXXXXXXXXXXXXXXXXXXXXXXXXLSXXXXXXXXXXXXXXXXXXXXXXXXXXXXXXXXXXXXTXXXXXQXXXXXXXXXXXXXXXXXXXXXXXXXXXXXXXXXXXXXXXXXXXXXXXXXXXXXXXXXXXXXXXXGEXXXXXXXXSXGXXXXXXXXXXKLSLXXXXXXXXXXXXXKXXXXXXXLXXXXXXXXXXXXXXXXXXXXXXXGXXXXXXXXXXXXXXXXXXXXXQXXNXXXXLXXXXXXXXXXXXXXXXXXXXLSXXLSLXXXLXXXXXXXKXXXXXXXXXXXXXXXXXXXXXXXXXXLXXXXXXXXXXXXXXXXXXXXXXLXXXXXXXXXXXXXSXXXXXXXXXXXXXXXXXXXEXIVVXDSXDSXXXEXEXXSXXRSRLXLXXXRXXXKXR

SEQ ID NO: 13119 - protein, 61 aa, Artificial sequence
  protein pattern
  Variant (4)..(4): Xaa in position 4 is Ala or Ser
  Variant (5)..(5): Xaa in position 5 is any amino acid
  Variant (7)..(7): Xaa in position 7 is Ile or Val
  Variant (9)..(9): Xaa in position 9 is Asn or Val
  Variant (10)..(10): Xaa in position 10 is Leu or Val
  Variant (24)..(24): Xaa in position 24 is any amino acid
  Variant (26)..(26): Xaa in position 26 is Ala, Ser or Thr
  Variant (28)..(28): Xaa in position 28 is Ala, Ser or Val
  Variant (39)..(39): Xaa in position 39 is any or no amino acid
  Variant (41)..(41): Xaa in position 41 is any or no amino acid
TVYXXGXFXXKIQIPERYPFQPPXVXFXTPIYHPNIDNXGXRICLDILNLPPKGAWQPSLN

SEQ ID NO: 13120 - protein, 55 aa, Artificial sequence
  protein pattern
  Variant (6)..(6): Xaa in position 6 is Ile or Met
  Variant (7)..(7): Xaa in position 7 is any amino acid
  Variant (12)..(12): Xaa in position 12 is Asp or Glu
  Variant (21)..(21): Xaa in position 21 is Ala or Cys
  Variant (23)..(23): Xaa in position 23 is Ile or Val
  Variant (33)..(33): Xaa in position 33 is Thr or Val
  Variant (36)..(37): Xaa in position 36 to 37 is any amino acid
  Variant (40)..(40): Xaa in position 40 is Glu or Ser
  Variant (41)..(41): Xaa in position 41 is any amino acid
  Variant (47)..(47): Xaa in position 47 is any amino acid
  Variant (48)..(48): Xaa in position 48 is Pro or Val
  Variant (49)..(49): Xaa in position 49 is any amino acid
  Variant (50)..(50): Xaa in position 50 is Ala or Pro
  Variant (51)..(51): Xaa in position 51 is any amino acid
  Variant (53)..(53): Xaa in position 53 is Ala, Cys or Ser
  Variant (55)..(55): Xaa in position 55 is Gly or Thr
TVLTSXXLLLSXPNPDDGLMXEXSREYKYNRQXFDXXARXXTEKYAXXXXXGXSX

SEQ ID NO: 13121 - protein, 28 aa, Artificial sequence
  protein pattern
  Variant (7)..(7): Xaa in position 7 is any amino acid
  Variant (8)..(8): Xaa in position 8 is Leu or Met
  Variant (11)..(11): Xaa in position 11 is any amino acid
  Variant (14)..(14): Xaa in position 14 is Leu or Val
  Variant (19)..(19): Xaa in position 19 is Asn, Ser or Thr
  Variant (23)..(23): Xaa in position 23 is any amino acid
  Variant (25)..(25): Xaa in position 25 is Ala or Val
  Variant (27)..(27): Xaa in position 27 is Phe or Leu
  Variant (28)..(28): Xaa in position 28 is Asn or Pro
AQAARLXXRMXKEXKLLLXDPPXGXSXX

SEQ ID NO: 13122 - protein, 31 aa, Artificial sequence
  protein pattern
  Variant (2)..(2): Xaa in position 2 is Gly, Ile or Val
  Variant (3)..(3): Xaa in position 3 is any amino acid
  Variant (4)..(4): Xaa in position 4 is Glu or Gln
  Variant (5)..(5): Xaa in position 5 is Glu or Asn
  Variant (6)..(6): Xaa in position 6 is Ala or Thr
  Variant (7)..(7): Xaa in position 7 is Ser or Thr
  Variant (8)..(8): Xaa in position 8 is any amino acid
  Variant (9)..(9): Xaa in position 9 is Ala, Pro or Val
  Variant (11)..(11): Xaa in position 11 is Arg or Ser
  Variant (15)..(16): Xaa in position 15 to 16 is any or no amino acid
  Variant (19)..(19): Xaa in position 19 is any or no amino acid
  Variant (21)..(21): Xaa in position 21 is Glu or Gly
  Variant (22)..(22): Xaa in position 22 is Asp or Gln
  Variant (23)..(23): Xaa in position 23 is Glu or Ser
  Variant (24)..(24): Xaa in position 24 is Ala or Glu
  Variant (25)..(25): Xaa in position 25 is Asp or Glu
  Variant (27)..(28): Xaa in position 27 to 28 is any amino acid
  Variant (29)..(29): Xaa in position 29 is Arg or Ser
  Variant (30)..(30): Xaa in position 30 is any amino acid
  Variant (31)..(31): Xaa in position 31 is Arg or Ser
SXXXXXXXXEXIVVXXSDXSXXXXXEXXXXX

SEQ ID NO: 13123 - protein, 15 aa, Artificial sequence
  protein pattern
  Variant (2)..(2): Xaa in position 2 is Ser or Thr
  Variant (3)..(3): Xaa in position 3 is Phe or Leu
  Variant (4)..(4): Xaa in position 4 is any amino acid
  Variant (5)..(5): Xaa in position 5 is Ser or Thr
  Variant (6)..(6): Xaa in position 6 is Phe or Ile
  Variant (7)..(7): Xaa in position 7 is Asp or Glu
  Variant (9)..(9): Xaa in position 9 is Gln or Arg
  Variant (11)..(11): Xaa in position 11 is Glu or Gln
  Variant (14)..(14): Xaa in position 14 is any or no amino acid
SXXXXXXAXIXGPXE

SEQ ID NO: 13124 - protein, 15 aa, Artificial sequence
  protein pattern
  Variant (2)..(2): Xaa in position 2 is Asp or Lys
  Variant (3)..(3): Xaa in position 3 is Gly, Asn or Val
  Variant (4)..(4): Xaa in position 4 is any amino acid
  Variant (5)..(5): Xaa in position 5 is Asp or Lys
  Variant (6)..(6): Xaa in position 6 is any amino acid
  Variant (11)..(12): Xaa in position 11 to 12 is any or no amino acid
  Variant (14)..(14): Xaa in position 14 is any or no amino acid
NXXXXXSRKKXXLXS

SEQ ID NO: 13125 - protein, 27 aa, Artificial sequence
  protein pattern
  Variant (2)..(7): Xaa in position 2 to 7 is any or no amino acid
  Variant (9)..(9): Xaa in position 9 is any amino acid
  Variant (10)..(10): Xaa in position 10 is Gly or Asn
  Variant (11)..(11): Xaa in position 11 is any amino acid
  Variant (15)..(15): Xaa in position 15 is any amino acid
  Variant (17)..(17): Xaa in position 17 is Gly or Leu
  Variant (18)..(18): Xaa in position 18 is any amino acid
  Variant (20)..(20): Xaa in position 20 is Gln, Arg or Ser
  Variant (21)..(21): Xaa in position 21 is Leu or Pro
  Variant (22)..(23): Xaa in position 22 to 23 is any amino acid
  Variant (24)..(24): Xaa in position 24 is Asp or Lys
  Variant (25)..(25): Xaa in position 25 is Asn, Ser or Thr
  Variant (26)..(26): Xaa in position 26 is any amino acid
  Variant (27)..(27): Xaa in position 27 is Ala or Leu
CXXXXXXNXXXKKLXLXXKXXXXXXXX

SEQ ID NO: 13126 - protein, 19 aa, Artificial sequence
  protein pattern
  Variant (2)..(3): Xaa in position 2 to 3 is any amino acid
  Variant (4)..(5): Xaa in position 4 to 5 is any or no amino acid
  Variant (7)..(7): Xaa in position 7 is Asp or Gln
  Variant (11)..(11): Xaa in position 11 is any amino acid
  Variant (12)..(12): Xaa in position 12 is Pro or Ser
  Variant (13)..(13): Xaa in position 13 is Asn or Arg
  Variant (14)..(14): Xaa in position 14 is Glu or Lys
  Variant (16)..(16): Xaa in position 16 is Pro or Ser
  Variant (18)..(18): Xaa in position 18 is Arg or Ser
  Variant (19)..(19): Xaa in position 19 is Ala, Gln or Ser
TXXXXSXNNRXXXXLXLXX

SEQ ID NO: 13127 - protein, 14 aa, Artificial sequence
  protein pattern
  Variant (2)..(2): Xaa in position 2 is any amino acid
  Variant (3)..(4): Xaa in position 3 to 4 is any or no amino acid
  Variant (6)..(7): Xaa in position 6 to 7 is any amino acid
  Variant (8)..(8): Xaa in position 8 is any or no amino acid
  Variant (10)..(10): Xaa in position 10 is Gln or Ser
  Variant (12)..(12): Xaa in position 12 is Glu or Asn
  Variant (13)..(13): Xaa in position 13 is Asp or Glu
  Variant (14)..(14): Xaa in position 14 is Ala, Asp or Asn
TXXXLXXXNXNXXX

SEQ ID NO: 13128 - protein, 33 aa, Artificial sequence
  protein pattern
  Variant (2)..(2): Xaa in position 2 is any or no amino acid
  Variant (4)..(5): Xaa in position 4 to 5 is any amino acid
  Variant (6)..(6): Xaa in position 6 is Gly or Val
  Variant (7)..(7): Xaa in position 7 is Glu, Ser or Thr
  Variant (8)..(8): Xaa in position 8 is Asn, Pro or Ser
  Variant (9)..(9): Xaa in position 9 is any amino acid
  Variant (12)..(20): Xaa in position 12 to 20 is any amino acid
  Variant (21)..(22): Xaa in position 21 to 22 is any or no amino acid
  Variant (24)..(24): Xaa in position 24 is Cys, Gly or Ser
  Variant (25)..(28): Xaa in position 25 to 28 is any amino acid
  Variant (29)..(29): Xaa in position 29 is Glu, Ser or Thr
  Variant (30)..(30): Xaa in position 30 is Asp, Gly or Val
  Variant (31)..(32): Xaa in position 31 to 32 is any amino acid
  Variant (33)..(33): Xaa in position 33 is Gly or Asn
KXKXXXXXXLSXXXXXXXXXXXAXXXXXXXXXX

SEQ ID NO: 13129 - protein, 21 aa, Artificial sequence
  protein pattern
  Variant (3)..(6): Xaa in position 3 to 6 is any or no amino acid
  Variant (8)..(8): Xaa in position 8 is Ala, Asn, Gln or Ser
  Variant (9)..(9): Xaa in position 9 is any amino acid
  Variant (11)..(11): Xaa in position 11 is Asp or His
  Variant (12)..(12): Xaa in position 12 is Leu or Pro
  Variant (13)..(13): Xaa in position 13 is Cys or Val
  Variant (14)..(14): Xaa in position 14 is any amino acid
  Variant (15)..(15): Xaa in position 15 is Glu or Gly
  Variant (16)..(16): Xaa in position 16 is Glu or Ser
  Variant (17)..(18): Xaa in position 17 to 18 is any amino acid
  Variant (19)..(19): Xaa in position 19 is Asn or Thr
  Variant (20)..(20): Xaa in position 20 is any amino acid
  Variant (21)..(21): Xaa in position 21 is Gly, Leu or Val
LAXXXXSXXKXXXXXXXXXXX

SEQ ID NO: 13130 - protein, 12 aa, Artificial sequence
  protein pattern
  Variant (2)..(2): Xaa in position 2 is any amino acid
  Variant (3)..(3): Xaa in position 3 is Lys or Arg
  Variant (6)..(6): Xaa in position 6 is any or no amino acid
  Variant (8)..(9): Xaa in position 8 to 9 is any or no amino acid
  Variant (11)..(11): Xaa in position 11 is Cys or Pro
LXXRRXLXXKXR

SEQ ID NO: 13131 - DNA, 1350 bp, Arabidopsis thaliana
  CDS (1)..(1350)
atggcggaagagacggagaaaaagtacattacgaacgaagatcttaaaaaacacaacaaatctggagatctatggatcgcgattcaaggcaaggtctacaacgtctccgattggattaaaactcatcccggaggcgacacggtgattctcaatctcgttggtcaagacgtcaccgatgctttcatcgcatttcatcccggaaccgcttggcaccatctcgaccatctcttcaccggttaccacatcagagatttccaagtctccgaagtctcacgcgattaccgtcgtatggctgccgagtttcgtaaactcggtctcttcgaaaacaaaggtcacgttactctctacactctagccttcgtcgccgccatgttcctcggagttctctacggtgttttggcttgtacctccgtcttcgctcaccaaatcgccgccgcgcttctcggtctcctctggatccagagcgcttacataggtcacgattctggtcattacgttatcatgtcgaacaaatcttataacagattcgctcagcttctctccggtaactgtctcaccggaatctcaatcgcgtggtggaaatggactcacaatgctcatcatctagcttgtaacagcctcgattacgatccagatctacaacacatccctgtcttcgccgtctccaccaaattcttctcctcattgacctcgagattctacgatcggaaactcacgtttgatccagtcgcgagattcttagtcagctatcaacactttacttattatccagttatgtgctttggaagaatcaatctcttcattcaaacgtttctcttgctcttctccaaacgtgaagtaccagatcgtgctttaaacttcgccggaatcttagtcttctggacttggttcccactcttagtctcatgtctaccaaactggcctgagagattcttcttcgtcttcacaagcttcaccgtcacggcgcttcaacacattcaattcacgcttaaccatttcgctgctgatgtctacgttggtccacccaccggtagcgactggttcgagaagcaagcggcgggaacaatcgatatctcttgtagatcatacatggattggttctttggtggattacagtttcagcttgagcatcatttgttccctcgcttacctcgttgccatctccggaaagtttctccggtggttcaagagctttgcaagaagcataatcttccgtataggagtatgtcgtggtttgaagcaaatgtgttgaccattaacactttgaagacagcagcttatcaagctagagacgtggctaatccggtggttaagaacttggtttgggaagctttgaatactcatggctaa

SEQ ID NO: 13132 - protein, 449 aa, Arabidopsis thaliana
MAEETEKKYITNEDLKKHNKSGDLWIAIQGKVYNVSDWIKTHPGGDTVILNLVGQDVTDAFIAFHPGTAWHHLDHLFTGYHIRDFQVSEVSRDYRRMAAEFRKLGLFENKGHVTLYTLAFVAAMFLGVLYGVLACTSVFAHQIAAALLGLLWIQSAYIGHDSGHYVIMSNKSYNRFAQLLSGNCLTGISIAWWKWTHNAHHLACNSLDYDPDLQHIPVFAVSTKFFSSLTSRFYDRKLTFDPVARFLVSYQHFTYYPVMCFGRINLFIQTFLLLFSKREVPDRALNFAGILVFWTWFPLLVSCLPNWPERFFFVFTSFTVTALQHIQFTLNHFAADVYVGPPTGSDWFEKQAAGTIDISCRSYMDWFFGGLQFQLEHHLFPRLPRCHLRKVSPVVQELCKKHNLPYRSMSWFEANVLTINTLKTAAYQARDVANPVVKNLVWEALNTHG

SEQ ID NO: 13133 - DNA, 1401 bp, Oryza sativa
  CDS (1)..(1401)
atgcctccggcgatcccgacggccacaatgccggcctcccccaaggaggcgcagagccgcgccggcgccggcgtccgcatgatctcctcggaggagctccgcgcgcacgcgtcgagggacgacctgtggatctccatctccggggacgtgtacgacgtcacggcgtgggtgccccaccacccgggcggcgacatcccgctcctgacgctggcggggcaggacgccaccgacgcgttcgccgcctaccacccgccgtcggcgcgcccgctcctggggaggttcctcgtgggccggctcgaggactacacggtctcgccggcgtccgccgacttccgccgcctcctcgcgcagctctcctccgcggggctgttcgagcgggtggggcccaccccgaaggtgcaggtcgccgggatgctgctcctcctctgcgccgcgctctactgcgtcctcgcctgcgcgagcgcgtgggcgcacctcctcgccggcgggctcatcgggttcatctggatccagtccgggtggatggggcacgactcggggcaccaccggatcacggggcacgccgcgctcgaccgcctcctccaggtgctctccggcaactgcctcaccggcctcagcatcgcgtggtggaagtgcaaccacaacacccaccacattgcctgcaacagcctcgaccacgacccggacctccagcacatgccgctcttcgccgtctcctccaagctgttcggcctctggtcctacttctaccagcgcaccctggtgttcgacgccgcgtccaagttcttgatcagctaccagcactggacattctacccggtcatgtgcttcgccaggataaacctccttattcagtcggccgtcttcttgctgtcgagcaggaaggtgccacagagggggctggagatcgcgggcgtcgccgcgttctgggtttggtacccaatggtggtgtcctgcttgcccaattggtgggagagggtggcgttcgtggtcgcgagcttcgtgattaccgggattcagcatgttcagttctgcctgaaccacttctcctcggaggtgtatgtcgggccgccaaaggggaatgactggttcgagaagcagacggcgggcacgctcgacattcagtgctcgccatggatggattggttccacggtggcctgcagttccaaatcgagcaccatctgtttcctcgcctcccgcggtgccaccttaggaaggtttcgccatttgttcgtgacctttgcaagaagcatgggctgccttatgccgccgcctcgttctggcaggctaatgtgttgacatggaagacattgagggctgctgcattgcaggccaggaaagccactagtggtgctgcgccaaagaatttggtttgggaagctgtgaacactcatggatga

SEQ ID NO: 13134 - protein, 466 aa, Oryza sativa
MPPAIPTATMPASPKEAQSRAGAGVRMISSEELRAHASRDDLWISISGDVYDVTAWVPHHPGGDIPLLTLAGQDATDAFAAYHPPSARPLLGRFLVGRLEDYTVSPASADFRRLLAQLSSAGLFERVGPTPKVQVAGMLLLLCAALYCVLACASAWAHLLAGGLIGFIWIQSGWMGHDSGHHRITGHAALDRLLQVLSGNCLTGLSIAWWKCNHNTHHIACNSLDHDPDLQHMPLFAVSSKLFGLWSYFYQRTLVFDAASKFLISYQHWTFYPVMCFARINLLIQSAVFLLSSRKVPQRGLEIAGVAAFWVWYPMVVSCLPNWWERVAFVVASFVITGIQHVQFCLNHFSSEVYVGPPKGNDWFEKQTAGTLDIQCSPWMDWFHGGLQFQIEHHLFPRLPRCHLRKVSPFVRDLCKKHGLPYAAASFWQANVLTWKTLRAAALQARKATSGAAPKNLVWEAVNTHG

SEQ ID NO: 13135 - DNA, 1347 bp, Glycine max
  CDS (1)..(1347)
atggagggtgagaacaagaagtacatcacatctgaggagctgaaggagcacaataagccaggggatttgtggatttcaatccaagggaaggtttacaatgtttcagattgggcaaaggaccaccctggaggagaggttcccttgttgaaccttgcaggccaggatgtgactgatgcattcgtagcataccatccaggctcagcatggaagtatcttgatcccttcttcacagggtaccacctaagagatttcaaggtctcagaggtgtcaaaagattacagaaagcttgtgtctgagtttgtcaaaatgggtctttttgagaagaaagagcatgttactctttacacactgtcctctgttgctgtcatgttttcaattgttgtttatggtgtcatagggtgcagtagtgtgtgggctcatcttggtgctgcccttttgttgggcttgctttggatgcaaagcacttacgtgggtcatgactctggccactatgaggttatgtctagccctggctacaacaaattggcacaaatcctttgtggcaattgcatgactgggataagcattgcatggtggaagtggactcacaatgctcaccacatctcatgcaatagtcttgactatgatcctgatctccagcacatacctgtctttgccgtgtcgacacggttcttcaattcaatcaaatcttgtttctatggaaggaaattggtgtttgattcattatcaaggtttctcatcagctaccagcacttcacattctacccagttttgtgctttgcaagggtcaatttgtacctccagactttgttgctgttgttctctaggagaaaggtgccagatagagcctttaacataatggggatccttgtgttttgggtttggttccctctgttgatctcttcactaccaaattggggagaaagggtcatgtttgtgttggccagttttgctgtttgttcaatccagcaccttcaattttgtttgaaccatttctcagcagatgtgtatgagggcccaccaaatggcaatgactggtttgagaagcaaactggtggcacattggacatttcttgctcctcatggatggattggttctttggtggcttgcaattccagcttgagcaccatttgttcccaaggcttccaagggcacaattgaggaaaatctcacctttggtgattgatctttgcaagaagcacaatttgccttacaggagtttgacatttgttgaggccaatctttggactcttaagaccctcaggactgctgctcttcaggccaggaatctcagtaacccttcttcccagaatttgttgtgggaagcttttaacactcatggatga

SEQ ID NO: 13136 - protein, 448 aa, Glycine max
MEGENKKYITSEELKEHNKPGDLWISIQGKVYNVSDWAKDHPGGEVPLLNLAGQDVTDAFVAYHPGSAWKYLDPFFTGYHLRDFKVSEVSKDYRKLVSEFVKMGLFEKKEHVTLYTLSSVAVMFSIVVYGVIGCSSVWAHLGAALLLGLLWMQSTYVGHDSGHYEVMSSPGYNKLAQILCGNCMTGISIAWWKWTHNAHHISCNSLDYDPDLQHIPVFAVSTRFFNSIKSCFYGRKLVFDSLSRFLISYQHFTFYPVLCFARVNLYLQTLLLLFSRRKVPDRAFNIMGILVFWVWFPLLISSLPNWGERVMFVLASFAVCSIQHLQFCLNHFSADVYEGPPNGNDWFEKQTGGTLDISCSSWMDWFFGGLQFQLEHHLFPRLPRAQLRKISPLVIDLCKKHNLPYRSLTFVEANLWTLKTLRTAALQARNLSNPSSQNLLWEAFNTHG

SEQ ID NO: 13137 - DNA, 1356 bp, Glycine max
  CDS (1)..(1356)
atggaggttgtagagaaggagaagaagaagtacatcacctcagaggagctgaagggtcacaacaaggagggagatttatggatctcaattcaaggtaaggtgtacaatgtctcagattgggtgaaggagcaccctggtggtgatgttcctatctcaaaccttgctggccaggatgtcactgatgcattcatagcataccatcctggcacagcatggtcacaccttgacaaattcttcactggctaccacctcagtgacttcaaggtctctgaggtgtccaaagactacagaaagcttgcatctgagttctcaaaattgggtctttttgacaccaaaggccatgtcacttcttgcacccttgcatctgttgctgttatgttcctcattgtgatgtatggtgtgttgaggtgcactagtgtgtgggctcatttgggctcaggcatgctattagggttgctttggatgcaaagtgcttatgtgggtcatgattctggccactatgtggttatgacaagcaatggtttcaacaaggttgcacagatcctctctgggaactgcttgactgggataagcattgcttggtggaagtggactcacaatgctcaccacattgcctgcaacagccttgatcatgaccctgatctgcagcacatgccggtcttcgccgtgtcctcgcggttcttcaattcgataacttctcatttctatgggaggaagttggagtttgatttcattgcaaggttcttgatctgctaccagcacttcactttttacccggttatgtgtgttgccagggtcaacttgtatctgcagaccattctgctattgttttcgaggcgtaaagtgcaggatagagccttgaacataatggggatccttgtgttttggacttggttccctcttttggtgtctttcctgccaaattggcctgagagggttatgtttgtgcttgctagctttgctgtttgttccatccagcacattcagttctgcttgaatcactttgctgcaaatgtgtatgttgggctaccgagtgggaatgactggtttgaaaagcagacaagtgggacattggatatctcttgctcctcttcgatggattggttcttcggtggcttgcagtttcagcttgagcatcatttgtttccaaggctacctcggtgccaattgaggaacatttcgcctttggtcagtgacctttgcaagaagcataatttgccttataggagcttgtcattttgggaggccaatcagtggacaattaggaccctcaggactgctgccctacaggctagggacttgacaaaccctgcccctaagaatttgttgtgggaagctgttaatacccatggctga

SEQ ID NO: 13138 - protein, 451 aa, Glycine max
MEVVEKEKKKYITSEELKGHNKEGDLWISIQGKVYNVSDWVKEHPGGDVPISNLAGQDVTDAFIAYHPGTAWSHLDKFFTGYHLSDFKVSEVSKDYRKLASEFSKLGLFDTKGHVTSCTLASVAVMFLIVMYGVLRCTSVWAHLGSGMLLGLLWMQSAYVGHDSGHYVVMTSNGFNKVAQILSGNCLTGISIAWWKWTHNAHHIACNSLDHDPDLQHMPVFAVSSRFFNSITSHFYGRKLEFDFIARFLICYQHFTFYPVMCVARVNLYLQTILLLFSRRKVQDRALNIMGILVFWTWFPLLVSFLPNWPERVMFVLASFAVCSIQHIQFCLNHFAANVYVGLPSGNDWFEKQTSGTLDISCSSSMDWFFGGLQFQLEHHLFPRLPRCQLRNISPLVSDLCKKHNLPYRSLSFWEANQWTIRTLRTAALQARDLTNPAPKNLLWEAVNTHG

SEQ ID NO: 13139 - DNA, 1934 bp, Glycine max
  CDS (305)..(1657)
gcacgagcacacaagtaaaaccttagagagagagagagagagagagagagggtaaaagggtattagatccttgaaccagatcaaatcatcaaaatctctgtctatggggttgtgaaaacaacaatcacattgttgttgctgtaaaaggggattccttagtctagatttgtttgcattgcagaagaaccagataccccattattgttcttatctatctatctgtctatattctatttatcttcttattgtagttctcattgtgtctgatttcagtgatttgtgttgtttttggttaacacaagcaatggaggttgttgagaaggagaagaagtacataacctcagaggagctgaagggtcacaacaaggagggagatttatggatctcaattcaaggtaaggtgtacaatgtctcagattgggtcaaggagcaccctggtggtgatgttccaatctcaaaccttgctggccaggatgtcactgatgcattcatagcataccatcctggcacagcatggtcacaccttgaaaaattcttcactggctaccacctcagtgacttcaaggtctctgaggtgtccaaagactacagaaagcttgcatctgagttctcaaaattgggtctttttgacaccaaagggcatgtcacttcatgcacccttgcatctgttgctgttatgttcctcattgtactctatggtgttctgaggtgcactagtgtgtgggctcatttgggttcaggcatgctcttagggttgctttggatgcaaagtgcttatgtgggccatgattctggccactatgtggttatgacaaccaatggtttcaacaaggttgcacagatcctctctgggaactgcttgaccgggataagcattgcttggtggaagtggactcacaatgctcaccacattgcgtgcaacagccttgaccatgaccctgatctgcagcacatgccggtctttgcagtttcgtcgcggttcttcaattccataacctctcatttctatgggaggaagttggagtttgatttcattgctaggttcttgatctgctaccagcactttactttttacccggtaatgtgtgttgccagggtcaacttgtatctgcagacaattctgctattgttttcgaggcgaaaagtgcaggatagagccttgaacataatggggatccttgtgttttggacttggttccctcttttagtgtcttgcctgccaaattggcctgagagggttatgtttgtgcttgctagctttgctgtttgttccatccagcacattcagttctgtttgaatcactttgctgcaaatgtatatgtcgggccaccgagtgggaatgactggtttgagaagcagacaagtggtacattggatatctcttgtgcctcttcgatggattggtttttcggtggcttgcagtttcagcttgagcatcatttgtttccaaggctacctcggtgccaattgaggaagatttcgcctttggttagtgacctttgcaagaagcataatttgccttataggagcttgtcattttgggaggccaatcagtggacaattaggaccctcaggactgctgccctacaagctagggacttaacaaaccctgcccctaagaatttgttgtgggaagctgttaatacccatggctgaggcatttggagtttttagagtttaggattttgtcaaggtcttttttttttttgttttctctttaaaaagaaaaaaaattctcattgtgattttgctagcccccacttttccagattgggctttgaatttaactttttgttaggtgtggtgtacaaatggatggtgatccagatgttactgcagttcatgtgctttgcatcaatacaaattcatatcatgtatgccaaaaaaaaaaaaaaaaaaaaaaaaaaaaaaaaaaaaaaaaaaaaaaaaaaaa

SEQ ID NO: 13140 - protein, 450 aa, Glycine max
MEVVEKEKKYITSEELKGHNKEGDLWISIQGKVYNVSDWVKEHPGGDVPISNLAGQDVTDAFIAYHPGTAWSHLEKFFTGYHLSDFKVSEVSKDYRKLASEFSKLGLFDTKGHVTSCTLASVAVMFLIVLYGVLRCTSVWAHLGSGMLLGLLWMQSAYVGHDSGHYVVMTTNGFNKVAQILSGNCLTGISIAWWKWTHNAHHIACNSLDHDPDLQHMPVFAVSSRFFNSITSHFYGRKLEFDFIARFLICYQHFTFYPVMCVARVNLYLQTILLLFSRRKVQDRALNIMGILVFWTWFPLLVSCLPNWPERVMFVLASFAVCSIQHIQFCLNHFAANVYVGPPSGNDWFEKQTSGTLDISCASSMDWFFGGLQFQLEHHLFPRLPRCQLRKISPLVSDLCKKHNLPYRSLSFWEANQWTIRTLRTAALQARDLTNPAPKNLLWEAVNTHG

SEQ ID NO: 13141 - DNA, 1989 bp, Zea mays
  CDS (294)..(1643)
gacacacaagtaaaaccttagagagagagagagagagagggtaaaagggtattagatccttgaaccagatcaaatcatcaaaatctctgtctatggggttgtgaaaacaacaatcacattgttgttgctgtaaaaggggattccttagtctagatttgtttgcattgcagaagaaccagataccccattattgttcttatctatctatctgtctatattctatttatcttcttattgtagttctcattgtgtctgatttcagtgatttgtgttgtttctggttaacacaagcaatggaggttgttgagaaggagaagtacataacctcagaggagctgaagggtcacaacaaggagggagatttatggatctcaattcaaggtaaggtgtacaatgtctcagattgggtcaaggagcaccctggtggtgatgttccaatctcaaaccttgctggccaggatgtcactgatgcattcatagcataccatcctggcacagcatggtcacaccttgaaaaattcttcactggctaccacctcagtgacttcaaggtctctgaggtgtccaaagactacagaaagcttgcatctgagttctcaaaattgggtctttttgacaccaaagggcatgtcacttcatgcacccttgcatctgttgctgttatgttcctcattgtactctatggtgttctgaggtgcactagtgtgtgggctcatttgggttcaggcatgctcttagggttgctttggatgcaaagtgcttatgtgggccatgattctggccactatgtggttatgacaaccaatggtttcaacaaggttgcacagatcctctctgggaactgcttgaccgggataagcattgcttggtggaagtggactcacaatgctcaccacattgcgtgcaacagccttgaccatgaccctgatctgcagcacatgccggtctttgcagtttcgtcgcggttcttcaattccataacctctcatttctatgggaggaagttggagtttgatttcattgctaggttcttgatctgctaccagcactttactttttacccggtaatgtgtgttgccagggtcaacttgtatctgcagacaattctgctattgttttcgaggcgaaaagtgcaggatagagccttgaacataatggggatccttgtgttttggacttggttccctcttttagtgtcttgcctgccaaattggcctgagagggttatgtttgtgcttgctagctttgctgtttgttccatccagcacattcagttctgtttgaatcactttgctgcaaatgtatatgtcgggccaccgagtgggaatgactggtttgagaagcagacaagtggtacattggatatctcttgtgcctcttcgatggattggtttttcggtggcttgcagtttcagcttgagcatcatttgtttccaaggctacctcggtgccaattgaggaagatttcgcctttggttagtgacctttgcaagaagcataatttgccttataggagcttgtcattttgggaggccaatcagtggacaattaggaccctcaggactgctgccctacaagctagggacttaacaaaccctgcccctaagaatttgttgtgggaagctgttaatacccatggctgaggcatttggagtttttagagtttaggattttgtcaaggtctttttttttttgttttctctttaaaaagaaaaaaaattctcattgtgattttgctagcccccacttttccagattgggctttgaatttaactttttgttaggtgtggtgtacaaatggatggtgatccagatgttactgcagttcatgtgctttgcatcaatacaaattcatatcatgtatgcctttttgccttttcacttctttttccttatcttggaataggtttcttaatgtctgaaagatattataccatggttgatcttaataaagatagaaagatttcatcaataaaaaaaaaaaaaaaa

SEQ ID NO: 13142 - protein, 449 aa, Zea mays
MEVVEKEKYITSEELKGHNKEGDLWISIQGKVYNVSDWVKEHPGGDVPISNLAGQDVTDAFIAYHPGTAWSHLEKFFTGYHLSDFKVSEVSKDYRKLASEFSKLGLFDTKGHVTSCTLASVAVMFLIVLYGVLRCTSVWAHLGSGMLLGLLWMQSAYVGHDSGHYVVMTTNGFNKVAQILSGNCLTGISIAWWKWTHNAHHIACNSLDHDPDLQHMPVFAVSSRFFNSITSHFYGRKLEFDFIARFLICYQHFTFYPVMCVARVNLYLQTILLLFSRRKVQDRALNIMGILVFWTWFPLLVSCLPNWPERVMFVLASFAVCSIQHIQFCLNHFAANVYVGPPSGNDWFEKQTSGTLDISCASSMDWFFGGLQFQLEHHLFPRLPRCQLRKISPLVSDLCKKHNLPYRSLSFWEANQWTIRTLRTAALQARDLTNPAPKNLLWEAVNTHG

SEQ ID NO: 13143 - DNA, 1389 bp, Zea mays
  CDS (1)..(1389)
atgccgccctctgtcgatgcaatgccggcccccggcgacgccgcgggcgccggcgacgtgcgcatgatctcctccaaggagctccgcgctcacgcttccgccgacgacctctggatctccatctccggcgacgtgtacgacgtcacgccctggctcccccaccacccgggcggcgacctcccgcttctcaccctggcggggcaggacgccaccgacgccttcgccgcctaccacccgccctcggcgcgcccgctcctccgccgcttcttcgttggccgcctctctgactacgccgtctcccccgcgtccgccgactaccgccgcctcctcgcgcagctatcctccgcgggcctcttcgaacgcgtcggccccacccccaaggtccagctcgtcctgatggccgtcctcttctacgccgcgctgtacctcgtcctcgcatgcgccagcgcctgggcgcacctcctcgcggggggtctcattggcttcgtctggatccagtccggctggatgggccacgactcgggccaccaccgcatcaccggccatccggtcctcgaccgcgtcgtgcaggtgctctccgggaactgcctcaccggcctcagcatcgcctggtggaagtgtaaccacaacacgcaccacatcgcctgcaacagcctggaccatgacccggacctccagcacatgccgctctttgccgtctcccccaagctgttcggcaacatatggtcctacttctaccaacggaccctggcgttcgatgccgcctcgaaattcttcatcagctaccagcactggaccttctacccggtaatgtgcatcgccaggataaatcttctcgcgcagtccgccctgttcgttctcacggagaagagggtgccgcagcggttgcttgagatcgcgggggtcgccacattctgggcttggtacccgttgctggtggcttccctgccgaattggtgggagagggtcgcgtttgtgcttttcagcttcaccatctgcgggattcagcacgtccaattctgcctgaaccacttctcgtccgacgtgtatgtcgggccacccaagggcaatgactggtttgagaagcagacggcaggcacgctcgacatcctgtgctctccttggatggattggttccacggtggcctgcagttccagattgagcaccatctgtttccccgcctacctcggtgccaccttcgcaaggttgcaccggccgtccgcgacctttgcaagaagcatgggctcacttattctgcagccacattctggggtgcaaatgtgcttacatggaagacactcagggctgctgcattgcaggccaggaccgctacaagtggtggtgctccgaagaatttggtatgggaggctgtgaacacccatggataa

SEQ ID NO: 13144 - protein, 462 aa, Zea mays
MPPSVDAMPAPGDAAGAGDVRMISSKELRAHASADDLWISISGDVYDVTPWLPHHPGGDLPLLTLAGQDATDAFAAYHPPSARPLLRRFFVGRLSDYAVSPASADYRRLLAQLSSAGLFERVGPTPKVQLVLMAVLFYAALYLVLACASAWAHLLAGGLIGFVWIQSGWMGHDSGHHRITGHPVLDRVVQVLSGNCLTGLSIAWWKCNHNTHHIACNSLDHDPDLQHMPLFAVSPKLFGNIWSYFYQRTLAFDAASKFFISYQHWTFYPVMCIARINLLAQSALFVLTEKRVPQRLLEIAGVATFWAWYPLLVASLPNWWERVAFVLFSFTICGIQHVQFCLNHFSSDVYVGPPKGNDWFEKQTAGTLDILCSPWMDWFHGGLQFQIEHHLFPRLPRCHLRKVAPAVRDLCKKHGLTYSAATFWGANVLTWKTLRAAALQARTATSGGAPKNLVWEAVNTHG

SEQ ID NO: 13145 - DNA, 1395 bp, Zea mays
  CDS (1)..(1395)
atgccgccctctgccgacgcaatgccggcccccggagacgccgcgtgcgccggcgacgtgcgcttgatctcctccaaggagctccgcgagcacgcgtccgccgccgacctctggatctccatctcgggcgacgtgtacgacgtgacgccctggcttccccaccacccgggcggcgacctcccgctcatcaccttggcggggcaggacgccaccgacgccttcgccgcctaccacccgccctcggcgcgcccgctcctccgccgcttcttcgtcggccgcctctccgactacaccgtctcccccgcgtccgccgactaccgccgcctcctggcgcagctctcctccgcgggcctcttcgagcgcgtcggccccacccccagggtacagctcgccctgatggccgtcctcttctacgcggcgctctacctcgtcctcgcctgcgccagcgcctcggcgcacatgctcgctggggggctcatcggcttcgtctggatccagtccggctggatgggccacgactcgggccaccaccgcatcacgggccatccgctcctggaccgcgtcgtgcaggtgctctccggaaactgcctcactggcctcagcatcgcctggtggaaatgcaaccacaacacgcaccacatcgcctgcaacagcctggaccatgacccggacctccagcacatgccgctcttcgctgtctcccccaagctgttcggcaacatatggtcctacttctaccagcggaccctggccttcgacgccgcctcgaaattcctcatcagctaccagcactggaccttctacccggtaatgtgcatcgccaggataaatcttctggcgcagtccgctgtcttcgtcctgaccgagaagagggtgccgcagcggctgcttgagatcgccggtgtcgccgcgttctgggcttggtacccgttgctggtggcgtgcctgccgaattggtgggagagggtggcgttcgtgcttctcagctttaccatctgcgggatccagcacgtccaattctgcctgaaccacttctcgtccgatgtgtacgtcgggccacccaagggcaacgactggttcgagaagcagacggcaggcacgctcgacatcctgtgccctccttggatggattggttccatggcggcctgcagttccagattgagcaccatctgttcccccgcctgcctcggtgccaccttcggaaggttgcgccggcggtgcgtgacctttgcaagaagcatgggctgacctattccgcagcctccttctgggacgcaaatgtgcttacatggaagacactcagggctgccgcattgcaggccaggagcgccacaggcggcggcggcggcgctccgaagaatttggtctgggaggcattgaacacccatggatga

SEQ ID NO: 13146 - protein, 464 aa, Zea mays
MPPSADAMPAPGDAACAGDVRLISSKELREHASAADLWISISGDVYDVTPWLPHHPGGDLPLITLAGQDATDAFAAYHPPSARPLLRRFFVGRLSDYTVSPASADYRRLLAQLSSAGLFERVGPTPRVQLALMAVLFYAALYLVLACASASAHMLAGGLIGFVWIQSGWMGHDSGHHRITGHPLLDRVVQVLSGNCLTGLSIAWWKCNHNTHHIACNSLDHDPDLQHMPLFAVSPKLFGNIWSYFYQRTLAFDAASKFLISYQHWTFYPVMCIARINLLAQSAVFVLTEKRVPQRLLEIAGVAAFWAWYPLLVACLPNWWERVAFVLLSFTICGIQHVQFCLNHFSSDVYVGPPKGNDWFEKQTAGTLDILCPPWMDWFHGGLQFQIEHHLFPRLPRCHLRKVAPAVRDLCKKHGLTYSAASFWDANVLTWKTLRAAALQARSATGGGGGAPKNLVWEALNTHG

SEQ ID NO: 13147 - DNA, 1350 bp, Arabidopsis thaliana
  CDS (1)..(1350)
atggcggatcaaacgaagaagagatacgttacaagcgaggatttgaaaaaacacaacaaacctggagatttatggatttcgattcaaggtaaagtttacgacgtttccgattgggttaaatctcatcccggaggcgaagcagcgattctcaatctcgccggccaagacgtcaccgacgcgttcatcgcttaccatcccggaaccgcatggcaccacttagaaaagcttcacaatggctatcacgtgagagaccaccacgtgtcagacgtctcacgtgactaccgtcgtttagccgccgagttctccaaacgcggcctcttcgacaaaaaaggtcacgtgactctttacacactcacgtgcgtcggcgtcatgctcgcggcggttctctacggcgttttggcgtgtaccagcatctgggctcacctcatctccgccgttttactcggtctcctctggatccaaagcgcttacgtcggccacgattccggtcactacacggtgacgtcaaccaaaccgtgtaacaaactaatccagcttctctccggtaactgtctcaccggcatctcaatcgcgtggtggaaatggacgcacaacgctcaccacatcgcttgtaacagccttgaccacgatccggatctacaacacatcccgatcttcgccgtctctacaaaattcttcaattcgatgacgtcacgtttctatggcaggaaattaacattcgatcctctagctcgattcttaatcagctaccaacactggacattttacccagtaatgtgcgtcggaagaatcaacctcttcatccaaacattcctattgctattctcgaaacgccacgtcccagatcgggccttgaacatcgccggaattttagttttctggacatggttccctctcttagtctcgttccttccgaattggcaagagagattcatcttcgtcttcgtgagcttcgccgtcacggcgattcaacatgttcagttctgtttaaaccatttcgcagcagatgtgtataccggtccaccaaacggaaacgattggtttgagaaacaaaccgccggtacgcttgatatatcgtgtagatcgtttatggattggttctttggtggattgcagtttcagttagagcatcatttgtttcctcggcttcctcgttgtcatctccggacagtatcgccggtggttaaggagctttgtaagaagcataatctaccgtataggagtctttcgtggtgggaagctaatgtgtggacgattaggactttgaagaacgcggcgattcaagctagagatgcgactaatcctgtgttgaagaacttgctttgggaagctgtgaacacgcatggctaa

SEQ ID NO: 13148 - protein, 449 aa, Arabidopsis thaliana
MADQTKKRYVTSEDLKKHNKPGDLWISIQGKVYDVSDWVKSHPGGEAAILNLAGQDVTDAFIAYHPGTAWHHLEKLHNGYHVRDHHVSDVSRDYRRLAAEFSKRGLFDKKGHVTLYTLTCVGVMLAAVLYGVLACTSIWAHLISAVLLGLLWIQSAYVGHDSGHYTVTSTKPCNKLIQLLSGNCLTGISIAWWKWTHNAHHIACNSLDHDPDLQHIPIFAVSTKFFNSMTSRFYGRKLTFDPLARFLISYQHWTFYPVMCVGRINLFIQTFLLLFSKRHVPDRALNIAGILVFWTWFPLLVSFLPNWQERFIFVFVSFAVTAIQHVQFCLNHFAADVYTGPPNGNDWFEKQTAGTLDISCRSFMDWFFGGLQFQLEHHLFPRLPRCHLRTVSPVVKELCKKHNLPYRSLSWWEANVWTIRTLKNAAIQARDATNPVLKNLLWEAVNTHG

SEQ ID NO: 13149 - DNA, 1497 bp, Ostreococcus lucimarinus CCE9901
  CDS (1)..(1497)
atgccgcgggacggcgtggacctctcgcgtcgcgcgcgcgcgcgacgacgcggggacgcgagcgcgacgcgcgcgacggcgcgggagggcgagggcgcgcgacgggcgaatcgcggcgacgcgagcgcggcgcgggacgtcgggacgggcgtcgggggggagacgcggcgaggcgaggcgacgtacgcgcgcgccgacgtgcgctcgcacgacgtcgggagcgattgttggctcgtcgtgggcgatggggtgtacgacgcgacgtcttgggtcgagaaacatccgggggggagcacgattctggagcagtacgcggggagagacgcgacggacgcgttcatggcgtatcacgggggggagcggcgcgcgctggcgcgcttggagacgcttcgaatcgggcgcttggtggacgagagcgcggcgccgccgacgcatttaaaggcgtttcgtcggatgagggacgcgatggagggtagtgagaagttgttgaagagcgatctcacggattacgccttcatcatcgcgagattggtcgtgcttttcggcggcgtgttggcgtgcgtgttgtcgtcgggcgccggtttcaagacgcacatgttcggcgccgtcttgctcggtttgttttggcagcaaagtatgttcatcggccacgatgctgggcacacatcgatcacttatgatcgcaaaaaagacgccatgatcgggtggtgcgttggaaacctcttcaacggcgtcggcatcgcgtggtggatggcgacgcacaacgtccaccactgcgcgtgcaactcgttggaatgcgaccccgacatccagcacatgcccgtgttcgcggtctccaacaaatattttggctcggtgtactctctgtatcaccgcagacgcatgacgtacgaccgtctcgccaggacgctcgttcgattccagcactacacgttctatccaattatggccgtcgctcgcatcaacttatacttgcagacgttgatcttcttgatcaaggcgaagcgcgtgcggagccgagcgatggagtttttaacacttggtgtgttcgccacgtggctcaccacgctcatcgctcagttacccgtgggtcacaaagtgccgttcttcttcctctcgcacgccgtcgccggcgtcatccacgtgcaaatttgcctctcgcatttttcgcgcgacgtcttcgaagggcgacctgaaaacgacgagtgggtgaacatgcaactcgctgggacgttggacatcgactgcccgcgctggctcgactggttccacggtggtttacagtttcaaaccgagcaccacctgtgcccgcgcgtacctcgacacaagcttcgcgcgtttcgcgaagacgtcgtcaagccttacgccaaagccaacggtctagggttacattccgtcagtttctgggccgccaatgcggaagttttccgcacccttaagctcgccgccaagcaatcgcgctgggcgcctcacttttcttcagccatgcacctctga

SEQ ID NO: 13150 - protein, 498 aa, Ostreococcus lucimarinus CCE9901
MPRDGVDLSRRARARRRGDASATRATAREGEGARRANRGDASAARDVGTGVGGETRRGEATYARADVRSHDVGSDCWLVVGDGVYDATSWVEKHPGGSTILEQYAGRDATDAFMAYHGGERRALARLETLRIGRLVDESAAPPTHLKAFRRMRDAMEGSEKLLKSDLTDYAFIIARLVVLFGGVLACVLSSGAGFKTHMFGAVLLGLFWQQSMFIGHDAGHTSITYDRKKDAMIGWCVGNLFNGVGIAWWMATHNVHHCACNSLECDPDIQHMPVFAVSNKYFGSVYSLYHRRRMTYDRLARTLVRFQHYTFYPIMAVARINLYLQTLIFLIKAKRVRSRAMEFLTLGVFATWLTTLIAQLPVGHKVPFFFLSHAVAGVIHVQICLSHFSRDVFEGRPENDEWVNMQLAGTLDIDCPRWLDWFHGGLQFQTEHHLCPRVPRHKLRAFREDVVKPYAKANGLGLHSVSFWAANAEVFRTLKLAAKQSRWAPHFSSAMHL

SEQ ID NO: 13151 - DNA, 1368 bp, Nematostella vectensis
  CDS (1)..(1368)
atgacagtcgctttacaaaggcggacccccaaagtttatactttagatgaggtgaaagaacactgctccaaaggagactgctgggtcgttgttgaagattcagtgtacgatttgagcaaatggatcggtcatcatcccggaggagagctgccgattctctacatggccggccgcgagtgcactgatgtcttcaaggcttttcacccggcgtgggtatttacaaagaagctaccggctttcaagatcggcaagctcgatgatacacgcaaggagaagaaggaaactagtctcagtgaggatttcgaaaagctgcggcaagaaataatcgaaggaggaggactccagacgaattactggttttatatccgactggcatctatgctggccctgctgtttgcctcaataatatactgtgtcgtattctccaacaatgtgtacatccaagtagcagcaggcatcttggtagcagttttctggcagcagatggcatttattggccatgatgcagggcaccatgcaatattccatgacgagcagtgggacgacagacttggccttgttgtaggcaacctcctaactggggtcagcattggatggtggaaaaagagtcacaatgcacatcatgttgtgaccaactctgtggagctggaccctgacattcagcatctaccagttcttgctgtcacagataagttcttcaactccatcaagtccatctatcatgacagagtcatgcattttgatggcttggccaagttctttgtccgctatcagcaccatttgtatttcctcatcatgggacttgcaaggttcaatctctacgcccagagctttttgctggtgctgtcaaaggagagggtgaagttgcgtgtgatggagttcgtcactatggtcttgttctggacctggtacttgaccctgtgctcctatctgccaacctggtcaacaagatttgcgtttgtgttcctggctcatttccttgctgggattatccacatccagatcacgctcagccatttctccatggagacatacaacggcctgccccttgatgctttcaaagaaaacaggtttcttctctcacaaatggataccaccatggacattgagtgtgatcccaatctggatttcttccatggcggcctgcaattccagtttgagcaccacctcttccctcgtgttgcacgccaaaacctgcgctcaatccaggagaagatgaagttgctgtgcaaaaaacatgggctgccatatcgctccaaatcttttgtggatgccaacattgaggttatccagtgtctgaaggacactgctgagaagtcaaagtgcttttccccaaagatctgggatagtgttcattgcattggttag

SEQ ID NO: 13152 - protein, 455 aa, Nematostella vectensis
MTVALQRRTPKVYTLDEVKEHCSKGDCWVVVEDSVYDLSKWIGHHPGGELPILYMAGRECTDVFKAFHPAWVFTKKLPAFKIGKLDDTRKEKKETSLSEDFEKLRQEIIEGGGLQTNYWFYIRLASMLALLFASIIYCVVFSNNVYIQVAAGILVAVFWQQMAFIGHDAGHHAIFHDEQWDDRLGLVVGNLLTGVSIGWWKKSHNAHHVVTNSVELDPDIQHLPVLAVTDKFFNSIKSIYHDRVMHFDGLAKFFVRYQHHLYFLIMGLARFNLYAQSFLLVLSKERVKLRVMEFVTMVLFWTWYLTLCSYLPTWSTRFAFVFLAHFLAGIIHIQITLSHFSMETYNGLPLDAFKENRFLLSQMDTTMDIECDPNLDFFHGGLQFQFEHHLFPRVARQNLRSIQEKMKLLCKKHGLPYRSKSFVDANIEVIQCLKDTAEKSKCFSPKIWDSVHCIG

SEQ ID NO: 13153 - DNA, 1410 bp, Physcomitrella patens subsp. patens
  CDS (1)..(1410)
atggggccgcttgcggcggaggatgagctgggttcatttccgcaggaattgaaggtcgacgaacatttacgttcactgccgagcatcaccagtggagagttatctcgacacaacaagactgatgatctgtggatctctattcaaggcaaagtgtacaatgtcacagggtggctcaggaagcatccaggtggtgaaatcccgttgctccatcttgcaggccaggatgttacagacgcatttcttgcatttcacccaggcacggcatggaatctcctccctcagttccttgtagggactctatctgactacgacgttcctcttgtggctgaggagcacagacgactactcagggaattcaagaaagctggattgtacaagaatccactgaacgtctatgctttgtacgcctgctgggtggttccattacttgccctgtcagtgcttggggtcttatactcacaaagtttcatggtgcacatgctgagtgctgctatgttgggcgttgtgtggaatcaaagtggttgggtgggacacgacacaggtcactgcgggatgttcaaaaatcccaacatcgacagatggtttgctattatcgttggagattgcttgtcagggattagcatgggatggtggaagaggaaccacaacgctcatcacattgcttgtaacagcattgaatatgatccagatcttcagtacatccccctctttgccgtgacatccaaactcttctcaaacctttactcctacttctatgacagggttatgccattcgatggtctggctcgctctctcattgcctaccagcactggacattttatcctatcatggctgtggctcgcgtgaacctctttgttcaatcccttttagtgttgacctcaaagaagcatgtaccagacaggtggctggagctcggtgcgattggtttcttctacctgtggttcttcacccttctttcttatctaccaagttcggagaggctcgtatttgttctcgttagttttgccgtgactgggatccagcacgtgcagttctgcctgaaccatttctcttcgccggtgtaccaagggcagccgaagagcaaggcttgggttgagtctcaagcacgcggcactcttaatctgtccacacctgcctacatggattggtttcatggaggtcttcagttccagattgaacatcatctcttccctacgttgcctcgccataacctcagaaaggttaccaagtttgtgagacccttctgtgagaagcatggtctgccgtatgaatccgtcagcttctgggaagctaaccggatgatcatcaggacgcttaggacagctgctttgcaagctcgggattttactaaacctgccccggccctttcagagagtctcttgtgggaagctgtgaactccaagggttga

SEQ ID NO: 13154 - protein, 469 aa, Physcomitrella patens subsp. patens
MGPLAAEDELGSFPQELKVDEHLRSLPSITSGELSRHNKTDDLWISIQGKVYNVTGWLRKHPGGEIPLLHLAGQDVTDAFLAFHPGTAWNLLPQFLVGTLSDYDVPLVAEEHRRLLREFKKAGLYKNPLNVYALYACWVVPLLALSVLGVLYSQSFMVHMLSAAMLGVVWNQSGWVGHDTGHCGMFKNPNIDRWFAIIVGDCLSGISMGWWKRNHNAHHIACNSIEYDPDLQYIPLFAVTSKLFSNLYSYFYDRVMPFDGLARSLIAYQHWTFYPIMAVARVNLFVQSLLVLTSKKHVPDRWLELGAIGFFYLWFFTLLSYLPSSERLVFVLVSFAVTGIQHVQFCLNHFSSPVYQGQPKSKAWVESQARGTLNLSTPAYMDWFHGGLQFQIEHHLFPTLPRHNLRKVTKFVRPFCEKHGLPYESVSFWEANRMIIRTLRTAALQARDFTKPAPALSESLLWEAVNSKG

SEQ ID NO: 13155 - DNA, 1419 bp, Trichoplax adhaerens
  CDS (1)..(1419)
atgactactgtggtaaaaactgttgaagctgtgaacgaaagtaatttacgtgcacgaaaaaagaacatcaacactccttatacaattgaagaagttgcaaagcacaacaccgagaacgatttatggataattattaataataaggtgtacgacgtaactaaatggatcccttaccatccaggaggcaatctacccatcctgaatttaggtggacatgacgttactgacgcatttcgaggatttcatcctgattgggcgtttaaaaagttatctgcttttcaagttggtatcttgaccggctacgaacctaaccaagttgtcaaagattatcgagcccttgatgaaaagctacgccgtgaaggttactataagacacattatatgttttacgctaaattatatctgtggttgtcatttctattttgcctatcgatgtacttaacgatatacaccactgagttgaaatggcaaatgcttggggctttagtattgggaatgttctggcaacagcttgcattcgttggccatgatactggacatattagcatctctcataacagagacattgacggctggataggatcaactgtaggcaatttctttggtggtgtcagtttagcgtggtggaaacgtactcacaacgttcatcatgtagtacccaattctgtccaacatgatcctgatattcaacatttacctatatttgctgtaactgataaagttattcctgatggtgtattctccaattatcataaaaagcaaatgacctttgatagttttgcaaaatttatggtttccaatcaacatattttctattatcctgtcatggctgttgctagatttaacttatacttgcaatcgatattactacttttcagtaatgttgatgtacaatgcagaaaagccgaaatagtcagtgttggcttattttggtgctggtatattaaagtattaggttttctgcctagtacttcagctatgatagcctacgtactaattagtcatgtagtagctggcttagttcatgttcaaatttgtttgtctcactttcctatggaaacttacgatggtgttccttacaactcagatgatgaatgctattgcatcacacagttgaaaacaactctaaacgttgactgtccagaatggttggattggtttcatgggggcttgcaattccaagttgaacatcatcttttccccaggcttccaagacataatttaagacacgctcgtaaactggtgaaagaactatgcaagaaacataatttgccatactatgaatatggatttgttgaagctaatagacttttattactcaccttaaagaatgcagcagaagtagctaaaaaggcaaaggaagttaaattttctttaaaaaattcaatcattggtgaccttttatatgctagaggttaa

SEQ ID NO: 13156 - protein, 472 aa, Trichoplax adhaerens
MTTVVKTVEAVNESNLRARKKNINTPYTIEEVAKHNTENDLWIIINNKVYDVTKWIPYHPGGNLPILNLGGHDVTDAFRGFHPDWAFKKLSAFQVGILTGYEPNQVVKDYRALDEKLRREGYYKTHYMFYAKLYLWLSFLFCLSMYLTIYTTELKWQMLGALVLGMFWQQLAFVGHDTGHISISHNRDIDGWIGSTVGNFFGGVSLAWWKRTHNVHHVVPNSVQHDPDIQHLPIFAVTDKVIPDGVFSNYHKKQMTFDSFAKFMVSNQHIFYYPVMAVARFNLYLQSILLLFSNVDVQCRKAEIVSVGLFWCWYIKVLGFLPSTSAMIAYVLISHVVAGLVHVQICLSHFPMETYDGVPYNSDDECYCITQLKTTLNVDCPEWLDWFHGGLQFQVEHHLFPRLPRHNLRHARKLVKELCKKHNLPYYEYGFVEANRLLLLTLKNAAEVAKKAKEVKFSLKNSIIGDLLYARG

SEQ ID NO: 13157 - DNA, 1365 bp, Hydra magnipapillata
  CDS (1)..(1365)
atgactgctgctcatgaactacctatttatagcagggaggaagttgctcttcatacagctaaatctgatgcttgggtaataattagagataaagtatacaatgtcactaattggttagataaacatcctggtggtgtttcattaatattaaatttagcaggaaaagattgttcagttgagtttaacagcttccatctaaatcctaactatgacagactcaagccatatcttatagggcaattgcctgcagctcaatggcataaagatacgcaattaggaaaagatcttaaagcgttatttgaagagttaaaaaatcttaaagcatttgaaagtgattattggttatatattaaacttgcaagtataatttcatcactttttgttgcttccatcttctttttacacttttcatcatcatactggtcactttgtttaagtgcaatgtttcttggtttattctggcagcaattggcttttgttggtcatgatcttggccaccatgctgtaacacataataaaaaaaaagatgagactcttggttatatatttggaaattttcttcaaggaatcagtgtagcttggtggcgacacagtcacaacacccatcatacacttactaattcaatcaatcacgatccagatattcagcacctgcctgtgttagctgtttctaaatcgtattttaacaacatattttcaacgtactatcatcgggtcttaaaatttgacaggattgcacatttgtttgtttcaattcaacattatatgttttttcctatcatgggattggctcgttttaacctttatgcacaaagttttatttttaatctaataggggtcggagcttcttcaaagggaaaacaggcagagttattttctttactgggtttttggacttggtttttgttgttgttaatgtatattagctctacactatcttacagccatgctattatttttttgtttttatcgcatgccacagcaggtttagtacacatacagatttgtataagtcatttttctatggaaacatatatgggagtgcctcagagtaactacgaaaatgatggctattttttatctcagttaatgacaaccatgaatgttgattgtcctccttggatggatttgtttcatggtggacttcaatttcaaattgagcaccatatatttccacatttaacaagaagcaaacttcgttatgttcaaggtaggttacagagcttatgtaaaaagcatggtttgcctcaccactcaaaaccattttttggagctgtgttagcagttgtggaaaagcttcatgaaacatcaaaagagcttaaattgtctaatatgatttgggatggaatgaaccttgttggttaa

SEQ ID NO: 13158 - protein, 454 aa, Hydra magnipapillata
MTAAHELPIYSREEVALHTAKSDAWVIIRDKVYNVTNWLDKHPGGVSLILNLAGKDCSVEFNSFHLNPNYDRLKPYLIGQLPAAQWHKDTQLGKDLKALFEELKNLKAFESDYWLYIKLASIISSLFVASIFFLHFSSSYWSLCLSAMFLGLFWQQLAFVGHDLGHHAVTHNKKKDETLGYIFGNFLQGISVAWWRHSHNTHHTLTNSINHDPDIQHLPVLAVSKSYFNNIFSTYYHRVLKFDRIAHLFVSIQHYMFFPIMGLARFNLYAQSFIFNLIGVGASSKGKQAELFSLLGFWTWFLLLLMYISSTLSYSHAIIFLFLSHATAGLVHIQICISHFSMETYMGVPQSNYENDGYFLSQLMTTMNVDCPPWMDLFHGGLQFQIEHHIFPHLTRSKLRYVQGRLQSLCKKHGLPHHSKPFFGAVLAVVEKLHETSKELKLSNMIWDGMNLVG

SEQ ID NO: 13159 - DNA, 1344 bp, Vitis vinifera
  CDS (1)..(1344)
atggcagagacaaagaggtacatttcaaaggaagagctcaagacccacagcagggatggggatctatggatctctatacaggggaaggtctataatgtgtctgattgggcgaaagtgcacccaggtgggtctgctccattgctgagtctcgccggccaggatgctactgacgcttttgtggcctaccatcccggggttttgtggagccgtttggacgatttctttactgggtttcatctcgaggactatgctgtttcggaggcgtcgagggattataggaggttggtgtatgagtttacgaagatggggttgtttgagaaaaaggggcatggggtgttcgtcacgctctgtgcgatggcggtgatgttctccgcctgtatttatggggttctggggtctgacaacacatgggttcatctcgccagtggcgcgttgatggggcttttctggattcagagtgggtggattgggcacgattctgggcactaccaggtgatgatgaacaggcgtttgaaccgctttgtgcaggtgctgagtgggaattgtcttgcggggatcagtattgcgtggtggaagtggaatcacaacgctcatcacattgcctgcaacagcctcgatttcgatccggatcttcagcatatgcctgtattcgcggtatcttccaagcttttcagttcccttacatcttatttctatgaaaggaagatgaattttgattgtgtggctaggtttctagtgagttaccagcactggactttttatcctgtgatgtgtgttgctagattaaatctatttgctcagtcctggtctttgttgttgtccaagaggagggttcgctacagggctcaggagattttggggctgcttgtgttttggatttggtaccctttacttgtttcatgtctgcccaattggtgggaaagagtgatgtttgttgttctgagtttctcctttactggaatccagcatgttcaattctgtttgaatcatttctcatccagtgtttatgtgggtcctccaagtgggaatgattggtttgagaagcagactcatgggtctctcgatatttcctgctcctcttggatggactggtttcatggtgggctgcagtttcagattgagcaccatctgtttcctcggctgcctcggaaccagctcaggaacgtctcaccctttgttcaggagctttgcaagaagcacaatttgccttatgattgcgcgtcattctggaaggccaatgtgttgacactcgcgacactgaggactgcagccttgcaggctcgcgatcttgccaacccgattccaaagaatttggtctgggaagcagtgaacactcatggatga

SEQ ID NO: 13160 - protein, 447 aa, Vitis vinifera
MAETKRYISKEELKTHSRDGDLWISIQGKVYNVSDWAKVHPGGSAPLLSLAGQDATDAFVAYHPGVLWSRLDDFFTGFHLEDYAVSEASRDYRRLVYEFTKMGLFEKKGHGVFVTLCAMAVMFSACIYGVLGSDNTWVHLASGALMGLFWIQSGWIGHDSGHYQVMMNRRLNRFVQVLSGNCLAGISIAWWKWNHNAHHIACNSLDFDPDLQHMPVFAVSSKLFSSLTSYFYERKMNFDCVARFLVSYQHWTFYPVMCVARLNLFAQSWSLLLSKRRVRYRAQEILGLLVFWIWYPLLVSCLPNWWERVMFVVLSFSFTGIQHVQFCLNHFSSSVYVGPPSGNDWFEKQTHGSLDISCSSWMDWFHGGLQFQIEHHLFPRLPRNQLRNVSPFVQELCKKHNLPYDCASFWKANVLTLATLRTAALQARDLANPIPKNLVWEAVNTHG

SEQ ID NO: 13161 - DNA, 1344 bp, Vitis vinifera
  CDS (1)..(1344)
atggcgggtgaaaggaagtacatttcagctgaagaactcaaacagcatgacaagccaggggatctgtggatctctatacagggtaaggtttacaatgtcacggattgggctaaggtccatccgggtggggatatccctcttctgaatttggctggccaagatgttacagacgccttcattgcataccatccaggtactgcttggcaatatcttgataaattctttactgggtattatctcaaagacttcaaagtctcggaggtgtccaaagacttcaggaaactcgctaatgaattttcaaaacttgggttgtttgagaagaaaggccatggaatcctgtacacctgttccatcattggattcttgttcatggtgtgtatttatggtgttttgtgtgttgatagtttctgggttcatctgggttgtgctgcattactggggtttctatggattcagagttcttatctgggtcatgattctgggcattatcagataatgtccagtcctgggtttaataagcttgctcaaatgcttattgggaattgcataaccgggataagcattgcgtggtggaagtggactcataatgcccatcatatagcttgtaatagtcttgattatgatcctgatcttcagcatattccagtgtttgcagtttcttccagcttgttcgattccataaactctgtcttttatgggagaatattgaaatttgattctgttgctaggttttttgtgagttaccagcactggacctattatccggttatgtgtgtggcaaggattaatttgtttctgcaaacattattgttgttgttttctgggaggaatattccggatagagctttgaatattatggggatttgtgtgttttggacatggtaccctcttcttgtttcatgtttgcccaattggggtgagagggtgatgtttgtgattgtgagcatggctgtgacttcgattcaacatattcaattcactttgaaccatttttcagctaatgtgtatgttgggccgccttgtgggaacgattggtttgagaagcagactagtgggacaattgatatttcatgctcagcttggatggactggtttcatggtggtctgcagtttcagcttgagcaccatttgtttcctcggttgccaaggtgccatttgaggagcatttcccctgtggtgaaggacctatgcaagaagcataatttgccttataggagtttatcgttttgggaggccaacgtatcgacaattaggacgctaagaactgctgctctgcaggctcgtgaccttaccaaccctgtcccaaagaatttggtttgggaagctgctaatattcatggatga

SEQ ID NO: 13162 - protein, 447 aa, Vitis vinifera
MAGERKYISAEELKQHDKPGDLWISIQGKVYNVTDWAKVHPGGDIPLLNLAGQDVTDAFIAYHPGTAWQYLDKFFTGYYLKDFKVSEVSKDFRKLANEFSKLGLFEKKGHGILYTCSIIGFLFMVCIYGVLCVDSFWVHLGCAALLGFLWIQSSYLGHDSGHYQIMSSPGFNKLAQMLIGNCITGISIAWWKWTHNAHHIACNSLDYDPDLQHIPVFAVSSSLFDSINSVFYGRILKFDSVARFFVSYQHWTYYPVMCVARINLFLQTLLLLFSGRNIPDRALNIMGICVFWTWYPLLVSCLPNWGERVMFVIVSMAVTSIQHIQFTLNHFSANVYVGPPCGNDWFEKQTSGTIDISCSAWMDWFHGGLQFQLEHHLFPRLPRCHLRSISPVVKDLCKKHNLPYRSLSFWEANVSTIRTLRTAALQARDLTNPVPKNLVWEAANIHG

SEQ ID NO: 13163 - DNA, 1344 bp, Populus trichocarpa
  CDS (1)..(1344)
atggagggcgacaaaaagtacattacaggcgaagagcttaagcaacacaacaaggaaggagacttgtggatctctatccagggaaaggtttataatgtctctgattgggcttatgagcatccaggcggagatgttgctctcctgaatctggcaggccaagatgttactgatgcatttattgcctaccatcctggaacagcatggcaatatcttgacaagttctttacggggtattatctcaaagatttcaaggtgtcagagacgtccaaggattacaggaggcttgcttcagagtttgcgaaactgggtttgtttgaaaagaaaggacatattaccatgtatgccctcgcatctattgcattgatgttttgcgttgttctttatggtgttttgtgttgccagagtgtttgggctcatttaggatctgctttggtgttgggttttctttggattcaaagtgcctatattggtcatgattcggggcattaccaagtaatgaagagtcgtggttataacaaatttgctcaatttgttgctgggaattccctcacaggcattagcattgcttggtggaaatggacccacaatgcacaccatcttgcctgcaacagtcttgattacgatcctgatcttcaacacataccagtctttgcggtaaattcgactttttttaattcgataaagtcttgcttttatggaaggtacttggattttgatcctgtggcaaggttttttgtgagttaccaacattggactttttatccagtaatgtgtgttgccagggtcaatttgtatttacaaacattcttgctattgttttcaaagagaaaattcccagatagagctttgaacatcttgggaatcctcatcttttggacttggttccctctacttgtgtcttgtctccctaattggcctgagagggtgatgtttgtgcttgcaagctttgctgttaccgcaattcaacacgttcaattttgtttgaatcattttgcggccgatgtttacactggacctccaaaagggaatgattggtttgagaaacagacaggagggactttggatatttcgtgctcatcttggatggattggttttacggtggtttgcagtttcagcttgagcatcacttgtttccaaggatgccaagatgccaattgagaagggtttcaccgttggtacaggatctatgcaagaagcacaatttgtcttacaggagtttgtccttctgggaagccaatgtgtggacaatcaggagactcaggaacgttgcccagcaggctagggatctgtccaaccccgtccctaaaaatttgttgtgggaagctgttaatactcatggatga

SEQ ID NO: 13164 - protein, 447 aa, Populus trichocarpa
MEGDKKYITGEELKQHNKEGDLWISIQGKVYNVSDWAYEHPGGDVALLNLAGQDVTDAFIAYHPGTAWQYLDKFFTGYYLKDFKVSETSKDYRRLASEFAKLGLFEKKGHITMYALASIALMFCVVLYGVLCCQSVWAHLGSALVLGFLWIQSAYIGHDSGHYQVMKSRGYNKFAQFVAGNSLTGISIAWWKWTHNAHHLACNSLDYDPDLQHIPVFAVNSTFFNSIKSCFYGRYLDFDPVARFFVSYQHWTFYPVMCVARVNLYLQTFLLLFSKRKFPDRALNILGILIFWTWFPLLVSCLPNWPERVMFVLASFAVTAIQHVQFCLNHFAADVYTGPPKGNDWFEKQTGGTLDISCSSWMDWFYGGLQFQLEHHLFPRMPRCQLRRVSPLVQDLCKKHNLSYRSLSFWEANVWTIRRLRNVAQQARDLSNPVPKNLLWEAVNTHG

SEQ ID NO: 13165 - DNA, 1347 bp, Populus trichocarpa
  CDS (1)..(1347)
atggcggagacaaggaggtacattacaaaagaagagcttgaaaagcacaacacagcaggagatctatggatctctatacaaggcaagatctacaatgtcacttactgggctaatgaccaccctggaggccagcttccattgttgagtcttgcaggccaagatgtcactgatgcgtttgttgcttaccatccagggactgcgtggaaataccttgacaaattctttaccgggttttatctcaaagactacactgttagtgaggtatcggaagattttagaaaactcgctgccgagttctcaaaatcgggtctttttgagaaaaaaggacatgtggtgtttgttactctttgtttagttgtaatgatgttttgtctcagtgtttatggtgttttgtgctctgatagtagatcggttcgtttagtttgtggtgggttaatggggcttatgtggatacaaagtgggtggattgggcatgattcaggtcattatcaggttatgagtagccgtggattcaattgtcttgtgcagatcttaagtgggaattgccttgcaggggttggtattggatggtggaagtgtaaccataatgcacatcacattgcttgtaatagtcttgattatgatccagatctgcagcacatgccttttttcgcggtatcttctaagtttttcagttcaattacttcttgtttttatgataggaagttgaatttcgattctgtttctaggttcttggttagttatcaacattggacattttatcctgtaatgtgtttggcgaggattaatttgtttgcgcagtctttcttgattttgttatctaagaaaaaattgtcgactaataggggcctggagtttttgggtttagttgtgttctggacttggtatcctctgcttgtttcctgcttgcccagttggggggagagaatcatttttgttgttgccagttttagtgttactgggattcagcatgttcagttctgtctgaatcatttctcatcaagtgtttatgttggtccgcctagtgggaataattggtttgagaaacaaactgagggaacattgaatatatcatgctcgccttggatggattggtttcatggtggattgcaatttcaggttgagcaccatctctttccccgtttgcctcgatgccaacttagaagagtctcaccgttcatcagggagctttgtaagaagcataatttgccatacaatatcgtatcattctggaaggccaatgcaatgaccttggagactctccggactgcagccttgcaagctagggatcttaccaatcctgttcctaagaatttggtgtgggaagctgttaatactcatggatga

SEQ ID NO: 13166 - protein, 448 aa, Populus trichocarpa
MAETRRYITKEELEKHNTAGDLWISIQGKIYNVTYWANDHPGGQLPLLSLAGQDVTDAFVAYHPGTAWKYLDKFFTGFYLKDYTVSEVSEDFRKLAAEFSKSGLFEKKGHVVFVTLCLVVMMFCLSVYGVLCSDSRSVRLVCGGLMGLMWIQSGWIGHDSGHYQVMSSRGFNCLVQILSGNCLAGVGIGWWKCNHNAHHIACNSLDYDPDLQHMPFFAVSSKFFSSITSCFYDRKLNFDSVSRFLVSYQHWTFYPVMCLARINLFAQSFLILLSKKKLSTNRGLEFLGLVVFWTWYPLLVSCLPSWGERIIFVVASFSVTGIQHVQFCLNHFSSSVYVGPPSGNNWFEKQTEGTLNISCSPWMDWFHGGLQFQVEHHLFPRLPRCQLRRVSPFIRELCKKHNLPYNIVSFWKANAMTLETLRTAALQARDLTNPVPKNLVWEAVNTHG

SEQ ID NO: 13167 - DNA, 1344 bp, Populus trichocarpa
  CDS (1)..(1344)
atggagggagataagaagggcattacaagcgaagagcttaagcagcacaacaaggcaggagacttgtggatctctattcagggaaaggtttacgatgtctctgattgggcaaatgagcatccgggtggagatgttgctctcatgaatatggcaggcctagatgctactgatgcattcattgcctaccatcctggaacagcatggaaatatcttgataagctctttacagggtattatctcacagatttcaagctatcagagacatccaaggattacaggaggcttgcttcagagtttgctaaactgggcctgttcgaaaagaaaggacatattactatgtatgcactgacatctattgtattgatgttttgtgttgttctttatggtgttttgtgttgccagagtgtttgggctcattttggttctgctgtggtgttggggtttctttggattcaaagtgcctatattggtcatgattcagggcattaccaggtgatgaacactcgtggttctaacaaactcgctcaattcgtcgctggaaactcgctcacgggtattagcattgcttggtggaaatggacccacaatgcacaccatctcgcttgcaacagtcttgattatgatcctgatcttcaacacataccagtctttgcggtaaattcgatttttttcaattctataaagtcttgcttttatggaaggtacttaaattttgatcctgtggccaggttctttgtgagttaccaacactggactttttatccagtaatgtgtgttgcgagggtcaatttgtacatacaaacgttcttgctattgttttcaaagagaagattcccagatagagctttgaacatcttgggaattcttatcttctggacttggttccctctacttgtgtcttgcatccctaattggcccgagagggtgatgtttgtgcttacaagctttgctgttacggcaattcaacacgttcaattttgtttgaatcattttgcggccgatgtttactctggacttccagaagggaatgattggtttgagaaacagacaagtgggactttggatatttcgtgttcatcttggatggattggttttatggtggtttgcagtttcagcttgagcatcatttgtttccaaggatgccgagatgccaattgagaagagtttcaccattggtacaggatctgtgcaagaagcacaatttatcttacaggagcttgtccttctgggaagccaacgtgtggacaatcaggaaactcaggaatgtcgctctgcaggctagggacctggccaaccctgttccgaaaaatatgctgtgggaagctgttaatactcacggatga

SEQ ID NO: 13168 - protein, 447 aa, Populus trichocarpa
MEGDKKGITSEELKQHNKAGDLWISIQGKVYDVSDWANEHPGGDVALMNMAGLDATDAFIAYHPGTAWKYLDKLFTGYYLTDFKLSETSKDYRRLASEFAKLGLFEKKGHITMYALTSIVLMFCVVLYGVLCCQSVWAHFGSAVVLGFLWIQSAYIGHDSGHYQVMNTRGSNKLAQFVAGNSLTGISIAWWKWTHNAHHLACNSLDYDPDLQHIPVFAVNSIFFNSIKSCFYGRYLNFDPVARFFVSYQHWTFYPVMCVARVNLYIQTFLLLFSKRRFPDRALNILGILIFWTWFPLLVSCIPNWPERVMFVLTSFAVTAIQHVQFCLNHFAADVYSGLPEGNDWFEKQTSGTLDISCSSWMDWFYGGLQFQLEHHLFPRMPRCQLRRVSPLVQDLCKKHNLSYRSLSFWEANVWTIRKLRNVALQARDLANPVPKNMLWEAVNTHG

SEQ ID NO: 13169 - DNA, 1347 bp, Nonea caspica
  CDS (1)..(1347)
atggctactgaaatcaagaagtacattacctcagatgagcttaaaaaccatgataaaccaggagatctatggatctcaattcaggggaaggtctatgatgtttcaaattgggttaaagaccatccaggtgggaccttccccttgatgagtcttgctggtcaagaggtaactgatgcatttgttgcatttcatcctccctctgtctggaagaatcttgataggtttttcactgggtattatcttaaagattactctgtttctgaggtgtccaaagattataggaagcttgtgtttgagttttctaaaatgggtttgtatgacaaaaagggtcatattgtttttgccactttgtgttttatagcaacgctgtttgctatgagtgtctatggggttttgttttgtgagggtgttttggtacatttgttttctgggtgtttgatgggatttctgtggatccagagtggttggattggacatgatgctaggcattatatggttgtgtctgattcaaggtttaataagtttgtgggtatttttgtttcaaattgtatttcaggtataagtattggttggtggaaatggaaccacaatgcacatcaccttgcatgtaatagtcttgagtatgaccctgatttacaatatataccattccttgttgtgtcctccaagttttttacctcactcaattctcacttctatggaaaaagattgacttttgattctctatcaagattctttgtaagctatcaacattggacattttaccctgttatgtgttctgctaggctcaatatgtttgtacaatctctcataatgttgttgaccaagcggaatgtgtcctatagagctcaggagctcctgggattgcttgtgttcttgatttggttcccgttgcttgtttcgtgtttgcctaatgtgggtgaaagagtgatgtttgttgttgcaagcttgtgtgtgactgggatgcaacaggttcagttctctttgaatcacttctcttcgagtgtttatgttggcaaggtcaaagggaataattggttcgagaagcaaacagatggaacacttgacatttcttgccctccttggatggattggttccatggcggattgcaatttcaagtcgagcatcatttgtttcctaagatgcctagatgccactttaggaaaatctccccgttcgttatggagttatgcaagaagcataacttgccttacaatgttgcatctttctccaaggccaatgaattgacactcagtacattgaggaacacggcattggcagctagggatataaccaagccactcccgaagaatttggtatgggaagctcttcaaactcatggttaa

SEQ ID NO: 13170 - protein, 448 aa, Nonea caspica
MATEIKKYITSDELKNHDKPGDLWISIQGKVYDVSNWVKDHPGGTFPLMSLAGQEVTDAFVAFHPPSVWKNLDRFFTGYYLKDYSVSEVSKDYRKLVFEFSKMGLYDKKGHIVFATLCFIATLFAMSVYGVLFCEGVLVHLFSGCLMGFLWIQSGWIGHDARHYMVVSDSRFNKFVGIFVSNCISGISIGWWKWNHNAHHLACNSLEYDPDLQYIPFLVVSSKFFTSLNSHFYGKRLTFDSLSRFFVSYQHWTFYPVMCSARLNMFVQSLIMLLTKRNVSYRAQELLGLLVFLIWFPLLVSCLPNVGERVMFVVASLCVTGMQQVQFSLNHFSSSVYVGKVKGNNWFEKQTDGTLDISCPPWMDWFHGGLQFQVEHHLFPKMPRCHFRKISPFVMELCKKHNLPYNVASFSKANELTLSTLRNTALAARDITKPLPKNLVWEALQTHG

SEQ ID NO: 13171 - DNA, 1344 bp, Nicotiana tabacum
  CDS (1)..(1344)
atggcagattcaagaaagtacattaccagtgaggagctcaagaatcacaataaaccaggggatctgtggatatccattcaaggtaaagtgtatgatgtctcagattggattaaagaacaccctggtggtgattttccactgttgaatcttgctggtcaagatgtcactgatgcctttgttgcataccatcctgctactgcttggcagtatcttgacaaattctttaatgggttttatctcaaggattattctgcttctgaggtgtctaaagattataggaggcttgtatctgagtttactaaactggggttgtttgaaaagaaaggccatgtttgtttctacaccatgtgttccattgcaatgttgtttgctgtgagtgtttatggcatcatgtgtagtgagagtgtgttggttcatttgatgagtggtggtttgatggggtttctttggattcagagtggttggattggtcatgattcagggcattatcaggtaatgagtacacgtggactcaacagatttgctcaagtgttaactgggaattgccttgctggaatcagcattgcttggtggaagtggaatcacaatgctcatcacattgctgtcaacagtcttgaatatgaccctgatcttcagcacatgccattttttgtggtatcttccaagtttttcaactcactcacttcttatttttatgataggaagatgacttttgattcttttactagattcttggttagtaatcagcattggacattttatcctgtcatgtgtttagctaggatcaatttgtttgcacagtcattcatattgttgttgtccaagaaaaatgtgccctatcgagttcaggagcttttaggggtggttgcattctggatttggtatccattgcttgtttcttgcttgccaaattggggtgaaaggataatgtttgttcttgctagtttcacagtgactggaattcaacatgttcaattctgtttgaaccatttctcatctgacatttacgtcgcaccgcctaaaggaaatgattggtttgagaagcaaactggtggctctcttgacatatcatgccctagttggatggattggttttatggcggattgcagtttcagattgagcatcatttgtttcctagattgccaagatgccaactgaggaaagtgtctccttttgtgaaggacctctgcaaaaagcatggtttaccttataattgtgcctccttttacatggctaatgctttgaccatcagcaccctcagaactgcagctttgcaggctcgcgatttaacaaagcctgtcccaaagaatctagtttgggaagctgtcaacactcatggttga

SEQ ID NO: 13172 - protein, 447 aa, Nicotiana tabacum
MADSRKYITSEELKNHNKPGDLWISIQGKVYDVSDWIKEHPGGDFPLLNLAGQDVTDAFVAYHPATAWQYLDKFFNGFYLKDYSASEVSKDYRRLVSEFTKLGLFEKKGHVCFYTMCSIAMLFAVSVYGIMCSESVLVHLMSGGLMGFLWIQSGWIGHDSGHYQVMSTRGLNRFAQVLTGNCLAGISIAWWKWNHNAHHIAVNSLEYDPDLQHMPFFVVSSKFFNSLTSYFYDRKMTFDSFTRFLVSNQHWTFYPVMCLARINLFAQSFILLLSKKNVPYRVQELLGVVAFWIWYPLLVSCLPNWGERIMFVLASFTVTGIQHVQFCLNHFSSDIYVAPPKGNDWFEKQTGGSLDISCPSWMDWFYGGLQFQIEHHLFPRLPRCQLRKVSPFVKDLCKKHGLPYNCASFYMANALTISTLRTAALQARDLTKPVPKNLVWEAVNTHG

SEQ ID NO: 13173 - DNA, 1344 bp, Jatropha curcas
  CDS (1)..(1344)
atggcggattcaaagaagtacatttcagaagaagagctaaagaagcacactaagtcaggggatctatggatctcaatacaggggaaggtctacaatgtcaccggttggacaaaggaccatccaggaggtgagcttccattgcttcatctctccgggcaagacgttactgatgctttcgttgcatatcatccgggcactgcatggcaatatctcgacaaattctttactggatattatctcaaagaccactctgtttctgaggtatcaaaagattatagaaaattgcttgctgagttcacaaaaatgggtctttttgaaaagaaagggcacgtgacattagtcacactttgtgtcgtggcaatgctgctttctttcagtatttatgggattttatgctcagatagtacatgggtacatttgctttctggtgggttaatagggtttttgtggattcaaagtgggtggattggacatgattcggggcattatcaggtcatgacaagccctaaaatcaatcggttggttcagatcttaactggtaattgccttgcagggataagtattgcgtggtggaaatggaaccataatacccaccacattgcctgtaatagtcttgaatttgacccagatctgcagcacatgcctttttttgcggtatcttcaaaactttttagctcacttaagtcttatttttatgaaaggaagatgaacttcgattctgtttgtaggtttttggttagttatcagcattggacattttatcctgtgatgtgttttgctaggcttaatttgtttgcacaatctttcttgcttttgttatccaaaagaagggtacccaacagaggtcaagagattttaggagtccttgtgttttggatttggtatcctttacttgtttcttgcttaccaaattggggagagagagtgatgtttgttcttgctagtttcgcggttactgggattcaacacgttcagttctgtttgaatcatttctcatccaatgtttatgttggtcttccaagcggaaatgattggtttgagaaacaaacaaagggaacactcaacataaactgttcttcttggatggattggtttcatggtgggttgcagttccagattgaacatcatctgtttccacgtttgcctcgatgccagcttagaaaaatctcaccatttgttaaggagctatgcaagaagcatcatttaccttacgatagtgcatcattttggaaggctaatgttatgacaattagaactctttcagctgcagccttgcaggctagggaccttgcgaatccagttccaaagaacttagtttgggaagctgttaatactcatggataa

SEQ ID NO: 13174 - protein, 447 aa, Jatropha curcas
MADSKKYISEEELKKHTKSGDLWISIQGKVYNVTGWTKDHPGGELPLLHLSGQDVTDAFVAYHPGTAWQYLDKFFTGYYLKDHSVSEVSKDYRKLLAEFTKMGLFEKKGHVTLVTLCVVAMLLSFSIYGILCSDSTWVHLLSGGLIGFLWIQSGWIGHDSGHYQVMTSPKINRLVQILTGNCLAGISIAWWKWNHNTHHIACNSLEFDPDLQHMPFFAVSSKLFSSLKSYFYERKMNFDSVCRFLVSYQHWTFYPVMCFARLNLFAQSFLLLLSKRRVPNRGQEILGVLVFWIWYPLLVSCLPNWGERVMFVLASFAVTGIQHVQFCLNHFSSNVYVGLPSGNDWFEKQTKGTLNINCSSWMDWFHGGLQFQIEHHLFPRLPRCQLRKISPFVKELCKKHHLPYDSASFWKANVMTIRTLSAAALQARDLANPVPKNLVWEAVNTHG

SEQ ID NO: 13175 - DNA, 1368 bp, Stylosanthes hamata
  CDS (1)..(1368)
  misc_feature (1182)..(1182): n is a, g, c or t
atggcggaacctcaaccagagccaccattatcaccccaaacaaactacatttccctcgaagaactccgcaagcacaacaccccccaagatctatggatctccatccacggcaaagtctacaacgtcaccaactggctccaacaccatcccggcggctccctcccactcctcaacctcgccggccaagacgtcaccgacgcattcctcgctttccaccctaaacacgcctccaacctcctccaccctttcttcaccggcatctacctccaaaaccacaccgtctccgaagtttctagagactaccgcaaccttctctccaccttcacacggatgggcctcttcgaaagaaaccgcggcgtcgtcgcttctctgttcttcatcttcttcatgttctgcgtctcggtttacggtgttctcttcggtcagaccgccctggttcgcgtcggctcgggcggtttgatgggcttcttgtggattcagagcggttggatcggtcacgactccggtcattacatgattgttggttccaagaaactgaaccgggttcttcaaatcctctctggtaacgttcttgctggaattagcattggttggtggaaatggaaccacaatgcgcatcacattgcttgtaacagcctcgatttcgatcccgatcttcagcaccttcccttcttcgtggtctcctcgaggttcttcaattcaatcttttcatgcttctatgaacggttgatgaaattcgattcgttttctaggtttttggttagttaccagcattggactttttaccccgttatgtgcttcgctaggctcaatttgttcgcgcaatctttcatcttgttgttctcgaatcggaaggttccggatagaggaactgagattttagggctaattgctttctggatttggtaccctttgttggtttcttgtttgcctaattggggggaaagaattctgtttgttttggcaagcttttctgttactgggattcagcatattcaattctgtttgaaccatttctctgctaaggtttatgttggtcctccaactgctactgattggtgtgagaagcagtgtaatggaacacttgatgtcagttcttcttcctggatggattggttccatggaggtttgcagtttcaggttgagcatcacttgtttccgcggctgccgcgctgccatctncggcggatttctccctttgttaaggagctttgcaagaagcacaaccttccttacaattgtgtgtcgttctggaaggcgaatgttctcacgattcggacgctgaggaatgcggcgctgcaggctcgggatgtttcgagccctgttccgaagaatcttgtttgggaagctgttaacactcatggatga

SEQ ID NO: 13176 - protein, 455 aa, Stylosanthes hamata
MAEPQPEPPLSPQTNYISLEELRKHNTPQDLWISIHGKVYNVTNWLQHHPGGSLPLLNLAGQDVTDAFLAFHPKHASNLLHPFFTGIYLQNHTVSEVSRDYRNLLSTFTRMGLFERNRGVVASLFFIFFMFCVSVYGVLFGQTALVRVGSGGLMGFLWIQSGWIGHDSGHYMIVGSKKLNRVLQILSGNVLAGISIGWWKWNHNAHHIACNSLDFDPDLQHLPFFVVSSRFFNSIFSCFYERLMKFDSFSRFLVSYQHWTFYPVMCFARLNLFAQSFILLFSNRKVPDRGTEILGLIAFWIWYPLLVSCLPNWGERILFVLASFSVTGIQHIQFCLNHFSAKVYVGPPTATDWCEKQCNGTLDVSSSSWMDWFHGGLQFQVEHHLFPRLPRCHLRRISPFVKELCKKHNLPYNCVSFWKANVLTIRTLRNAALQARDVSSPVPKNLVWEAVNTHG

SEQ ID NO: 13177 - DNA, 1410 bp, Crepis alpina
  CDS (1)..(1410)
atgtgtgaagattcaacgatggtttctccttccgttgctgtcgttgaagtattgaagtcaacaagcagcagcgacggaaagaaatacataacatcagaagagctagaaaaacacaacaaaccgacggacctatggatctcaatacaaggcaaggtgtacaacgtgacggaatggtcgaaaatccacccggggggggacatccccctcctgaacctggcgggccaggacgtgacggacgccttcatcgccttccacccggggtccgcctggcaccacctccaaagcctcttcacgggctaccacctccaagactaccaagtctcggacatctctaaagactaccgcaagctcgcgtccgagttttcaaaagccggaatgttcgacaagaaagggcacggtgtcatctactccctctgcttcgtctccatcctcctttccctttgcgtgtacggcgtcctgtgctccgctagtgtcaccgtccacatgtttgcgggcgcgctgctgggcttggcgtggatgcaaatcgcgtatctgggccacgacgcgggtcattaccagatgatggcgacccgcgggtggaacaagtttgccgggattttcatcgggaactgtatcacgggtattagcatcgcgtggtggaagtggacccacaatgcccaccacatcgcgtgcaactccctcgattacgaccccgacttgcaacacctccccatgctcgcggtttcctcgaagctattcgagtccatcacttcggttttttacgggagaagattaacgttcgatagcgtcgcgagattcttcatctcgtaccaacactacacttactaccccatcatgtgtgtgacacgtgtgaacctctacctacaaacaatcctactactatgctcaaaacgaagaatccctgaccggaccttaaacatcatcgggacgcttatcttttggacttggtttcctcttttagtgtcctgtctccccaactggcctgaacgtgtcgcctttgtgctggtttcgttttgtgtgaccgggatccaacatgtgcagtttacactaaaccatttcgcggctgacgtgtacgtgggcccgccgagagggaacgattggtttgagaagcaaacggccgggaccatcgacatttcgtgttcttcctacatggattggttttttggcgggttgcagttccaactcgagcatcatttgtttccgaggttacctaggtgtcacttgaggtcgatttctccgattgtgatggatctttgtaagaagcataacttgccgtatacgagtttgtctttctttgatgcgaatgtgacgactcttaagacacttaggactgcggcgttgcaggcgcgtgacctggcgaatggccccccacagaacttagtttgggaagcgtttaatactcatggttga

SEQ ID NO: 13178 - protein, 469 aa, Crepis alpina
MCEDSTMVSPSVAVVEVLKSTSSSDGKKYITSEELEKHNKPTDLWISIQGKVYNVTEWSKIHPGGDIPLLNLAGQDVTDAFIAFHPGSAWHHLQSLFTGYHLQDYQVSDISKDYRKLASEFSKAGMFDKKGHGVIYSLCFVSILLSLCVYGVLCSASVTVHMFAGALLGLAWMQIAYLGHDAGHYQMMATRGWNKFAGIFIGNCITGISIAWWKWTHNAHHIACNSLDYDPDLQHLPMLAVSSKLFESITSVFYGRRLTFDSVARFFISYQHYTYYPIMCVTRVNLYLQTILLLCSKRRIPDRTLNIIGTLIFWTWFPLLVSCLPNWPERVAFVLVSFCVTGIQHVQFTLNHFAADVYVGPPRGNDWFEKQTAGTIDISCSSYMDWFFGGLQFQLEHHLFPRLPRCHLRSISPIVMDLCKKHNLPYTSLSFFDANVTTLKTLRTAALQARDLANGPPQNLVWEAFNTHG

SEQ ID NO: 13179 - DNA, 1395 bp, Zea mays
  CDS (1)..(1395)
atgccgccctctgccgacgcaatgccggcccccggagacgccgcgtgcgccggcgacgtgcgcttgatctcctccaaggagctccgcgagcacgcgtccgccgccgacctctggatctccatctcgggcgacgtgtacgacgtgacgccctggcttccccaccacccgggcggcgacctcccgctcatcaccttggcggggcaggacgccaccgacgccttcgccgcctaccacccgccctcggcgcgcccgctcctccgccgcttcttcgtcggccgcctctccgactacaccgtctcccccgcgtccgccgactaccgccgcctcctggcgcagctctcctccgcgggcctcttcgagcgcgtcggccccacccccagggtacagctcgccctgatggccgtcctcttctacgcggcgctctacctcgtcctcgcctgcgccagcgcctcggcgcacacgctcgctggggggctcatcggcttcgtctggatccagtccggctggatgggccacgactcgggccaccaccgcatcacgggccatccgctcctggaccgcgtcgtgcaggtgctctccggaaactgcctcactggcctcagcatcgcctggtggaaatgcaaccacaacacgcaccacatcgcctgcaacagcctggaccatgacccggacctccagcacatgccgctcttcgctgtctcccccaagctgttcggcaacatatggtcctacttctaccagcggaccctggccttcgacgccgcctcgaaattcctcatcagctaccagcactggaccttctacccggtaatgtgcatcgccaggataaatcttctggcgcagtccgctgtcttcgtcctgaccgagaagagggtgccgcagcggctgcttgagatcgccggtgtcgccgcgttctgggcttggtacccgttgctggtggcgtgcctgccgaattggtgggagagggtggcgttcgtgcttctcagctttaccatctgcgggatccagcacgtccaattctgcctgaaccacttctcgtccgatgtgtacgtcgggccacccaagggcaacgactggttcgagaagcagacggcaggcacgctcgacatcctgtgccctccttggatggattggttccatggcggcctgcagttccagattgagcaccatctgttcccccgcctgcctcggtgccaccttcggaaggttgcgccggcggtgcgtgacctttgcaagaagcatgggctgacctattccgcagcctccttctgggacgcaaatgtgcttacatggaagacactcagggctgccgcattgcaggccaggagcgccacaggcggcggcggcggcgctccgaagaatttggtctgggaggcattgaacacccatggatga

SEQ ID NO: 13180 - protein, 464 aa, Zea mays
MPPSADAMPAPGDAACAGDVRLISSKELREHASAADLWISISGDVYDVTPWLPHHPGGDLPLITLAGQDATDAFAAYHPPSARPLLRRFFVGRLSDYTVSPASADYRRLLAQLSSAGLFERVGPTPRVQLALMAVLFYAALYLVLACASASAHTLAGGLIGFVWIQSGWMGHDSGHHRITGHPLLDRVVQVLSGNCLTGLSIAWWKCNHNTHHIACNSLDHDPDLQHMPLFAVSPKLFGNIWSYFYQRTLAFDAASKFLISYQHWTFYPVMCIARINLLAQSAVFVLTEKRVPQRLLEIAGVAAFWAWYPLLVACLPNWWERVAFVLLSFTICGIQHVQFCLNHFSSDVYVGPPKGNDWFEKQTAGTLDILCPPWMDWFHGGLQFQIEHHLFPRLPRCHLRKVAPAVRDLCKKHGLTYSAASFWDANVLTWKTLRAAALQARSATGGGGGAPKNLVWEALNTHG

SEQ ID NO: 13181 - DNA, 1392 bp, Zea mays
  CDS (1)..(1392)
atgccgccctctgccgacgcaatgccggcccccggagacgccgcgtgcgccggcgacgtgcgcttgatctcctccaaggagctccgcgagcacgcgtccgccgccgacctctggatctccatctcgggcgacgtgtacgacgtgacgccctggcttccccaccacccgggcggcgacctcccgctcatcaccttggcggggcaggacgccaccgacgccttcgccgcctaccacccgccctcggcgcgcccgctcctccgccgcttcttcgtcggccgcctctccgactacaccgtctcccccgcgtccgccgactaccgccgcctcctggcgcagctctcctccgcgggcctcttcgagcgcgtcggccccacccccagggtacagctcgccctgatggccgtcctcttctacgcggcgctctacctcgtcctcgcctgcgccagcgcctcggcgcacatgctcgctggggggctcatcggcttcgtctggatccagtccggctggatgggccacgactcgggccaccaccgcatcacgggccatccgctcctggaccgcgtcgtgcaggtgctctccggaaactgcctcactggcctcagcatcgcctggtggaaatgcaaccacaacacgcaccacatcgcctgcaacagcctggaccatgacccggacctccagcacatgccgctcttcgctgtctcccccaagctgttcggcaacatatggtcctacttctaccagcggaccctggccttcgacgccgcctcgaaattcctcatcagctaccagcactggaccttctacccggtaatgtgcatcgccaggataaatcttctggcgcagtccgctgtcttcgtcctgaccgagaagagggtgccgcagcggctgcttgagatcgccggtgtcgccgcgttctgggcttggtacccgttgctggtggcgtgcctgccgaattggtgggagagggtggcgttcgtgcttctcagctttaccttctgcgggatccagcacgtccaattctgcctgaaccacttctcgtccgatgtgtacgtcgggccacccaagggcaacgactggttcgagaagcagacggcaggcacgctcgacatcctgtgccctccttggatggattggttccatggcggcctgcagttccagattgagcaccatctgttcccccgcctgcctcggtgccaccttcggaaggttgcgccggccgtgcgtgacctttgcaagaagcatgggctgacctattccgcagcctccttcttggacgcaaatgtgcttacatggaagacactcagggctgccgcattgcaggccaggagcgccacaggcggcggcggcgctccgaagaatttggtctgggaggcattgaacacccatggatga

SEQ ID NO: 13182 - protein, 463 aa, Zea mays
MPPSADAMPAPGDAACAGDVRLISSKELREHASAADLWISISGDVYDVTPWLPHHPGGDLPLITLAGQDATDAFAAYHPPSARPLLRRFFVGRLSDYTVSPASADYRRLLAQLSSAGLFERVGPTPRVQLALMAVLFYAALYLVLACASASAHMLAGGLIGFVWIQSGWMGHDSGHHRITGHPLLDRVVQVLSGNCLTGLSIAWWKCNHNTHHIACNSLDHDPDLQHMPLFAVSPKLFGNIWSYFYQRTLAFDAASKFLISYQHWTFYPVMCIARINLLAQSAVFVLTEKRVPQRLLEIAGVAAFWAWYPLLVACLPNWWERVAFVLLSFTFCGIQHVQFCLNHFSSDVYVGPPKGNDWFEKQTAGTLDILCPPWMDWFHGGLQFQIEHHLFPRLPRCHLRKVAPAVRDLCKKHGLTYSAASFLDANVLTWKTLRAAALQARSATGGGGAPKNLVWEALNTHG

SEQ ID NO: 13183 - DNA, 1344 bp, Ricinus communis
  CDS (1)..(1344)
atggggttagagaagaagtacataacttctgaagagcttaaaaagcacagcagttctggagatttgtggatctcgattcagggtaaagtttacgatgtaacagaatggatgaaagaacatcctggtggtgatacccctctcctgaatctggctggtcaggacgtaaccgatgcatttattgcgtatcatcctggcactgcctgggcacatcttgacaagctttttacagggtattatcttgaagatttcaaggtatctgaggtgtcgaaggattacagaaagttatattcagaatttgccaaattaggtttgtttgaccagaaaggacatgtagccatgtattcattggcatcagttggtttcttattttgctttgttttatatggcgtcttatgcttttcgagtttttgggctcatatgggtgctgctgttttactaggtgtactttggattcaaagtgcatatgttggtcacgattcgggtcattaccaggtaatgcggagtcgtgggtttaataaacttgctcagcttttagctggaaattgcctaacggggataagtattgcttggtggaagtggacccataatgcacatcatattgcctgtaatagtcttgattttgatcctgatcttcaacacatacctgtttttgcggtatctacgcgtcttttcaattctattagatcatgtttctatgaaagaaaccttaattttgatccgttagcgaggtttcttgttagttaccagcactggactttttatcctgtgatgtgtgttgcaagggttaatttgtatctgcaaacactgctgttattgttttcaacgcgaaaagtccctgacagagcagttaacataatggggattctggttttctggatttggtttcctcttcttgtttcttctttaccggattggccagagagggtgatatttgtgctaacttcctttgctgttacttcattacaacacgtccaattttgtttgaatcatttctcagctgatgtttatttaggacctccaaatgggaacgattggtttgagaagcaggctggtggaactttggatatttcatgctcatcttggatggattgggtttatggtggtttgcaatttcagctcgagcatcatctgtttccaaggttgccaaggtgtcaattgagaagggtttcaccattggtaagggatctatgcaagaagcacaatttgccttacaggagtttgtcgttttgggaggccaatgtatcgacaattaggactcttagaaatgctgccttgcaagctagagacatggccaaccctgttccgaagaacttgctgtgggaagctgttaatactcatggatga

SEQ ID NO: 13184 - protein, 447 aa, Ricinus communis
MGLEKKYITSEELKKHSSSGDLWISIQGKVYDVTEWMKEHPGGDTPLLNLAGQDVTDAFIAYHPGTAWAHLDKLFTGYYLEDFKVSEVSKDYRKLYSEFAKLGLFDQKGHVAMYSLASVGFLFCFVLYGVLCFSSFWAHMGAAVLLGVLWIQSAYVGHDSGHYQVMRSRGFNKLAQLLAGNCLTGISIAWWKWTHNAHHIACNSLDFDPDLQHIPVFAVSTRLFNSIRSCFYERNLNFDPLARFLVSYQHWTFYPVMCVARVNLYLQTLLLLFSTRKVPDRAVNIMGILVFWIWFPLLVSSLPDWPERVIFVLTSFAVTSLQHVQFCLNHFSADVYLGPPNGNDWFEKQAGGTLDISCSSWMDWVYGGLQFQLEHHLFPRLPRCQLRRVSPLVRDLCKKHNLPYRSLSFWEANVSTIRTLRNAALQARDMANPVPKNLLWEAVNTHG

SEQ ID NO: 13185 - DNA, 1344 bp, Ricinus communis
  CDS (1)..(1344)
atggcagaaacaaagaagtacattacaaaagaagatcttgaaaagcacaataaccctggagatctctggatctcaatacaaggcaagatctacaatgttactgattggagcaaagaccatcctggtggtgtgtcgcccttgcttcatcttgctggccaagatgttactgatgcttttgttgcttaccatcctggcactgcttggcaatatcttgacaaattctttactggctatcatcttaaagactattctgtttctgagacatcaaaagattacagaagattagttgctgaattctcaaaattgggtctttttgaaaagaaagggcacattgcgtttattactcttgtctctatggtaatgctacttgctttgagtgtttatggagttctttgctctaatagtacatgggtgcatcttatttctggtggcttaatggggtttatgtggatacaaagtgggtggataggtcatgattctggccattatcaggttatgatgagccgtcgattcaatcgtttggcgcagatcttatctggaaattgtcttgcaggaatcagtattgcctggtggaaatggaaccataacacccatcacattgcttgtaatagtcttgattttgatccagatctgcagcatatgcctttctttgcggtatcctcaaaatttttcagttcaattacatcttatttttatgaaaggaagatgaattttgattgtgctgcaagattcttggttagttatcagcatttgacgttttaccctgtgatgtgttttgctaggattaatttgtttgctcaatctatatctctcctgttatctaagagaagggtggctaataggggtcaagagattcttggagtacttgtgttctggatttggtatcctttccttgtttcttgcttacccaattggggagagagagtgatgtttgttgttgcaagtttctcggttactggaattcagcatgttcagttctgtttgaatcatttctcgtccagtgtttatcttggccctcctagtgcaaatgattggtttgagaaccaaacaaaggggacacttaatataacttgctcatcttggatggattggtttcatggtggattgcagtttcagattgagcaccatttgtttcctcgtttgcctcgatgtcaactcagaaaagtctcaccgtttgtcagggagttatgcaagaagcacaatttgccttatgatagtgcatcattctggaacgctaatgaactgacatttaagactcttcgtgctgcagccttgcaggctagggatctttctaatccaattccaaagaatttagtttgggaagctgttaatactcatggatga

SEQ ID NO: 13186 - protein, 447 aa, Ricinus communis
MAETKKYITKEDLEKHNNPGDLWISIQGKIYNVTDWSKDHPGGVSPLLHLAGQDVTDAFVAYHPGTAWQYLDKFFTGYHLKDYSVSETSKDYRRLVAEFSKLGLFEKKGHIAFITLVSMVMLLALSVYGVLCSNSTWVHLISGGLMGFMWIQSGWIGHDSGHYQVMMSRRFNRLAQILSGNCLAGISIAWWKWNHNTHHIACNSLDFDPDLQHMPFFAVSSKFFSSITSYFYERKMNFDCAARFLVSYQHLTFYPVMCFARINLFAQSISLLLSKRRVANRGQEILGVLVFWIWYPFLVSCLPNWGERVMFVVASFSVTGIQHVQFCLNHFSSSVYLGPPSANDWFENQTKGTLNITCSSWMDWFHGGLQFQIEHHLFPRLPRCQLRKVSPFVRELCKKHNLPYDSASFWNANELTFKTLRAAALQARDLSNPIPKNLVWEAVNTHG

SEQ ID NO: 13187 - DNA, 1347 bp, Borago officinalis
  CDS (1)..(1347)
atggctgctcaaatcaagaaatacattacctcagatgaactcaagaaccacgataaacccggagatctatggatctcgattcaagggaaagcctatgatgtttcggattgggtgaaagaccatccaggtggcagctttcccttgaagagtcttgctggtcaagaggtaactgatgcatttgttgcattccatcctgcctctacatggaagaatcttgataagtttttcactgggtattatcttaaagattactctgtttctgaggtttctaaagattataggaagcttgtgtttgagttttctaaaatgggtttgtatgacaaaaaaggtcatattatgtttgcaactttgtgctttatagcaatgctgtttgctatgagtgtttatggggttttgttttgtgagggtgttttggtacatttgttttctgggtgtttgatggggtttctttggattcagagtggttggattggacatgatgctgggcattatatggtagtgtctgattcaaggcttaataagtttatgggtatttttgctgcaaattgtctttcaggaataagtattggttggtggaaatggaaccataatgcacatcacattgcctgtaatagccttgaatatgaccctgatttacaatatataccattccttgttgtgtcttccaagttttttggttcactcacctctcatttctatgagaaaaggttgacttttgactctttatcaagattctttgtaagttatcaacattggacattttaccctattatgtgtgctgctaggctcaatatgtatgtacaatctctcataatgttgttgaccaagagaaatgtgtcctatcgagctcatgaactcttgggatgcctagtgttctcgatttggtacccgttgcttgtttcttgtttgcctaattggggtgaaagaattatgtttgttattgcaagtttgtcagtgactggaatgcaacaagttcagttctccttgaaccacttctcttcaagtgtttatgttggaaagcctaaagggaataattggtttgagaaacaaacggatgggacacttgacatttcttgtcctccttggatggattggtttcatggtggattgcaattccaaattgagcatcatttgtttcccaagatgcctagatgcaaccttaggaaaatctcgccctacgtgatcgagttatgcaagaaacataatttgccttacaattatgcatctttctccaaggccaatgaaatgacactcagaacattgaggaacacagcattgcaggctagggatataaccaagccgctcccgaagaatttggtatgggaagctcttcacactcatggttaa

SEQ ID NO: 13188 - protein, 448 aa, Borago officinalis
MAAQIKKYITSDELKNHDKPGDLWISIQGKAYDVSDWVKDHPGGSFPLKSLAGQEVTDAFVAFHPASTWKNLDKFFTGYYLKDYSVSEVSKDYRKLVFEFSKMGLYDKKGHIMFATLCFIAMLFAMSVYGVLFCEGVLVHLFSGCLMGFLWIQSGWIGHDAGHYMVVSDSRLNKFMGIFAANCLSGISIGWWKWNHNAHHIACNSLEYDPDLQYIPFLVVSSKFFGSLTSHFYEKRLTFDSLSRFFVSYQHWTFYPIMCAARLNMYVQSLIMLLTKRNVSYRAHELLGCLVFSIWYPLLVSCLPNWGERIMFVIASLSVTGMQQVQFSLNHFSSSVYVGKPKGNNWFEKQTDGTLDISCPPWMDWFHGGLQFQIEHHLFPKMPRCNLRKISPYVIELCKKHNLPYNYASFSKANEMTLRTLRNTALQARDITKPLPKNLVWEALHTHG

SEQ ID NO: 13189 - DNA, 1347 bp, Echium pitardii var. pitardii
  CDS (1)..(1347)
atggattctgcaatcaagaagtacatcaccacagatgagctcaagaagcatgataaaccagatgatctctggatatcaattcaaggaaaaatctatgatgtttcaaactggttgaaggaccatccaggtgggcactatcctttaacgagtcttgcaggccaggatgtaactgatgcatttgttgcgtttcatcctgcgtctgcatggcaaaatctcgatgaattctttaatggttattatcttaaagattactatgtttctgatgtgtccaaagattacagaaagcttgtgtctgagttttctaagatgggtttgtttaaaaaaaacggtcataccgtgtttgtaactttgtcccttattgctatgtcgtttgctatgagtgtgtatggggttttgttttgtcagggtgttttggtgcattggctttgtgggtgtttagtggggattctctggactcagtgtggtttacttggtcatgatgctgggcattatactatgatgccttcttcaaggcttaataagttcgtgtttattctcgccgcaaattgcctttcaggagtaagcattggttggtggacgtggaaccacaatgcacatcacgttgcgtgtaatagcctcgagtatgaccctgatgtacaatatataccattcatcgttgtatcctccaagcttcttacctcgctcacctctcatttccatgaaaaaagattgaagttcgattctttatcaaaattcttcgtaagccatcagcattggacattttaccctgttatgtgttccgctaggctctatctaattgtacaatctttcataatgttattgaccaagagaaatgtgtcccatagaagtcaggaactcttcgggttgatcgtgttctggatttggtacccgtttcttgtttattgtttgcctaattggagtgaaagaataatgtttgttcttcctagctttttcatgactggaattcaacaacttcaattctctttaagtcatgtctcttcaagtgtttatgttggaaagcctaaagggaatgattggtttgagaaacaaacaagtgggacacttgacatttcttgcccttcatggatggattggttttatggtggaacacaattccaaattgagcatcatttattccctaggttgccaaggtgccactttaggacaatctctcccttagtgatggagctatgtaagaagcataatttgaattacaattgtgcatcattttttaagggcaataaaatggtaatcaaaacattaaagaaggcagcattggaggctagggatttagccaagccaaagaatttggaatgtgttggtgttaacactcatgctcaagattag

SEQ ID NO: 13190 - protein, 448 aa, Echium pitardii var. pitardii
MDSAIKKYITTDELKKHDKPDDLWISIQGKIYDVSNWLKDHPGGHYPLTSLAGQDVTDAFVAFHPASAWQNLDEFFNGYYLKDYYVSDVSKDYRKLVSEFSKMGLFKKNGHTVFVTLSLIAMSFAMSVYGVLFCQGVLVHWLCGCLVGILWTQCGLLGHDAGHYTMMPSSRLNKFVFILAANCLSGVSIGWWTWNHNAHHVACNSLEYDPDVQYIPFIVVSSKLLTSLTSHFHEKRLKFDSLSKFFVSHQHWTFYPVMCSARLYLIVQSFIMLLTKRNVSHRSQELFGLIVFWIWYPFLVYCLPNWSERIMFVLPSFFMTGIQQLQFSLSHVSSSVYVGKPKGNDWFEKQTSGTLDISCPSWMDWFYGGTQFQIEHHLFPRLPRCHFRTISPLVMELCKKHNLNYNCASFFKGNKMVIKTLKKAALEARDLAKPKNLECVGVNTHAQD

SEQ ID NO: 13191 - DNA, 1347 bp, Echium sabulicola
  CDS (1)..(1347)
atggctaatgcaatcaagaagtacattactgcagaggagcttaagaagcatgataaagaaggggatctctggatctccattcaaggcaaaatctatgatgtttcagattggttgaaggagcatccaggtgggaagttccccttactgagccttgctggacaagaggtaacagatgcatttgttgcatttcattctggttcaacttggaagcttcttgaaaaattcttcactggttattaccttaaagattactctgtttcagaggtgtccaaagattacaggaagcttgtgtttgagtttaataaaatggggttgtttgacaaaaagggtcatattgttcttgtgactgtgttgtttatagctatgctttttgctatgagtgtttatggggttttgttttgtgagggtgttttggtacatttactttcaggggggttgatgggttttgtctggattcagagtggttggattgggcatgatgctggtcattacattgttatgcctaatcctaggttgaataagcttatgggtattgttgctgcaaattgtttatcaggaataagcattggttggtggaaatggaaccataatgcacaccacattgcttgtaatagtctcgattacgacccggatttgcagtacattccgtttcttgttgtgtcgtcgaagttgtttagctcgctcacctctcatttctatgagaagaaactgacatttgactcgttatcgagattctttgtaagccatcagcattggacgttttacccggttatgtgttctgctagggttaatatgtttgtgcaatctttgataatgttgttgactaagagaaatgtgttttatagaagtcaagaactgttgggattggtggtgttctggatttggtacccattgcttgtttcttgcttgcctaattggggagaaagaataatgttcgtggttgctagtctctcggtgactggaatgcagcaagtgcaattctctttgaaccatttctcgtcgagtgtttatgttggtcagcctaaggggaacgattggttcgagaaacaaacatgtgggacactcgacatttcttgcccttcttggatggattggtttcatggtggattgcaattccaagttgagcatcatttgttccctaagctgcccagatgccaccttcggaaaatctccccgttcgtgatggagttatgcaagaagcataatttgtcttacaattgtgcatcattctccgaggccaatgaaatgacactcagaacattaagggacacagcattgcaggctcgcgatttaaccaagccgctccccaagaatttggtatgggaagcgcttaatactcatggttaa

SEQ ID NO: 13192 - protein, 448 aa, Echium sabulicola
MANAIKKYITAEELKKHDKEGDLWISIQGKIYDVSDWLKEHPGGKFPLLSLAGQEVTDAFVAFHSGSTWKLLEKFFTGYYLKDYSVSEVSKDYRKLVFEFNKMGLFDKKGHIVLVTVLFIAMLFAMSVYGVLFCEGVLVHLLSGGLMGFVWIQSGWIGHDAGHYIVMPNPRLNKLMGIVAANCLSGISIGWWKWNHNAHHIACNSLDYDPDLQYIPFLVVSSKLFSSLTSHFYEKKLTFDSLSRFFVSHQHWTFYPVMCSARVNMFVQSLIMLLTKRNVFYRSQELLGLVVFWIWYPLLVSCLPNWGERIMFVVASLSVTGMQQVQFSLNHFSSSVYVGQPKGNDWFEKQTCGTLDISCPSWMDWFHGGLQFQVEHHLFPKLPRCHLRKISPFVMELCKKHNLSYNCASFSEANEMTLRTLRDTALQARDLTKPLPKNLVWEALNTHG

SEQ ID NO: 13193 - DNA, 1347 bp, Echium plantagineum
  CDS (1)..(1347)
atggctaatgcaatcaagaagtacattactgcagaggagctgaagaagcatgataaagcaggggatctctggatctccattcaaggaaaaatctatgatgtttcagattggttgaaggaccatccaggtgggaacttccccttgctgagccttgctggccaagaggtaactgatgcatttgttgcatttcattctggtacaacttggaagcttcttgaaaaattcttcactggttattaccttaaagattactctgtttctgaggtgtccaaagattacaggaagcttgtgtttgagtttaataaaatgggcttgtttgacaaaaagggtcatattgttcttgtgactgtcttgtttatagctatgttgtttggtatgagtgtttatggggttttgttttgtgagggtgttttggtacatttgcttgctggggggttgatgggttttgtctggattcagagtggttggattggtcatgatgctgggcattatattgttatgcctgatgctaggcttaataagcttatgggtattgttgctgccaattgtttatctggaataagcattggttggtggaaatggaaccataatgcacatcacattgcctgtaatagcctcgattacgacccggatttgcagtacattccgtttcttgttgtgtcgtccaagttgtttagctcgctcacctctcatttctatgaaaagaaactgacatttgactctttatcgagattctttgtaagccatcagcattggacgttttacccggttatgtgtatggctagggttaatatgtttgtgcagtctctgataatgttgttgactaagcgaaatgtgttctatagaagtcaagaactgttgggattggtggtgttttggatttggtacccgttgcttgtttcttgcttgcctaattggggagaacgagtaatgttcgttgttgctagtctctcggtgactggaatgcaacaagtgcagttctctttgaaccatttctcgtcgagtgtttatgttggtcagcctaaagggaacgattggttcgagaaacaaacatgtgggacgctcgacatttcttgcccttcttggatggattggtttcatggtggattgcaattccaagttgagcatcatttgttccctaagctgcccagatgccaccttcggaaaatctccccgttcgtgatggagttatgcaagaagcataatttgtcttacaattgtgcatcattctccgaggccaacaatatgacactcagaacattaagggacacagcattgcaagctcgcgatttaaccaagccgctccccaagaatttggtatgggaagctcttaatactcatggttaa

SEQ ID NO: 13194 - protein, 448 aa, Echium plantagineum
MANAIKKYITAEELKKHDKAGDLWISIQGKIYDVSDWLKDHPGGNFPLLSLAGQEVTDAFVAFHSGTTWKLLEKFFTGYYLKDYSVSEVSKDYRKLVFEFNKMGLFDKKGHIVLVTVLFIAMLFGMSVYGVLFCEGVLVHLLAGGLMGFVWIQSGWIGHDAGHYIVMPDARLNKLMGIVAANCLSGISIGWWKWNHNAHHIACNSLDYDPDLQYIPFLVVSSKLFSSLTSHFYEKKLTFDSLSRFFVSHQHWTFYPVMCMARVNMFVQSLIMLLTKRNVFYRSQELLGLVVFWIWYPLLVSCLPNWGERVMFVVASLSVTGMQQVQFSLNHFSSSVYVGQPKGNDWFEKQTCGTLDISCPSWMDWFHGGLQFQVEHHLFPKLPRCHLRKISPFVMELCKKHNLSYNCASFSEANNMTLRTLRDTALQARDLTKPLPKNLVWEALNTHG

SEQ ID NO: 13195 - DNA, 1377 bp, Helianthus annuus
  CDS (1)..(1377)
atggtgtcgccatccatagaagtgttgaattcaattgctgatggaaaaaaatacataacatcaaaagagttaaagaagcataacaaccctaatgacctttggatctcaattttgggcaaagtttacaacgttacagaatgggctaaagagcatccgggtggcgatgccccgttgattaatctcgcgggccaggatgtaactgacgcatttatcgcatttcatcccggtactgcgtggaagcatctagacaaactattcaccgggtatcacttaaaagattaccaggtttctgacatttctagagactaccggaaactcgcttcagagtttgcaaaagcgggtatgtttgagaagaaaggtcacggtgtaatttactcactttgtttcgtgtcgctactgctttccgcttgtgtgtatggcgtgttatattccggaagcttctggattcatatgctttcgggggcgatattgggattagcatggatgcaaattgcctatttgggtcatgacgcgggtcattaccaaatgatggcgacccgcgggtggaacaagtttgccggaatatttatcgggaattgtataaccggaataagcatcgcgtggtggaaatggacgcataacgcacatcacatcgcttgtaacagtcttgattatgatcctgatcttcagcatttaccgatgttagccgtttcttccaagctttttaactcaataacttctgttttctatgggagacagttgacctttgacccgttagcccggttcttcgtgagctaccagcattacttatattacccgatcatgtgtgtggcccgggtcaacctctatttacaaacaatcctgttgctgatttcaaaacgaaagattcccgacagaggtttaaacatactcggaaccctaatcttctggacgtggtttccgttacttgtttctcgcttaccgaactggcccgaacgcgtggcgtttgtgttggttagcttctgtgtaacgggtatacaacatattcagtttacactgaaccatttttctggggatgtttacgtgggcccgccaaaaggagacaattggttcgagaaacaaacgcgtgggaccatcgatatcgcgtgttcttcttggatggattggtttttcggaggtttacagtttcaacttgagcaccatttgtttcctaggttgccacggtgtcacttgaggtcgatttctcctatatgtagagaactctgcaagaaatataacttaccttatgtgagtttgtcgttttatgatgcgaatgtaacgaccttgaagacgcttaggacagcggctctacaggcacgtgaccttacgaacccggccccacagaatttagcttgggaagctttcaacacccatggttga

SEQ ID NO: 13196 - protein, 458 aa, Helianthus annuus
MVSPSIEVLNSIADGKKYITSKELKKHNNPNDLWISILGKVYNVTEWAKEHPGGDAPLINLAGQDVTDAFIAFHPGTAWKHLDKLFTGYHLKDYQVSDISRDYRKLASEFAKAGMFEKKGHGVIYSLCFVSLLLSACVYGVLYSGSFWIHMLSGAILGLAWMQIAYLGHDAGHYQMMATRGWNKFAGIFIGNCITGISIAWWKWTHNAHHIACNSLDYDPDLQHLPMLAVSSKLFNSITSVFYGRQLTFDPLARFFVSYQHYLYYPIMCVARVNLYLQTILLLISKRKIPDRGLNILGTLIFWTWFPLLVSRLPNWPERVAFVLVSFCVTGIQHIQFTLNHFSGDVYVGPPKGDNWFEKQTRGTIDIACSSWMDWFFGGLQFQLEHHLFPRLPRCHLRSISPICRELCKKYNLPYVSLSFYDANVTTLKTLRTAALQARDLTNPAPQNLAWEAFNTHG

SEQ ID NO: 13197 - DNA, 1347 bp, Camellia sinensis
  CDS (1)..(1347)
atggctgaacccaccaagcgattcatcacatttgaatccctcaaagcacacaacaaaccaggcgatctatggatttctattcaaggcaaggtctacgatgtctctgattgggctaaagaacaccctggtggctatcttcccttgttgagcctcgcaggccaagacgtgaccgatgcttttgtcgcgtaccatccaaacactgcttggcaatatcttgacaagttcttcaatggctatttcatagaagactactctgtctctgaggtttccaaagattacagaatgcttgtttctgaattttcccaaatgggtttgtttgaaaaaaaaggccatcttgctttaatttcgttttgtttcatggcattgttgttttctgtgagtgtttggggtgttttgtgttgttctagcatttgggttcatcttgtttgtggtggattgatggggggtttgtggattcagagtggttgggcagggcatgattcagggcactatcagattatgcctagcaaaaaattgaatcgatttgttcagatcttaactgggaattgccttgctgggatcagcattgcttggtggaaatggaatcacaatgctcatcacatttcttgtaacagtctggatttcgatccggatctccaacacatgcctttctttgtggtatcttcgaaactattcaattccctcacttcttgcttttatgaaagaaagatgccttttgattcagttactagattgtttgtgagttaccaacattggactttctatcctgttatgtgctttgctagactcaatctctttgcaccatcattcatgttgttgtgttctaagcgaaaagtacccaacagggttcaggaaattttggggatttccgtgttttggtatttggatccccttcttgtttcttgtttacccaatttgggagaaagactaatgtttgtccttgctagctttgctgtttctggaattcaacatgttcagttctgtttgaaccatttctcatcaattgtctatgtcggtccgcctagtgggactgattggtgtgggaaacaaactcgtgggacgctcgatataacatgtccgtcttgggtggactggtttcatggtggattgcagtttcagattgagcaccatttgtttccccgattgcctcgttcccagctgagaaaagtctctcccttcgtgagagagctctgcaagaagcacaatttgccttatgatactgcatcattctggaaggccaatgcattgacagttaggacccttaggaacgcggccttgcaggctcgggatgttgctaatccagttcagaagaatttagtctgggaggctgtcaatactcatggatga

SEQ ID NO: 13198 - protein, 448 aa, Camellia sinensis
MAEPTKRFITFESLKAHNKPGDLWISIQGKVYDVSDWAKEHPGGYLPLLSLAGQDVTDAFVAYHPNTAWQYLDKFFNGYFIEDYSVSEVSKDYRMLVSEFSQMGLFEKKGHLALISFCFMALLFSVSVWGVLCCSSIWVHLVCGGLMGGLWIQSGWAGHDSGHYQIMPSKKLNRFVQILTGNCLAGISIAWWKWNHNAHHISCNSLDFDPDLQHMPFFVVSSKLFNSLTSCFYERKMPFDSVTRLFVSYQHWTFYPVMCFARLNLFAPSFMLLCSKRKVPNRVQEILGISVFWYLDPLLVSCLPNLGERLMFVLASFAVSGIQHVQFCLNHFSSIVYVGPPSGTDWCGKQTRGTLDITCPSWVDWFHGGLQFQIEHHLFPRLPRSQLRKVSPFVRELCKKHNLPYDTASFWKANALTVRTLRNAALQARDVANPVQKNLVWEAVNTHG

SEQ ID NO: 13199 - DNA, 1341 bp, Anemone leveillei
  CDS (1)..(1341)
  misc_feature (1269)..(1269): n is a, g, c or t
atggcggagaaaaggagagaaatctcatctcaagaactagctcaacacacaaacaaaggtgacttatggatctcaatccaaggtaaagtatacgatgtaagtgaatgggttaaagatcatccaggcggtgatgctccattgatgaatctagctggacaagatgtcacagatgcatttgtagctttccatccaggttccgcttggaaatatctggataaattccatatcggatatttatcagattatgtagtttccgatgtgtctaaggattatcggaaacttgcttctgagttttctaaagctggtctgtttgagaaaaagggccatgggattttcatgtctttgttgtcagttggtattatgtttgttgttattttatcgggtgtgttattatctggtaatacttgggttcatgctgcttgtgctggtttgttgggtatattgtggatgcagattggatttgtcggacatgattctgggcattataatgttatgcttacccctaaattgaataggtttgttcagatttttacgggtaattgtgtaactgggattagcattgggtggtggaggtggacgcacactgcacatcatattgccgtgaacagtcttgactatgatcccgatcttcagcatgtgccgtttctggcagtgtctaaggatattctcagttcgcttacgtccaagttttatggaaggaagatgacttttgatgctgctgctaggttcctagttagctatcagcattggagtttttatcctgttatggctgttgcaaggatcaatctgtttacgcaatcgtttctgttattgttgtcgagtaggccgatgcaggataggtatttggagttgttgggactgatggtgttttggggttggtattctctattggtgtcttgcttgcctaattggggggaaagagctatgttcgttgcggttagttttgcggtttctggaattcagcatgttcaattctgtttaaaccatttctccgctcatacttatgttggacctccgcgtgcaaatgattggtttgagaagcagacgaaaggttctattgatatttcgtgttcgacttggatggattggtttcatggtggattgcagtttcaggttgagcatcatttgttcccccgattgcctagatgccatttgaggaagatttctccttttgtcaaggaactttgcaggaagcataatttgccttatgtcagtgtttccttctttgaggccaataagatgaccattgctactctaaggaatgcagcnttacaggcgcgtgatcttaccaaccctattcccaagaatttggtctgggaagccttcaacacacacggatag

SEQ ID NO: 13200 - protein, 446 aa, Anemone leveillei
MAEKRREISSQELAQHTNKGDLWISIQGKVYDVSEWVKDHPGGDAPLMNLAGQDVTDAFVAFHPGSAWKYLDKFHIGYLSDYVVSDVSKDYRKLASEFSKAGLFEKKGHGIFMSLLSVGIMFVVILSGVLLSGNTWVHAACAGLLGILWMQIGFVGHDSGHYNVMLTPKLNRFVQIFTGNCVTGISIGWWRWTHTAHHIAVNSLDYDPDLQHVPFLAVSKDILSSLTSKFYGRKMTFDAAARFLVSYQHWSFYPVMAVARINLFTQSFLLLLSSRPMQDRYLELLGLMVFWGWYSLLVSCLPNWGERAMFVAVSFAVSGIQHVQFCLNHFSAHTYVGPPRANDWFEKQTKGSIDISCSTWMDWFHGGLQFQVEHHLFPRLPRCHLRKISPFVKELCRKHNLPYVSVSFFEANKMTIATLRNAALQARDLTNPIPKNLVWEAFNTHG

SEQ ID NO: 13201 - DNA, 1341 bp, Anemone leveillei
  CDS (1)..(1341)
atggcagagaagagaagaagcatttcttctgatgacctgaggagtcacaacaagcctggagacgtatggatctccattcaaggtaagatctacgatgttaccgaatggggtaaagaccatcctggaggtgaaggtcctttgctaaatctggctgggcaagatgtcacagatgcatttgtagctttccatcctggttctgcttggaaaaatctcgataagtttcatatcgggtatttacaagattatgtagtttctgacgtgtccaaagattatcggaaacttgtttctgagttttcgaaagccggtctctacgagaaaaaagggcacgggcacctgattcgacttctggtcatgagtttagtgtttatagctagcgtttcgggtgttgtattatctgataaaacttctgttcatgttggctctgctgttttgttggctgttatttggatgcagtttggatttataggtcatgattcaggccattacaatatcatgactagcccggaactgaacagatacatgcagatattttcagtaaacgtcgtttcaggggtgagcgtcggatggtggaagcggtatcacaatgcacatcacattgcagtcaatagtctggaatatgatccagatcttcagtatgttcccttcttagtggtatctaccgccattttcgattcactcacatctcatttttaccgaaagaaaatgacatttgatgctgttgcaaggtttctagttagcttccagcattggactttttatccactgatggctattgggagggttagttttttggcgcagtcaattggagtgttgctatccaagaaaccgctgccggatagacatttggagtggtttggtttggtggtgttttgggcttggtattcacttctaatttcttgcttgccgaattggtgggaaagagtgatttttattgcagtcaactttgccgtcactggaattcagcatgttcagttctgtctaaaccattactcagctcaaacttacatcggtgctccttgcgcgaatgattggttcgagaagcagactaaaggttcgatcgacatatcatgttcgccttggacggattggtttcacggcgggttacagtttcagattgagcatcatttgttccctagaatgcctcggtgcaatttaagaaagatttcaccctttgtgaaggaactttgcaggaagcacaacttggtttataccagtgtatcattcttcgagggcaatcggaggactctcgcaactctgaagaatgcagctttgaaggcgcgtgatctcaccagcccaattccgaagaatttggtttgggaggccgtccacacacacggataa

SEQ ID NO: 13202 - protein, 446 aa, Anemone leveillei
MAEKRRSISSDDLRSHNKPGDVWISIQGKIYDVTEWGKDHPGGEGPLLNLAGQDVTDAFVAFHPGSAWKNLDKFHIGYLQDYVVSDVSKDYRKLVSEFSKAGLYEKKGHGHLIRLLVMSLVFIASVSGVVLSDKTSVHVGSAVLLAVIWMQFGFIGHDSGHYNIMTSPELNRYMQIFSVNVVSGVSVGWWKRYHNAHHIAVNSLEYDPDLQYVPFLVVSTAIFDSLTSHFYRKKMTFDAVARFLVSFQHWTFYPLMAIGRVSFLAQSIGVLLSKKPLPDRHLEWFGLVVFWAWYSLLISCLPNWWERVIFIAVNFAVTGIQHVQFCLNHYSAQTYIGAPCANDWFEKQTKGSIDISCSPWTDWFHGGLQFQIEHHLFPRMPRCNLRKISPFVKELCRKHNLVYTSVSFFEGNRRTLATLKNAALKARDLTSPIPKNLVWEAVHTHG

SEQ ID NO: 13203 - DNA, 1347 bp, Argania spinosa
  CDS (1)..(1347)
atggctgctcaaatcaagaaatacattacctcagatgaactcaagaaccacgataaacccggagatctatggatctcgattcttgggaaagcctatgatgtttcggattgggtgacagaccatccaggtggcagctttcccttgaagagtcttgctggtcaagaggtaactgatgcatttgttgcattccatcctgcctctacatggaagaatcttgataagtttttcactgggtattatcttaaagattactctgtttctgaggtttctaaagattatagcaagcttgtgtttgagttttctaaaatgggtttgtatgacaaagcaggtcatattatgtttgcaactttgtgctttatagcaatgctgtttgctatgagtgtatatggggttttgcgttgtgagggtgttctggtacatttgttttctgggtgcttgatggggtttctttggattcagagtggttggattggacatgatcctgggcattatatggtagtgtctgattcaaggcttaataagtttatgggtatttttgctgcaaattgtctttcaggaataagtattggttggtcgaaatggaaccataatgcacatcacattgcctgtaatagccttgaatatgaccctgatttacaatatataccattccttgttgtgtcttccaagttttttggttcactcacctctcatttctatgagaaaaggttgactattgactctttatcaagattctttgtaagttatcaacattggacattttacactattatgtgtgctgctaggctcaatatgtatgtacaatctctcataatgttgttgaccaagagaaatgtgtcctatcgagctcatgaactcttgggatgcctagtgttctcgatttggtacccgttgcttgtttcttgtttgcctaattggggtgaaagaattatgtttgttattgcaagtttgtcagtgactggaatgcaacaagttcagttctccttgaaccacttctcttcaagtgtttatgttggaaagcctaacgggaataattggtttgagacacaaacggatgggacacttgacatttcttgtcctccttggatggattggtttcatggtggattgcaattccaaattgagcatcatttgtttcccaagatgcctagatgcaaccttaggacaatctcgccctacgtgatcgagttatgcaagaaacataatttgccttacaattatgcatctttctccaaggccaatgaaatgacactcagaacattgaggaacacagcattgcaggctagggatataaccaagccgctcccgaagaatttggtatgggaagctcttcacactcatggttaa

SEQ ID NO: 13204 - protein, 448 aa, Argania spinosa
MAAQIKKYITSDELKNHDKPGDLWISILGKAYDVSDWVTDHPGGSFPLKSLAGQEVTDAFVAFHPASTWKNLDKFFTGYYLKDYSVSEVSKDYSKLVFEFSKMGLYDKAGHIMFATLCFIAMLFAMSVYGVLRCEGVLVHLFSGCLMGFLWIQSGWIGHDPGHYMVVSDSRLNKFMGIFAANCLSGISIGWSKWNHNAHHIACNSLEYDPDLQYIPFLVVSSKFFGSLTSHFYEKRLTIDSLSRFFVSYQHWTFYTIMCAARLNMYVQSLIMLLTKRNVSYRAHELLGCLVFSIWYPLLVSCLPNWGERIMFVIASLSVTGMQQVQFSLNHFSSSVYVGKPNGNNWFETQTDGTLDISCPPWMDWFHGGLQFQIEHHLFPKMPRCNLRTISPYVIELCKKHNLPYNYASFSKANEMTLRTLRNTALQARDITKPLPKNLVWEALHTHG

SEQ ID NO: 13205 - DNA, 1350 bp, Arabidopsis thaliana
  CDS (1)..(1350)
atggcggaagagacggagaaaaagtacattacgaacgaagatcttaaaaaacacaacaaatctggagatctatggatcgcgattcaaggcaaggtctacaacgtctccgattggattaaaactcatcccggaggcgacacggtgattctcaatctcgttggtcaagacgtcaccgatgctttcatcgcatttcatcccggaaccgcttggcaccatctcgaccatctcttcaccggttaccacatcagagatttccaagtctccgaagtctcacgcgattaccgtcgtatggctgccgagtttcgtaaactcggtctcttcgaaaacaaaggtcacgttactctctacactctagccttcgtcgccgccatgttcctcagagttctctacggtgttttggcttgtacctccgtcttcgctcaccaaatcgccgccgcgcttctcggtctcctctggatccagagcgcttacataggtcacgattctggtcattacgttatcatgtcgaacaaatcttataacagattcgctcagcttctctccggtaactgtctcaccggaatctcaatcgcgtggtggaaatggactcacaatgctcatcatctagcttgtaacagcctcgattacgatccagatctacaacacatccctgtcttcgccgtctccaccaaattcttctcctcattgacctcgagattctacgatcggaaactcacgtttgatccagtcgcgagattcttagtcagctatcaacactttacttattatccagttatgtgctttggaagaatcaatctcttcattcaaacgtttctcttgctcttctccaaacgtgaagtaccagatcgtgctttaaacttcgccggaatcttagtcttctggacttggttcccactcttagtctcatgtctaccaaactggcctgagagattcttcttcgtcttcacaggcttcaccgtcacggcgcttcaacacattcaattcacgcttaaccatttcgctgctgatgtctacgttggtccacccaccggtagcgactggttcgagaagcaagcggcgggaacaatcgatatctcttgtagatcatacatggattggttctttggtggattacagtttcagcttgagcatcatttgttccctcgcttacctcgttgccatctccggaaagtttctccggtggttcaagagctttgcaagaagcataatcttccgtataggagtatgtcgtggtttgaagcaaatgtgttgaccattaacactttgaagacagcagcttatcaagctagagacgtggctaatccggtggttaagaacttggtttgggaagctttgaatactcatggctaa

SEQ ID NO: 13206 - protein, 449 aa, Arabidopsis thaliana
MAEETEKKYITNEDLKKHNKSGDLWIAIQGKVYNVSDWIKTHPGGDTVILNLVGQDVTDAFIAFHPGTAWHHLDHLFTGYHIRDFQVSEVSRDYRRMAAEFRKLGLFENKGHVTLYTLAFVAAMFLRVLYGVLACTSVFAHQIAAALLGLLWIQSAYIGHDSGHYVIMSNKSYNRFAQLLSGNCLTGISIAWWKWTHNAHHLACNSLDYDPDLQHIPVFAVSTKFFSSLTSRFYDRKLTFDPVARFLVSYQHFTYYPVMCFGRINLFIQTFLLLFSKREVPDRALNFAGILVFWTWFPLLVSCLPNWPERFFFVFTGFTVTALQHIQFTLNHFAADVYVGPPTGSDWFEKQAAGTIDISCRSYMDWFFGGLQFQLEHHLFPRLPRCHLRKVSPVVQELCKKHNLPYRSMSWFEANVLTINTLKTAAYQARDVANPVVKNLVWEALNTHG

SEQ ID NO: 13207 - DNA, 1341 bp, Aquilegia vulgaris
  CDS (1)..(1341)
atgacagaaaagagaagagaaattacatctgaagaattgaagaaacataacaaacatggtgatatatggatctcaattcaaggtaagatctatgatgtttcagaatggattaaagatcatccaggtggtgaagcacctttattgaatctagctggtcaagatgttacagatgcatttgttgcttttcatccaggttctgcttggaaatatcttgataagttttttattgggtatttaaaagattatacaatttctgaagtttctaaagattatagaaaacttgttgctgagttttctaaagcaggtctttatgataaaaaaggtcatcacatccttttttctcttacttttgtcactattttaatggctattagtgttatgggtgttttgtgttctgataagacttgggctcatcttgcttctgctgctgttttggggcttctttggatgcaaattgggtttgttgggcatgattcaggacattacaatatcatgcttactcctaaattgaatcgatttatgcagatttttaccggaaattgtattacaggaatcagcattgggtggtggaagtggaaccacaatgcgcatcacattgctgttaacagtttagattatgatccagatcttcaacatataccctttttggctgtgtcttccgatattttcagttcactcacatctaagttttatggaaggaaaatgacttttgatccaattgcaagatttctgattagtttccagcattggactttttatccagtcatggcaattgcgagaattaatttatttgctcagtcttttatattgttgctttcaaagaggcctgtgacggatagagcattggaattgcttggtttgatggtgttttggtgctggtattctcttcttctagcttgcttgcccaattggggggagagagcgatgtatgttgccatgagttttgcggtttctgggtatcagcatattcaattctgcttgaaccatttttcagctcacacttatgttgggcctcctccgtgcaatgactggtttgagaagcagactaaaggtccatttgacatctcgtgttcgacttggatggattggtttcatggtggactgcaatttcaggttgagcatcatttgttccctcgattgcctcggtgccatttgagaaagatttcgccttttgtgaaggaactctgcaggaaacacaacttgccttatatcagtgtttccttctttgaggctaataagatgacaattgcaactcttagaaatgctgcgttgcaggcgcgtgatctcaccaatccaattccaaagaatctggtctgggaagctgttaacacccatggttga

SEQ ID NO: 13208 - protein, 446 aa, Aquilegia vulgaris
MTEKRREITSEELKKHNKHGDIWISIQGKIYDVSEWIKDHPGGEAPLLNLAGQDVTDAFVAFHPGSAWKYLDKFFIGYLKDYTISEVSKDYRKLVAEFSKAGLYDKKGHHILFSLTFVTILMAISVMGVLCSDKTWAHLASAAVLGLLWMQIGFVGHDSGHYNIMLTPKLNRFMQIFTGNCITGISIGWWKWNHNAHHIAVNSLDYDPDLQHIPFLAVSSDIFSSLTSKFYGRKMTFDPIARFLISFQHWTFYPVMAIARINLFAQSFILLLSKRPVTDRALELLGLMVFWCWYSLLLACLPNWGERAMYVAMSFAVSGYQHIQFCLNHFSAHTYVGPPPCNDWFEKQTKGPFDISCSTWMDWFHGGLQFQVEHHLFPRLPRCHLRKISPFVKELCRKHNLPYISVSFFEANKMTIATLRNAALQARDLTNPIPKNLVWEAVNTHG

SEQ ID NO: 13209 - DNA, 1347 bp, Echium pitardii var. pitardii
  CDS (1)..(1347)
atggctaatgcaatcaagaagtacattactgcagaagagctgaagaagcatgataaagaaggggatctctggatctccattcaaggcaaggtctatgatgtttcagattggttgaaggaccatccaggtgggaagttccccttgctgagccttgctggacaagaggtaacagatgcatttgttgcatttcattctggttcaacttggaagcttcttgatagtttcttcactggctattatcttaaagattactctgtttcagaggtgtccaaagattacaggaagcttgtgtttgagtttaataaaatggggttgtttgacaaaaagggtcatattgtgcttgtgactgtgttttttatagctatgatgtttgctatgagtgtttatggggttttgttttgtgagggtgttttggtacatttacttgcaggggggttgatggggtttgtctggattcagagtgggtggattgggcatgatgctgggcattatatagttatgcctaatccaaagcttaataagcttatgggtattgttgctagtaattgcctttcaggaataagcattggttggtggaaatggaaccacaatgcacatcacattgcctgtaatagcctcgattatgacccggatttacaatacataccgtttcttgttgtgtcgtcgaagttgtttagctcgctcacctctcatttctatgaaaagaaactcacatttgactcgttatcgagattctttgtaagccatcaacattggacgttttacccagttatgtgttccgctagggtcaatatgtttgtgcaatcgctgataatgttgttgactaagagaaatgtgttctatagaagtcaagaactgttgggattggtggtgttctggatttggtacccattgcttgtttcttgcttgcctaattggggagaaaggataatgtttgttgttgctagtctctcggtgactggattgcaacaagtgcagttctctttgaaccatttcgcggcgagtgtttatgttggtcagcctaaagggatcgattggttcgagaaacaaacatgtgggacactcgacatttcttgcccttcttggatggattggtttcatggtggattgcaattccaagttgagcatcatttgttccctaagctgcccagatgccaccttaggaaaatctccccattcgtgatggagttatgcaagaagcacaatttgtcttacaattgtgcatcattctcccaggccaatgaaatgacactcagaacattaagggacacagctttgcaggctcgcgatttaaccaagccgctccccaagaacttggtatgggaagctcttaatactcatggttaa

SEQ ID NO: 13210 - protein, 448 aa, Echium pitardii var. pitardii
MANAIKKYITAEELKKHDKEGDLWISIQGKVYDVSDWLKDHPGGKFPLLSLAGQEVTDAFVAFHSGSTWKLLDSFFTGYYLKDYSVSEVSKDYRKLVFEFNKMGLFDKKGHIVLVTVFFIAMMFAMSVYGVLFCEGVLVHLLAGGLMGFVWIQSGWIGHDAGHYIVMPNPKLNKLMGIVASNCLSGISIGWWKWNHNAHHIACNSLDYDPDLQYIPFLVVSSKLFSSLTSHFYEKKLTFDSLSRFFVSHQHWTFYPVMCSARVNMFVQSLIMLLTKRNVFYRSQELLGLVVFWIWYPLLVSCLPNWGERIMFVVASLSVTGLQQVQFSLNHFAASVYVGQPKGIDWFEKQTCGTLDISCPSWMDWFHGGLQFQVEHHLFPKLPRCHLRKISPFVMELCKKHNLSYNCASFSQANEMTLRTLRDTALQARDLTKPLPKNLVWEALNTHG

SEQ ID NO: 13211 - DNA, 1347 bp, Echium gentianoides
  CDS (1)..(1347)
atggctaatgcaatcaagaagtacattactgcagaggagctgaagaagcatgataaagaaggggatctttggatctccattcaaggcaaggtctatgatgtttcagattggttgaaggaccatccaggtgggaagttccccttgctgagccttgctggacaagaggtaacagatgcatttgttgcatttcattctggttcaacttggaagtttcttgatagtttcttcactggctattatcttaaagattactctgtttctgaggtgtccaaagattacaggaagcttgtgtttgagtttaataaaatggggttgtttgacaaaaagggtcatattgtgcttgtgactgtgttgtttatagctatgatgtttgctatgagtgtttatggggttttgttttgtgagggtgttttggtacatttgcttgcaggggggttgatggggtttgtctggattcagagtgggtggattgggcatgatgctgggcattatatagttatgcctaatccaaggcttaataagcttatgggtattgttgctggtaattgcctttcaggaataagcattggttggtggaaatggaaccataatgcacatcacattgcctgtaatagcctcgattatgacccggatttacaatacataccgtttcttgttgtgtcgtccaagttgtttagctcgctcacctctcatttctatgaaaagaaactgacatttgactcgttatcgagattctttgtaagccatcaacattggacgttttacccggttatgtgttccgctagggtcaatatgtttgtgcaatcgctcataatgttgttgactaagagaaatgtgttctatagaagtcaagaactgttgggattggtggtgttctggatttggtacccattgcttgtttcttgcttgcctaattggggagaaagaataatgtttgttgttgctagtctctcggtgactggaatgcaacaagtgcagttctctttgaaccatttctcggcgagtgtttatgttggtcagcctaaagggaacgattggttcgagaaacaaacatgtgggacactcgacatttcttgcccttcttggatggattggtttcatggtggattgcaattccaagtagagcatcatttgttccctaagctgcccagatgccaccttaggaaaatctccccattcgtgatggagttatgcaagaagcacaatttgtcttacaattgtgcatcattctccgaggccaatgaaatgacactcagaacattaagggacacagcattgcaggctcgcgatttaaccaagccgctccccaagaacttggtatgggaagctcttaatactcatggttaa

SEQ ID NO: 13212 - protein, 448 aa, Echium gentianoides
MANAIKKYITAEELKKHDKEGDLWISIQGKVYDVSDWLKDHPGGKFPLLSLAGQEVTDAFVAFHSGSTWKFLDSFFTGYYLKDYSVSEVSKDYRKLVFEFNKMGLFDKKGHIVLVTVLFIAMMFAMSVYGVLFCEGVLVHLLAGGLMGFVWIQSGWIGHDAGHYIVMPNPRLNKLMGIVAGNCLSGISIGWWKWNHNAHHIACNSLDYDPDLQYIPFLVVSSKLFSSLTSHFYEKKLTFDSLSRFFVSHQHWTFYPVMCSARVNMFVQSLIMLLTKRNVFYRSQELLGLVVFWIWYPLLVSCLPNWGERIMFVVASLSVTGMQQVQFSLNHFSASVYVGQPKGNDWFEKQTCGTLDISCPSWMDWFHGGLQFQVEHHLFPKLPRCHLRKISPFVMELCKKHNLSYNCASFSEANEMTLRTLRDTALQARDLTKPLPKNLVWEALNTHG

SEQ ID NO: 13213 - DNA, 1341 bp, Borago officinalis
  CDS (1)..(1341)
atggagggtacaaagaaatatatatcagtaggagagctagagaagcacaaccaactaggggatgtttggatttcaatccaggggaaagtttacaatgtcacagattggatcaagaaacatcctggtggagatgttccaattatgaatcttgctggtcaagatgctacagatgcattcatagcttaccatccaggtacagcttggaaaaatcttgaaaatttgtttactgggtatcatctggaggattatcttgtttctgagatttcaaaggattacaggaagcttgcttctgagttttctaaggccgggttgtttgaaaagaaaggtcatactgtgatttattgtctttcatttattgcattgttgctttgtggttgtgtttatggtgttttgtgtagcaacagtttgtgggtgcatatgttgtctggagctatgttgggaatgtgttttattcaggcagcttatttaggtcatgattcagggcattatactatgatgagttccaaggggtataataagtttgcacaagttctgaatggaaattgcttgactgggattagtatagcctggtggaaatggactcacaacgcccaccatattgcgtgtaatagcctagattatgaccctgatcttcaacatttgcctgtttttgcggttccttcgagtttctttaagtcgttgacttctcggttctatggaagggaactaacctttgatgggctgtctcgttttttagtaagctaccaacactttactatctaccttgtgatgatttttggaaggattaatctttatgttcagacattcttgctgttgttctcaactaggaaagtgcctgatagagctttgaacatcattgggatacttgtttactggacttggttcccatatcttgtttcatgtttgcctaattggaacgaaagagtgttgttcgttcttacatgtttctccgtcaccgctctccagcatattcaatttactttgaaccattttgctgcagatgtctatgttggaccaccaacgggaaccaattggtttgagaaacaggcagccgggactattgatatatcatgttcttcttggatggattggttctttgggggattgcaattccagcttgaacaccacttgttccctaggatgcctagatgtcagttgagaaacatttctcccatagttcaagattattgtaagaaacacaatttgccttataggagtttgtcattctttgatgcaaatgtggcaacaattaagactctcagaacagcagcgcttcaagctagagacctcaccgttgttccacagaatctgctgtgggaagctttcaatacccatggctga

SEQ ID NO: 13214 - protein, 446 aa, Borago officinalis
MEGTKKYISVGELEKHNQLGDVWISIQGKVYNVTDWIKKHPGGDVPIMNLAGQDATDAFIAYHPGTAWKNLENLFTGYHLEDYLVSEISKDYRKLASEFSKAGLFEKKGHTVIYCLSFIALLLCGCVYGVLCSNSLWVHMLSGAMLGMCFIQAAYLGHDSGHYTMMSSKGYNKFAQVLNGNCLTGISIAWWKWTHNAHHIACNSLDYDPDLQHLPVFAVPSSFFKSLTSRFYGRELTFDGLSRFLVSYQHFTIYLVMIFGRINLYVQTFLLLFSTRKVPDRALNIIGILVYWTWFPYLVSCLPNWNERVLFVLTCFSVTALQHIQFTLNHFAADVYVGPPTGTNWFEKQAAGTIDISCSSWMDWFFGGLQFQLEHHLFPRMPRCQLRNISPIVQDYCKKHNLPYRSLSFFDANVATIKTLRTAALQARDLTVVPQNLLWEAFNTHG

SEQ ID NO: 13215 - DNA, 1347 bp, Borago officinalis
  CDS (1)..(1347)
atggctgctcaaatcaagaaatacattacctcagatgaactcaagaaccacgataaacccggagatctatggatctcgattcaagggaaagcctatgatgtttcggattgggtgaaagaccatccaggtggcagctttcccttgaagagtcttgctggtcaagaggtaactgatgcatttgttgcattccatcctgcctctacatggaagaatcttgataagtttttcactgggtattatcttaaagattactctgtttctgaggtttctaaagattataggaagcttgtgtttgagttttctaaaatgggtttgtatgacaaaaaaggtcatattatgtttgcaactttgtgctttatagcaatgctgtttgctatgagtgtttatggggttttgttttgtgagggtgttttggtacatttgttttctgggtgtttgatggggtttctttggattcagagtggttggattggacatgatgctgggcattatatggtagtgtctgattcaaggcttaataagtttatgggtatttttgctgcaaattgtctttcaggaataagtattggttggtggaaatggaaccataatgcacatcacattgcctgtaatagccttgaatatgaccctgatttacaatatataccattccttgttgtgtcttccaagttttttggttcactcacctctcatttctatgagaaaaggttgacttttgactctttatcaagattctttgtaagttatcaacattggacattttaccctattatgtgtgctgctaggctcaatatgtatgtacaatctctcataatgttgttgaccaagagaaatgtgtcctatcgagctcaggaactcttgggatgcctagtgttctcgatttggtacccgttgcttgtttcttgtttgcctaattggggtgaaagaattatgtttgttattgcaagtttatcagtgactggaatgcaacaagttcagttctccttgaaccacttctcttcaagtgtttatgttggaaagcctaaagggaataattggtttgagaaacaaacggatgggacacttgacatttcttgtcctccttggatggattggtttcatggtggattgcaattccaaattgagcatcatttgtttcccaagatgcctagatgcaaccttaggaaaatctcgccctacgtgatcgagttatgcaagaaacataatttgccttacaattatgcatctttctccaaggccaatgaaatgacactcagaacattgaggaacacagcattgcaggctagggatataaccaagccgctcccgaagaatttggtatgggaagctcttcacactcatggttaa

SEQ ID NO: 13216 - protein, 448 aa, Borago officinalis
MAAQIKKYITSDELKNHDKPGDLWISIQGKAYDVSDWVKDHPGGSFPLKSLAGQEVTDAFVAFHPASTWKNLDKFFTGYYLKDYSVSEVSKDYRKLVFEFSKMGLYDKKGHIMFATLCFIAMLFAMSVYGVLFCEGVLVHLFSGCLMGFLWIQSGWIGHDAGHYMVVSDSRLNKFMGIFAANCLSGISIGWWKWNHNAHHIACNSLEYDPDLQYIPFLVVSSKFFGSLTSHFYEKRLTFDSLSRFFVSYQHWTFYPIMCAARLNMYVQSLIMLLTKRNVSYRAQELLGCLVFSIWYPLLVSCLPNWGERIMFVIASLSVTGMQQVQFSLNHFSSSVYVGKPKGNNWFEKQTDGTLDISCPPWMDWFHGGLQFQIEHHLFPKMPRCNLRKISPYVIELCKKHNLPYNYASFSKANEMTLRTLRNTALQARDITKPLPKNLVWEALHTHG

SEQ ID NO: 13217 - DNA, 1350 bp, Brassica napus
  CDS (1)..(1350)
atgtcggagcagacaaagaagagattcattacaagcgatgatctgaaaaaacacaaccaacccggagatttatggatctcaatccaaggcaaagtctacgacgtctcccactgggtcaaatcccatcccggaggcgaagcagcgatcctaaacctcgccggtcaagacgtcaccgacgcgttcatcgcttaccatcccggaaccgcatggcgccacctcgaaaacctccacaacggctaccacgtgaaagaccaccacgtgtccgacgtgtcgcgtgactaccgtcgtttagccgcggagttttccaaacgcggactcttcgataaaaaaggtcacgtgactctttacacgctcacgtgcgtcgctgccatgctcgcggcggttgtatacggtgttgttgcatgcacgagcatatgggcccacttaatatccgccgtcttgctgggccttctctggatacagagcgcttacgtgggacatgactctggtcattacaacgtgacgtcaacgaagccgtgtaataaactcgtccagcttctgtctggtaactgcatcaccgggatatcgatcgcgtggtggaaatggacgcataacgctcaccatatctcttgtaatagtcttgaccacgatcctgatctccagcacatccctgtcttagcggtctccaacaagttctttaagtcgatgacgtcacgtttctatgggaggaagttgacgttcgatccactagctcgattcttgatcagctaccaacactggtcgttttatccaatcatgtgtgtggggagaatcaatctctttatccaaacgttacttttgctattctcgagacgttacgttcctgatcgagccttgaacatagctgggattcttgttttctggacgtggtttcctcttttagtatccttcctaccaaactggcaagagaggatcatctttgtctttttaagcatggccgtcacggcgattcagcacgttcagttctgtttaaaccattttgcggcagatgtttacaccggtccgcctaatgggaacgattggtttgagaagcaaacagctggtacgcttgatatatcgtgtaggtcgtatatggattggttctttggcgggttgcagtttcagctagagcatcatctgttccctaggctaccgcgttgccatctcaggggagtttcgcctgtggttcaggagctttgtaagaagcataatctaccgtataggagtctttcgtggtgggaggctaatgtgtggacgctcaggactctgaggaaagcggcggttcaagctagagatgtgactaatcctgtgttggagaatttgctatgggaagctctgaatactcatggctag

SEQ ID NO: 13218 - protein, 449 aa, Brassica napus
MSEQTKKRFITSDDLKKHNQPGDLWISIQGKVYDVSHWVKSHPGGEAAILNLAGQDVTDAFIAYHPGTAWRHLENLHNGYHVKDHHVSDVSRDYRRLAAEFSKRGLFDKKGHVTLYTLTCVAAMLAAVVYGVVACTSIWAHLISAVLLGLLWIQSAYVGHDSGHYNVTSTKPCNKLVQLLSGNCITGISIAWWKWTHNAHHISCNSLDHDPDLQHIPVLAVSNKFFKSMTSRFYGRKLTFDPLARFLISYQHWSFYPIMCVGRINLFIQTLLLLFSRRYVPDRALNIAGILVFWTWFPLLVSFLPNWQERIIFVFLSMAVTAIQHVQFCLNHFAADVYTGPPNGNDWFEKQTAGTLDISCRSYMDWFFGGLQFQLEHHLFPRLPRCHLRGVSPVVQELCKKHNLPYRSLSWWEANVWTLRTLRKAAVQARDVTNPVLENLLWEALNTHG

SEQ ID NO: 13219 - DNA, 1410 bp, Triticum aestivum
  CDS (1)..(1410)
atggcccgcacgggcctcgcggacgcaacggcgccggaagccgacgcaatgccggccgccagcaaggacgccgccgacgtccgcatgatctccaccaaggagctgcaggcgcacgccgccgcggacgacctctggatctccatctccggggacgtctacgacgtcacgccctggctgcgccaccacccgggcggcgaggtcccgctcatcaccctcgccggccaggacgccaccgacgccttcatggcctaccacccgccctccgtgcgcccgctcctccgccgcttcttcgtcggccgcctcaccgactacactgtcccccccgcctccgccgacttccgccgcctcctcgcgcagctctcctccgcgggcctcttcgagcgcgtcggccacacccccaagttcctgctcgtcgcaatgtcggtgctcttctgcatcgccctctactgcgtcctcgcctgctccagcaccggggcccacatgttcgccggcggcctcattggcttcatctggatccagtcgggctggattggccatgactccggccaccaccaaatcaccaggcaccctgccctcaaccgcctcctgcaggtggtctccgggaactgcctcaccggcctcggcatcgcctggtggaagttcaaccacaacacacaccacatctcctgcaacagcctcgaccatgaccctgacctccagcacttgccgctcttcgcggtttccaccaagctcttcaacaacctttggtcagtctgctacgagcgcaccttggcgtttgatgccatatccaagttcttcgtcagctaccagcactggacattttacccggtgatgggatttgcaaggataaatcttcttgtgcagtcaatcgtgttcctgatcacacaaaagaaggtgcggcagcgttggctggagatcgccggtgttgctgcgttctgggtttggtaccccttgttggtgtcttgcctgccgaattggtgggagagggtggcttttgtgcttgcaagctttgtgatcacggggattcagcatgtgcagttctgcctgaaccacttctcatcagccgtttatgttgggccaccaaaggggaacgactggtttgagaggcaaaccgcaggcacacttgatatcaagtgctccccgtggatggattggttccatggtggtctgcagttccaggttgaacaccatttgtttcctcgcctgcctcgctgccactatagaatggtcgcaccaattgtgcgtgacctttgcaagaagcacgggctgtcttatggtgctgccacattctgggaggcaaatgtaatgacatggaagacgctacgggctgcagcattgcaggccagggaagccactactggggctgctccgaagaatttggtctgggaagctttgaacactcatggatga

SEQ ID NO: 13220 - protein, 469 aa, Triticum aestivum
MARTGLADATAPEADAMPAASKDAADVRMISTKELQAHAAADDLWISISGDVYDVTPWLRHHPGGEVPLITLAGQDATDAFMAYHPPSVRPLLRRFFVGRLTDYTVPPASADFRRLLAQLSSAGLFERVGHTPKFLLVAMSVLFCIALYCVLACSSTGAHMFAGGLIGFIWIQSGWIGHDSGHHQITRHPALNRLLQVVSGNCLTGLGIAWWKFNHNTHHISCNSLDHDPDLQHLPLFAVSTKLFNNLWSVCYERTLAFDAISKFFVSYQHWTFYPVMGFARINLLVQSIVFLITQKKVRQRWLEIAGVAAFWVWYPLLVSCLPNWWERVAFVLASFVITGIQHVQFCLNHFSSAVYVGPPKGNDWFERQTAGTLDIKCSPWMDWFHGGLQFQVEHHLFPRLPRCHYRMVAPIVRDLCKKHGLSYGAATFWEANVMTWKTLRAAALQAREATTGAAPKNLVWEALNTHG

SEQ ID NO: 13221 - DNA, 1341 bp, Ricinus communis
  CDS (1)..(1341)
atggcagaaacaaagaagtacattacaaaagaagatcttgaaaagcacaataaccctggagatctctggatctcaatacaaggcaagatctacaatgttactgattggagcaaagaccatcctggtggtgtgtcgcccttgcttcatcttgctggccaagatgttactgatgcttttgttgcttaccatcctggcactgcttggcaatatcttgacaaattctttactggctatcatcttaaagactattctgtttctgagacatcaaaagattacagaagattagttgctgaattctcaaaattgggttttgaaaagaaagggcacattgcgtttattactcttgtctctatggtaatgctacttgctttgagtgtttatggagttctttgctctaatagtacatgggtgcatcttatttctggtggcttaatggggtttatgtggatacaaagtgggtggataggtcatgattctggccattatcaggttatgatgagccgtcgattcaatcgtttggcgcagatcttatctggaaattgtcttgcaggaatcagtattgcctggtggaaatggaaccataacacccatcacattgcttgtaatagtcttgattttgatccagatctgcagcatatgcctttctttgcggtatcctcaaaatttttcagttcaattacatcttatttttatgaaaggaagatgaattttgattgtgctgcaagattcttggttagttatcagcatttgacgttttaccctgtgatgtgttttgctaggattaatttgtttgctcaatctatatctctcctgttatctaagagaagggtggctaataggggtcaagagattcttggagtacttgtgttctggatttggtatcctttccttgtttcttgcttacccaattggggagagagagtgatgtttgtggctgcaagtttctcggttactagaattcagcatgttcagttctgtttgaatcatttctcgtccagtgtttatcttggcctcctaattgcaaatgattggtttgagaaccaaacaaaggggaccttagatataacttgctcatcttggatggattggttccatggtggattgcagttccagatggagcaccatttgttccctcgtttgcctcgagtcaaactcaggaaagtctcaccgtttgtcagggagttatgcaagaagcacaatttgccttatgatagtgcatcattctggaacgctaatgaactgacatttaagactcttcgtgctgcagccttgcaggctagggatctttctaatccaattccaaagaatttagtttgggaagctgttaatactcatggatga

SEQ ID NO: 13222 - protein, 446 aa, Ricinus communis
MAETKKYITKEDLEKHNNPGDLWISIQGKIYNVTDWSKDHPGGVSPLLHLAGQDVTDAFVAYHPGTAWQYLDKFFTGYHLKDYSVSETSKDYRRLVAEFSKLGFEKKGHIAFITLVSMVMLLALSVYGVLCSNSTWVHLISGGLMGFMWIQSGWIGHDSGHYQVMMSRRFNRLAQILSGNCLAGISIAWWKWNHNTHHIACNSLDFDPDLQHMPFFAVSSKFFSSITSYFYERKMNFDCAARFLVSYQHLTFYPVMCFARINLFAQSISLLLSKRRVANRGQEILGVLVFWIWYPFLVSCLPNWGERVMFVAASFSVTRIQHVQFCLNHFSSSVYLGLLIANDWFENQTKGTLDITCSSWMDWFHGGLQFQMEHHLFPRLPRVKLRKVSPFVRELCKKHNLPYDSASFWNANELTFKTLRAAALQARDLSNPIPKNLVWEAVNTHG

SEQ ID NO: 13223 - DNA, 1389 bp, Zea mays
  CDS (1)..(1389)
atgccgccctctgtcgatgcaatgccggcccccggcgacgccgcgggcgccggcgacgtgcgcatgatctcctccaaggagctccgcgctcacgcttccgccgacgacctctggatctccatctccggcgacgtgtacgacgtcacgccctggctcccccaccacccgggcggcgacctcccgcttctcaccctggcggggcaggacgccaccgacgccttcgccgcctaccacccgccctcggcgcgcccgctcctccgccgcttcttcgttggccgcctctctgactacgccgtctcccccgcgtccgccgactaccgccgcctcctcgcgcagctatcctccgcgggcctcttcgaacgcgtcggccccacccccaaggtccagctcgtcctgatggccgtcctcttctacgccgcgctgtacctcgtcctcgcatgcgccagcgcctgggcgcacctcctcgcggggggtctcattggcttcgtctggatccagtccggctggatgggccacgactcgggccaccaccgcatcaccggccatccggtcctcgaccgcgtcgtgcaggtgctctccgggaactgcctcaccggcctcagcatcgcctggtggaagtgtaaccacaacacgcaccacatcgcctgcaacagcctggaccatgacccggacctccagcacatgccgctctttgccgtctcccccaagctgttcggcaacatatggtcctacttctaccaacggaccctggcgttcgatgccgcctcgaaattcttcatcagctaccagcactggaccttctacccggtaatgtgcatcgccaggacaaatctcctcgcgcagtccgccctcttcgtcctcaccgagaagagggtgccgcagcggctgcttgagatcgccggggtcgccacattctgggcttggtacccgttgctggtggcttccctgccgaattggtgggagagggtcgcgtttgtgcttttcagcttcaccatctgcgggattcagcacgtccaattctgcctgaaccacttctcgtccgacgtgtatgtcgggccacccaagggcaatgactggtttgagaagcagacggcaggcacgctcgacatcctgtgctctccttggatggattggttccacggtggcctgcagttccagattgagcaccatctgtttccccgcctacctcggtgccaccttcgcaaggttgcaccggccgtccgcgacctttgcaagaagcatgggctcacttattctgcagccacattctggggtgcaaatgtgcttacatggaagacactcagggctgctgcattgcaggccaggaccgctacaagtggtggtgctccgaagaatttggtatgggaggctgtgaacacccatggataa

SEQ ID NO: 13224 - protein, 462 aa, Zea mays
MPPSVDAMPAPGDAAGAGDVRMISSKELRAHASADDLWISISGDVYDVTPWLPHHPGGDLPLLTLAGQDATDAFAAYHPPSARPLLRRFFVGRLSDYAVSPASADYRRLLAQLSSAGLFERVGPTPKVQLVLMAVLFYAALYLVLACASAWAHLLAGGLIGFVWIQSGWMGHDSGHHRITGHPVLDRVVQVLSGNCLTGLSIAWWKCNHNTHHIACNSLDHDPDLQHMPLFAVSPKLFGNIWSYFYQRTLAFDAASKFFISYQHWTFYPVMCIARTNLLAQSALFVLTEKRVPQRLLEIAGVATFWAWYPLLVASLPNWWERVAFVLFSFTICGIQHVQFCLNHFSSDVYVGPPKGNDWFEKQTAGTLDILCSPWMDWFHGGLQFQIEHHLFPRLPRCHLRKVAPAVRDLCKKHGLTYSAATFWGANVLTWKTLRAAALQARTATSGGAPKNLVWEAVNTHG

SEQ ID NO: 13225 - DNA, 1410 bp, Hordeum vulgare
  CDS (1)..(1410)
atggcccgcacgggcctcgcggacgctacggcgccggacgccgacgcaatgccggccgccaccaaggacgccgccgacgtgcgcatgatctccaccaaggagctgcaggcgcacgccgccgcggacgacctctggatctccatctccggggacgtctacgacgtcacgccgtggctgcgctaccacccgggcggcgaggtcccgctcatcaccctcgccggccaggacgccaccgacgccttcatggcctaccacccgccctccgtgcgcccgctcctccgccgcttcttcgtcggccgcctctccgactacaccgtcccccccgcctccgccgacttacgacgcctcctcgcgcacctctcatccgcgggcctcttcgagcgcgtcggccacacccccaagttcctgctcgtcgcaatgtcggtgctcttctgcgtcgccctctactgcgtcctcgcctgttccagcaccggggcccacatgttcgccggcggcctcattggcttcatctggatccagtcgggctggattggccatgactccggccaccaccagatcaccagtcaccccgcgctcaaccgcctcctgcaggtggtctccgggaactgcctcaccggcctcggcatcgcctggtggaagttcaaccacaacacacaccacatctcctgcaacagcctcgaccatgacccggacctccagcacttgccgctcttcgcggtttccaccaagctcttcaacaacctttggtcagtctgctacgagcgcaccttggcgttcgatgccatatccaagttcttcgtcagctaccagcactggacattttacccggtgatgggatttgcaaggataaatcttctagtgcagtcaatcgtgttcctcatcacacaaaagaaggtgcggcagcgttggctggagatcgccggtgtggccgcgttctgggtttggtaccccttgctggtgtcttgcctgccgaattggtgggagagggtggcttttgtgcttgcaagctttgtgatcacggggattcagcatgtgcagttctgcctcaaccacttctcatcagcagtttatgtcgggccaccaaaggggaacgactggtttgagaggcaaaccgcgggcacacttgatatcaagtgctccccgtggatggattggttccatggtggtctgcagttccaggttgaacaccatttgtttccccgcctgcctcggtgccactataggatggtcgcgccgattgtgcgcgacctttgcaagaagcacgggctgtcttatggtgctgccacattctgggaggcaaatgtaatgacatggaagacgctaagggctgcagcattgcaggccagggacgccactactggatctgcgcccaagaatctggtctgggaagctttgaacacccatggatga

SEQ ID NO: 13226 - protein, 469 aa, Hordeum vulgare
MARTGLADATAPDADAMPAATKDAADVRMISTKELQAHAAADDLWISISGDVYDVTPWLRYHPGGEVPLITLAGQDATDAFMAYHPPSVRPLLRRFFVGRLSDYTVPPASADLRRLLAHLSSAGLFERVGHTPKFLLVAMSVLFCVALYCVLACSSTGAHMFAGGLIGFIWIQSGWIGHDSGHHQITSHPALNRLLQVVSGNCLTGLGIAWWKFNHNTHHISCNSLDHDPDLQHLPLFAVSTKLFNNLWSVCYERTLAFDAISKFFVSYQHWTFYPVMGFARINLLVQSIVFLITQKKVRQRWLEIAGVAAFWVWYPLLVSCLPNWWERVAFVLASFVITGIQHVQFCLNHFSSAVYVGPPKGNDWFERQTAGTLDIKCSPWMDWFHGGLQFQVEHHLFPRLPRCHYRMVAPIVRDLCKKHGLSYGAATFWEANVMTWKTLRAAALQARDATTGSAPKNLVWEALNTHG

SEQ ID NO: 13227 - DNA, 1410 bp, Triticum aestivum
  CDS (1)..(1410)
atggcccgcacgggcctcgcggacgcaacggcgccggaagccgacgcaatgccggccgccagcaaggacgccgccgacgtccgcatgatctccaccaaggagctgcaggcgcacgctgccgcggacgacctctggatctccatctccggggacgtctacgacgtcacgccctggctgcgccaccacccgggcggcgaggtcccgctcatcaccctcgccggccaggacgccaccgacgccttcatggcctaccacccgccctccgtgcgcccgctcctccgccgcttcttcgtcggccgcctctccgactacaccgtcccccccgcctccgccgacttccgccgcctcctcgcgcagctctcctccgcgggcctcttcgagcgcgtcggccacacccccaagttcctgctcgtcgcaatgtcggtgctcttctgcatcgccctctactgcgtcctcgcctgctccagcaccggggcccacatgttcgccggcggcctcattggcttcatctggatccagtcgggctggattggccatgactccggccaccaccaaatcaccaggcaccctgccctcaaccgcctcctgcaggtggtctccgggaactgcctcaccggcctcggcatcgcctggtggaagttcaaccacaacacacaccacatctcctgcaacagcctcgaccatgaccctgacctccagcacttgccgctcttcgcggtttccaccaagctcttcaacaacctttggtcagtctgctacgagcgcaccttggcgtttgatgccatatccaagttcttcgtcagctaccagcactggacattctacccggtgatgggatttgcaaggataaatcttcttgtgcagtcaatcgtgttcctgatcacgcaaaagaaggtgcggcagcgttggctggagatcgccggagttgcagcgttctgggtttggtaccccttgttggtctcttgcctgccgaattggtgggagagggttgcttttgtgcttgcaagctttgtgatcacggggattcagcatgtgcagttctgcctgaaccacttctcatccgccgtgtatgttgggccaccaaaggggaacgactggtttgagaggcaaaccgcgggcacacttgatatcaagtgctccccgtggatggattggttccatggtggtctgcagttccaggttgaacaccatttgtttcctcgcctgcctcgctgccactataggatggtcgcgccgattgtgcgtgacctttgcaagaagcatgggctgtcttatggtgctgccacattctgggaggcaaatgtaatgacatggaagacgctaagggctgcagcattgcaggccagggaagccactactggagctgctccgaagaatctggtctgggaagctttgaacactcatggatga

SEQ ID NO: 13228 - protein, 469 aa, Triticum aestivum
MARTGLADATAPEADAMPAASKDAADVRMISTKELQAHAAADDLWISISGDVYDVTPWLRHHPGGEVPLITLAGQDATDAFMAYHPPSVRPLLRRFFVGRLSDYTVPPASADFRRLLAQLSSAGLFERVGHTPKFLLVAMSVLFCIALYCVLACSSTGAHMFAGGLIGFIWIQSGWIGHDSGHHQITRHPALNRLLQVVSGNCLTGLGIAWWKFNHNTHHISCNSLDHDPDLQHLPLFAVSTKLFNNLWSVCYERTLAFDAISKFFVSYQHWTFYPVMGFARINLLVQSIVFLITQKKVRQRWLEIAGVAAFWVWYPLLVSCLPNWWERVAFVLASFVITGIQHVQFCLNHFSSAVYVGPPKGNDWFERQTAGTLDIKCSPWMDWFHGGLQFQVEHHLFPRLPRCHYRMVAPIVRDLCKKHGLSYGAATFWEANVMTWKTLRAAALQAREATTGAAPKNLVWEALNTHG

SEQ ID NO: 13229 - DNA, 1395 bp, Zea mays
  CDS (1)..(1395)
atgccgccctctgccgacgcaatgccggcccccggagacgccgcgtgcgccggcgacgtgcgcttgatctcctccaaggagctccgcgagcacgcgtccgccgccgacctctggatctccatctcgggcgacgtgtacgacgtgacgccctggcttccccaccacccgggcggcgacctcccgctcatcaccttggcggggcaggacgccaccgacgccttcgccgcctaccacccgccctcggcgcgcccgctcctccgccgcttcttcgtcggccgcctctccgactacaccgtctcccccgcgtccgccgactaccgccgcctcctggcgcagctctcctccgcgggcctcttcgagcgcgtcggccccacccccagggtacagctcgccctgatggccgtcctcttctacgcggcgctctacctcgtcctcgcctgcgccagcgcctcggcgcacatgctcgctggggggctcatcggcttcgtctggatccagtccggctggatgggccacgactcgggccaccaccgcatcacgggccatccgctcctggaccgcgtcgtgcaggtgctctccggaaactgcctcactggcctcagcatcgcctggtggaaatgcaaccacaacacgcaccacatcgcctgcaacagcctggaccatgacccggacctccagcacatgccgctcttcgctgtctcccccaagctgttcggcaacatatggtcctacttctaccagcggaccctggccttcgacgccgcctcgaaattcctcatcagctaccagcactggaccttctacccggtaatgtgcatcgccaggataaatcttctggcgcagtccgctgtcttcgtcctgaccgagaagagggtgccgcagcggctgcttgagatcgccggtgtcgccgcgttctgggcttggtacccgttgctggtggcgtgcctgccgaattggtgggagagggtggcgttcgtgcttctcagctttaccttctgcgggatccagcacgtccaattctgcctgaaccacttctcgtccgatgtgtacgtcgggccacccaagggcaacgactggttcgagaagcagacggcaggcacgctcgacatcctgtgccctccttggatggattggttccatggcggcctgcagttccagattgagcaccatctgttcccccgcctgcctcggtgccaccttcggaaggttgcgccggcggtgcgtgacctttgcaagaagcatgggctgacctattccgcagcctccttctgggacgcaaatgtgcttacatggaagacactcagggctgccgcattgcaggccaggagcgccacaggcggcggcggcggcgctccgaagaatttggtctgggaggcattgaacacccatggatga

SEQ ID NO: 13230 - protein, 464 aa, Zea mays
MPPSADAMPAPGDAACAGDVRLISSKELREHASAADLWISISGDVYDVTPWLPHHPGGDLPLITLAGQDATDAFAAYHPPSARPLLRRFFVGRLSDYTVSPASADYRRLLAQLSSAGLFERVGPTPRVQLALMAVLFYAALYLVLACASASAHMLAGGLIGFVWIQSGWMGHDSGHHRITGHPLLDRVVQVLSGNCLTGLSIAWWKCNHNTHHIACNSLDHDPDLQHMPLFAVSPKLFGNIWSYFYQRTLAFDAASKFLISYQHWTFYPVMCIARINLLAQSAVFVLTEKRVPQRLLEIAGVAAFWAWYPLLVACLPNWWERVAFVLLSFTFCGIQHVQFCLNHFSSDVYVGPPKGNDWFEKQTAGTLDILCPPWMDWFHGGLQFQIEHHLFPRLPRCHLRKVAPAVRDLCKKHGLTYSAASFWDANVLTWKTLRAAALQARSATGGGGGAPKNLVWEALNTHG

SEQ ID NO: 13231 - DNA, 24 bp, Artificial sequence
  primer
atggcggaagagacggagaaaaag

SEQ ID NO: 13232 - DNA, 20 bp, Artificial sequence
  primer
ttagccatgagtattcaaag

SEQ ID NO: 13233 - protein, 462 aa, Artificial sequence
  consensus sequence
  Variant (2)..(4): Xaa in position 2 to 4 is any amino acid
  Variant (7)..(8): Xaa in position 7 to 8 is any amino acid
  Variant (10)..(13): Xaa in position 10 to 13 is any amino acid
  Variant (20)..(20): Xaa in position 20 is any amino acid
  Variant (22)..(23): Xaa in position 22 to 23 is any amino acid
  Variant (25)..(25): Xaa in position 25 is any amino acid
  Variant (27)..(28): Xaa in position 27 to 28 is any amino acid
  Variant (30)..(32): Xaa in position 30 to 32 is any amino acid
  Variant (37)..(38): Xaa in position 37 to 38 is any amino acid
  Variant (40)..(42): Xaa in position 40 to 42 is any amino acid
  Variant (48)..(48): Xaa in position 48 is any amino acid
  Variant (53)..(53): Xaa in position 53 is any amino acid
  Variant (55)..(55): Xaa in position 55 is any amino acid
  Variant (58)..(63): Xaa in position 58 to 63 is any amino acid
  Variant (64)..(65): Xaa in position 64 to 65 is any or no amino acid
  Variant (67)..(69): Xaa in position 67 to 69 is any amino acid
  Variant (71)..(71): Xaa in position 71 is any amino acid
  Variant (73)..(73): Xaa in position 73 is any amino acid
  Variant (74)..(74): Xaa in position 74 is any or no amino acid
  Variant (76)..(76): Xaa in position 76 is any amino acid
  Variant (78)..(79): Xaa in position 78 to 79 is any amino acid
  Variant (82)..(82): Xaa in position 82 is any amino acid
  Variant (83)..(86): Xaa in position 83 to 86 is any or no amino acid
  Variant (88)..(88): Xaa in position 88 is any amino acid
  Variant (92)..(92): Xaa in position 92 is any amino acid
  Variant (94)..(100): Xaa in position 94 to 100 is any amino acid
  Variant (101)..(101): Xaa in position 101 is any or no amino acid
  Variant (105)..(107): Xaa in position 105 to 107 is any amino acid
  Variant (109)..(126): Xaa in position 109 to 126 is any amino acid
  Variant (128)..(128): Xaa in position 128 is any amino acid
  Variant (131)..(137): Xaa in position 131 to 137 is any amino acid
  Variant (138)..(138): Xaa in position 138 is any or no amino acid
  Variant (140)..(144): Xaa in position 140 to 144 is any amino acid
  Variant (146)..(146): Xaa in position 146 is any amino acid
  Variant (148)..(149): Xaa in position 148 to 149 is any amino acid
  Variant (151)..(151): Xaa in position 151 is any amino acid
  Variant (154)..(156): Xaa in position 154 to 156 is any amino acid
  Variant (160)..(160): Xaa in position 160 is any amino acid
  Variant (163)..(179): Xaa in position 163 to 179 is any amino acid
  Variant (183)..(184): Xaa in position 183 to 184 is any amino acid
  Variant (186)..(186): Xaa in position 186 is any amino acid
  Variant (189)..(189): Xaa in position 189 is any amino acid
  Variant (193)..(194): Xaa in position 193 to 194 is any amino acid
  Variant (197)..(197): Xaa in position 197 is any amino acid
  Variant (206)..(207): Xaa in position 206 to 207 is any amino acid
  Variant (213)..(214): Xaa in position 213 to 214 is any amino acid
  Variant (216)..(218): Xaa in position 216 to 218 is any amino acid
  Variant (221)..(223): Xaa in position 221 to 223 is any amino acid
  Variant (225)..(227): Xaa in position 225 to 227 is any amino acid
  Variant (228)..(229): Xaa in position 228 to 229 is any or no amino acid
  Variant (231)..(231): Xaa in position 231 is any amino acid
  Variant (234)..(238): Xaa in position 234 to 238 is any amino acid
  Variant (241)..(244): Xaa in position 241 to 244 is any amino acid
  Variant (246)..(247): Xaa in position 246 to 247 is any amino acid
  Variant (249)..(249): Xaa in position 249 is any amino acid
  Variant (252)..(252): Xaa in position 252 is any amino acid
  Variant (257)..(257): Xaa in position 257 is any amino acid
  Variant (259)..(260): Xaa in position 259 to 260 is any amino acid
  Variant (263)..(263): Xaa in position 263 is any amino acid
  Variant (266)..(267): Xaa in position 266 to 267 is any amino acid
  Variant (269)..(272): Xaa in position 269 to 272 is any amino acid
  Variant (274)..(278): Xaa in position 274 to 278 is any amino acid
  Variant (279)..(280): Xaa in position 279 to 280 is any or no amino acid
  Variant (282)..(283): Xaa in position 282 to 283 is any amino acid
  Variant (284)..(284): Xaa in position 284 is any or no amino acid
  Variant (286)..(290): Xaa in position 286 to 290 is any amino acid
  Variant (292)..(294): Xaa in position 292 to 294 is any amino acid
  Variant (297)..(297): Xaa in position 297 is any amino acid
  Variant (299)..(299): Xaa in position 299 is any amino acid
  Variant (304)..(305): Xaa in position 304 to 305 is any amino acid
  Variant (309)..(309): Xaa in position 309 is any amino acid
  Variant (310)..(311): Xaa in position 310 to 311 is any or no amino acid
  Variant (313)..(313): Xaa in position 313 is any amino acid
  Variant (316)..(317): Xaa in position 316 to 317 is any amino acid
  Variant (320)..(321): Xaa in position 320 to 321 is any amino acid
  Variant (323)..(328): Xaa in position 323 to 328 is any amino acid
  Variant (331)..(331): Xaa in position 331 is any amino acid
  Variant (334)..(334): Xaa in position 334 is any amino acid
  Variant (339)..(341): Xaa in position 339 to 341 is any amino acid
  Variant (344)..(344): Xaa in position 344 is any amino acid
  Variant (346)..(346): Xaa in position 346 is any amino acid
  Variant (348)..(351): Xaa in position 348 to 351 is any amino acid
  Variant (352)..(355): Xaa in position 352 to 355 is any or no amino acid
  Variant (359)..(359): Xaa in position 359 is any amino acid
  Variant (362)..(362): Xaa in position 362 is any amino acid
  Variant (365)..(365): Xaa in position 365 is any amino acid
  Variant (368)..(368): Xaa in position 368 is any amino acid
  Variant (370)..(371): Xaa in position 370 to 371 is any amino acid
  Variant (377)..(377): Xaa in position 377 is any amino acid
  Variant (384)..(384): Xaa in position 384 is any amino acid
  Variant (396)..(396): Xaa in position 396 is any amino acid
  Variant (399)..(401): Xaa in position 399 to 401 is any amino acid
  Variant (403)..(403): Xaa in position 403 is any amino acid
  Variant (404)..(404): Xaa in position 404 is any or no amino acid
  Variant (406)..(407): Xaa in position 406 to 407 is any amino acid
  Variant (413)..(413): Xaa in position 413 is any amino acid
  Variant (415)..(415): Xaa in position 415 is any amino acid
  Variant (417)..(419): Xaa in position 417 to 419 is any amino acid
  Variant (422)..(423): Xaa in position 422 to 423 is any amino acid
  Variant (426)..(427): Xaa in position 426 to 427 is any amino acid
  Variant (429)..(430): Xaa in position 429 to 430 is any amino acid
  Variant (434)..(435): Xaa in position 434 to 435 is any amino acid
  Variant (441)..(445): Xaa in position 441 to 445 is any amino acid
  Variant (446)..(450): Xaa in position 446 to 450 is any or no amino acid
  Variant (454)..(454): Xaa in position 454 is any amino acid
  Variant (458)..(458): Xaa in position 458 is any amino acid
IXXXELXXHXXXXDLWISIXGXXYXVXXWXXXHPGGXXPXXXLAGQDXTDAFXAXHPXXXXXXXXLXXXFXGXXLXDXXVSXXXXXSXDYRXLXXXXXXXXGLFXXXGXXXXXXXXXXXXXXXXXXYXVLXXXXXXXXHXXXXXLXGXXWXQSXXXGHDXGHXXXXXXXXXXXXXXXXXGNCXXGXSIXWWKXXHNXHHIACNSLXXDPDLQXXPXXXVSXXXFXXXXXSXFYXXXXXFDXXXXFXXSXQHXTFYPXMXXARXNLXXQXXXXLXXXXXXXVXXXRXXXXXGXXXFWXWXPLLVXXLPNXXXWXERXXFVXXSXXXXXXQHXQFXLNHFXXXVYXGXPXXXXXXXXWFEXQTXGTXDIXCXXWMDWFXGGLQFQXEHHLFPRLPRCXLRXXXPXXVXXLCKKHXLXYXXXSFXXANXXTXXTLRXXALQARXXXXXXXXXXKNLXWEAXNTHG

SEQ ID NO: 13234 - protein, 52 aa, Artificial sequence
  protein pattern
  Variant (3)..(3): Xaa in position 3 is any amino acid
  Variant (5)..(5): Xaa in position 5 is Pro, Ser or Thr
  Variant (6)..(6): Xaa in position 6 is Phe, Ile or Leu
  Variant (7)..(7): Xaa in position 7 is Asp or Asn
  Variant (9)..(9): Xaa in position 9 is any amino acid
  Variant (11)..(11): Xaa in position 11 is any amino acid
  Variant (12)..(12): Xaa in position 12 is Ala, Pro, Ser or Thr
  Variant (13)..(14): Xaa in position 13 to 14 is any amino acid
  Variant (18)..(18): Xaa in position 18 is Phe, His or Tyr
  Variant (21)..(21): Xaa in position 21 is any amino acid
  Variant (25)..(25): Xaa in position 25 is Ile, Leu, Met or Val
  Variant (32)..(32): Xaa in position 32 is Lys or Arg
  Variant (33)..(33): Xaa in position 33 is Leu or Met
  Variant (36)..(36): Xaa in position 36 is Ala, Cys, Asn, Ser or Val
  Variant (37)..(38): Xaa in position 37 to 38 is any amino acid
  Variant (40)..(40): Xaa in position 40 is any amino acid
  Variant (41)..(41): Xaa in position 41 is Ile or Val
  Variant (42)..(42): Xaa in position 42 is Ala or Ser
  Variant (44)..(46): Xaa in position 44 to 46 is any amino acid
  Variant (47)..(47): Xaa in position 47 is Asp or Glu
  Variant (50)..(50): Xaa in position 50 is any or no amino acid
  Variant (52)..(52): Xaa in position 52 is His or Lys
QTXGXXXIXCXXXXDWFXGGXQFQXEHHLFPXXPRXXXRXXXPXXXXLCXKX

SEQ ID NO: 13235 - protein, 44 aa, Artificial sequence
  protein pattern
  Variant (3)..(3): Xaa in position 3 is Ile, Leu, Met or Val
  Variant (4)..(4): Xaa in position 4 is Ala, Ser or Thr
  Variant (6)..(6): Xaa in position 6 is Ile, Leu or Val
  Variant (7)..(7): Xaa in position 7 is Gly or Ser
  Variant (9)..(9): Xaa in position 9 is Ala or Gly
  Variant (12)..(13): Xaa in position 12 to 13 is any amino acid
  Variant (14)..(14): Xaa in position 14 is Asn or Thr
  Variant (16)..(16): Xaa in position 16 is Asn or Thr
  Variant (17)..(17): Xaa in position 17 is Ala or Thr
  Variant (20)..(20): Xaa in position 20 is Ile, Leu or Val
  Variant (21)..(21): Xaa in position 21 is Ala or Ser
  Variant (22)..(22): Xaa in position 22 is Cys or Val
  Variant (26)..(26): Xaa in position 26 is Asp or Glu
  Variant (27)..(27): Xaa in position 27 is Phe, His or Tyr
  Variant (31)..(31): Xaa in position 31 is Leu or Val
  Variant (33)..(33): Xaa in position 33 is His or Tyr
  Variant (34)..(34): Xaa in position 34 is Ile, Leu, Met or Val
  Variant (36)..(36): Xaa in position 36 is Phe, Ile, Leu, Met or Val
  Variant (37)..(37): Xaa in position 37 is Phe, Ile or Leu
  Variant (38)..(38): Xaa in position 38 is Ala or Val
  Variant (40)..(40): Xaa in position 40 is any or no amino acid
  Variant (42)..(43): Xaa in position 42 to 43 is any amino acid
  Variant (44)..(44): Xaa in position 44 is Phe, Ile or Leu
NCXXGXXIXWWXXXHXXHHXXXNSLXXDPDXQXXPXXXVXSXXX

SEQ ID NO: 13236 - protein, 58 aa, Artificial sequence
  protein pattern
  Variant (2)..(3): Xaa in position 2 to 3 is any amino acid
  Variant (4)..(4): Xaa in position 4 is any or no amino acid
  Variant (6)..(6): Xaa in position 6 is any or no amino acid
  Variant (8)..(9): Xaa in position 8 to 9 is any amino acid
  Variant (11)..(11): Xaa in position 11 is Ala, Asp, Asn, Ser or Thr
  Variant (12)..(13): Xaa in position 12 to 13 is any amino acid
  Variant (14)..(14): Xaa in position 14 is Ala, Asp, Gly, Asn, Gln or Thr
  Variant (19)..(19): Xaa in position 19 is Ala or Ser
  Variant (21)..(21): Xaa in position 21 is any amino acid
  Variant (23)..(23): Xaa in position 23 is Asp or Lys
  Variant (24)..(24): Xaa in position 24 is Ala, Ile or Val
  Variant (26)..(26): Xaa in position 26 is Asp or Asn
  Variant (28)..(28): Xaa in position 28 is Ser or Thr
  Variant (29)..(29): Xaa in position 29 is any amino acid
  Variant (31)..(33): Xaa in position 31 to 33 is any amino acid
  Variant (38)..(39): Xaa in position 38 to 39 is any amino acid
  Variant (40)..(40): Xaa in position 40 is Ala, Pro or Val
  Variant (41)..(41): Xaa in position 41 is Ile or Leu
  Variant (42)..(43): Xaa in position 42 to 43 is any amino acid
  Variant (45)..(45): Xaa in position 45 is Ala, Ser or Val
  Variant (48)..(48): Xaa in position 48 is Asp or Glu
  Variant (49)..(49): Xaa in position 49 is Ala or Val
  Variant (54)..(54): Xaa in position 54 is any amino acid
  Variant (56)..(56): Xaa in position 56 is Phe or Tyr
  Variant (58)..(58): Xaa in position 58 is Pro or Ser
IXXXEXLXXHXXXXDLWIXIXGXXYXVXXWXXXHPGGXXXXXXLXGQXXTDAFXAXHX

SEQ ID NO: 13237 - protein, 37 aa, Artificial sequence
  protein pattern
  Variant (2)..(5): Xaa in position 2 to 5 is any amino acid
  Variant (6)..(6): Xaa in position 6 is any or no amino acid
  Variant (9)..(10): Xaa in position 9 to 10 is any amino acid
  Variant (11)..(11): Xaa in position 11 is Ala, Cys, Ser or Thr
  Variant (12)..(12): Xaa in position 12 is Lys or Arg
  Variant (14)..(14): Xaa in position 14 is Phe or Leu
  Variant (15)..(15): Xaa in position 15 is Ile or Val
  Variant (16)..(16): Xaa in position 16 is Cys or Ser
  Variant (17)..(17): Xaa in position 17 is any amino acid
  Variant (20)..(21): Xaa in position 20 to 21 is any amino acid
  Variant (22)..(22): Xaa in position 22 is Phe or Tyr
  Variant (25)..(25): Xaa in position 25 is Ile, Leu or Val
  Variant (27)..(27): Xaa in position 27 is Ala, Cys or Gly
  Variant (28)..(28): Xaa in position 28 is any amino acid
  Variant (29)..(29): Xaa in position 29 is Ala, Gly or Thr
  Variant (31)..(31): Xaa in position 31 is any amino acid
  Variant (32)..(32): Xaa in position 32 is Asn or Ser
  Variant (33)..(33): Xaa in position 33 is Phe, Leu or Met
  Variant (34)..(35): Xaa in position 34 to 35 is any amino acid
  Variant (37)..(37): Xaa in position 37 is Ser or Thr
YXXXXXFDXXXXFXXXXQHXXXYPXMXXXRXXXXXQX

SEQ ID NO: 13238 - protein, 25 aa, Artificial sequence
  protein pattern
  Variant (3)..(3): Xaa in position 3 is Phe, Ile or Val
  Variant (4)..(4): Xaa in position 4 is any amino acid
  Variant (7)..(8): Xaa in position 7 to 8 is any amino acid
  Variant (9)..(9): Xaa in position 9 is Cys, Gly or Ser
  Variant (10)..(10): Xaa in position 10 is Phe, Leu or Met
  Variant (11)..(11): Xaa in position 11 is Ala, Cys, Ser, Thr or Val
  Variant (12)..(12): Xaa in position 12 is Phe, Ile or Val
  Variant (13)..(13): Xaa in position 13 is Cys or Thr
  Variant (14)..(14): Xaa in position 14 is any amino acid
  Variant (15)..(15): Xaa in position 15 is Ile, Leu or Met
  Variant (17)..(17): Xaa in position 17 is any amino acid
  Variant (18)..(18): Xaa in position 18 is Ile, Leu or Val
  Variant (21)..(21): Xaa in position 21 is Cys, Ser or Thr
ERXXFVXXXXXXXXXQXXQFXLNHF

SEQ ID NO: 13239 - protein, 28 aa, Artificial sequence
  protein pattern
  Variant (2)..(6): Xaa in position 2 to 6 is any amino acid
  Variant (7)..(7): Xaa in position 7 is any or no amino acid
  Variant (9)..(9): Xaa in position 9 is any or no amino acid
  Variant (11)..(11): Xaa in position 11 is Phe, Ile, Leu or Val
  Variant (12)..(12): Xaa in position 12 is any amino acid
  Variant (14)..(14): Xaa in position 14 is any amino acid
  Variant (16)..(16): Xaa in position 16 is any amino acid
  Variant (17)..(17): Xaa in position 17 is Ala, Gly, Ser or Thr
  Variant (18)..(18): Xaa in position 18 is any amino acid
  Variant (19)..(19): Xaa in position 19 is Ile, Leu, Met or Val
  Variant (23)..(23): Xaa in position 23 is Ala, Pro, Ser or Thr
  Variant (26)..(27): Xaa in position 26 to 27 is any amino acid
  Variant (28)..(28): Xaa in position 28 is Ile, Met or Val
HXXXXXXLXGXXWXQXXXXGHDXGHXXX

SEQ ID NO: 13240 - protein, 10 aa, Artificial sequence
  protein pattern
  Variant (3)..(4): Xaa in position 3 to 4 is any amino acid
  Variant (5)..(5): Xaa in position 5 is Ala or Thr
  Variant (8)..(8): Xaa in position 8 is any amino acid
TLXXXALXAR

SEQ ID NO: 13241 - protein, 24 aa, Artificial sequence
  protein pattern
  Variant (2)..(2): Xaa in position 2 is any amino acid
  Variant (3)..(3): Xaa in position 3 is Asp or Asn
  Variant (4)..(4): Xaa in position 4 is Phe, His or Tyr
  Variant (5)..(5): Xaa in position 5 is any amino acid
  Variant (6)..(6): Xaa in position 6 is Ala, Ile, Leu or Val
  Variant (7)..(7): Xaa in position 7 is Pro or Ser
  Variant (8)..(8): Xaa in position 8 is Asp, Glu or Pro
  Variant (9)..(9): Xaa in position 9 is any amino acid
  Variant (11)..(11): Xaa in position 11 is any amino acid
  Variant (13)..(13): Xaa in position 13 is any amino acid
  Variant (14)..(14): Xaa in position 14 is Arg or Ser
  Variant (15)..(15): Xaa in position 15 is any amino acid
  Variant (17)..(19): Xaa in position 17 to 19 is any amino acid
  Variant (20)..(20): Xaa in position 20 is Phe or Leu
  Variant (21)..(21): Xaa in position 21 is Ala, Asn, Ser, Thr or Val
  Variant (22)..(23): Xaa in position 22 to 23 is any amino acid
LXXXXXXXXSXDXXXLXXXXXXXG

SEQ ID NO: 13242 - protein, 11 aa, Artificial sequence
  protein pattern
  Variant (3)..(3): Xaa in position 3 is Leu or Val
  Variant (7)..(7): Xaa in position 7 is Phe, Leu or Val
  Variant (8)..(8): Xaa in position 8 is any amino acid
NLXWEAXXTHG

SEQ ID NO: 13243 - protein, 12 aa, Artificial sequence
  protein pattern
  Variant (2)..(2): Xaa in position 2 is Pro, Ser or Thr
  Variant (4)..(5): Xaa in position 4 to 5 is any amino acid
  Variant (6)..(6): Xaa in position 6 is Ala, Leu or Val
  Variant (7)..(7): Xaa in position 7 is Ser or Thr
  Variant (9)..(10): Xaa in position 9 to 10 is any amino acid
LXYXXXXFXXAN

SEQ ID NO: 13244 - protein, 11 aa, Artificial sequence
  protein pattern
  Variant (2)..(2): Xaa in position 2 is Phe or Tyr
  Variant (3)..(3): Xaa in position 3 is Pro or Ser
  Variant (4)..(4): Xaa in position 4 is any amino acid
  Variant (7)..(8): Xaa in position 7 to 8 is any amino acid
  Variant (9)..(9): Xaa in position 9 is Ile or Leu
  Variant (11)..(11): Xaa in position 11 is Asp, Asn or Ser
WXXXLVXXXPX

SEQ ID NO: 13245 - DNA, 1686 bp, Arabidopsis thaliana
  CDS (1)..(1686)
atggatttcgagcttagatcagcgaaagagaagcttgaaagagagcagagagagaggaagcaaagagcgaaactgaaactcgaacgcgagaagaaatcaaaggaagctgcgattaagcaacgcgaagccattgaagctgctcaaagagctagaagacttgacgccatcgaagcccagattaaggctgatcaacatatgcaagagagtttagtatctggagatggaatagtgtttgaacgagtcttccaagctgtttcttttcaaggaaatggagataagattaaactaccaccatcatgttttactgagttgtctgatcaaggagctttcgataaaggtcctttgtattttgagctctctgttgttgaccatgcggataataaaaagacaacacattctggtgttcttgagtttactgctgaagatggcactattggacttcctccacatgtgtggagcaatttgttttcaacgcatgatccaatggatgttcctttggtggaaattcggtatatccgattgcctaaaggcagttacgcgaagcttcaacctgataaccttggtttctcggatttgcctaaccataaagcaatacttgaaactattcttcgtcaacatgctacactttctttagacgatgttctcttggttaattatgggcaggtctcttacaagcttcaggttcttgagttaagacctgccactagcatttcggttctggagactgacattgaggttgatattgttagtccagatatagtttcagatcaaccgaatcagcatgtgctaaagccgcttcaatatgggaaatctgaatctggaacagttgaggaaggtcggtatgattactataagtttgtgattgacgaggctactgtagaaaaagtaatggcaggaagcgtcaaagttattgtaaaggtagatgtggagaaagttggagcggatacggatctctatgtgtcaaagcacccggttctatttccatctcttaatcaacacgagtggtcttcacacgacgtgggttcaaagaccttgatcttggtatcaaaggagagggctttgagctcagggacttacagtataggtgtttacggcttcaaaggaacagtcaagtaccaggtctcagtactggtccaagaaagcattgatggagctaaggttggggaacgggctgtatcatcttcgtcagatgttgatacagtagaatgtaggaactgtaagcattcaattccaagcaggagtatcgcgttgcacgaggtgtactgtagcagacacaacgtggtttgtaaccatcacgggtgtggaatcgttctcagagtcgaagaggcgaaaaaccatttgcactgtgaaaaatgcgggaaagcattgcagccaacagagatggagaaacatttaaaagttttccatgaaccactcacttgtggctgcggaatagtacttgagaaagaacagatggttcaacatcaagggaaagattgtcctcttcgcctaatcgcgtgtagattctgtggagatatggtggaagcgggtaactctgcagctgatactagagacaggatgagaggaatgtctgaacatgagagtacttgtggttcaagaactgcaccatgcgactcatgtggtcgatctgtgatgctcaaagacatggacattcaccagattgctgttcatggcaagagtagctga

SEQ ID NO: 13246 - protein, 561 aa, Arabidopsis thaliana
MDFELRSAKEKLEREQRERKQRAKLKLEREKKSKEAAIKQREAIEAAQRARRLDAIEAQIKADQHMQESLVSGDGIVFERVFQAVSFQGNGDKIKLPPSCFTELSDQGAFDKGPLYFELSVVDHADNKKTTHSGVLEFTAEDGTIGLPPHVWSNLFSTHDPMDVPLVEIRYIRLPKGSYAKLQPDNLGFSDLPNHKAILETILRQHATLSLDDVLLVNYGQVSYKLQVLELRPATSISVLETDIEVDIVSPDIVSDQPNQHVLKPLQYGKSESGTVEEGRYDYYKFVIDEATVEKVMAGSVKVIVKVDVEKVGADTDLYVSKHPVLFPSLNQHEWSSHDVGSKTLILVSKERALSSGTYSIGVYGFKGTVKYQVSVLVQESIDGAKVGERAVSSSSDVDTVECRNCKHSIPSRSIALHEVYCSRHNVVCNHHGCGIVLRVEEAKNHLHCEKCGKALQPTEMEKHLKVFHEPLTCGCGIVLEKEQMVQHQGKDCPLRLIACRFCGDMVEAGNSAADTRDRMRGMSEHESTCGSRTAPCDSCGRSVMLKDMDIHQIAVHGKSS

SEQ ID NO: 13247 - DNA, 1704 bp, Zea mays
  CDS (1)..(1704)
atggatttcgagctgcggcaggcgcgggagaagctggagcgcgagcagcgggagcggatgcagcgcgccaaggccaaagcggagcgcgagagcctggccaaggcagaggcggcgcgccgccaggaagcgctcgaggcgtcccaccgcgagcgacgactcgatgccgcacgggcccaggaagaggctgaccggacaatggaagaggtgatgcagctggggaaggggatttcattctcgcacatgtttgaggcacttcgatatgatggccctggggataagatcaagttgccaccatcttcgtttaaggagttgtctgatgaaggagctctcgataaaggtcccatgtacttcaggttgtcgaaggttagggacacagtcccaggtgctgctatggaacaagatgctgggacaacctgttgtggtgttcttgaattcacggcaagggaaggctctgctgaactcccgctgcatgtttggaacaacctgtttgggagtgacaccccagaggtccctctaattgaagtcaaatataccagtttgctcaaaggaacatatgcaaagttgaagccagaaggaggtgggttttcagatctccctaaccatagagcagtcctcgaaacagcgctccgcaatcatgcaacactatctgaaaatgatactgttgtggtaaactatggacagctgcagtacaagttgaaggttcttgaactgaagcctgcctcaagtgtatctgtcctagagacagatgttgaagttgacatcgtgggatcagattcggttttggacaacgaagatgaccaacatgtgcttgtgcctcttgtaattggaaatatagaatccagtgttgtggaagaaggaaagttcaggtactacaaattttcagttgaaggaaatgtgagtgagaaagtagcttctgggcatgcaaatatcgagattaaaatagatacggacgcgagcggtggtgacactgatatctatgtttcaagacatcctttagtatttccaactcagcaccgacatgagtggtcttctcatgaaatgggatcgaaggttcttatactcaaaccacgggatgctacattggtcagtggtgtttacagtattggagtttatggtttcaaagggacttctaagtaccagctctctgtagctatcaaggatgttagtggccaaaggattggtgaatatgctagtgcctcgggaagtgttgattttgattctgtgctgtgtagaaactgtaagcgccatatagccagccagtctgctcatcttcatgaggcatactgcatgagacacaatgtagcctgctcacatgatgggtgtggagttgtccttcggaaggaagaagcagcagatcatgtgcactgcaacaagtgcggacgagcttaccagcagagagaaatggaaaagcatatgaaagtcttccatgaaccgttgcagtgcccctgtggggtggtcctggagaaggaagatatggttcagcaccagtccttgacttgccccttgcgattaattgtgtgccgcttctgtggtgacacagtccaggctggtggagagccttctgatgttcgtgacaggatgcgaaacatgtctgagcatgagagtatctgcggatccaggacagcaccatgtgactcctgtggacggtcgatcatgcttaaggagatggagattcatcttattgctgtgcatcagaagagctaa

SEQ ID NO: 13248 - protein, 567 aa, Zea mays
MDFELRQAREKLEREQRERMQRAKAKAERESLAKAEAARRQEALEASHRERRLDAARAQEEADRTMEEVMQLGKGISFSHMFEALRYDGPGDKIKLPPSSFKELSDEGALDKGPMYFRLSKVRDTVPGAAMEQDAGTTCCGVLEFTAREGSAELPLHVWNNLFGSDTPEVPLIEVKYTSLLKGTYAKLKPEGGGFSDLPNHRAVLETALRNHATLSENDTVVVNYGQLQYKLKVLELKPASSVSVLETDVEVDIVGSDSVLDNEDDQHVLVPLVIGNIESSVVEEGKFRYYKFSVEGNVSEKVASGHANIEIKIDTDASGGDTDIYVSRHPLVFPTQHRHEWSSHEMGSKVLILKPRDATLVSGVYSIGVYGFKGTSKYQLSVAIKDVSGQRIGEYASASGSVDFDSVLCRNCKRHIASQSAHLHEAYCMRHNVACSHDGCGVVLRKEEAADHVHCNKCGRAYQQREMEKHMKVFHEPLQCPCGVVLEKEDMVQHQSLTCPLRLIVCRFCGDTVQAGGEPSDVRDRMRNMSEHESICGSRTAPCDSCGRSIMLKEMEIHLIAVHQKS

SEQ ID NO: 13249 - DNA, 1710 bp, Oryza sativa
  CDS (1)..(1710)
atggatttcgagctgcgcaaggcgcgggagaagctggagcgggagcagcgggagcgcgtgcagcgcgccaaggacaaggccgaccgcgagcgccgcgccaaggccgaggccgcgcgccgccgcgacgcgctcgaggcgtcccaccgcgagcgccgcctcgacgccgcccgcgcgcaggaagaggctcagcagaagatggaagaggtgatgcaacttggaaaggggatttctttcttgcacatgtttgaagctcttcgatatgatggtcctggggataagatcaagttgccaccatcgtcttttaaggaattgtctgatgaaggagcactggacaaaggtcccatgtacttcaggttgtcaaaggttagagacagtgttccgggtgcccctcaggataatgatgccgatgaggcaacatgttgtggtgttcttgagttcactgcaagggaaggctccgcagaactcactccacatgtgtggaacaatctgttccggggtgatagcccagatgttcctctgattgaggttaggtatgtcagtttacccaaagggacatatgcgaagctgaagccagaaggagtggggttctcagaccttcctaaccatagggctgtccttgaaacggcactccgcaatcatgcaacactatctgaaaatgattttgttgtggtgaattatgggcagctgcaatacaagttgaaggttcttgaattaaaacctgcatcaagtgtttctgtcctggagacagatgtggaagttgacattgaaggaccagattcagttttggacaacgtagagaatcaacatgtgcttgtgccacttgagactggaaaggttgaatctggagttgtggaagaaggaaagtttaggtactacaaatttcttgttgatgaaggtatgggtgagaaagtagcttctaggcatgcaaatattgaggttaagatagagacatatacaagtggtggtgacactgatatttatgtatcaaggcatcctttagttttcccaactcagcaccgtcacgaatggtcttctcatgaaatgggatctaaggtcctcatactgaaaccaagggatgccagtctctccagtggtacctacagtattggagtttatggtttcaagggaaccactaaataccaactttctgtagctattaaagatgttcttaatggccaaaggattggtgagcaggctagtgcctcatctagtgttgatgttgattcagtggtgtgcaagaactgcaaacgctatatatccaaccgaacttcactacttcatgaagcatactgtgtgagacacaatgttgtttgcatgcatgatgggtgtggtgttgttcttcgaaaggaggaagcaacagatcacgtgcattgcaacaagtgtgggcaagctttccagcagagagaaatggagaagcacatgaaagttttccatgagccactacaatgcccttgtggggtggtccttgaaaaggaagatatggttcaacaccaatcctcaacctgccctttgcgcttgattgtgtgccgattttgtggtgacactgttcaagctggtggagaaccacttgatgctcgggatcggcttcgcaacatgtgtgagcacgagagtatctgtggatccaggactgcaccatgtgattcttgtggacggtcagtcatgctgaaggacatggacattcatgtgattgctgtgcatcagaagagctaa

SEQ ID NO: 13250 - protein, 569 aa, Oryza sativa
MDFELRKAREKLEREQRERVQRAKDKADRERRAKAEAARRRDALEASHRERRLDAARAQEEAQQKMEEVMQLGKGISFLHMFEALRYDGPGDKIKLPPSSFKELSDEGALDKGPMYFRLSKVRDSVPGAPQDNDADEATCCGVLEFTAREGSAELTPHVWNNLFRGDSPDVPLIEVRYVSLPKGTYAKLKPEGVGFSDLPNHRAVLETALRNHATLSENDFVVVNYGQLQYKLKVLELKPASSVSVLETDVEVDIEGPDSVLDNVENQHVLVPLETGKVESGVVEEGKFRYYKFLVDEGMGEKVASRHANIEVKIETYTSGGDTDIYVSRHPLVFPTQHRHEWSSHEMGSKVLILKPRDASLSSGTYSIGVYGFKGTTKYQLSVAIKDVLNGQRIGEQASASSSVDVDSVVCKNCKRYISNRTSLLHEAYCVRHNVVCMHDGCGVVLRKEEATDHVHCNKCGQAFQQREMEKHMKVFHEPLQCPCGVVLEKEDMVQHQSSTCPLRLIVCRFCGDTVQAGGEPLDARDRLRNMCEHESICGSRTAPCDSCGRSVMLKDMDIHVIAVHQKS

SEQ ID NO: 13251 - DNA, 2163 bp, Oryza sativa
  CDS (193)..(1902)
gagaagcttcctccaactccggccgccaccgacccccctcgacacccgactccctccataaatttccccccctcccgcggccgccgggagatcatcgccgacgacaaccagagcagaggagaggggaggggaacccaagcaagcaatcagcgtggaatcggatcgggtacgaggaggaggaggaggagggggatggatttcgagctgcgcaaggcgcgggagaagctggagcgggagcagcgggagcgcgtgcagcgcgccaaggacaaggccgaccgcgagcgccgcgccaaggccgaggccgcgcgccgccgcgacgcgctcgaggcgtcccaccgcgagcgccgcctcgacgccgcccgcgcgcaggaagaggctcagcagaagatggaagaggtgatgcaacttggaaaggggatttctttcttgcacatgtttgtagctcttcgatatgatggtcctggggataagatcaagttgccaccatcgtcttttaaggaattgtctgatgaaggagcactggacaaaggtcccatgtacttcaggttgtcaaaggttagagacagtgttccgggtgcccctcaggataatgatgccgatgaggcaacatgttgtggtgttcttgagttcactgcaagggaaggctccgcagaactcactccacatgtgtggaacaatctgttccggggtgatagcccagatgttcctctgattgaggttaggtatgtcagtttacccaaagggacatatgcgaagctgaagccagaaggagtggagttctcagaccttcctaaccatagggctgtccttgaaacggcactccgcaatcatgcaacactatctgaaaatgattttgttgtggtgaattatgggcagctgcaatacaagttgaaggttcttgaattaaaacctgcatcaagtgtttctgtcctggagacagatgtggaagttgacattgaaggaccagattcagttttggacaacgtagagaatcaacatgtgcttgtgccacttgagactggaaaggttgaatctggagttgtggaagaaggaaagtttaggtactacaaatttcttgttgatgaaggtatgggtgagaaagtagcttctaggcatgcaaatattgaggttaagatagagacatatacaagtggtggtgacactgatatttatgtatcaaggcatcctttagttttcccaactcagcaccgtcacgaatggtcttctcatgaaatgggatctaaggtcctcatactgaaaccaagggatgccagtctctccagtggtacctacagtattggagtttatggtttcaagggaaccactaaataccaactttctgtagctattaaagatgttcttaatggccaaaggattggtgagcaggctagtgcctcatctagtgttgatgttgattcagtggtgtgcaagaactgcaaacgctatatatccaaccgaacttcactacttcatgaagcatactgtgtgagacacaatgttgtttgcatgcatgatgggtgtggtgttgttcttcgaaaggaggaagcaacagatcacgtgcattgcaacaagtgtgggcaagctttccagcagagagaaatggagaagcacatgaaagttttccatgagccactacaatgcccttgtggggtggtccttgaaaaggaagatatggttcaacaccaatcctcaacctgccctttgcgcttgattgtgtgccgattttgtggtgacactgttcaagctggtggagaaccacttgatgctcgggatcggcttcgcaacatgtgtgagcacgagagtatctgtggatccaggactgcaccatgtgattcttgtggacggtcagtcatgctgaaggacatggacattcatgtgattgctgtgcatcagaagagctaactattgtaaagcattggctctgagaaagatggcctgtcctttatcctgctgggctttaaccaccaaggccatgaagtttcagcactgctggaccaaatgttatttccttttgtgttacatatatcttgtgtcattggttaaattgtaacactgcgtatgggagcttggaacactggggcggtgtatgggagtatggaacacagtggcggtgtctccttatgtatacacaaaccatctataatatttgatttgagctttctc

SEQ ID NO: 13252 - protein, 569 aa, Oryza sativa
MDFELRKAREKLEREQRERVQRAKDKADRERRAKAEAARRRDALEASHRERRLDAARAQEEAQQKMEEVMQLGKGISFLHMFVALRYDGPGDKIKLPPSSFKELSDEGALDKGPMYFRLSKVRDSVPGAPQDNDADEATCCGVLEFTAREGSAELTPHVWNNLFRGDSPDVPLIEVRYVSLPKGTYAKLKPEGVEFSDLPNHRAVLETALRNHATLSENDFVVVNYGQLQYKLKVLELKPASSVSVLETDVEVDIEGPDSVLDNVENQHVLVPLETGKVESGVVEEGKFRYYKFLVDEGMGEKVASRHANIEVKIETYTSGGDTDIYVSRHPLVFPTQHRHEWSSHEMGSKVLILKPRDASLSSGTYSIGVYGFKGTTKYQLSVAIKDVLNGQRIGEQASASSSVDVDSVVCKNCKRYISNRTSLLHEAYCVRHNVVCMHDGCGVVLRKEEATDHVHCNKCGQAFQQREMEKHMKVFHEPLQCPCGVVLEKEDMVQHQSSTCPLRLIVCRFCGDTVQAGGEPLDARDRLRNMCEHESICGSRTAPCDSCGRSVMLKDMDIHVIAVHQKS

SEQ ID NO: 13253 - DNA, 1710 bp, Vitis vinifera
  CDS (1)..(1710)
atggatttcgagctgagaagagccagagagaagctcgagagagagcagaaggagaggaaggagaaagcaaggttgaagttggaaagggatagaaaatccaaacaggaagcggcccgccagcgcgatgccattgaagcggttcagagatctcggcgccttgacgccgccgaagcccaactcaaggctgatcagcaaatggaagaaagtttacttgctggcagaggagtaatgttttttcgtattttagaagctgttgcttatcagggtaatggagataagatcaaattgccaccttcctgctttaaggaattatctgatcagggtgcttttgataaagggccactttactttgggctttcagttgttcatcaagagggttctttagatacaaaggcagctgaaacacaaaatcagaggacaactcatgcaggtgttctggaattcactgcagaggaaggttctgtcagccttcctcctcatgtatggagtaacttgtttccggaggaaaccttaaagtctccattggttgaagttcgttatctttggctcccaaaaggaacttatgcaaaacttcaagcagatgggattggcttttcagacatacccaatcacaaggctgtccttgaaacaagactacgccagcatgccactctttctcaagatgatgtcctgatcgtgaaccatggggagttgacatacaagttaaaggttcttgagttaaaaccatcctcaagtatatctgtcctggaaacagatattgaggttgatatagtgggtcctgattcggtttcagggaggacaaatcagcagttcctgaaaccactggaatttggaaaatcagagactggaatggttgaggaaggtaattatgtgtattacaagttctcaatggatggtgacatcttggggataattgcttctggggatgcaagaattgaggtaaagatagaagcagagtcagatggtggagatactgatctttacatttcgagacatcccctcatattcccaaataggcaccaacatgaatggtcttctcatgatgtgggttcaaaaactttgatactgagtcataaggatcagagcttggaagcaggtacttttagcattggtgtctatggctttaaaggaacaacaaagtaccagatatcggtaagtgttcaagataacttaaaccacaaggtgggtcaacaagctacatcttcttcatctatggaggtggataccgtagagtgtaggaattgcaagcattatatacccagtagatctatagcactgcatgaggcctattgtagcagacataacatcatttgtccacatgctggttgtggggttgttctcagggtggcagaggccaagaaccatgtgcattgtgacaaatgtgggcaagcccttcaaaggggagagatggagaagcacatgaaagtgttccatgaaccacttcactgcccatgcggggtagtacttgagaaggaactaatggtgcaacaccaggcttcagcgtgccctcttcgcctaataacatgccggttttgtggtgacatggttcaggctgggagttctgccatggacgtccgagaccgattaagaggactgtctgagcatgaaagcatctgtggctcaagaaccgccccatgcgactcatgtgggcgttccgtcatgctaaaagagatggacatccaccaaatagccgttcatcagaggaactaa

SEQ ID NO: 13254 - protein, 569 aa, Vitis vinifera
MDFELRRAREKLEREQKERKEKARLKLERDRKSKQEAARQRDAIEAVQRSRRLDAAEAQLKADQQMEESLLAGRGVMFFRILEAVAYQGNGDKIKLPPSCFKELSDQGAFDKGPLYFGLSVVHQEGSLDTKAAETQNQRTTHAGVLEFTAEEGSVSLPPHVWSNLFPEETLKSPLVEVRYLWLPKGTYAKLQADGIGFSDIPNHKAVLETRLRQHATLSQDDVLIVNHGELTYKLKVLELKPSSSISVLETDIEVDIVGPDSVSGRTNQQFLKPLEFGKSETGMVEEGNYVYYKFSMDGDILGIIASGDARIEVKIEAESDGGDTDLYISRHPLIFPNRHQHEWSSHDVGSKTLILSHKDQSLEAGTFSIGVYGFKGTTKYQISVSVQDNLNHKVGQQATSSSSMEVDTVECRNCKHYIPSRSIALHEAYCSRHNIICPHAGCGVVLRVAEAKNHVHCDKCGQALQRGEMEKHMKVFHEPLHCPCGVVLEKELMVQHQASACPLRLITCRFCGDMVQAGSSAMDVRDRLRGLSEHESICGSRTAPCDSCGRSVMLKEMDIHQIAVHQRN

SEQ ID NO: 13255 - DNA, 1704 bp, Populus trichocarpa
  CDS (1)..(1704)
atggattttgagctgagaagagcgagagagaagttagagaaagaacagaaagagaggaaagaaagagccaagcttagacttgatagagagaggaaagccaaagaagaggcaagaaagcaaagagaagccatcgaagctgttcatcgatctcgaaggctcgatgccattcaagcccagctcaaggttgatgagcaaatgcaagaaaatttgcttgcagggagaggaatagtattttctcgcatcctagaagctgtatcttttcagggtagtggagataagattaaattacctccttcttgcttcacaggattgtctgatcaaggtgcatttgataaaggaccattgtatttccaattatcagtggttcatcaagaaggttcttcagagatgattgacactgactcaaagcagtcgacgacccactcaggtgttcttgagtttactgcagaagagggttcagtagggcttcctcctcatgtatggagtaacctctttcccatagattctccaaaggctcctttgattgaggttcagtatgtctggctgcctaaaggaacttatgcaaagcttcagccagatgttgttgggttttcagacttgcccaatcataaggctgtacttgaaacaagccttcggcaacatgctacgctttctgaaggtgatgtgatcactgtcaaccatgggatactgacatacaagttacaggttctggagttgagaccttcgtcgagtgtctctgtcttggaaacagatattgaggttgatgttgttggtccagattcaggtctggagagcagtcaacctgtgctgaagcctcttatatttgggaaggcagaatctgggatggtggaagaaggaaactataactattttaaattctctattgataatgatatttgggacagaattgctgctgaggatgttagggtcgaggtaaggatagaggccgagaccaataatggcgatactgatctttacatgtcaaagcatcctcttatgtttccaaccagacaccaacatgaatggtcttctcatgatataggttcaaaagttttgatacttggctctaaggataagaacttgggaatgggtgcttacagcattggtgtgcatggtttcaaaggaacaacaaagtacaatgtagcagtgagtgttcaagagaatagcaaccacaaggtgggtcaacaagctggatcttcatcatctatggacattgatgctgtagagtgtaggaactgcaagcattttatacccagcagaagtatagcattgcacgaagccttctgtagcagacataatattgtttgttcacatcctggctgtggaattgttctgaggattgaagagtccaaaaaccatttgcactgtgacaaatgtgggcaagcttttcaacagggtgaaatggagaagcacatgaaagttttccatgaaccacttcaatgcccatgtggggtggtccttgaaaagaaccagatggtacaacaccaggcttcaatctgtcccgtccgtcttattacatgccggttttgtggtgacatggttcaagctgggacttcagctatggatgtgcgtgatcgattgagaggattaactgagcatgagagtgtttgtggatctagaactgctccatgcgactcttgtggacgatcagtgatgttgaaggagatggacatacaccaaattgctgtccatcaaaaaagttga

SEQ ID NO: 13256 - protein, 567 aa, Populus trichocarpa
MDFELRRAREKLEKEQKERKERAKLRLDRERKAKEEARKQREAIEAVHRSRRLDAIQAQLKVDEQMQENLLAGRGIVFSRILEAVSFQGSGDKIKLPPSCFTGLSDQGAFDKGPLYFQLSVVHQEGSSEMIDTDSKQSTTHSGVLEFTAEEGSVGLPPHVWSNLFPIDSPKAPLIEVQYVWLPKGTYAKLQPDVVGFSDLPNHKAVLETSLRQHATLSEGDVITVNHGILTYKLQVLELRPSSSVSVLETDIEVDVVGPDSGLESSQPVLKPLIFGKAESGMVEEGNYNYFKFSIDNDIWDRIAAEDVRVEVRIEAETNNGDTDLYMSKHPLMFPTRHQHEWSSHDIGSKVLILGSKDKNLGMGAYSIGVHGFKGTTKYNVAVSVQENSNHKVGQQAGSSSSMDIDAVECRNCKHFIPSRSIALHEAFCSRHNIVCSHPGCGIVLRIEESKNHLHCDKCGQAFQQGEMEKHMKVFHEPLQCPCGVVLEKNQMVQHQASICPVRLITCRFCGDMVQAGTSAMDVRDRLRGLTEHESVCGSRTAPCDSCGRSVMLKEMDIHQIAVHQKS

SEQ ID NO: 13257 - DNA, 1704 bp, Sorghum bicolor
  CDS (1)..(1704)
atggatttcgagctgcggcaggcgcgggagaagctggagcgcgagcagagggagcggatgcagcgcgccaaggccaaggccgagcgcgagcgccgggccaaggccgaggcggcgcgccgccgggaagcgctcgaggcgtcccatcgcgagcgacgactcgacgccgcacgcgcccaggaagaggctgaccagaaaatggaagaggtgatgcagctggggaagggagtttcattctcgcacatgtttgaggcacttcgttatgatggccctggggataagatcaagctgccaccatcttcgtttaaggagttgtctgatgaaggagctctcgataaaggtcccatgtacttcaggttgtccaaagttagggacacagtcccaggtacctctatggaacaagatgccgaggcgacctgttgtggtgttcttgaattcactgcaagggaaggctctgctgaactcccgctgcatgtttggaacaacctgtttcggagtgacaccccagaggtccctctgattgaagtcaaatatatcagtttgcccaaaggaacctatgcaaagttgaagccagaaggagctggattttcagatcttcctaaccatagagcagtccttgaaacagcactccgcaatcacgcaacactttctgaaaacgatactgttgtggtgaactatgggcagctggaatacaagttaaaggttcttgaactgaagcctgcatcaagtgtatctgtcctagagacagatgttgaagttgacattgagggatcagattcggttttggacaacgaagaggaccaacatgtgcttgtgcctcttgtaattggaaacatagaatccagtgttgtggaagaaggaaagttcaggtactacaaattttcagttgaagaaaatgtgagtgagaaagtagcttctgggcgcgcaaatatcgaggttaaaatagataccgatgcgagcggtggcgacactgatatctatgtttcaagacatcctttagtattcccaactcagcaccgacatgagtggtcttcccatgaaatgggatcgaaggttcttatactcaaaccacgggatgctacattggtcactggtgtttacagtatcggagtttatggtttcaaagggacttccaagtaccagctctctgtagctatcaaggatgttaatagccaaaggattggtgaatatgctagtgcctcaggaagtgttgatgttgattcagtgctgtgtaagaactgtaagcgccatatagccagccggtctgctcctcttcatgaggcatactgcatgagacacaatgtcgcctgcccgcatgatggatgtggagttgttctccggaaggaagaagcagcagatcatgtgcactgcaacaagtgtgggcgagcttgccagcagagagaaatggagaagcatatgaaagtcttccatgaaccgttgcagtgcccctgtggggtggtcctggagaaggaagatatggttcagcaccaatcctcgacctgccccctgcgattgattgtgtgccgcttctgtggtgacacagtccatgctggtggagagcctgctgatgttcgtgaccggttgcgaaacatgtctgagcatgagagtatctgcggatccaggacagcaccatgtgactcctgtggacggtcggtcatgctgaaggagatggacattcatcttattgctgtgcaccagaagagctga

SEQ ID NO: 13258 - protein, 567 aa, Sorghum bicolor
MDFELRQAREKLEREQRERMQRAKAKAERERRAKAEAARRREALEASHRERRLDAARAQEEADQKMEEVMQLGKGVSFSHMFEALRYDGPGDKIKLPPSSFKELSDEGALDKGPMYFRLSKVRDTVPGTSMEQDAEATCCGVLEFTAREGSAELPLHVWNNLFRSDTPEVPLIEVKYISLPKGTYAKLKPEGAGFSDLPNHRAVLETALRNHATLSENDTVVVNYGQLEYKLKVLELKPASSVSVLETDVEVDIEGSDSVLDNEEDQHVLVPLVIGNIESSVVEEGKFRYYKFSVEENVSEKVASGRANIEVKIDTDASGGDTDIYVSRHPLVFPTQHRHEWSSHEMGSKVLILKPRDATLVTGVYSIGVYGFKGTSKYQLSVAIKDVNSQRIGEYASASGSVDVDSVLCKNCKRHIASRSAPLHEAYCMRHNVACPHDGCGVVLRKEEAADHVHCNKCGRACQQREMEKHMKVFHEPLQCPCGVVLEKEDMVQHQSSTCPLRLIVCRFCGDTVHAGGEPADVRDRLRNMSEHESICGSRTAPCDSCGRSVMLKEMDIHLIAVHQKS

SEQ ID NO: 13259 - DNA, 1713 bp, Ricinus communis
  CDS (1)..(1713)
atggattttgaactgagaagggcaagagagaagcttgaaaaagaacaaaaagacaggaaagagaaagcaagattgagacttgaaagggagagaaaggctaaagatgaagctaagaaacaaagagaagccattgaagctgcacaaagatctcgaaggcttgatgctattcaagcacagattaaggctgatgagcaaatgcaagaaaatttaattgctggtagaggaattgcattttcttgtatcttggaagctgtaccttttcagggtaatggagacaagattaaacttccatcttcctgtttcacagaattatccgatcaaggtgcttttgacaaaggaccgatatatttccaattatctgtgattcatcaagaaggctcttctgagatgaaaactactgactcagagcagaaaatcacgcactcaggtgtcctagagttcactgcagaagaaggttctgttgggcttcctcctcatgtatggaataacttgttcccttcaggacctttggaagttcctctggttgagattcgttatcgttggctgcctaaaggaacctatgcaaagcttcaacctgaggttgttggcttttcagaccttcctaatcacaaggctatcctagaaacaacgcttcgccagcatgcgactctttctcaaggtgatgtgatcactgtcaaccatgggatactgacatacaaattacgggttctagagttgaaaccttcctctagtgtctctgttctggaaacagatattgaggttgacatagttggtccagattccacttcggtttcagagactgcaaatcaacatgttctgaagccacttactgttgggaccttggaatctggaatggtcgaggaagggaattatgagtattataaattttctatcgataatgaaacatgggaaaagatcgcttctgatgatattagagtcgaagtgaagatagatgctgaaactggtagtggtgatactgatctttacgtatcaaagcatcccctcatattcccaaccagacatcaacatgaatggtcttctcatgatatgggttcaaaggttttgatactcagctctaaggataagaacctaggggtgggtatttatagcattggtgtatatggattcaagggaacaacaaagtacaaggcattattaagtgttcaagataacaataatctgaaaacgggtcaacaggctggatcttcatcatccatggaagttgatactgtagaatgtcgaaattgcaagcattttatacccaataggagtatagcactgcatgaagcgtattgtagcagacataatattgtttgtcagcatgctggatgtggtattgttttaaggactgaggaggccaaaaaccatatgcactgcgagaaatgtggtcaagcttttctaaagggagaaatggagaagcacatgaaaattttccatgaaccccttcagtgcccctgtggagtagtgcttgagaaggaacagatggtgcaacaccaagcttcagcttgtcccctacgtcttatcacatgccgattttgcggcgacatggttcaagctgggagttccgctatggatgtgcgggaccgattaagaggattatctgagcatgagagtgtctgcggatccagaacagctccatgcgactcttgtggccggtctgtcatgttgaaggaaatggacattcatcaaattgctgttcaccagaaaagttaa

SEQ ID NO: 13260 - protein, 570 aa, Ricinus communis
MDFELRRAREKLEKEQKDRKEKARLRLERERKAKDEAKKQREAIEAAQRSRRLDAIQAQIKADEQMQENLIAGRGIAFSCILEAVPFQGNGDKIKLPSSCFTELSDQGAFDKGPIYFQLSVIHQEGSSEMKTTDSEQKITHSGVLEFTAEEGSVGLPPHVWNNLFPSGPLEVPLVEIRYRWLPKGTYAKLQPEVVGFSDLPNHKAILETTLRQHATLSQGDVITVNHGILTYKLRVLELKPSSSVSVLETDIEVDIVGPDSTSVSETANQHVLKPLTVGTLESGMVEEGNYEYYKFSIDNETWEKIASDDIRVEVKIDAETGSGDTDLYVSKHPLIFPTRHQHEWSSHDMGSKVLILSSKDKNLGVGIYSIGVYGFKGTTKYKALLSVQDNNNLKTGQQAGSSSSMEVDTVECRNCKHFIPNRSIALHEAYCSRHNIVCQHAGCGIVLRTEEAKNHMHCEKCGQAFLKGEMEKHMKIFHEPLQCPCGVVLEKEQMVQHQASACPLRLITCRFCGDMVQAGSSAMDVRDRLRGLSEHESVCGSRTAPCDSCGRSVMLKEMDIHQIAVHQKS

SEQ ID NO: 13261 - DNA, 1710 bp, Oryza sativa subsp. japonica
  CDS (1)..(1710)
atggatttcgagctgcgcaaggcgcgggagaagctggagcgggagcagcgggagcgcgtgcagcgcgccaaggacaaggccgaccgcgagcgccgcgccaaggccgaggccgcgcgccgccgcgacgcgctcgaggcgtcccaccgcgagcgccgcctcgacgccgcccgcgcgcaggaagaggctcagcagaagatggaagaggtgatgcaacttggaaaggggatttctttcttgcacatgtttgaagctcttcgatatgatggtcctggggataagatcaagttgccaccatcgtcttttaaggaattgtctgatgaaggagcactggacaaaggtcccatgtacttcaggttgtcaaaggttagagacagtgttccgggtgcccctcaggataatgatgccgatgaggcaacatgttgtggtgttcttgagttcactgcaagggaaggctccgcagaactcactccacatgtgtggaacaatctgttccggggtgatagcccagatgttcctctgattgaggttaggtatgtcagtttacccaaagggacatatgcgaagctgaagccagaaggagtggggttctcagaccttcctaaccatagggctgtccttgaaacggcactccgcaatcatgcaacactatctgaaaatgattttgttgtggtgaattatgggcagctgcaatacaagttgaaggttcttgaattaaaacctgcatcaagtgtttctgtcctggagacagatgtggaagttgacattgaaggaccagattcagttttggacaacgtagagaatcaacatgtgcttgtgccacttgagactggaaaggttgaatctggagttgtggaagaaggaaagtttaggtactacaaatttcttgttgatgaaggtatgggtgagaaagtagcttctaggcatgcaaatattgaggttaagatagagacatatacaagtggtggtgacactgatatttatgtatcaaggcatcctttagttttcccaactcagcaccgtcacgaatggtcttctcatgaaatgggatctaaggtcctcatactgaaaccaagggatgccagtctctccagtggtacctacagtattggagtttatggtttcaagggaaccactaaataccaactttctgtagctattaaagatgttcttaatggccaaaggattggtgagcaggctagtgcctcatctagtgttgatgttgattcagtggtgtgcaagaactgcaaacgctatatatccaaccgaacttcactacttcatgaagcatactgtgtgagacacaatgttgtttgcatgcatgatgggtgtggtgttgttcttcgaaaggaggaagcaacagatcacgtgcattgcaacaagtgtgggcaagctttccagcagagagaaatggagaagcacatgaaagttttccatgagccactacaatgcccttgtggggtggtccttgaaaaggaagatatggttcaacaccaatcctcaacctgccctttgcgcttgattgtgtgccgattttgtggtgacactgttcaagctggtggagaaccacttgatgctcgggatcggcttcgcaacatgtgtgagcacgagagtatctgtggatccaggactgcaccatgggattcttgtggacggtcagtcatgctgaaggacatggacattcatgtgattgctgtgcatcagaagagctaa

SEQ ID NO: 13262 - protein, 569 aa, Oryza sativa subsp. japonica
MDFELRKAREKLEREQRERVQRAKDKADRERRAKAEAARRRDALEASHRERRLDAARAQEEAQQKMEEVMQLGKGISFLHMFEALRYDGPGDKIKLPPSSFKELSDEGALDKGPMYFRLSKVRDSVPGAPQDNDADEATCCGVLEFTAREGSAELTPHVWNNLFRGDSPDVPLIEVRYVSLPKGTYAKLKPEGVGFSDLPNHRAVLETALRNHATLSENDFVVVNYGQLQYKLKVLELKPASSVSVLETDVEVDIEGPDSVLDNVENQHVLVPLETGKVESGVVEEGKFRYYKFLVDEGMGEKVASRHANIEVKIETYTSGGDTDIYVSRHPLVFPTQHRHEWSSHEMGSKVLILKPRDASLSSGTYSIGVYGFKGTTKYQLSVAIKDVLNGQRIGEQASASSSVDVDSVVCKNCKRYISNRTSLLHEAYCVRHNVVCMHDGCGVVLRKEEATDHVHCNKCGQAFQQREMEKHMKVFHEPLQCPCGVVLEKEDMVQHQSSTCPLRLIVCRFCGDTVQAGGEPLDARDRLRNMCEHESICGSRTAPWDSCGRSVMLKDMDIHVIAVHQKS

SEQ ID NO: 13263 - DNA, 1713 bp, Lotus japonicus
  CDS (1)..(1713)
atggattttgaactgagaagagcgagagagaagctagagaaagagcagaaagagaggaaagagaaagcaagattgatacagcagaaggaaagaaaagccaaagaagacgctcggaagcaaagggaagccatcgaagctgctcaaagatctcgtcgtattgatgccgctgaagcccaactcaaggctgaacaacagatgcaagaaagcctaattgcggggagaggaattgtgttttatcgtttactagaagctgtaccttttcaaggcagtggagataagatcaaactgcctccttcttgcttcacagacttgtctgataacggtgctcttgataagggacccatgtactttcagctgtcgttggttcatgttgaaggcacttcaggcattgaaggagctgacaaagagaaacaggggaccacccattcaggagttttggaattcactgcagatgaaggttcagtgggtcttcctcctcatgtatggaacaacttattttctgaagtctctgtgaactctccattagtggaagttcgttatgtttggcttcccaaaggaacatatgcaaaacttcaacctgaaagagcaggattttctgatttgccaaatcataaggctattctcgaaacaagtcttcgacagcatgctactctatctcaaggtgacatattaacagtaaattatggagaacttgcctacaaattaagggtgcttgagttaaaaccttctacaagtgtatctgtgttagaaacagatattgaagttgacatagttgattctgatacatccttagaaaagacagatcagcatgttttaattccaattgtatttggtatgccacaaattggaacagtagaggaagggaagtttgtgtattacaaattttcaatagacaatggcacttgggagaaaatctctactggaagttctagtattgagctaaaattagaatcagagacagatgggggagatactgatcttttcatttctagacatcctctcatatttcctacacgacaccagcatgagtggtcttcacatgatattggatcaaagactttgattcttagttccaaagataaaaacttaagtgctgagacgtacagcgtaggtatatttggctttaggggaattgctaagtacaaactatcagtcatgatccaggataatctcgaccaaaaattgggtcagcaaacatcatcttccatttcatctacggaaacggatacagaaaaatgtaggaattgcaagcattacatacccaccaggacgattgcactgcatgaagcttactgtgtcaggcataatattgtctgtcagcatgtaggatgtggagttgtgcttaggattgaggagtcgaagaaccacgtccactgtgacaggtgtggacaagctttccagcaggtagaattggaaaagcacatgaaagtttttcatgagccactacgctgcccttgtggaataatccttgagaaagagcaaatggtggaacaccaagcttcagtttgccccttgcggctaatttcatgcaggttttgtggtgacatggttcaagctggaagttctgccatggagatccgtgacagaatgagaggattgtctgagcatgagagcgtttgtgggtctaggacagccccctgtgattcttgtggacgttcagtgatgctgaaggatatggatatacaccaggttgctgttcatcaaaaaagttaa

SEQ ID NO: 13264 - protein, 570 aa, Lotus japonicus
MDFELRRAREKLEKEQKERKEKARLIQQKERKAKEDARKQREAIEAAQRSRRIDAAEAQLKAEQQMQESLIAGRGIVFYRLLEAVPFQGSGDKIKLPPSCFTDLSDNGALDKGPMYFQLSLVHVEGTSGIEGADKEKQGTTHSGVLEFTADEGSVGLPPHVWNNLFSEVSVNSPLVEVRYVWLPKGTYAKLQPERAGFSDLPNHKAILETSLRQHATLSQGDILTVNYGELAYKLRVLELKPSTSVSVLETDIEVDIVDSDTSLEKTDQHVLIPIVFGMPQIGTVEEGKFVYYKFSIDNGTWEKISTGSSSIELKLESETDGGDTDLFISRHPLIFPTRHQHEWSSHDIGSKTLILSSKDKNLSAETYSVGIFGFRGIAKYKLSVMIQDNLDQKLGQQTSSSISSTETDTEKCRNCKHYIPTRTIALHEAYCVRHNIVCQHVGCGVVLRIEESKNHVHCDRCGQAFQQVELEKHMKVFHEPLRCPCGIILEKEQMVEHQASVCPLRLISCRFCGDMVQAGSSAMEIRDRMRGLSEHESVCGSRTAPCDSCGRSVMLKDMDIHQVAVHQKS

SEQ ID NO: 13265 - DNA, 1710 bp, Triticum aestivum
  CDS (1)..(1710)
atggatttcgagctgcggagcgcgcgggagaagctggagagggagcagcgggagcggatgcagcgcgctaaggccaaagccgaccgcgagcgccgcgccaaggccgaggccgcgcgccgccgcgacgcgctcgaggcctcaaacagggagcgccgcctcgacgccgcccgggcgcaggaagaggctgaccagaaaatggaagaggtgatgcaactaggaaaggggatatctttttcacacatgtttgaagcactgcgatatgacggtccaggggataagattaagctgccaccatcttctttcaaggatttatccgatcaaggagcgcttgacaaaggtcccatgtacttcaggctgtccaaggttagggacagagttccaggtgcctctccagatcaagacgccgaggaggcaacctgctgtggcgttcttgaattcactgcaagggaaggctctgcacaactcccatcacatgtctggaacaatttgtttcagagtgacatcccagatgttcctttgattgaggtgaggtatgcaagtttgcccaaagggacatatgcgaaacttaagccggaaggagtgggattctcagatctccctaaccatagagctgtccttgaaacggcactgcgcaatcacgcaacactatctgaaaatgatgttgtcatggtcaactacggacaactgcagtataagttgaaggttcttgagttgaagcccgcatcaagtgtttctgtgctggagacggatgttgaagttgacattgaggaaccagattcagttttcgacaatgaagaaaatcaacatgtgcttgtgccgctcgagactgggaaggtcgaatctggagctgtggaagaagggaagttcaggtactacaaattttctgtcgaggaaggtgtggctgagaaagttgcgtctggttgtgcaaatattgaggtaaagatagagtctgatacaagtggcggtgacactgatatttatgtttcaaggcatcctttagtattcccaactcagcaccgtcatgagtggtcatctcatgagatgggatctaaggttcttatactcaaaccaaaggatgctactttggtcagtggcctttacagtgttggggtttacggtttcaagggcacagcgaagtttcaactttctgtagctatcaaggatgttattgatagccaaaggattggtgagcagggtagtgtgtcatcagccgtcaatggtgactcagtggtttgtaagaactgcaaacgacatatatctagccggacctcagtacttcatgaggcatactgtgtgaggcacaatgttatttgcatgcatgatggatgtggagtagttcttcgtaaggaagcagcagcagatcatgtgcattgcagtaagtgtggacaagctttccagcagagagaaatggagaagcacatgaaagtcttccatgagccgctgaactgcccctgcggggtagttctagaaaaggaagaaatggtcaaacaccaatcctcaacctgcccatttcgcttgattgtgtgccgtttctgtggcgacacggttcaagctggtggacagccgctggatgttcgagatcggcttcgaaacatgtgcgaacatgagagtatctgtggatccaggactgcaccatgcgactcttgtgggcgatcggtcatgcttaaggagatggacattcatgcaattgctgtccatcaaaagagctga

SEQ ID NO: 13266 - protein, 569 aa, Triticum aestivum
MDFELRSAREKLEREQRERMQRAKAKADRERRAKAEAARRRDALEASNRERRLDAARAQEEADQKMEEVMQLGKGISFSHMFEALRYDGPGDKIKLPPSSFKDLSDQGALDKGPMYFRLSKVRDRVPGASPDQDAEEATCCGVLEFTAREGSAQLPSHVWNNLFQSDIPDVPLIEVRYASLPKGTYAKLKPEGVGFSDLPNHRAVLETALRNHATLSENDVVMVNYGQLQYKLKVLELKPASSVSVLETDVEVDIEEPDSVFDNEENQHVLVPLETGKVESGAVEEGKFRYYKFSVEEGVAEKVASGCANIEVKIESDTSGGDTDIYVSRHPLVFPTQHRHEWSSHEMGSKVLILKPKDATLVSGLYSVGVYGFKGTAKFQLSVAIKDVIDSQRIGEQGSVSSAVNGDSVVCKNCKRHISSRTSVLHEAYCVRHNVICMHDGCGVVLRKEAAADHVHCSKCGQAFQQREMEKHMKVFHEPLNCPCGVVLEKEEMVKHQSSTCPFRLIVCRFCGDTVQAGGQPLDVRDRLRNMCEHESICGSRTAPCDSCGRSVMLKEMDIHAIAVHQKS

SEQ ID NO: 13267 - DNA, 1704 bp, Zea mays
  CDS (1)..(1704)
atggatttcgagctgcggcaggcgcgggagaagctggagcgcgagcagcgggagcggatgcagcgcgccaaggccaaagcggagcgcgagagcctggccaaggcagaggcggcgcgccgccaggaagcgctcgaggcgtcccaccgcgagcgacgactcgatgccgcacgggcccaggaagaggctgaccggacaatggaagaggtgatgcagctggggaaggggatttcattctcgcacatgtttgaggcacttcgatatgatggccctggggataagatcaagttgccaccatcttcgtttaaggagttgtctgatgaaggagctctcgataaaggtcccatgtacttcaggttgtcgaaggttagggacacagtcccaggtgctgctatggaacaagatgctgagacaacctgttgtggtgttcttgaattcacggcaagggaaggctctactgaactcccgctgcatgtttggaacaacctgtttgggagtgacaccccagaggtccctctaattgaagtcaaatataccagtttgctcaaaggaacatatgcaaagttgaagccagaaggaggtgggttttcagatctccctaaccatagagcagtcctcgaaacagcgctccgcaatcatgcaacactatctgaaaatgatactgttgtggtaaactatggacagctgcagtacaagttgaaggttcttgaactgaagcctgcctcaagtgtatctgtcctagagacagatgttgaagttgacatcgtgggatcagattcggttttggacaacgaagatgaccaacatgtgcttgtgcctcttgtaattggaaatatagaatccagtgttgtggaagaaggaaagttcaggtactacaaattttcagttgaaggaaatgtgagtgagaaagtagcttctgggcatgcaaatatcgagattaaaatagatacggacgcgagcggtggtgacactgatatctatgtttcaagacatcctttagtatttccaactcagcaccgacatgagtggtcttctcatgaaatgggatcgaaggttcttatactcaaaccacgggatgctacattggtcagtggtgtttacagtattggagtttatggtttcaaagggacttctaagtaccagctctctgtagctatcaaggatgttagtggccaaaggattggtgaatatgctagtgcctcgggaagtgttgattttgattctgtgctgtgtagaaactgtaagcgccatatagccagccagtctgctcatcttcatgaggcatactgcatgagacacaatgtagcctgctcacatgatgggtgtggagttgtccttcggaaggaagaagcagcagatcatgtgcactgcaacaagtgcggacgagcttaccagcagagagaaatggaaaagcatatgaaagtcttccatgaaccgttgcagtgcccctgtggggtggtcctggagaaggaagatatggttcagcaccagtccttgacttgccccttgcgattaattgtgtgccgcttctgtggtgacacagtccaggctggtggagagccttctgatgttcgtgacaggatgcgaaacatgtctgagcatgagagtatctgcggatccaggacagcaccatgtgactcctgtggacggtcgatcatgcttaaggagatggagattcatcttattgctgtgcatcagaagagctaa

SEQ ID NO: 13268 - protein, 567 aa, Zea mays
MDFELRQAREKLEREQRERMQRAKAKAERESLAKAEAARRQEALEASHRERRLDAARAQEEADRTMEEVMQLGKGISFSHMFEALRYDGPGDKIKLPPSSFKELSDEGALDKGPMYFRLSKVRDTVPGAAMEQDAETTCCGVLEFTAREGSTELPLHVWNNLFGSDTPEVPLIEVKYTSLLKGTYAKLKPEGGGFSDLPNHRAVLETALRNHATLSENDTVVVNYGQLQYKLKVLELKPASSVSVLETDVEVDIVGSDSVLDNEDDQHVLVPLVIGNIESSVVEEGKFRYYKFSVEGNVSEKVASGHANIEIKIDTDASGGDTDIYVSRHPLVFPTQHRHEWSSHEMGSKVLILKPRDATLVSGVYSIGVYGFKGTSKYQLSVAIKDVSGQRIGEYASASGSVDFDSVLCRNCKRHIASQSAHLHEAYCMRHNVACSHDGCGVVLRKEEAADHVHCNKCGRAYQQREMEKHMKVFHEPLQCPCGVVLEKEDMVQHQSLTCPLRLIVCRFCGDTVQAGGEPSDVRDRMRNMSEHESICGSRTAPCDSCGRSIMLKEMEIHLIAVHQKS

SEQ ID NO: 13269 - DNA, 20 bp, Artificial sequence
  primer
atggatttcgagcttagatc

SEQ ID NO: 13270 - DNA, 21 bp, Artificial sequence
  primer
tcagctactcttgccatgaac

SEQ ID NO: 13271 - protein, 574 aa, Artificial sequence
  consensus sequence
  Variant (7)..(7): Xaa in position 7 is any amino acid
  Variant (14)..(14): Xaa in position 14 is any amino acid
  Variant (17)..(17): Xaa in position 17 is any amino acid
  Variant (20)..(22): Xaa in position 20 to 22 is any amino acid
  Variant (24)..(28): Xaa in position 24 to 28 is any amino acid
  Variant (31)..(32): Xaa in position 31 to 32 is any amino acid
  Variant (35)..(35): Xaa in position 35 is any amino acid
  Variant (38)..(40): Xaa in position 38 to 40 is any amino acid
  Variant (42)..(42): Xaa in position 42 is any amino acid
  Variant (44)..(44): Xaa in position 44 is any amino acid
  Variant (47)..(48): Xaa in position 47 to 48 is any amino acid
  Variant (50)..(50): Xaa in position 50 is any amino acid
  Variant (56)..(57): Xaa in position 56 to 57 is any amino acid
  Variant (60)..(61): Xaa in position 60 to 61 is any amino acid
  Variant (63)..(65): Xaa in position 63 to 65 is any amino acid
  Variant (67)..(67): Xaa in position 67 is any amino acid
  Variant (69)..(72): Xaa in position 69 to 72 is any amino acid
  Variant (74)..(74): Xaa in position 74 is any amino acid
  Variant (77)..(77): Xaa in position 77 is any amino acid
  Variant (79)..(82): Xaa in position 79 to 82 is any amino acid
  Variant (85)..(88): Xaa in position 85 to 88 is any amino acid
  Variant (90)..(90): Xaa in position 90 is any amino acid
  Variant (100)..(100): Xaa in position 100 is any amino acid
  Variant (102)..(103): Xaa in position 102 to 103 is any amino acid
  Variant (107)..(107): Xaa in position 107 is any amino acid
  Variant (110)..(110): Xaa in position 110 is any amino acid
  Variant (115)..(115): Xaa in position 115 is any amino acid
  Variant (118)..(118): Xaa in position 118 is any amino acid
  Variant (121)..(121): Xaa in position 121 is any amino acid
  Variant (123)..(127): Xaa in position 123 to 127 is any amino acid
  Variant (128)..(133): Xaa in position 128 to 133 is any or no amino acid
  Variant (135)..(137): Xaa in position 135 to 137 is any amino acid
  Variant (138)..(140): Xaa in position 138 to 140 is any or no amino acid
  Variant (142)..(143): Xaa in position 142 to 143 is any amino acid
  Variant (151)..(151): Xaa in position 151 is any amino acid
  Variant (155)..(156): Xaa in position 155 to 156 is any amino acid
  Variant (158)..(159): Xaa in position 158 to 159 is any amino acid
  Variant (163)..(163): Xaa in position 163 is any amino acid
  Variant (167)..(173): Xaa in position 167 to 173 is any amino acid
  Variant (174)..(174): Xaa in position 174 is any or no amino acid
  Variant (177)..(177): Xaa in position 177 is any amino acid
  Variant (180)..(180): Xaa in position 180 is any amino acid
  Variant (182)..(183): Xaa in position 182 to 183 is any amino acid
  Variant (193)..(193): Xaa in position 193 is any amino acid
  Variant (195)..(197): Xaa in position 195 to 197 is any amino acid
  Variant (206)..(206): Xaa in position 206 is any amino acid
  Variant (208)..(208): Xaa in position 208 is any amino acid
  Variant (212)..(212): Xaa in position 212 is any amino acid
  Variant (215)..(215): Xaa in position 215 is any amino acid
  Variant (221)..(222): Xaa in position 221 to 222 is any amino acid
  Variant (224)..(226): Xaa in position 224 to 226 is any amino acid
  Variant (229)..(229): Xaa in position 229 is any amino acid
  Variant (231)..(231): Xaa in position 231 is any amino acid
  Variant (233)..(233): Xaa in position 233 is any amino acid
  Variant (237)..(237): Xaa in position 237 is any amino acid
  Variant (244)..(244): Xaa in position 244 is any amino acid
  Variant (254)..(254): Xaa in position 254 is any amino acid
  Variant (259)..(261): Xaa in position 259 to 261 is any amino acid
  Variant (264)..(268): Xaa in position 264 to 268 is any amino acid
  Variant (269)..(271): Xaa in position 269 to 271 is any or no amino acid
  Variant (276)..(276): Xaa in position 276 is any amino acid
  Variant (279)..(280): Xaa in position 279 to 280 is any amino acid
  Variant (282)..(283): Xaa in position 282 to 283 is any amino acid
  Variant (286)..(287): Xaa in position 286 to 287 is any amino acid
  Variant (292)..(294): Xaa in position 292 to 294 is any amino acid
  Variant (299)..(305): Xaa in position 299 to 305 is any amino acid
  Variant (308)..(308): Xaa in position 308 is any amino acid
  Variant (310)..(315): Xaa in position 310 to 315 is any amino acid
  Variant (317)..(317): Xaa in position 317 is any amino acid
  Variant (320)..(324): Xaa in position 320 to 324 is any amino acid
  Variant (330)..(330): Xaa in position 330 is any amino acid
  Variant (332)..(332): Xaa in position 332 is any amino acid
  Variant (334)..(334): Xaa in position 334 is any amino acid
  Variant (338)..(338): Xaa in position 338 is any amino acid
  Variant (342)..(342): Xaa in position 342 is any amino acid
  Variant (344)..(344): Xaa in position 344 is any amino acid
  Variant (351)..(352): Xaa in position 351 to 352 is any amino acid
  Variant (356)..(356): Xaa in position 356 is any amino acid
  Variant (360)..(362): Xaa in position 360 to 362 is any amino acid
  Variant (364)..(365): Xaa in position 364 to 365 is any amino acid
  Variant (367)..(368): Xaa in position 367 to 368 is any amino acid
  Variant (370)..(370): Xaa in position 370 is any amino acid
  Variant (382)..(382): Xaa in position 382 is any amino acid
  Variant (385)..(386): Xaa in position 385 to 386 is any amino acid
  Variant (389)..(391): Xaa in position 389 to 391 is any amino acid
  Variant (393)..(398): Xaa in position 393 to 398 is any amino acid
  Variant (399)..(399): Xaa in position 399 is any or no amino acid
  Variant (401)..(402): Xaa in position 401 to 402 is any amino acid
  Variant (404)..(405): Xaa in position 404 to 405 is any amino acid
  Variant (407)..(407): Xaa in position 407 is any amino acid
  Variant (408)..(408): Xaa in position 408 is any or no amino acid
  Variant (410)..(412): Xaa in position 410 to 412 is any amino acid
  Variant (414)..(414): Xaa in position 414 is any amino acid
  Variant (416)..(416): Xaa in position 416 is any amino acid
  Variant (418)..(418): Xaa in position 418 is any amino acid
  Variant (422)..(423): Xaa in position 422 to 423 is any amino acid
  Variant (425)..(426): Xaa in position 425 to 426 is any amino acid
  Variant (428)..(430): Xaa in position 428 to 430 is any amino acid
  Variant (437)..(437): Xaa in position 437 is any amino acid
  Variant (441)..(442): Xaa in position 441 to 442 is any amino acid
  Variant (444)..(444): Xaa in position 444 is any amino acid
  Variant (446)..(446): Xaa in position 446 is any amino acid
  Variant (450)..(450): Xaa in position 450 is any amino acid
  Variant (454)..(454): Xaa in position 454 is any amino acid
  Variant (458)..(459): Xaa in position 458 to 459 is any amino acid
  Variant (461)..(461): Xaa in position 461 is any amino acid
  Variant (464)..(464): Xaa in position 464 is any amino acid
  Variant (468)..(468): Xaa in position 468 is any amino acid
  Variant (470)..(470): Xaa in position 470 is any amino acid
  Variant (472)..(473): Xaa in position 472 to 473 is any amino acid
  Variant (487)..(487): Xaa in position 487 is any amino acid
  Variant (498)..(498): Xaa in position 498 is any amino acid
  Variant (504)..(506): Xaa in position 504 to 506 is any amino acid
  Variant (513)..(513): Xaa in position 513 is any amino acid
  Variant (520)..(520): Xaa in position 520 is any amino acid
  Variant (525)..(528): Xaa in position 525 to 528 is any amino acid
  Variant (530)..(530): Xaa in position 530 is any amino acid
  Variant (534)..(534): Xaa in position 534 is any amino acid
  Variant (536)..(538): Xaa in position 536 to 538 is any amino acid
  Variant (543)..(543): Xaa in position 543 is any amino acid
  Variant (562)..(562): Xaa in position 562 is any amino acid
  Variant (567)..(567): Xaa in position 567 is any amino acid
MDFELRXAREKLEXEQXERXXXAXXXXXREXXAKXEAXXXRXAXEAXXRXRRLDAXXAQXXAXXXMXEXXXXGXGIXFXXXXEAXXXXGXGDKIKLPPSXFXXLSDXGAXDKGPXYFXLSXVXXXXXXXXXXXDXXXXXXTXXGVLEFTAXEGSXXLXXHVWXNLFXXXXXXXXPLXEVXYXXLPKGTYAKLXPXXXGFSDLPNHXAXLETXLRXHATLSXXDXXXVNXGXLXYKLXVLELKPXSSVSVLETDXEVDIXXXDSXXXXXXXXQHVLXPLXXGXXESXXVEEGXXXYYKFXXXXXXXEKXAXXXXXXEXKIXXXXXGGDTDXYXSXHPLXFPTXHXHEWSSHXXGSKXLILXXXDXXLXXGXYSIGVYGFKGTXKYXXSVXXXDXXXXXXXGXXAXXSXXSXXXDXVXCXNCKXXIXXRXXXLHEAYCXRHNXXCXHXGCGXVLRXEEAXXHXHCXKCGXAXQXXEMEKHMKVFHEPLXCPCGVVLEKEXMVQHQXXXCPLRLIXCRFCGDXVQAGXXXXDXRDRXRXXXEHESXCGSRTAPCDSCGRSVMLKXMDIHXIAVHQKS

SEQ ID NO: 13272 - protein, 60 aa, Artificial sequence
  protein pattern
  Variant (3)..(3): Xaa in position 3 is any amino acid
  Variant (7)..(7): Xaa in position 7 is any amino acid
  Variant (9)..(9): Xaa in position 9 is any amino acid
  Variant (11)..(12): Xaa in position 11 to 12 is any amino acid
  Variant (18)..(18): Xaa in position 18 is Leu or Met
  Variant (26)..(26): Xaa in position 26 is any amino acid
  Variant (28)..(28): Xaa in position 28 is Gly or Pro
  Variant (31)..(31): Xaa in position 31 is Ile or Val
  Variant (36)..(36): Xaa in position 36 is Glu or Asn
  Variant (37)..(37): Xaa in position 37 is any amino acid
  Variant (40)..(40): Xaa in position 40 is any amino acid
  Variant (43)..(43): Xaa in position 43 is Ala, Gly or Ser
  Variant (44)..(45): Xaa in position 44 to 45 is any amino acid
  Variant (48)..(48): Xaa in position 48 is Phe, Leu or Val
  Variant (52)..(52): Xaa in position 52 is Ala, Thr or Val
  Variant (59)..(59): Xaa in position 59 is any amino acid
HCXKCGXAXQXXEMEKHXKVFHEPLXCXCGXVLEKXXMVXHQXXXCPXRLIXCRFCGDXV

SEQ ID NO: 13273 - protein, 60 aa, Artificial sequence
  protein pattern
  Variant (2)..(4): Xaa in position 2 to 4 is any amino acid
  Variant (6)..(6): Xaa in position 6 is Asp, Glu or Gln
  Variant (7)..(7): Xaa in position 7 is Gln or Arg
  Variant (8)..(8): Xaa in position 8 is any amino acid
  Variant (10)..(10): Xaa in position 10 is Glu or Gln
  Variant (12)..(12): Xaa in position 12 is Ser or Val
  Variant (13)..(13): Xaa in position 13 is Leu or Met
  Variant (14)..(15): Xaa in position 14 to 15 is any amino acid
  Variant (17)..(17): Xaa in position 17 is Asp, Lys or Arg
  Variant (19)..(19): Xaa in position 19 is Ile or Val
  Variant (20)..(20): Xaa in position 20 is any amino acid
  Variant (22)..(22): Xaa in position 22 is any amino acid
  Variant (23)..(23): Xaa in position 23 is His or Arg
  Variant (24)..(24): Xaa in position 24 is Ile, Leu, Met or Val
  Variant (25)..(25): Xaa in position 25 is Phe or Leu
  Variant (26)..(26): Xaa in position 26 is any amino acid
  Variant (28)..(28): Xaa in position 28 is Leu or Val
  Variant (29)..(29): Xaa in position 29 is any amino acid
  Variant (30)..(30): Xaa in position 30 is Phe or Tyr
  Variant (31)..(31): Xaa in position 31 is Asp or Gln
  Variant (33)..(33): Xaa in position 33 is Asn, Pro or Ser
  Variant (43)..(43): Xaa in position 43 is Cys or Ser
  Variant (45)..(45): Xaa in position 45 is any amino acid
  Variant (46)..(46): Xaa in position 46 is Asp or Glu
  Variant (50)..(50): Xaa in position 50 is Glu, Asn or Gln
  Variant (53)..(53): Xaa in position 53 is Phe or Leu
  Variant (58)..(58): Xaa in position 58 is Leu or Met
AXXXAXXXMXEXXXXGXGXXFXXXXXAXXXXGXGDKIKLPPSXFXXLSDXGAXDKGPXYF

SEQ ID NO: 13274 - protein, 58 aa, Artificial sequence
  protein pattern
  Variant (2)..(2): Xaa in position 2 is any or no amino acid
  Variant (4)..(4): Xaa in position 4 is any or no amino acid
  Variant (6)..(6): Xaa in position 6 is any or no amino acid
  Variant (8)..(8): Xaa in position 8 is any amino acid
  Variant (9)..(9): Xaa in position 9 is Asp or Glu
  Variant (10)..(10): Xaa in position 10 is Phe, Ile or Val
  Variant (12)..(12): Xaa in position 12 is Ala, Ser or Thr
  Variant (14)..(14): Xaa in position 14 is any amino acid
  Variant (16)..(16): Xaa in position 16 is Lys or Arg
  Variant (20)..(20): Xaa in position 20 is His or Arg
  Variant (21)..(21): Xaa in position 21 is any amino acid
  Variant (23)..(23): Xaa in position 23 is Ala, Pro or Ser
  Variant (24)..(24): Xaa in position 24 is Asn or Ser
  Variant (25)..(25): Xaa in position 25 is Gln or Arg
  Variant (26)..(26): Xaa in position 26 is Ser or Thr
  Variant (27)..(28): Xaa in position 27 to 28 is any amino acid
  Variant (32)..(32): Xaa in position 32 is Ala or Val
  Variant (33)..(33): Xaa in position 33 is Phe or Tyr
  Variant (35)..(35): Xaa in position 35 is any amino acid
  Variant (39)..(39): Xaa in position 39 is Ile or Val
  Variant (40)..(40): Xaa in position 40 is Ala, Ile or Val
  Variant (42)..(42): Xaa in position 42 is any amino acid
  Variant (44)..(44): Xaa in position 44 is any amino acid
  Variant (48)..(48): Xaa in position 48 is Ile or Val
  Variant (52)..(52): Xaa in position 52 is any amino acid
  Variant (53)..(53): Xaa in position 53 is Ala or Glu
  Variant (55)..(55): Xaa in position 55 is Ala or Ser
  Variant (56)..(56): Xaa in position 56 is any amino acid
  Variant (57)..(57): Xaa in position 57 is Asp or Asn
AXSXSXSXXXDXVXCXNCKXXIXXXXXXLHEXXCXRHNXXCXHXGCGXVLRXXEXXXH

SEQ ID NO: 13275 - protein, 41 aa, Artificial sequence
  protein pattern
  Variant (3)..(3): Xaa in position 3 is Leu or Met
  Variant (5)..(5): Xaa in position 5 is Gly or Asn
  Variant (6)..(6): Xaa in position 6 is Leu or Met
  Variant (7)..(7): Xaa in position 7 is Cys, Ser or Thr
  Variant (12)..(12): Xaa in position 12 is any amino acid
  Variant (27)..(27): Xaa in position 27 is Ile or Val
  Variant (31)..(31): Xaa in position 31 is Asp or Glu
  Variant (33)..(33): Xaa in position 33 is Asp or Glu
  Variant (36)..(36): Xaa in position 36 is any amino acid
  Variant (41)..(41): Xaa in position 41 is Gly or Gln
DRXRXXXEHESXCGSRTAPCDSCGRSXMLKXMXIHXIAVHX

SEQ ID NO: 13276 - DNA, 594 bp, Arabidopsis thaliana
  CDS (1)..(594)
atgtcgaaagctaccatagaactcgatttcctcggacttgagaagaaacaaaccaacaacgctcctaagcctaagttccagaaatttctcgatcgccgtcgtagtttccgagatattcaaggtgcgatttcgaaaatcgatccggagattatcaaatcgctgttagcttccactggaaacaattccgattcatcggctaaatctcgttcggttccgtctactccgagggaagatcagcctcagatcccgatttctccggtccacgcgtctctcgccaggtctagtaccgaactcgtttcgggaactgttcctatgacgattttctacaatggaagtgtttcagttttccaagtgtctcgtaacaaagctggtgaaattatgaaggtcgctaatgaagcagcatctaagaaagacgagtcgtcgatggagacagatctttcggtaattcttccgaccactctaagaccaaagctctttggccagaatctagaaggagatcttcccatcgcaaggagaaagtcactgcaacgttttctcgagaagcgcaaggagagattagtatcaacatctccttactatccgacatcggcctaa

SEQ ID NO: 13277 - protein, 197 aa, Arabidopsis thaliana
MSKATIELDFLGLEKKQTNNAPKPKFQKFLDRRRSFRDIQGAISKIDPEIIKSLLASTGNNSDSSAKSRSVPSTPREDQPQIPISPVHASLARSSTELVSGTVPMTIFYNGSVSVFQVSRNKAGEIMKVANEAASKKDESSMETDLSVILPTTLRPKLFGQNLEGDLPIARRKSLQRFLEKRKERLVSTSPYYPTSA

SEQ ID NO: 13278 - DNA, 567 bp, Oryza sativa
  CDS (1)..(567)
atgtcgacgagggcgcccgtcgagctcgacttcctcggcctccgcgccgccgccgccgacgccgacgaccgccacgccaagagcggcggctcctccgcctcctcttcctcctccatccgagggatggagacgagcgcgatagcgaggatagggccccacctgctgcgccgcgtcatcgccgccgccggacctccgccaccgccgtcgacggcgccggtgccggaggagatgcccggcgccgccgccgccgccgctccgatgacgctcttctacaacggttcagtcgccgtcttcgacgtctcccacgataaggcagaggctataatgaggatggcaaccgaggcaactaaagcaaaaggactcgctcgtggcaatgcaattgtaggcaattttgccaaagagccactcacaagaactaaatctctgcaacgattcctctccaagagaaaagagaggttgaccagcttgggtccgtaccaggtgggtgggcccgctgccgtcggtgcgacgacgtcgaccaccaccaagtcttttcttgcgaaggaagaggagcacacggcgtcctag

SEQ ID NO: 13279 - protein, 188 aa, Oryza sativa
MSTRAPVELDFLGLRAAAADADDRHAKSGGSSASSSSSIRGMETSAIARIGPHLLRRVIAAAGPPPPPSTAPVPEEMPGAAAAAAPMTLFYNGSVAVFDVSHDKAEAIMRMATEATKAKGLARGNAIVGNFAKEPLTRTKSLQRFLSKRKERLTSLGPYQVGGPAAVGATTSTTTKSFLAKEEEHTAS

SEQ ID NO: 13280 - DNA, 639 bp, Vitis vinifera
  CDS (1)..(639)
atgtcgagagccgccatggaacttgatttcttcggaatggagaaggacggcgccaccgccaaatctcagttccagaggttctcggatcgccggagaagctttcgaggaatgcaaagcgccatttccaagatcaatccggatcttctcaagaccgtgatcgcctccggctctgtatcgcaggctccgaagaataatccgccgttcgcttcccggaagtcgttctcggtgccgtccactccgaaagctgaccagaattaccttccggcgttgccggtttacagtcctgttttcaggcctgtgagtgccgaaacaactccaataaccattttctataatggcaccgtctccgtttttgatgtctctccagagcagatcgagagtatcatgaagctcgctttggacggaagcaccaagactgtggaacctgctgattcgaaacttgcaattcctccaaacgaggagcagcagcttctcgagactctcaacggagatctgccactggcacgaaggaagtcattgcacaggtttctagagaagcgtaaagagaggttgacttcagtgtacccatatccacctcacatccaatacgcggtttcagaccaggaaaagaccaccatggaggagctgttccgggcctag

SEQ ID NO: 13281 - protein, 212 aa, Vitis vinifera
MSRAAMELDFFGMEKDGATAKSQFQRFSDRRRSFRGMQSAISKINPDLLKTVIASGSVSQAPKNNPPFASRKSFSVPSTPKADQNYLPALPVYSPVFRPVSAETTPITIFYNGTVSVFDVSPEQIESIMKLALDGSTKTVEPADSKLAIPPNEEQQLLETLNGDLPLARRKSLHRFLEKRKERLTSVYPYPPHIQYAVSDQEKTTMEELFRA

SEQ ID NO: 13282 - DNA, 591 bp, Populus trichocarpa
  CDS (1)..(591)
atgtccagagcagcagctgttgaactcgatttttttgccatgggtaaagagaacaagtcgtcaccttccaagtccaagtttcttaatcgccaaagaagctttcgagatattcagagtgccatttcgaaaataaatcctgagcttttaaaatccgtgattgcctctggttctgctgccaccaagactactccggaaaatggcaatcagttctcaaacaagtcattctctgtgccttccactcctaaacaggaacagccttcatttcctgctctccctctctattctcctctcccaaggcctaatatgatgatccctcccgaaaccgcccccttgactattttctacaatggaaccgttgccgttttcaatgtccctcgagacaaggcggagaacattttgaagcttgccgagaagagaatttccaagaccagtgctgaaccaatgactgatccaaaaactgatcaacaacagctttttgagagccttgatggagcagatctgccaattgccaggaggaaatcactgcagaggtttctggagaaaagaaaggggaggttgacttcggtgtccccgtatgtttgcaacacctaa

SEQ ID NO: 13283 - protein, 196 aa, Populus trichocarpa
MSRAAAVELDFFAMGKENKSSPSKSKFLNRQRSFRDIQSAISKINPELLKSVIASGSAATKTTPENGNQFSNKSFSVPSTPKQEQPSFPALPLYSPLPRPNMMIPPETAPLTIFYNGTVAVFNVPRDKAENILKLAEKRISKTSAEPMTDPKTDQQQLFESLDGADLPIARRKSLQRFLEKRKGRLTSVSPYVCNT

SEQ ID NO: 13284 - DNA, 600 bp, Populus trichocarpa
  CDS (1)..(600)
atgtcgagaggaaccgttgaacttgatttctttggcatgagcaaagagaaccgctcctcctcttccaaatccaagtgttttaatcgccaaagaagctttcgagatattcagagtgccatttcgaaaataaatcctgagcttctaaaatctgtgattgcctctggttctgcttccaacaaggctactccagctaacggcaatcagttgtcaaacaaggcattctctgtgccatctactcctaaacaagatctgcctccatttcctgctttgcctgtctatttccctctcccaaggctcaatttggagaatcctcccgaaaccgcccccttgactattttctacaacggaaccgtcgctgttttcgatgtccctcgagacaaggcggagaacattttgaagcttgctgagaagggattctccaagaccgttgttgaatcagtagccgatccaagaacagatcaccaacaaaagcttcttgagagtcttgatggagatctgccaatagctagaaggaaatcactgcagaggtttttggagaaaagaaaagagaggttgacttcggctaccccgtatgcttgcacacctaagacgcgtttttga

SEQ ID NO: 13285 - protein, 199 aa, Populus trichocarpa
MSRGTVELDFFGMSKENRSSSSKSKCFNRQRSFRDIQSAISKINPELLKSVIASGSASNKATPANGNQLSNKAFSVPSTPKQDLPPFPALPVYFPLPRLNLENPPETAPLTIFYNGTVAVFDVPRDKAENILKLAEKGFSKTVVESVADPRTDHQQKLLESLDGDLPIARRKSLQRFLEKRKERLTSATPYACTPKTRF

SEQ ID NO: 13286 - DNA, 534 bp, Ricinus communis
  CDS (1)..(534)
atgtggaacgctactgttgagcttgatttctttggcatggagaaggataattgttccaagtctcgatttcctaaattcaatcgccagagaagctttcgagatattcagagcgccatttcaaaaatcaatcctgagcttctgaggtctgtgattgtttctggttcagctaatcagaagaatgcagaaaatggaaatcagtttgattcgaagatgtttcctgctttacctgttttttctcctttgccaaggcctacattggagactcctcctcaaactgcacctttgactatcttctataacggagccgttgctgtttttgatgttcctcgtgataaggcggaaaccatcctaaaacttgccgagaatggagtttcaaaatctgctgaatcaacgagtcagaaacatctgctagacaatcttgatggagatctgccaattgctcggagaaagtcactccagaggtttttggagaaacgcaaagaaaggttgacttcagcatcaccttatggctggctacctgattctcatttatag

SEQ ID NO: 13287 - protein, 177 aa, Ricinus communis
MWNATVELDFFGMEKDNCSKSRFPKFNRQRSFRDIQSAISKINPELLRSVIVSGSANQKNAENGNQFDSKMFPALPVFSPLPRPTLETPPQTAPLTIFYNGAVAVFDVPRDKAETILKLAENGVSKSAESTSQKHLLDNLDGDLPIARRKSLQRFLEKRKERLTSASPYGWLPDSHL

SEQ ID NO: 13288 - DNA, 567 bp, Oryza sativa subsp. indica
  CDS (1)..(567)
atgtcgacgagggcgcccgtcgagctcgacttcctcggcctccgcgccgccgccgccgacgccgacgaccgccacgccaagagcggcggctcctccgcctcctcttcctcctccatccgagggatggagacgagcgcgatagcgaggatagggccccacctgctgcgccgcgtcatcgccgccgccagacctccgccaccgccgtcgacggcgccggtgccggaggagatgcccggcgccgccgccgccgccgctccgatgacgctcttctacaacggttcagtcgccgtcttcgacgtctcccacgataaggcagaggctataatgaggatggcaaccgaggcaactaaagcaaaaggactcgctcgtggcaatgcaattgtaggcaattttgccaaagagccactcacaagaactaaatctctgcaacgattcctctccaagagaaaagagaggttgaccagcttgggtccgtaccaggtgggtgggcccgctgccgtcggtgcgacgacgtcgaccaccaccaagtcttttcttgcgaaggaagaggagcacacggcgtcctag

SEQ ID NO: 13289 - protein, 188 aa, Oryza sativa subsp. indica
MSTRAPVELDFLGLRAAAADADDRHAKSGGSSASSSSSIRGMETSAIARIGPHLLRRVIAAARPPPPPSTAPVPEEMPGAAAAAAPMTLFYNGSVAVFDVSHDKAEAIMRMATEATKAKGLARGNAIVGNFAKEPLTRTKSLQRFLSKRKERLTSLGPYQVGGPAAVGATTSTTTKSFLAKEEEHTAS

SEQ ID NO: 13290 - DNA, 639 bp, Vitis vinifera
  CDS (1)..(639)
  misc_feature (197)..(197): m is a or c
  misc_feature (317)..(317): m is a or c
  misc_feature (480)..(480): y is t or c
atgtcgagagccgccatggaactcgatttcttcggaatggagaaggacggcgccaccgccaaatctcagttccagaggttctcggatcgccggagaagctttcgaggaatgcaaagcgccatttccaagatcaatccggatcttctcaagaccgtgatcgcctccggctctgtatcgcaggctccgaagaataatcmgccgttcgcttcccggaagtcgttctcggtgccgtccactccgaaagccgaccagaattaccttccggcgttgccggtttacagtcctgttttcaggcctgtgagtgccgaaacaactcmaataaccattttctataatggcaccgtctccgtttttgatgtctctccagagcagatcgagagtatcatgaagctcgctttggacggaagcaccaagactgtggaacctgctgattcgaaacttgcaattcctccaaacgaggagcagcagcttctcgagacyctcaacggagatctgccactggcacgaaggaagtcattgcacaggtttctagagaagcgtaaagagaggttgacttcagtgtacccatatccacctcacatccaatacgcggtttcagaccaggaaaagaccaccatggaggagctgttccgggcctag

SEQ ID NO: 13291 - protein, 212 aa, Vitis vinifera
  misc_feature (66)..(66): The Xaa at location 66 stands for Gln, or Pro.
  misc_feature (106)..(106): The Xaa at location 106 stands for Gln, or Pro.
MSRAAMELDFFGMEKDGATAKSQFQRFSDRRRSFRGMQSAISKINPDLLKTVIASGSVSQAPKNNXPFASRKSFSVPSTPKADQNYLPALPVYSPVFRPVSAETTXITIFYNGTVSVFDVSPEQIESIMKLALDGSTKTVEPADSKLAIPPNEEQQLLETLNGDLPLARRKSLHRFLEKRKERLTSVYPYPPHIQYAVSDQEKTTMEELFRA

SEQ ID NO: 13292 - DNA, 759 bp, Solanum lycopersicum
  CDS (1)..(759)
atggggtcatcggaaaatatggattccggcaaggtgaccggacagaaatctcagttttctcagacttgtaaccttttgagtcaattcttgaagaaaaaaggttctgttggagatcttaataatcttggtatctacaaaactacttttgaatcaactggatctcaacaaacagctactaccaccacaactactatgaatttgttaccaatgattgagaaatcaagtgattcatcgtcgtcatcgtcgtccgttgaaacaaatcctcaaaaacccatgaatcttttccctcaagaatttgatttctccaaagaacaatccacaaaaaagacagaatcttggaaacctgatcaaccagagaaggcacaaatgaccattttttatggtggacaagtcattgtttttgatgattttccagctgataaagcaaatgaaatcatgaagttagccaacaaacagaaccccacaaacaatttcacttatcctatgatcaagaatcaaaaaacagctgatcaatctggtgtgagttttggtaacaaattgattcaagaacttcctaaactgtcaatgccacagccttctgttgctgatttaccaatcgcgagacggaattcacttacaagattcttggagaaaaggaaagatagagtaacatcaattgcaccataccaaatctccaacaacaagaaatccaagaatgaggataacaaagcatggttgggattaggtgctcaatttgttaaaactgagcaatatttctag

SEQ ID NO: 13293 - protein, 252 aa, Solanum lycopersicum
MGSSENMDSGKVTGQKSQFSQTCNLLSQFLKKKGSVGDLNNLGIYKTTFESTGSQQTATTTTTTMNLLPMIEKSSDSSSSSSSVETNPQKPMNLFPQEFDFSKEQSTKKTESWKPDQPEKAQMTIFYGGQVIVFDDFPADKANEIMKLANKQNPTNNFTYPMIKNQKTADQSGVSFGNKLIQELPKLSMPQPSVADLPIARRNSLTRFLEKRKDRVTSIAPYQISNNKKSKNEDNKAWLGLGAQFVKTEQYF

SEQ ID NO: 13294 - DNA, 720 bp, Nicotiana tabacum
  CDS (1)..(720)
atggggtcatcggagattgtagattccggcaaggtctccggccagaagtctcagttttctcaaacttgtaatctttcgagccaattcttgaagaaaaaaggttcttttggagatctcaataatcttggtatctaccgcagttttgaaccaactggaaaccaaacaactacaactactatgaatttattgccaatgattgaaaaatcaggtgattcagctgagaaaaattctcaaaagccaatgaatctttttcctcaagaagttatttctactgcaaaatctgaaccagaaaaggcacaaatgactatattttatggtggtcaagttattgtatttgatgattttccagcagataaagcaaatgaaatcatgaaattggctaccaagaaaaccaacaacaaacagaatttggctagtaacatattttcttatcctatggtaaataatcaaaattcagctgaatctgttactaccaatttttctcaagaacttcgtacgcgaactcacgtgccaatatcacaatccagtgttgctgatttaccaattgcgagacgaaattcacttacaagatttttggagaaaagaaaagatagaattacttcaactgcaccatatcagatttgcaacaaaaaaatagcagattctaagaatgaggaaaataaggcatggcttggattaggtgcaaagtttgttccagtgaaaactgagcagttcttttag

SEQ ID NO: 13295 - protein, 239 aa, Nicotiana tabacum
MGSSEIVDSGKVSGQKSQFSQTCNLSSQFLKKKGSFGDLNNLGIYRSFEPTGNQTTTTTMNLLPMIEKSGDSAEKNSQKPMNLFPQEVISTAKSEPEKAQMTIFYGGQVIVFDDFPADKANEIMKLATKKTNNKQNLASNIFSYPMVNNQNSAESVTTNFSQELRTRTHVPISQSSVADLPIARRNSLTRFLEKRKDRITSTAPYQICNKKIADSKNEENKAWLGLGAKFVPVKTEQFF

SEQ ID NO: 13296 - DNA, 699 bp, Glycine max
  CDS (1)..(699)
atgtcaagcttccccaacacggtggcggaaggccgcaggtccggcaaggcaccggaaaaatccaccttttctcagacttgcagcctcttgagccagttcttgaaggagaaacgtgcttctgctgattccacccttggaattggtggaaaaatggaacctaaagcgaataccaaggctttgttaggaagcttgcaaaactctgatggggccttaaagctaagcgcttctgccatggaatttcttccccagcttgtggaaaacccctgcattaagaagtctaggtcaccgggacctgaatctccccaattgacaatattctatgccggaaaaatgttggtatttgatgcctttccgccggagaaggcgacagaggtcatggagatggccaccaagttggcctcgaacaactccggcactgaagaaagtccccctagccttccggttaccactgaaaaattggctgtgtccaagatgcctcaaacaaacacatcctcagaaacccctaagcccggaaaccaaggggttggttcagatatgaggtacccaaggagagcttcacttctaaaatttcttgagaaaagaaaagaaagggtcaatgctagagggccataccaaatgaacaatctcaagccagaaggaagcagttcaggtggtgaacctgaagatcagtgttccaaacagtttgaccttaacttttag

SEQ ID NO: 13297 - protein, 232 aa, Glycine max
MSSFPNTVAEGRRSGKAPEKSTFSQTCSLLSQFLKEKRASADSTLGIGGKMEPKANTKALLGSLQNSDGALKLSASAMEFLPQLVENPCIKKSRSPGPESPQLTIFYAGKMLVFDAFPPEKATEVMEMATKLASNNSGTEESPPSLPVTTEKLAVSKMPQTNTSSETPKPGNQGVGSDMRYPRRASLLKFLEKRKERVNARGPYQMNNLKPEGSSSGGEPEDQCSKQFDLNF

SEQ ID NO: 13298 - DNA, 693 bp, Glycine max
  CDS (1)..(693)
atgtcaagcttccccaacacggtggcggaaggccgcaggtccagcaaggcaccggaaaaatccactttttctcagacttgcagcctcttgagccagttcttgaaggagaaacgtgcttctgctgattccacctttcgaattggtgggaaaatggaacccatagcgagtaccaagggtttgttaggaagcctgcaaaactctgatggggctttgaaactaagcgcttctgccatggaatttcttccccagcttgtggaaaacccctgcattaagaagtctagatcacagggacctgaaactccccaattgacaatattctatgctggaaaaatgttggtgtttgatgccttttcgccggagaaggcgacggaggtcatggagatggccaccaagttggcctcggacaactccggcaccgaagaaagtccccctagtgctccggttgccactgaaaaattggctgtgtccaaagtgccccaaacaaacacattctcagaaacccctaaggcaggaaaccaaggggttggttcagatatgaggtacccaaggagagcttcacttctaaaatttcttgagaaaagaaaagaaagggtcaatgctagggggccataccaaattaacaaccacaagccagaaggaagcagttcggggggtgaaccggaagattcccaacagtttgaccttaacttgtag

SEQ ID NO: 13299 - protein, 230 aa, Glycine max
MSSFPNTVAEGRRSSKAPEKSTFSQTCSLLSQFLKEKRASADSTFRIGGKMEPIASTKGLLGSLQNSDGALKLSASAMEFLPQLVENPCIKKSRSQGPETPQLTIFYAGKMLVFDAFSPEKATEVMEMATKLASDNSGTEESPPSAPVATEKLAVSKVPQTNTFSETPKAGNQGVGSDMRYPRRASLLKFLEKRKERVNARGPYQINNHKPEGSSSGGEPEDSQQFDLNL

SEQ ID NO: 13300 - DNA, 591 bp, Brassica napus
  CDS (1)..(591)
atgcccaacgttaccacagagcttgacttcttcggtcttgagaagaaacagaccaacaacgctcctaagcctaagttcaagaaacttcttgaccgccgtcgtagtttccgagaaattcaaggtgcgatttctaagatggatccggagattatcaaatcgctgttagctactggtgctaacccttccgaaacctcgaccagatctctatcggttccatctactccaaaggaagatcatcaacggatcctgaattctccggtccatgcccctctcaccaggcccagtacagaacttgtctctggaactgtacctatgacaattttctacaatggtaccgtctcagttttccaagtgtctcctaacaaagctgaggatattatgaaggtggccatggaaacatcaccaaagaaagacaaatctatggagaaagatctctcggtaattcctccgaccaccttaagaacaaagctctttggccagaatatagatggagatcttcccatcgcaaggaggaagtcactgcaaaggtttcttgagaagcgcaaggagagagtagtatcatcatctccttactttccgacatcggcctaa

SEQ ID NO: 13301 - protein, 196 aa, Brassica napus
MPNVTTELDFFGLEKKQTNNAPKPKFKKLLDRRRSFREIQGAISKMDPEIIKSLLATGANPSETSTRSLSVPSTPKEDHQRILNSPVHAPLTRPSTELVSGTVPMTIFYNGTVSVFQVSPNKAEDIMKVAMETSPKKDKSMEKDLSVIPPTTLRTKLFGQNIDGDLPIARRKSLQRFLEKRKERVVSSSPYFPTSA

SEQ ID NO: 13302 - DNA, 591 bp, Brassica napus
  CDS (1)..(591)
atgtctaaggttaccacagagcttgacttcttcggtcttgagaagaagcagaccaacaacggtcctaagcctaagttcaagaaacttcttgaccgcggtcgtagtttccgagaaattcaaggtgcgatttctaagatggatccggagattatcaaatcgctgttagctactggtgctaacccttccgatacctcgaccagatctctatcggttccgtctactccaaaggaagatcatcaacggatcctgatttctccggtccatgcccctctcaccaggcccagtacagaacttgtctctggaactgtacctatgacaattttctacaatggtaccgtctcagttttccaagtgtctcctaacaaagctgaggatattatgaaggtggccatggaaacatcaccaaagaaagacaaatctatggagaaagatctctcggtaattcctccgaccaccttaagaacaaagctctttggccagaatatagatggagatcttcccatcgcaaggaggaagtcactgcaaaggtttcttgagaagcgcaaggagagagtagtatcatcatctccttactttccgacatcggcctaa

SEQ ID NO: 13303 - protein, 196 aa, Brassica napus
MSKVTTELDFFGLEKKQTNNGPKPKFKKLLDRGRSFREIQGAISKMDPEIIKSLLATGANPSDTSTRSLSVPSTPKEDHQRILISPVHAPLTRPSTELVSGTVPMTIFYNGTVSVFQVSPNKAEDIMKVAMETSPKKDKSMEKDLSVIPPTTLRTKLFGQNIDGDLPIARRKSLQRFLEKRKERVVSSSPYFPTSA

SEQ ID NO: 13304 - DNA, 22 bp, Artificial sequence
  primer
atgtcgaaagctaccatagaac

SEQ ID NO: 13305 - DNA, 23 bp, Artificial sequence
  primer
ttaggccgatgtcggatagtaag

SEQ ID NO: 13306 - protein, 230 aa, Artificial sequence
  consensus sequence
  Variant (2)..(30): Xaa in position 2 to 30 is any amino acid
  Variant (31)..(37): Xaa in position 31 to 37 is any or no amino acid
  Variant (39)..(45): Xaa in position 39 to 45 is any amino acid
  Variant (46)..(46): Xaa in position 46 is any or no amino acid
  Variant (48)..(64): Xaa in position 48 to 64 is any amino acid
  Variant (65)..(98): Xaa in position 65 to 98 is any or no amino acid
  Variant (100)..(115): Xaa in position 100 to 115 is any amino acid
  Variant (116)..(126): Xaa in position 116 to 126 is any or no amino acid
  Variant (131)..(131): Xaa in position 131 is any amino acid
  Variant (133)..(133): Xaa in position 133 is any amino acid
  Variant (135)..(135): Xaa in position 135 is any amino acid
  Variant (138)..(142): Xaa in position 138 to 142 is any amino acid
  Variant (143)..(143): Xaa in position 143 is any or no amino acid
  Variant (146)..(147): Xaa in position 146 to 147 is any amino acid
  Variant (149)..(151): Xaa in position 149 to 151 is any amino acid
  Variant (153)..(173): Xaa in position 153 to 173 is any amino acid
  Variant (174)..(203): Xaa in position 174 to 203 is any or no amino acid
  Variant (205)..(205): Xaa in position 205 is any amino acid
  Variant (207)..(208): Xaa in position 207 to 208 is any amino acid
  Variant (211)..(211): Xaa in position 211 is any amino acid
  Variant (214)..(214): Xaa in position 214 is any amino acid
  Variant (222)..(222): Xaa in position 222 is any amino acid
  Variant (224)..(225): Xaa in position 224 to 225 is any amino acid
  Variant (227)..(228): Xaa in position 227 to 228 is any amino acid
MXXXXXXXXXXXXXXXXXXXXXXXXXXXXXXXXXXXXSXXXXXXXXIXXXXXXXXXXXXXXXXXXXXXXXXXXXXXXXXXXXXXXXXXXXXXXXXXXXPXXXXXXXXXXXXXXXXXXXXXXXXXXXTIFYXGXVXVFXXXXXXKAXXIXXXAXXXXXXXXXXXXXXXXXXXXXXXXXXXXXXXXXXXXXXXXXXXXXXXXXXXDXPXXRRXSLXRFLEKRKXRXXSXXPY

SEQ ID NO: 13307 - protein, 27 aa, Artificial sequence
  protein pattern
  Variant (2)..(2): Xaa in position 2 is Leu or Met
  Variant (3)..(4): Xaa in position 3 to 4 is any amino acid
  Variant (5)..(5): Xaa in position 5 is Ala or Pro
  Variant (8)..(8): Xaa in position 8 is any amino acid
  Variant (11)..(11): Xaa in position 11 is any amino acid
  Variant (12)..(12): Xaa in position 12 is Lys or Arg
  Variant (19)..(19): Xaa in position 19 is Asp, Glu or Gly
  Variant (21)..(21): Xaa in position 21 is Ile, Leu or Val
  Variant (22)..(22): Xaa in position 22 is Asn, Thr or Val
  Variant (23)..(23): Xaa in position 23 is Ala or Ser
  Variant (24)..(25): Xaa in position 24 to 25 is any amino acid
DXXXXRRXSLXXFLEKRKXRXXXXXPY

SEQ ID NO: 13308 - protein, 13 aa, Artificial sequence
  protein pattern
  Variant (2)..(2): Xaa in position 2 is Ile or Leu
  Variant (5)..(5): Xaa in position 5 is Gly or Asn
  Variant (7)..(7): Xaa in position 7 is Ala, Gln, Ser or Thr
  Variant (9)..(9): Xaa in position 9 is any amino acid
  Variant (12)..(12): Xaa in position 12 is Asp, Asn or Gln
  Variant (13)..(13): Xaa in position 13 is Asp or Val
TXFYXGXVXVFXX

SEQ ID NO: 13309 - DNA, 558 bp, Arabidopsis thaliana
  CDS (1)..(558)
atgactctcgctaagaaccaaaaatcatcattgtcacgactatacaagaaagtttcctcgaagagatcagaatcgtcaagaaaccttgaagacgaatcaagaacgagcagtaatagtagcggaagcagctcgttaaacgttaacgagctaagaaccgtttttgactatatggatgcaaactcagacgggaaaatctccggtgaagagctacaaagctgcgttagtctcttaggcggcgcgttatcgtcacgtgaggtggaggaagtggtgaagacatcagacgttgacggagacgggtttatagattttgaggagtttttgaagcttatggaaggggaagatggtagtgatgaagaaaggaggaaggagttgaaagaagcgtttgggatgtatgttatggagggggaagagtttattacggcggcgagtttacggaggacgttgagtcgactcggcgagtcgtgtacggttgatgcttgtaaggttatgattcgtgggtttgatcagaatgacgatggagttctcagctttgacgagtttgttttgatgatgcgttga

SEQ ID NO: 13310 - protein, 185 aa, Arabidopsis thaliana
MTLAKNQKSSLSRLYKKVSSKRSESSRNLEDESRTSSNSSGSSSLNVNELRTVFDYMDANSDGKISGEELQSCVSLLGGALSSREVEEVVKTSDVDGDGFIDFEEFLKLMEGEDGSDEERRKELKEAFGMYVMEGEEFITAASLRRTLSRLGESCTVDACKVMIRGFDQNDDGVLSFDEFVLMMR

SEQ ID NO: 13311 - DNA, 615 bp, Zea mays
  CDS (1)..(615)
atgggcaaggttcggtccttcttctcgcgctcccgcagcggcaagcgcggcagcgcccggagagcaggctcgtcctcgccgcactcctccgcggccagcgcgccgccgtccccgtccccactcccgaggaggtcaccgtcgtcgtcgtcaaccacaaccagggacgagacggagcgcgtgttccgcaagttcgacgcgaacggcgacgggcagatctcgcggtccgagctggcggcgctgttcgagggcgtgggccacgccgtgaccgacgacgaggtgtcgcgcatgatggaggaggcggacgcggacggcgacggctgcatcagcctgcccgagttcgccgcgctcatggagtccgcgtccgccgacgccgccgccgtcgaggaggacctgcgccacgccttcatggtcttcgacgccgacggcaacggcctcatcacgcccgccgagctcgcgcgcgtcctgcgcggcctcggggagtccgccaccgtcgcccagtgccgccgcatgatccagggcgtcgaccgcaacggcgacggcctcgtctccttcgacgagttcaagctcatgatggccgcgggcggcggcggcggattcggcaggatcggtgcctag

SEQ ID NO: 13312 - protein, 204 aa, Zea mays
MGKVRSFFSRSRSGKRGSARRAGSSSPHSSAASAPPSPSPLPRRSPSSSSTTTRDETERVFRKFDANGDGQISRSELAALFEGVGHAVTDDEVSRMMEEADADGDGCISLPEFAALMESASADAAAVEEDLRHAFMVFDADGNGLITPAELARVLRGLGESATVAQCRRMIQGVDRNGDGLVSFDEFKLMMAAGGGGGFGRIGA

SEQ ID NO: 13313 - DNA, 540 bp, Zea mays
  CDS (1)..(540)
atgggtctcgtcgtctccgccaccgcctcgtgcagcgacatcttcggccgacgccgctcctcgacgctgcctcccgcaactgctacccccacgtctagtaccccaccgctcacggatacaacaccggagccagagctcgtccgcgtcttccgccacttcgacgcggatggcgatggccgcatctcggtggccgagatgcgcgagtcctgcgggtgcacggccgcggaggcggaggagatggtcgctgccgcagaccgcgacggggacgggttcatcagcctcgacgagctcggggcgcttttcgaggacgaagacctgtcggacacgctgcgcgctgcgttcgccgagtacgacgagaacggcgacggcgtgatcaccgcggaggagctgctccgcgcgctgcggaggctgggtatcgtcggggaggagatgacggctgagcggtgcgcagagatcatcgcggcggtggaccgagatggcgacggggtcatctccttcgacgagttcaaggccatgatggccaccgagccggcggcgtga

SEQ ID NO: 13314 - protein, 179 aa, Zea mays
MGLVVSATASCSDIFGRRRSSTLPPATATPTSSTPPLTDTTPEPELVRVFRHFDADGDGRISVAEMRESCGCTAAEAEEMVAAADRDGDGFISLDELGALFEDEDLSDTLRAAFAEYDENGDGVITAEELLRALRRLGIVGEEMTAERCAEIIAAVDRDGDGVISFDEFKAMMATEPAA

SEQ ID NO: 13315 - DNA, 558 bp, Zea mays
  CDS (1)..(558)
atggcgaagcggccgtcgagcaaacggagcttcaggctgccgttcatgtgcgggcagtcggacgtggccagcccgaggggcgcggctgtcaagcggccgtcgtcgtcgtcgtcctcgtcactcggcagggggtccaggtccgggtctagctccgcctccagctccagcagcaggcacggcgagctgcagcggatcttccagcacttcgaccgggacaacgacggcaagatctccggcgccgagctgcgcgccttcttcgtgtccatgggcgacgacatgccgccgtcgtacggcgacggtggctacatgctggacttcgccggcttcgtggcgctgatggagagggagggcggccaggaggaggacctgcgcagggcgttcgacgtgttcaacgccgtggagtccgcgggcaggatcacggccaggggcctgcagagggtgctcgcccagctcggggacaagcgttccgtcgccgactgcgaggccatgattcgggcctacgacgtcgacggcgacggtggcctcgacttccacgagttccagaggatgatgagctaa

SEQ ID NO: 13316 - protein, 185 aa, Zea mays
MAKRPSSKRSFRLPFMCGQSDVASPRGAAVKRPSSSSSSSLGRGSRSGSSSASSSSSRHGELQRIFQHFDRDNDGKISGAELRAFFVSMGDDMPPSYGDGGYMLDFAGFVALMEREGGQEEDLRRAFDVFNAVESAGRITARGLQRVLAQLGDKRSVADCEAMIRAYDVDGDGGLDFHEFQRMMS

SEQ ID NO: 13317 - DNA, 513 bp, Zea mays
  CDS (1)..(513)
atggttgttgccgtcgccgcgcggtcgtcgtcgtccgcgaccagcagcagcagcgagctggggtcgctgttcgcggcgttcgacgcggacgcggacgggcggatctcggcggccgagctgcgggagtgcgtgcgggcgacgctggggcccgacgccgcggcggtgtcggcggaggaggcggaggcgctggtggcgggcgcggacgcggacggcgacgggctgctggacgccgccgagttcgcgcggctcgtggccggcctgcacgcgggtgccgccgaggaggaccgccaccgctgcctgcgccaggccttccggatgtactcctccgacgacgacgcggcggagggccggggctcctcctgcatcacccccgacagcctgcgccgcatgctcgccaggctcggcgcgcaccaggacgtggacgactgccgcgccatgatctgcaggttcgacctcgacggcgacggcgtgctcagcttccacgagttcaaggtcatgatgggcgccgcgtga

SEQ ID NO: 13318 - protein, 170 aa, Zea mays
MVVAVAARSSSSATSSSSELGSLFAAFDADADGRISAAELRECVRATLGPDAAAVSAEEAEALVAGADADGDGLLDAAEFARLVAGLHAGAAEEDRHRCLRQAFRMYSSDDDAAEGRGSSCITPDSLRRMLARLGAHQDVDDCRAMICRFDLDGDGVLSFHEFKVMMGAA

SEQ ID NO: 13319 - DNA, 570 bp, Zea mays
  CDS (1)..(570)
atgggcaaggtgcgctccttcttctgccgcgcccgcagcggcaagcgcggtggctcccggccaggcttgtcgtcctcgtctctctcgtccccgtgcccctccgcgaggagggcgtcgccgccggccggggacgagacggagcgcgtcttccgcaagttcgacgcgaacggcgacggccagatctcgcggtccgagctggcggcgctgttcgagagcgtgggccacgcggccaccgacgacgaggtgtcgcgcatgatggaggaggccgacgcggacggcgacggctacatcagcctgcccgagttcgcggcgctcatggactcggcgtccggcgacgccgacgccgtcgaggaggacctgcgccacgccttctcggtcttcgacgccgacggcaacggcctcatcacccccgccgagctcgcgcgcgtcctgcgcggcctcggcgagtccgcctccgtcgcccagtgccgccgcatgatccagggcgtcgaccgcaacggcgacggactcgtgtccttcgacgagttcaagctcatgatggccggcggattcggcaggatcggtgcctag

SEQ ID NO: 13320 - protein, 189 aa, Zea mays
MGKVRSFFCRARSGKRGGSRPGLSSSSLSSPCPSARRASPPAGDETERVFRKFDANGDGQISRSELAALFESVGHAATDDEVSRMMEEADADGDGYISLPEFAALMDSASGDADAVEEDLRHAFSVFDADGNGLITPAELARVLRGLGESASVAQCRRMIQGVDRNGDGLVSFDEFKLMMAGGFGRIGA

SEQ ID NO: 13321 - DNA, 606 bp, Oryza sativa
  CDS (1)..(606)
atgggcaaggtgagggcgttcttctcgcgcaagggcagggggaacagcagcggcaggtccaggtcgatgcgggaggcggcgatgaacgtggactggtcgccgaggccgtcggatctcgccgccgccgccgccgcgaagccccgcccgcccgcggcggaggacgagacggagcgggtgttcaggaagttcgacgcgaacggcgacgggcggatctcgcgggccgagctggcggcgctgttccgcagcgtgggccacgccgtcaccgacgacgaggtggcgcggatgatgcaggaggccgactccgacggcgacggctacatctcgctcggcgagttcgccgccatcagcgccccgccgcccggcgacgccgccgccgccgaggaggacctgcgccacgccttcggcgtgttcgacgccgacggcaacggcgtcatcacccccgccgagctggcccgcgtcctccgcggcatcggcgaggccgccaccgtcgcccagtgccgccgcatgatcgacggcgtcgaccgcaacggcgacggcctcatcaacttcgaggagttcaagctcatgatggccgccggcgccggcttcggcaggatcgcttcttga

SEQ ID NO: 13322 - protein, 201 aa, Oryza sativa
MGKVRAFFSRKGRGNSSGRSRSMREAAMNVDWSPRPSDLAAAAAAKPRPPAAEDETERVFRKFDANGDGRISRAELAALFRSVGHAVTDDEVARMMQEADSDGDGYISLGEFAAISAPPPGDAAAAEEDLRHAFGVFDADGNGVITPAELARVLRGIGEAATVAQCRRMIDGVDRNGDGLINFEEFKLMMAAGAGFGRIAS

SEQ ID NO: 13323 - DNA, 564 bp, Glycine max
  CDS (1)..(564)
atgtcgagtttgagtttcctaaagttcaattatagcttctcatggaagccctccgcttcacgcaaaaatgtagtcaagaagaacagcttcatatcaagacagacatcgaatgaaggacaaagtttccttccaaaagaagaggaaatgaaatgggtgttccagaaatttgacaccaacaaagatggcaaggtttctcttgaagagtacaaggctgctgcaagggccttggatagggccattggggaagctgaagcagtgaaagcgtttagggtcatggacactgatgaagacggcttcattgacttcaaagagttcatgaagatgttcaatgaagagggtaggataaaagaaactgagatcaagaatgcttttcaagtgtttgatttgaacggtgatgggaagattagtgctgaggagttgtcccaagttctcaaaaggttaggagagagttgcagccttagtgcctgtaaaaaaatggtcaaaggagtggatgggaatggagatggttttattgacttgaatgagtttacgaggatgatgatgagtgggaagaaactaggctaa

SEQ ID NO: 13324 - protein, 187 aa, Glycine max
MSSLSFLKFNYSFSWKPSASRKNVVKKNSFISRQTSNEGQSFLPKEEEMKWVFQKFDTNKDGKVSLEEYKAAARALDRAIGEAEAVKAFRVMDTDEDGFIDFKEFMKMFNEEGRIKETEIKNAFQVFDLNGDGKISAEELSQVLKRLGESCSLSACKKMVKGVDGNGDGFIDLNEFTRMMMSGKKLG

SEQ ID NO: 13325 - DNA, 564 bp, Glycine max
  CDS (1)..(564)
atgtcgaatttgagtttcctaaagttcaattatagcttctcatggaagccttcctcttcacgcaaaaatgtagccaagaagaacagcttcgtatcaagacagacatcgaatgaaggacaaagtttccaaccaacaaaagaggaaatgaaatgggtgttccagaaatttgacaccaacagagacggcaaggtttctcttgaagagtacaaggctgctgcaagggccttggatagggccattggggaagctgaagcagtgaaagcatttagggtcatggacattgatggagatggcttcattgacttgaatgagttcatggagatgttcaatggagaaggtaggataaaagaaactgagatcaagaatgcttttcaagtgtttgatttgaacggtgatgggaagattagtgctgaggagttgtctcatgttctcaaaaggctaggagagagttgcagccttagtgcctgtaaaaaaatggtcaaaggagtggatgggaatggagatggttttattgacttgaatgagtttacaaggatgatgatgagtgggaagaaactaggctaa

SEQ ID NO: 13326 - protein, 187 aa, Glycine max
MSNLSFLKFNYSFSWKPSSSRKNVAKKNSFVSRQTSNEGQSFQPTKEEMKWVFQKFDTNRDGKVSLEEYKAAARALDRAIGEAEAVKAFRVMDIDGDGFIDLNEFMEMFNGEGRIKETEIKNAFQVFDLNGDGKISAEELSHVLKRLGESCSLSACKKMVKGVDGNGDGFIDLNEFTRMMMSGKKLG

SEQ ID NO: 13327 - DNA, 573 bp, Glycine max
  CDS (1)..(573)
atgtcgaatttgagtttccttcaatttcatagtagcagccctttggggcactcctcttctcaacccaaaagtccaaccccaaacagcaacaacttcaaatcatcaaaacatacatcaaatgtagggtgcaatattcaaccaaaatcggaggaaatgaaattggtgttcgacaagtttgacaccaacaaagatggcaagattacccttgaagagtacaaagcagctatgaggacaatggggtggggaatcgaaggcactgaggctgatgagtcttttcaggtcatggactctgatggagatggcttcattgacttcaaagagttcatggacatgttcaacgtggaggagacggtgaaagagacggagatcaagagtgcttttcaagtgtttgatttgaatggcgacggaaaaatcagtgctgaggaattatcacaagttctcaaaagcctaggggagagttgcagccttagtgcttgcaagaaaatggtgatgggggtggatggaaatggggatggttttatagacttgaatgagtttatgaggatgctaatgagtggcaagaaactcgcttaa

SEQ ID NO: 13328 - protein, 190 aa, Glycine max
MSNLSFLQFHSSSPLGHSSSQPKSPTPNSNNFKSSKHTSNVGCNIQPKSEEMKLVFDKFDTNKDGKITLEEYKAAMRTMGWGIEGTEADESFQVMDSDGDGFIDFKEFMDMFNVEETVKETEIKSAFQVFDLNGDGKISAEELSQVLKSLGESCSLSACKKMVMGVDGNGDGFIDLNEFMRMLMSGKKLA

SEQ ID NO: 13329 - DNA, 534 bp, Arabidopsis thaliana
  CDS (1)..(534)
atgaagaataatactcaacctcaatcatctttcaagaaactttgccggaaactatcaccaaagagggaagattcagccggagagatacaacaacataacagtagcaatggtgaggacaagaacagagagttagaggctgttttttcttacatggatgcaaacagagacggtagaatctcaccagaagagcttcaaaagagtttcatgacattgggagaacaattgtctgatgaagaagccgtagctgctgttagattgtctgatacggacggagatgggatgttggattttgaggaattttctcagttaatcaaagtagatgacgaagaagagaagaagatggagctcaagggagcgtttagactgtatattgcagaaggtgaagattgtattacaccaagaagcttgaagatgatgctaaagaagctaggagaatcaagaaccactgatgattgtagagttatgattagtgcttttgatctcaatgctgatggagttttaagctttgatgagtttgctcttatgatgcgctaa

SEQ ID NO: 13330 - protein, 177 aa, Arabidopsis thaliana
MKNNTQPQSSFKKLCRKLSPKREDSAGEIQQHNSSNGEDKNRELEAVFSYMDANRDGRISPEELQKSFMTLGEQLSDEEAVAAVRLSDTDGDGMLDFEEFSQLIKVDDEEEKKMELKGAFRLYIAEGEDCITPRSLKMMLKKLGESRTTDDCRVMISAFDLNADGVLSFDEFALMMR

SEQ ID NO: 13331 - DNA, 450 bp, Botryotinia fuckeliana B05.10
  CDS (1)..(450)
atggccgattctcttactgaagagcaagtctccgagttcaaggaggccttctccctctttgacaagaatggtgatggacaaatcactagcaaggagttgggaaccgtcatgcgatcccttggtcaaaacccttccgagtccgagttgcaagacatgatcaacgaggtcgatgctgacaacaacggtaccattgatttcccagaatttcttactatgatggcaagaaagatgaaggataccgactctgaggaggagattcgtgaagcattcaaggtcttcgatcgtgataacaacggtttcatctccgctgctgaacttcgtcatgtcatgacctccatcggagagaagttgactgatgacgaggttgatgagatgattagggaagccgatcaagatggtgacggaagaatcgactacaacgaatttgtacagcttatgatgcaaaagtaa

SEQ ID NO: 13332 - protein, 149 aa, Botryotinia fuckeliana B05.10
MADSLTEEQVSEFKEAFSLFDKNGDGQITSKELGTVMRSLGQNPSESELQDMINEVDADNNGTIDFPEFLTMMARKMKDTDSEEEIREAFKVFDRDNNGFISAAELRHVMTSIGEKLTDDEVDEMIREADQDGDGRIDYNEFVQLMMQK

SEQ ID NO: 13333 - DNA, 468 bp, Sclerotinia sclerotiorum 1980 UF-70
  CDS (1)..(468)
atggcagagttaaagaacgcccaaggtctcagcaatgaggaaattcaagcatacagagatgctttctctatcttcgacaaagatggtgatggaaccatatcaactgccgaactcgcagaggcaatgaaatctttgggacaaaatccatccgatgcggaaattcaagatatgattaatgaggttgatgttgatcaatcgggaacagtcgacttcgatgaattcctcaagatgatgactaccgaaacgaagggtgttgacttcgaacaagagatgcgcagtgcttttaaagtattcgatgttgatggaagcggtacaatttccccagaggaaatctacaagttgatggcatctttgggagagaatttgtcagaggacgagatcaagagcatggtgaaggaggttgataaaaatggtgatggaagcatagattacgatgaatttgtttcattcattcgcgacaacaaataa

SEQ ID NO: 13334 - protein, 155 aa, Sclerotinia sclerotiorum 1980 UF-70
MAELKNAQGLSNEEIQAYRDAFSIFDKDGDGTISTAELAEAMKSLGQNPSDAEIQDMINEVDVDQSGTVDFDEFLKMMTTETKGVDFEQEMRSAFKVFDVDGSGTISPEEIYKLMASLGENLSEDEIKSMVKEVDKNGDGSIDYDEFVSFIRDNK

SEQ ID NO: 13335 - DNA, 576 bp, Vitis vinifera
  CDS (1)..(576)
atggccactgctgctgtcacggccactgcttccaagtcctccaagtggttctccagcaaaactactaaactcagcctccctcgcgttggatccaaatccaaatcctcatcctcgagcccatgcccttctccatctctagtccttggaccaaagaagagctcaaaagaagatgagctccgacaagtttttggttacttcgacagtgatggagatgggaggatatcgggtgaggagcttagagtttacttccagtctatcggggagtccatgtcgcatgaggaggcgcaaaaagtgattggcgatttcgatgtcgatggtgacagcttactagaatttcaagactttgttcgattgatggagcaaagcagcgagatggatgatgaccttaagagggctttccagatgttcgaagtggaaaagggttgcgggtgcatcaccccaaaaggactgcaacagatgttcaacaggctgggagattccaaaacttacgaggagtgtgtggcaatgattcgagtgtttgatcttgatggcaacggagtgctcgacttccatgagtttcaccggatgatgacttga

SEQ ID NO: 13336 - protein, 191 aa, Vitis vinifera
MATAAVTATASKSSKWFSSKTTKLSLPRVGSKSKSSSSSPCPSPSLVLGPKKSSKEDELRQVFGYFDSDGDGRISGEELRVYFQSIGESMSHEEAQKVIGDFDVDGDSLLEFQDFVRLMEQSSEMDDDLKRAFQMFEVEKGCGCITPKGLQQMFNRLGDSKTYEECVAMIRVFDLDGNGVLDFHEFHRMMT

SEQ ID NO: 13337 - DNA, 579 bp, Populus trichocarpa
  CDS (1)..(579)
atgaaatcacactcggtttcatctccaccttattcaactcccgccaattcatctcctcttgcaagattacgtcgtaaactatctccaaggaaatcccacgacaaaccacatcccacaagcgtcaacaactcaactagtgctcttaatgtggtagatcacaacaacgagctccgaggggtcttcaattactttgacgaaaatggagatggaaagatatctcctgctgagttacagtcctgtattacctctgttggaggtaagctttccatcgaggaagctgaggctgccatcaggttctctgatatggatggagacgggcttttggggttccaggacttcctatgcttgatgacaggcaatctttcagaggaagagaagaccgaggatctcagacaggcttttggattgtacgagactgagcctggctctggctgcatcactcattccagcttgaagcggatgttgagtcgattgggggagtccaattccatcaacgactgcaaggctatcatccgtaccttcgacctcaatggagacggtgttcttagcttccacgagtttgctgtcatgatgcgctag

SEQ ID NO: 13338 - protein, 192 aa, Populus trichocarpa
MKSHSVSSPPYSTPANSSPLARLRRKLSPRKSHDKPHPTSVNNSTSALNVVDHNNELRGVFNYFDENGDGKISPAELQSCITSVGGKLSIEEAEAAIRFSDMDGDGLLGFQDFLCLMTGNLSEEEKTEDLRQAFGLYETEPGSGCITHSSLKRMLSRLGESNSINDCKAIIRTFDLNGDGVLSFHEFAVMMR

SEQ ID NO: 13339 - DNA, 594 bp, Populus trichocarpa
  CDS (1)..(594)
atgaagtcacactcagtttcatcctcaccttcatcttcaccttccggcaactcatctcctcttgcaagattacggcgtaaactatctccccggaaacccgacaataaccacccagtttctcttccagctcccacaaacgttaataactcgactagtgctattaatgtaattggaaacaaccagctacaaagggtcttcaattactttgacgaagatggagatggaaggatatctcctgctgagttgcggagctgtattactactgttggaggtcagctttccatcgaggaagctgaggccgccgtcagcttctctgatatggatggagatgggttgttgggattccaggatttccaatgcttgatggcagggagtgcttcagaggaggagaagacagaagagctcagacaggcttttggaatgtacgagactgagcctggctcaggctgcatcactcctaccagcctgaagaggatgttgagtcgactggggaagtctaggtccatcaacgactgcaaggctatgattcgtacctttgaccttaatggagacggtgtccttagcttccacgagttttctgtcatgatgcgctag

SEQ ID NO: 13340 - protein, 197 aa, Populus trichocarpa
MKSHSVSSSPSSSPSGNSSPLARLRRKLSPRKPDNNHPVSLPAPTNVNNSTSAINVIGNNQLQRVFNYFDEDGDGRISPAELRSCITTVGGQLSIEEAEAAVSFSDMDGDGLLGFQDFQCLMAGSASEEEKTEELRQAFGMYETEPGSGCITPTSLKRMLSRLGKSRSINDCKAMIRTFDLNGDGVLSFHEFSVMMR

SEQ ID NO: 13341 - DNA, 450 bp, Postia placenta Mad-698-R
  CDS (1)..(450)
atggccgaccaactgaatctagagcagatctctgagttcaaggaggccttctcgctattcgacaaggatggcgatggcacgattaccacgaaggagctcggcacagtcatgcgctcgctcgggcagaaccccacggaagcagagctgcaggacatgattaacgaggtcgacgcggatggcaacgggaccatcgacttccctgagttcctcaccatgatggcccgcaagatgcgcgacaccgacagcgaggaggagattaaggaggccttcaaggtcttcgacaaagacggcaacggctacatcagcgcggccgaactccggcacgtcatgagcaaccttggcgagaagttgtcggacaacgaggtggacgagatgattcgtgaggcggatgtcgatggcgacggccagattaactacgatgaattcgtaaagatgatgctctcgaagtga

SEQ ID NO: 13342 - protein, 149 aa, Postia placenta Mad-698-R
MADQLNLEQISEFKEAFSLFDKDGDGTITTKELGTVMRSLGQNPTEAELQDMINEVDADGNGTIDFPEFLTMMARKMRDTDSEEEIKEAFKVFDKDGNGYISAAELRHVMSNLGEKLSDNEVDEMIREADVDGDGQINYDEFVKMMLSK

SEQ ID NO: 13343 - DNA, 411 bp, Talaromyces stipitatus ATCC 10500
  CDS (1)..(411)
atggaaatggtgcgtagagtaaatccaccaaccctcggcgagatcacggcagaagagcttagagacgtcatgcgctcgttgggacagaacccaaccgaatctgagttacaagatattgtaaacgaattggatgttgatcatacaggcacaatcgactttgacgagttcctcacaatgatggtccacaagggaaaagcaacagatgaagaggccgaattgcgtgccgcttttgatgtgtttgaccaggacggcagtggcacaatcagcgcagacgagatgcgccgggtcatgaagtccattggcgagaatctgaccgatgctgaaattgatgagatgattagagaggctgatacagatggaaatgggaccattgattatgaagaatttgtccgtttgatgaaccagaattga

SEQ ID NO: 13344 - protein, 136 aa, Talaromyces stipitatus ATCC 10500
MEMVRRVNPPTLGEITAEELRDVMRSLGQNPTESELQDIVNELDVDHTGTIDFDEFLTMMVHKGKATDEEAELRAAFDVFDQDGSGTISADEMRRVMKSIGENLTDAEIDEMIREADTDGNGTIDYEEFVRLMNQN

SEQ ID NO: 13345 - DNA, 573 bp, Ricinus communis
  CDS (1)..(573)
atgcagtcccacacactttcaccttcactcaatcacaatacccattcatctcctaaatcacctctatcaagattacgtcgcatgctatctccaaggacaccagaccagccttctctttctcctcctataaactctactactgccacttccatcagcagcgagcttcaaagggtcttcgactacttcgatgagaatagagatggaaagatatcagctgccgagttgcagaggtgcgtcagggcagttggaggagaactctctactgaggatgcagaggctgcagtcatctcagctgatacggatggggactgccttttgggatttgaggatttccaaaggctgatggagggaagcaactcggaggaggagaagaaggaagagcttagacaagcttttgggatgtatgagacggagccaggctctggtttcatttcccctgccagtttaaagagaatgctcagtcgattaggcgactctaagtcccttaccgactgcagccaaatgattcgtacttttgacattaatggggatggcctccttagcttccacgagttctctctcatgatgcgctaa

SEQ ID NO: 13346 - protein, 190 aa, Ricinus communis
MQSHTLSPSLNHNTHSSPKSPLSRLRRMLSPRTPDQPSLSPPINSTTATSISSELQRVFDYFDENRDGKISAAELQRCVRAVGGELSTEDAEAAVISADTDGDCLLGFEDFQRLMEGSNSEEEKKEELRQAFGMYETEPGSGFISPASLKRMLSRLGDSKSLTDCSQMIRTFDINGDGLLSFHEFSLMMR

SEQ ID NO: 13347 - DNA, 597 bp, Ricinus communis
  CDS (1)..(597)
atggcaaaagagagaatcctaaaaccttccaaatggttctctaataagggtcttaggttaagtctcaatcgtggaagatcaaaatctagtagctcatcaaccctaagttgctctcctccttctcctatgtctccatgcacaccaaaaaataacaccttaaaggttgaagacgagcttaaagaagtttttcgccatttcgatactgatggagatgagaaggtatcagctctagagcttaggtcttttttcggttcagttggtgagtttatgtcacatgaagaagctgagtctgtgattaatgatcttgattcagatggggataagttattagacttcaatgatttcttgaagctaatgaaaagggaaggtaacagtaatcctaatgatcaagatcatgaagatgaccttaagaaagcatttgagatgttcgaaatggagaaaggatcagggtgtattacacctaaaggattgcaaaggatgcttcatcgcttaggtgattcgaaatcttatgatgaatgcgttgctatgattcatgtttttgatattgatggtaatggtgttcttgattttcatgaattttaccaaatgatggcttag

SEQ ID NO: 13348 - protein, 198 aa, Ricinus communis
MAKERILKPSKWFSNKGLRLSLNRGRSKSSSSSTLSCSPPSPMSPCTPKNNTLKVEDELKEVFRHFDTDGDEKVSALELRSFFGSVGEFMSHEEAESVINDLDSDGDKLLDFNDFLKLMKREGNSNPNDQDHEDDLKKAFEMFEMEKGSGCITPKGLQRMLHRLGDSKSYDECVAMIHVFDIDGNGVLDFHEFYQMMA

SEQ ID NO: 13349 - DNA, 597 bp, Ricinus communis
  CDS (1)..(597)
atggccactgagaaaccaccaaaatcatccaaatggttttccaacaagaatcttcagctaagcttcaagcgactccgatcagagtcatctacctcaagaagattgaactgtgttcctaactcaagagtaacctctcctgcctcgctaacgaccccagaaattgttacgactgctaggcaagaagatgagctaaaacaagtgtttagttattttgatacagatggtgatggaaagatttcagcacttgaacttagggcatactttggttccgttggagagtacatgtcgcatgaagatgctgaaagtgtgatcaaagaacttgatgtagatggtgatggcttgctggatttcagtgatttcttgaagctaatgaagagaggagcagccaatgatgaggaggaagacctcaagaaagcatttgagatgtttgagttgaagaaaggagatgggtgcataactccaagaggtttacaaaggatgttgaatcgtttaggaaataaaaaatcattagatgaatgtgtagctatgattcaggtttttgatactgacggtgatggtgttcttgattttcatgagtttcatcaaatgatgtcttag

SEQ ID NO: 13350 - protein, 198 aa, Ricinus communis
MATEKPPKSSKWFSNKNLQLSFKRLRSESSTSRRLNCVPNSRVTSPASLTTPEIVTTARQEDELKQVFSYFDTDGDGKISALELRAYFGSVGEYMSHEDAESVIKELDVDGDGLLDFSDFLKLMKRGAANDEEEDLKKAFEMFELKKGDGCITPRGLQRMLNRLGNKKSLDECVAMIQVFDTDGDGVLDFHEFHQMMS

SEQ ID NO: 13351 - DNA, 558 bp, Arabidopsis lyrata subsp. lyrata
  CDS (1)..(558)
atgactctcgctaagaaccaaaaatcaccattgtcacgattatacaagaaggtttcaaagaagagatcagaatcgtcaagaaatcttgaagacgaagcaagaaccagcagcagcagtagcggaagcaactcgctaaacgtcgacgagctaagagccgtttttgactacatggatgcaaactccgacgggaaaatctccggtgaagagctacaaagctgcgttagtctcttaggcggcgcgttatcgtcacgtgaggcggaggaggtggtgaagatatcagacgttgacggagacgggtttatagattttggtgagtttttgaagcttatggaaggagaagatggtaatgatgaagagaggaggaaggagctgagagtggcgtttgggatgtatgtgatggagggggaagagtttattacggcggcgagtttacggaggacgttgagtcgactcggcgagtcgtgtacggttgatgcttgtaaggttatgattcgtgggtttgatcagaatgacgatggagttctcagctttgaagaatttgttttgatgatgcgttga

SEQ ID NO: 13352 - protein, 185 aa, Arabidopsis lyrata subsp. lyrata
MTLAKNQKSPLSRLYKKVSKKRSESSRNLEDEARTSSSSSGSNSLNVDELRAVFDYMDANSDGKISGEELQSCVSLLGGALSSREAEEVVKISDVDGDGFIDFGEFLKLMEGEDGNDEERRKELRVAFGMYVMEGEEFITAASLRRTLSRLGESCTVDACKVMIRGFDQNDDGVLSFEEFVLMMR

SEQ ID NO: 13353 - DNA, 522 bp, Debaryomyces hansenii CBS767
  CDS (1)..(522): transl_table=12
atgtcacatcaaagcaatacatcaatatctaccccagggaacgcttctaataatcagaaacgagcattggggaacttaaaacttgagttgttaaatgaacagaaacaagaaataagggaagctttctctctttttgatatgaacaacgatggctgtttagattaccatgagttaaaagtggcgttcagagcgttaggttttgaattgtcaaaaagagaagtgttggatattatccacgaatatgacacagatgacaggaatttaatcacgtacgaaaactttttccaggcagtcggcgaaaaaattgtgaatagggacccattggacgaaatacgtagagccttcaagttgttcgacgatgatggtacgggaaaaattagtttaagaaacttaagaagagtggccaaggaattaggagagaatttaaccgatgacgaattgagagctatgattgacgaatttgatctagatgaagatggagagatcaatgaacaggaattcattaatatttgtacagaatag

SEQ ID NO: 13354 - protein, 173 aa, Debaryomyces hansenii CBS767
MSHQSNTSISTPGNASNNQKRALGNLKLELLNEQKQEIREAFSLFDMNNDGCLDYHELKVAFRALGFELSKREVLDIIHEYDTDDRNLITYENFFQAVGEKIVNRDPLDEIRRAFKLFDDDGTGKISLRNLRRVAKELGENLTDDELRAMIDEFDLDEDGEINEQEFINICTE

SEQ ID NO: 13355 - DNA, 450 bp, Ustilago maydis 521
  CDS (1)..(450)
atggccgaccagcttaccgaagaccagatcgccgagttcaaggaggccttctccctgtttgacaaggacggcgatggcaccatcaccaccaaggagcttggcaccgtcatgcgatcgctcggtcagaaccccaccgaggcagagctgcaggacatggtcaatgaggtggatgccgacggcaacggcactatcgactttcccgaattcctcaccatgatggcacgcaagatgaaagacactgattcggaagaagagatcaaggaggccttcaaggtattcgacaaggatggaaacggctttattagcgccgctgagcttcgacatgtcatgaccaacttgggcgagaagctctcagacaacgaggtcgacgaaatgatccgagaggctgacgtcgatggcgacggccagatcaactacgacgaatttgtcaagatgatgctgagcaagtag

SEQ ID NO: 13356 - protein, 149 aa, Ustilago maydis 521
MADQLTEDQIAEFKEAFSLFDKDGDGTITTKELGTVMRSLGQNPTEAELQDMVNEVDADGNGTIDFPEFLTMMARKMKDTDSEEEIKEAFKVFDKDGNGFISAAELRHVMTNLGEKLSDNEVDEMIREADVDGDGQINYDEFVKMMLSK

SEQ ID NO: 13357 - DNA, 576 bp, Vitis vinifera
  CDS (1)..(576)
  misc_feature (364)..(364): r is g or a
  misc_feature (373)..(373): r is g or a
  misc_feature (384)..(384): y is t or c
atggccactgctgctgtcacggccactgcttccaagtcctccaagtggttctccagcaaaactactaaactcagcctccctcgcgttggatccaaatccaaatcctcatcctcgagcccatgcccttctccatctctagtccttggaccaaagaagagctcaaaagaagatgagctccgacaagtttttggttacttcgacagtgatggagatgggaggatatcgggtgaggagcttagagtttacttccagtctatcggggagtccatgtcgcatgaggaggcgcaaaaagtgattggcgatttcgatgtcgatggtgacagcttactagaatttcaagactttgttcgattgatggagcaargcagcgagrtggatgatgaycttaagagggctttccagatgttcgaagtggaaaagggttgcgggtgcatcaccccaaaaggactgcaacagatgttcaacaggctgggagattccaaaacttacgaggagtgtgtggcaatgattcgagtgtttgatcttgatggcaacggagtgctcgacttccatgagtttcaccggatgatgacttga

SEQ ID NO: 13358 - protein, 191 aa, Vitis vinifera
  misc_feature (122)..(122): The Xaa at location 122 stands for Gly, or Ser.
  misc_feature (125)..(125): The Xaa at location 125 stands for Met, or Val.
MATAAVTATASKSSKWFSSKTTKLSLPRVGSKSKSSSSSPCPSPSLVLGPKKSSKEDELRQVFGYFDSDGDGRISGEELRVYFQSIGESMSHEEAQKVIGDFDVDGDSLLEFQDFVRLMEQXSEXDDDLKRAFQMFEVEKGCGCITPKGLQQMFNRLGDSKTYEECVAMIRVFDLDGNGVLDFHEFHRMMT

SEQ ID NO: 13359 - DNA, 618 bp, Zea mays
  CDS (1)..(618)
atgggcaaggttcggtccttcttctcccgctcccgcagcggcaagcgcggcagcgcccggagggcaggctcgtcctcgccgcactcctccgcggcgagcgcgccgccgtccccgtccccactcccactcccgaggaggtcgccgtcgtcgtcgtcgtcgaccagggacgagacggagcgcgtgttccgcaagttcgacgcgaacggcgacgggcagatctcgcggtccgagctggcggcgctgttcgagggcgtgggccacgccgtgaccgacgacgaggtgtcgcgcatgatggaggaggcggacgcggacggcgacggctgcatcagcctgcccgagttcgccgcgctcatggagtccgcgtccgccgacgccgccgccgtggaggaggacctgcgccacgccttcatggtcttcgacgccgacggcaacggcctcatcacgcccgccgagctcgcgcgcgtcctgcgcggcctcggggagtccgccaccgtcgcccagtgccgccgcatgatccagggcgtcgaccgcaacggcgacggcctcgtctccttcgacgagttcaagctcatgatggccgcgggcggcggcggcggattcggcaggatcggtgcctag

SEQ ID NO: 13360 - protein, 205 aa, Zea mays
MGKVRSFFSRSRSGKRGSARRAGSSSPHSSAASAPPSPSPLPLPRRSPSSSSSTRDETERVFRKFDANGDGQISRSELAALFEGVGHAVTDDEVSRMMEEADADGDGCISLPEFAALMESASADAAAVEEDLRHAFMVFDADGNGLITPAELARVLRGLGESATVAQCRRMIQGVDRNGDGLVSFDEFKLMMAAGGGGGFGRIGA

SEQ ID NO: 13361 - DNA, 453 bp, Sordaria macrospora
  CDS (1)..(453)
atgtcccttaaacaccccaccctcggccccgaccaaatcgcccaattccgcgaagtcttcgacctcttcgacaaggaccacacgggcgacatcaccgccgaagagctgggcgtggtcatgcgcgagctgggcttgaacccctccaagtcggagctcgaggacctggtcaatgaggccgacattaacaaggacggcgtcattaactttgaggagtttctgaatctgatgtcagcctcggtcaaggaaaccgacaccgagaaggagctgctggaggcgttcaaggtctttgacaaggacgggtccggcaccatctcgacggaggagctcagggctgtcctcaagagtctgggcgaggacatgacggatgcggatgtggatgagatgatcaagttggcggataagaatggggatgggcagattgattataccgaattcgcccagatcatgaaatag

SEQ ID NO: 13362 - protein, 150 aa, Sordaria macrospora
MSLKHPTLGPDQIAQFREVFDLFDKDHTGDITAEELGVVMRELGLNPSKSELEDLVNEADINKDGVINFEEFLNLMSASVKETDTEKELLEAFKVFDKDGSGTISTEELRAVLKSLGEDMTDADVDEMIKLADKNGDGQIDYTEFAQIMK

SEQ ID NO: 13363 - DNA, 576 bp, Datura metel
  CDS (1)..(576)
atggcatcagtttctgattccacggctgaaaaagagtcttttttctcaagattacaaagtatgtttcatctcggaaggaaggaagagaagaaggagataactacagatactactactactactcatcgaaagaagatgagtagtagtggtagtaataacaacgagttagagagggtatttacctactttgacgagaacggagatggaaaggtgtcaccagtagagctaaggaggtgcgtgagggcggtaggaggcgagctgacggaggaggaggcggagatggcagtgaggctatcggattccgatggggacgggttgttaggattggaggattttacgaagctaatggaagggatggaggaagaaagaaataaagagagtgaattgattggagcatttggaatgtacgaagaaaaggaaggaggctacattactcctaagagcttgaagagaatgttgagtcggctcggcgagtctacctccattgataaatgcaaggttatgataaggagattcgatctcaatggagatggagtcctcagctttgatgagttcaaagttatgatgacaacttag

SEQ ID NO: 13364 - protein, 191 aa, Datura metel
MASVSDSTAEKESFFSRLQSMFHLGRKEEKKEITTDTTTTTHRKKMSSSGSNNNELERVFTYFDENGDGKVSPVELRRCVRAVGGELTEEEAEMAVRLSDSDGDGLLGLEDFTKLMEGMEEERNKESELIGAFGMYEEKEGGYITPKSLKRMLSRLGESTSIDKCKVMIRRFDLNGDGVLSFDEFKVMMTT

SEQ ID NO: 13365 - DNA, 597 bp, Solanum lycopersicum
  CDS (1)..(597)
atgtctaatatggtgttagttactgtttccatggctgaaaagggatcttttttctcaagattacgtaaaaggttttttctgaagaaggctaatactcctaagaaggaacatgagagtgtaacaacaacaacaactattactagtactagtactattgatcgtttatcggtgagtgatagtaatagtggtgagttagagagggtatttacgtactttgatgagaatggagatggaaaggtatcaccaatggagctaaggagatgcatgaaggcggtaggaggtgagataacggtggaggaggcggagatggtggtgaggctatcggattctgatggggacgggttgttagggtttgaggattttacgaagttaatggaaggaatggaggaagagaggaataaagagagtgagttgatgggagcatttggaatgtatgaaatggaaggatacattactcctaagagcttgaagatgatgttgagtcgactcggcgagtcaacctccattgataaatgcaaggttatgataaggagatttgatactaatggagatggagttcttagctttgatgagttcaaagttatgatgacaagttag

SEQ ID NO: 13366 - protein, 198 aa, Solanum lycopersicum
MSNMVLVTVSMAEKGSFFSRLRKRFFLKKANTPKKEHESVTTTTTITSTSTIDRLSVSDSNSGELERVFTYFDENGDGKVSPMELRRCMKAVGGEITVEEAEMVVRLSDSDGDGLLGFEDFTKLMEGMEEERNKESELMGAFGMYEMEGYITPKSLKMMLSRLGESTSIDKCKVMIRRFDTNGDGVLSFDEFKVMMTS

SEQ ID NO: 13367 - DNA, 468 bp, Nostoc punctiforme (strain ATCC 29133 / PCC 73102)
  CDS (1)..(468): transl_table=11
atgattgatgagcaagaaatagaaaagctgtggcaagccttcaaagtattagatgtagacggcaacggagcaatctcaaccgacgaactgggggaagtaatgcgatcgctaggacaaaatcctacggaaacggggttgcgtgacttaatcaaagagattgacgtggatttgtcaggcactattgactttgacgagtttaaaacgctgatgatcgctaaggtaggcgatcgcgaaagccgcctcaagttagccttcagcgcctttgatgaagacaatagcggccaaattactgccgtcgagttgcggacggtaatgagtcaatttgggctgacagacgctgaattgaaagagatgctacaggaagtagatcatgatggcgatggctcaattgactttgaggaattttgtcagctagtactggaagagtcagagagcaagacaggctataaagactcaccaatctcctag

SEQ ID NO: 13368 - protein, 155 aa, Nostoc punctiforme (strain ATCC 29133 / PCC 73102)
MIDEQEIEKLWQAFKVLDVDGNGAISTDELGEVMRSLGQNPTETGLRDLIKEIDVDLSGTIDFDEFKTLMIAKVGDRESRLKLAFSAFDEDNSGQITAVELRTVMSQFGLTDAELKEMLQEVDHDGDGSIDFEEFCQLVLEESESKTGYKDSPIS

SEQ ID NO: 13369 - DNA, 573 bp, Nicotiana tabacum
  CDS (1)..(573)
atggaatcagtttctgtacctagtgttgaaaacaaatcttatttctcaagattaaggaagaggttttcactcaaaaaggcaacgacgactacaacaacaacaactattactactgattatctttcgatgagtagtagtagcaaaagtaataatagtggcgagttagagagggtatttacatactttgacgagaatggagatggaaaagtgtcaccggctgagctcaggaggtgtgtgaaggcggtaggaggcgaactgacggtggaggaggcggagatggcggtgaggctatcggattccgacggggatggattgttgggtttggaggattttacaaaactaatggaaggaatggaagaggagagaaataaggagagtgaattgataggagcatttggaatgtatgaaatggaggggagtggctacattactcctaagagtttgaagatgatgttgagtcgactcggtgagtcaacttccattgataactgcaaagctatgattcagagatttgatatcaatggagatggagttctcaactttgatgagttcaaagctatgatgacaagttaa

SEQ ID NO: 13370 - protein, 190 aa, Nicotiana tabacum
MESVSVPSVENKSYFSRLRKRFSLKKATTTTTTTTITTDYLSMSSSSKSNNSGELERVFTYFDENGDGKVSPAELRRCVKAVGGELTVEEAEMAVRLSDSDGDGLLGLEDFTKLMEGMEEERNKESELIGAFGMYEMEGSGYITPKSLKMMLSRLGESTSIDNCKAMIQRFDINGDGVLNFDEFKAMMTS

SEQ ID NO: 13371 - DNA, 450 bp, Paxillus involutus
  CDS (1)..(450)
atggcggatcaactgtctgaagagcaaatatctgaattcaaggaagccttctctctctttgacaaagatggcgatggcacgatcaccaccaaggagcttggcactgtgatgcgctcgctagggcagaaccccaccgaaggagagctacaagacatgatcaacgaagtcgatgcagacggaaacggcacgattgatttccctgagttcttgaccatgatggcgcgcaagatgcgcgacacggacagtgaagaagaaatcaaggaggcatttaaagtgttcgacaaggacggaaatggctacattagcgccgcagagttgcgacatgtcatgacgaaccttggagagaaattgaccgatacagaggttgacgagatgatccgcgaggcggatgttgatggtgatggccaaatcaactacgacgagttcgtcaagatgatgttatcgaagtga

SEQ ID NO: 13372 - protein, 149 aa, Paxillus involutus
MADQLSEEQISEFKEAFSLFDKDGDGTITTKELGTVMRSLGQNPTEGELQDMINEVDADGNGTIDFPEFLTMMARKMRDTDSEEEIKEAFKVFDKDGNGYISAAELRHVMTNLGEKLTDTEVDEMIREADVDGDGQINYDEFVKMMLSK

SEQ ID NO: 13373 - DNA, 450 bp, Pleurotus ostreatus
  CDS (1)..(450)
atggccgaccaactgtccgaagaacaaatctctgaattcaaggaggccttctcacttttcgataaagacggagatggcaccatcaccaccaaagagctcggaaccgtcatgcgctcactggggcagaaccccaccgaagccgaattgcaggacatgatcaacgaagttgacgcagacggcaacggcacgattgatttccctgaattcctcacaatgatggcgcgaaagatgcgtgacacggacagcgaggaggagatcaaggaggcgttcaaggtgtttgataaggatgggaacgggtacatcagcgctgctgagctcaggcatgttatgacaaatttgggcgagaagttgaccgataatgaggtggatgagatgatccgtgaagctgatgttgacggcgatgggcaaattaactacgaagaattcgtcaagatgatgctctcgaagtaa

SEQ ID NO: 13374 - protein, 149 aa, Pleurotus ostreatus
MADQLSEEQISEFKEAFSLFDKDGDGTITTKELGTVMRSLGQNPTEAELQDMINEVDADGNGTIDFPEFLTMMARKMRDTDSEEEIKEAFKVFDKDGNGYISAAELRHVMTNLGEKLTDNEVDEMIREADVDGDGQINYEEFVKMMLSK

SEQ ID NO: 13375 - DNA, 456 bp, Pneumocystis carinii
  CDS (1)..(456)
atgagtaatgaacagaatttaacagaagaacagatttcagagtttaaggaagctttttcattatttgataaggatggggatggctctattacaacgaaagagcttggaattgttatgcggtcattaggtcagaatccaacagaagcagaattacaagatatggtgaacgaagttgatgcagatgggaatggaacaattgattttcctgaatttctggcaatgatggcacgaaaaatgaaagatgtcgattctgaagaagaaattcgggaagcatttaaagtatttgataaagatggtaacggaattatttctgcagcagagttgagacatgttatgacaaatttgggggagaagttgacagatgaggaagttgatgaaatgattcgagaagctgatgtagatggtgatggagttattgattatagtgaatttgttaagatgatgttaagtaaataa

SEQ ID NO: 13376 - protein, 151 aa, Pneumocystis carinii
MSNEQNLTEEQISEFKEAFSLFDKDGDGSITTKELGIVMRSLGQNPTEAELQDMVNEVDADGNGTIDFPEFLAMMARKMKDVDSEEEIREAFKVFDKDGNGIISAAELRHVMTNLGEKLTDEEVDEMIREADVDGDGVIDYSEFVKMMLSK

SEQ ID NO: 13377 - DNA, 570 bp, Glycine max
  CDS (1)..(570)
atgtcgaatttgagtttccttcaatttcatagtagcaactcgttggggcactcctcttttcaacccaatagtccaaacccgaacaacaacataaaatcatcaaaacagacatcaaatgtagggtgcaatattcagccaaagtcagaggaaatgaaatgggtgttcgacaagtttgacaccaacaaagatggcaagattaccctcgaagagtacaaagcagcagtgagaacaatggggtggggaatcgaaggcactgagactgatgagtcttttcaggtgatggactctgatggagatggcttcattgacttcaaagagttcatggacatgttcaacgtggaggagagggtgaaagagacggagatcaagagtgcttttcaagtgtttgatttgaatggcgatgggaaaatcagtgcagaggaattgtcacaagttctcaaaagcctaggggaaagttgcagccttagtgcttgtaagaaaatggtgatgggggtggatagaaatggggatggctttatagacttgaatgagtttatgaggatgatgatgagttgcaagaaactcacctaa

SEQ ID NO: 13378 - protein, 189 aa, Glycine max
MSNLSFLQFHSSNSLGHSSFQPNSPNPNNNIKSSKQTSNVGCNIQPKSEEMKWVFDKFDTNKDGKITLEEYKAAVRTMGWGIEGTETDESFQVMDSDGDGFIDFKEFMDMFNVEERVKETEIKSAFQVFDLNGDGKISAEELSQVLKSLGESCSLSACKKMVMGVDRNGDGFIDLNEFMRMMMSCKKLT

SEQ ID NO: 13379 - DNA, 564 bp, Glycine max
  CDS (1)..(564)
atgtcgaatttgagtttcctaaagttcaattatagcttctcatggaagccttcctcttcacgcaaaaatgtatccaagaagaacagcttcgtatcaagacagacatcgaatgaaggacaaagtttccaaccaacaaaagaggaaatgaaatgggtgttccagaaatttgacaccaacagagacggcaaggtttctcttgaagagtacaaggctgctgcaagggccttggatagggccattggggaagctgaagcagtgaaagcatttagggtcatggacattgatggagatggcttcattgacttgaatgagttcatggagaagttcaatggagaaggtaggataaaagaaactgagatcaagaatgcttttcaagtgtttgatttgaacggtgatgggaagattagtgctgaggagttgtctcatgttctcaaaaggctaggagagagttgcagccttaatgcctgtaaaaaaatggtcaaaggagtggatgggaatggagatggttttattgacttgaatgagtttacaaggatgatgatgagtgggaagaaactaggctaa

SEQ ID NO: 13380 - protein, 187 aa, Glycine max
MSNLSFLKFNYSFSWKPSSSRKNVSKKNSFVSRQTSNEGQSFQPTKEEMKWVFQKFDTNRDGKVSLEEYKAAARALDRAIGEAEAVKAFRVMDIDGDGFIDLNEFMEKFNGEGRIKETEIKNAFQVFDLNGDGKISAEELSHVLKRLGESCSLNACKKMVKGVDGNGDGFIDLNEFTRMMMSGKKLG

SEQ ID NO: 13381 - DNA, 576 bp, Triticum aestivum
  CDS (1)..(576)
atgggcaagatcaagatgccggccctgttccgccgccgctcctcctccaagtcgcgctccgcctccccgccgccgcctccccaggaggagcgggaggagaaccggccggcgtcgggcgcggggtccccggcgcggtcggcggaggaggagatggagcgggtgttccgcaagttcgacgccaacggcgacggccggatctcgcggccggagctggccgccctcttcgagagcctgggccacgcggccaccgaggacgagctgacccgcatgatggccgaggcggacgcggacggcgacggcttcatcagcctggaggagttcgcggcgctcaacgccaccgcgcccggcgacgacgaggaggacctgcggctcgccttcaaggtgttcgacgcggacggcagcggcgacatctccgccgcggagctggcgcgcgtgctccacgtcctcggcgagaaggccacggtccagcagtgccgccgcatgatcgagggcgtggacaagaacggcgacggcctcatctccttcgacgagttcaaggtcatgatggcctccggcttcgccgccaagatggcctga

SEQ ID NO: 13382 - protein, 191 aa, Triticum aestivum
MGKIKMPALFRRRSSSKSRSASPPPPPQEEREENRPASGAGSPARSAEEEMERVFRKFDANGDGRISRPELAALFESLGHAATEDELTRMMAEADADGDGFISLEEFAALNATAPGDDEEDLRLAFKVFDADGSGDISAAELARVLHVLGEKATVQQCRRMIEGVDKNGDGLISFDEFKVMMASGFAAKMA

SEQ ID NO: 13383 - DNA, 573 bp, Triticum aestivum
  CDS (1)..(573)
atgggcaagatcaagatgccggccctgttccgccgccgctcctcctccaagtcgcgctccgcgtcgccgccgcctactccccaggaggaagagggcacccggccggcgtctggcgcggggtccccggcgcggtcggcggaggaggagatggagcgggtgttccgcaagttcgacgccaacggcgacggccggatctcgcggccggagctggcggccctgttcgagagcctgggccacgcggccacggaggacgagctgacccgcatgatggcggaggccgacgcggacggcgacggcttcatcagcctggaggagttcgcggcgctgaacgccacggcggccggcgacgacgaggaggacctgcggctggccttcaaggtgttcgacgcggacggcagcggcgacatctcggccgcggagctggctcgcgtgctccacggccttggcgagaaggcgacagtgcagcagtgccggcgcatgatcgagggcgtggacaagaacggcgacgggctcatctccttcgacgagttcaaggtcatgatggcctccggcttggccgccaagatggcctga

SEQ ID NO: 13384 - protein, 190 aa, Triticum aestivum
MGKIKMPALFRRRSSSKSRSASPPPTPQEEEGTRPASGAGSPARSAEEEMERVFRKFDANGDGRISRPELAALFESLGHAATEDELTRMMAEADADGDGFISLEEFAALNATAAGDDEEDLRLAFKVFDADGSGDISAAELARVLHGLGEKATVQQCRRMIEGVDKNGDGLISFDEFKVMMASGLAAKMA

SEQ ID NO: 13385 - DNA, 456 bp, Oryza sativa
  CDS (1)..(456)
atggttgttgcatcagcagcatcgccgtgcgagtccagtgcgttgttcgcgacgttcgaccacgacggcgacggcaggatctccgcggcggagctgcggctgtgcatgaagacgacgctcggggaggaggtgtcggacgaggaggcggggcagctggtggcgtcggtggacgcggacggcgacgggctgctgtgcgaggcggagttcgtgcggctggtgcaggcggcggaggtggaggaggaagacgagcggcggggcaccggcctccgggaggcgttcggcatgtacgagatggaaggggaagggtgcatcacgccgacgagcctcaggcggatgctgcgccggctgggctccgaccaggacatcgacgactgccgcgccatgatctgcaggttcgatctcaacggcgacggcgtcctcagcttcgacgagttcaagatcatgatgaacgcctaa

SEQ ID NO: 13386 - protein, 151 aa, Oryza sativa
MVVASAASPCESSALFATFDHDGDGRISAAELRLCMKTTLGEEVSDEEAGQLVASVDADGDGLLCEAEFVRLVQAAEVEEEDERRGTGLREAFGMYEMEGEGCITPTSLRRMLRRLGSDQDIDDCRAMICRFDLNGDGVLSFDEFKIMMNA

SEQ ID NO: 13387 - DNA, 570 bp, Hordeum vulgare
  CDS (1)..(570)
atgggcaagatgcggtcactcttctcacggagccggagcggcaacggcggcagccggcggtccacctcctcctccaggtcgtcagcgccgccgtcgcccgcgcgcggggcctcgagggaggacgagatggagcgcgtgttccgcaagttcgacgccaacggcgacggcaggatctcgcgggcggagctggcggcgctcttcgagagcgtgggccacgcggtcaccgacgacgaggtggcgcgcatgatggaggaggccgacgcagacggcgacggctacatcagcctcgccgagttcgccgccatcaacgccgcgcccgacgcagccgtcgaggaggacctccgccacgccttccgcgtcttcgacgccgacggcaacggcgtcatctcccccgccgagctcgcgcgcgtgctgcgggggctcggcgaggccgccaccgtcgcgcagtgccgccgcatgatcgagggcgtcgaccgcaacggcgacggcctcgtctccttcgacgagttcaagctcatgatggccaacggcgccgggttcgccatcgcccagggcaacgtccgcgcctga

SEQ ID NO: 13388 - protein, 189 aa, Hordeum vulgare
MGKMRSLFSRSRSGNGGSRRSTSSSRSSAPPSPARGASREDEMERVFRKFDANGDGRISRAELAALFESVGHAVTDDEVARMMEEADADGDGYISLAEFAAINAAPDAAVEEDLRHAFRVFDADGNGVISPAELARVLRGLGEAATVAQCRRMIEGVDRNGDGLVSFDEFKLMMANGAGFAIAQGNVRA

SEQ ID NO: 13389 - DNA, 513 bp, Brassica napus
  CDS (1)..(513)
atgaagaacactcaacgtcagttatcttcatctttcatgaaactctgcgagagactctcctcagacatcaacggtgaaaacaagaacaaagacttggcggctgtttttgcatacatggatgcaaaccgagacggtagaatctcagcggaggagcttaagaagagtttcaagacactaggagagcaactctctgatgaagaagccaaaaccgcggttaaactgtctgatatagacggagatgggatgctggaatttgaggagtttgctcagttaatcaaagggagtggtgatgagtttacagaggaagagaagaagagcaagataatggaagcgttcagaatgtacattgatgaaagagaagattgcattactccaagaagcttgaagacgatgctgatgaagcttggtgagtcaagaacgaatgatgattgtagagtcatgatcaaagcttttgatcttaatgatgatggagttttgagctttgatgagtttgctcttatggtgatgcgttaa

SEQ ID NO: 13390 - protein, 170 aa, Brassica napus
MKNTQRQLSSSFMKLCERLSSDINGENKNKDLAAVFAYMDANRDGRISAEELKKSFKTLGEQLSDEEAKTAVKLSDIDGDGMLEFEEFAQLIKGSGDEFTEEEKKSKIMEAFRMYIDEREDCITPRSLKTMLMKLGESRTNDDCRVMIKAFDLNDDGVLSFDEFALMVMR

SEQ ID NO: 13391 - DNA, 510 bp, Brassica napus
  CDS (1)..(510)
atgaagaacactcaacgtcagttatcttcatctttcatgaaactctgcgagagactctcctcagacatcaacggtgaaaacaagaacaaagacttggcggctgtttttgcatacatggatgcaaaccgagacggtagaatctcagcggaggagcttaagaagagtttcaagacactgggagagcagctctctgatgaagaagccgaaaccgcggttaaactgtctgatatagacggagatgggatgcttgattttgaggagtttgctcagttactcaaagggggtgatgagtttacagaggaagagaagaagagcaagataatggaagcgttcagaatgtacattgctgagggagaagattgcattactccaagaagcttgaagatgatgctgatgaagcttggtgagtctagaactactgatgattgtgtagtcatgatcaaagcttttgatcttaatgctgatggagttttgagctttgatgagtttgctcttatggtgatgcgttaa

SEQ ID NO: 13392 - protein, 169 aa, Brassica napus
MKNTQRQLSSSFMKLCERLSSDINGENKNKDLAAVFAYMDANRDGRISAEELKKSFKTLGEQLSDEEAETAVKLSDIDGDGMLDFEEFAQLLKGGDEFTEEEKKSKIMEAFRMYIAEGEDCITPRSLKMMLMKLGESRTTDDCVVMIKAFDLNADGVLSFDEFALMVMR

SEQ ID NO: 13393 - DNA, 546 bp, Brassica napus
  CDS (1)..(546)
atgatgaagaatactcaagaacctcaatcatcttcgtctttcgtgaagttctgtcggaaactgtcacctaagagaaaagattcaccagcagaaagtacacaacataacatcaatgatgatcaggacaagaacaaagacttagaggctgtctttgcttacatggacgaaaacaaagacgggagaatatctccacatgagcttcaaaagagtttcatgacactaggagagcaactatccgacgaagaagccgaagctgcggttagattgtctgatacagacggagacgggatgttggattttcaagagtttgctcagttaatcaaaggagatgatgatcaggaagagaagaagactgagctcaaggaagcttttagaatgtatatagcagaaggggaagagtgtattactccgagaagtttgaagatgatgttaaagaagctaggtgagtcgagaaccactgatgattgtagagttatgattcgtgcttttgatctcaatgctgatggagtattgagctttgatgagtttgctcttatgatgcgttaa

SEQ ID NO: 13394 - protein, 181 aa, Brassica napus
MMKNTQEPQSSSSFVKFCRKLSPKRKDSPAESTQHNINDDQDKNKDLEAVFAYMDENKDGRISPHELQKSFMTLGEQLSDEEAEAAVRLSDTDGDGMLDFQEFAQLIKGDDDQEEKKTELKEAFRMYIAEGEECITPRSLKMMLKKLGESRTTDDCRVMIRAFDLNADGVLSFDEFALMMR

SEQ ID NO: 13395 - DNA, 540 bp, Zea mays
  CDS (1)..(540)
atgggtctcgtcgtctccgccaccgcctcgtgcagcgacatcttcggccgacgccgctcctcgacgctgcctcccgcaactgctacccccacgtcgagtaccccacagctcccggatacaacgccggagccagagctcgtccgcgtcttccgccacttcgacgcggatggcgatggccgcatctcggtggccgagatgcgcgagtcgtgcgggtgcacggccgcggaggcggaggagatggtcgctgccgcagaccgcgacggggacgggttcatcagcctcgaggagctcggggcgctgttcgaggacgaagaccagtcggacacgctgcgcgctgcgttcgccgagtacgacgagaacggcgacggcgtgatcaccgcggaggagctgctccgcgcgctgcggaggctgggtatcgtcggggaggagatgacggctgagcggtgcgcagagatcatcgcggcggtggaccgagatggcgacggggtcatctccttcgacgagttcaaggccatgatggccaccgagccggcggcgtga

SEQ ID NO: 13396 - protein, 179 aa, Zea mays
MGLVVSATASCSDIFGRRRSSTLPPATATPTSSTPQLPDTTPEPELVRVFRHFDADGDGRISVAEMRESCGCTAAEAEEMVAAADRDGDGFISLEELGALFEDEDQSDTLRAAFAEYDENGDGVITAEELLRALRRLGIVGEEMTAERCAEIIAAVDRDGDGVISFDEFKAMMATEPAA

SEQ ID NO: 13397 - DNA, 570 bp, Glycine max
  CDS (1)..(570)
atgtcgaatttgagtttccttcaatttcatagtagcaactcgttggggcactcctcttttcaacccaatagtccaaacccgaacaacaacataaaatcatcaaaacagacatcaaatgtagggtgcaatattcagccaaagtcggaggaaatgaaatgggtgttcgacaagtttgacaccaacaaagatggcaagattaccctcgaagagtacaaagcagcagtgagaacaatggggtggggaatcgaaggcactgagactgatgagtcttttcaggtgatggactctgatggagatggcttcattgacttcaaagagttcatggacatgttcaacgtggaggagagggtgaaagagacggagatcaagagtgcttttcaagtgtttgatttgaatggcgatgggaaaatcagtgcagaggaattgtcacaagttctcaaaagcctaggggaaagttgcagccttagtgcttgtaagaaaatggtgatgggggtggatagaaatggggatggctttatagacttgaatgagtttatgaggatgatgatgagttgcaagaaactcgcttaa

SEQ ID NO: 13398 - protein, 189 aa, Glycine max
MSNLSFLQFHSSNSLGHSSFQPNSPNPNNNIKSSKQTSNVGCNIQPKSEEMKWVFDKFDTNKDGKITLEEYKAAVRTMGWGIEGTETDESFQVMDSDGDGFIDFKEFMDMFNVEERVKETEIKSAFQVFDLNGDGKISAEELSQVLKSLGESCSLSACKKMVMGVDRNGDGFIDLNEFMRMMMSCKKLA

SEQ ID NO: 13399 - DNA, 636 bp, Glycine max
  CDS (1)..(636)
atgccaactattttgcataggattttccttctttacaacctcgtacactcattcctcctctgtctggtccccaagaaggtgcgtcccttcctccccccttcttggttccaaaccaaaaccatcactgcaccttcttcttcttcttcttcttcttccagtgcccgcatcatcaagagaacaacaatggaccccaacgagctgaagcgcgtgttccagatgttcgaccgcaacggcgacggaagaataacgaagaaggagctgaacgactcgctggagaatcttggcatcttcattcctgacaaggagctcggccaaatgatcgagaggattgacgtcaacggcgatggctgcgtcgacatcgacgagttcggggagctctaccagaccatcatggacgagcgcgacgaggaggaggacatgagggaggccttcaacgtcttcgaccagaacgccgacggcttcatcaccgtcgacgagttgaggaccgtcctgtcctccctcggcttgaagcagggcagaaccgtccaagactgcaagaacatgatatccaaggttgatgttgatggagacggcatggtcgatttcaaggagttcaagcaaatgatgaaagggggtggcttcagtgctctcacttaa

SEQ ID NO: 13400 - protein, 211 aa, Glycine max
MPTILHRIFLLYNLVHSFLLCLVPKKVRPFLPPSWFQTKTITAPSSSSSSSSSARIIKRTTMDPNELKRVFQMFDRNGDGRITKKELNDSLENLGIFIPDKELGQMIERIDVNGDGCVDIDEFGELYQTIMDERDEEEDMREAFNVFDQNADGFITVDELRTVLSSLGLKQGRTVQDCKNMISKVDVDGDGMVDFKEFKQMMKGGGFSALT

SEQ ID NO: 13401 - DNA, 456 bp, Helianthus annuus
  CDS (1)..(456)
atggccaataactcaccaactaatcacacaaccgactacgagaaagtcttcaacaagttcgacgctaacggcgacggcaaaatctccataaccgaactcggctccatcctcgccgcactcggcggcggctccgtcacgccggagaacgagctcaaagtcgtaatggcagagatcgatacggataacgacggttttatcgatcttcaggagtttattgcgtttcagaaacgcggatgtaacggttccgattgtgataataaggagttacgtgaagcgtttgatctgtacgatcaggataagaacggtaagatctcggctaatgagttgttctccgtgttgaagagtttaggtgagaagtgttcgttgaaggattgtaggaagatgattaaatcggttgatgttgacggtgacggttgcgttaattttgaagaatttaagaagatgatgagcaaataa

SEQ ID NO: 13402 - protein, 151 aa, Helianthus annuus
MANNSPTNHTTDYEKVFNKFDANGDGKISITELGSILAALGGGSVTPENELKVVMAEIDTDNDGFIDLQEFIAFQKRGCNGSDCDNKELREAFDLYDQDKNGKISANELFSVLKSLGEKCSLKDCRKMIKSVDVDGDGCVNFEEFKKMMSK

SEQ ID NO: 13403 - DNA, 564 bp, Glycine max
  CDS (1)..(564)
atggcatcagctaaatggttattcaagataataacgtttccatgcataactcctcccaggcccaaatcattaccggcaatagacggtgacaccactacaccacctcctctaattgggccttcgggcccaaaagacgacgatgagaggctcaaagacgtttttgatcacttggacattgacaaagatggaaagatttcgagcagcgagttaatggattatttcgcgtccgtgggtgagtccctgagccataaagtggcagagagagtgataaacgagtttgactccgatggtgacgagttactcgatttcggagactttgagaaactgatgaagcaagaggacagtgaggaattggaggatgttctgagaagcgcgttcgagatgttcgaggttgagaaagggtgtgggtgcataacgcccaagggcttgcaacaaatgttgcgccaactaggagacgtcaagtcccacgacgagtgtgcggccatgattcaagcattcgatcttgacggcaatggcttccttgatttcaacgaatttcagcagatgatgtctccagcttcttag

SEQ ID NO: 13404 - protein, 187 aa, Glycine max
MASAKWLFKIITFPCITPPRPKSLPAIDGDTTTPPPLIGPSGPKDDDERLKDVFDHLDIDKDGKISSSELMDYFASVGESLSHKVAERVINEFDSDGDELLDFGDFEKLMKQEDSEELEDVLRSAFEMFEVEKGCGCITPKGLQQMLRQLGDVKSHDECAAMIQAFDLDGNGFLDFNEFQQMMSPAS

SEQ ID NO: 13405 - DNA, 423 bp, Glycine max
  CDS (1)..(423)
atggacaagctaagccagtataaacgtgtgttcaaccaatttgatgagaatggagacagcaagatatcgccgtcagagctccggcaatgcgtggaggccattggcggggagttgtcagagaaggacgcggaggtggcagtgacattgctcgacagggacggcgatggactggtggggtttgaagattttgtgaggtttttggaggaagggaaagaggaagagaaagaggatgacttgaaggaggcttttaagaggtatgagatggatgggagtggttgcatcacacccaggagtcttaagaggatgcttagtaggttaggtgaatctagaagcttagatgagtgtaaagttatgattgctagatttgatcttgatggagatggggtgctcactttcgatgaatttaaggtcatgatgttgtaa

SEQ ID NO: 13406 - protein, 140 aa, Glycine max
MDKLSQYKRVFNQFDENGDSKISPSELRQCVEAIGGELSEKDAEVAVTLLDRDGDGLVGFEDFVRFLEEGKEEEKEDDLKEAFKRYEMDGSGCITPRSLKRMLSRLGESRSLDECKVMIARFDLDGDGVLTFDEFKVMML

SEQ ID NO: 13407 - DNA, 423 bp, Glycine max
  CDS (1)..(423)
atgatgaggggtgcggaatacgagcgtgtgctaaggtacttcgatgaagacggtgatggaaagatttcaccctcagagctaaggaacagaatagcaatgatgggtggtgaggttatgttgaaggaggctgagatggcgatcgaggcgttggattcggacggcgacgggttgttgtgtttggacgatttgatgaatctgatggaggctgctggagaagaagagaagttgaaggatttgagagaagcctttgatatgtatgatatggagaggtgtgggtttattactccaaaggccttgaagaggatgctgaagaagttgggagaatctaagtccatggatgagtgcaaagtgatgataagtaggtttgatttgaatggggatggcatgcttagctttgaagagttcagaattatgatgaagtaa

SEQ ID NO: 13408 - protein, 140 aa, Glycine max
MMRGAEYERVLRYFDEDGDGKISPSELRNRIAMMGGEVMLKEAEMAIEALDSDGDGLLCLDDLMNLMEAAGEEEKLKDLREAFDMYDMERCGFITPKALKRMLKKLGESKSMDECKVMISRFDLNGDGMLSFEEFRIMMK

SEQ ID NO: 13409 - DNA, 552 bp, Helianthus annuus
  CDS (1)..(552)
atgggtttaaagaatctcttcaatcggaaaaccaagaagatcaaaaaccacaaaacaacccatgaaacaaaccccacaaacaacacaacaccatcggtcacatcccatgaacaagaactagaacaagtgttcaacaaattcgacgtaaacggtgacgggaagatctcatcatccgagttgggttcgatcatgggcagcatgggtcaccagccgacaccggaggagttagagaacatgatcatgcaggtggatgccgatggcgatgggtttattgatttgaaagagttcattgagttgaacacgaaagatgtcgattcgaatgagttgttggagaatttgaaggaggcgttctcggtttttgatgtggataagaacgggtcgattacggcggatgagttgcagaaggtgttggggagtttgggggaggagtgtaccgttggagagtgccggaagatgatagccggcgttgaccaagatggggatggtatgattagttttgatgagtttaaagtcatgatgatgagtggatctatgtttaatgacttgatttga

SEQ ID NO: 13410 - protein, 183 aa, Helianthus annuus
MGLKNLFNRKTKKIKNHKTTHETNPTNNTTPSVTSHEQELEQVFNKFDVNGDGKISSSELGSIMGSMGHQPTPEELENMIMQVDADGDGFIDLKEFIELNTKDVDSNELLENLKEAFSVFDVDKNGSITADELQKVLGSLGEECTVGECRKMIAGVDQDGDGMISFDEFKVMMMSGSMFNDLI

SEQ ID NO: 13411 - DNA, 459 bp, Hordeum vulgare
  CDS (1)..(459)
atggttgcgtcaaagtcgggcgagctgagcgcgctgttcttgtcactggaccgggacgcagacggcaggatctctgcggcggagctgcgggggtgcatgcgcgcgacgcttggcgaggacgtgccggcggaggaggccgaggcgctggtggcgtcggcggacgcggacggtgacgggctgctaagcgagtccgagttcctcgagctggcgcaacaggcggcctgggcaggcgacgcgggggaggaggacgacgagcggaggatccgggcgctgagggaggcgttcgggatgtacgagatggaggggcaggggtgcatcacgccggccagcctgaggcggatgctcggcaggctcggcgccgagcggggcaccggcgagtgccgcgccatgatctgccggttcgacctcgacggtgacggcgtgctcagcttcgacgagttcaagatcatgatgagctag

SEQ ID NO: 13412 - protein, 152 aa, Hordeum vulgare
MVASKSGELSALFLSLDRDADGRISAAELRGCMRATLGEDVPAEEAEALVASADADGDGLLSESEFLELAQQAAWAGDAGEEDDERRIRALREAFGMYEMEGQGCITPASLRRMLGRLGAERGTGECRAMICRFDLDGDGVLSFDEFKIMMS

SEQ ID NO: 13413 - DNA, 525 bp, Oryza sativa
  CDS (1)..(525)
atgggtctcgtcgtttccgccgccgcctcatgtggtcgcctccgccgcagccgcagccgctcgccgcccccggctgtcctggatccctcccagtccccgttgtccttggagcgggaggccgagccggagctgatccgcgtcttccgctgcttcgacaccgacggcgacggcctcatctcggccgcggagatgagggagttctacgggtgctcggtggacgaggccgaggagatggtcgccgccgcggacagggacggggacgggttcgtcagcatcgaggagctccgcgcggtgatggagggcgggggattggacgcgctgcgcgccgcgttcgacgagtacgacgaggacgggaacggtgtgatcacggcggaggagctgcgccgcgcgctgcgtaggctgaacctcgacgggatggatctgacggctgagcagtgcgcggagatcgtcgcggccgtggacagcgacggcgacggggtcatctccttcgacgagttcaaggccatgatgagcaagcaggcgtga

SEQ ID NO: 13414 - protein, 174 aa, Oryza sativa
MGLVVSAAASCGRLRRSRSRSPPPAVLDPSQSPLSLEREAEPELIRVFRCFDTDGDGLISAAEMREFYGCSVDEAEEMVAAADRDGDGFVSIEELRAVMEGGGLDALRAAFDEYDEDGNGVITAEELRRALRRLNLDGMDLTAEQCAEIVAAVDSDGDGVISFDEFKAMMSKQA

SEQ ID NO: 13415 - DNA, 456 bp, Triticum aestivum
  CDS (1)..(456)
atggttgcgacgaagtcgggcgagctgagggcgctgttcttgtcactggaccgggacgcggacggcaggatctcggcggcggagctgcgggggtgcatgcgggcgacgctaggcgaggacgtgccggcggaggaggccgaagcgctggtggcgtcggcggacgcggacggcgacgggctgctgtgcgaggccgagttcctcgagctggcgcagcaggcggcctgggcgggcgcggaggaggaggacgacgagctgaggatccgggcgctgagggaggcgttcgggatgtacgagatggaggggcagggatgcatcacgccgaccagtctgggccggatgcttggcaggcttggcgccgagcggggcgccggcgagtgccgcgccatgatctgccggttcgaccttgacggcgacggcgtgctcagcttcgacgagttcaagatcatgatgagctag

SEQ ID NO: 13416 - protein, 151 aa, Triticum aestivum
MVATKSGELRALFLSLDRDADGRISAAELRGCMRATLGEDVPAEEAEALVASADADGDGLLCEAEFLELAQQAAWAGAEEEDDELRIRALREAFGMYEMEGQGCITPTSLGRMLGRLGAERGAGECRAMICRFDLDGDGVLSFDEFKIMMS

SEQ ID NO: 13417 - DNA, 465 bp, Triticum aestivum
  CDS (1)..(465)
atgaatagtcactcgatcatggcggtgtcgtcggtgttcgccgccttcgacaaggacggcgacggcaaggtctccgcgtccgaactgcggcgctgcatggaggccacgctgggcgagagcgtgtccgaggaggaagcggcggcggtccttgcggcgattgatgccgacggcgacgggctgctaaaccaagaagagttctcgaggctggccgccggcgcccatgaagaggacgatgccgacgtgaagcgaaggtgcctgagggaggcgttcgggatgtacgcatcgtcgtccgtggaagacacgacgacgacgatgattacgccggcgagcctgaggcggacgctgagcaggctggggtcgcacgagctgggcgtggaggagtgcagggcaatgatctgcagattcgacctcgacggcgacggcaaactctcgttcgacgagttccgggtcatgatgatggcctga

SEQ ID NO: 13418 - protein, 154 aa, Triticum aestivum
MNSHSIMAVSSVFAAFDKDGDGKVSASELRRCMEATLGESVSEEEAAAVLAAIDADGDGLLNQEEFSRLAAGAHEEDDADVKRRCLREAFGMYASSSVEDTTTTMITPASLRRTLSRLGSHELGVEECRAMICRFDLDGDGKLSFDEFRVMMMA

SEQ ID NO: 13419 - DNA, 456 bp, Triticum aestivum
  CDS (1)..(456)
atggttgcgacaaagtcgggcgagctgagggcgctattcgcgtcgctggaccaggacagcgacggccgggtctccgcggcagagctgcgggggtgcatgcgggcaacgctgggcgaggacgtgccggcagaggaggccgaggcactggtggcgtcggcggacgcggacggcgacgggctgctgtgcgaggccgagttcctcgagctggcgcagcaggcggcctgggcgagcgccgaggacgaggacaacgagcagaggacccgggcgctgagggaggcgttcgggatgtacgagatggaggggcaggggtgcatcacgccggccagcctcgggcggatgctcggcaggctcggcaccgagcggggcgccggcgagtgccgcgccatgatctgccggttcgacctcgaaggcgacggcgtgctcagcttcgacgagttcaagatcatgttgagctag

SEQ ID NO: 13420 - protein, 151 aa, Triticum aestivum
MVATKSGELRALFASLDQDSDGRVSAAELRGCMRATLGEDVPAEEAEALVASADADGDGLLCEAEFLELAQQAAWASAEDEDNEQRTRALREAFGMYEMEGQGCITPASLGRMLGRLGTERGAGECRAMICRFDLEGDGVLSFDEFKIMLS

SEQ ID NO: 13421 - DNA, 456 bp, Triticum aestivum
  CDS (1)..(456)
atggttgcgacaaagacgggcgagctgagggcgctgttcttgtcactggaccgggacgcggacggcaggatctcggccgcggagctgcgggggtgcatgcgggcgacgctgggcgaggatgtgccggcggaggaggccgaggcgctggtggcgtcggtggacgctgacggcgacgggctgctgtgcgagtccgagttcctcgagctggcccagcaggcggcctggacgggcgcggacgaagagaacgacgagctgaggatccgggcgctaagggaggcgttcgggatgtacgagatggaggggcaggggtgcatcacgccggccagccttgggcggatgctcggcaggctcggcgcccagcggggcgcccgcgagtgtcgcgccatgatctgcccgttcgatctcgacggcgacggcgtgctcagtttcgacgagttcaagatcatgatgagctag

SEQ ID NO: 13422 - protein, 151 aa, Triticum aestivum
MVATKTGELRALFLSLDRDADGRISAAELRGCMRATLGEDVPAEEAEALVASVDADGDGLLCESEFLELAQQAAWTGADEENDELRIRALREAFGMYEMEGQGCITPASLGRMLGRLGAQRGARECRAMICPFDLDGDGVLSFDEFKIMMS

SEQ ID NO: 13423 - DNA, 570 bp, Zea mays
  CDS (1)..(570)
atgggcaaggtgcgctccttcttctgccgcgcccgcagcggcaagcgcggcggctcccggccaggctcgtcgtcctcgtctctctcgtccccgtgcccgtccgcgaggagggcgtcgccgccggccggggacgagacggagcgcgtcttccgcaagttcgacgcgaacggcgacggccagatctcgcggtccgagctggcggcgctgttcgagagcgtgggccacgcggccaccgacgacgaggtgtcgcgcatgatggaggaggccgacgcggacggcgacggctacatcagcctgcccgagttcgcggcgctcatggactcggcgtccggcgacgccgacgccgtcgaggaggacctgcgccacgccttctcggtcttcgacgccgacggcaacggcctcatcacgcccgccgagctcgcgcgcgtcctgcgcggcctcggcgagtccgcctccgtcgcccagtgccgccgcatgatccagggcgtcgaccgcaacggcgacggactcgtgtccttcgacgagttcaagctcatgatggccggcggattcggcaggatcggtgcctag

SEQ ID NO: 13424 - protein, 189 aa, Zea mays
MGKVRSFFCRARSGKRGGSRPGSSSSSLSSPCPSARRASPPAGDETERVFRKFDANGDGQISRSELAALFESVGHAATDDEVSRMMEEADADGDGYISLPEFAALMDSASGDADAVEEDLRHAFSVFDADGNGLITPAELARVLRGLGESASVAQCRRMIQGVDRNGDGLVSFDEFKLMMAGGFGRIGA

SEQ ID NO: 13425 - DNA, 576 bp, Zea mays
  CDS (1)..(576)
atgggcaaggtgcgctccttcttctgccgcgcccgcagcggcaagcgcggtggctcccggccaggcttgtcgtcctcgtctctctcgtccccgtgcccctccgcgaggagggcgtcgccgccggccggggacgagacggagcgcgtcttccgcaagttcgacgcgaacggcgacggccagatctcgcggtccgagctggcggcgctgttcgagagcgtgggccacgcggccaccgacgacgaggtgtcgcgcatgatggaggaggccgacgcggacggcgacggctacatcagcctgcccgagttcgcggcgctcatggactcggcgtccggcgacgccgacgccgtcgaggaggacctgcgccacgccttctcggtcttcgacgccgacggcaacggcctcatcacccccgccgagctcgcgcgcgtcctgcgcggcctcggcgagtccgcctccgtcgcccagtgccgccgcatgatccagggcgtcgaccagaacggcgacggcctcatctccttcgacgagttcaaggtcatgatggccaggggaggaggatgcttcgcaaagatcgcctag

SEQ ID NO: 13426 - protein, 191 aa, Zea mays
MGKVRSFFCRARSGKRGGSRPGLSSSSLSSPCPSARRASPPAGDETERVFRKFDANGDGQISRSELAALFESVGHAATDDEVSRMMEEADADGDGYISLPEFAALMDSASGDADAVEEDLRHAFSVFDADGNGLITPAELARVLRGLGESASVAQCRRMIQGVDQNGDGLISFDEFKVMMARGGGCFAKIA

SEQ ID NO: 13427 - DNA, 513 bp, Zea mays
  CDS (1)..(513)
atggttgttgccgtcgccgcgcggtcgtcgtcgtccgcgaccagcagcagcagcgagctggggtcgctgttcgcggcgttcgacgcggacgcggacgggcggatctcggcggccgagctgcgggagtgcgtgcgggcgacgctggggcccgacgccgcggcggtgtcggcggaggaggcggaggcgctggtggcgggcgcggacgcggacggcgacgggctgctggacgccgccgagttcgcgcggctcgtggccggcctgcacgcgggcgccgccgaggaggaccgccaccgcggcctgcgccaggccttccggatgtactcctccgacgacgacgcggcggagggccggggctcctcctgcatcacccccgacagcctgcgccgcatgctcgccaggctcggcgcgcaccaggacgtggacgactgccgcgccatgatctgcaggttcgacctcgacggcgacggcgtgctcagcttccacgagttcaaggtcatgatgggcgccgcgtga

SEQ ID NO: 13428 - protein, 170 aa, Zea mays
MVVAVAARSSSSATSSSSELGSLFAAFDADADGRISAAELRECVRATLGPDAAAVSAEEAEALVAGADADGDGLLDAAEFARLVAGLHAGAAEEDRHRGLRQAFRMYSSDDDAAEGRGSSCITPDSLRRMLARLGAHQDVDDCRAMICRFDLDGDGVLSFHEFKVMMGAA

SEQ ID NO: 13429 - DNA, 456 bp, Zea mays
  CDS (1)..(456)
atggctccggcggcgcgcgcaccatccgagttcagccgcgtgttctcggcgctggaccgcgacggcgacggcaagctgtcggcggccgagctgcgggcgtgcatgagggcggcgctgggcgaggacgtgtcggcggaggaggcggaccgcctggtggcgtcggcggatggcgacggcgacgggctgctgagccaggaggagctgctggcgctggcggggacaacggcggcggaggaggaggaggaggaggagcgacggcgggggctgagggaggcgttccggatgtacgccgtggaagggcagggctgcatcacgccgctgagcctgaagcggatgctcgccaggctcggctcccaccaggacgttgccgagtgcacggccatgatctgcaggttcgacctcgacggcgacggcgtgctcagcttcgaggaattcagggtcatgatggatgcatag

SEQ ID NO: 13430 - protein, 151 aa, Zea mays
MAPAARAPSEFSRVFSALDRDGDGKLSAAELRACMRAALGEDVSAEEADRLVASADGDGDGLLSQEELLALAGTTAAEEEEEEERRRGLREAFRMYAVEGQGCITPLSLKRMLARLGSHQDVAECTAMICRFDLDGDGVLSFEEFRVMMDA

SEQ ID NO: 13431 - DNA, 26 bp, Artificial sequence
  primer
atgactctcgctaagaaccaaaaatc

SEQ ID NO: 13432 - DNA, 22 bp, Artificial sequence
  primer
tcaacgcatcatcaaaacaaac

SEQ ID NO: 13433 - protein, 152 aa, Artificial sequence
  consensus sequence
  Variant (2)..(4): Xaa in position 2 to 4 is any amino acid
  Variant (6)..(8): Xaa in position 6 to 8 is any amino acid
  Variant (11)..(11): Xaa in position 11 is any amino acid
  Variant (13)..(15): Xaa in position 13 to 15 is any amino acid
  Variant (18)..(26): Xaa in position 18 to 26 is any amino acid
  Variant (27)..(35): Xaa in position 27 to 35 is any or no amino acid
  Variant (37)..(37): Xaa in position 37 is any amino acid
  Variant (38)..(44): Xaa in position 38 to 44 is any or no amino acid
  Variant (46)..(46): Xaa in position 46 is any amino acid
  Variant (51)..(56): Xaa in position 51 to 56 is any amino acid
  Variant (58)..(71): Xaa in position 58 to 71 is any amino acid
  Variant (72)..(84): Xaa in position 72 to 84 is any or no amino acid
  Variant (87)..(92): Xaa in position 87 to 92 is any amino acid
  Variant (93)..(97): Xaa in position 93 to 97 is any or no amino acid
  Variant (99)..(99): Xaa in position 99 is any amino acid
  Variant (101)..(101): Xaa in position 101 is any amino acid
  Variant (102)..(103): Xaa in position 102 to 103 is any or no amino acid
  Variant (105)..(108): Xaa in position 105 to 108 is any amino acid
  Variant (110)..(112): Xaa in position 110 to 112 is any amino acid
  Variant (114)..(115): Xaa in position 114 to 115 is any amino acid
  Variant (118)..(122): Xaa in position 118 to 122 is any amino acid
  Variant (123)..(127): Xaa in position 123 to 127 is any or no amino acid
  Variant (129)..(130): Xaa in position 129 to 130 is any amino acid
  Variant (133)..(135): Xaa in position 133 to 135 is any amino acid
  Variant (137)..(138): Xaa in position 137 to 138 is any amino acid
  Variant (142)..(146): Xaa in position 142 to 146 is any amino acid
  Variant (149)..(150): Xaa in position 149 to 150 is any amino acid
FXXXDXXXDGXIXXXELXXXXXXXXXXXXXXXXXXEXXXXXXXXDXDGDGXXXXXXFXXXXXXXXXXXXXXXXXXXXXXXXXXXAFXXXXXXXXXXXGXGXXXIXXXXLXXXLXXLGXXXXXXXXXXCXXMIXXXDXXGDGXXXXXEFXXMM

SEQ ID NO: 13434 - protein, 21 aa, Artificial sequence
  protein pattern
  Variant (2)..(4): Xaa in position 2 to 4 is any amino acid
  Variant (6)..(6): Xaa in position 6 is any amino acid
  Variant (7)..(7): Xaa in position 7 is Asp or Asn
  Variant (8)..(8): Xaa in position 8 is Ala, Asp, Gly, Asn or Gln
  Variant (9)..(9): Xaa in position 9 is Asp, Asn or Ser
  Variant (11)..(11): Xaa in position 11 is any amino acid
  Variant (12)..(12): Xaa in position 12 is Ile, Leu or Val
  Variant (13)..(13): Xaa in position 13 is Asp, Asn, Ser or Thr
  Variant (14)..(14): Xaa in position 14 is Phe or Tyr
  Variant (15)..(15): Xaa in position 15 is any amino acid
  Variant (18)..(19): Xaa in position 18 to 19 is any amino acid
  Variant (21)..(21): Xaa in position 21 is Met or Val
IXXXDXXXXGXXXXXEFXXMX

SEQ ID NO: 13435 - protein, 21 aa, Artificial sequence
  protein pattern
  Variant (2)..(4): Xaa in position 2 to 4 is any amino acid
  Variant (6)..(6): Xaa in position 6 is any amino acid
  Variant (7)..(7): Xaa in position 7 is Asp or Asn
  Variant (8)..(8): Xaa in position 8 is any amino acid
  Variant (9)..(9): Xaa in position 9 is Asp, Asn or Ser
  Variant (11)..(11): Xaa in position 11 is any amino acid
  Variant (13)..(13): Xaa in position 13 is Ser or Thr
  Variant (14)..(14): Xaa in position 14 is Ala, Gly, Pro, Ser or Thr
  Variant (15)..(15): Xaa in position 15 is any amino acid
  Variant (18)..(20): Xaa in position 18 to 20 is any amino acid
  Variant (21)..(21): Xaa in position 21 is Phe, Ile, Leu, Met or Val
FXXXDXXXXGXIXXXELXXXX

SEQ ID NO: 13436 - DNA, 1551 bp, Populus trichocarpa
  CDS (1)..(1551)
atgggtgctttaacgagtagtggtaaccacaaaagagatcacccatgtaattataacccatattcaaattctccagattttcacatctctaaaaagcccagattctctaccatgcatcaaacccgtaaattcaacaaccaaaccctaggttcttctaacagtattgcctctagaatctctaagtacccagaaacagctacgaagtttcgccgagaggttcatgccccttgtagttttcagaaatttaccttgtccagggttaaaagtggtggttttagcgaaaaggagagaaatcttggtcgtgaaggtgatgtaatggggaatttcttgagtagaaagttggattatgcgaaacaaagcgcgtttggtgcgattaggtatttggtcaaagagaaagaagtgattgatgttgatgatgagagtgagaagattgagaaagaaattgtgtctgaggattctagtattgaagaagttgaggttttcgaagaggatggaagagagggagggtctgcggttttggactggatgttgcgaaatggggttgtgggcagtgagaatgatggtgatgttaaaattttggaggagagatcagtggttactattgatgggaatttaggtgcggagaatacagggaagatgttgagttcattggcattgaataatgaatttggggttttgactgttgagacttacaagaagttgttggaggatacagagaggaggaacgggaggttgggatcattgaaatttgagattgagtacaatgagaaaaggtgggattcatttaaggccttacgacctgtgatgaaggaacctgtggaggagatatcgcgagagccttttatccctctcacacctgaggaagaaaccgaggttaaacaagcattttttcccaacaataggaggagggtcttggtcagtcatggcaattccaatattgatattactggacaaattttgcactgccttgcaccaggagcatggttgaatgatgaggtcataaatttgtacatggagttgctcaaagaaagggaaaggagagaaccgaagaagttcctaaaatgtcattttttcaatacctttttttacaaaaagttaacaggtggaggtaagggtggctatgattatagagctgtcaaaagatggaccacagaaaaaaagttgggatatttcttgattgactgtgacaaaatatttgtccctgttcaccaagagatacattggtgtttggcagtcattaacaaaaaggatcagaagttccagtatcttgattcactcaaaggaagggacagcagagtccttgaaagtttggctaaatactatgctgaagaagttaaagacaagagtaagaaagacattgatgtaagtaattgggagcgtgaatttgttgaagaccttcctgaacaacagaatgggtatgactgtggtgtgtttatgatcaagtatgctgatttttatagcagaggtataggactttgttttggccaggagcacatgccctattttcggttgaggacagccaaggaaattctgagattgagagctgactga

SEQ ID NO: 13437 - protein, 516 aa, Populus trichocarpa
MGALTSSGNHKRDHPCNYNPYSNSPDFHISKKPRFSTMHQTRKFNNQTLGSSNSIASRISKYPETATKFRREVHAPCSFQKFTLSRVKSGGFSEKERNLGREGDVMGNFLSRKLDYAKQSAFGAIRYLVKEKEVIDVDDESEKIEKEIVSEDSSIEEVEVFEEDGREGGSAVLDWMLRNGVVGSENDGDVKILEERSVVTIDGNLGAENTGKMLSSLALNNEFGVLTVETYKKLLEDTERRNGRLGSLKFEIEYNEKRWDSFKALRPVMKEPVEEISREPFIPLTPEEETEVKQAFFPNNRRRVLVSHGNSNIDITGQILHCLAPGAWLNDEVINLYMELLKERERREPKKFLKCHFFNTFFYKKLTGGGKGGYDYRAVKRWTTEKKLGYFLIDCDKIFVPVHQEIHWCLAVINKKDQKFQYLDSLKGRDSRVLESLAKYYAEEVKDKSKKDIDVSNWEREFVEDLPEQQNGYDCGVFMIKYADFYSRGIGLCFGQEHMPYFRLRTAKEILRLRAD

SEQ ID NO: 13438 - DNA, 2113 bp, Glycine max
  CDS (199)..(1737)
cagctacgtaggccccccccccgagttgttgttgttgtttgtgccgcgaaagagaaggcaagcaaaaaaggtgatcctgggcgtacaagaccataacaccaccttccagctcactctccataaaccctaacgcttcgtctagggtttcgctgaattccccaattttcccaacccccgaccggacatgctccttctccgatggccgtcgtaactagcaacggcaagcgccgccaacattggccctccgcgaattaccactttccatctcccaattccaaaagacccagacttccaacaatgtcccaaaaccacgcgcaatccgtgttatcctccagtagtatcatttctagaatttctacgtaccccgaaaccaagccacccctccatagggaggttcacgccccgtgtagaccacgtaagtttgattctcctgccttcaatagaagtgctcattattatcgcaaggaagagattagtcacgatgtgggcaacttgttaagtaaaaattaccaaagggcgaaaaattccgcgttagctagcattaggtttggggaaaagggcaaggaggtgatagaagtggatgctgatagttccaaggatatggtttcggaggaggattcgagtgtggaagaggttcgttttgtggaagaagatggacgagaagtgcgctccgtggtgacggagcacaagtggcaagagggtgatttggttgtgactgaggttaaggatttggatgctaaggatatgtgtggtggccctcagcagcagtcaacttcatccgtggtttctgagttgactaatggtgatctgaatgtggttaatgctgagaagatgttggacattctttctttgactccggatcatgatctttcctccgttcaagcctacaagaagttgctcgatgctcttggccagcgaacggatacccttaacaggctggaggctgaaattaaagttaacgagaagcgtatgtccacgtttgaattgttgcgcccgaagaaggaactagtagaggaagttccattggaaccttttattcctcttactaaagaggaagaagttgaggttgcacatgccttttctaccaaccggaaaaagatcttggtttcccatgagaaatctggcattgagatctcgggagaaaagtttcaatgccttagaccgggtgcatggttaaacgatgaggtaataaatgtgtaccttgaattgctgaaagagagggagagaagagagccacagaagtttctgaactgtcattttttcagtacctttttctacaagaggttaataagtggcaagaatgggtatgatttcaaatctgtgaggagatggaccagccaaaagaaattgggatatggcctacatgaatgtgataaaatatttgttcctatccataaagagattcattggtgcttggctgttatcaataagaaagataagaaatttcagtatctggactcactaagaggaacagatgcccaagtaatgaaagttctggctagctatattgtagatgaagtaaaggacaagactggaaaagatattgatgtaagttcttggaaaaaagaatttgttgaagaccttcctgagcagcagaacgggtatgattgtggggtgtttatgatcaaatatgccgacttctatagcagaaacttggggctatgtttcaaccaggaacacatgtcttactttcggcgcagaacagctaaagaaatcttgagattaaaagctaactaagcaaaagaatattcatttgtatttccatattggattttggtcatcagaaattgaaacaatcattaatgtaaaatcagtagagcactttttgatgaaggatccttcactcctgtcactatctcgaccttaaccattcaaaagttctggcatttgttagattgtggactggactgattatacatatcatcccgatatccaggtacaccatgttggtagtgtagtgtgtagtgggttgtatatgctacgcaaaggtgaaatcatagatgagatgaggcattaggttgtggttttaattatgtaatcataaatgtgctccctcaccttttttggtgtctggttactaaaaaaaaaaaaaaaagaaaaaaaaaaaaaaaaa

SEQ ID NO: 13439 - protein, 512 aa, Glycine max
MAVVTSNGKRRQHWPSANYHFPSPNSKRPRLPTMSQNHAQSVLSSSSIISRISTYPETKPPLHREVHAPCRPRKFDSPAFNRSAHYYRKEEISHDVGNLLSKNYQRAKNSALASIRFGEKGKEVIEVDADSSKDMVSEEDSSVEEVRFVEEDGREVRSVVTEHKWQEGDLVVTEVKDLDAKDMCGGPQQQSTSSVVSELTNGDLNVVNAEKMLDILSLTPDHDLSSVQAYKKLLDALGQRTDTLNRLEAEIKVNEKRMSTFELLRPKKELVEEVPLEPFIPLTKEEEVEVAHAFSTNRKKILVSHEKSGIEISGEKFQCLRPGAWLNDEVINVYLELLKERERREPQKFLNCHFFSTFFYKRLISGKNGYDFKSVRRWTSQKKLGYGLHECDKIFVPIHKEIHWCLAVINKKDKKFQYLDSLRGTDAQVMKVLASYIVDEVKDKTGKDIDVSSWKKEFVEDLPEQQNGYDCGVFMIKYADFYSRNLGLCFNQEHMSYFRRRTAKEILRLKAN

SEQ ID NO: 13440 - DNA, 1266 bp, Glycine max
  CDS (1)..(1266)
atgggtgcgatgaccgcaaaccggaagcgctccgaagaatgcatgaacgtaaaccacacaaattccgattctccgagaaaacgcgccaaattctcgatcaaacccgttccgtccgccaccagcgccgtcgcgagactctcccggtacccagaggttcacgcgccgttggcgagggaggttcacgcgccgtgccggtcgcgaaaattcgaacgctctagggttattgtcagtgccggcaacgtcatggggaactttctggcaacgaagttcaaggaggcgaagcgttcggcgtcggcgaaatgcaggaacctggtggagaaggggaaggaggtgattgaggtggacgcagagacggagagtgaagagcgttacgtggattcgagtgtggaagaggcgcgtggcgatggtgacaagaagttgcttgaggatgttgggaggagaagtggcacgcttcagaggctgaattttgagattgatttgaatgagaagcgcagggaacattataatttgttgcggccgaagaaggaattggttgaggaacaggaagtgccgcaagagccttttgttgctcttacaagtgaggaggaagatgaggttgaatgtgccttttcttccaactggaggaggatcttggttacccacgagaattctaacattgtgatcacgggagagaagtttcagtgccttaggcccactggatggttaaatgatgaggttataaatttgtacctggaattgcttaaggagagggagcaaagagaaccacagaaatttctgaaatgtcattttttcaatacctttttctacaaaaagttaataagtgggccgaaaggttatgatttcaaatctgtcagaagatggacaacccaacggaaattgggatacagtctacttgaatgtgataaaatatttgtacctatccatcaagagatacattggtgcttggcagttatcaataagaaagataagaaattccagtatcttgactcaatgaaaggagaggatagttttgtgctagaaaagctggctaaatattttgcggatgaagtaaatgacaagactggaaaacatattgatgtaaatacctggaaaaaagaatttgtgaaagaccttcctgtgcagaaaaatgggtatgattgtggggtgtttatgatcaaatatgcagacttttatagcaggggtctggaattgtgttttaaccaggaaaacatgtcttactttcggcgtaggacggctaaggagatcttgagattgaaagctgaatga

SEQ ID NO: 13441 - protein, 421 aa, Glycine max
MGAMTANRKRSEECMNVNHTNSDSPRKRAKFSIKPVPSATSAVARLSRYPEVHAPLAREVHAPCRSRKFERSRVIVSAGNVMGNFLATKFKEAKRSASAKCRNLVEKGKEVIEVDAETESEERYVDSSVEEARGDGDKKLLEDVGRRSGTLQRLNFEIDLNEKRREHYNLLRPKKELVEEQEVPQEPFVALTSEEEDEVECAFSSNWRRILVTHENSNIVITGEKFQCLRPTGWLNDEVINLYLELLKEREQREPQKFLKCHFFNTFFYKKLISGPKGYDFKSVRRWTTQRKLGYSLLECDKIFVPIHQEIHWCLAVINKKDKKFQYLDSMKGEDSFVLEKLAKYFADEVNDKTGKHIDVNTWKKEFVKDLPVQKNGYDCGVFMIKYADFYSRGLELCFNQENMSYFRRRTAKEILRLKAE

SEQ ID NO: 13442 - DNA, 1362 bp, Glycine max
  CDS (1)..(1362)
atgggcgcgatgaccatcaaccgcaagcgccctgaagaatgcatgaatgtaaaccacaccaattccgattcccagagaaaacgtgccaaattctcgaccaaacccgtgccgtccgccaccagcgccgtcgcgagactctcccggtacccggaggttcacgcgcctttggcgagggaggtccacgcgccgtgccggcagcgaaaattcgaacgcgctagggttagtgttagcgtcagtgccagcgacgccatggggaacgttctggccgcgaagtttaaggaggcgaagcgttcggcggcggcgaaatgcagaatcttagtggaggaggggaaggaggtgactgaagtggacgcggagacggagagcgaagggcgttacgagaattcgagtgtggaaggggcgggtggcgatggtgacaaggttgttagggttcagcagcagtcacagtcaacgctgtcgtttgattcggaggtgacgaatgcgaagttaaaggtggcgagtggagagaagaagttgcttgaggatgttggtaggagaagtgacacgcttcagaggctgaattttgagattgatttgcatgagaagcgcagggactattataatttggtgcggccgaagaaggaattggttgaggaagaggaagtgccgcaagagccttttgttgctcttacaagtgaggaggaagatgaggttgaacgtgccttttctgccaaccggtggaggatcctggttacccacaagaattctaacattgagatcacgggagagaagtttcagtgccttagaccggctggatggttaaatgatgaggttataaatttgtacctggaattgcttaaggagagggagcaaagagaaccactgaaatttctgaaatgtcattttttcaatacctttttctacaaaaagttaataagtggtccgaaaggttatgatttcaaatctgtcagaagatggacaagccaacggaatttgggatacagtctacttgaatgtgataaaatatttgtacctatccatcaagagatacattggtgcttggcagttatcaataagaaagataagaaattccagtatcttgactcaatgaaaggagaggatagttttgtgctagaaaagctggctaaatattttgcggatgaagtaaatgacaagactggaaaacatattgatgtaaatacctggaaaaaagaatttgtgaaagaccttcctcagcagaaaaatgggtatgattgtggggtgtttatgataaaatatgcagacttttatagcaggggtctggagttgtgttttaaccaggaaaacatgtcttacttccggtgtaggacagctaaggagatcttgagattgaaagctgaatga

SEQ ID NO: 13443 - protein, 453 aa, Glycine max
MGAMTINRKRPEECMNVNHTNSDSQRKRAKFSTKPVPSATSAVARLSRYPEVHAPLAREVHAPCRQRKFERARVSVSVSASDAMGNVLAAKFKEAKRSAAAKCRILVEEGKEVTEVDAETESEGRYENSSVEGAGGDGDKVVRVQQQSQSTLSFDSEVTNAKLKVASGEKKLLEDVGRRSDTLQRLNFEIDLHEKRRDYYNLVRPKKELVEEEEVPQEPFVALTSEEEDEVERAFSANRWRILVTHKNSNIEITGEKFQCLRPAGWLNDEVINLYLELLKEREQREPLKFLKCHFFNTFFYKKLISGPKGYDFKSVRRWTSQRNLGYSLLECDKIFVPIHQEIHWCLAVINKKDKKFQYLDSMKGEDSFVLEKLAKYFADEVNDKTGKHIDVNTWKKEFVKDLPQQKNGYDCGVFMIKYADFYSRGLELCFNQENMSYFRCRTAKEILRLKAE

SEQ ID NO: 13444 - DNA, 1789 bp, Arabidopsis thaliana
  CDS (10)..(1518)
agttatttcatgaaaaaccaatctagggttttgaactctgaattgggggattttgacctttcagttttgtgggatcaaattttgaatttcgagggttatggttcctactgtttcagaccaatggatatggatggttaccacaaacggagcgccggtttaaacccttgtaaacactccggtttctcacattcatcaagacccatggctccaggaatttaccgttacccagaagtgaaatcttcgttgcggagacaagttcatgcgcctgtgcggatactcaatagcggtcgagatcgtagcacacgacaaggttctggtaatgtgttgggaacctttctcacaaggaacaatgacatgtggaaaagaaatgcacttgattcgtctttacgctatagaacggatagagaagtaattgatgttgatgatgagcttggagatgttgaaatgatatctgatgatacaagtagggagggtgtcgaaaacgtggctatggaggtggacgaggtggaagagaaggcggagatgggaaatggattgttttctgaggttgccagtctgaaaaatgggagcttgagggtgggtgaatgttctaaagctaatagtagttcactcgttgtgaatcgccctgtgactgatgtcacaagttttgaagcatacagaaaggttcttgagagtgctgtgaaccggacttctaaactgaaagacagaggctttgttgatttttttaaagagagaggtcgtgctttactacgaagcttgtcttccttttggagacaagatgaagaaccagtagaggttgtacaacgtgaggcatttgtacctctttctagagaggaggagacagcagtcaggcgtgcattctcagctaatgattcaaacatcttggttactcataagaactcaaatattgatattaccgggaaaatcttgaggtgccttaaaccaggcaaatggttgaacgatgaggtcattaatctttatatggtattgctgaaagaaagggaagctagagaaccaaagaagtttcttaaatgtcattttttcaatacatttttcttcactaagttagttaattcggcgactggatacaactatggtgcagtgagaagatggacttcaatgaagaggttgggctaccatctcaaagactgtgacaagatatttatccctatccatatgaacatccactggactttggctgtaattaatataaaggaccagaaattccagtatcttgactctttcaaaggaagggagcctaaaatcctcgatgcactggctagatactttgtcgatgaagtgagggataagagtgaagtagaccttgatgtaagtcgatggagacaagaatttgtccaggaccttccaatgcagagaaatggattcgattgtggaatgtttatggtgaaatacatcgacttctatagcagaggtctggatctttgtttcactcaggaacaaatgccatatttccgggctaggacagcaaaggagattctgcaactgaaagccgagtgatgccagcataataaggaaactcttaaagaatagttttgaagttcttcttcttcttcatgtagatagtatttagcaagttagatgcacactttacgtgtttgataatttgatgtacatagaaaagggtaacaatgtggttctctgatgatcaggcttgatagtgaaattcgaattgttgtttaaagattctagtttcatatcagatactctgattttgaattctggtattatttttgtactttataaatttaaaattaaagaaatttgtgtt

SEQ ID NO: 13445 - protein, 502 aa, Arabidopsis thaliana
MKNQSRVLNSELGDFDLSVLWDQILNFEGYGSYCFRPMDMDGYHKRSAGLNPCKHSGFSHSSRPMAPGIYRYPEVKSSLRRQVHAPVRILNSGRDRSTRQGSGNVLGTFLTRNNDMWKRNALDSSLRYRTDREVIDVDDELGDVEMISDDTSREGVENVAMEVDEVEEKAEMGNGLFSEVASLKNGSLRVGECSKANSSSLVVNRPVTDVTSFEAYRKVLESAVNRTSKLKDRGFVDFFKERGRALLRSLSSFWRQDEEPVEVVQREAFVPLSREEETAVRRAFSANDSNILVTHKNSNIDITGKILRCLKPGKWLNDEVINLYMVLLKEREAREPKKFLKCHFFNTFFFTKLVNSATGYNYGAVRRWTSMKRLGYHLKDCDKIFIPIHMNIHWTLAVINIKDQKFQYLDSFKGREPKILDALARYFVDEVRDKSEVDLDVSRWRQEFVQDLPMQRNGFDCGMFMVKYIDFYSRGLDLCFTQEQMPYFRARTAKEILQLKAE

SEQ ID NO: 13446 - DNA, 1470 bp, Arabidopsis thaliana
  CDS (1)..(1470)
atgggtgccgtagcgatcaatcgtaaacgcagcgacgaatccttcaatttcattaatcaacaatcaaccaaccctttacgaaattcaccgtatttccaagcttccaagaaacgaagattctcattcgctatgtctgaagattctggtaagccagcgtcttcaaacccaacaatttcgaggatttcaaggtaccctgatgctaaagctcctcttagacgagagattcatgctcctagtagaggaattcttagatatggaaaggcaaaatctaatgattactgcgaaaaggacgcaaatttctttgttcgtaagtatgatgatgcaaagagatcagctttggaagctttgagattcgttaataaaggtaaagactttgttgatttgggtgatgaggttgaaaaggaggaagttgtttctgatgattcaagtgttcaagcaattgaagttattgattgtgatgatgatgaggagaagaagaatcttcagccttcgttttcttctggtgttactgatgttaagaaaggggagaactttagagttgaggatactagtatgatgctggattcgttgtcgttagatagagatgtcgataatgatgcttcgagcctcgaagcttatagaaagcttatgcaaagtgcggagaagaggaattcaaagttggaagctttgggttttgagattgtgttgaatgagaagaagttgtcactgctgcgtcagtctcgcccaaagactgtggaaaagcgtgttgaggtgcctcgtgaaccttttattcctctcacagaagatgaagaggctgaagtctaccgtgccttttctgggagaaatagaaggaaggtcttggctactcatgaaaactcaaacattgatattactggagaagttctgcaatgccttacaccatctgcatggctaaacgacgaggttatcaatgtctaccttgaactactcaaagaaagagaaactagagagcccaaaaagtatttgaagtgtcactacttcaatacctttttctacaaaaagctggtaagcgattctggttataattttaaagctgtcaggagatggactacgcagagaaagttgggatatgctcttattgactgtgacatgatatttgttcccatccacaggggtgtgcattggaccttggcagtaattaacaacagggaaagcaagctcttgtatcttgattcactgaatggagttgatcctatgattctgaatgctctggcaaaatacatgggtgatgaagcaaatgaaaaaagtggaaaaaagattgatgctaattcgtgggacatggaatttgtggaagaccttccccaacaaaagaatgggtatgactgtggaatgtttatgcttaagtacatcgattttttcagcagaggcctggggctatgtttcagccaggaacacatgccatacttccgactcagaacagctaaagagattctgaggctacgagctgattga

SEQ ID NO: 13447 - protein, 489 aa, Arabidopsis thaliana
MGAVAINRKRSDESFNFINQQSTNPLRNSPYFQASKKRRFSFAMSEDSGKPASSNPTISRISRYPDAKAPLRREIHAPSRGILRYGKAKSNDYCEKDANFFVRKYDDAKRSALEALRFVNKGKDFVDLGDEVEKEEVVSDDSSVQAIEVIDCDDDEEKKNLQPSFSSGVTDVKKGENFRVEDTSMMLDSLSLDRDVDNDASSLEAYRKLMQSAEKRNSKLEALGFEIVLNEKKLSLLRQSRPKTVEKRVEVPREPFIPLTEDEEAEVYRAFSGRNRRKVLATHENSNIDITGEVLQCLTPSAWLNDEVINVYLELLKERETREPKKYLKCHYFNTFFYKKLVSDSGYNFKAVRRWTTQRKLGYALIDCDMIFVPIHRGVHWTLAVINNRESKLLYLDSLNGVDPMILNALAKYMGDEANEKSGKKIDANSWDMEFVEDLPQQKNGYDCGMFMLKYIDFFSRGLGLCFSQEHMPYFRLRTAKEILRLRAD

SEQ ID NO: 13448 - DNA, 1569 bp, Vitis vinifera
  CDS (1)..(1569)
atgggtgccctaactagcaatcgtaagcgcggtgacgaatgtttcaccttgaatcatacgttcttgtctccgtatcctcaagatttggaccgtagaatcgattctcacatttccaagaagcctaggctttcatctatgccacagaccccggaccctgccgtttcgtcgagaagtactgcttcaagaattcagcggtaccccgagccgacggcgaagttgcgtagggaagttcatgccccgtgtagagtggtcaaattcggatttgcagcgagttcaaatcgggagtcgaggttaaggattggtgaggtcgacgagaaggtaggtttgagtaacgttatggggaatgttcttagctctcaatatgaaaaggcaaaaaatactgcaattcaagcgttacggtacttcaggaaggataaggaggtgattgatgtgggaaatgagcgaggtgaagatttagcgtcggaagattcaagtatagaagagattgaggctgtggaagatgggcgagaagggcggtctgtggtttcagatgagaggtcacggggggctgatggggcggctgttcccgatatccaggaattggaaacaaaaaatttcgaccggcggctttggcagtcttcttcttctggtgttacggaattgagtaatgttaatttgaagatgttggattcattgactctgcgtgagacggatgttgagttaggagtgcttccgcacaaaaagtggttggattctgctgagaaacggaattccaaattgagagatttgagtgttcaaattaagtttttggaggctcaacgatcttcattgcatgcattacgccctgcaaagaaaccagaggaggaggtacctagagaacctttcctccctcttacacaggaggaagaggccgaggttgatcgtgccttatcttccataaataggaggaaggtattggtcacccatgagatctccaacattgagattacaggagaaatattgcaatgccttcaacccactgcatggttgaacgatgaggtcataaatgtgtacctcgagttactgaaagagagagaaaagagagaaccgaaaaagtttttgaaatgtcatttcttcaacacattcttttataaaaagttaataagtgggaggaattcctatgactataaatctgttagaagatggactacgcaaaggaagttgggatacagccttagtgaatgtgacaaaatatttgtccccatccatcaagagatacattggtgcttagcggttatcaataaacaggataagaagttccagtatcttgattcactcaaaggaatggatacccgagtgctgaaagtattggctagatactatgtggatgaagtgaaggacaagagtgagaaggacattgacctgagttcttgggagcaagaatacgtagaagaccttcctgaacagaagaatgggtacgactgtggcatgttcatgatcaaatatgctgatttctatagcagaggcatagagctctgtttcaaccaggaacacatgccctattttcggttgaggactgctaaggagattttaaaattgaaagccgactaa

SEQ ID NO: 13449 - protein, 522 aa, Vitis vinifera
MGALTSNRKRGDECFTLNHTFLSPYPQDLDRRIDSHISKKPRLSSMPQTPDPAVSSRSTASRIQRYPEPTAKLRREVHAPCRVVKFGFAASSNRESRLRIGEVDEKVGLSNVMGNVLSSQYEKAKNTAIQALRYFRKDKEVIDVGNERGEDLASEDSSIEEIEAVEDGREGRSVVSDERSRGADGAAVPDIQELETKNFDRRLWQSSSSGVTELSNVNLKMLDSLTLRETDVELGVLPHKKWLDSAEKRNSKLRDLSVQIKFLEAQRSSLHALRPAKKPEEEVPREPFLPLTQEEEAEVDRALSSINRRKVLVTHEISNIEITGEILQCLQPTAWLNDEVINVYLELLKEREKREPKKFLKCHFFNTFFYKKLISGRNSYDYKSVRRWTTQRKLGYSLSECDKIFVPIHQEIHWCLAVINKQDKKFQYLDSLKGMDTRVLKVLARYYVDEVKDKSEKDIDLSSWEQEYVEDLPEQKNGYDCGMFMIKYADFYSRGIELCFNQEHMPYFRLRTAKEILKLKAD

SEQ ID NO: 13450 - DNA, 1599 bp, Populus trichocarpa
  CDS (1)..(1599)
atgggtgctctaacaagtagtagtaaccacaaaagagaccaccgatgtaacaacgacaacctattttcaaattctccagatttccacatatctaaaaagcccagattctatactttgtatcaaactcctgaatacaacaaccaaaccctaggttcctctaacagtattgcctctagaatctctaggtacccagaatcagctacaaggtttcgccgagaggttcacgccccttgtagacctcagaaatttggcttgtcaaagattagaagtggtgattttagtgaaaagaagagaacttttggtggtggtggtggcggcgatttaatgtggaagtttttgagtaaaaagttgggttatgcgaaacaaagcgcgtttggcgcgattaggtatttggttaaagagaaagaagtggttgatgttgataatgagagtgagaagattgagcaagaaattgtgtctgaggattctagtattgaagaagtcgaggtcattgaagaggatggaatagagggagggtccacggttttggaccagaggttgggaagtggggatgttaagattttggaggagagatcagtggttactattgatggggatttaggggtggaggatgcagggaagatgctgggttcattggcattgaataatgaagttgaagttttgggtgttgaggcttacaagaagttgttggagaatacagagaggaggaacaggaagttgacatctttggaatttgagattgagtacaatgagaaaaggtgggattcgctaaaggcgttgcggcctgtgaagaaggaacctgtagaggagataccccgtgagccttttatccctctcacacctgaggaagaagccgaggttaagcgtgcatttttgcccaacaataggaggagggtcttggtcagtcacgataattccaatattgatattactggacaaactttgcgctgccttgcaccaggaacatggttgaatgacgaggtcataaatttgtacatggagttgcttaaagaaagggaaaggagagaaccgaagaagttcttgaaatgtcatttcttcaatactttcttttacaaaaagttaacaggtggaggtaagggtggctttgattatagagctgtcaaaagatggaccacggaaaaaaagttgggatatttcttgattgactgtgacaaaatatttgtccctgttcaccaagagatacattggtgtttggcaatcattaataaaaaggatcacaagttccaatatctcgattcactcaaaggaagggacatcagagttcttgaaagtttggctaaatactatgctgaagaagtgaaagacaagagtaagaaagacattgacgtaagtaattgggagcgtgaatttgttgaagaccttcctgaacagcagaacggctgttttgaagaaaccacgcaacaaatttacactggggctacttttgatgcttcactgctgaggtatgactgtggtgtgtttatgatcaaatatgctgatttttatagcagaggtgtaggactgtgttttggccaggagcacatgccctattttcggttgaggacagccaaggaaattctgagactgaaagctgactga

SEQ ID NO: 13451 - protein, 532 aa, Populus trichocarpa
MGALTSSSNHKRDHRCNNDNLFSNSPDFHISKKPRFYTLYQTPEYNNQTLGSSNSIASRISRYPESATRFRREVHAPCRPQKFGLSKIRSGDFSEKKRTFGGGGGGDLMWKFLSKKLGYAKQSAFGAIRYLVKEKEVVDVDNESEKIEQEIVSEDSSIEEVEVIEEDGIEGGSTVLDQRLGSGDVKILEERSVVTIDGDLGVEDAGKMLGSLALNNEVEVLGVEAYKKLLENTERRNRKLTSLEFEIEYNEKRWDSLKALRPVKKEPVEEIPREPFIPLTPEEEAEVKRAFLPNNRRRVLVSHDNSNIDITGQTLRCLAPGTWLNDEVINLYMELLKERERREPKKFLKCHFFNTFFYKKLTGGGKGGFDYRAVKRWTTEKKLGYFLIDCDKIFVPVHQEIHWCLAIINKKDHKFQYLDSLKGRDIRVLESLAKYYAEEVKDKSKKDIDVSNWEREFVEDLPEQQNGCFEETTQQIYTGATFDASLLRYDCGVFMIKYADFYSRGVGLCFGQEHMPYFRLRTAKEILRLKAD

SEQ ID NO: 13452 - DNA, 1551 bp, Populus trichocarpa
  CDS (1)..(1551)
atgggtgctttaacgagtagtggtaaccacaaaagagatcacccatgtaattataacccatattcaaattctccagattttcacgtctctaaaaagcccagattctctaccatgcatcaaacccgtaaattcaacaaccaaaccctaggttcttctaacagtattgcctctagaatctctaagtacccagaaacagctacgaagtttcgccgagaggttcatgccccttgtagttttcagaaatttaccttgtccagggttaaaagtggtggttttagcgaaaaggagagaaatcttggtcgtgaaggtgatgtaatggggaatttcttgagtagcaagttggattatgcgaaacaaagcgcgtttggtgcgattagatatttggtcaaagagaaagaagtgattgatgttgatgatgagaatgagaagattgagaaagaaattgtgtctgaggattctagtattgaagaagttgaggctttcgaagaggatggaagagagggagggtctgcggttttgaactggatgttgcgaaatggggttgtgggcagtgagaatgatggtgatgttaaaattttggaggagagatcagtggttactattgatgggaatttaggtgtggagaatacagggaagatgttgggttcattggcattgaataatgaatttggggttttgactgttgagacttacaagaagttgttggaggatacagagaggaggaacgggaggttgggatcattgaaatttgagattgagtacaatgagaaaaggtgggattcatttaaggccttacgacctgtgatgaaggaacctgtggagaagatatcgcgagagccttttatccctctcacacctgaggaagaaaccgaggttaaacaagcattttttcccaacaataggaggagggtcttggtcagtcatggcaattccaatattgatattactggacaaattttgcactgccttgcaccaggagcatggttgaatgatgaggtcataaatttgtacatggagttgctcaaagaaagggaaaggagagaaccgaagaagttcctaaaatgtcattttttcaatacctttttttacaaaaagttaacaggtggaggtaagggtggctatgattatagagctgtcaaaagatggaccacagaaaaaaagttgggatatttcttgattgactgtgacaaaatatttgtccctgttcaccaagagatacattggtgtttggcagtcattaacaaaaaggatcagaagttccagtatcttgattcactcaaaggaagggacaacagagttcttgaaagtttggctaaatactatgctgaagaagttaaagacaagagtaagaaagacattgatgtaagtaattgggagcgtgaatttgttgaagaccttcctgaacaacagaatgggtatgactgtggtgtgtttatgatcaagtatgctgatttttatagcagaggtatagggctttgttttggccaggagcacatgccctattttcggttgaggacagccaaggaaattctgagattgagagctgactga

SEQ ID NO: 13453 - protein, 516 aa, Populus trichocarpa
MGALTSSGNHKRDHPCNYNPYSNSPDFHVSKKPRFSTMHQTRKFNNQTLGSSNSIASRISKYPETATKFRREVHAPCSFQKFTLSRVKSGGFSEKERNLGREGDVMGNFLSSKLDYAKQSAFGAIRYLVKEKEVIDVDDENEKIEKEIVSEDSSIEEVEAFEEDGREGGSAVLNWMLRNGVVGSENDGDVKILEERSVVTIDGNLGVENTGKMLGSLALNNEFGVLTVETYKKLLEDTERRNGRLGSLKFEIEYNEKRWDSFKALRPVMKEPVEKISREPFIPLTPEEETEVKQAFFPNNRRRVLVSHGNSNIDITGQILHCLAPGAWLNDEVINLYMELLKERERREPKKFLKCHFFNTFFYKKLTGGGKGGYDYRAVKRWTTEKKLGYFLIDCDKIFVPVHQEIHWCLAVINKKDQKFQYLDSLKGRDNRVLESLAKYYAEEVKDKSKKDIDVSNWEREFVEDLPEQQNGYDCGVFMIKYADFYSRGIGLCFGQEHMPYFRLRTAKEILRLRAD

SEQ ID NO: 13454 - DNA, 1446 bp, Vitis vinifera
  CDS (1)..(1446)
atgggtgccctaactagcaatcgtaagcgcggtgacgaatgtttcaccttgaatcatacgttcttgtctccgtatcctcaagatttggaccgtagaatcgattctcacatttccaagaagcctaggctttcatctatgccacagaccccggaccctgccgtttcgtcgagaagtactgcttcaagaattcagcggtaccccgagccgacggcgaagttgcgtagggaagttcatgccccgtgtagagtggtcaaattcggatttgcagcgagttcaaatcgggataacgttatggggaatgttcttagctctcaatatgaaaaggcaaaaaatactgcaattcaagcgttacggtacttcaggaaggataaggaggtgattgatgtgggaaatgagcgaggtgaagatttagcgtcacggggggctgatggggcggctgttcccgatatccaggaattggaaacaaaaaatttcgaccggcggctttggcagtcttcttcttctggtgttacggaattgagtaatgttaatttgaagatgttggattcattgactctgcgtgagacggatgttgagttaggagtgcttccgcacaaaaagtggttggattctgctgagaaacggaattccaaattgagagatttgagtgttcaaattaagtttttggaggctcaacgatcttcattgcatgcattacgccctgcaaagaaaccagaggaggaggtacctagagaacctttcctccctcttacacaggaggaagaggccgaggttgatcgtgccttatcttccataaataggaggaaggtattggtcacccatgagatctccaacattgagattacaggagaaatattgcaatgccttcaacccactgcatggttgaacgatgaggtcataaatgtgtacctcgagttactgaaagagagagaaaagagagaaccgaaaaagtttttgaaatgtcatttcttcaacacattcttttataaaaagttaataagtgggaggaattcctatgactataaatctgttagaagatggactacgcaaaggaagttgggatacagccttagtgaatgtgacaaaatatttgtccccatccatcaagagatacattggtgcttagcggttatcaataaacaggataagaagttccagtatcttgattcactcaaaggaatggatacccgagtgctgaaagtattggctagatactatgtggatgaagtgaaggacaagagtgagaaggacattgacctgagttcttgggagcaagaatacgtagaagaccttcctgaacagaagaatgggtacgactgtggcatgttcatgatcaaatatgctgatttctatagcagaggcatagagctctgtttcaaccaggaacacatgccctattttcggttgaggactgctaaggagattttaaaattgaaagccgactaa

SEQ ID NO: 13455 - protein, 481 aa, Vitis vinifera
MGALTSNRKRGDECFTLNHTFLSPYPQDLDRRIDSHISKKPRLSSMPQTPDPAVSSRSTASRIQRYPEPTAKLRREVHAPCRVVKFGFAASSNRDNVMGNVLSSQYEKAKNTAIQALRYFRKDKEVIDVGNERGEDLASRGADGAAVPDIQELETKNFDRRLWQSSSSGVTELSNVNLKMLDSLTLRETDVELGVLPHKKWLDSAEKRNSKLRDLSVQIKFLEAQRSSLHALRPAKKPEEEVPREPFLPLTQEEEAEVDRALSSINRRKVLVTHEISNIEITGEILQCLQPTAWLNDEVINVYLELLKEREKREPKKFLKCHFFNTFFYKKLISGRNSYDYKSVRRWTTQRKLGYSLSECDKIFVPIHQEIHWCLAVINKQDKKFQYLDSLKGMDTRVLKVLARYYVDEVKDKSEKDIDLSSWEQEYVEDLPEQKNGYDCGMFMIKYADFYSRGIELCFNQEHMPYFRLRTAKEILKLKAD

SEQ ID NO: 13456 - DNA, 1479 bp, Ricinus communis
  CDS (1)..(1479)
atgggagctttaacaagctacagcaacaagcgagatccattttcaaatactcctgattttcacatttcaaagaaacctagattgtctttcatgcatcaaatttcaaaccaaaccctaggttcatcaaatagtactgtctctagaatctcacggtacccagaaactaaaactacctcaaagtttcgcagagaagttcatgcaccttgtagaattttgaaatttgggttatctaggtcgaaagacattgattctagtgaaaaaaataaatctttaggtgatgatatgggtaatttcttgagtaacaagcttgattttgcaaaaagaagtgcaattggtgcttttaggtatttggttaaagagaagcaagtaactgatgttgataatgagtttggaagacatgaaaaggaggtgttgatatctgaggattctagcattgaggaagtcgaggctattgaagcagattatggggctttggatgacaataataataataataaggatgataatgatgttaagattgtggaggaaagatcagtggttactaatgatggtgggttacagaatgctgggagaatgttggagtctttggtattgaatggtgaagttgatgtatctagtcttgaggcttataagaagttgttggagaatgctgagaggagaaacgggagattgcaagcattggattttgagattgaggcgaatcagaaaagattaagtttttatcagtcaatacgacctgtgaagaaacctgaagaggaagtgcaggagatacctaaggaactctttatccctcttacccgggaggaagagactgaggttaaacgtgcattttcagctaactacaggaggagagttctgaccagtcataagaattcaaatattgatattactggagaaatcttgcgatgccttgcaccaggggcatggttgaatgatgaggtgataaatgtctatctagagttgctgaaagaaagagaaaagagagaaccagagaagtttctgaaatgccatttctttaacacttttttttacaaaaagttattgagtggggattataaagctgtcagaagatggactacagaaaggaagttgggatacttcctgattgattgcgataaaatatttgtccctgttcacagagaggtccattggtgtttggcaataattaacaaaaaggatcagaagttccaatatcttgattcactcaaaggaagggacttcaaagtgttggaaaatctggctaaatattatgttgaagaagtgaaggacaagtgtaaaaaggacattgatgtaagtaattgggaactcgaatttgttgaagatcttcctgaacagcagaatgggtatgactgtggtgtgttcatgatcaaatatgcagatttttatagcagaggcatagggctttgttttggccaggagcacatgccctattttcggatgaggacagccaaggagatcctgagattgagagctgactga

SEQ ID NO: 13457 - protein, 492 aa, Ricinus communis
MGALTSYSNKRDPFSNTPDFHISKKPRLSFMHQISNQTLGSSNSTVSRISRYPETKTTSKFRREVHAPCRILKFGLSRSKDIDSSEKNKSLGDDMGNFLSNKLDFAKRSAIGAFRYLVKEKQVTDVDNEFGRHEKEVLISEDSSIEEVEAIEADYGALDDNNNNNKDDNDVKIVEERSVVTNDGGLQNAGRMLESLVLNGEVDVSSLEAYKKLLENAERRNGRLQALDFEIEANQKRLSFYQSIRPVKKPEEEVQEIPKELFIPLTREEETEVKRAFSANYRRRVLTSHKNSNIDITGEILRCLAPGAWLNDEVINVYLELLKEREKREPEKFLKCHFFNTFFYKKLLSGDYKAVRRWTTERKLGYFLIDCDKIFVPVHREVHWCLAIINKKDQKFQYLDSLKGRDFKVLENLAKYYVEEVKDKCKKDIDVSNWELEFVEDLPEQQNGYDCGVFMIKYADFYSRGIGLCFGQEHMPYFRMRTAKEILRLRAD

SEQ ID NO: 13458 - DNA, 1470 bp, Arabidopsis thaliana
  CDS (1)..(1470)
atgggtgccgtagcgatcaatcgtaaacgcagcgacgaatccttcaatttcattaatcaacaatcaaccaaccctttacgaaattcaccgtatttccaagcttccaagaaacgaagattctcattcgctatgtctgaagattctggtaagccagcgtcttcaaacccaacaatttcgaggatttcaaggtaccctgatgctaaagctcctcttagacgagagattcatgctcctagtagaggaattcttagatatggaaaggcaaaatctaatgattactgcgaaaaggacgcaaatttctttgttcgtaagtatgatgatgcaaagagatcagctttggaagctttgagattcgttaataaaggtaaagactttgttgatttgggtgatgaggttgaaaaggaggaagttgtttctgatgattcaagtgttcaagcaattgaagttattgattgtgatgatgatgaggagaagaagaatcttcagccttcgttttcttctggtgttactgatgttaagaaaggggagaactttagagttgaggatactagtatgatgctggattcgttgtcgttagatagagatgtcgataatgatgcttcgagcctcgaagcttatagaaagcttatgcaaagtgcggagaagaggaattcaaagttggaagctttgggttttgagattgtgttgaatgagaagaagttgtcactgctgcgtcagtctcgcccaaagactgtggaaaagcgtgttgaggtgcctcgtgaaccttttattcctctcacagaagatgaagaggctgaagtctaccgtgccttttctgggagaaatagaaggaaggtcttggctactcatgaaaactcaaacattgatattactggagaagttctgcaatgccttacaccatctgcatggctaaacgacgaggttatcaatgtctaccttgaactactcaaagaaagagaaactagagagcccccaaagtatttgaagtgtctctacttcaatacctttttctacaaaaagctggtaagcgattctggttataattttaaagctgtcaggagatggactacgcagagaaagttgggatatgctcttattgactgtgacatgatatttgttcccatccacaggggtgtgcattggaccttggcagtaattaacaacagggaaagcaagctcttgtatcttgattcactgaatggagttgatcctatgattctgaatgctctggcaaaatacatgggtgatgaagcaaatgaaaaaagtggaaaaaagattgatgctaattcgtgggacatggaatttgtggaagaccttccccaacaaaagaatgggtatgactgtggaatgtttatgcttaagtacatcgattttttcagcagaggcctggggctatgtttcagccaggaacacatgccatacttccgactcagaacagctaaagagattctgaggctacgagctgattga

SEQ ID NO: 13459 - protein, 489 aa, Arabidopsis thaliana
MGAVAINRKRSDESFNFINQQSTNPLRNSPYFQASKKRRFSFAMSEDSGKPASSNPTISRISRYPDAKAPLRREIHAPSRGILRYGKAKSNDYCEKDANFFVRKYDDAKRSALEALRFVNKGKDFVDLGDEVEKEEVVSDDSSVQAIEVIDCDDDEEKKNLQPSFSSGVTDVKKGENFRVEDTSMMLDSLSLDRDVDNDASSLEAYRKLMQSAEKRNSKLEALGFEIVLNEKKLSLLRQSRPKTVEKRVEVPREPFIPLTEDEEAEVYRAFSGRNRRKVLATHENSNIDITGEVLQCLTPSAWLNDEVINVYLELLKERETREPPKYLKCLYFNTFFYKKLVSDSGYNFKAVRRWTTQRKLGYALIDCDMIFVPIHRGVHWTLAVINNRESKLLYLDSLNGVDPMILNALAKYMGDEANEKSGKKIDANSWDMEFVEDLPQQKNGYDCGMFMLKYIDFFSRGLGLCFSQEHMPYFRLRTAKEILRLRAD

SEQ ID NO: 13460 - DNA, 1509 bp, Arabidopsis thaliana
  CDS (1)..(1509)
atgaaaaaccaatctagggttttgaactctgaattgggggattttgacctttcagttttgtgggatcaaattttgaatttcgagggttatggttcctactgtttcagaccaatggatatggatggttaccacaaacggagcgccggtttaaacccttgtaaacactccggtttctcacattcatcaagacccatggctccaggaatttaccgttacccagaagtgaaatcttcgttgcggagacaagttcatgcgcctgtgcggatactcaatagcggtcgagatcgtagcacacgacaaggttctggtaatgtgttgggaacctttctcacaaggaacaatgacatgtggaaaagaaatgcacttgattcgtctttacgctatagaacggatagagaagtaattgatgttgatgatgagcttggagatgttgaaatgatatctgatgatacaagtagggagggtgtcgaaaacgtggctatggaggtggacgaggtggaagagaaggcggagatgggaaatggattgttttctgaggttgccagtctgaaaaatgggagcttgagggtgggtgaatgttctaaagctaatagtagttcactcgttgtgaatcgccctgtgactgatgtcacaagttttgaagcatacagaaaggttcttgagagtgctgtgaaccggacttctaaactgaaagacagaggctttgttgatttttttaaagagagaggtcgtgctttactacgaagcttgtcttccttttggagacaagatgaagaaccagtagaggttgtacaacgtgaggcatttgtacctctttctagagaggaggagacagcagtcaggcgtgcattctcagctaatgattcaaacatcttggttactcataagaactcaaatattgatattaccgggaaaatcttgaggtgccttaaaccaggcaaatggttgaacgatgaggtcattaatctttatatggtattgctgaaagaaagggaagctagagaaccaaagaagtttcttaaatgtcattttttcaatacatttatcttcactaagttagttaattcggcgactggatacaactatggtgcagtgagaagatggacttcaatgaagaggttgggctaccatctcaaagactgtgacaagatatttatccctatccatatgaacatccactggactttggctgtaattaatataaaggaccagaaattccagtatcttgactctttcaaaggaagggagcctaaaatcctcgatgcactggctagatactttgtcgatgaagtgagggataagagtgaagtagaccttgatgtaagtcgatggagacaagaatttgtccaggaccttccaatgcagagaaatggattcgattgtggaatgtttatggtgaaatacatcgacttctatagcagaggtctggatctttgtttcactcaggaacaaatgccatatttccgggctaggacagcaaaggagattctgcaactgaaagccgagtga

SEQ ID NO: 13461 - protein, 502 aa, Arabidopsis thaliana
MKNQSRVLNSELGDFDLSVLWDQILNFEGYGSYCFRPMDMDGYHKRSAGLNPCKHSGFSHSSRPMAPGIYRYPEVKSSLRRQVHAPVRILNSGRDRSTRQGSGNVLGTFLTRNNDMWKRNALDSSLRYRTDREVIDVDDELGDVEMISDDTSREGVENVAMEVDEVEEKAEMGNGLFSEVASLKNGSLRVGECSKANSSSLVVNRPVTDVTSFEAYRKVLESAVNRTSKLKDRGFVDFFKERGRALLRSLSSFWRQDEEPVEVVQREAFVPLSREEETAVRRAFSANDSNILVTHKNSNIDITGKILRCLKPGKWLNDEVINLYMVLLKEREAREPKKFLKCHFFNTFIFTKLVNSATGYNYGAVRRWTSMKRLGYHLKDCDKIFIPIHMNIHWTLAVINIKDQKFQYLDSFKGREPKILDALARYFVDEVRDKSEVDLDVSRWRQEFVQDLPMQRNGFDCGMFMVKYIDFYSRGLDLCFTQEQMPYFRARTAKEILQLKAE

SEQ ID NO: 13462 - DNA, 1437 bp, Arabidopsis thaliana
  CDS (1)..(1437)
atgtccgggtccgaatctgtgtatcggaaacgccaaccaatggatatggatggttaccacaaacggagcgccggtttaaacccttgtaaacactccggtttctcacattcatcaagacccatggctccaggaatttaccgttacccagaagtgaaatcttcgttgcggagacaagttcatgcgcctgtgcggatactcaatagcggtcgagatcgtagcacacgacaaggttctggtaatgtgttgggaacctttctcacaaggaacaatgacatgtggaaaagaaatgcacttgattcgtctttacgctatagaacggatagagaagtaattgatgttgatgatgagcttggagatgttgaaatgatatctgatgatacaagtagggagggtgtcgaaaacgtggctatggaggtggacgaggtggaagagaaggcggagatgggaaatggattgttttctgaggttgccagtctgaaaaatgggagcttgagggtgggtgaatgttctaaagctaatagtagttcactcgttgtgaatcgccctgtgactgatgtcacaagttttgaagcatacagaaaggttcttgagagtgctgtgaaccggacttctaaactgaaagacagaggctttgttgatttttttaaagagagaggtcgtgctttactacgaagcttgtcttccttttggagacaagatgaagaaccagtagaggttgtacaacgtgaggcatttgtacctctttctagagaggaggagacagcagtcaggcgtgcattctcagctaatgattcaaacatcttggttactcataagaactcaaatattgatattaccgggaaaatcttgaggtgccttaaaccaggcaaatggttgaacgatgaggtcattaatctttatatggtattgctgaaagaaagggaagctagagaaccaaagaagtttcttaaatgtcattttttcaatacatttttcttcactaagttagttaattcggcgactggatacaactatggtgcagtgagaagatggacttcaatgaagaggttgggctaccatctcaaagactgtgacaagatatttatccctatccatatgaacatccactggactttggctgtaattaatataaaggaccagaaattccagtatcttgactctttcaaaggaagggagcctaaaatcctcgatgcactggctagatactttgtcgatgaagtgagggataagagtgaagtagaccttgatgtaagtcgatggagacaagaatttgtccaggaccttccaatgcagagaaatggattcgattgtggaatgtttatggtgaaatacatcgacttctatagcagaggtctggatctttgtttcactcaggaacaaatgccatatttccgggctaggacagcaaaggagattctgcaactgaaagccgagtga

SEQ ID NO: 13463 - protein, 478 aa, Arabidopsis thaliana
MSGSESVYRKRQPMDMDGYHKRSAGLNPCKHSGFSHSSRPMAPGIYRYPEVKSSLRRQVHAPVRILNSGRDRSTRQGSGNVLGTFLTRNNDMWKRNALDSSLRYRTDREVIDVDDELGDVEMISDDTSREGVENVAMEVDEVEEKAEMGNGLFSEVASLKNGSLRVGECSKANSSSLVVNRPVTDVTSFEAYRKVLESAVNRTSKLKDRGFVDFFKERGRALLRSLSSFWRQDEEPVEVVQREAFVPLSREEETAVRRAFSANDSNILVTHKNSNIDITGKILRCLKPGKWLNDEVINLYMVLLKEREAREPKKFLKCHFFNTFFFTKLVNSATGYNYGAVRRWTSMKRLGYHLKDCDKIFIPIHMNIHWTLAVINIKDQKFQYLDSFKGREPKILDALARYFVDEVRDKSEVDLDVSRWRQEFVQDLPMQRNGFDCGMFMVKYIDFYSRGLDLCFTQEQMPYFRARTAKEILQLKAE

SEQ ID NO: 13464 - DNA, 1413 bp, Glycine max
  CDS (1)..(1413)
atgggtgcgatgaccgccaaccggaagcgctccgaagaatgcatgaacgtaaaccacacaaattccgattctccgagaaaacgcgccaaattctcgatcaaacccgttccgtccgccaccagcgccgtcgcgagactctcccggtacccagaggttcacgcgccgttggcgagggaggttcacgcgccgtgccggcagcgaaaattcgaacgcgctagggttagtgttagcgtcagtgccagcgacgccatggggaacgttctggccgcgaagtttaaggaggcgaagcgttcggcggcggcgaaatgcagaatcttagtggaggaggggaaggaggtgactgaagtggacgcggagacggagagcgaagggcgttacgagaattcgagtgtggaaggggcgggtggcgatggtgacaaggttgttagggttcagcagcagtcacagtcaacgctgtcgtttgattcggaggtgacgaatgcgaagttaaaggtggcgagtggagagaaggtgtggggctatgagacgcaacgcgatttggaaaatgttcatatgtataagaagttgcttgaggatgttgggaggagaagtggcacgcttcagaggctgaattttgagattgatttgaatgagaagcgcagggaacattataatttgttgcggccgaagaaggaattggttgaggaacaggaagtgccgcaagagccttttgttgctcttacaagtgaggaggaagatgaggttgaatgtgccttttcttccaactggaggaggatcttggttacccacgagaattctaacattgtgatcacgggagagaagtttcagtgccttagacccactggatggttaaatgatgaggttataaatttgtacctggaattgcttaaggagagggagcaaagagaaccacagaaatttctgaaatgtcattttttcaatacctttttctacaaaaagttaataagtggcaagaatgggtatgatttcaaatctgtgaggagatggaccagccaaaagaaattgggatatggcctacatgaatgtgataaaatatttgtacctatccataaagagattcattggtgcttggctgttatcaataagaaagataagaaatttcagtatctggactcactgagaggaacagatgcccgagtgatgaaaattctggctagctatattgtagatgaagtaaaggacaagactggaaaagatattgatgtaagttcttggaaaaaagaatttgttgaagaccttcctgagcagcagaatgggtatgattgtggggtgtttatgatcaaatatgccgacttctatagcagaaacttggggctatgtttcaaccaggaacacatgtcttactttcggcgcagaacagctaaagaaatcttgagattaaaagctaactaa

SEQ ID NO: 13465 - protein, 470 aa, Glycine max
MGAMTANRKRSEECMNVNHTNSDSPRKRAKFSIKPVPSATSAVARLSRYPEVHAPLAREVHAPCRQRKFERARVSVSVSASDAMGNVLAAKFKEAKRSAAAKCRILVEEGKEVTEVDAETESEGRYENSSVEGAGGDGDKVVRVQQQSQSTLSFDSEVTNAKLKVASGEKVWGYETQRDLENVHMYKKLLEDVGRRSGTLQRLNFEIDLNEKRREHYNLLRPKKELVEEQEVPQEPFVALTSEEEDEVECAFSSNWRRILVTHENSNIVITGEKFQCLRPTGWLNDEVINLYLELLKEREQREPQKFLKCHFFNTFFYKKLISGKNGYDFKSVRRWTSQKKLGYGLHECDKIFVPIHKEIHWCLAVINKKDKKFQYLDSLRGTDARVMKILASYIVDEVKDKTGKDIDVSSWKKEFVEDLPEQQNGYDCGVFMIKYADFYSRNLGLCFNQEHMSYFRRRTAKEILRLKAN

SEQ ID NO: 13466 - DNA, 20 bp, Artificial sequence
  primer
atgggtgctttaacgagtag

SEQ ID NO: 13467 - DNA, 21 bp, Artificial sequence
  primer
tcagtcagctctcaatctcag

SEQ ID NO: 13468 - protein, 567 aa, Artificial sequence
  consensus sequence
  Variant (2)..(6): Xaa in position 2 to 6 is any amino acid
  Variant (7)..(8): Xaa in position 7 to 8 is any or no amino acid
  Variant (10)..(16): Xaa in position 10 to 16 is any amino acid
  Variant (17)..(40): Xaa in position 17 to 40 is any or no amino acid
  Variant (42)..(51): Xaa in position 42 to 51 is any amino acid
  Variant (52)..(60): Xaa in position 52 to 60 is any or no amino acid
  Variant (63)..(67): Xaa in position 63 to 67 is any amino acid
  Variant (70)..(70): Xaa in position 70 is any amino acid
  Variant (75)..(80): Xaa in position 75 to 80 is any amino acid
  Variant (81)..(82): Xaa in position 81 to 82 is any or no amino acid
  Variant (89)..(89): Xaa in position 89 is any amino acid
  Variant (91)..(106): Xaa in position 91 to 106 is any amino acid
  Variant (107)..(121): Xaa in position 107 to 121 is any or no amino acid
  Variant (123)..(124): Xaa in position 123 to 124 is any amino acid
  Variant (126)..(131): Xaa in position 126 to 131 is any amino acid
  Variant (134)..(135): Xaa in position 134 to 135 is any amino acid
  Variant (137)..(140): Xaa in position 137 to 140 is any amino acid
  Variant (142)..(146): Xaa in position 142 to 146 is any amino acid
  Variant (147)..(147): Xaa in position 147 is any or no amino acid
  Variant (151)..(152): Xaa in position 151 to 152 is any amino acid
  Variant (154)..(155): Xaa in position 154 to 155 is any amino acid
  Variant (157)..(159): Xaa in position 157 to 159 is any amino acid
  Variant (160)..(162): Xaa in position 160 to 162 is any or no amino acid
  Variant (164)..(166): Xaa in position 164 to 166 is any amino acid
  Variant (167)..(170): Xaa in position 167 to 170 is any or no amino acid
  Variant (172)..(172): Xaa in position 172 is any amino acid
  Variant (174)..(181): Xaa in position 174 to 181 is any amino acid
  Variant (182)..(260): Xaa in position 182 to 260 is any or no amino acid
  Variant (262)..(262): Xaa in position 262 is any amino acid
  Variant (264)..(268): Xaa in position 264 to 268 is any amino acid
  Variant (270)..(272): Xaa in position 270 to 272 is any amino acid
  Variant (274)..(275): Xaa in position 274 to 275 is any amino acid
  Variant (277)..(277): Xaa in position 277 is any amino acid
  Variant (279)..(279): Xaa in position 279 is any amino acid
  Variant (281)..(283): Xaa in position 281 to 283 is any amino acid
  Variant (285)..(293): Xaa in position 285 to 293 is any amino acid
  Variant (296)..(305): Xaa in position 296 to 305 is any amino acid
  Variant (306)..(309): Xaa in position 306 to 309 is any or no amino acid
  Variant (311)..(311): Xaa in position 311 is any amino acid
  Variant (313)..(313): Xaa in position 313 is any amino acid
  Variant (317)..(317): Xaa in position 317 is any amino acid
  Variant (321)..(321): Xaa in position 321 is any amino acid
  Variant (324)..(325): Xaa in position 324 to 325 is any amino acid
  Variant (329)..(329): Xaa in position 329 is any amino acid
  Variant (330)..(330): Xaa in position 330 is any or no amino acid
  Variant (332)..(335): Xaa in position 332 to 335 is any amino acid
  Variant (338)..(338): Xaa in position 338 is any amino acid
  Variant (340)..(340): Xaa in position 340 is any amino acid
  Variant (345)..(345): Xaa in position 345 is any amino acid
  Variant (349)..(352): Xaa in position 349 to 352 is any amino acid
  Variant (355)..(355): Xaa in position 355 is any amino acid
  Variant (357)..(358): Xaa in position 357 to 358 is any amino acid
  Variant (367)..(367): Xaa in position 367 is any amino acid
  Variant (369)..(369): Xaa in position 369 is any amino acid
  Variant (377)..(377): Xaa in position 377 is any amino acid
  Variant (381)..(381): Xaa in position 381 is any amino acid
  Variant (398)..(400): Xaa in position 398 to 400 is any amino acid
  Variant (401)..(403): Xaa in position 401 to 403 is any or no amino acid
  Variant (406)..(409): Xaa in position 406 to 409 is any amino acid
  Variant (415)..(418): Xaa in position 415 to 418 is any amino acid
  Variant (422)..(422): Xaa in position 422 is any amino acid
  Variant (424)..(425): Xaa in position 424 to 425 is any amino acid
  Variant (433)..(433): Xaa in position 433 is any amino acid
  Variant (435)..(436): Xaa in position 435 to 436 is any amino acid
  Variant (440)..(440): Xaa in position 440 is any amino acid
  Variant (446)..(447): Xaa in position 446 to 447 is any amino acid
  Variant (449)..(449): Xaa in position 449 is any amino acid
  Variant (457)..(458): Xaa in position 457 to 458 is any amino acid
  Variant (460)..(460): Xaa in position 460 is any amino acid
  Variant (462)..(464): Xaa in position 462 to 464 is any amino acid
  Variant (466)..(467): Xaa in position 466 to 467 is any amino acid
  Variant (470)..(470): Xaa in position 470 is any amino acid
  Variant (472)..(474): Xaa in position 472 to 474 is any amino acid
  Variant (477)..(477): Xaa in position 477 is any amino acid
  Variant (480)..(481): Xaa in position 480 to 481 is any amino acid
  Variant (483)..(483): Xaa in position 483 is any amino acid
  Variant (486)..(488): Xaa in position 486 to 488 is any amino acid
  Variant (490)..(491): Xaa in position 490 to 491 is any amino acid
  Variant (495)..(495): Xaa in position 495 is any amino acid
  Variant (499)..(499): Xaa in position 499 is any amino acid
  Variant (501)..(501): Xaa in position 501 is any amino acid
  Variant (504)..(524): Xaa in position 504 to 524 is any amino acid
  Variant (529)..(529): Xaa in position 529 is any amino acid
  Variant (532)..(532): Xaa in position 532 is any amino acid
  Variant (535)..(535): Xaa in position 535 is any amino acid
  Variant (542)..(543): Xaa in position 542 to 543 is any amino acid
  Variant (547)..(547): Xaa in position 547 is any amino acid
  Variant (550)..(550): Xaa in position 550 is any amino acid
  Variant (552)..(552): Xaa in position 552 is any amino acid
  Variant (556)..(556): Xaa in position 556 is any amino acid
  Variant (564)..(564): Xaa in position 564 is any amino acid
  Variant (566)..(566): Xaa in position 566 is any amino acid
MXXXXXXXNXXXXXXXXXXXXXXXXXXXXXXXXXXXXXXXKXXXXXXXXXXXXXXXXXXXSSXXXXXRIXRYPEXXXXXXXXREVHAPXRXXXXXXXXXXXXXXXXXXXXXXXXXXXXXXXGXXLXXXXXXAKXXAXXXXRXXXXXXKEVXXVXXEXXXXXXEXXXXXXXSXEXXXXXXXXXXXXXXXXXXXXXXXXXXXXXXXXXXXXXXXXXXXXXXXXXXXXXXXXXXXXXXXXXXXXXXXXXXXXXXXXXXXXXXXKXLXXXXXRXXXLXXLXFXIXXXEXXXXXXXXXRPXXXXXXXXXXXXXXEXFXPLTXEEEXEVXXAFSXXNXXXXLVXHXNSNIXITGXXXXCLXPXXWLNDEVINXYXELLKEREXREPXKFLKCHFFNTFFYKKLXXXXXXGYXXXXVRRWTXXXXLGYXLXXCDKIFVPXHXXIHWXLAVINXXDXKFQYLDSXXGXDXXXLXXLAXYXXXEVXDKXXKXIDXXXWXXEFVXDLPXQXNGXXXXXXXXXXXXXXXXXXXXXYDCGXFMXKYXDFYSRGXXLCFXQEXMXYFRXRTAKEILXLXA

SEQ ID NO: 13469 - protein, 60 aa, Artificial sequence
  protein pattern
  Variant (2)..(3): Xaa in position 2 to 3 is any or no amino acid
  Variant (5)..(6): Xaa in position 5 to 6 is any or no amino acid
  Variant (9)..(9): Xaa in position 9 is any amino acid
  Variant (13)..(13): Xaa in position 13 is any amino acid
  Variant (15)..(15): Xaa in position 15 is any amino acid
  Variant (18)..(18): Xaa in position 18 is Phe or Tyr
  Variant (22)..(22): Xaa in position 22 is Met or Val
  Variant (25)..(25): Xaa in position 25 is Ile, Leu or Val
  Variant (28)..(28): Xaa in position 28 is Ala or Ile
  Variant (31)..(31): Xaa in position 31 is Phe or Tyr
  Variant (34)..(34): Xaa in position 34 is Gly or Asn
  Variant (35)..(35): Xaa in position 35 is Ile or Leu
  Variant (36)..(36): Xaa in position 36 is Asp, Glu or Gly
  Variant (40)..(40): Xaa in position 40 is Gly, Asn, Ser or Thr
  Variant (43)..(43): Xaa in position 43 is any amino acid
  Variant (45)..(45): Xaa in position 45 is Pro or Ser
  Variant (49)..(49): Xaa in position 49 is any amino acid
  Variant (57)..(57): Xaa in position 57 is Gln or Arg
  Variant (59)..(59): Xaa in position 59 is Lys or Arg
WXXEXXFVXDLPXQXNGXDCGXFMXKYXDFXSRXXXLCFXQEXMXYFRXRTAKEILXLXA

SEQ ID NO: 13470 - protein, 56 aa, Artificial sequence
  protein pattern
  Variant (4)..(4): Xaa in position 4 is any amino acid
  Variant (8)..(9): Xaa in position 8 to 9 is any amino acid
  Variant (10)..(10): Xaa in position 10 is Phe or Leu
  Variant (11)..(11): Xaa in position 11 is any amino acid
  Variant (14)..(14): Xaa in position 14 is any amino acid
  Variant (16)..(16): Xaa in position 16 is Ala, Gly or Thr
  Variant (17)..(17): Xaa in position 17 is any amino acid
  Variant (26)..(26): Xaa in position 26 is Leu or Val
  Variant (28)..(28): Xaa in position 28 is Leu or Met
  Variant (29)..(29): Xaa in position 29 is any amino acid
  Variant (36)..(36): Xaa in position 36 is any amino acid
  Variant (40)..(40): Xaa in position 40 is any amino acid
  Variant (52)..(52): Xaa in position 52 is Phe or Ile
  Variant (53)..(53): Xaa in position 53 is Phe or Tyr
  Variant (54)..(54): Xaa in position 54 is any amino acid
SNIXITGXXXXCLXPXXWLNDEVINXYXXLLKEREXREPXKFLKCHFFNTFXXXKL

SEQ ID NO: 13471 - protein, 60 aa, Artificial sequence
  protein pattern
  Variant (2)..(3): Xaa in position 2 to 3 is any or no amino acid
  Variant (5)..(6): Xaa in position 5 to 6 is any amino acid
  Variant (7)..(8): Xaa in position 7 to 8 is any or no amino acid
  Variant (10)..(10): Xaa in position 10 is Lys or Arg
  Variant (14)..(14): Xaa in position 14 is Ser or Thr
  Variant (15)..(15): Xaa in position 15 is any amino acid
  Variant (16)..(17): Xaa in position 16 to 17 is Lys or Arg
  Variant (21)..(21): Xaa in position 21 is any amino acid
  Variant (23)..(23): Xaa in position 23 is any amino acid
  Variant (24)..(24): Xaa in position 24 is Asp or Glu
  Variant (27)..(27): Xaa in position 27 is any amino acid
  Variant (30)..(30): Xaa in position 30 is Ile or Val
  Variant (32)..(32): Xaa in position 32 is Ile or Val
  Variant (34)..(34): Xaa in position 34 is any amino acid
  Variant (35)..(35): Xaa in position 35 is Glu, Gly or Asn
  Variant (36)..(36): Xaa in position 36 is Ile or Val
  Variant (39)..(39): Xaa in position 39 is Cys or Thr
  Variant (42)..(42): Xaa in position 42 is Ile or Val
  Variant (45)..(45): Xaa in position 45 is any amino acid
  Variant (46)..(46): Xaa in position 46 is Lys or Arg
  Variant (47)..(47): Xaa in position 47 is Asp or Glu
  Variant (48)..(48): Xaa in position 48 is any amino acid
  Variant (50)..(50): Xaa in position 50 is Phe or Leu
  Variant (51)..(51): Xaa in position 51 is any amino acid
  Variant (56)..(56): Xaa in position 56 is Phe, Leu or Met
  Variant (57)..(57): Xaa in position 57 is any amino acid
  Variant (59)..(59): Xaa in position 59 is any amino acid
  Variant (60)..(60): Xaa in position 60 is Asp or Glu
GXXYXXXXVXRWTXXXXLGYXLXXCDXIFXPXHXXXHWXLAXINXXXXKXXYLDSXXGXX

SEQ ID NO: 13472 - protein, 14 aa, Artificial sequence
  protein pattern
  Variant (3)..(4): Xaa in position 3 to 4 is any amino acid
  Variant (5)..(5): Xaa in position 5 is Ala, Pro, Ser or Thr
  Variant (6)..(6): Xaa in position 6 is any amino acid
  Variant (7)..(7): Xaa in position 7 is Phe or Leu
  Variant (8)..(8): Xaa in position 8 is any amino acid
  Variant (10)..(10): Xaa in position 10 is Glu or Gln
PEXXXXXXRXVHAP

SEQ ID NO: 13473 - protein, 26 aa, Artificial sequence
  protein pattern
  Variant (2)..(2): Xaa in position 2 is Ala or Pro
  Variant (4)..(4): Xaa in position 4 is Ile, Leu or Val
  Variant (5)..(5): Xaa in position 5 is Ala or Pro
  Variant (7)..(7): Xaa in position 7 is Ser or Thr
  Variant (8)..(8): Xaa in position 8 is any amino acid
  Variant (12)..(12): Xaa in position 12 is Ala, Asp, Thr or Val
  Variant (13)..(13): Xaa in position 13 is Ala or Glu
  Variant (15)..(16): Xaa in position 15 to 16 is any amino acid
  Variant (18)..(20): Xaa in position 18 to 20 is any amino acid
  Variant (21)..(21): Xaa in position 21 is any or no amino acid
  Variant (23)..(25): Xaa in position 23 to 25 is any amino acid
  Variant (26)..(26): Xaa in position 26 is Ile or Val
EXFXXLXXEEEXXVXXAXXXXNXXXX

SEQ ID NO: 13474 - protein, 23 aa, Artificial sequence
  protein pattern
  Variant (2)..(6): Xaa in position 2 to 6 is any amino acid
  Variant (7)..(7): Xaa in position 7 is any or no amino acid
  Variant (9)..(9): Xaa in position 9 is Asn, Ser or Thr
  Variant (10)..(11): Xaa in position 10 to 11 is any amino acid
  Variant (13)..(14): Xaa in position 13 to 14 is any amino acid
  Variant (16)..(17): Xaa in position 16 to 17 is any amino acid
  Variant (18)..(18): Xaa in position 18 is Glu or Gln
  Variant (20)..(22): Xaa in position 20 to 22 is any or no amino acid
LXXXXXXRXXXLXXLXXXIXXXE

SEQ ID NO: 13475 - protein, 20 aa, Artificial sequence
  protein pattern
  Variant (2)..(5): Xaa in position 2 to 5 is any or no amino acid
  Variant (7)..(7): Xaa in position 7 is any amino acid
  Variant (8)..(8): Xaa in position 8 is Ala, Gly or Val
  Variant (9)..(9): Xaa in position 9 is Asp or Glu
  Variant (11)..(11): Xaa in position 11 is Ala or Val
  Variant (12)..(12): Xaa in position 12 is any amino acid
  Variant (13)..(13): Xaa in position 13 is Asp or Glu
  Variant (15)..(15): Xaa in position 15 is Cys, Ser or Thr
  Variant (16)..(16): Xaa in position 16 is any amino acid
  Variant (18)..(18): Xaa in position 18 is Asp, His or Lys
KXXXXYXXXEXXXKXXKXID

SEQ ID NO: 13476 - protein, 25 aa, Artificial sequence
  protein pattern
  Variant (2)..(2): Xaa in position 2 is Asn or Thr
  Variant (3)..(3): Xaa in position 3 is Phe, Leu or Val
  Variant (5)..(5): Xaa in position 5 is Ala, Ser or Thr
  Variant (6)..(11): Xaa in position 6 to 11 is any amino acid
  Variant (13)..(13): Xaa in position 13 is Asn, Gln or Arg
  Variant (14)..(14): Xaa in position 14 is Asn, Ser or Thr
  Variant (16)..(19): Xaa in position 16 to 19 is any amino acid
  Variant (20)..(20): Xaa in position 20 is any or no amino acid
  Variant (22)..(24): Xaa in position 22 to 24 is any amino acid
  Variant (25)..(25): Xaa in position 25 is Asp, Glu or Lys
GXXLXXXXXXXKXXAXXXXXRXXXX

SEQ ID NO: 13477 - DNA, 939 bp, Populus trichocarpa
  CDS (1)..(939)
atggcggcgaagaaacaagagagtaacaacaaatcaaagaagagaaagcaaaacccagatgctaagacaaatacatatagctcattttctaaaagaccgaagcttgtcagctcaaaacctgaaaacaagcaagaaaagaagcctttcaagccatttaagaagcagaattttggcaaattgaagtcgcaatctggtgaagagaagaacacccctttatcaaaaagagagcgtaggctacatgcaaaggaattgacggaggctaggaagaagagaaggaagcaacattacactcttgaacaagagcttgcacgtctttgggaaaagatgaggcagcgtaatattgtcaaagaagagagatccaagattattgctgaagctatactaaagatgaaggggaagattccggaaattgcaagctcccatgtttcgtctcgtgttctgcagacttgtgtgaagtattgtacacaagctgaaagggataccgtatttgacgagctcaagccacattttctgacccttgcgaccaacaagtatgcaattcatcttgtgatgaaaatgctagataatgcttctaaaaaacagctagcagagttcatcagctccctccgtgggcatgctgcttctcttcttcgacacactgttggatctgttgttatcgagcatgcataccagctgggaaatgcaactcaaaaacaagagcttctgatggagttgtattccactgaacttcaattgttcaaggatctttcatcaatgaaagaaagcaggttaccggatgttatcttgaagctgaacctacagaaaggttcagtcttacgacacatggcttctgtcattcaaccaattctggagaaaggaattgttgatcactctattatacacagggtgctaatagagtacctcagcatagctggcaaggcccacttcttgttcgaatga

SEQ ID NO: 13478 - protein, 312 aa, Populus trichocarpa
MAAKKQESNNKSKKRKQNPDAKTNTYSSFSKRPKLVSSKPENKQEKKPFKPFKKQNFGKLKSQSGEEKNTPLSKRERRLHAKELTEARKKRRKQHYTLEQELARLWEKMRQRNIVKEERSKIIAEAILKMKGKIPEIASSHVSSRVLQTCVKYCTQAERDTVFDELKPHFLTLATNKYAIHLVMKMLDNASKKQLAEFISSLRGHAASLLRHTVGSVVIEHAYQLGNATQKQELLMELYSTELQLFKDLSSMKESRLPDVILKLNLQKGSVLRHMASVIQPILEKGIVDHSIIHRVLIEYLSIAGKAHFLFE

SEQ ID NO: 13479 - DNA, 1968 bp, Populus trichocarpa
  CDS (1)..(1968)
atggcggcgaagaaacaagagagtaacaaccaatcaaagaagagaaagcaaaacccagatgctaagacaaatacatatagctcattttctaaaagaccgaagcttgtcagctcaaaacctgaaaacaagcaagaaaagaagcctttcaagccatttaagaagcagaattttggcaaattgaagtcgcaatctggtgaagagaagaacacccctttatcaaaaagagagcgtaggctacatgcaaaggaattgacggaggctaggaagaagagaaggaagcaacattacactcttgaacaagagcttgcacgtctttgggaaaagatgaggcagcgtaatattgtcaaagaagagagatccaagattattgctgaagctatactaaagatgaaggggaagattccggaaattgcaagctcccatgtttcgtctcgtgttctgcagacttgtgtgaagtattgtacacaagctgaaagggataccgtatttgacgagctcaagccacattttctgacctttgcgaccaacaagtatgcaattcatcttgtgatgaaaatgctagataatgcttctaaaaaacagctagcagagttcatcagctccctccgtgggcatgctgcttctcttcttcgacacactgttggatctgttgttatcgagcatgcataccagctggcaaatgcaactcaaaaacaagagcttctgatggagttgtattccactgaacttcaattgttcaaggatctttcatcaatgaaagagagcaggttaccggatgttatcctgaagctgaacctacagaaaggttcagtcttacgacacatggcttctgtcattcaaccaattctggagaaaggaattgttgatcactctattatacacagggtgctaatagagtacctcagcatagctggcaagacctcagcagcagaaataattcaacaattgtcaggcccacttcttgttcgaatgatccatacaagggatggatctcggattgggatactgtgtgtcaaacatgggagtgctaaggagcgaaagaagattgtcaaaggactgaaaggcacagtaggcaaaacagctcattttcaatatggaagtttggtacttgcctgcattgtctcaactattgacgacacaaagctcgtaacaaagactgtcattcgcgagcttcagtcgatcttaaaggagcttgttttggataagaatggaagacgtcctttgttgcagttgcttaatccaaattgtacgcgatatttcagtcctgatgaaatggcttctcttagcctatctatttcctctctcaatgccatgggtgaattggaagtaaattctgaaactaagtctttaaaggacgaggaatctagtgacaaggacaactatgggagagaagttacaatggcaaagcctgatggaagcacaagtcctgaaactcttccactcattgagggtggcaaaaaagatccttctattagaaggcaagagctgttggtgggcagtggccttgctgagagcctcattgacatatgtatcgagaatgcagaagagttgctaagatcaaattttggtaaagaagtcatatatgaggttgcaactgggggttctggtggtattcttcaagaaactttgggtgacaagatgaacaccttgcatgaagctatagcatcacttgcagcagaatctaaatttgaggaatcagataaggatcatgtccttgaaaatttccactccagtcggaccattaggaaattagttatggaaagctccatgtttgccaccactctatggaagaaagctttgaaaggaaagtgtgagcagtggacacaaggtcacagttctaaggtaatatgtgcattcttggaatcgtctgacgccaagatcagtaaactagccaaggaagaactgcagcccttaatagacaggggtattctcaaattacctgaaaagaagcaaccagcaaacaaatga

SEQ ID NO: 13480 - protein, 655 aa, Populus trichocarpa
MAAKKQESNNQSKKRKQNPDAKTNTYSSFSKRPKLVSSKPENKQEKKPFKPFKKQNFGKLKSQSGEEKNTPLSKRERRLHAKELTEARKKRRKQHYTLEQELARLWEKMRQRNIVKEERSKIIAEAILKMKGKIPEIASSHVSSRVLQTCVKYCTQAERDTVFDELKPHFLTFATNKYAIHLVMKMLDNASKKQLAEFISSLRGHAASLLRHTVGSVVIEHAYQLANATQKQELLMELYSTELQLFKDLSSMKESRLPDVILKLNLQKGSVLRHMASVIQPILEKGIVDHSIIHRVLIEYLSIAGKTSAAEIIQQLSGPLLVRMIHTRDGSRIGILCVKHGSAKERKKIVKGLKGTVGKTAHFQYGSLVLACIVSTIDDTKLVTKTVIRELQSILKELVLDKNGRRPLLQLLNPNCTRYFSPDEMASLSLSISSLNAMGELEVNSETKSLKDEESSDKDNYGREVTMAKPDGSTSPETLPLIEGGKKDPSIRRQELLVGSGLAESLIDICIENAEELLRSNFGKEVIYEVATGGSGGILQETLGDKMNTLHEAIASLAAESKFEESDKDHVLENFHSSRTIRKLVMESSMFATTLWKKALKGKCEQWTQGHSSKVICAFLESSDAKISKLAKEELQPLIDRGILKLPEKKQPANK

SEQ ID NO: 13481 - DNA, 1968 bp, Populus trichocarpa
  CDS (1)..(1968)
atggcggcgaagaagcaagatagcaacagcaaaccaaagaagagaaatcgaaacccagatgccaatactaatccagatagctcatcttttaaaaaaccgaagcttgttagctcaaaacctgaaaacaagccagtggagaaggttttcaagccatttaagaagacgtttgggaaagtgaaatcgcaatctggtgaagagaagaagacccctttatcaaaaagagagcgtaggatacatgcaaaggaattgacagaggcaaggaaaaagagaaggaagcaatattacactcttgaacaagagcttgcacgtctttgggaaaagatgaggcagcgtaatattgccaaagaagagagatcaaagataattactgaagctatacaaaagatgaagggtaagattcctgaaattgcaagctcccatgtttcgtcccgtgttttgcagacttgcgtgaagtattgttcacaaactgaaagggatgctgtatttgacgagcttaagccacattttcttacctttgcgagcaacaagtatgcaattcatcttgtgacgaaaatgttagataatgcttctaaaaaacagttagcagagttcatcagccccctccgtggtcatgttgcttcccttcttcgacacgcagttggatctgttgttattgagcatgcataccagctgggaaatgcaactcaaaaacaagagcttctgatggagttatattccactgagcttcaattgttcaaggaccttgcatcaatgaaagagagcaggttagtggatgtcatctcgaagctgaacctacagaaaggttcagtctcacgacacatggcttctgtcattcaaccaattttggagaaaggaattgttgatcacaccattatacacaaggtgctgatagagtacctcagcatagctgacaagacctctgcagcagaaataattcaacaattgtcgggtccacttcttgttcgaatgatccatacaagggatggatctcggattgggattctgtgtgtcaaacatgggagcgccaaggagcgaaagaagattgtcaaaggactgaaaggcacagtaggcaaaacagctcattttcaatatggaagtttggtgctcgcctgcattgtttcaactgttgatgacacaaagcttgtagcaaagactgtcattcgcgagctgcagacaattttaaaggagcttgttttggataagaatggaagacgccctttgttgcagctgcttaatccaaattgtacgcggtattttagtcctgatgaaatggcttctcttagcttatctatttcctctctcaatgccatgggtgacttagaagtgaatcgtgaaacaaagtctttaaaggatgaggaatctagtgacaaggacaatagtgggagagacgttacaatggttgaggctgatggaagtgcaagttctgaaactcttcaacttgttgagggtggcaaaaaagatccttctattagaaggcaggagttgttggtgggcagtggccttgccaagaacctcattgacatgtgtaccgagaatgcagaagagttgcttagatcaaattttggcaaagaagtcttatatgaggctgcaactgggggttctggtggcattctccaacaaactttgggtgatgagttgaatgccttgcatgaagctatagcatctgttgctgcagagtctaaatctgaaggatcagaaaaggagcatgtccttgaaaatttccactcgagtcgtacaattaggaaattagttttggacaaccccgcctttgccgccactctatggaagaaagctttgagtggaaaatgtgagcagtgggcacaaggtcacagttccaaggtaatatgtgcattcttggaatcatcagatgccatggtcagcaaactggccaaggaagagttgcagcccttgataaaccggggtattcttaaattacctgaaaagaagcaaccagccaatgaaggttaa

SEQ ID NO: 13482 - protein, 655 aa, Populus trichocarpa
MAAKKQDSNSKPKKRNRNPDANTNPDSSSFKKPKLVSSKPENKPVEKVFKPFKKTFGKVKSQSGEEKKTPLSKRERRIHAKELTEARKKRRKQYYTLEQELARLWEKMRQRNIAKEERSKIITEAIQKMKGKIPEIASSHVSSRVLQTCVKYCSQTERDAVFDELKPHFLTFASNKYAIHLVTKMLDNASKKQLAEFISPLRGHVASLLRHAVGSVVIEHAYQLGNATQKQELLMELYSTELQLFKDLASMKESRLVDVISKLNLQKGSVSRHMASVIQPILEKGIVDHTIIHKVLIEYLSIADKTSAAEIIQQLSGPLLVRMIHTRDGSRIGILCVKHGSAKERKKIVKGLKGTVGKTAHFQYGSLVLACIVSTVDDTKLVAKTVIRELQTILKELVLDKNGRRPLLQLLNPNCTRYFSPDEMASLSLSISSLNAMGDLEVNRETKSLKDEESSDKDNSGRDVTMVEADGSASSETLQLVEGGKKDPSIRRQELLVGSGLAKNLIDMCTENAEELLRSNFGKEVLYEAATGGSGGILQQTLGDELNALHEAIASVAAESKSEGSEKEHVLENFHSSRTIRKLVLDNPAFAATLWKKALSGKCEQWAQGHSSKVICAFLESSDAMVSKLAKEELQPLINRGILKLPEKKQPANEG

SEQ ID NO: 13483 - DNA, 1842 bp, Ricinus communis
  CDS (1)..(1842)
atggcggcgaagaaacaagagaagaagagaaagcaaaattcagatgcgaagaacgtcaccgatagtttaccttctaaaaagccgaagcttaacgagaaatttaaaaaacctttcgacccttctaaaaagctaaatgataaatcaaaattaggtcaatcgaaatctggaaatgacaaaaatgcgcctgagacaaagcgagagcgtcgaattcgtgctaaggaattggcagaggctagaaagaagaaaagaaagcggcattacacactggagcaagagcttgcatctctctgggagaagatgaggcagcggaatatttctaaagaagatagatcaaaatatataagcgaagctttacaaaagatgaagggaaagattccagaaattgctagctcccatgtttcttctcgtgtattgcagacctgtgttaagtattgctcgcagacagaaagggatgctgtgtttgaagagcttaagccacattttcttactttctcatgcaacacttatgcagttcatctggtcaagaaaatgttagataatgcttctaaaaaacaactggcagaatttatctccagtctccgagggcatgttgcatcacttcttcgacacatggttggatctgttgttattgagcatgcctaccaacttggaaatgcaacccaaaaacaagagctcctgctggagctatactcggccgagcttcagttgttcaaggaccttaccttgatgaaagagagcagattgcttgatgtagtctccaagttgaagctgcagaaggcttcagtcttgcgacacatgacttctgtgattcaaccaattcttgaaaaagggattgttgatcactctatcatacacagggtgctaatagagtatctcagcatggctgataagtcctctgcagcagaagtaattcagcaactgtcaggtccacttcttgttcgaatgatccatacaagggatggatcaaggattggtatactgtgtgttaaatatgggagtgccaaggaaagaaagaagattgtcaagggaatgaaaggtcatataggcaagatagctcatgatcgatatggcagcttgattgggaggtgcccgttactgcagcttcttcatccaaattgctcacgctatttcagccctgatgatatggctgctttcagtctatctatcttgtctctcagtgccaagagtgagttggaagtaaagtctgagacaaagtctttaaacgacgaagcatctagcgatgaggcggatgctattgccaaaattacaacggctggggccaatgaaagtgcaagttctgagaatgccgacttcattgagggtggaaagaaagatccatctataagaagacatgagctgttggttgggagcggcctcgctgagaatcttattgatgtatgtatagagaatgcaggagagttgctcagatcaaattttggcaaagaagtcttatatgaggttgcaactgggggtgctggcggcattctccattcaggtctggatgacaagttgaacaccttgcatgaagctatagcttctcttgcagcagagcctaaatctgaagaatctgaacaggaacatgtccttgaaaatttctattccagtcgaaccattagaaaattaatcatggatagctcaacctttgctgctactttatggatgaaagccctgaaaggaagatgtgaattgtgggcccaaggtcacagttcaaaggtaatatacgcattcttggaatcctcagatgccaaaatctctaaactagtcagcaaagagctgcagccattgatagatagtggtatcctcaaagttcctgaacacaagaaaccaggaaaagaagggtaa

SEQ ID NO: 13484 - protein, 613 aa, Ricinus communis
MAAKKQEKKRKQNSDAKNVTDSLPSKKPKLNEKFKKPFDPSKKLNDKSKLGQSKSGNDKNAPETKRERRIRAKELAEARKKKRKRHYTLEQELASLWEKMRQRNISKEDRSKYISEALQKMKGKIPEIASSHVSSRVLQTCVKYCSQTERDAVFEELKPHFLTFSCNTYAVHLVKKMLDNASKKQLAEFISSLRGHVASLLRHMVGSVVIEHAYQLGNATQKQELLLELYSAELQLFKDLTLMKESRLLDVVSKLKLQKASVLRHMTSVIQPILEKGIVDHSIIHRVLIEYLSMADKSSAAEVIQQLSGPLLVRMIHTRDGSRIGILCVKYGSAKERKKIVKGMKGHIGKIAHDRYGSLIGRCPLLQLLHPNCSRYFSPDDMAAFSLSILSLSAKSELEVKSETKSLNDEASSDEADAIAKITTAGANESASSENADFIEGGKKDPSIRRHELLVGSGLAENLIDVCIENAGELLRSNFGKEVLYEVATGGAGGILHSGLDDKLNTLHEAIASLAAEPKSEESEQEHVLENFYSSRTIRKLIMDSSTFAATLWMKALKGRCELWAQGHSSKVIYAFLESSDAKISKLVSKELQPLIDSGILKVPEHKKPGKEG

SEQ ID NO: 13485 - DNA, 597 bp, Arabidopsis lyrata subsp. lyrata
  CDS (1)..(597)
atgtcttccaaaggtctgaaatcgaccaagaggaaggttactgaaacattcgattctctaaaatcgaagaagccaaagctggtgtctggagaacaacaacaacaacatgggaaacccaaatattttggagacagggagcagagtactaatctatcgaagaaggagcgtcgtgtacaggctaaggagctaacagaagctaggaagaagaagaggaagccacattacaatcttgagcaagagcttgcatctctatgggagaagatgaggcgtcgtgatattggcaaggaggaccgatcaaagctgatttctgaagctataaggaagatgaaggggaaggttccagagattgcagtctcacatgtttcatcccgtgtactccagacttgtgtgaagttttgctcacaagctgaaaaagatgctctcttcgccgaactccagccacagtttcttaaccttgcttctaataaatatgctgttcattttatacagaagatgttggatggagcatctaagcagcagctggcagcttgtatattcagcctccggggacatgttgctcctcttctccgtcacctgtttggatctgttggtatgtag

SEQ ID NO: 13486 - protein, 198 aa, Arabidopsis lyrata subsp. lyrata
MSSKGLKSTKRKVTETFDSLKSKKPKLVSGEQQQQHGKPKYFGDREQSTNLSKKERRVQAKELTEARKKKRKPHYNLEQELASLWEKMRRRDIGKEDRSKLISEAIRKMKGKVPEIAVSHVSSRVLQTCVKFCSQAEKDALFAELQPQFLNLASNKYAVHFIQKMLDGASKQQLAACIFSLRGHVAPLLRHLFGSVGM

SEQ ID NO: 13487 - DNA, 1890 bp, Arabidopsis lyrata subsp. lyrata
  CDS (1)..(1890)
atgtcttccaaatcgaccaagaggaaggttactgaaacattcgattctctaaaatcgaagaagccaaagctggtgtctggagaacaacaacaacaacaacatgggaaacctaaatttgttaaacccaaatcttttggagacagtctatcgaagaaggagcgtcgtgtacaggctaaggagctaacagaagctaggaagaagaagaggaagccacattacaatcttgagcaagagcttgcatctctatgggagaagatgaggcgtcgtgatattggcaaggaggaccgatcaaagctgatttctgaagctataaggaagatgaaggggaaggttccagagattgcagtctcacatgtttcatcccgtgtactccagacttgtgtgaagttttgctcacaagctgaaaaagatgctctcttcgccgaactccagccacagtttcttaaccttgcttctaataaatatgctgttcattttatacagaagatgttggatggagcatctaagcagcagctggcagcttgtatattcagcctccggggacatgttgctcctcttctccgtcacctgtttggatctgttgttgtggagcatgcataccgtctgggaactgctgcacaaaaacaagaactccttgcagaattgtattctacagagcttcagttattcaagggcttgacctcatctaccgaaaaaacggtggtagacatcatcgctaagctaggactgcaaaaaggtgctgttaaccgacacatgactgccattatccaaccgattcttgagaagggaattgtcgaccacactatcacacacaaattgctgattgaatacctgacaatagctgataagacttctgctgcagatgtgcttcagctactgacaggctcccttcttttgcgtatggttcatacccgtgatggttctaggcttgccatgctttctatcaaacatggaagcgccaaggagagaaagaagattatcaaagcaatgaaagagcatgttacaaagatgggtttttatcagtttggaagtatggtgcttgcatgtattttttcaatagttgatgacacaaagctcgtgaccaagataattgttcgtgagctcgaggccagcctaaaggatcttgttatggacaagaatggtaggagaccgctattgcagctactgcatccaaattcttcacgttatttgagccatgatgatttggccgctcttgatctttctgttccatcactctgctcaatggataagtcagacacatcctctaaaacaaaggacacagatggtaacgaatctggtgaggagacgaaggatgaacaagacgatacagtagctgaacatacagatcatgaagaaaacgtcacagctatgggcggtaaaaaagatccccttgtgagaagacaggagttgctcgtcaacagtggccttgctgagaggcttattgatgtgtgcgtggaaaatgccgaggaattcctcaagtccaactttggcaaagaggtcatgtatgaggttgccatcggaggctccgatggtattctttgcccatctctgagcgagaagctgtatgagctgtacgaagctattagctctgtagcagcaaaaccgaaaccccaagaatctgggaaggattcagagcacatcctggaaaactttcactcaagtcggaccataagaaggcttgtcttggattgccctggtttcgcatccactctctttaagaaggccttgtctggaaaatgtcggtcgtgggctcaaggacactgttcaaagatactatctgctttcctagagactgaagattttcaagttcgtgagatggctaaaacagagcttcaggtgttggtgagtgaaggtactctgaaaatctcagcagccaagaaacctgaatga

SEQ ID NO: 13488 - protein, 629 aa, Arabidopsis lyrata subsp. lyrata
MSSKSTKRKVTETFDSLKSKKPKLVSGEQQQQQHGKPKFVKPKSFGDSLSKKERRVQAKELTEARKKKRKPHYNLEQELASLWEKMRRRDIGKEDRSKLISEAIRKMKGKVPEIAVSHVSSRVLQTCVKFCSQAEKDALFAELQPQFLNLASNKYAVHFIQKMLDGASKQQLAACIFSLRGHVAPLLRHLFGSVVVEHAYRLGTAAQKQELLAELYSTELQLFKGLTSSTEKTVVDIIAKLGLQKGAVNRHMTAIIQPILEKGIVDHTITHKLLIEYLTIADKTSAADVLQLLTGSLLLRMVHTRDGSRLAMLSIKHGSAKERKKIIKAMKEHVTKMGFYQFGSMVLACIFSIVDDTKLVTKIIVRELEASLKDLVMDKNGRRPLLQLLHPNSSRYLSHDDLAALDLSVPSLCSMDKSDTSSKTKDTDGNESGEETKDEQDDTVAEHTDHEENVTAMGGKKDPLVRRQELLVNSGLAERLIDVCVENAEEFLKSNFGKEVMYEVAIGGSDGILCPSLSEKLYELYEAISSVAAKPKPQESGKDSEHILENFHSSRTIRRLVLDCPGFASTLFKKALSGKCRSWAQGHCSKILSAFLETEDFQVREMAKTELQVLVSEGTLKISAAKKPE

SEQ ID NO: 13489 - DNA, 2211 bp, Ostreococcus tauri
  CDS (1)..(2211)
atggctagagaaggtgagagaacgcattcgacgatgacacgtgcagacgccaaggctgggtccggcgccaagacgagaagggcgcagaagcgaaagagtaaattcaatcccgactcgagtggcggcggcggcggcgacgactcggcgacgaagacgtccgactcgaaggctcgaaagtcaaagacgttcgatgggaagagtgagggcagaaaactgagcggtggatcgaaatccttcacgaagggcgactcgaaggggcgcgacagaggcgagaagcgtccgagctctggtgagagcgtggaggcaaagagcaaaaaggcaaagtccagcaacgacggtaagccgctctctcgcaaggagcaaaaggcgaaggcggacgaaattaaggcgctgagaaagcctaacttcgcgttagtacaagagttggcccagatctgggagcgcatgcgggggaagaaggtttcaaagacggatcgaagcacgctgtgtgacgaaattttcaagaagtccaagggcaaggtgccagagctggcaaacaatcacaaaggctcgcgtgtggtgcaggcagtgctcaagtacggcactccggagcaatgcgatctctgtacgggtaactttttggttcgcaagctcatcgattctactgacaaaaaggacgtgcccaagcttctcgccaatctcaagggacagattccgagactggctcgtcatcccgtcgggtctcagatcgtcgaagcgctctaccacgtcgcttcgggcaaggacaagaaatcgatgacgtttgagttctatggtccagagttcgtccactttggcgtcgccgaggtcggttcccttcgtgaagccttgctcaccaagcccgtcgcacagcgccagagcacgcttcgtcacgtgaacacgtcgatgataccggtattagaaaaaggtttagtgtcttcctccgtaattcatcgcgttttatcggagtacctgagcgtgggcggcccgagcacgaaggcagaggcggcgggatccatcgccgccgctggtttactccgtatgatgcacacaaaggagggctcgcacgcggtgaacatgatgctcgcgcactctggagcgaagcaacgcaagggcgtcgtcaaagcgctgaagggtcagatttggagagttgcacaggatgactttgcgcacctcgtcatcgcgcacctctttgactgtgtggacgacacacagctgctcacaaagggcgtcgtgagcgagctcaaacaggaaggcatcgaagaagtcgcatcgcacaaaaatgcacgtcgagtgctgttacacattttaaaccctcgatccacgagatacttcccgccgcacttgcttgagtgtcttccagatcccgaacaaattcgcgcagacgcggaggagacgctcgcagtaatgaaaaaaggcggtgatgctgaaaaggcggcaaagaaggcggttgggaaggacgactcagacgatgacgacataggaatcattgacgacgagctgggagaggatgagatggatgaggatgaggataacgaagatgaggacgatggagatttggaagaagctccggcggatggtccggaattcggcatcgctaagaagcctgccagcacgcgccgagcggaaatcttccatcaaggtttaggcgatgctctcatcgcggcgtgtaacgccaatgcggccgcgatgttacggaataacctcgcttcagacgtgttatttgaggtcgcagcagggggttgtgacggcgttttccacgaagcgatgggtgacgagaagatgaccgcgctctataaagccatctctagcgcggtggcgctatcgatgtcatctaaagagattgatgatgagacgggcgaggctcttgagtcgttgcacacgaattttttctccaccagaacgcttcgtcgaatggcgttggaaatcaagcacccggcgttcgtgccccagttctggaacacagcgctcaagggcagtctcaagacgtggatagatggacacggaagtaaagttatcgccgcgatcgttcgcgcggataccgactcgaaaacacgcaaggcgattcacgccgccgtcggtaagctggtcgatggaggagacgccgacgcgtgggcggagggtttctttcacgtcaaggatgcgacggatgccaaaaaatccaaggtaaaagatgcgaaacgcaagagctcgagcaaaccgtcgaagaagtaa

SEQ ID NO: 13490 - protein, 736 aa, Ostreococcus tauri
MAREGERTHSTMTRADAKAGSGAKTRRAQKRKSKFNPDSSGGGGGDDSATKTSDSKARKSKTFDGKSEGRKLSGGSKSFTKGDSKGRDRGEKRPSSGESVEAKSKKAKSSNDGKPLSRKEQKAKADEIKALRKPNFALVQELAQIWERMRGKKVSKTDRSTLCDEIFKKSKGKVPELANNHKGSRVVQAVLKYGTPEQCDLCTGNFLVRKLIDSTDKKDVPKLLANLKGQIPRLARHPVGSQIVEALYHVASGKDKKSMTFEFYGPEFVHFGVAEVGSLREALLTKPVAQRQSTLRHVNTSMIPVLEKGLVSSSVIHRVLSEYLSVGGPSTKAEAAGSIAAAGLLRMMHTKEGSHAVNMMLAHSGAKQRKGVVKALKGQIWRVAQDDFAHLVIAHLFDCVDDTQLLTKGVVSELKQEGIEEVASHKNARRVLLHILNPRSTRYFPPHLLECLPDPEQIRADAEETLAVMKKGGDAEKAAKKAVGKDDSDDDDIGIIDDELGEDEMDEDEDNEDEDDGDLEEAPADGPEFGIAKKPASTRRAEIFHQGLGDALIAACNANAAAMLRNNLASDVLFEVAAGGCDGVFHEAMGDEKMTALYKAISSAVALSMSSKEIDDETGEALESLHTNFFSTRTLRRMALEIKHPAFVPQFWNTALKGSLKTWIDGHGSKVIAAIVRADTDSKTRKAIHAAVGKLVDGGDADAWAEGFFHVKDATDAKKSKVKDAKRKSSSKPSKK

SEQ ID NO: 13491 - DNA, 1971 bp, Saccharomyces cerevisiae
  CDS (1)..(1971)
atggcacctttaaccaagaagacaaacggaaaacgttctgctaaagaagttagtcattcagaaaagaaattagccaaaaaacctagaatttctattgattcgtctgatgaagaatcagaactatccaaaaaggaagatgctgtatcctcttcatcagatgatgatgatttggatgatttaagtaccagtgactctgaagcagaagaagaagctgacgaattagatatttccgatgacagtgaggaacatgaaaatgagaatgaagagaaagaaggaaaggacaaatctgaaggaggtgaaaatggaaatcacactgaacaaagaaaactgctaaaagaaaggaaaatgcaaagaaaatctggtacccaagtgcaacaaattaaatccgtctgggaaagattgcgtgtgaagaccccacctttaccaaaacagattcgtgaaaaactttccaacgaaatctgggagctatctaaggactgtatcagtgatcttgtcttaaagcatgatgcttcccgtattgttcaaactttagtcaagtattcgtccaaagatcgtcgtgaacaaattgtcgatgctttaaagggaaaattttatgttctagccacatctgcgtacggtaagtatctattggttaagttactgcattatggttcaagaagttcaaggcaaactataataaatgaattacacggttctttgagaaaattaatgagacatcgtgagggtgcctacgttgttgaagatttatttgttctttatgccacacatgaacaaagacaacaaatgattaaagagttttggggctctgaatatgctgtatttagagaaacccacaaagatttgaccattgagaaagtttgtgaaagtagcattgaaaaaaggaatattatcgccagaaacttgattggtaccattaccgcatcagtagaaaagggttccaccggctttcaaattctacatgctgctatgagagaatatgtgaaaatagccaacgaaaaggaaatatctgaaatgatcgaattgcttcatgaacaattcgctgaattggtgcatactccagaaggttcagacgttgcttgtactttggttgctagagctaacgccaaggaaagaaagttaattttaaaggctttgaaaaaccacgccgaaaaattgatcaaaaatgagtacggtaatattgtcttcattacaattctgaactgtgttgacgatacagttttagtattcaagactttcagtcctactgttaaggaacatttgcaagaattcataattgataagtttggtagaaggccttggttatacatactattaggtttggacggtaagtatttctcacctatcgtcaagaatgaattattgagatacattgaactgtccaaagccacctctaagaaggatcctttacaaagaaggcacgaacttttgtcaaaattcgcccccatgtttttaagcactatatcaaaagattattccagtatattgacagagaatctaggctgtcagttcattgccgaagttctaataaacgatgagttgtacgcgcagctgaatgaaaaagaccaagaaaagtatcaacaggtcttaaacaacattttaactacttttaagggtgacataaccgaagaagagcacccaatacatagagcattttctactagactattaaaggcactaattcaaggtggtaaatggaataacaaagaaaaaaaggtcataccattaaaaaatgttcaaggcttaggcgttccatttgctgaaaagttatacgatgaaattattgactcctccaacttgttagaatggattaataacgctgatagttcatttacaattgttgcactgtatgaaacgttaaaagatcaaaaagaagggaaaccatttttgaaggatttgagaggagttcagagtaaaatcaccactgatgaaagtaacaaaggctctcagcttttggctaaattgttaaaataa

SEQ ID NO: 13492 - protein, 656 aa, Saccharomyces cerevisiae
MAPLTKKTNGKRSAKEVSHSEKKLAKKPRISIDSSDEESELSKKEDAVSSSSDDDDLDDLSTSDSEAEEEADELDISDDSEEHENENEEKEGKDKSEGGENGNHTEQRKLLKERKMQRKSGTQVQQIKSVWERLRVKTPPLPKQIREKLSNEIWELSKDCISDLVLKHDASRIVQTLVKYSSKDRREQIVDALKGKFYVLATSAYGKYLLVKLLHYGSRSSRQTIINELHGSLRKLMRHREGAYVVEDLFVLYATHEQRQQMIKEFWGSEYAVFRETHKDLTIEKVCESSIEKRNIIARNLIGTITASVEKGSTGFQILHAAMREYVKIANEKEISEMIELLHEQFAELVHTPEGSDVACTLVARANAKERKLILKALKNHAEKLIKNEYGNIVFITILNCVDDTVLVFKTFSPTVKEHLQEFIIDKFGRRPWLYILLGLDGKYFSPIVKNELLRYIELSKATSKKDPLQRRHELLSKFAPMFLSTISKDYSSILTENLGCQFIAEVLINDELYAQLNEKDQEKYQQVLNNILTTFKGDITEEEHPIHRAFSTRLLKALIQGGKWNNKEKKVIPLKNVQGLGVPFAEKLYDEIIDSSNLLEWINNADSSFTIVALYETLKDQKEGKPFLKDLRGVQSKITTDESNKGSQLLAKLLK

SEQ ID NO: 13493 - DNA, 21 bp, Artificial sequence
  primer
atggcggcgaagaaacaagag

SEQ ID NO: 13494 - DNA, 21 bp, Artificial sequence
  primer
tcattcgaacaagaagtgggc

SEQ ID NO: 13495 - protein, 303 aa, Artificial sequence
  consensus sequence
  Variant (2)..(9): Xaa in position 2 to 9 is any amino acid
  Variant (10)..(13): Xaa in position 10 to 13 is any or no amino acid
  Variant (15)..(17): Xaa in position 15 to 17 is any amino acid
  Variant (19)..(20): Xaa in position 19 to 20 is any amino acid
  Variant (22)..(47): Xaa in position 22 to 47 is any amino acid
  Variant (48)..(73): Xaa in position 48 to 73 is any or no amino acid
  Variant (75)..(77): Xaa in position 75 to 77 is any amino acid
  Variant (79)..(81): Xaa in position 79 to 81 is any amino acid
  Variant (83)..(88): Xaa in position 83 to 88 is any amino acid
  Variant (91)..(91): Xaa in position 91 is any amino acid
  Variant (94)..(97): Xaa in position 94 to 97 is any amino acid
  Variant (99)..(99): Xaa in position 99 is any amino acid
  Variant (104)..(105): Xaa in position 104 to 105 is any amino acid
  Variant (108)..(108): Xaa in position 108 is any amino acid
  Variant (111)..(115): Xaa in position 111 to 115 is any amino acid
  Variant (116)..(117): Xaa in position 116 to 117 is any or no amino acid
  Variant (119)..(120): Xaa in position 119 to 120 is any amino acid
  Variant (124)..(126): Xaa in position 124 to 126 is any amino acid
  Variant (128)..(130): Xaa in position 128 to 130 is any amino acid
  Variant (132)..(132): Xaa in position 132 is any amino acid
  Variant (136)..(136): Xaa in position 136 is any amino acid
  Variant (139)..(139): Xaa in position 139 is any amino acid
  Variant (141)..(142): Xaa in position 141 to 142 is any amino acid
  Variant (144)..(145): Xaa in position 144 to 145 is any amino acid
  Variant (149)..(149): Xaa in position 149 is any amino acid
  Variant (152)..(152): Xaa in position 152 is any amino acid
  Variant (155)..(161): Xaa in position 155 to 161 is any amino acid
  Variant (163)..(167): Xaa in position 163 to 167 is any amino acid
  Variant (169)..(171): Xaa in position 169 to 171 is any amino acid
  Variant (173)..(179): Xaa in position 173 to 179 is any amino acid
  Variant (181)..(184): Xaa in position 181 to 184 is any amino acid
  Variant (185)..(186): Xaa in position 185 to 186 is any or no amino acid
  Variant (188)..(188): Xaa in position 188 is any amino acid
  Variant (191)..(192): Xaa in position 191 to 192 is any amino acid
  Variant (195)..(200): Xaa in position 195 to 200 is any amino acid
  Variant (202)..(203): Xaa in position 202 to 203 is any amino acid
  Variant (205)..(205): Xaa in position 205 is any amino acid
  Variant (207)..(210): Xaa in position 207 to 210 is any amino acid
  Variant (212)..(212): Xaa in position 212 is any amino acid
  Variant (215)..(216): Xaa in position 215 to 216 is any amino acid
  Variant (219)..(221): Xaa in position 219 to 221 is any amino acid
  Variant (223)..(238): Xaa in position 223 to 238 is any amino acid
  Variant (239)..(239): Xaa in position 239 is any or no amino acid
  Variant (241)..(244): Xaa in position 241 to 244 is any amino acid
  Variant (246)..(248): Xaa in position 246 to 248 is any amino acid
  Variant (250)..(273): Xaa in position 250 to 273 is any amino acid
  Variant (274)..(275): Xaa in position 274 to 275 is any or no amino acid
  Variant (277)..(286): Xaa in position 277 to 286 is any amino acid
  Variant (290)..(296): Xaa in position 290 to 296 is any amino acid
  Variant (298)..(301): Xaa in position 298 to 301 is any amino acid
KXXXXXXXXXXXXSXXXKXXKXXXXXXXXXXXXXXXXXXXXXXXXXXXXXXXXXXXXXXXXXXXXXXXXXXXXKXXXRXXXKXXXXXXKKXRKXXXXLXQELAXXWEXMRXXXXXXXKXXRSKXXXEXXXKXKGKXPEXAXXHXXSRVXQTXVKXXXXXXXDXXXXXLXXXFXXXXXXXYXXXXXXKXLDXXSKXXXXXXIXXLXGXXXXLXRHXXGSXXXEXXXXXXXXXXXXXXXXXEXXXXEXXXFXXXXXXXXXXXXXXXXXXXXXXXXXXRXXXXXXXXXXEKGXXXXXXXHXXXXEY

SEQ ID NO: 13496 - protein, 38 aa, Artificial sequence
  protein pattern
  Variant (4)..(4): Xaa in position 4 is Ile or Val
  Variant (7)..(7): Xaa in position 7 is Ile or Leu
  Variant (9)..(9): Xaa in position 9 is Asn, Ser or Val
  Variant (10)..(10): Xaa in position 10 is Asn or Ser
  Variant (12)..(12): Xaa in position 12 is any amino acid
  Variant (13)..(13): Xaa in position 13 is Gly or Ser
  Variant (17)..(17): Xaa in position 17 is Leu or Val
  Variant (19)..(19): Xaa in position 19 is Ala or Thr
  Variant (20)..(20): Xaa in position 20 is Cys or Val
  Variant (21)..(21): Xaa in position 21 is Leu or Val
  Variant (23)..(23): Xaa in position 23 is Phe or Tyr
  Variant (24)..(24): Xaa in position 24 is Cys or Gly
  Variant (25)..(25): Xaa in position 25 is Ser or Thr
  Variant (26)..(26): Xaa in position 26 is Pro or Gln
  Variant (27)..(27): Xaa in position 27 is Ala, Glu or Thr
  Variant (28)..(28): Xaa in position 28 is Glu or Gln
  Variant (29)..(29): Xaa in position 29 is any amino acid
  Variant (31)..(33): Xaa in position 31 to 33 is any amino acid
  Variant (34)..(34): Xaa in position 34 is Ala, Asp, Glu or Gly
  Variant (35)..(35): Xaa in position 35 is Glu or Asn
  Variant (36)..(36): Xaa in position 36 is Phe or Leu
  Variant (37)..(37): Xaa in position 37 is any amino acid
  Variant (38)..(38): Xaa in position 38 is Pro or Val
KGKXPEXAXXHXXSRVXQXXXKXXXXXXXDXXXXXXXX

SEQ ID NO: 13497 - protein, 33 aa, Artificial sequence
  protein pattern
  Variant (2)..(2): Xaa in position 2 is any amino acid
  Variant (3)..(3): Xaa in position 3 is any or no amino acid
  Variant (5)..(5): Xaa in position 5 is any or no amino acid
  Variant (7)..(8): Xaa in position 7 to 8 is any amino acid
  Variant (9)..(9): Xaa in position 9 is Phe or Tyr
  Variant (10)..(10): Xaa in position 10 is Ala, Asn or Thr
  Variant (12)..(12): Xaa in position 12 is any amino acid
  Variant (17)..(17): Xaa in position 17 is Gln, Arg or Ser
  Variant (18)..(18): Xaa in position 18 is Ile or Leu
  Variant (21)..(21): Xaa in position 21 is Lys or Arg
  Variant (24)..(24): Xaa in position 24 is any amino acid
  Variant (25)..(25): Xaa in position 25 is Lys or Arg
  Variant (26)..(26): Xaa in position 26 is any amino acid
  Variant (27)..(27): Xaa in position 27 is Ile or Val
  Variant (28)..(28): Xaa in position 28 is Ala, Gly, Ser or Val
  Variant (30)..(30): Xaa in position 30 is Glu or Thr
  Variant (31)..(31): Xaa in position 31 is Asp or Glu
KXXRXKXXXXLXQELAXXWEXMRXXXXXKXXRS

SEQ ID NO: 13498 - protein, 43 aa, Artificial sequence
  protein pattern
  Variant (2)..(2): Xaa in position 2 is Ala or Gly
  Variant (3)..(3): Xaa in position 3 is any amino acid
  Variant (4)..(4): Xaa in position 4 is His or Tyr
  Variant (5)..(5): Xaa in position 5 is Phe or Leu
  Variant (6)..(6): Xaa in position 6 is Ile, Leu or Val
  Variant (7)..(7): Xaa in position 7 is any amino acid
  Variant (9)..(9): Xaa in position 9 is Leu or Met
  Variant (11)..(11): Xaa in position 11 is Asp or His
  Variant (12)..(12): Xaa in position 12 is any amino acid
  Variant (13)..(13): Xaa in position 13 is Ala or Gly
  Variant (15)..(16): Xaa in position 15 to 16 is any amino acid
  Variant (17)..(18): Xaa in position 17 to 18 is any or no amino acid
  Variant (20)..(21): Xaa in position 20 to 21 is any amino acid
  Variant (22)..(23): Xaa in position 22 to 23 is any or no amino acid
  Variant (25)..(25): Xaa in position 25 is any amino acid
  Variant (26)..(26): Xaa in position 26 is Glu, Pro or Ser
  Variant (28)..(28): Xaa in position 28 is His or Arg
  Variant (30)..(30): Xaa in position 30 is any amino acid
  Variant (31)..(31): Xaa in position 31 is Ala, Leu or Val
  Variant (32)..(33): Xaa in position 32 to 33 is any amino acid
  Variant (35)..(35): Xaa in position 35 is Leu or Met
  Variant (38)..(39): Xaa in position 38 to 39 is any amino acid
  Variant (41)..(41): Xaa in position 41 is Ala or Ser
  Variant (42)..(42): Xaa in position 42 is any amino acid
  Variant (43)..(43): Xaa in position 43 is Gly or Val
YXXXXXXKXLXXXSXXXXQXXXXIXXLXGXXXXLXRHXXGXXX

SEQ ID NO: 13499 - protein, 21 aa, Artificial sequence
  protein pattern
  Variant (2)..(5): Xaa in position 2 to 5 is any or no amino acid
  Variant (9)..(9): Xaa in position 9 is any amino acid
  Variant (10)..(10): Xaa in position 10 is Thr or Val
  Variant (11)..(11): Xaa in position 11 is Asp, Gly or Ser
  Variant (12)..(12): Xaa in position 12 is any amino acid
  Variant (13)..(13): Xaa in position 13 is Gln, Ser or Thr
  Variant (14)..(14): Xaa in position 14 is Ile or Val
  Variant (15)..(15): Xaa in position 15 is any amino acid
  Variant (17)..(17): Xaa in position 17 is any amino acid
  Variant (18)..(18): Xaa in position 18 is Ala, Leu or Val
  Variant (19)..(19): Xaa in position 19 is Leu or Met
  Variant (20)..(20): Xaa in position 20 is any amino acid
IXXXXEKGXXXXXXXHXXXXE

SEQ ID NO: 13500 - protein, 26 aa, Artificial sequence
  protein pattern
  Variant (2)..(3): Xaa in position 2 to 3 is any amino acid
  Variant (4)..(5): Xaa in position 4 to 5 is any or no amino acid
  Variant (7)..(14): Xaa in position 7 to 14 is any amino acid
  Variant (15)..(16): Xaa in position 15 to 16 is any or no amino acid
  Variant (18)..(18): Xaa in position 18 is Phe or Leu
  Variant (19)..(19): Xaa in position 19 is Trp or Tyr
  Variant (20)..(20): Xaa in position 20 is Gly or Ser
  Variant (21)..(21): Xaa in position 21 is Ala, Pro, Ser or Thr
  Variant (23)..(25): Xaa in position 23 to 25 is any amino acid
LXXXXAXXXXXXXXXXEXXXXEXXXF

SEQ ID NO: 13501 - DNA, 636 bp, Oryza sativa
  CDS (1)..(636)
atggtttcgcttctcactggcagtttgaccctgtcaggggcagcaattgttaccttcttttacagtcttggggaacatgggcttcagactgcattactgtactacctgaaggcacagtttggttacagcaaagatgagttcgctaatcttctgttaattgctggtgctgcaggaatgctgtcacagctgactgtaatgccggtcttggctcgatttgttggcgaggatatactgcttattataggactcctaggaggatgtactcatgttttcctgtatggcattgcatggtcatattgggtaccatatttatctgcggtgtttataattctgagtgcttttgttcacccttctataagaaccaatgtatcgaagagtgttggatcaaatgagcagggaattgctcaaggctgtatatcgggcataagctcgtttgccagcatattagctccactaatttttacccctctaacagcatgggtcctttcagaaacagcgccattcaaattcaaaggtttcagtatcatgtgtgctggcttttgtacgctcattgccttcattatcagcatgaggatgcgagcagggcaatctggtgcaagtgagatgttggccattgtgcagcatgagcaagcatga

SEQ ID NO: 13502 - protein, 211 aa, Oryza sativa
MVSLLTGSLTLSGAAIVTFFYSLGEHGLQTALLYYLKAQFGYSKDEFANLLLIAGAAGMLSQLTVMPVLARFVGEDILLIIGLLGGCTHVFLYGIAWSYWVPYLSAVFIILSAFVHPSIRTNVSKSVGSNEQGIAQGCISGISSFASILAPLIFTPLTAWVLSETAPFKFKGFSIMCAGFCTLIAFIISMRMRAGQSGASEMLAIVQHEQA

SEQ ID NO: 13503 - DNA, 960 bp, Zea mays
  CDS (1)..(960)
atggtctgcgaaggcaccatgatgaccctctcgcttgcctacgtggccgacagggtgccggagacgaggcgcgcggcggccttcggcgtcttctccggcgtctgcagcgccggcttcgtcggcggcaccgtggcagcccgcttcctccccgtctcatccacgtttcaggtctcagcggtggcagccgtcgcgacggccgtctacatgaaggccttcctccaggagacggacggcggagcctccgtatcctcctcttcctcctcctcctccggcagcggcagcgacgaggaggcggcctgccgccggccgctctgcctcccctcctccagcagtagcgaggaggcggcgtcgctgccaaggctcccgccacttcggaaggcgccgtcgctgtcggagattgcagccgctcttaccagcagctcgaccttctgctgtgcggccgtcgtcacgtttttccacggcctcggtgagacgggcctactgagcgcactactgtacttcctcaaggcgaaattccactacagcaagaaccagtatgccaatctgctacttatcatcggcatcacaggaagcttctcgcagctaactgtgatgccactcctagtgcgaaagctaggtgagcagaagctacttgtcatatcactagtggcgagctgcgggcaggcattcctatacagcatctcatggtcgtcctgggtcccatatcttgccgcaagcagtgtaatattaagcatgctggtcacaccttgtataagaagcatcgtatcaaagaaagtgggaccttttgaacagggaatggtccaagggtgcatgactggaataagctcgaccgcaagtgtcgtatctcctctaatctttactcctctcacagcctggtgtctatcagaagctacgcctttctacttaaaaggtttcagcgttgcctgtgctgggtttgcaacgcgttggcgacgagcataa

SEQ ID NO: 13504 - protein, 319 aa, Zea mays
MVCEGTMMTLSLAYVADRVPETRRAAAFGVFSGVCSAGFVGGTVAARFLPVSSTFQVSAVAAVATAVYMKAFLQETDGGASVSSSSSSSSGSGSDEEAACRRPLCLPSSSSSEEAASLPRLPPLRKAPSLSEIAAALTSSSTFCCAAVVTFFHGLGETGLLSALLYFLKAKFHYSKNQYANLLLIIGITGSFSQLTVMPLLVRKLGEQKLLVISLVASCGQAFLYSISWSSWVPYLAASSVILSMLVTPCIRSIVSKKVGPFEQGMVQGCMTGISSTASVVSPLIFTPLTAWCLSEATPFYLKGFSVACAGFATRWRRA

SEQ ID NO: 13505 - DNA, 1347 bp, Zea mays
  CDS (1)..(1347)
atgaaggacttggcggggctggggcacctgttcgtggtgtccttcctgttccacttcgcctccttcatggtgatcccggcggtcaccgacgtcaccatggaggccgcctgccccggccgcgacgagtgctccgtcgccatctacctcagcggcttccagaacgcagtcaccgggatgggggcgctcgtcgtcacccccatcgtcgggaacctgtcggacaggtacggccggaaggcgctcatgacgctgccggtcaccgtagccatcgcgccgctgtttatactggcatgcggccgctcggaggtgtacttctacgtgtactacgtggccaagatcatcgccggggtcttctgcgagggcaccatgcattgtctctgccttgcctacgtggctgaccacgtgggccccaggcgtcgcgcggcggcgttcggcctcctctccggcgtgtcggcagccgggttcgtgtcggggaccttgaccgcgcgcttcctcccgaccgcatccaccttccaggtcgccgccgccgtggccgtggcggcagcgctctacctcagggccttcctccccgacgctggcggcagcgtctcctgcgccgacgaagcctgcgaccctctcctccaggattcgtcctgcgcctcttccacatcatcctccgatgaagagctctcgcctcggctgccgccgcataagggaggcctgccgtctctgtccgacatggtcgcgcttctcactggcagtctggccttgtcgggggcagcaaccatcactttcttctacagtctaggtgaacatgggcttcagactgcattgctgtactacttgaaggcacaatttggttacaacaaagatgagtttgctaatctacttctaattgtcggtgctgccgggatgctatcacagctcactgtaatgcctatcttggctccgattctgggtgaagagatgctgcttattgttgggcttctaggtggatgtactcatgttttcttgtatggcattgcatggtcatattgggtaccttattttgctgcggcatttgtaattttgagtgcttttgttcacccatctataagaaccaatgtatcaaaaaatgtcggatcaaatgagcagggaattgctcaaggatgtatatctgggattagttcttttgcaagcatattaggtcccctcatctttactcccttaaccgcgtggtttctttctgaaacagagcccttcaacttcaaaggtttcagtattttgtgtgctggcttctgcacccttattgcgtttgttatcagtttgaggatgcctggtgctcgatctagtacgtgcaagaagaccgcagttcagcatgagcaagcatga

SEQ ID NO: 13506 - protein, 448 aa, Zea mays
MKDLAGLGHLFVVSFLFHFASFMVIPAVTDVTMEAACPGRDECSVAIYLSGFQNAVTGMGALVVTPIVGNLSDRYGRKALMTLPVTVAIAPLFILACGRSEVYFYVYYVAKIIAGVFCEGTMHCLCLAYVADHVGPRRRAAAFGLLSGVSAAGFVSGTLTARFLPTASTFQVAAAVAVAAALYLRAFLPDAGGSVSCADEACDPLLQDSSCASSTSSSDEELSPRLPPHKGGLPSLSDMVALLTGSLALSGAATITFFYSLGEHGLQTALLYYLKAQFGYNKDEFANLLLIVGAAGMLSQLTVMPILAPILGEEMLLIVGLLGGCTHVFLYGIAWSYWVPYFAAAFVILSAFVHPSIRTNVSKNVGSNEQGIAQGCISGISSFASILGPLIFTPLTAWFLSETEPFNFKGFSILCAGFCTLIAFVISLRMPGARSSTCKKTAVQHEQA

SEQ ID NO: 13507 - DNA, 984 bp, Glycine max
  CDS (1)..(984)
atggcagtgtttcttcataacttctccatgttcatggtggtaccagccatcaccgatgtcacaatggctgctctttgtcccggacaagatgaatgctcacttgccatctacatcactggttttcaacaagcgatgataggactgggcacgcttgtgatgatgccactcttgggtaatctttcggataagtatgggaggaaggccatcctcacagtccctatgatcctcaccatcattcccgtaggcatattagcttacagcaggacgaaaaaattcttctacgtctactatgtgtttaagatacttatttcaatgatttgcgaaggaagcgttccttgcctcggtctagcttacgtggcagataacattccagaaagtggacgaagcactgcgtttggaattctttcgggaattgcgtctgccgcgtttgtgtgtggcaccttatcggctcgatttttatctactgccttgacttttcaatattttttaaaggctcaatttcactttgataagaatcaatttgctgacttgatggtcatttctggaatagcaggaactgtgtcacagcttcttcttatgcctattttggctcctattttgggcgaggcaagactactctcagttggactattctttcattgtatacatatgttcctttacagcatagcatggtcctccttggttccttatgcttccgccatgttctcaattttatttgtcttctcacacccttgtatacgaagtattgtatctaaacaagctggtccccatgagcagggaaaggctcaaggttgcatttcaggcatatgttcaattgcacatattgtttctcccttggttttctctccattaacagctctattcctttctgaaagagcaccttttgattttcctggatttagtataatgtgcattggatttgcttcgatgatatctcttgttcaaagtatgatgctcagagtggttcctcccatattgaattag

SEQ ID NO: 13508 - protein, 327 aa, Glycine max
MAVFLHNFSMFMVVPAITDVTMAALCPGQDECSLAIYITGFQQAMIGLGTLVMMPLLGNLSDKYGRKAILTVPMILTIIPVGILAYSRTKKFFYVYYVFKILISMICEGSVPCLGLAYVADNIPESGRSTAFGILSGIASAAFVCGTLSARFLSTALTFQYFLKAQFHFDKNQFADLMVISGIAGTVSQLLLMPILAPILGEARLLSVGLFFHCIHMFLYSIAWSSLVPYASAMFSILFVFSHPCIRSIVSKQAGPHEQGKAQGCISGICSIAHIVSPLVFSPLTALFLSERAPFDFPGFSIMCIGFASMISLVQSMMLRVVPPILN

SEQ ID NO: 13509 - DNA, 633 bp, Zea mays
  CDS (1)..(633)
atggtcgcgcttctcactggcagtctggccttgtcaggggcagcaaccatcactttcttctacagtctaggtgaacatgggcttcagactgcattgctgtactacttgaaggcacaatttggttacaacaaagatgagtttgctaatctacttctaattgtcggtgctgccgggatgctatcacagctcactgtaatgcctatcttggctccgattctgggtgaagagatgctgcttattgttgggcttctaggtggatgtactcatgttttcttgtatggcattgcatggtcatattgggtaccttattttgctgcggcatttgtaattttgagtgcttttgttcacccatctataagaaccaatgtatcaaaaaatgtcggatcaaatgagcagggaattgctcaaggatgtatatctgggattagttcttttgcaagcatattaggtcccctcatctttactcccttaaccgcgtggtttctttctgaaacagagcccttcaacttcaaaggtttcagtattttgtgtgctggcttctgcacccttattgcgtttgttatcagtttgaggatgcctggtgctcgatctagtacgtgcaagaagaccgcagttcagcatgagcaagcatga

SEQ ID NO: 13510 - protein, 210 aa, Zea mays
MVALLTGSLALSGAATITFFYSLGEHGLQTALLYYLKAQFGYNKDEFANLLLIVGAAGMLSQLTVMPILAPILGEEMLLIVGLLGGCTHVFLYGIAWSYWVPYFAAAFVILSAFVHPSIRTNVSKNVGSNEQGIAQGCISGISSFASILGPLIFTPLTAWFLSETEPFNFKGFSILCAGFCTLIAFVISLRMPGARSSTCKKTAVQHEQA

SEQ ID NO: 13511 - DNA, 1930 bp, Zea mays
  CDS (69)..(1415)
aaacgcatgcaatctatcaccgcctcagctcgtgctctctgctctgcactatctactaccaaagaaagatgaaggacttggcggggctggggcacctgttcgtggtgtccttcctgttccacttcgcctccttcatggtgatcccggcggtcaccgacgtcaccatggaggccgcctgccccggccgcgacgagtgctccgtcgccatctacctcagcggcttccagaacgcagtcaccgggatgggggcgctcgtcgtcacccccatcgtcgggaacctgtcggacaggtacggccggaaggcgctcatgacgctgccggtcaccgtagccatcgcgccgctgtttatactggcatgcggccgctcggaggtgtacttctacgtgtactacgtggccaagatcatcgccggggtcttctgcgagggcaccatgcattgtctctgccttgcctacgtggctgaccacgtgggccccaggcgtcgcgcggcggcgttcggcctcctctccggcgtgtcggcagccgggttcgtgtcggggaccttgaccgcgcgcttcctcccgaccgcatccaccttccaggtcgccgccgccgtggccgtggcggcagcgctctacctcagggccttcctccccgacgctggcggcagcgtctcctgcgccgacgaagcctgcgaccctctcctccaggattcgtcctgcgcctcttccacatcatcctccgatgaagagctctcgcctcggctgccgccgcataagagaggcctgccgtctctgtccgacatggtcgcgcttctcactggcagtctggccttgtcaggggcagcaaccatcactttcttctacagtctaggtgaacatgggcttcagactgcattgctgtactacttgaaggcacaatttggttacaacaaagatgagtttgctaatctacttctaattgtcggtgctgccgggatgctatcacagctcactgtaatgcctatcttggctccgattctgggtgaagagatgctgcttattgttgggcttctaggtggatgtactcatgttttcttgtatggcattgcatggtcatattgggtaccttattttgctgcggcatttgtaattttgagtgcttttgttcacccatctataagaaccaatgtatcaaaaaatgtcggatcaaatgagcagggaattgctcaaggatgtatatctgggattagttcttttgcaagcatattaggtcccctcatctttactcccttaaccgcgtggtttctttctgaaacagagcccttcaacttcaaaggtttcagtattttgtgtgctggcttctgcacccttattgcgtttgttatcagtttgaggatgcctggtgctcgatctagtacgtgcaagaagaccgcagttcagcatgagcaagcatgacagaatatagtatagtgccacctactcttttttattctgcccaagtgcatagacagaaaaggacaggatgggaaaaaagtgacttcgagaaaaaggaaaaggtatagtgacaggaagtgctggagaaacatgctcgatttcgtatgttcaaagagaaggggttatcctatgcaactagacatttttatccttcactggaatgttgagcattgcagaattgacaattgctatgccatcgagcaagttcagtcgtttgtaaatatgctcctagtaggaagtaactgaattattcgcaaaaaaaggaagtggctgaactattgtgccttttgcacgatgcttcgtttcaaggattagccatgaattaacgtttatgtactctaagaggaggtgatttgcatctcaactaaacatttgagtatgcagttaagttgatttgtccagttaaatatgtagaacatgttcctccttcataggtcatccttttgagttctactttgcgaaaaaaaaaaaaaaaa

SEQ ID NO: 13512 - protein, 448 aa, Zea mays
MKDLAGLGHLFVVSFLFHFASFMVIPAVTDVTMEAACPGRDECSVAIYLSGFQNAVTGMGALVVTPIVGNLSDRYGRKALMTLPVTVAIAPLFILACGRSEVYFYVYYVAKIIAGVFCEGTMHCLCLAYVADHVGPRRRAAAFGLLSGVSAAGFVSGTLTARFLPTASTFQVAAAVAVAAALYLRAFLPDAGGSVSCADEACDPLLQDSSCASSTSSSDEELSPRLPPHKRGLPSLSDMVALLTGSLALSGAATITFFYSLGEHGLQTALLYYLKAQFGYNKDEFANLLLIVGAAGMLSQLTVMPILAPILGEEMLLIVGLLGGCTHVFLYGIAWSYWVPYFAAAFVILSAFVHPSIRTNVSKNVGSNEQGIAQGCISGISSFASILGPLIFTPLTAWFLSETEPFNFKGFSILCAGFCTLIAFVISLRMPGARSSTCKKTAVQHEQA

SEQ ID NO: 13513 - DNA, 1347 bp, Zea mays
  CDS (1)..(1347)
atgaaggacttggcggggctggcgcacctgttcgtggtgtccttcctgttccacttcgcctccttcatggtgatcccggcggtcaccgacgtcaccatggaggccgcctgccccggccgcgacgagtgctccgtcgccatctacctcagcggcttccagaacgcagtcaccgggatgggggcgctcgtcgtcacccccatcgtcgggaacctgtcggacaggtacggccggaaggcgctcatgacgctgccggtcaccgtagccatcgcgccgctgtttatactggcatgcggccgctcggaggtgtacttctacgtgtactacgtggccaagatcatcgccggggtcttctgcgagggcaccatgcattgtctctgccttgcctacgtggctgaccacgtgggccccaggcgtcgcgcggcggcgttcggcctcctctccggcgtgtcggcagccgggttcgtgtcggggaccttgaccgcgcgcttcctcccgaccgcatccaccttccaggtcgccgccgccgtggccgtggcggcagcgctctacctcagggccttcctccccgacgctggcggcagcgtctcctgcgccgacgaagcctgcgaccctctcctccaggattcgtcctgcgcctcttccacatcatcctccgatgaagagctctcgcctcggctgccgccgcataagagaggcctgccgtctctgtccgacatggtcgcgcttctcactggcagtctggccttgtcaggggcagcaaccatcactttcttctacagtctaggtgaacatgggcttcagactgcattgctgtactacttgaaggcacaatttggttacaacaaagatgagtttgctaatctacttctaattgtcggtgctgccgggatgctatcacagctcactgtaatgcctatcttggctccgattctgggtgaagagatgctgcttattgttgggcttctaggtggatgtactcatgttttcttgtatggcattgcatggtcatattgggtaccttattttgctgcggcatttgtaattttgagtgcttttgttcacccatctataagaaccaatgtatcaaaaaatgtcggatcaaatgagcagggaattgctcaaggatgtatatctgggattagttcttttgcaagcatattaggtcccctcatctttactcccttaaccgcgtggtttctttctgaaacagagcccttcaacttcaaaggtttcagtattttgtgtgctggcttctgcacccttattgcgtttgttatcagtttgaggatgcctggtgctcgatctagtacgtgcaagaagaccgcagttcagcatgagcaagcatga

SEQ ID NO: 13514 - protein, 448 aa, Zea mays
MKDLAGLAHLFVVSFLFHFASFMVIPAVTDVTMEAACPGRDECSVAIYLSGFQNAVTGMGALVVTPIVGNLSDRYGRKALMTLPVTVAIAPLFILACGRSEVYFYVYYVAKIIAGVFCEGTMHCLCLAYVADHVGPRRRAAAFGLLSGVSAAGFVSGTLTARFLPTASTFQVAAAVAVAAALYLRAFLPDAGGSVSCADEACDPLLQDSSCASSTSSSDEELSPRLPPHKRGLPSLSDMVALLTGSLALSGAATITFFYSLGEHGLQTALLYYLKAQFGYNKDEFANLLLIVGAAGMLSQLTVMPILAPILGEEMLLIVGLLGGCTHVFLYGIAWSYWVPYFAAAFVILSAFVHPSIRTNVSKNVGSNEQGIAQGCISGISSFASILGPLIFTPLTAWFLSETEPFNFKGFSILCAGFCTLIAFVISLRMPGARSSTCKKTAVQHEQA

SEQ ID NO: 13515 - DNA, 789 bp, Zea mays
  CDS (1)..(789)
atgaaggccttcctccaggagacggacggcggagcctcctcttcctcctcctcctccggcagcgacgaggaagcggcctgccgccggccgctctgcctcccctcctcctccagcagtagcgaggaggaggcgtcgccgccaaggctcccgccacttcgcaaggcgccgtcgctgtccgagatagcagccgctcttaccagcagctcgaccttctgcggtgcggccgtcgtcacgtttttccacggcctcggcgagacgggcctactgagcgcactactgtacttcctcaaggcgaaattccactacagcaagaaccagtatgccaatctgctacttatcatcggcatcacaggaagcttctcgcagctaactgtgatgccactcctagtgccaaagctaggtgagcagaagctacttgtcatatcactagtggcgagctgcgggcaggcattcctatacagcatctcatggtcgtcctgggtcccatatcttgccgcaagcagtgtaatattaagcatgctggtcacaccttgtataagaagcatcgtatcaaagaaagtgggaccttttgaacagggaatggtccaagggtgcatgactggaataagctcgaccgcaagtgtcgtatctcctctaatctttactcctctcacagcctggtgtctatcagaagctacgcctttctacttaaaaggtttcagcgttgcctgtgctgggtttgcaacgctggtagcgttggcgacgagcataagtatgaggccagctgaagtgcagccagataggaaatag

SEQ ID NO: 13516 - protein, 262 aa, Zea mays
MKAFLQETDGGASSSSSSSGSDEEAACRRPLCLPSSSSSSEEEASPPRLPPLRKAPSLSEIAAALTSSSTFCGAAVVTFFHGLGETGLLSALLYFLKAKFHYSKNQYANLLLIIGITGSFSQLTVMPLLVPKLGEQKLLVISLVASCGQAFLYSISWSSWVPYLAASSVILSMLVTPCIRSIVSKKVGPFEQGMVQGCMTGISSTASVVSPLIFTPLTAWCLSEATPFYLKGFSVACAGFATLVALATSISMRPAEVQPDRK

SEQ ID NO: 13517 - DNA, 849 bp, Arabidopsis thaliana
  CDS (1)..(849)
atgtgcattcgtttgcgccaatctttctgctcgatttttatctattggcgtgacatttcagcagcaatgggaattttatcaacgttgtatatgaggcttttcctaccggattcgatccgagacaatagcctcggtgctcccattgttataaatgagaaattgagttctcctttacttgaagattgtccaggacatagaaataggatatttagagcaattcgtttggtacatgaaatggcttctctaatgagaagtagcgttccactttttcaagttgcgatggtatcattcttcagtagtcttgctgaggcaggtctacatgcttcatctatgtactatttaaaggccaagtttcactttaacaaagaccagtttgcagacttgatgatcatagttggcgcatctggatctatttcacagttgctctttatgcccgttctagttcctgctttaaaagaggagagactgctctcaattggtcttttctttggttgtgcccatatgttcctactatgtgtggcatggtcctcatgggttccatatatggcagccatatttgcacttttctcaatatttccttcatcgtgtatgcgaagcattgtctccaaacaagtagcatcatatgaacaggggaaagcccaaggaattatttcaagcatatgttcccttgcaaatgtcatttccccgctagcattttcacctctaacagattggtttctgtctgaaagagccccatttaatttcccagggttcagtataatgtgtgcgggatttgccatgactatagctttcatccaaagcctgatgatcagagcagcaacaccaatatcagttatgggatctccataa

SEQ ID NO: 13518 - protein, 282 aa, Arabidopsis thaliana
MCIRLRQSFCSIFIYWRDISAAMGILSTLYMRLFLPDSIRDNSLGAPIVINEKLSSPLLEDCPGHRNRIFRAIRLVHEMASLMRSSVPLFQVAMVSFFSSLAEAGLHASSMYYLKAKFHFNKDQFADLMIIVGASGSISQLLFMPVLVPALKEERLLSIGLFFGCAHMFLLCVAWSSWVPYMAAIFALFSIFPSSCMRSIVSKQVASYEQGKAQGIISSICSLANVISPLAFSPLTDWFLSERAPFNFPGFSIMCAGFAMTIAFIQSLMIRAATPISVMGSP

SEQ ID NO: 13519 - DNA, 1320 bp, Vitis vinifera
  CDS (1)..(1320)
atggagaagttggcaggcctgacacacctcttcgtgacggttttgctggggagtttctccgccttcatagtgattccggccattactgacgtcaccatgtctgcgctctgccccggtaaagacgaatgctctctcgccatttacctctctggtttccagcaggcgattataggactgggaaccgttgtgatgacacctgtaattgggaatttgtctgatgaatatggaaggaaggctctgctcacaattccaatggccctctccatcattcccttggctatattggcatatagcaggactaccacctccttctacgcatactttgtgatcaggactcttactgccatggttggtgaaggcagtataaactgccttgctctcgcatatgtggcagacaacatttcagaaggccaacgagcctcagctttcggagttctatctggggtagcatctgctgcctttgtctgtggaaccctagccgcccgcttcctctccactgcctccacctttcaggttgccacccttgtatcgatgattgcaaccgtttacatgagagttttcctcaaggagactttccccaaaggcgattcttcacaggcattattgaaaaaagaaccgggtatgagtcctgacgatggtaactcatcggagaagatacagacattcaagaaaattccatctgttggagacctgatcagcttgttgaagtgcagggcggcattttcacaggctgcagtcgtcgtcttcttcaacggtcttgcagagggtggcctccaggcctcactgttgtacttcttgaaggctcggtttcacttcaacaaaaaccagtttgcagacataatgctaatcgttggggtcatggggaccatttcacaactgcttttcatgcccttgttggcgcctcgagtatcagaagagaagttgctctctatagggctcttcatgggatgcacaaacatatttctcaacagcatcgcttggtcattctgggtcccatatgccattgctgcgttggctgcttttgcagtatttgctaacccttgtgtacgaagcatcgcatcgaagcaagtaggccccaatgagcagggaaaggctcaaggctgtatatcaggcataagttcctcagcccagataatttctcccttgatctttagtcctctaacagctctattcttatctcaaggagcaccattttattttcctggtttcagcatcatgtgcattggatttgcttcaatgatcgccttcattcagagtactatgataagggctgttcctcctatttcaagtcagccaaccagcaacagcatcgaggcctag

SEQ ID NO: 13520 - protein, 439 aa, Vitis vinifera
MEKLAGLTHLFVTVLLGSFSAFIVIPAITDVTMSALCPGKDECSLAIYLSGFQQAIIGLGTVVMTPVIGNLSDEYGRKALLTIPMALSIIPLAILAYSRTTTSFYAYFVIRTLTAMVGEGSINCLALAYVADNISEGQRASAFGVLSGVASAAFVCGTLAARFLSTASTFQVATLVSMIATVYMRVFLKETFPKGDSSQALLKKEPGMSPDDGNSSEKIQTFKKIPSVGDLISLLKCRAAFSQAAVVVFFNGLAEGGLQASLLYFLKARFHFNKNQFADIMLIVGVMGTISQLLFMPLLAPRVSEEKLLSIGLFMGCTNIFLNSIAWSFWVPYAIAALAAFAVFANPCVRSIASKQVGPNEQGKAQGCISGISSSAQIISPLIFSPLTALFLSQGAPFYFPGFSIMCIGFASMIAFIQSTMIRAVPPISSQPTSNSIEA

SEQ ID NO: 13521 - DNA, 1329 bp, Vitis vinifera
  CDS (1)..(1329)
atggaaaagctttctgggttgagacacctatttatgactgtttttctcttcaatttcgccacgttcatggtgattccggccatcaccgacgtcactatggctgcgctttgtcccggaagagatgagtgctccatcgccatttacctcaccggatttcaacaagtgataataggattgggaaccctggtgatgatgcctctggtgggtaatctgtcggatatgtatgggaggaaggctttgctcacgatcccaatgtgtctcactattatccccttagcgatattagcttggagtagaagcaggaattttttttacgcgtacttcgtgctgaagacgcttacttctatggtttgcgaaggaagcgtacactgcctcaccctggcttatgtggcggataatattccggagattcgacgagcgtcagcatttggagttctttccggcgttggatcatctgcattcgtttgcgggactctctctgctcgttttctcaaaacttcttccacgtttcaggttgcggcgtcggttgcggcggtggcggctgtgtacatgaagctgttccttccggattcggtcataaaggacggcgttttggatcgggcaatcttagagcaaaagccttgtgtcattcatttggatggggaatccgctcaggactcgccagtattcaaatcaatgccatcgctggatgatatgctctccttgttgcagaccagctccacgtttacaaaagccgcaattgtcgctttcttcagcaatcttggggacgttggccttcatacttcgttaatgtactacttaaaggcccgctttcacttcaacaagcaccagtttgcggacttgatgatgatttctgggattgcaggcacaatatcacaactggttcttatgcccatattggctcccaccataggagaggagaagctgctcgcaatagggctcctctttagctgttcacatatgtttctttacagcatcgcctggtccttctgggtcccttatgcagccgctatgttctccattttgattgtttttgcgccaccatgcattcggagcatagcatccaaacaagtcggtcccagtgagcaggggaaggtgcaagggtgcatttcgggcatatcttcctttgctcatctcgtttctcccttggctttcactcctctgactgctctgttcctctctgacggagcaccatttaatttccctggtttcagtatcatgtgcattggatttgcttcgatgatagcattcctgcagagtttaacgataagggcggctcctccgatttcaaataaaaaagttggtaactgcagctacacggaggcctag

SEQ ID NO: 13522 - protein, 442 aa, Vitis vinifera
MEKLSGLRHLFMTVFLFNFATFMVIPAITDVTMAALCPGRDECSIAIYLTGFQQVIIGLGTLVMMPLVGNLSDMYGRKALLTIPMCLTIIPLAILAWSRSRNFFYAYFVLKTLTSMVCEGSVHCLTLAYVADNIPEIRRASAFGVLSGVGSSAFVCGTLSARFLKTSSTFQVAASVAAVAAVYMKLFLPDSVIKDGVLDRAILEQKPCVIHLDGESAQDSPVFKSMPSLDDMLSLLQTSSTFTKAAIVAFFSNLGDVGLHTSLMYYLKARFHFNKHQFADLMMISGIAGTISQLVLMPILAPTIGEEKLLAIGLLFSCSHMFLYSIAWSFWVPYAAAMFSILIVFAPPCIRSIASKQVGPSEQGKVQGCISGISSFAHLVSPLAFTPLTALFLSDGAPFNFPGFSIMCIGFASMIAFLQSLTIRAAPPISNKKVGNCSYTEA

SEQ ID NO: 13523 - DNA, 1278 bp, Populus trichocarpa
  CDS (1)..(1278)
atgtcttgttttatgcagattatagggcttgggacgctggtaacgatgcctttgatagggaacatgtcggacaagtatggtcggaaagctttgcttactgttccaatgagtcttataatagttccctcaggttggggattttcaactttatggttggttagtcgttatttgattgtcaatatatataagctgcttcaatcaaccatattggcctacagcaggaccaggaacttcttctatgcgtattatgtcgtcaggactctcatggccatggtctgtgaaggaagtgtccaatgccttgctctcgcctatgtggcagacaatgttccggagagtcggcgagcctcgacgtttgggattctttcaggcattgcatcgtccgctttcgtatgcggaaacctctccactcgtttcctctccacctcctccaccttccaggtttctgccttagtggcaattgcagctctagtgtacatgaggttttttcttcaggaatccatcatcgatgaacaactctctacgccaatactaacatataaggggaacgggaaaggaaaaggaaaagctaatgctgcatgctttgcacatgaaattccaagcaaaaatgtgcaggtttttaaatcagcaccttccttggaggatatgctctgcttgcttaagagcagtgtgaccctttcgcaagctgctgttgttgcatttttctacagtcttgcggaagttggccttcatgcttcattaatgtactatttgaaggcgcaatttcactttagcaaggatcaatttgctgttttgatggtgatttctgggattgcagggaccgtttcacagttggttattatgcctctattgactcctgctcttggagaagcaaggctgcttgcagtggggctcttttttacctgtgtacatgtgtttctttacagcatagcgtggaccttctgggtaccttatgttgcttccatgttctctcttctgtttgtgttttcacaaccatgtatgcgaagcattgtgtccaagcaagttggatcctgtgagcaggggaaggctcaagggtgcatttctggaataagttcctttgccaatgtcatttctcccttggttttctctcctttaacagctttattcctctctgaaagggcgccgttccccttccctggtttcagtattatgtgcgtcggatttgcatcgatgatagccttcattcagagtctcatgatgaggaccgctcctcccattgcaaatcaaaaggtcgttaattccaactatgtggatgcctag

SEQ ID NO: 13524 - protein, 425 aa, Populus trichocarpa
MSCFMQIIGLGTLVTMPLIGNMSDKYGRKALLTVPMSLIIVPSGWGFSTLWLVSRYLIVNIYKLLQSTILAYSRTRNFFYAYYVVRTLMAMVCEGSVQCLALAYVADNVPESRRASTFGILSGIASSAFVCGNLSTRFLSTSSTFQVSALVAIAALVYMRFFLQESIIDEQLSTPILTYKGNGKGKGKANAACFAHEIPSKNVQVFKSAPSLEDMLCLLKSSVTLSQAAVVAFFYSLAEVGLHASLMYYLKAQFHFSKDQFAVLMVISGIAGTVSQLVIMPLLTPALGEARLLAVGLFFTCVHVFLYSIAWTFWVPYVASMFSLLFVFSQPCMRSIVSKQVGSCEQGKAQGCISGISSFANVISPLVFSPLTALFLSERAPFPFPGFSIMCVGFASMIAFIQSLMMRTAPPIANQKVVNSNYVDA

SEQ ID NO: 13525 - DNA, 1329 bp, Populus trichocarpa
  CDS (1)..(1329)
atggagaagttcacagaattgatccacctctttgtgacagtattcctctccaccttcggtagcttaatggtgcttccggccgtaaccgatgtcaccatggtagcagtttgtccaggtcaagatgagtgctctcttgccatttacctcaccggattccagcaagccagtattggaatgggaacagttgtgatgttgccgcttattgggaatctatcagaccaatatggaaggaaggctctgctcacacttcctatgactctctccattattcctttagttatactggcatatagcaggacaaccggcttcttctatgcctactatgcgctcaggaccctcacagctatgatctgtgaagggagcatcgactgccttgctcttgcttatgtggcagacaacgttttagagagacaaagaacatcagtatttggaattctgtctggcataacaacagccgcgcttgtctgtggaaccttagctgctcgtttcctctccactgctttgacatttcaggttgctgcgttgttgtcaatgcttgccgccgtgtacatgagaatcttcctcgaggaaagtctaccacaaagcgaaaatttgacgcagccaatcttgaagagcggacaggatgatcactgtcaagatgatggtgatttaccaaggaagccaatggtatctaagaagattccatcaattcaggctatcattagcttgctgaagagcagcgtaacattttcgcaagcagcaattgttgcattcttccatagtctttcatatggtggactgcaggcttctatcatgtactacttgaaggctcgttttcacttcagcaaaaaccagtatgctgatctaatgctacttgttggtgtttcaggaatggcatcacagctgcttttcatgcccttgttggcaccacttgtagcagaggaaaaactactggcaatagggcttttagggggcattgcaaatgcactgctttacagtgtagcatgctcagcttgggtcccgtatgccactaccattttttcggtttttgcagttttcatccctccgtgtttacgcagcatcgtgtcgaaacaaatagggcctaacgagcaggggaaggctcaaggatgcatttcaggaataatctccttggcaaacatcatctcccccttaatctatagtcctctgacagctttattcctgtctgaggatgcaccatttaatttccctggcttcatttttgtgtgcattggatttgcaataatgattgcgttctttcagagtcttctgataagggctgctcctcctatttcaagtcacaaaagcagcagcagcagcattctagcctag

SEQ ID NO: 13526 - protein, 442 aa, Populus trichocarpa
MEKFTELIHLFVTVFLSTFGSLMVLPAVTDVTMVAVCPGQDECSLAIYLTGFQQASIGMGTVVMLPLIGNLSDQYGRKALLTLPMTLSIIPLVILAYSRTTGFFYAYYALRTLTAMICEGSIDCLALAYVADNVLERQRTSVFGILSGITTAALVCGTLAARFLSTALTFQVAALLSMLAAVYMRIFLEESLPQSENLTQPILKSGQDDHCQDDGDLPRKPMVSKKIPSIQAIISLLKSSVTFSQAAIVAFFHSLSYGGLQASIMYYLKARFHFSKNQYADLMLLVGVSGMASQLLFMPLLAPLVAEEKLLAIGLLGGIANALLYSVACSAWVPYATTIFSVFAVFIPPCLRSIVSKQIGPNEQGKAQGCISGIISLANIISPLIYSPLTALFLSEDAPFNFPGFIFVCIGFAIMIAFFQSLLIRAAPPISSHKSSSSSILA

SEQ ID NO: 13527 - DNA, 1344 bp, Sorghum bicolor
  CDS (1)..(1344)
atgaaggacttggcggggctggggcacctgttcgtggtgacgttcctgttccacttcgcatccttcatggtgatcccggcggtcaccgacgtcaccatggaggccgtctgccccggccgcgacgagtgctccgtcgccatctacctcaccggcttccagaacgcggtcaccgggctgggggcgctcgtcgtcacccccatcgtcggcaacctgtcggacaggtacggccggaaggcgctcatgacgctgccggtgacggtggccgtcgcgccgctgtttatactggcttgcaaccgctcggaggtgtacttctacgtgtactacgtggccaagatcatcgccgggatcttctgcgagggcaccatgcactgtctctgccttgcctacgtggctgaccacgtgggccccaggcgtcgcgcggcagcgttcggtctcctctccggtgtgtcggcagcggggttcgtgtcggggaccttgaccgcgcgcttcctcccaactgcatccaccttccaggtcgccgccgccgtggccgtggcgtcagcgctctacctcagggccttcctccccgacgcaggcggcgtctcctgcgctgacgaagcctgcgatccgctcctccaggattcgtcctgcacctcgtccgcatcatcctccgatgaagagctctcgcctcggctgccgccgcataagagcgggctgccgtctctatccgacatggtcgcgcttctcactagcagtttggccttgtcaggggcagcagtcgtcactttcttttacagtctaggtgaacatgggcttaatactgcattgctgtactacctgaaggcacaatttggttacagcaaagatgaatttgctaatctgcttctaattgccggtgctgccggaatgctatcacagctcactgtaatgcctatcttggctccgattctgggtgaagaggtgctgcttattgttgggctgctaggtggatgtactcatgttttcttgtatggcattgcatggtcatactgggtaccttattttgctgcagcatttgtaattttgagtgcttttgttcacccatctataaggaccaatgtatcaaaaaatgttggatcaaatgagcagggaattgctcaaggatgtatatctgggattagttcttttggaagtatactaggtcccctcatatttactcctttaactgcatggtttctttctgaaacagggcccttcgacttcaaaggtttcagtattttgtgtgctggcttttgcaccctcattgcgtttattatcagtttgaggatgcgtggagctcaatctagtacgtgcaagaagaccacggttcagcatgagcaagcataa

SEQ ID NO: 13528 - protein, 447 aa, Sorghum bicolor
MKDLAGLGHLFVVTFLFHFASFMVIPAVTDVTMEAVCPGRDECSVAIYLTGFQNAVTGLGALVVTPIVGNLSDRYGRKALMTLPVTVAVAPLFILACNRSEVYFYVYYVAKIIAGIFCEGTMHCLCLAYVADHVGPRRRAAAFGLLSGVSAAGFVSGTLTARFLPTASTFQVAAAVAVASALYLRAFLPDAGGVSCADEACDPLLQDSSCTSSASSSDEELSPRLPPHKSGLPSLSDMVALLTSSLALSGAAVVTFFYSLGEHGLNTALLYYLKAQFGYSKDEFANLLLIAGAAGMLSQLTVMPILAPILGEEVLLIVGLLGGCTHVFLYGIAWSYWVPYFAAAFVILSAFVHPSIRTNVSKNVGSNEQGIAQGCISGISSFGSILGPLIFTPLTAWFLSETGPFDFKGFSILCAGFCTLIAFIISLRMRGAQSSTCKKTTVQHEQA

SEQ ID NO: 13529 - DNA, 1344 bp, Sorghum bicolor
  CDS (1)..(1344)
atgacgaaggtggaggagctggcggggctggggcacctgctggtgttcgccttcctcttctgcttctccgccttcatggtggcccccgtgatgaccgacgtcaccatggcggcgctctgccccggccgcgacgagtgctccctcgccatctacctcactggcctccagcaagcggttactggtctgggcgcgctggtgctgacgccggtggtgggcaacctgtccgacaggtacggccggaaggcgttgctggcgctgccggccacggcgtccatcgttcctctcggaatcctggcgtacgggcggaccaaaggttacttctacgcgtactacgtaaccaagacgctgacggcgatggtcgccgaaggcaccatgatgtgcctctcgcttgcttacgtggctgacagggtgccggagacgcggcgcgcggcggccttcggcgtcttctccggcgtctgcagcgccggcttcgtcgccagcacagtggcagcccgcttcctccccgcctcatccacgtttcaggtctccgcagtggcagccgtggtgacggccgtctacatgaaggccttcctccaggagacggacggcggagcctccatatcctcctcctgcagcagcagcagcagcaatagcgacgaggaggcctcccggccgctctgccttccctccagcagcagcagcgaggaggcgtcgccgaggcttccgccacttcggaaggcgccgtcgctgtcggagttagcagccactcttaccagcagctcaaccttctctagggcggccgtcgtcacatttttccatggccttggtgagacaggcttactaagtacactactgtacttcctgaaggcaaaattccattatagcaaggaccagtatgccaatttgctacttatcattggcattacaggaagcttctcgcagctaactgtgatgccactcctagtggcaaagcttggtgaacagaagctacttgtcgtagcacttatagcgagctgcgggcaggcattcctatacagcatcgcatggtcgttctgggtcccttatcttgccgcaagcagtgtaatactaagcatgttggtcacaccttgtataagaagcattgtatcaaagaaagcggggccttttgagcagggaatggtccaagggtgcatcactggaataagctcaactgcaagtgtcatatctcctctaatttttactcctctcacagcctggtgtctgtcagaagctacgcctttctacttaaaaggtttcagccttgcctgtgctggatttgcaacgctggtagcgtttgcaacgagcataagtatgaggccaggtgaagtgcagactgataggaaatag

SEQ ID NO: 13530 - protein, 447 aa, Sorghum bicolor
MTKVEELAGLGHLLVFAFLFCFSAFMVAPVMTDVTMAALCPGRDECSLAIYLTGLQQAVTGLGALVLTPVVGNLSDRYGRKALLALPATASIVPLGILAYGRTKGYFYAYYVTKTLTAMVAEGTMMCLSLAYVADRVPETRRAAAFGVFSGVCSAGFVASTVAARFLPASSTFQVSAVAAVVTAVYMKAFLQETDGGASISSSCSSSSSNSDEEASRPLCLPSSSSSEEASPRLPPLRKAPSLSELAATLTSSSTFSRAAVVTFFHGLGETGLLSTLLYFLKAKFHYSKDQYANLLLIIGITGSFSQLTVMPLLVAKLGEQKLLVVALIASCGQAFLYSIAWSFWVPYLAASSVILSMLVTPCIRSIVSKKAGPFEQGMVQGCITGISSTASVISPLIFTPLTAWCLSEATPFYLKGFSLACAGFATLVAFATSISMRPGEVQTDRK

SEQ ID NO: 13531 - DNA, 1329 bp, Ricinus communis
  CDS (1)..(1329)
atggaaaagttgtcaggtttaagccatctctttatgactatctttctgcataacttctccacgtttatggtgattcctgccatcaccgacgttacgatgtctgcgctttgtcctgggagagatgaatgctccttagctatctacttgaccggattccagcaagcgatcatagggctgggaacattggtaatgatgcctttggtagggaatctatcggacaaatatggaaggaaagctttgcttactattcctatgagtcttaccgtaatccccttggccacattggcatacagcagaaccacgtatttcttctacgcatattatgtgatgaagactctcactgccatggtttgtgaaggaagtgtccactgccttgctctcgcctatgtggcagacaatgttccggaagcgcggcgagcctcggcctttggaattctttcaggaattggatcgtcggcgttcgtttgtggaacactctctactcgttttctttccaccgcttccactttccaggtttcagcctcaatggcagttgtggccatagtatacatgaaggttttccttcaggactcaatcgtggataaaaacctcactactccaataatctctaacggaaagggtaaagtttatgtacagattgaaaattcaagtgagaatgagcaggtttttagaactatgccttccttagaggatatgatttgcttgcttaagagcagtgttacgtttacgcaagctgccattgttgcttttttcatcaacctttcggaggttggccttcatgcttcattaatgtactacttaaaggcacggtttcacttcaacaagaatcaatttgctgacctaatggtaatttctgggattgctggcaccatttcgcagttgcttctcatgcctttattggctcctgctttaggagaggcgaggttgctttcagtagggctcttttttacatgtatacatatgtttctttacagcattgcatggtccttctgggtcccttatgctgctgccttgctctccattttgttcgtcttttcacaaccatgcttgcggactattgtatcgaagcaagttggggcttgtgagcagggaaaggctcaaggattcgtttcaggtttgggctcgttagccaatgtggtttcgcccttggttttctctcctttaacagctttgttcctatccgaaagagcaccatttcacttccctggtttcagtattatgtgtgttggatttgcctcgatgatagccttgatccagagtatgatgatgagggtggcccctcccatttcaaatgagagagccagtaattacagcaatgtggaagcctag

SEQ ID NO: 13532 - protein, 442 aa, Ricinus communis
MEKLSGLSHLFMTIFLHNFSTFMVIPAITDVTMSALCPGRDECSLAIYLTGFQQAIIGLGTLVMMPLVGNLSDKYGRKALLTIPMSLTVIPLATLAYSRTTYFFYAYYVMKTLTAMVCEGSVHCLALAYVADNVPEARRASAFGILSGIGSSAFVCGTLSTRFLSTASTFQVSASMAVVAIVYMKVFLQDSIVDKNLTTPIISNGKGKVYVQIENSSENEQVFRTMPSLEDMICLLKSSVTFTQAAIVAFFINLSEVGLHASLMYYLKARFHFNKNQFADLMVISGIAGTISQLLLMPLLAPALGEARLLSVGLFFTCIHMFLYSIAWSFWVPYAAALLSILFVFSQPCLRTIVSKQVGACEQGKAQGFVSGLGSLANVVSPLVFSPLTALFLSERAPFHFPGFSIMCVGFASMIALIQSMMMRVAPPISNERASNYSNVEA

SEQ ID NO: 13533 - DNA, 1233 bp, Ricinus communis
  CDS (1)..(1233)
atggagaagctaacagaactgagccacctctttgtcaccatcttcctcgccggagtggctggtatgatggtggttccggcgataacagatgttaccatgttagcactttgccctggtcaagacgaatgctctctggccatttacctctctggattccaacaagctgctgacaacgtttcagaaggacgacgagcatcagcatttggaattctatctggcatattcatagcagcctttgtctgcggaacattagttgctcgttttctcactactactttgacctttcaggttgctacatttatttcaatgcttgctgctgtgtacatgagggttttcctgaaggataaagtggtggaaggtgaatgtttaacacagccaatcttgaagaccggactagatgacattcatcaagatgatgacttgcctaacaaggcaccattatccaagaagattctaacagttggggatcttatttccttgctcaagtgtagtgcaacattttcacaagcagcagttgttgctttctttcatagtcttgctgagggaggaatccaagcagcttctatgtactactggaaggcccgttttcatttcaccaaaaaccagtttgccgatctatttctccttgctggtcttgcaggaatgatatcacagctgattttcatgcctttgttggcaccttttgtatcagagaaaaaactactgtccgcaggactctttatgggttttgtaactatgttgctttacagcatatcgtggtcattctgggttccttatgcgactactgcattaacagtctttgttgttttcgtgactccatctttacgcagtattgtatccaagcaagttggccctgatgagcaggggaaggctcagggctgcatttcaagcatatcttccttcgccaacatcatttcccctctgatttttagtcctttgacagctctatttctgtctgaagaagcaccatttcatttccctggctttagtatgttatgcattggatttgcattggtgaaagtctatttagtcttcacttgtatctccatagaagtgatcgtagagcttctgtatgcaatgacgaaacatgtgaaaagagttcaagaaaagtcatcactgaccagtgtaaaatgtatcattttgatgcaagcaaagctttacaaggcttccatgcaatggcaagttatgaacctgaggaaagctttacaaggttcaagcattactggttgctga

SEQ ID NO: 13534 - protein, 410 aa, Ricinus communis
MEKLTELSHLFVTIFLAGVAGMMVVPAITDVTMLALCPGQDECSLAIYLSGFQQAADNVSEGRRASAFGILSGIFIAAFVCGTLVARFLTTTLTFQVATFISMLAAVYMRVFLKDKVVEGECLTQPILKTGLDDIHQDDDLPNKAPLSKKILTVGDLISLLKCSATFSQAAVVAFFHSLAEGGIQAASMYYWKARFHFTKNQFADLFLLAGLAGMISQLIFMPLLAPFVSEKKLLSAGLFMGFVTMLLYSISWSFWVPYATTALTVFVVFVTPSLRSIVSKQVGPDEQGKAQGCISSISSFANIISPLIFSPLTALFLSEEAPFHFPGFSMLCIGFALVKVYLVFTCISIEVIVELLYAMTKHVKRVQEKSSLTSVKCIILMQAKLYKASMQWQVMNLRKALQGSSITGC

SEQ ID NO: 13535 - DNA, 849 bp, Arabidopsis lyrata subsp. lyrata
  CDS (1)..(849)
atgtgcattcgtttgcgccactctttgcgctcgatttttatctatcgccaccacatttcagcagcaatagcaattttatcaacgctgtatatgagggttttcctaccagattcgatccgagataatagcctcggtgttcccagtattttaagtgagaaattaagttctccattacttgaagattgtcctgcacatagaaatagaatatttagagcaattcgatcagtacgggaaatggcatctttaatgaaaagcagcgttccactttcacaagttgcgatggtatcattcttcagtagtcttgctgaggcaggtctacatgcttcatctatgtactatttaaaggccaagtttcactttaacaaagaccagtttgcagacttgatgatcatatttggcgcagccggatctatttcacagttgctctttatgcccattctagtccctgctttaaaagaggagagactgctctcaattggtcttttctttggttgtgcccatatgttcctgatatgtgtggcatggtcctcatgggttccatatatggcagccatatttacatttttctcaatatttccacaatcgtgtatgcgaagcattgtctccaaacaagtagaatcatatgaacaggggaaagcccaagggattatttcaagcatatgttcccttgcaaatgtcatttccccgcttgcattttcacctctaacagattggtttctgtcagaaagagccccatttaatttcccaggattcagtataatgtgtgcgggatttacgatgactatagctttcatccaaagcctcatgatcagagcaacaactccaatatcagatatgggatctccataa

SEQ ID NO: 13536 - protein, 282 aa, Arabidopsis lyrata subsp. lyrata
MCIRLRHSLRSIFIYRHHISAAIAILSTLYMRVFLPDSIRDNSLGVPSILSEKLSSPLLEDCPAHRNRIFRAIRSVREMASLMKSSVPLSQVAMVSFFSSLAEAGLHASSMYYLKAKFHFNKDQFADLMIIFGAAGSISQLLFMPILVPALKEERLLSIGLFFGCAHMFLICVAWSSWVPYMAAIFTFFSIFPQSCMRSIVSKQVESYEQGKAQGIISSICSLANVISPLAFSPLTDWFLSERAPFNFPGFSIMCAGFTMTIAFIQSLMIRATTPISDMGSP

SEQ ID NO: 13537 - DNA, 1359 bp, Oryza sativa subsp. indica
  CDS (1)..(1359)
atgaaggacttggctgtgctggggcacttgttcgtggcggcgttcatgttccacttcgcctcctacatggtcatcccggcgatcaccgacgtgacgatggacgccgtctgccccggccgcgacgagtgctccgtcgccatctacctcagcggcttccagagcgccatcacagggatgggggctcttgtggtgactcccatcgtggggaatttgtcggacaaatacggcaggaaggcgctgatgacactgccggtgaccgtggccattctgccgttgtttatactggcctgcaaccgctccaaggtgtacttctacgtgtactacgtcgttaaggtcctcgccggcatcttctgcgagggcagcatgcattgcctcttgctcgcctacgtggccgaccaagtcggcgccaggcggcgagcggcggcgttcgggctcctctccggcgtgtcggcagcggggttcgtctccggaacactcaccgcgcggttcctccagacatcaaccaccttccaggtggcggcggccgtcgccgcggcgacggccatctatctcagggccgttgtcccagattccggcggagccaactccttcgttgacgaagcctgtgatcccttcctacaaggctcatcctgctccgccgcgacttcgtcttcgtcctcctccgatgaggagatctcaccgagacttccgccgcacaagggcggggtgccgtcgttgtcagacatggtttcgcttctcactggcagtttgaccctgtcaggggcagcaattgttaccttcttttacagtcttggggaacatgggcttcagactgcattactgtactacctgaaggcacagtttggttacagcaaagatgagttcgctaatcttctgttaattgctggtgctgcaggaatgctgtcacagctgactgtaatgccggtcttggctcgatttgttggcgaggatatactgcttattataggactcctaggaggatgtactcatgttttcctgtatggcattgcatggtcatattgggtaccatatttatctgcggtgtttataattctgagtgcttttgttcacccttctataagaaccaatgtatcaaagagtgttggatcaaatgagcagggaattgctcaaggctgtatatcgggcataagctcgtttgccagcatattagctccactaatttttacccctctaacagcatgggtcctttcagaaacagcgccattcaaattcaaaggtttcagtatcatgtgtgctggcttttgtacgctcattgccttcattatcagcatgaggatgcgagcagggcaatctggtgcaagtgagaagttggccattgtgcagcatgagcaagcatga

SEQ ID NO: 13538 - protein, 452 aa, Oryza sativa subsp. indica
MKDLAVLGHLFVAAFMFHFASYMVIPAITDVTMDAVCPGRDECSVAIYLSGFQSAITGMGALVVTPIVGNLSDKYGRKALMTLPVTVAILPLFILACNRSKVYFYVYYVVKVLAGIFCEGSMHCLLLAYVADQVGARRRAAAFGLLSGVSAAGFVSGTLTARFLQTSTTFQVAAAVAAATAIYLRAVVPDSGGANSFVDEACDPFLQGSSCSAATSSSSSSDEEISPRLPPHKGGVPSLSDMVSLLTGSLTLSGAAIVTFFYSLGEHGLQTALLYYLKAQFGYSKDEFANLLLIAGAAGMLSQLTVMPVLARFVGEDILLIIGLLGGCTHVFLYGIAWSYWVPYLSAVFIILSAFVHPSIRTNVSKSVGSNEQGIAQGCISGISSFASILAPLIFTPLTAWVLSETAPFKFKGFSIMCAGFCTLIAFIISMRMRAGQSGASEKLAIVQHEQA

SEQ ID NO: 13539 - DNA, 1353 bp, Populus trichocarpa
  CDS (1)..(1353)
atggaaaagttgtcaggtttaagtcatctcttcatgacaatatttctgcataatttctcaacatttatggtgatccctgccattactgatgtcacaatgtcggccttatgccctggaagagatgagtgttctttggccatttacctaaccggattccaacaagcgattatagggcttgggacgctggtaacgatgcctttgatagggaacatgtcggacaagtatggtcggaaagctttgcttactgttccaatgagtcttataatagttccctcagccatattggcctacagcaggaccaggaacttcttctatgcgtattatgtcgtcaggactctcatggccatggtctgtgaaggaagtgtccaatgccttgctctcgcctatgtggcagacaatgttccggagagtcggcgagcctcgacgtttgggattctttcaggcattgcatcgtccgctttcgtatgcggaaacctctccactcgtttcctctccacctcctccaccttccaggtttctgccttagtggcaattgcagctctagtgtacatgaggttttttcttcaggaatccatcatcgatgaacaactctctacgccaatactaacatataaggggaacgggaaaggaaaaggaaaagctaatgctgcatgctttgcacatgaaattccaagcaaaaatgtgcaggtttttaaatcagcaccttccttggaggatatgctctgcttgcttaagagcagtgtgaccctttcgcaagctgctgttgttgcatttttctacagtcttgcggaagttggccttcatgcttcattaatgtactatttgaaggcgcaatttcactttagcaaggatcaatttgctgttttgatggtgatttctgggattgcagggaccgtttcacagttggttattatgcctctattgactcctgctcttggagaagcaaggctgcttgcagtggggctcttttttacctgtgtacatgtgtttctttacagcatagcgtggaccttctgggtaccttatgttgcttccatgttctctcttctgtttgtgttttcacaaccatgtatgcgaagcattgtgtccaagcaagttggatcctgtgagcaggggaaggctcaagggtgcatttctggaataagttcctttgccaatgtcatttctcccttggttttctctcctttaacagctttattcctctctgaaagggcgccgttccccttccctggtttcagtattatgtgcgtcggatttgcatcgatgatagccttcattcagagtctcatgatgaggaccgctcctcccattgcaaatcaaaaggtcgttaattccaactatgtggatgcctag

SEQ ID NO: 13540 - protein, 450 aa, Populus trichocarpa
MEKLSGLSHLFMTIFLHNFSTFMVIPAITDVTMSALCPGRDECSLAIYLTGFQQAIIGLGTLVTMPLIGNMSDKYGRKALLTVPMSLIIVPSAILAYSRTRNFFYAYYVVRTLMAMVCEGSVQCLALAYVADNVPESRRASTFGILSGIASSAFVCGNLSTRFLSTSSTFQVSALVAIAALVYMRFFLQESIIDEQLSTPILTYKGNGKGKGKANAACFAHEIPSKNVQVFKSAPSLEDMLCLLKSSVTLSQAAVVAFFYSLAEVGLHASLMYYLKAQFHFSKDQFAVLMVISGIAGTVSQLVIMPLLTPALGEARLLAVGLFFTCVHVFLYSIAWTFWVPYVASMFSLLFVFSQPCMRSIVSKQVGSCEQGKAQGCISGISSFANVISPLVFSPLTALFLSERAPFPFPGFSIMCVGFASMIAFIQSLMMRTAPPIANQKVVNSNYVDA

SEQ ID NO: 13541 - DNA, 1317 bp, Brassica napus
  CDS (1)..(1317)
atggaggaaacaacaacgtttcaggggctaagacaccttttcatgaccgtcttcttgcacggattctcggcgttcattgtagtcccggtcattacagacgtcagcatggcggctttatgtcctggaaaagacgagtgttccctcgcaatttacctctcaggctttcaacaggctattacgggtgtggggtccttgatgatgatgccgttggtaggaagcttgtcagataagcatggaagaaaaagtttactcacacttccaatggcactcaacattctgcctcttgctatattagcgtatagcagagagacgtctgtcttctacatctactatgttctcaagactttcacgtccatattttgtgaaggaagtgtgttctgtcttgcccttgcttatgtggctgataatgtatccgaaaatcaacgagcctctgcatttggaatacttaccggaattggatcttgcgcatttgtatgtgcaaattgttgtgctcgattcttatccaccaccgctatatttcaggtcgcgacaacggtagcaattttttcaacagtgtacatgagaatttttctacctgattcgatccgagacaatagcttggttacttccattgtttcaaccgagaaattgagttacgtgttacttgaagattaccctggacatagaaatcaaatatctagaacagtacgttctgtacgtgaaatggcctctctaatgaggagcagcgttccactttttcaagttgcaatggtgtcattcttcagtagtcttagtgaggccggtctacatgcttcatctatgtactatctaaaggccaagtttcagtttaacaaagatcagtttgcagacttgatgatcatatttggcattgccgggtctgtttcacagttgctcttcatgcccattttaattcctgctttaaaagaggagaaactgctctcaattggtctttttttcggatgtgcgcatatgttcctcctcggtatggcatggtccgcgtgggttccatatatggcggccatgttttcacttgtctctatatttcatcagtcatgtatgcggagcattgtctccaaacaagtaacatcatatgaacagggtaaggcccaagggattatttcaagcatatgctctcttgcaaacgtcatttctccgctagcattttcacctctaacaggctggtttttgtctgaaagagcaccatttcatttcccagggttcagtcttatgtgcgcggggtttactatgacaatagcttttatcttaagtctgatgatcagagcaacaactccagtggcagctatgggatctccataa

SEQ ID NO: 13542 - protein, 438 aa, Brassica napus
MEETTTFQGLRHLFMTVFLHGFSAFIVVPVITDVSMAALCPGKDECSLAIYLSGFQQAITGVGSLMMMPLVGSLSDKHGRKSLLTLPMALNILPLAILAYSRETSVFYIYYVLKTFTSIFCEGSVFCLALAYVADNVSENQRASAFGILTGIGSCAFVCANCCARFLSTTAIFQVATTVAIFSTVYMRIFLPDSIRDNSLVTSIVSTEKLSYVLLEDYPGHRNQISRTVRSVREMASLMRSSVPLFQVAMVSFFSSLSEAGLHASSMYYLKAKFQFNKDQFADLMIIFGIAGSVSQLLFMPILIPALKEEKLLSIGLFFGCAHMFLLGMAWSAWVPYMAAMFSLVSIFHQSCMRSIVSKQVTSYEQGKAQGIISSICSLANVISPLAFSPLTGWFLSERAPFHFPGFSLMCAGFTMTIAFILSLMIRATTPVAAMGSP

SEQ ID NO: 13543 - DNA, 1332 bp, Glycine max
  CDS (1)..(1332)
atggagggattaggaggactgggccacctttttgtgacaatgtttgtgtcggggtttggtggtgtcatagttcttccggcaatcaccgacgttaccatggcagcactttgccctggtcaagatcagtgttcccttgccatttacctctctggcttccaacaagctatggctggagtggggtcagtggtgatgacaccattaataggaaacttgtccgaccgatatggcagaaaagcgttgctcacacttcctctcactgtgtctgtcattcctcaagtgatattggcatatagcagggatacccaattcttctacgcgtactatgtggtgaaaactctggctgccatggcaggcgaagggtccttccactgcctggctcttgcatacgtggcagacaaggttccagatgggaaacgaacatcagcattcggaatacttgctggtgttggatcagcatcattcgttggtggaacattagctgctcgtttcctatccactgctttaacatttcaggttgcttcagtcttgtcaatggttgcattggtgtacatgagaattttccttaaggatagtgtacctggtggtgccatcagacagccattattgaaagaggtcgaggaaccatgtgatgaggatgattcaacaccaaaggcaacaggaacatttaagaaacttccatcactgggggatttgatttgtttgctcaggtgtagtcccacattctcccaagcagccatggtttcgttcttcaatagtcttgcagatggtggcttgatggctgtattgctgtattatttgaaggcacgttttcaattcaacaagaaccagtttgctgatttgttgatgattactgggattggagccactcttgcacaactatttttcatgcccattttagtgcctgtgataggagaggagaagctgctctccacagggctcttaattagctgcataaatgtctttgtctacagcatagcatggacagcatgggttccttatgctctagcaggttgctctgtgtttgcagtttttgtgcgcccaagtttatgcagcattgcatcaaaacaagttggacctactgaacagggaatggttcaaggatgtctttcagcaattagttccttcgccaacatcattgctccattaattttcagtccactgacagccttgttcctgtcagaagaagcaccgttttattttcctggcttcagtctaatgtgccttgggctagcactgatggtagcattttttcagagtctaataattcgtgctgttcctcctattgcgggtggcaaaattagcagtaaccgctgcacggataccttggtctga

SEQ ID NO: 13544 - protein, 443 aa, Glycine max
MEGLGGLGHLFVTMFVSGFGGVIVLPAITDVTMAALCPGQDQCSLAIYLSGFQQAMAGVGSVVMTPLIGNLSDRYGRKALLTLPLTVSVIPQVILAYSRDTQFFYAYYVVKTLAAMAGEGSFHCLALAYVADKVPDGKRTSAFGILAGVGSASFVGGTLAARFLSTALTFQVASVLSMVALVYMRIFLKDSVPGGAIRQPLLKEVEEPCDEDDSTPKATGTFKKLPSLGDLICLLRCSPTFSQAAMVSFFNSLADGGLMAVLLYYLKARFQFNKNQFADLLMITGIGATLAQLFFMPILVPVIGEEKLLSTGLLISCINVFVYSIAWTAWVPYALAGCSVFAVFVRPSLCSIASKQVGPTEQGMVQGCLSAISSFANIIAPLIFSPLTALFLSEEAPFYFPGFSLMCLGLALMVAFFQSLIIRAVPPIAGGKISSNRCTDTLV

SEQ ID NO: 13545 - DNA, 20 bp, Artificial sequence
  primer
atggtttcgcttctcactgg

SEQ ID NO: 13546 - DNA, 21 bp, Artificial sequence
  primer
tcatgcttgctcatgctgcac

SEQ ID NO: 13547 - protein, 254 aa, Artificial sequence
  consensus sequence
  Variant (2)..(4): Xaa in position 2 to 4 is any amino acid
  Variant (7)..(9): Xaa in position 7 to 9 is any amino acid
  Variant (10)..(68): Xaa in position 10 to 68 is any or no amino acid
  Variant (71)..(72): Xaa in position 71 to 72 is any amino acid
  Variant (74)..(78): Xaa in position 74 to 78 is any amino acid
  Variant (81)..(83): Xaa in position 81 to 83 is any amino acid
  Variant (86)..(87): Xaa in position 86 to 87 is any amino acid
  Variant (89)..(89): Xaa in position 89 is any amino acid
  Variant (91)..(91): Xaa in position 91 is any amino acid
  Variant (94)..(98): Xaa in position 94 to 98 is any amino acid
  Variant (100)..(100): Xaa in position 100 is any amino acid
  Variant (104)..(104): Xaa in position 104 is any amino acid
  Variant (106)..(108): Xaa in position 106 to 108 is any amino acid
  Variant (110)..(111): Xaa in position 110 to 111 is any amino acid
  Variant (114)..(114): Xaa in position 114 is any amino acid
  Variant (116)..(117): Xaa in position 116 to 117 is any amino acid
  Variant (119)..(119): Xaa in position 119 is any amino acid
  Variant (121)..(122): Xaa in position 121 to 122 is any amino acid
  Variant (124)..(125): Xaa in position 124 to 125 is any amino acid
  Variant (129)..(130): Xaa in position 129 to 130 is any amino acid
  Variant (133)..(133): Xaa in position 133 is any amino acid
  Variant (135)..(135): Xaa in position 135 is any amino acid
  Variant (137)..(139): Xaa in position 137 to 139 is any amino acid
  Variant (141)..(142): Xaa in position 141 to 142 is any amino acid
  Variant (145)..(146): Xaa in position 145 to 146 is any amino acid
  Variant (149)..(151): Xaa in position 149 to 151 is any amino acid
  Variant (153)..(155): Xaa in position 153 to 155 is any amino acid
  Variant (159)..(159): Xaa in position 159 is any amino acid
  Variant (164)..(164): Xaa in position 164 is any amino acid
  Variant (169)..(170): Xaa in position 169 to 170 is any amino acid
  Variant (172)..(178): Xaa in position 172 to 178 is any amino acid
  Variant (180)..(181): Xaa in position 180 to 181 is any amino acid
  Variant (183)..(184): Xaa in position 183 to 184 is any amino acid
  Variant (186)..(187): Xaa in position 186 to 187 is any amino acid
  Variant (191)..(191): Xaa in position 191 is any amino acid
  Variant (194)..(195): Xaa in position 194 to 195 is any amino acid
  Variant (199)..(200): Xaa in position 199 to 200 is any amino acid
  Variant (206)..(206): Xaa in position 206 is any amino acid
  Variant (208)..(208): Xaa in position 208 is any amino acid
  Variant (210)..(210): Xaa in position 210 is any amino acid
  Variant (212)..(215): Xaa in position 212 to 215 is any amino acid
  Variant (218)..(218): Xaa in position 218 is any amino acid
  Variant (220)..(220): Xaa in position 220 is any amino acid
  Variant (225)..(226): Xaa in position 225 to 226 is any amino acid
  Variant (230)..(231): Xaa in position 230 to 231 is any amino acid
  Variant (234)..(234): Xaa in position 234 is any amino acid
  Variant (236)..(236): Xaa in position 236 is any amino acid
  Variant (240)..(241): Xaa in position 240 to 241 is any amino acid
  Variant (243)..(243): Xaa in position 243 is any amino acid
  Variant (246)..(249): Xaa in position 246 to 249 is any amino acid
  Variant (251)..(253): Xaa in position 251 to 253 is any amino acid
YXXXFLXXXXXXXXXXXXXXXXXXXXXXXXXXXXXXXXXXXXXXXXXXXXXXXXXXXXXXXXXXXXXXLLXXSXXXXXAAXXXFFXXLXEXGLXXXXXYXLKAXFXXXKXXFAXLXXIXGXXGXXSQLXXMPXLXPXXXEXXLLXXGLXXXCXXXFLYXIAWSXWVPYXXAXXXXXXXFXXPXXRXXVSKXVGXXEQGXXQGCISXIXSXAXXXXPLXFXPLTAXXLSEXXPFXFXGFSXXCXGFXXXXAXXXS

SEQ ID NO: 13548 - protein, 59 aa, Artificial sequence
  protein pattern
  Variant (2)..(2): Xaa in position 2 is Ser or Thr
  Variant (3)..(3): Xaa in position 3 is any amino acid
  Variant (4)..(4): Xaa in position 4 is Ala or Val
  Variant (7)..(7): Xaa in position 7 is any amino acid
  Variant (8)..(8): Xaa in position 8 is Ala or Val
  Variant (9)..(9): Xaa in position 9 is Ala, Glu, Gly or Thr
  Variant (10)..(10): Xaa in position 10 is Pro or Ser
  Variant (11)..(11): Xaa in position 11 is any amino acid
  Variant (15)..(15): Xaa in position 15 is any amino acid
  Variant (16)..(16): Xaa in position 16 is Ala or Val
  Variant (19)..(19): Xaa in position 19 is any amino acid
  Variant (20)..(20): Xaa in position 20 is Ile or Met
  Variant (21)..(21): Xaa in position 21 is Ser or Thr
  Variant (22)..(22): Xaa in position 22 is Gly or Ser
  Variant (24)..(24): Xaa in position 24 is any or no amino acid
  Variant (26)..(26): Xaa in position 26 is any amino acid
  Variant (27)..(27): Xaa in position 27 is any or no amino acid
  Variant (29)..(29): Xaa in position 29 is any amino acid
  Variant (30)..(31): Xaa in position 30 to 31 is Ile, Leu or Val
  Variant (32)..(32): Xaa in position 32 is Ala, Gly or Ser
  Variant (35)..(35): Xaa in position 35 is Ala, Ile or Val
  Variant (37)..(37): Xaa in position 37 is Ser or Thr
  Variant (41)..(41): Xaa in position 41 is Ala, Asp or Gly
  Variant (42)..(43): Xaa in position 42 to 43 is any amino acid
  Variant (46)..(46): Xaa in position 46 is Asp, Glu or Gln
  Variant (47)..(47): Xaa in position 47 is any amino acid
  Variant (48)..(48): Xaa in position 48 is Ala, Glu or Thr
  Variant (51)..(51): Xaa in position 51 is any amino acid
  Variant (52)..(52): Xaa in position 52 is Phe or Leu
  Variant (53)..(53): Xaa in position 53 is any amino acid
  Variant (57)..(57): Xaa in position 57 is Ile, Leu, Met or Val
  Variant (58)..(58): Xaa in position 58 is any amino acid
RXXXSKXXXXXEQGXXQGXXXXIXSXXAXXXXPLXFXPLTXXXLSXXXPFXXXGFSXXC

SEQ ID NO: 13549 - protein, 56 aa, Artificial sequence
  protein pattern
  Variant (2)..(5): Xaa in position 2 to 5 is any amino acid
  Variant (7)..(7): Xaa in position 7 is any amino acid
  Variant (9)..(9): Xaa in position 9 is Ala, Ile or Val
  Variant (10)..(10): Xaa in position 10 is any amino acid
  Variant (12)..(12): Xaa in position 12 is any amino acid
  Variant (13)..(13): Xaa in position 13 is Phe, Ile, Leu or Val
  Variant (17)..(17): Xaa in position 17 is any amino acid
  Variant (18)..(18): Xaa in position 18 is Phe, Ile, Leu or Val
  Variant (21)..(21): Xaa in position 21 is Ile, Leu or Val
  Variant (23)..(25): Xaa in position 23 to 25 is any amino acid
  Variant (26)..(26): Xaa in position 26 is Ile, Leu or Val
  Variant (27)..(27): Xaa in position 27 is any amino acid
  Variant (29)..(29): Xaa in position 29 is Ala, Asp, Glu or Gln
  Variant (30)..(30): Xaa in position 30 is any amino acid
  Variant (33)..(33): Xaa in position 33 is any amino acid
  Variant (34)..(34): Xaa in position 34 is Ile or Val
  Variant (35)..(35): Xaa in position 35 is Ala, Gly or Ser
  Variant (37)..(37): Xaa in position 37 is Phe, Ile, Leu or Val
  Variant (38)..(38): Xaa in position 38 is any amino acid
  Variant (39)..(39): Xaa in position 39 is Gly, Ser or Thr
  Variant (41)..(43): Xaa in position 41 to 43 is any amino acid
  Variant (46)..(46): Xaa in position 46 is any amino acid
  Variant (47)..(47): Xaa in position 47 is Cys, Gly or Ser
  Variant (48)..(48): Xaa in position 48 is Ile, Met or Val
  Variant (49)..(49): Xaa in position 49 is Ala or Ser
  Variant (51)..(51): Xaa in position 51 is Ser or Thr
  Variant (52)..(52): Xaa in position 52 is any amino acid
AXXXXIXGXXGXXSQLXXMPXLXXXXXEXXLLXXXLXXXCXXXFLXXXXWXXWVPY

SEQ ID NO: 13550 - protein, 10 aa, Artificial sequence
  protein pattern
  Variant (2)..(2): Xaa in position 2 is Phe or Tyr
  Variant (6)..(6): Xaa in position 6 is any amino acid
  Variant (8)..(8): Xaa in position 8 is any amino acid
  Variant (9)..(9): Xaa in position 9 is Phe or Tyr
  Variant (10)..(10): Xaa in position 10 is Asn or Ser
YXLKAXFXXX

SEQ ID NO: 13551 - DNA, 2235 bp, Zea mays
  CDS (1)..(2235)
atggcagggcaggagcgtaggacaatcgatctggaggagggatgggcgttcatgcagaagggcatcaccaagctgaagaacatcctcgagggcaagcccgagccgcagttcagttccgaggactacatgatgctctacacgacgatatacaacatgtgcacgcagaagccgccgcaggactactcacagcagctctacgacaagtatcgggagtcgttcgaggagtacatcgcctccatggtactaccttcattaagggagaaacatgacgagtttatgctgagggagctagtgcaaaggtggtcaaaccataaagtcatggttcgctggctgtcacgcttcttttattaccttgaccgatacttcatatcaaggaggtcacttacaccacttaaagaagtgggccttacttgcttccgagagttgatctatcaagagattaaaggacaagttaaagatgcagtgatagctctgatagacaaagaacgtgagggtgaacagattgaccgggctctgttgaagaatgttttggatatttttgttgaaattgggttgggtcaaatggagtgttatgagaatgactttgaagatttcttgctcaaggatactacagagtactactctgtcaaagctcaaagctggattcttgaggactcatgcccagattacatgattaaggctgaggagtgtttaaagcgggagaaggagcgagttggtcactatttgcatattagcagcgaacagaagttattggagaaagtgcaaaatgaattgcttgctcagtatgcaaccccgctgttagagaaggagcattctggatgttctgctttgcttcgcgatgacaaggttgaggatctttctaggatgtacagactcttctccaaaatctcccgtggtctggaacctatttcaaacatgttcaaaacgcatgtcacaagtgagggtacagccttggtcaagcaagcagaagattctgctagtaataagaagccagagaagaaggatatggttggcatgcaggaacaggtctttgtgtggaaaatcatcgagctgcatgacaaatatgtagcttatgtgacagaatgtttccagggacatacactcttccataaggcacttaaagaagcctttgaggtcttctgtaacaaaggtgtctctggcagttcgaatgctgagttgttggctaccttctgcgacaatattctgaagaaaggctgcagtgaaaagctcagtgatgaagccattgaagatgcccttgagaaggttgtgagattgctggcatacatcagtgataaagacctgtttgccgagttctataggaagaaacttgccagaagattacttttcgacaaaagtgctaatgatgagcatgagagaagtattctgacaaagctcaagcaacagtgcggggggcagtttacttccaaaatggagggcatggttacggaccttactgtcgctagagatcaccaaactaagtttgaagagtttgtagctgggcatccagagttgaatcctggcatagatttggctgttactgttttgacaacgggattctggccaagctacaaaacttttgacataaaccttcctgcggagatggtgaaatgtgtagaggttttcaaggaattctatcaaacaagaacgaagcacaggaagctgacatggatttattccttgggaacctgcaacatcaatgctaagtttgatgctaaacctattgagctcattgttacgacatatcaggctgcattactactactgttcaatggatccgaaaggcttagttattctgaaattgcaacacaattaaacctgtcagatgatgatgtagtgcgtttgctccattcactttcttgtgcaaaatacaagatccttaacaaggaaccagcaaatagatccatctcgcccaatgatgtttttgagttcaattcaaaatttactgacagaatgagaagaattaagattccactgcctcccgttgatgagaagaaaaaggttgttgaagatgttgacaaagacaggaggtatgcaattgatgcatcaattgtgcgcattatgaagagccgcaaagttatgggtcatcaacagctggttgctgaatgtgttgagcagcttagccgcatgtttaagccggacttcaaagccataaagaagaggattgaggatctcatcacaagggactatttggagcgcgacaaggacaacgccaatacgtacaaataccttgcctga

SEQ ID NO: 13552 - protein, 744 aa, Zea mays
MAGQERRTIDLEEGWAFMQKGITKLKNILEGKPEPQFSSEDYMMLYTTIYNMCTQKPPQDYSQQLYDKYRESFEEYIASMVLPSLREKHDEFMLRELVQRWSNHKVMVRWLSRFFYYLDRYFISRRSLTPLKEVGLTCFRELIYQEIKGQVKDAVIALIDKEREGEQIDRALLKNVLDIFVEIGLGQMECYENDFEDFLLKDTTEYYSVKAQSWILEDSCPDYMIKAEECLKREKERVGHYLHISSEQKLLEKVQNELLAQYATPLLEKEHSGCSALLRDDKVEDLSRMYRLFSKISRGLEPISNMFKTHVTSEGTALVKQAEDSASNKKPEKKDMVGMQEQVFVWKIIELHDKYVAYVTECFQGHTLFHKALKEAFEVFCNKGVSGSSNAELLATFCDNILKKGCSEKLSDEAIEDALEKVVRLLAYISDKDLFAEFYRKKLARRLLFDKSANDEHERSILTKLKQQCGGQFTSKMEGMVTDLTVARDHQTKFEEFVAGHPELNPGIDLAVTVLTTGFWPSYKTFDINLPAEMVKCVEVFKEFYQTRTKHRKLTWIYSLGTCNINAKFDAKPIELIVTTYQAALLLLFNGSERLSYSEIATQLNLSDDDVVRLLHSLSCAKYKILNKEPANRSISPNDVFEFNSKFTDRMRRIKIPLPPVDEKKKVVEDVDKDRRYAIDASIVRIMKSRKVMGHQQLVAECVEQLSRMFKPDFKAIKKRIEDLITRDYLERDKDNANTYKYLA

SEQ ID NO: 13553 - DNA, 2235 bp, Glycine max
  CDS (1)..(2235)
atgtccatgagtgagcgcaagactattgacctagatcaaggatgggattttatgcagaagggcattttgaagctgaagaacattctagaagggcttcccgagcctcagttcagctcggaggactatatgatgctatacacgaccatatacaatatgtgcactcagaagccgcctcatgactattcccaacaactgtacgacaagtacaaggaatcgtttgaagaatacatcgtatcaacggtattaccttctttgagagagaaacacgatgaatttatgttaagagaacttgtgaaaagatgggcaaaccataaaattatggttaggtggctttctcggttctttcactacttggaccgatactttattgcccggaggtcacttccgccacttaatgaagttgggttgacttgcttccgcgatttgatttacaaggaactaaatgggaaagttagagatgcagttatttcactaattgatcaagaacgggagggagaacagattgatcgagctctattaaagaatgtattagacatatttgttgaaattggaatggggcaaatggatcactatgagaatgattttgaagctgccatgctcaaagacacttcttcttattattctcgaaaggcttcaaattggatcctagaagattcttgtcctgattatatgctcaaggctgaggagtgcttaaaacgggagaaagatagggttgctcattacttgcactctagtagcgagccaaagttattagagaaagttcaacatgagttgttatctgtgtatgcaaaccaactccttgagaaagagcactctggatgtcatgctttacttagagatgacaaggttgaagacttgtcaagaatgttcaggctattctctaaaatacctcgaggcttagatcctgtttccaatatatttaagcagcatgttaccactgaaggtatggctttggtgaagcatgctgaagatgcagctagcaacaaaaaggcagagaaaaaggatatcgtaggtctgcaggagcaggtttttgttcggaaggtgattgagctgcatgacaagtacctggcatatgtgaatgattgtttccagaatcatactcttttccacaaggctcttaaagaggcttttgaggtcttttgcaacaaaggtgttgctggaagttcaagcgcagaactgcttgcctccttctgtgataacattcttaagaaaggaggaagtgaaaaattaagtgatgaagcaattgaagaaactcttgaaaaggtggtcaagctgcttgcctatattagtgacaaagacttgtttgctgaattctataggaagaagcttgctcgaaggcttctctttgacaagagtgccaatgatgatcatgagcgaagtattttgacaaaattgaagcaacaatgtggtggacagtttacctcaaagatggaaggaatggttacagatttgacactggcaaaggagaatcaaactagctttgaggagtatttaagcaataatcccaatgcagaccctggcatagacttgacagttacagttctgactactggcttctggcctagttacaaatcttttgatctcaatcttcctgcagaaatgataaggtgtgttgaagttttcaaagaattttatcaaactaaaacgaagcacagaaaacttacatggatttattccttgggtacgtgtaatataagtgggaaatttgacccaaaaaccgtggagctgattgttacaacctaccaggcttcagcattactgctttttaattcgtctgatagactgagttactcagagataatgactcagttaaacttatctgacgatgatgttattagactgctccattccttatcatgtgccaagtacaagattctcaacaaggagccaaatacaaaaacaatatcgtccactgattattttgaatttaattataaatttactgacaaaatgaggagaatcaagattcctcttcctcccgtggatgagaagaaaaaagtaattgaggatgttgacaaggacagaagatatgctattgatgcctcaattgtgcgtattatgaagagtagaaaagttttgggctaccaacaattagtcgttgagtgtgttgagcagttaggtcgcatgtttaagcctgacgtcaaggctattaaaaagcggattgaagatttgatttctcgtgactacttggaaagagacaaagataatgctaatatgttcaagtacttggcttga

SEQ ID NO: 13554 - protein, 744 aa, Glycine max
MSMSERKTIDLDQGWDFMQKGILKLKNILEGLPEPQFSSEDYMMLYTTIYNMCTQKPPHDYSQQLYDKYKESFEEYIVSTVLPSLREKHDEFMLRELVKRWANHKIMVRWLSRFFHYLDRYFIARRSLPPLNEVGLTCFRDLIYKELNGKVRDAVISLIDQEREGEQIDRALLKNVLDIFVEIGMGQMDHYENDFEAAMLKDTSSYYSRKASNWILEDSCPDYMLKAEECLKREKDRVAHYLHSSSEPKLLEKVQHELLSVYANQLLEKEHSGCHALLRDDKVEDLSRMFRLFSKIPRGLDPVSNIFKQHVTTEGMALVKHAEDAASNKKAEKKDIVGLQEQVFVRKVIELHDKYLAYVNDCFQNHTLFHKALKEAFEVFCNKGVAGSSSAELLASFCDNILKKGGSEKLSDEAIEETLEKVVKLLAYISDKDLFAEFYRKKLARRLLFDKSANDDHERSILTKLKQQCGGQFTSKMEGMVTDLTLAKENQTSFEEYLSNNPNADPGIDLTVTVLTTGFWPSYKSFDLNLPAEMIRCVEVFKEFYQTKTKHRKLTWIYSLGTCNISGKFDPKTVELIVTTYQASALLLFNSSDRLSYSEIMTQLNLSDDDVIRLLHSLSCAKYKILNKEPNTKTISSTDYFEFNYKFTDKMRRIKIPLPPVDEKKKVIEDVDKDRRYAIDASIVRIMKSRKVLGYQQLVVECVEQLGRMFKPDVKAIKKRIEDLISRDYLERDKDNANMFKYLA

SEQ ID NO: 13555 - DNA, 2235 bp, Zea mays
  CDS (1)..(2235)
atggcggggcaggagcgtaggacaatcgatctggaggagggatgggcgttcatgcagaagggcatcaccaagctgaagaacatcctcgagggcaagcccgagccgcagttcagttccgaggactacatgatgctctacacgacgatatacaacatgtgcacgcagaagccgccgcacgactactcacagcagctctacgacaagtatcgggagtcgttcgaggagtacatcgcctccatggtactaccttcattaagggagaaacatgacgagtttatgctgagggagctagtgcaaaggtggtcaaaccataaagtcatggttcgctggctgtcacgcttcttttattaccttgaccgatacttcatatcaaggaggtcacttacaccacttaaagaagtgggccttacttgcttccgagagttgatctatcaagagattaaaggacaagttaaagatgcagtgatagctctgatagacaaagaacgtgagggtgaacagattgaccgggctctgttgaagaatgttttggatatttttgttgaaattgggctgggtcaaatggagtgttatgagaatgactttgaagatttcttgctcaaggatactacagagtactactctgtcaaagctcaaagctggattcttgaggactcatgcccagattacatgattaaggctgaggagtgtttgaagcgggagaaggagcgggttggtcactatttgcatattagcagtgaacaaaagttgttggagaaagtgcaaaatgaattgcttgctcagtatgcaaccccgctgttggagaaggagcattctggatgttctgctttgcttcgtgatgataaggttgaggacctttctaggatgtacaggctcttctccaaaatcagccgcggtctggagcctatttctaacatgtttaaaacgcatgttacaaatgagggcacagccttggtcaagcaagcagaagattctgctagcaataagaagccagaaaagaaggatatagttggcatgcaggagcaggtctttgtgtggaaaatcatcgagctgcatgacaaatatgtagcttatgtgacagaatgtttccagggacatacactcttccataaggcacttaaagaagcctttgaggtcttctgtaacaaaggtgtctctggcagttcgagtgccgagttgttggctaccttctgcgacaatattctgaagaaaggttgcagtgaaaagctcagtgatgaagccatcgaagatgcccttgagaaggtggtgagaatgcttgcatacatcagtgataaagacctgtttgccgagttctataggaagaagcttgcaagaagattactttttgacaaaagtgctaatgatgagcatgagagaagtattctgacaaagctcaaacaacagtgtgggggacagtttacttcaaaaatggagggcatggttactgaccttactgtcgctagagatcatcaaactaagtttgaggagtttgtagctggacatccagagttgaatcctgggatagacttagctgttactgttttgacaacgggattctggccaagctacaaaacttttgacataaaccttcctgccgagatggtgaaatgtgtagaggttttcaaggagttctatcaaacaagaacaaagcacaggaagctgacatggatttattccttgggaacctgcaacatcaatgctaagtttgatgctaaacctattgaacttattgttacaacatatcaggctgcattgctactactgtttaatggatctgacaggcttagttattctgagattgtaacacaattaaacctgtcagatgatgatgtagtgcgtttgctccattctctttcttgtgcaaaatacaagatccttaacaaggaaccagcaaatagatccatctcgcccaatgatgtttttgagttcaattcaaaatttactgacagaatgagaagaattaagattccactgcctcccgttgatgagaagaaaaaggttgttgaagatgttgacaaagacaggaggtatgcaattgatgcatcaattgtgcgcattatgaagagccgcaaagttatgggtcatcaacagctggttgctgaatgtgttgagcagctgagccgcatgttcaagcctgacttcaaagccataaagaagaggattgaggatctcattacaagggactacttggagcgcgacaaggacaacgctaatacgtacaaataccttgcctga

SEQ ID NO: 13556 - protein, 744 aa, Zea mays
MAGQERRTIDLEEGWAFMQKGITKLKNILEGKPEPQFSSEDYMMLYTTIYNMCTQKPPHDYSQQLYDKYRESFEEYIASMVLPSLREKHDEFMLRELVQRWSNHKVMVRWLSRFFYYLDRYFISRRSLTPLKEVGLTCFRELIYQEIKGQVKDAVIALIDKEREGEQIDRALLKNVLDIFVEIGLGQMECYENDFEDFLLKDTTEYYSVKAQSWILEDSCPDYMIKAEECLKREKERVGHYLHISSEQKLLEKVQNELLAQYATPLLEKEHSGCSALLRDDKVEDLSRMYRLFSKISRGLEPISNMFKTHVTNEGTALVKQAEDSASNKKPEKKDIVGMQEQVFVWKIIELHDKYVAYVTECFQGHTLFHKALKEAFEVFCNKGVSGSSSAELLATFCDNILKKGCSEKLSDEAIEDALEKVVRMLAYISDKDLFAEFYRKKLARRLLFDKSANDEHERSILTKLKQQCGGQFTSKMEGMVTDLTVARDHQTKFEEFVAGHPELNPGIDLAVTVLTTGFWPSYKTFDINLPAEMVKCVEVFKEFYQTRTKHRKLTWIYSLGTCNINAKFDAKPIELIVTTYQAALLLLFNGSDRLSYSEIVTQLNLSDDDVVRLLHSLSCAKYKILNKEPANRSISPNDVFEFNSKFTDRMRRIKIPLPPVDEKKKVVEDVDKDRRYAIDASIVRIMKSRKVMGHQQLVAECVEQLSRMFKPDFKAIKKRIEDLITRDYLERDKDNANTYKYLA

SEQ ID NO: 13557 - DNA, 2235 bp, Zea mays
  CDS (1)..(2235)
atggcagggcaggagcgtaggacaatcgatctggaggagggatgggcgtttatgcagaagggtatcaccaagctgaagaacatcctcgagggcaagcccgagcctcagttcagctccgaggactacatgatgctctacacgacgatatacaacatgtgcacgcagaagccgccgcacgactactcgcagcagctctacgacaagtatcgggagtcgttcgaggagtatatcacctccatggtactaccttcgctaagggagaaacatgatgagtttatgctgagggagctagtgcaaaggtggtcaaaccataaagtcatggttcgttggctctcgcgtttctttcattaccttgaccggtacttcatatcaaggaggtcacttaccccacttaaagaagttggtcttacttgcttccgagagttgatatatcaagagattaaagggcaagttaaagatgcggtgatagctctgatagacaaagaacgcgagggtgaacagattgaccggggtctgttgaagaatgtattggatatttttgttgaaattgggctgggtcaaatggagtgttatgagaatgactttgaagatttcttgctcaaggatactacagagtactactctgtcaaggctcaaagctggattcttgaggactcatgcccagattacatgattaaggctgaggagtgtttgaagcgggagaaggagcgggttggtcactatttgcatattagcagtgaacaaaagttgttggagaaagtgcaaaatgaattgcttgctcagtatgcaaccccgctgttggagaaggagcattctggatgttctgctttgcttcgtgatgataaggttgaggacctttctaggatgtacaggctcttctccaaaatcagccgcggtctggagcctatttctaacatgtttaaaacgcatgttacaaatgagggcacagccttggtcaagcaagcagaagattctgctagcaataagaagccagaaaagaaggatatagttggcatgcaggagcaggtctttgtgtggaaaatcatcgagctgcatgacaaatatgtagcttatgtgacagaatgtttccagggacatacactcttccataaggcacttaaagaagcctttgaggtcttctgtaacaaaggtgtctctggcagttcgagtgccgagttgttggctaccttctgcgacaatattctgaagaaaggttgcagtgaaaagctcagtgatgaagccatcgaagatgcccttgagaaggtggtgagaatgcttgcatacatcagtgataaagacctgtttgccgagttctataggaagaagcttgcaagaagattactttttgacaaaagtgctaatgatgagcatgagagaagtattctgacaaagctcaaacaacagtgtgggggacagtttacttcaaaaatggagggcatggttactgaccttactgtcgctagagatcatcaaactaagtttgaggagtttgtagctggacatccagagttgaatcctgggatagacttagctgttactgttttgacaacgggattctggccaagctacaaaacttttgacataaaccttcctgccgagatggtgaaatgtgtagaggttttcaaggagttctatcaaacaagaacaaagcacaggaagctgacatggatttattccttgggaacctgcaacatcaatgctaagtttgatgctaaacctattgaacttattgttacaacatatcaggctgcattgctactactgtttaatggatctgacaggcttagttattctgagattgtaacacaattaaacctgtcagatgatgatgtagtgcgtttgctccattctctttcttgtgcgaagtacaagatccttaacaaggaaccggctagtagatccatctctcccaatgatgtttttgagttcaattcaaagtttactgacagaatgagaagaatcaaggttccactccctcctgttgatgagaagaaaaaggttgttgaagatgttgacaaagacaggaggtatgcaattgatgcatcaattgtgcgcattatgaagagccgcaaagttatgggtcatcaacagctggttgctgaatgtgttgagcagctgagccgcatgttcaagcctgacttcaaagccataaagaagaggattgaggatctcattacaagggactacttggagcgcgacaaggacaacgctaatacgtacaaataccttgcctga

SEQ ID NO: 13558 - protein, 744 aa, Zea mays
MAGQERRTIDLEEGWAFMQKGITKLKNILEGKPEPQFSSEDYMMLYTTIYNMCTQKPPHDYSQQLYDKYRESFEEYITSMVLPSLREKHDEFMLRELVQRWSNHKVMVRWLSRFFHYLDRYFISRRSLTPLKEVGLTCFRELIYQEIKGQVKDAVIALIDKEREGEQIDRGLLKNVLDIFVEIGLGQMECYENDFEDFLLKDTTEYYSVKAQSWILEDSCPDYMIKAEECLKREKERVGHYLHISSEQKLLEKVQNELLAQYATPLLEKEHSGCSALLRDDKVEDLSRMYRLFSKISRGLEPISNMFKTHVTNEGTALVKQAEDSASNKKPEKKDIVGMQEQVFVWKIIELHDKYVAYVTECFQGHTLFHKALKEAFEVFCNKGVSGSSSAELLATFCDNILKKGCSEKLSDEAIEDALEKVVRMLAYISDKDLFAEFYRKKLARRLLFDKSANDEHERSILTKLKQQCGGQFTSKMEGMVTDLTVARDHQTKFEEFVAGHPELNPGIDLAVTVLTTGFWPSYKTFDINLPAEMVKCVEVFKEFYQTRTKHRKLTWIYSLGTCNINAKFDAKPIELIVTTYQAALLLLFNGSDRLSYSEIVTQLNLSDDDVVRLLHSLSCAKYKILNKEPASRSISPNDVFEFNSKFTDRMRRIKVPLPPVDEKKKVVEDVDKDRRYAIDASIVRIMKSRKVMGHQQLVAECVEQLSRMFKPDFKAIKKRIEDLITRDYLERDKDNANTYKYLA

SEQ ID NO: 13559 - DNA, 2220 bp, Zea mays
  CDS (1)..(2220)
atggcggggcaggagcgtaggacaatcgatctggaggagggatgggcgttcatgcagaagggcatcaccaagctgaagaacatcctcgagggcaagcccgagccgcagttcagttccgaggactacatgatgctctacacgacgatatacaacatgtgcacgcagaagccgccgcaggactactcacagcagctctacgacaagtatcgggagtcgttcgaggagtacatcgcctccatggtactaccttcattaagggagaaacatgacgagtttatgctgagggagctagtgcaaaggtggtcaaaccataaagtcatggttcgctggctgtcacgcttcttttattaccttgaccgatacttcatatcaaggaggtcacttacaccacttaaagaagtgggccttacttgcttccgagagttgatctatcaagagattaaaggacaagttaaagatgcagtgatagctctgatagacaaagaacgtgagggtgaacagattgaccgggctctgttgaagaatgttttggatatttttgttgaaattgggttgggtcaaatggagtgttatgagaatgactttgaagatttcttgctcaaggatactacagagtactactctgtcaaagctcaaagctggattcttgaggactcatgcccagattacatgattaaggctgaggagtgtttaaagcgggagaaggagcgagttggtcactatttgcatattagcagcgaacagaagttattggagaaagtgcaaaatgaattgcttgctcagtatgcaaccccgctgttagagaaggagcattctggatgttctgctttgcttcgcgatgacaaggttgaggatctttctaggatgtacagactcttctccaaaatctcccgtggtctggagcctatttcaaacatgttcaaaacgcatgtcacaagtgagggtacagccttggtcaagcaagcagaagattctgctagtaataagaagccagagaagaaggatatggttggcatgcaggaacaggtctttgtgtggaaaatcatcgagctgcatgacaaatatgtagcttatgtgacagaatgtttccagggacatacactcttccataaggcacttaaagaagcctttgaggtcttctgtaacaaaggtgtctctggcagttcgaatgctgagttgttggctaccttctgcgacaatattctgaagaaaggctgcagtgaaaagctcagtgatgaagccattgaagatgcccttgagaaggttgtgagattgctggcatacatcagtgataaagacctgtttgccgagttctatagaagattacttttcgacaaaagtgctaatgatgagcatgagagaagtattctgacaaagctcaagcaacagtgcggggggcagtttacttccaaaatggagggcatggttacggaccttactgtcgctagagatcaccaaactaagtttgaagagtttgtagctgggcatccagagttgaatcctggcatagatttggctgttactgttttgacaacgggattctggccaagctacaaaacttttgacataaaccttcctgcggagatggtgaaatgtgtagaggttttcaaggaattctatcaaacaagaacgaagcacaggaagctgacatggatttattccttgggaacctgcaacatcaatgctaagtttgatgctaaacctattgagctcattgttacgacatatcaggctgcattactactactgttcaatggatccgaaaggcttagttattctgaaattgcaacacaattaaacctgtcagatgatgatgtagtgcgtttgctccattcactttcttgtgcaaaatacaagatccttaacaaggaaccagcaaatagatccatctcgcccaatgatgtttttgagttcaattcaaaatttactgacagaatgagaagaattaagattccactgcctcccgttgatgagaagaaaaaggttgttgaagatgttgacaaagacaggaggtatgcaattgatgcatcaattgtgcgcattatgaagagccgcaaagttatgggtcatcaacagctggttgctgaatgtgttgagcagcttagccgcatgtttaagccggacttcaaagccataaagaagaggattgaggatctcatcacaagggactatttggagcgcgacaaggacaacgccaatacgtacaaataccttgcctga

SEQ ID NO: 13560 - protein, 739 aa, Zea mays
MAGQERRTIDLEEGWAFMQKGITKLKNILEGKPEPQFSSEDYMMLYTTIYNMCTQKPPQDYSQQLYDKYRESFEEYIASMVLPSLREKHDEFMLRELVQRWSNHKVMVRWLSRFFYYLDRYFISRRSLTPLKEVGLTCFRELIYQEIKGQVKDAVIALIDKEREGEQIDRALLKNVLDIFVEIGLGQMECYENDFEDFLLKDTTEYYSVKAQSWILEDSCPDYMIKAEECLKREKERVGHYLHISSEQKLLEKVQNELLAQYATPLLEKEHSGCSALLRDDKVEDLSRMYRLFSKISRGLEPISNMFKTHVTSEGTALVKQAEDSASNKKPEKKDMVGMQEQVFVWKIIELHDKYVAYVTECFQGHTLFHKALKEAFEVFCNKGVSGSSNAELLATFCDNILKKGCSEKLSDEAIEDALEKVVRLLAYISDKDLFAEFYRRLLFDKSANDEHERSILTKLKQQCGGQFTSKMEGMVTDLTVARDHQTKFEEFVAGHPELNPGIDLAVTVLTTGFWPSYKTFDINLPAEMVKCVEVFKEFYQTRTKHRKLTWIYSLGTCNINAKFDAKPIELIVTTYQAALLLLFNGSERLSYSEIATQLNLSDDDVVRLLHSLSCAKYKILNKEPANRSISPNDVFEFNSKFTDRMRRIKIPLPPVDEKKKVVEDVDKDRRYAIDASIVRIMKSRKVMGHQQLVAECVEQLSRMFKPDFKAIKKRIEDLITRDYLERDKDNANTYKYLA

SEQ ID NO: 13561 - DNA, 2235 bp, Oryza sativa
  CDS (1)..(2235)
atggcgacccacgagcggaagacgatcgatctggagcaggggtgggagttcatgcagaagggcatcaccaagctgaagaacatcctcgaggggaagcccgaaccccagttcagctccgaggactacatgatgctctacacgacgatttacaacatgtgcacgcagaagccgccgcacgactactcgcagcagctctacgagaagtaccgcgagtccttcgaggagtacatcacgtccatggtcttaccttcattaagagagaaacatgatgagtttatgctgagagagctagtaaaacggtggtcaaaccataaagtgatggttcggtggctatcacgcttcttccattatcttgatcggtactttatttcaaggaggtccctaccacaactaagtgaagttgggcttagctgtttccgggatctggtatatcaagagatcaaaggaaaagtaaaaagtgcggtgatatccttgatagatcaagaacgtgagggtgaacaaattgatagggccctgttaaagaatgttctggatatatttgttgagattggcttgactagcatggactactacgaaaatgattttgaagatttcttgctcaaagatactgcagactattactctataaaagcccagacctggattcttgaggactcttgtccagattacatgttaaaggcagaggagtgtctgaaaagggagaaagagcgagttgctcattatttgcactccagtagtgaacagaagttgttggagaaagtgcaacatgagttgctaactcaatacgcaagtcagctcctggagaaggagcattctggatgccatgcattgcttcgtgatgacaaggttgatgatctctctagaatgtacaggctcttttccagaataactcgtggtttagaacctgtttctcaaatatttaagcagcatgttactaatgagggcactgccttagtgaagcaagccgaagatgctgctagtaataagaagccagagaagaaggagatagttggtttacaggaacaggtttttgtccggaaaatcattgagcttcatgacaagtatgtagcttatgttacggattgttttcaggggcacactctcttccataaggcacttaaggaggcttttgaagttttttgcaacaaaggtgtttctggcagttcaagtgctgaattactagctaccttctgtgacaatatcttaaagaaaggcggtagtgaaaagcttagtgatgaagcaattgaagatacccttgagaaggttgtaaggttacttgcctacattagtgacaaggacttgtttgctgagttctatagaaagaagcttgcaaggagattgctttttgacaagagtgctaatgatgaacatgagagaagcatccttaccaagctaaagcaacaatgtggagggcagttcacttccaaaatggagggcatggttactgatctcactgtggcaagagatcaccaggctaaatttgaagagttcataagcacacactcagagttgaatcctggaatagccttagctgttactgtcctcacaacaggattttggccaagttacaaatcttttgatataaatctacctgcagaaatggtgaaatgtgtagaggttttcaaggagttttaccaaacaagaacaaaacacaggaaacttacctggatttattcactgggaacctgtaatattaatgctaaatttgaggccaaaactattgagctcattgttacaacttatcaggctgcattgctgctgctgtttaatggagttgatagactcagctattctgagattgtgacacagttaaatctctcagatgatgatgttgttcgattgctccattctctatcttgtgcaaaatacaagattcttagcaaagaaccaaataatagatctatttcaccaaatgatgtcttcgagttcaactcaaagtttactgacaagctgcgaagattaaagatacctcttcctccagttgatgagaagaagaaagtagttgaagatgttgataaggatcgcagatacgcaattgatgcatcaattgtgcgtattatgaagagtcgcaaagtattgggtcatcagcaacttgtgatggaatgtgtggagcagcttggacgcatgtttaagcctgacttcaaggcaataaagaagcgaattgaggatcttatcacaagggattacttggagagggataaagacaacccaaatgtgtacagatacttggcttga

SEQ ID NO: 13562 - protein, 744 aa, Oryza sativa
MATHERKTIDLEQGWEFMQKGITKLKNILEGKPEPQFSSEDYMMLYTTIYNMCTQKPPHDYSQQLYEKYRESFEEYITSMVLPSLREKHDEFMLRELVKRWSNHKVMVRWLSRFFHYLDRYFISRRSLPQLSEVGLSCFRDLVYQEIKGKVKSAVISLIDQEREGEQIDRALLKNVLDIFVEIGLTSMDYYENDFEDFLLKDTADYYSIKAQTWILEDSCPDYMLKAEECLKREKERVAHYLHSSSEQKLLEKVQHELLTQYASQLLEKEHSGCHALLRDDKVDDLSRMYRLFSRITRGLEPVSQIFKQHVTNEGTALVKQAEDAASNKKPEKKEIVGLQEQVFVRKIIELHDKYVAYVTDCFQGHTLFHKALKEAFEVFCNKGVSGSSSAELLATFCDNILKKGGSEKLSDEAIEDTLEKVVRLLAYISDKDLFAEFYRKKLARRLLFDKSANDEHERSILTKLKQQCGGQFTSKMEGMVTDLTVARDHQAKFEEFISTHSELNPGIALAVTVLTTGFWPSYKSFDINLPAEMVKCVEVFKEFYQTRTKHRKLTWIYSLGTCNINAKFEAKTIELIVTTYQAALLLLFNGVDRLSYSEIVTQLNLSDDDVVRLLHSLSCAKYKILSKEPNNRSISPNDVFEFNSKFTDKLRRLKIPLPPVDEKKKVVEDVDKDRRYAIDASIVRIMKSRKVLGHQQLVMECVEQLGRMFKPDFKAIKKRIEDLITRDYLERDKDNPNVYRYLA

SEQ ID NO: 13563 - DNA, 2199 bp, Oryza sativa
  CDS (1)..(2199)
atggcgacccacgagcggaagacgatcgatctggagcaggggtgggagttcatgcagaagggcatcaccaagctgaagaacatcctcgaggggaagcccgaaccccagttcagctccgaggactacatgatgctctacacgacgatttacaacatgtgcacgcagaagccgccgcacgactactcgcagcagctctacgagaagtaccgcgagtccttcgaggagtacatcacgtccatggtcttaccttcattaagagagaaacatgatgagtttatgctgagagagctagtaaaacggtggtcaaaccataaagtgatggttcggtggctatcacgcttcttccattatcttgatcggtactttatttcaaggaggtccctaccacaactaagtgaagttgggcttagctgtttccgggatctggtatatcaagagatcaaaggaaaagtaaaaagtgcggtgatatccttgatagatcaagaacgtgagggtgaacaaattgatagggccctgttaaagaatgttctggatatatttgttgagattggcttgactagcatggactactacgaaaatgattttgaagatttcttgctcaaagatactgcagactattactctataaaagcccagacctggattcttgaggactcttgtccagattacatgttaaaggcagaggagtgtctgaaaagggagaaagagcgagttgctcattatttgcactccagtagtgaacagaagttgttggagaaagtgcaacatgagttgctaactcaatacgcaagtcagctcctggagaaggagcattctggatgccatgcattgcttcgtgatgacaaggttgatgatctctctagaatgtacaggctcttttccagaataactcgtggtttagaacctgtttctcaaatatttaagcagcatgttactaatgagggcactgccttagtgaagcaagccgaagatgctgctagtaataagaaggtttttgtccggaaaatcattgagcttcatgacaagtatgtagcttatgttacggattgttttcaggggcacactctcttccataaggcacttaaggaggcttttgaagttttttgcaacaaaggtgtttctggcagttcaagtgctgaattactagctaccttctgtgacaatatcttaaagaaaggcggtagtgaaaagcttagtgatgaagcaattgaagatacccttgagaaggttgtaaggttacttgcctacattagtgacaaggacttgtttgctgagttctatagaaagaagcttgcaaggagattgctttttgacaagagtgctaatgatgaacatgagagaagcatccttaccaagctaaagcaacaatgtggagggcagttcacttccaaaatggagggcatggttactgatctcactgtggcaagagatcaccaggctaaatttgaagagttcataagcacacactcagagttgaatcctggaatagccttagctgttactgtcctcacaacaggattttggccaagttacaaatcttttgatataaatctacctgcagaaatggtgaaatgtgtagaggttttcaaggagttttaccaaacaagaacaaaacacaggaaacttacctggatttattcactgggaacctgtaatattaatgctaaatttgaggccaaaactattgagctcattgttacaacttatcaggctgcattgctgctgctgtttaatggagttgatagactcagctattctgagattgtgacacagttaaatctctcagatgatgatgttgttcgattgctccattctctatcttgtgcaaaatacaagattcttagcaaagaaccaaataatagatctatttcaccaaatgatgtcttcgagttcaactcaaagtttactgacaagctgcgaagattaaagatacctcttcctccagttgatgagaagaagaaagtagttgaagatgttgataaggatcgcagatacgcaattgatgcatcaattgtgcgtattatgaagagtcgcaaagtattgggtcatcagcaacttgtgatggaatgtgtggagcagcttggacgcatgtttaagcctgacttcaaggcaataaagaagcgaattgaggatcttatcacaagggattacttggagagggataaagacaacccaaatgtgtacagatacttggcttga

SEQ ID NO: 13564 - protein, 732 aa, Oryza sativa
MATHERKTIDLEQGWEFMQKGITKLKNILEGKPEPQFSSEDYMMLYTTIYNMCTQKPPHDYSQQLYEKYRESFEEYITSMVLPSLREKHDEFMLRELVKRWSNHKVMVRWLSRFFHYLDRYFISRRSLPQLSEVGLSCFRDLVYQEIKGKVKSAVISLIDQEREGEQIDRALLKNVLDIFVEIGLTSMDYYENDFEDFLLKDTADYYSIKAQTWILEDSCPDYMLKAEECLKREKERVAHYLHSSSEQKLLEKVQHELLTQYASQLLEKEHSGCHALLRDDKVDDLSRMYRLFSRITRGLEPVSQIFKQHVTNEGTALVKQAEDAASNKKVFVRKIIELHDKYVAYVTDCFQGHTLFHKALKEAFEVFCNKGVSGSSSAELLATFCDNILKKGGSEKLSDEAIEDTLEKVVRLLAYISDKDLFAEFYRKKLARRLLFDKSANDEHERSILTKLKQQCGGQFTSKMEGMVTDLTVARDHQAKFEEFISTHSELNPGIALAVTVLTTGFWPSYKSFDINLPAEMVKCVEVFKEFYQTRTKHRKLTWIYSLGTCNINAKFEAKTIELIVTTYQAALLLLFNGVDRLSYSEIVTQLNLSDDDVVRLLHSLSCAKYKILSKEPNNRSISPNDVFEFNSKFTDKLRRLKIPLPPVDEKKKVVEDVDKDRRYAIDASIVRIMKSRKVLGHQQLVMECVEQLGRMFKPDFKAIKKRIEDLITRDYLERDKDNPNVYRYLA

SEQ ID NO: 13565 - DNA, 2241 bp, Oryza sativa
  CDS (1)..(2241)
atgaatatgtcgccgcgcattccggtggtggacctcgaggacgggtggcgcgacgtgctcgccggcgtcgccaagctcaagtgcatcctcgatggctccaacgtcgtgcacttcgtccccgacgagtacatgcacctctacacgacggtttacaacatgtgcacgcagaagccgccgaacgactactcgcaggtgctctacgatcgctacaagcaggccctggacgatcacatcgaatccgtcgtgttgccctccttgaatgagaagcatggcgtgttccttctgagggaaatagtgcagaggtgggagaaacacaagctaatggtaaggtggctgaggaggttctttgactacctcgatcgttactatgttacacggaggtcccttgattcactcaaagatctgggctggagtagcttccgggatttggttttcgataagctcaaaagtactgtggcaacaattatgattggcatgattgatgatgagagggaaggcaatctaatagaccgtccactcctgaagaatgcccttgatatctatgttgaaattggggatagtcaactgaattattacagtgatgattttgaacaatcatttctcaacggaacaacagattactattctaagaaggcacaaacatggattcttgagaattcttgccctgaatacatgctcaaggctgaggaatgcttacaaaaagagaaagaccgggttgcaaattacttgcattctactacagaaccaaagctatttgcggctgcactcttcgagttgatagataggcgtgcagaagaaattctgaacaaggagaactccggatgcaaagtgttgctttgtgatgaaaagaccgaggatctagcaaggatgtttaggctcttctctaggataactgacgggctgcttccagtatcgaaaatatttaaggagcatgtcattgctgagggtatgtctctgctgaaacatgcaacagatgctgccaacagcagaaaggatgagaagaagggggtggtggtgggattgccggagcaggattttgtgaggagtgtcatagagctccatgacaaatatatggcatatgtcaccaactgtttccagagcaactcagtatttcacaaggcacttaaggaggcctttgaagttatttgcaacaaagatgttgttggttgcagtagtgctgaactgtttgcggcatactgtgatagtatcttaaaaagaggtggaagtgaaaagctaagtgatgaagctatagatgaaagtcttgagaaggttgtcaagcttctaacatatctcagcgacaaggacctctttgtagagtttcataggaagaaacttggaaggagattgctgtttgataagaatacaaatgacgaacatgagagaatcctactctccaagctgaagcaattcttcgggggacagtttacatcaaaaatggaggggatgctcaaagatattacattggcaaaagaacatcagtcaagttttgaggagtacgtaagcaacaatccagagtcaaatcctctgatagacttgaatgtgactgtcttgacaacaggatactggccaacatacaagaactcagatataaatcttccattggagatggttaaatgcgtggaggttttcaaggaatattatcggtccgacaagcaacacagaaagcttacctggatcttttccttgggaaactgcgtcgtcattggaaattttgatgctaaacctgttgagttcgttctcaacacttatcaggctgcattgttgctgctattcaatgaagctgataaactgagttactctgatattgtgtcacaattaaaactgtctgatgatgatgccgtgcgtttgcttcattcgctttcttgtgcaaagtataagattctcaacaaagagcctagcaacagagtgatttctccagaggacgagtttgagttcaattccaaatttaccgataggatgcgaaggattaaggtaccacttcctcaaatcgatgagaagaaaaaggttgtcgatgatgtcaacaaggacaggaggttcgcaattgatgcatctcttgtgcgcatcatgaaaagccgcaaagttctgggccatcagcaacttgtagcggaatgcgtggagcagctcagccgcatgtttaagcctgacatcaagatcatcaagaggaggatcgaggatcttatcagcagggagtacttggagcgtgattcggagaatgcccagacctacaaatacttggcttga

SEQ ID NO: 13566 - protein, 746 aa, Oryza sativa
MNMSPRIPVVDLEDGWRDVLAGVAKLKCILDGSNVVHFVPDEYMHLYTTVYNMCTQKPPNDYSQVLYDRYKQALDDHIESVVLPSLNEKHGVFLLREIVQRWEKHKLMVRWLRRFFDYLDRYYVTRRSLDSLKDLGWSSFRDLVFDKLKSTVATIMIGMIDDEREGNLIDRPLLKNALDIYVEIGDSQLNYYSDDFEQSFLNGTTDYYSKKAQTWILENSCPEYMLKAEECLQKEKDRVANYLHSTTEPKLFAAALFELIDRRAEEILNKENSGCKVLLCDEKTEDLARMFRLFSRITDGLLPVSKIFKEHVIAEGMSLLKHATDAANSRKDEKKGVVVGLPEQDFVRSVIELHDKYMAYVTNCFQSNSVFHKALKEAFEVICNKDVVGCSSAELFAAYCDSILKRGGSEKLSDEAIDESLEKVVKLLTYLSDKDLFVEFHRKKLGRRLLFDKNTNDEHERILLSKLKQFFGGQFTSKMEGMLKDITLAKEHQSSFEEYVSNNPESNPLIDLNVTVLTTGYWPTYKNSDINLPLEMVKCVEVFKEYYRSDKQHRKLTWIFSLGNCVVIGNFDAKPVEFVLNTYQAALLLLFNEADKLSYSDIVSQLKLSDDDAVRLLHSLSCAKYKILNKEPSNRVISPEDEFEFNSKFTDRMRRIKVPLPQIDEKKKVVDDVNKDRRFAIDASLVRIMKSRKVLGHQQLVAECVEQLSRMFKPDIKIIKRRIEDLISREYLERDSENAQTYKYLA

SEQ ID NO: 13567 - DNA, 2235 bp, Oryza sativa
  CDS (1)..(2235)
atggcggggcaggagcggaggacgatcgatctggaggagggatgggcgttcatgcagaagggcatcaccaagctgaagaacatcctcgagggcaagcccgagccacagttcagctccgaggactacatgatgctctacacgacgatatacaacatgtgcacgcagaagccgccgcacgactactcgcagcagctctacgacaagtaccgggagtcattcgaggagtacatcacctccatggtcttaccttcattaagagataaacatgacgagtttatgctgagggaactagtaaagaggtggtcaaaccataaaatcatggttcggtggctgtcacgtttcttcttttatcttgatcgatacttcatctcacggaggtcgcttataccacttgaacaagttgggcttacttgcttccgagatttgatataccaagaaatcaaaggacaagttaaaggtgcagtgatagctctgattgacaaagagcgtgaaggcgaacagatagacagggccctgctgaagaatgtcctgggcatatttgttgaaattggactaggcagtatggaatgttatgagaatgactttgaagatttcttgcttaaggatactacagattactactctctcaaggctcaaagctggattctcgaggactcttgtcctgattacatgataaaggctgaggagtgcttgaagaaagagaaggagcgagttggtcactacttgcatattagtagtgaacagaagttactggagaaagtgcaaaatgaattgcttgcacaatatgcaactcccctgttggagaaggagcattctgggtgttttgcattgcttcgtgatgacaaggaggaagacctttctaggatgtacaggctcttctccaaaattaaccgcggtctagaacctattgctaacatgtttaaaacgcatgttacaaatgagggcacagccttggtcaagcaagcagaagattctgctagtaataagaagcccgagaaaaaggacatggttggtatgcaggaacaggtttttgtctggaaaatcattgagctccatgacaagtatgtagcttatgtcacagaatgtttccagggtcacaccctctttcataaggcccttaaagaagcattcgaggtcttctgtaacaagggtgtctctggcagttcaagtgctgaactgcttgccaccttctgtgacaatattctgaagaaaggttgcagtgaaaagctcagtgatgaagccatcgaagatgctcttgagaaggtggtgcgattgcttgcatacatcagcgataaagacctctttgctgagttttacaggaaaaaacttgcaaggagattgctttttgataagagtgccaatgatgaacatgaaagaagcatacttaccaaactcaagcagcagtgtggtggacaatttacttctaaaatggagggaatggttactgatcttactgttgcaagggaccatcaaactaagtttgaagagtttgtggctgcacatcaggagttgaatcctgggatagacttggctgtcactgttttgacaacaggattctggccaagttacaagactttcgatattaaccttcctgctgagatggtgaaatgcgtggaggttttcaaggagttttaccaaacaagaacaaaacacagaaagcttacctggatatattccttgggaacctgcaatatcaatgcaaagtttgaggcaaaaactattgagctcattgtcacaacatatcaggctgcgttgctgctgctattcaacggatctgacaggcttacttattctgagattgtaacacagctaaacttatcagatgatgatgtagtgcgtttgctccattctctctcctgtgcaaaatacaagattcttaacaaggaaccagctaatagatctatttctcccaacgatgtttttgagttcaattcaaaattcactgacaggatgagaagaattaagatacccctacctcctgttgatgaaaagaaaaaggttgtcgaagatgttgacaaggacaggcggtatgcaattgatgcatcgattgtgcgcattatgaagagtcgcaaagttatgggccatcagcagctagttgcggaatgtgtggagcagctcagccgcatgttcaagcctgacttcaaagccatcaagaagcgaatcgaggacctcatcacaagggattacctggaacgcgagaaggacaacgctaatgtgtacagatacctggcttga

SEQ ID NO: 13568 - protein, 744 aa, Oryza sativa
MAGQERRTIDLEEGWAFMQKGITKLKNILEGKPEPQFSSEDYMMLYTTIYNMCTQKPPHDYSQQLYDKYRESFEEYITSMVLPSLRDKHDEFMLRELVKRWSNHKIMVRWLSRFFFYLDRYFISRRSLIPLEQVGLTCFRDLIYQEIKGQVKGAVIALIDKEREGEQIDRALLKNVLGIFVEIGLGSMECYENDFEDFLLKDTTDYYSLKAQSWILEDSCPDYMIKAEECLKKEKERVGHYLHISSEQKLLEKVQNELLAQYATPLLEKEHSGCFALLRDDKEEDLSRMYRLFSKINRGLEPIANMFKTHVTNEGTALVKQAEDSASNKKPEKKDMVGMQEQVFVWKIIELHDKYVAYVTECFQGHTLFHKALKEAFEVFCNKGVSGSSSAELLATFCDNILKKGCSEKLSDEAIEDALEKVVRLLAYISDKDLFAEFYRKKLARRLLFDKSANDEHERSILTKLKQQCGGQFTSKMEGMVTDLTVARDHQTKFEEFVAAHQELNPGIDLAVTVLTTGFWPSYKTFDINLPAEMVKCVEVFKEFYQTRTKHRKLTWIYSLGTCNINAKFEAKTIELIVTTYQAALLLLFNGSDRLTYSEIVTQLNLSDDDVVRLLHSLSCAKYKILNKEPANRSISPNDVFEFNSKFTDRMRRIKIPLPPVDEKKKVVEDVDKDRRYAIDASIVRIMKSRKVMGHQQLVAECVEQLSRMFKPDFKAIKKRIEDLITRDYLEREKDNANVYRYLA

SEQ ID NO: 13569 - DNA, 2229 bp, Oryza sativa
  CDS (1)..(2229)
atgggcgttcatgcagaagggcatcaccaagctgaagaacatcctcgagggcaagcccgagccacagttcagctccgaggactacatgatgctctacacgtacgtcccccgccgccgccgccgcctcctcctgggacgatatacaacatgtgcacgcagaagccgccgcacgactactcgcagcagctctacgacaagtaccgggagtcattcgaggagtacatcacctccatggtcttaccttcattaagagataaacatgacgagtttatgctgagggaactagtaaagaggtggtcaaaccataaaatcatggttcggtggctgtcacgtttcttcttttatcttgatcgatacttcatctcacggaggtcgcttataccacttgaacaagttgggcttacttgcttccgagatttgatataccaagaaatcaaaggacaagttaaaggtgcagtgatagctctgattgacaaagagcgtgaaggcgaacagatagacagggccctgctgaagaatgtcctgggcatatttgttgaaattggactaggcagtatggaatgttatgagaatgactttgaagatttcttgcttaaggatactacagattactactctctcaaggctcaaagctggattctcgaggactcttgtcctgattacatgataaaggctgaggagtgcttgaagaaagagaaggagcgagttggtcactacttgcatattagtagtgaacagaagttactggagaaagtgcaaaatgaattgcttgcacaatatgcaactcccctgttggagaaggagcattctgggtgttttgcattgcttcgtgatgacaaggaggaagacctttctaggatgtacaggctcttctccaaaattaaccgcggtctagaacctattgctaacatgtttaaaacgcatgttacaaatgagggcacagccttggtcaagcaagcagaagattctgctagtaataagaagcccgagaaaaaggacatggttggtatgcaggaacaggtttttgtctggaaaatcattgagctccatgacaagtatgtagcttatgtcacagaatgtttccagggtcacaccctctttcataaggcccttaaagaagcattcgaggtcttctgtaacaagggtgtctctggcagttcaagtgctgaactgcttgccaccttctgtgacaatattctgaagaaaggttgcagtgaaaagctcagtgatgaagccatcgaagatgctcttgagaaggtggtgcgattgcttgcatacatcagcgataaagacctctttgctgagttttacaggaaaaaacttgcaaggagattgctttttgataagagtgccaatgatgaacatgaaagaagcatacttaccaaactcaagcagcagtgtggtggacaatttacttctaaaatggagggaatggttactgatcttactgttgcaagggaccatcaaactaagtttgaagagtttgtggctgcacatcaggagttgaatcctgggatagacttggctgtcactgttttgacaacaggattctggccaagttacaagactttcgatattaaccttcctgctgagatggtgaaatgcgtggaggttttcaaggagttttaccaaacaagaacaaaacacagaaagcttacctggatatattccttgggaacctgcaatatcaatgcaaagtttgaggcaaaaactattgagctcattgtcacaacatatcaggctgcgttgctgctgctattcaacggatctgacaggcttacttattctgagattgtaacacagctaaacttatcagatgatgatgtagtgcgtttgctccattctctctcctgtgcaaaatacaagattcttaacaaggaaccagctaatagatctatttctcccaacgatgtttttgagttcaattcaaaattcactgacaggatgagaagaattaagatacccctacctcctgttgatgaaaagaaaaaggttgtcgaagatgttgacaaggacaggcggtatgcaattgatgcatcgattgtgcgcattatgaagagtcgcaaagttatgggccatcagcagctagttgcggaatgtgtggagcagctcagccgcatgttcaagcctgacttcaaagccatcaagaagcgaatcgaggacctcatcacaagggattacctggaacgcgagaaggacaacgctaatgtgtacagatacctggcttga

SEQ ID NO: 13570 - protein, 742 aa, Oryza sativa
MGVHAEGHHQAEEHPRGQARATVQLRGLHDALHVRPPPPPPPPPGTIYNMCTQKPPHDYSQQLYDKYRESFEEYITSMVLPSLRDKHDEFMLRELVKRWSNHKIMVRWLSRFFFYLDRYFISRRSLIPLEQVGLTCFRDLIYQEIKGQVKGAVIALIDKEREGEQIDRALLKNVLGIFVEIGLGSMECYENDFEDFLLKDTTDYYSLKAQSWILEDSCPDYMIKAEECLKKEKERVGHYLHISSEQKLLEKVQNELLAQYATPLLEKEHSGCFALLRDDKEEDLSRMYRLFSKINRGLEPIANMFKTHVTNEGTALVKQAEDSASNKKPEKKDMVGMQEQVFVWKIIELHDKYVAYVTECFQGHTLFHKALKEAFEVFCNKGVSGSSSAELLATFCDNILKKGCSEKLSDEAIEDALEKVVRLLAYISDKDLFAEFYRKKLARRLLFDKSANDEHERSILTKLKQQCGGQFTSKMEGMVTDLTVARDHQTKFEEFVAAHQELNPGIDLAVTVLTTGFWPSYKTFDINLPAEMVKCVEVFKEFYQTRTKHRKLTWIYSLGTCNINAKFEAKTIELIVTTYQAALLLLFNGSDRLTYSEIVTQLNLSDDDVVRLLHSLSCAKYKILNKEPANRSISPNDVFEFNSKFTDRMRRIKIPLPPVDEKKKVVEDVDKDRRYAIDASIVRIMKSRKVMGHQQLVAECVEQLSRMFKPDFKAIKKRIEDLITRDYLEREKDNANVYRYLA

SEQ ID NO: 13571 - DNA, 2235 bp, Glycine max
  CDS (1)..(2235)
atgtcaatgagtgagcggaagactattgacctagaacagggatgggatttcatgcagaagggcatcaccaagctcaagaacattctagaaggcttgcccgagcctcaattcagctccgaggactacatgatgctttacacgaccatctacaacatgtgcactcaaaagcctcctcatgactattcccaacaactttatgacaagtataaggagtcttttgaagagtacatcgtatcgacggtattgccttctttgagagagaagcacgatgaatttatgttgagagaacttgtgaagagatgggcgaaccataaaattatggttcggtggctttctcggttctttcactatttggatcggtactttattgctcggaggtcacttccgccccttaatgaagttgggttgacttgcttccgtgatttggtttacaaggaactaaatgggaaagttagagatgcagttatttcacttattgatcaagaacgggagggagagcagattgatcgagctctgttaaagaatgtattagacatatttgttgaaattggaatggggcaaatggatcactatgagaatgattttgaagccgccatgctcaaagacacttctgcttattattctcgaaaggcttcgaattggattctagaagattcttgtcctgattatatgctcaaggctgaggagtgcttaaaacgggagaaagatagggttgctcattacttgcactctagtagcgagccaaagttattagagaaagttcaacatgagttgttatctgtgtatgcaaaccaactccttgagaaagagcactctggatgtcatgctttacttagagatgacaaggttgaagacttgtcaagaatgttcaggctattctctaaaatacctcgaggcttagatcctgtttccagtatatttaagcagcatgttaccactgaaggtatggctttggtgaagcatgctgaagatgcagctagcaacaaaaaggcagagaagaaggatatcgtaggtctgcaggagcaggtttttgttcgcaaggtgattgagctgcatgacaagtacctggcatatgtgaacgattgtttccagaatcatactcttttccacaaggctcttaaagaggcttttgaggtcttttgcaacaaaggtgttgctggaagttcaagcgcagaactgcttgcctccttctgtgataacattcttaagaaaggaggaagtgaaaaattaagtgatgaagcaattgaagaaactcttgaaaaggtggtcaagctgcttgcctatattagtgacaaagacttgtttgctgaattttataggaagaagcttgctcgaaggcttctctttgacaagagtgccaatgatgatcacgagcgaagtattttgacaaaattgaagcaacaatgtggtggacagtttacctcaaagatggaaggaatggttacagatttgacactggcaaaggagaatcaaactagctttgaggagtatttaagcaataatcccaatgcagaccctggcatagacttgacagttacagttctgactactggcttctggcctagttacaaatcttttgatctcaatcttcctgcagaaatgataaggtgtgttgaagttttcaaagaattttatcaaactaaaacgaagcacagaaaacttacatggatttattccttgggtacgtgtaatataagtgggaaatttgacccaaaaaccgtggagctgattgttacaacctaccaggcttcagcattactgctttttaattcgtctgatagactgagttactcagagataatgactcagttaaacttatctgacgatgatgttattagactgctccattccttatcatgtgccaagtacaagattctcaacaaggagccaaatacaaaaacaatattgtccactgattattttgaatttaattccaaatttactgacaaaatgaggagaatcaagattcctcttcctcctgtggatgagaagaaaaaggttattgaggatgttgacaaggacagaagatatgctattgatgcctcaattgtgcgtattatgaagagtcgtaaagttttgggctaccaacaattagtcatggagtgtgttgagcagttaggtcgcatgtttaagcctgacgtcaaggctattaaaaagcggattgaagatttgatttctcgtgactacttggaaagagacaaagataatgctaatatgttcaagtacttggcttga

SEQ ID NO: 13572 - protein, 744 aa, Glycine max
MSMSERKTIDLEQGWDFMQKGITKLKNILEGLPEPQFSSEDYMMLYTTIYNMCTQKPPHDYSQQLYDKYKESFEEYIVSTVLPSLREKHDEFMLRELVKRWANHKIMVRWLSRFFHYLDRYFIARRSLPPLNEVGLTCFRDLVYKELNGKVRDAVISLIDQEREGEQIDRALLKNVLDIFVEIGMGQMDHYENDFEAAMLKDTSAYYSRKASNWILEDSCPDYMLKAEECLKREKDRVAHYLHSSSEPKLLEKVQHELLSVYANQLLEKEHSGCHALLRDDKVEDLSRMFRLFSKIPRGLDPVSSIFKQHVTTEGMALVKHAEDAASNKKAEKKDIVGLQEQVFVRKVIELHDKYLAYVNDCFQNHTLFHKALKEAFEVFCNKGVAGSSSAELLASFCDNILKKGGSEKLSDEAIEETLEKVVKLLAYISDKDLFAEFYRKKLARRLLFDKSANDDHERSILTKLKQQCGGQFTSKMEGMVTDLTLAKENQTSFEEYLSNNPNADPGIDLTVTVLTTGFWPSYKSFDLNLPAEMIRCVEVFKEFYQTKTKHRKLTWIYSLGTCNISGKFDPKTVELIVTTYQASALLLFNSSDRLSYSEIMTQLNLSDDDVIRLLHSLSCAKYKILNKEPNTKTILSTDYFEFNSKFTDKMRRIKIPLPPVDEKKKVIEDVDKDRRYAIDASIVRIMKSRKVLGYQQLVMECVEQLGRMFKPDVKAIKKRIEDLISRDYLERDKDNANMFKYLA

SEQ ID NO: 13573 - DNA, 2175 bp, Glycine max
  CDS (1)..(2175)
atggagcggaagatcattgattttgaccaaggctgggattatatgcagaaggggattaccaagctgaagagaattcttgaaggagcaccggaaactcctttcagttctgaggaatacatgatgctatacacaaccatttataatatgtgtactcagaagccaccgaatgacttttcacaacagctttatgacaaatacaaggatgcttttgatgaatacattaataccaccgttttgccatctctaagagagaagcatgatgaattcatgctgagggagcttgtccaaagatggttaaatcataaagttatggtccggtggctttcacgctttttccattatcttgatcgctacttcatttctcgacgctccctggctggacttggggcagttggcctcacttgcttccgtgattcagtttatatggaggtacgagtcaatgctaggaaagctgtgattgcacttattgataaagaacgtgagggtgaacaaattgatagatcgttgttgaaaaatgttcttgatatatttgttgagattggtatgggcgaaatggatcaatatgaacaggattttgaggtacatatgcttgaggatactgccgattactacaaaagtaaggctgcaaactggattgagattgactcctgcccagattatatgcttaaggcaagtctggagagagatagagtgtctcattacttacactctagcactgagcagaaattggtagagaaagtgcaacaagaggtgctggtgattcatgcaaatcaattactcgagaaagagaactctggctgccatgccttacttagagatgataaggtggaagatctctcgaggatgtatagactttaccataaaatacctaaaggcttggatcctgtagccaatgtattcaagcagcatattacagctgagggtgcagcattggttcaacaagctgaagaagcttcgagcaatcaggtccttgtccgaaaatttctagagctccatgacaagtatatggcatatgttaatgattgctttatgaatcatacactgttccacaaggcattaaaggaggcatttgagatattctgcaataaaactgttggtggtagttccagtgctgaacttttatctacattctgtgacaatatccttaagaaaggtggaagtgagaagctaagtgatgaagcaattgaagatacccttgagaaggtagtcaagttgcttgcatatatcagtgataaggatctctttgcagaattttacaggaagaagcttgcccgaagattactttttgacaggagtgccaatgatgaccatgaaaagtgtattttgacaaagttaaagcagcagtgtggtggccagttcacatcaaagatggaggggatggtggtagacttgacattggctagggataatcagctgaaatttgaggagtatcttcgtgataactcacatgtaaatcctggaattgacctgacagtaactgtgcttaccacaggattttggcctagttataagtcttttgatctcaaccttccttcagagatgatcagatgcttggaagtttttaagggcttctatgaaacgaggacaaaacacagaaaacttacttggatatactcactgggaacatgccacgtcactggcaagtttgatacaaaaaacattgaactaattgtgccaacctatccggctgctgccctactgctattcaacaatgctgataggttgagctattcagagattttgactcagctgaacttgggccatgaagatgttgttagattgctccattcactgtcatgtgcaaaatataagatacttatcaaggagccaaacaataaagttatatctcaaaatgacatctttgagttcaaccacaaatttacggataaaatgagaaggatcaagatacctctaccaccagctgatgaaagaaaaaaggtaattgaagatgttgacaaagatcggagatatgccattgatgcagcaattgtgcgcattatgaagagtaggaaaattttgggtcatcaacaactagttttggagtgtgttgagcagttgggccgcatgttcaagcctgatatcaaagcaatcaagaagaggatcgaagatctcatcactcgggactacctggaaagggacaaagataacccaaacaccttcaggtatctggcataa

SEQ ID NO: 13574 - protein, 724 aa, Glycine max
MERKIIDFDQGWDYMQKGITKLKRILEGAPETPFSSEEYMMLYTTIYNMCTQKPPNDFSQQLYDKYKDAFDEYINTTVLPSLREKHDEFMLRELVQRWLNHKVMVRWLSRFFHYLDRYFISRRSLAGLGAVGLTCFRDSVYMEVRVNARKAVIALIDKEREGEQIDRSLLKNVLDIFVEIGMGEMDQYEQDFEVHMLEDTADYYKSKAANWIEIDSCPDYMLKASLERDRVSHYLHSSTEQKLVEKVQQEVLVIHANQLLEKENSGCHALLRDDKVEDLSRMYRLYHKIPKGLDPVANVFKQHITAEGAALVQQAEEASSNQVLVRKFLELHDKYMAYVNDCFMNHTLFHKALKEAFEIFCNKTVGGSSSAELLSTFCDNILKKGGSEKLSDEAIEDTLEKVVKLLAYISDKDLFAEFYRKKLARRLLFDRSANDDHEKCILTKLKQQCGGQFTSKMEGMVVDLTLARDNQLKFEEYLRDNSHVNPGIDLTVTVLTTGFWPSYKSFDLNLPSEMIRCLEVFKGFYETRTKHRKLTWIYSLGTCHVTGKFDTKNIELIVPTYPAAALLLFNNADRLSYSEILTQLNLGHEDVVRLLHSLSCAKYKILIKEPNNKVISQNDIFEFNHKFTDKMRRIKIPLPPADERKKVIEDVDKDRRYAIDAAIVRIMKSRKILGHQQLVLECVEQLGRMFKPDIKAIKKRIEDLITRDYLERDKDNPNTFRYLA

SEQ ID NO: 13575 - DNA, 2235 bp, Glycine max
  CDS (1)..(2235)
atgtcaatgagtgagcggaagactattgacctagaacagggatgggatttcatgctgaagggcatcaccaagctcaagaacattctcgaaggcttgcccgagcctcaattcagctccgaggactacatgatgctttacacgaccatctacaacatgtgcactcaaaaacctcctcatgactattcccaacaactttacgacaagtataaggagtcttttgaagagtacatcgtatcaacggtattaccttctttgagagagaaacacgatgaatttatgttgagagaacttgtgaagagatgggcgaaccataaaattatggttcggtggctttctcggttctttcattatttggatcgatactttattgctcggaggtcacttccgccccttaatgaagttgggttgacttgcttccgcgatttgatttacaaggaactaaatgggaaagttagagatgcagttatttcactaattgatcaagaacgggagggagaacagattgatcgagctctattaaagaatgtattagacatatttgttgaaattggaatggggcaaatggatcactatgagaatgattttgaagctgccatgctcaaagacacttcttcttattattctcgaaaggcttcaaattggatcctagaagattcttgtcctgattatatgctcaaggctgaggagtgcttaaaacgggagaaagatagggttgctcattacttgcactctagtagcgagccaaagttattagagaaagttcaacatgagttgttatctgtgtatgcaaaccaactccttgagaaagagcactctggatgtcatgctttacttagagatgataaggttgaagacttgtcaagaatgttcaggctattctctaaaatacctcgaggcttagatcctgtttccaatatatttaaacagcatgttaccactgaaggtatggctttggtgaagcaggctgaagatgcagctagcaacaaaaaggcagaaaaaaaggatattgtaggtctgcaggagcaggtttttgttcggaaggtgattgagctgcatgacaagtacctggcatatgtgaatgattgtttccagaatcatactcttttccacaaggctcttaaagaggcttttgaggtcttttgcaacaaaggtgttgctggaagttcaagcgcagaactgcttgcctccttctgtgataacattcttaagaaaggaggaagtgaaaaattaagtgatgaagcaattgaagaaactcttgaaaaggtggtcaagctgcttgcctatattagtgacaaagacttgtttgctgaattctataggaagaagcttgctcgaaggcttctctttgacaagagtgccaatgatgatcatgagcgaagtattttgacaaaattgaagcaacaatgtggtggacagtttacctcaaagatggaaggaatggttacagatttgacactggcaaaggagaatcaaactagctttgaggagtatttaagcaataatcccaatgcagaccctggcatagacttgacagttacagttctgactactggtttctggcctagttacaaatcttttgatctcaatcttcctgcagaaatgattaggtgtgttgaagttttcaaagaattttatcaaactaaaacaaagcacaggaaacttacatggatttattcgttgggtacctgtaatataagtgggaaatttgacccaaaaaccgtggagctgattgttacaacctaccaggcttcagcattactgctttttaatttgtcagatagactgagttactctgagataatgactcagttaaacttatctgacgatgatgttattagattgctccattccttatcatgtgccaagtacaagattctcaacaaggagccaaatacaaaaacaatctcgtccactgattattttgaatttaattataaatttactgacaaaatgaggagaatcaagattcctcttcctcccgtggatgagaagaaaaaagtaattgaggatgttgacaaggacagaagatatgctattgatgcctcaattgtgcgtattatgaagagtagaaaagttttgggctaccaacaattagtcgttgagtgtgttgagcagttaggtcgcatgtttaagcctgacgtcaaggctattaaaaagcggattgaagatttgatttctcgtgactacttggaaagagacaaagataatgctaatatgttcaagtacttggcttga

SEQ ID NO: 13576 - protein, 744 aa, Glycine max
MSMSERKTIDLEQGWDFMLKGITKLKNILEGLPEPQFSSEDYMMLYTTIYNMCTQKPPHDYSQQLYDKYKESFEEYIVSTVLPSLREKHDEFMLRELVKRWANHKIMVRWLSRFFHYLDRYFIARRSLPPLNEVGLTCFRDLIYKELNGKVRDAVISLIDQEREGEQIDRALLKNVLDIFVEIGMGQMDHYENDFEAAMLKDTSSYYSRKASNWILEDSCPDYMLKAEECLKREKDRVAHYLHSSSEPKLLEKVQHELLSVYANQLLEKEHSGCHALLRDDKVEDLSRMFRLFSKIPRGLDPVSNIFKQHVTTEGMALVKQAEDAASNKKAEKKDIVGLQEQVFVRKVIELHDKYLAYVNDCFQNHTLFHKALKEAFEVFCNKGVAGSSSAELLASFCDNILKKGGSEKLSDEAIEETLEKVVKLLAYISDKDLFAEFYRKKLARRLLFDKSANDDHERSILTKLKQQCGGQFTSKMEGMVTDLTLAKENQTSFEEYLSNNPNADPGIDLTVTVLTTGFWPSYKSFDLNLPAEMIRCVEVFKEFYQTKTKHRKLTWIYSLGTCNISGKFDPKTVELIVTTYQASALLLFNLSDRLSYSEIMTQLNLSDDDVIRLLHSLSCAKYKILNKEPNTKTISSTDYFEFNYKFTDKMRRIKIPLPPVDEKKKVIEDVDKDRRYAIDASIVRIMKSRKVLGYQQLVVECVEQLGRMFKPDVKAIKKRIEDLISRDYLERDKDNANMFKYLA

SEQ ID NO: 13577 - DNA, 2175 bp, Glycine max
  CDS (1)..(2175)
atggagcgaaagatcattgattttgaccaaggttgggactatatgcagaaggggattaccaagctgaagaaaattcttgaaggagcaccagaaactcctttcagttctgaggaatacatgatgctatacacaaccatatataatatgtgtactcagaagcctccgaatgacttttcacaacagctttatgacaagtacaaggatgctttcgatgaatacatcaaaatcaccgttttgccatctctaagagagaagcatgatgaattcatgctgagggagcttgtccaaagatggctaaatcataaagtcatggtccggtggctttcgcgcttcttccattatcttgatcgctacttcatttctcgacgctccctgcctggactcggtgcagttggcctcacttgcttccgtgaatcggtttatatggaggtacgagtcaatgctaggaaagctgtgattgcacttattgataaagaacgtgagggtgaacaaattgatagatcgttgttgaaaaatgttcttgatatatttgttgagattggtatgggtgaaatgggtcaatatgaacaggattttgaggtacatatgcttgaggatactgccgattattacaaaagtaaggctgcaaactggattgagattgactcctgcccagattatatgcttaaggcaagtctggagagagatagagtgtctcattacttacactgtagcactgagcagaaattggtagagaaagtgcaactagagctgctggtgactcatgcaaatcaattactcgagaaagagaactctggctgtcatgccttacttagagatgataaggtggaagatctgtctaggatgtatagactttaccataaaatacctaaaggcttggatcctgttgccaatgtattcaagcagcatattacggttgagggtacatcattggttcaacaagctgaagaagctactagcaatcaggtccttgtccgtaaatttttagagctccatgacaaatatatggtgtatgttaatgattgctttatgaatcatacactgttccacaaggcattaaaggaagcatttgagatattctgcaataaaactgttgctggtagttccagtgctgaacttttatctacattctgtgacaatatccttaagaaaggtggaagtgagaagctaagtgatgaagcaattgaagatacccttgagaaggtagtcaagttgcttgcatatatcagtgataaggatctctttgcagaattttacaggaaaaagcttgcccgaaggttactttttgacaggagtgcaaatgatgaccatgaaaagtgtattttgacaaagttaaagcagcagtgtggtggccagttcacatcaaagatggaagggatggtggtagacttgacattggctagggataatcagctgaaatttgaggagtatcttcgtgataactcacatgtaaatcctggaattgacctgacagtaactgtgcttaccacaggattttggcctagttataagtcttttgatctcaaccttccttcagagatgatcaggtgcttggaagtttttaagggcttctatgaaacgaggacaaaacacagaaaacttacttggatatactctctgggaacatgccacgtcactggcaagtttgaaacaaaaaacattgaactaattgtgccaacctatccagctgctgccctactgctattcaacaatgctgataggttgagctattcagagattatgactcagctgaacttgggccatgaagatgttgctagattgctccattcactgtcatctgcaaaatataagatacttatcaaggagccaaacaataaagttatatctcaaagtgacatctttgagttcaactacaaatttacggataaaatgagaaggatcaagatccctctaccaccagctgatgaaaggaaaaaggtaattgaagatgttgacaaagatcggcgatatgccattgatgcagcaattgtgcgcattatgaagagtaggaaaattttgggtcatcaacaattagttttggagtgtgttgagcagttgggccgcatgttcaagcctgacatcaaagcaatcaagaagaggattgaagatctcatcactcgggactaccttgaaagggacaaagataacccaaacaccttcaggtatttggcataa

SEQ ID NO: 13578 - protein, 724 aa, Glycine max
MERKIIDFDQGWDYMQKGITKLKKILEGAPETPFSSEEYMMLYTTIYNMCTQKPPNDFSQQLYDKYKDAFDEYIKITVLPSLREKHDEFMLRELVQRWLNHKVMVRWLSRFFHYLDRYFISRRSLPGLGAVGLTCFRESVYMEVRVNARKAVIALIDKEREGEQIDRSLLKNVLDIFVEIGMGEMGQYEQDFEVHMLEDTADYYKSKAANWIEIDSCPDYMLKASLERDRVSHYLHCSTEQKLVEKVQLELLVTHANQLLEKENSGCHALLRDDKVEDLSRMYRLYHKIPKGLDPVANVFKQHITVEGTSLVQQAEEATSNQVLVRKFLELHDKYMVYVNDCFMNHTLFHKALKEAFEIFCNKTVAGSSSAELLSTFCDNILKKGGSEKLSDEAIEDTLEKVVKLLAYISDKDLFAEFYRKKLARRLLFDRSANDDHEKCILTKLKQQCGGQFTSKMEGMVVDLTLARDNQLKFEEYLRDNSHVNPGIDLTVTVLTTGFWPSYKSFDLNLPSEMIRCLEVFKGFYETRTKHRKLTWIYSLGTCHVTGKFETKNIELIVPTYPAAALLLFNNADRLSYSEIMTQLNLGHEDVARLLHSLSSAKYKILIKEPNNKVISQSDIFEFNYKFTDKMRRIKIPLPPADERKKVIEDVDKDRRYAIDAAIVRIMKSRKILGHQQLVLECVEQLGRMFKPDIKAIKKRIEDLITRDYLERDKDNPNTFRYLA

SEQ ID NO: 13579 - DNA, 2235 bp, Glycine max
  CDS (1)..(2235)
atgtccatgagtgagcgcaagactattgacctagatcaaggatgggattttatgcagaagggcattttgaagctgaagaacattctagaagggcttcccgagcctcagttcagctcggaggactatatgatgctctacacgaccatatacaatatgtgcactcagaagcctcctcatgactattcccaacaactgtatgacaagtacagggaatcatttgaagagtacatcgtatcaacggtattaccatctttgagagagaagcatgatgaatttatgttaagagaacttgtaaaaaggtgggcaaaccataaaattatggttaggtggctttctcgtttctttcactacttggaccgctactttattgctcgaaggtcacttccgccacttaatgaagttgggttgacttgcttccgtgatttggtttacaaggaactaaacgggaaagtgagagatgcagtgatttcccttattgatcaagaacgtgaaggagagcagattgaccgagctttattgaagaatgtattagatatatttgttgaaattggaatggggcaaatggatcactatgagaatgactttgaagctgccatgctcaaagacacttctgcttattattctcgaaaagcttcaaactggatcctagaagattcttgtcctgactatatgctcaaggctgaggagtgcttaaaacgggagaaagatagggttgcccattatttgcactctagcagtgagccaaagttattagagaaagttcaacatgaactgttatctgtatatgcaaaccaactccttgaaaaggagcattctggatgtcatgcattactaagagatgacaaggttgaagacttgtcaaggatgttcaggctcttttctaaaataccccgaggtttagatcctgtttccagtatatttaagcagcatgtgaccgctgaaggcatggcattagtgaagttggctgaagatgcagtgagtaccaagaaggcggagaaaaaggatattgttggtttacaagagcaggtttttgttcggaaggtgattgagctgcatgacaagtacctggcatatgtgaatgattgtttccaaaatcatacacttttccacaaggctcttaaggaggcttttgagatcttttgcaacaagggtgttgctggaagctcaagtgcagaactgcttgccactttctgtgacaatattcttaagaaaggaggaagtgaaaaattgagtgatgaagcaattgaagaaactcttgaaaaggttgtcaagttgcttgcctatattagcgacaaagatttgtttgctgaattttataggaagaagcttgctcgaaggctcctttttgacaagagtgccaatgatgatcatgagagaagtattttgacaaaactgaagcaacaatgtggtggtcaatttacctcgaagatggaaggaatggttacagatttgacattggcaaaggagaatcaaacaagctttgaggagtatttaagcaataatcctaatgcagaccctggaatagacttgacagttacagttttgacgactggcttctggcccagttacaaatcttttgacctcaatcttccagcagaaatggttagatgtgttgaagttttcaaggaattttatcaaacaaaaactaagcacaggaaacttacttggatttattccttgggaacctgcaacattagtgggaaattcgatccaaaaactgtggagctgattgtaacaacttaccaggcttcggcattgcttctatttaattcctcagatagactgagttattcggagataatgtctcagttaaacttatctgatgacgatgttattagactgctccactccttgtcatgtgccaagtacaagattcttaacaaggaaccgagcacgaaaacaatatcttctaccgactattttgaatttaattcaaaatttacagacaaaatgaggagaatcaagattcctcttcctcctgttgatgagaagaaaaaagtaattgaggatgttgacaaagacagaagatatgccattgatgcctcaattgtgcgtattatgaagagtcgaaaggtgttaaattaccaacagttagtaatggagtgtgttgagcagttaggtcgcatgttcaagcctgatgtcaaggcaattaagaagcggattgaagatttgatctctcgagactacttggagagagacaaagataatgcaaatttgttcaggtacttggcgtga

SEQ ID NO: 13580 - protein, 744 aa, Glycine max
MSMSERKTIDLDQGWDFMQKGILKLKNILEGLPEPQFSSEDYMMLYTTIYNMCTQKPPHDYSQQLYDKYRESFEEYIVSTVLPSLREKHDEFMLRELVKRWANHKIMVRWLSRFFHYLDRYFIARRSLPPLNEVGLTCFRDLVYKELNGKVRDAVISLIDQEREGEQIDRALLKNVLDIFVEIGMGQMDHYENDFEAAMLKDTSAYYSRKASNWILEDSCPDYMLKAEECLKREKDRVAHYLHSSSEPKLLEKVQHELLSVYANQLLEKEHSGCHALLRDDKVEDLSRMFRLFSKIPRGLDPVSSIFKQHVTAEGMALVKLAEDAVSTKKAEKKDIVGLQEQVFVRKVIELHDKYLAYVNDCFQNHTLFHKALKEAFEIFCNKGVAGSSSAELLATFCDNILKKGGSEKLSDEAIEETLEKVVKLLAYISDKDLFAEFYRKKLARRLLFDKSANDDHERSILTKLKQQCGGQFTSKMEGMVTDLTLAKENQTSFEEYLSNNPNADPGIDLTVTVLTTGFWPSYKSFDLNLPAEMVRCVEVFKEFYQTKTKHRKLTWIYSLGTCNISGKFDPKTVELIVTTYQASALLLFNSSDRLSYSEIMSQLNLSDDDVIRLLHSLSCAKYKILNKEPSTKTISSTDYFEFNSKFTDKMRRIKIPLPPVDEKKKVIEDVDKDRRYAIDASIVRIMKSRKVLNYQQLVMECVEQLGRMFKPDVKAIKKRIEDLISRDYLERDKDNANLFRYLA

SEQ ID NO: 13581 - DNA, 2235 bp, Glycine max
  CDS (1)..(2235)
atgtccatgagtgagcgcaagactattgacctagatcaaggatgggattttatgcagaagggcattttgaagctgaagaacattctagaagggcttcccgagcctcagttcagctcggaggactatatgatgctatacacgaccatatacaatatgtgcactcagaagccgcctcatgactattcccaacaactgtatgacaagtacagggaatcgtttgaagaatacatcgtatcaacggtattaccttctttgagagagaagcatgatgaatttatgttaagagaacttgtgaaaaggtgggcaaaccataaaattatggttaggtggctttctcgtttctttcactacttggaccgctactttattgcccggaggtcacttccgccacttaatgaagttgggttgacttgcttccgtgatttggtttacaaggaattaaacgggaaagtgagagatgcagtgatttcccttattgatcaagaacgtgaaggagagcagattgaccgagctttattgaagaatgtattagatatatttgttgaaattggaatggggcaaatggatcactatgagaatgattttgaagctgcgatgctcaaagacacttctgcttattattctcgaaaggcttcaaactggatcctagaagattcttgtcctgactatatgctcaaggctgaggaatgcttaaaacgggagaaagatagggttgcccattatttgcactctagcagtgagccaaagttattagagaaagttcaacacgaactgttatctgtatatgcgaaccaactccttgaaaaggagcattctggatgtcatgcattactaagagatgacaaggttgaagacttgtcaaggatgttcaggctcttttctaaaatacccagaggtttagatcctgtttccagtatatttaaacagcatgtgactgctgaaggcatggcattagtgaagttggctgaagatgcagtgagtaccaagaaggcggagaaaaaggatattgttggtttacaggagcaggtttttgttcggaaggtgattgagctgcatgacaagtacctggcatatgtgaatgattgtttccaaaatcatacactttttcacaaggctcttaaggaggcttttgagatcttttgcaacaagggtgtcgctggaagctcaagtgcagaactgcttgccactttttgtgacaatattcttaagaaaggaggaagtgaaaaattgagtgatgaagcaattgaagaaactcttgaaaaggttgtcaagttgcttgcctatattagtgacaaagatttgtttgctgaattttataggaagaagcttgctcgaaggctcctttttgacaagagtgccaatgatgatcatgagagaagtattttgacaaaactgaagcaacaatgtggtggtcaatttacctcaaagatggaaggaatggttacagatttgacattggcaaaggagaaccaaacaagctttgaggagtatttaaccaataatcctaatgcagaccctggaatagacttgacggttacagttttgactactggcttctggcctagttacaaatcttttgatctcaatcttccagcagaaatggttagatgtgttgaagttttcaaggaattttatcaaacaaaaactaagcacaggaaacttacttggatttattccttgggaacctgcaacattagtgggaaattcgatccaaaaactgttgagctgattgtaacaacttatcaggcttcggcattgcttctatttaattcctcagatagactgagttattcggagataatgactcagttaaacttatctgatgacgatgttattagactgctccactccttgtcatgtgccaagtacaagattcttaacaaggaaccaaacacaaaaacaatatcttctaccgactattttgaatttaattcaaaatttacggacaaaatgaggagaatcaagattcctcttcctcctgttgatgagaagaaaaaagtaattgaggatgttgacaaagacagaagatatgctattgatgcctcaattgtgcgtattatgaagagtcggaaggtgttaagttaccaacagttggtaatggagtgtgttgagcagctaggtcgcatgtttaagccggatgtcaaggcaattaagaagcggattgaagatttgatctctcgagactacttagagagagacaaagacaatgcaaatttgttccggtacttggcttga

SEQ ID NO: 13582 - protein, 744 aa, Glycine max
MSMSERKTIDLDQGWDFMQKGILKLKNILEGLPEPQFSSEDYMMLYTTIYNMCTQKPPHDYSQQLYDKYRESFEEYIVSTVLPSLREKHDEFMLRELVKRWANHKIMVRWLSRFFHYLDRYFIARRSLPPLNEVGLTCFRDLVYKELNGKVRDAVISLIDQEREGEQIDRALLKNVLDIFVEIGMGQMDHYENDFEAAMLKDTSAYYSRKASNWILEDSCPDYMLKAEECLKREKDRVAHYLHSSSEPKLLEKVQHELLSVYANQLLEKEHSGCHALLRDDKVEDLSRMFRLFSKIPRGLDPVSSIFKQHVTAEGMALVKLAEDAVSTKKAEKKDIVGLQEQVFVRKVIELHDKYLAYVNDCFQNHTLFHKALKEAFEIFCNKGVAGSSSAELLATFCDNILKKGGSEKLSDEAIEETLEKVVKLLAYISDKDLFAEFYRKKLARRLLFDKSANDDHERSILTKLKQQCGGQFTSKMEGMVTDLTLAKENQTSFEEYLTNNPNADPGIDLTVTVLTTGFWPSYKSFDLNLPAEMVRCVEVFKEFYQTKTKHRKLTWIYSLGTCNISGKFDPKTVELIVTTYQASALLLFNSSDRLSYSEIMTQLNLSDDDVIRLLHSLSCAKYKILNKEPNTKTISSTDYFEFNSKFTDKMRRIKIPLPPVDEKKKVIEDVDKDRRYAIDASIVRIMKSRKVLSYQQLVMECVEQLGRMFKPDVKAIKKRIEDLISRDYLERDKDNANLFRYLA

SEQ ID NO: 13583 - DNA, 3706 bp, Zea mays
  CDS (844)..(3078)
cggacgcgtgggcggacgcgtgggggcagttcgaatgctgagttgttggctaccttctgcgacaatattctgaagaaaggctgcagtgaaaagctcagtgatgaagccattgaagatgcccttgagaaggttgtgagattgctggcatacatcagtgataaagacctgtttgccgagttctatagaagattacttttcgacaaaagtgctaatgatgagcatgagagaagtattctgacaaagctcaagcaacagtgcggggggcagtttacttccaaaatggagggcatggttacggaccttactgtcgctagagatcaccaaactaagtttgaagagtttgtagctgggcatccagagttgaatcctggcatagatttggctgttactgttttgacaacgggattctggccaagctacaaaacttttgacataaaccttcctgcggagatggtgaaatgtgtagaggttttcaaggaattctatcaaacaagaacgaagcacaggaagctgacatggatttattccttgggaacctgcaacatcaatgcactatagaagagctatgacgtcgcatgcacgcgtacgtaagctcggaattcggctctgcgaacaagggaggatgtacacaggacgtatcctgtgtgctgaaatgcaaaacacgcccaacccttcatgacgctccacgcgctcgtctctctccttccttccatcctccctccctccttccctccctcgctcgcctctggaggaccctcgccatcctccccaagcgcaccaccaaacccccagcagcggcgctagggttcgcgcctcggcgcgtcggcaccgtcacctgcggtgatggcagggcaggagcgtaggacaatcgatctggaggagggatgggcgtttatgcagaagggcatcaccaagctgaagaacatcctcgagggcaagcccgagccgcagttcagttccgaggactacatgatgctctacacgacgatatacaacatgtgcacgcagaagccgccgcaggactactcacagcagctctacgacaagtatcgggagtcgttcgaggagtacatcgcctccatggtactaccttcattaagggagaaacatgacgagtttatgctgagggagctagtgcaaaggtggtcaaaccataaagtcatggttcgctggctgtcacgcttcttttattaccttgaccgatacttcatatcaaggaggtcacttacaccacttaaagaagtgggtcttacttgcttccgagagttgatctatcaagagattaaaggacaagttaaagatgcagtgatagctctgatagacaaagaacgtgagggtgaacagattgaccgggctctgttgaagaatgttttggatatttttgttgaaattgggttgggtcaaatggagtgttatgagaatgactttgaagatttcttgctcaaggatactacagagtactactctgtcaaagctcaaagctggattcttgaggactcatgcccagattacatgattaaggctgaggagtgtttaaagcgggagaaggagcgagttggtcactatttgcatattagcagcgaacagaagttattggagaaagtgcaaaatgaattgcttgctcagtatgcaaccccgctgttagagaaggagcattctggatgttctgctttgcttcgcgatgacaaggttgaggatctttctaggatgtacagactcttctccaaaatctcccgtggtctggagcctatttcaaacatgttcaaaacgcatgtcacaagtgagggtacagccttggtcaagcaagcagaagattctgctagtaataagaagccagaaaagaaggatatggttggcatgcaggaacaggtctttgtgtggaaaatcatcgagctgcatgacaaatatgtagcttatgtgacagaatgtttccagggacatacactcttccataaggcacttaaagaagcctttgaggtcttctgtaacaaaggtgtctctggcagttcgagtgctgagttgttggctaccttctgcgacaatattctgaagaaaggctgcagtgaaaagctcagtgatgaagccattgaagatgcccttgagaaggttgtgagattgctggcatacatcagtgataaagacctgtttgccgagttctataggaagaaacttgccagaagattactttttgacaaaagtgctaatgatgagcatgagagaagtattctgacaaagctcaaacaacagtgtgggggacagtttacttcaaaaatggagggcatggttactgaccttactgtcgctagagatcatcaaactaagtttgaggagtttgtagctggacatccagagttgaatcctgggatagacttagctgttactgttttgacaacgggattctggccaagctacaaaacttttgacataaaccttcctgccgagatggtgaaatgtgtagaggttttcaaggaattctatcaaacaagaacaaagcacaggaagctgacatggatttattccttgggaacctgcaacatcaatgctaagtttgatgctaaacctattgaacttattgttacaacatatcaggctgcattgctactactgtttaatggatctgacaggcttagttattctgagattgtaacacaattaaacctgtcagatgatgatgtagtgcgtttgctccattctctttcttgtgcgaagtacaagatccttaacaaggaaccggcaaatagatccatctcgcccaatgatgtttttgagttcaattcaaaatttactgacagaatgagaagaattaagattccactgcctcccgttgatgagaagaaaaaggttgttgaagatgttgacaaagacaggaggtatgcaattgatgcatcaattgtgcgcattatgaagagccgcaaagttatgggtcatcaacagctggttgctgaatgtgttgagcagcttagccgcatgtttaagccggacttcaaagccataaagaagaggattgaggatctcatcacaagggactatttggagcgcgacaaggacaacgccaatacgtacaaataccttgcctgattggtggttagtgacaaagtccaaaacagctccgggactatgcgataccactgggatggcaatcttcctgcaatgtcgtggtgcgtccacttctaccatgatttgcagcacgttttggtgatttgccctgccacagcacgggctgctcacattttgtacattggtcgttaaataggataagcgtgttggcctacattagatataatgatgattgatgatatgaggaataggagaggcattcaagtacttgtatgtgtcttctatgccaatgctttatctatatagctgtatcagtgttccagtcaattgatatgagatgatgcttggagtcgttttgctatatgaagtgacggatacaatgggaatttgcagcatccgtttgtatctgaatgcacctgcttttgttttataggtagatgcgtattctggctccgttgtcacctgttggtttgtggaggcagagtggattggtcagctagctgacggaagtcactgactcactagaagctattaagtggttttgtacttactgagtcaaatatatgtcatacgttgaaaccatgtttcgtaattatgaatagtttctttaaaattaaatttaaaaaaaaaaaaaaactcgagagggggc

SEQ ID NO: 13584 - protein, 744 aa, Zea mays
MAGQERRTIDLEEGWAFMQKGITKLKNILEGKPEPQFSSEDYMMLYTTIYNMCTQKPPQDYSQQLYDKYRESFEEYIASMVLPSLREKHDEFMLRELVQRWSNHKVMVRWLSRFFYYLDRYFISRRSLTPLKEVGLTCFRELIYQEIKGQVKDAVIALIDKEREGEQIDRALLKNVLDIFVEIGLGQMECYENDFEDFLLKDTTEYYSVKAQSWILEDSCPDYMIKAEECLKREKERVGHYLHISSEQKLLEKVQNELLAQYATPLLEKEHSGCSALLRDDKVEDLSRMYRLFSKISRGLEPISNMFKTHVTSEGTALVKQAEDSASNKKPEKKDMVGMQEQVFVWKIIELHDKYVAYVTECFQGHTLFHKALKEAFEVFCNKGVSGSSSAELLATFCDNILKKGCSEKLSDEAIEDALEKVVRLLAYISDKDLFAEFYRKKLARRLLFDKSANDEHERSILTKLKQQCGGQFTSKMEGMVTDLTVARDHQTKFEEFVAGHPELNPGIDLAVTVLTTGFWPSYKTFDINLPAEMVKCVEVFKEFYQTRTKHRKLTWIYSLGTCNINAKFDAKPIELIVTTYQAALLLLFNGSDRLSYSEIVTQLNLSDDDVVRLLHSLSCAKYKILNKEPANRSISPNDVFEFNSKFTDRMRRIKIPLPPVDEKKKVVEDVDKDRRYAIDASIVRIMKSRKVMGHQQLVAECVEQLSRMFKPDFKAIKKRIEDLITRDYLERDKDNANTYKYLA

SEQ ID NO: 13585 - DNA, 2163 bp, Oryza sativa
  CDS (1)..(2163)
atgaatatgtcgccgcgcattccggtggtggacctcgaggacgggtggcgcgacgtgctcgccggcgtcgccaagctcaagtgcatcctcgatggctccaacgtcgtgcacttcgtccccgacgagtacatgcacctctacacgacggtttacaacatgtgcacgcagaagccgccgaacgactactcgcaggtgctctacgatcgctacaagcaggccctggacgatcacatcgaatccgtcgtgttgccctccttgaatgagaagcatggcgtgttccttctgagggaaatagtgcagaggtgggagaaacacaagctaatggtaaggtggctgaggaggttctttgactacctcgatcgttactatgttacacggaggtcccttgattcactcaaagatctgggctggagtagcttccgggatttggttttcgataagctcaaaagtactgtggcaacaattatgattggcatgattgatgatgagagggaaggcaatctaatagaccgtccactcctgaagaatgcccttgatatctatgttgaaattggggatagtcaactgaattattacagtgatgattttgaacaatcatttctcaacggaacaacagattactattctaagaaggcacaaacatggattcttgagaattcttgccctgaatacatgctcaaggctgcactcttcgagttgatagataggcgtgcagaagaaattctgaacaaggagaactccggatgcaaagtgttgctttgtgatgaaaagaccgaggatctagcaaggatgtttaggctcttctctaggataactgacgggctgcttccagtatcgaaaatatttaaggagcatgtcattgctgagggtatgtctctgctgaaacatgcaacagatgctgccaacagcagaaaggatgagaagaagggggtggtggtgggattgccggagcaggattttgtgaggagtgtcatagagctccatgacaaatatatggcatatgtcaccaactgtttccagagcaactcagtatttcacaaggcacttaaggaggcctttgaagttatttgcaacaaagatgttgttggttgcagtagtgctgaactgtttgcggcatactgtgatagtatcttaaaaagaggtggaagtgaaaagctaagtgatgaagctatagatgaaagtcttgagaaggttgtcaagcttctaacatatctcagcgacaaggacctctttgtagagtttcataggaagaaacttggaaggagattgctgtttgataagaatacaaatgacgaacatgagagaatcctactctccaagctgaagcaattcttcgggggacagtttacatcaaaaatggaggggatgctcaaagatattacattggcaaaagaacatcagtcaagttttgaggagtacgtaagcaacaatccagagtcaaatcctctgatagacttgaatgtgactgtcttgacaacaggatactggccaacatacaagaactcagatataaatcttccattggagatggttaaatgcgtggaggttttcaaggaatattatcggtccgacaagcaacacagaaagcttacctggatcttttccttgggaaactgcgtcgtcattggaaattttgatgctaaacctgttgagttcgttctcaacacttatcaggctgcattgttgctgctattcaatgaagctgataaactgagttactctgatattgtgtcacaattaaaactgtctgatgatgatgccgtgcgtttgcttcattcgctttcttgtgcaaagtataagattctcaacaaagagcctagcaacagagtgatttctccagaggacgagtttgagttcaattccaaatttaccgataggatgcgaaggattaaggtaccacttcctcaaatcgatgagaagaaaaaggttgtcgatgatgtcaacaaggacaggaggttcgcaattgatgcatctcttgtgcgcatcatgaaaagccgcaaagttctgggccatcagcaacttgtagcggaatgcgtggagcagctcagccgcatgtttaagcctgacatcaagatcatcaagaggaggatcgaggatcttatcagcagggagtacttggagcgtgattcggagaatgcccagacctacaaatacttggcttga

SEQ ID NO: 13586 - protein, 720 aa, Oryza sativa
MNMSPRIPVVDLEDGWRDVLAGVAKLKCILDGSNVVHFVPDEYMHLYTTVYNMCTQKPPNDYSQVLYDRYKQALDDHIESVVLPSLNEKHGVFLLREIVQRWEKHKLMVRWLRRFFDYLDRYYVTRRSLDSLKDLGWSSFRDLVFDKLKSTVATIMIGMIDDEREGNLIDRPLLKNALDIYVEIGDSQLNYYSDDFEQSFLNGTTDYYSKKAQTWILENSCPEYMLKAALFELIDRRAEEILNKENSGCKVLLCDEKTEDLARMFRLFSRITDGLLPVSKIFKEHVIAEGMSLLKHATDAANSRKDEKKGVVVGLPEQDFVRSVIELHDKYMAYVTNCFQSNSVFHKALKEAFEVICNKDVVGCSSAELFAAYCDSILKRGGSEKLSDEAIDESLEKVVKLLTYLSDKDLFVEFHRKKLGRRLLFDKNTNDEHERILLSKLKQFFGGQFTSKMEGMLKDITLAKEHQSSFEEYVSNNPESNPLIDLNVTVLTTGYWPTYKNSDINLPLEMVKCVEVFKEYYRSDKQHRKLTWIFSLGNCVVIGNFDAKPVEFVLNTYQAALLLLFNEADKLSYSDIVSQLKLSDDDAVRLLHSLSCAKYKILNKEPSNRVISPEDEFEFNSKFTDRMRRIKVPLPQIDEKKKVVDDVNKDRRFAIDASLVRIMKSRKVLGHQQLVAECVEQLSRMFKPDIKIIKRRIEDLISREYLERDSENAQTYKYLA

SEQ ID NO: 13587 - DNA, 2313 bp, Zea mays
  CDS (1)..(2313)
atggcagggcaggagcgtaggacaatcgatctggaggagggatgggcgtttatgcagaagggtatcaccaagctgaagaacatcctcgagggcaagcccgagcctcagttcagctccgaggactacatgatgctctacacgacgatatacaacatgtgcacgcagaagccgccgcacgactactcgcagcagctctacgacaagtatcgggagtcgttcgaggagtatatcacctccatgatttcctactcagagaggagtaaggcagcttggatgggagtttttttagcttttgttgacggggaacaaatcgtgctctcagagcctggggctcacatgagcacttcaaatctggtactaccttcgctaagggagaaacatgatgagtttatgctgagggagctagtgcaaaggtggtcaaaccataaagtcatggttcgttggctctcgcgtttctttcattaccttgaccggtacttcatatcaaggaggtcacttaccccacttaaagaagttggtcttacttgcttccgagagttgatatatcaagagattaaagggcaagttaaagatgcggtgatagctctgatagacaaagaacgcgagggtgaacagattgaccggggtctgttgaagaatgtattggatatttttgttgaaattgggctgggtcaaatggagtgttatgagaatgactttgaagatttcttgctcaaggatactacagagtactactctgtcaaggctcaaagctggattcttgaggactcatgcccagattacatgattaaggctgaggagtgtttgaagcgggagaaggagcgggttggtcactatttgcatattagcagtgaacaaaagttgttggagaaagtgcaaaatgaattgcttgctcagtatgcaaccccgctgttggagaaggagcattctggatgttctgctttgcttcgtgatgataaggttgaggacctttctaggatgtacaggctcttctccaaaatcagccgcggtctggagcctatttctaacatgtttaaaacgcatgttacaaatgagggcacagccttggtcaagcaagcagaagattctgctagcaataagaaggtctttgtgtggaaaatcatcgagctgcatgacaaatatgtagcttatgtgacagaatgtttccagggacatacactcttccataaggcacttaaagaagcctttgaggtcttctgtaacaaaggtgtctctggcagttcgagtgccgagttgttggctaccttctgcgacaatattctgaagaaaggttgcagtgaaaagctcagtgatgaagccatcgaagatgcccttgagaaggtggtgagaatgcttgcatacatcagtgataaagacctgtttgccgagttctataggaagaagcttgcaagaagattactttttgacaaaagtgctaatgatgagcatgagagaagtattctgacaaagctcaaacaacagtgtgggggacagtttacttcaaaaatggagggcatggttactgaccttactgtcgctagagatcatcaaactaagtttgaggagtttgtagctggacatccagagttgaatcctgggatagacttagctgttactgttttgacaacgggattctggccaagctacaaaacttttgacataaaccttcctgccgagatggtgaaatgtgtagaggttttcaaggagttctatcaaacaagaacaaagcacaggaagctgacatggatttattccttgggaacctgcaacatcaatgctaagtttgatgctaaacctattgaacttattgttacaacatatcaggctgcattgctactactgtttaatggatctgacaggcttagttattctgagattgtaacacaattaaacctgtcagatgatgatgtagtgcgtttgctccattctctttcttgtgcgaagtacaagatccttaacaaggaaccggctagtagatccatctctcccaatgatgtttttgagttcaattcaaagtttactgacagaatgagaagaatcaaggttccactccctcctgttgatgagaagaaaaaggttgttgaagatgttgacaaagacaggaggtatgcaattgatgcatcaattgtgcgcattatgaagagccgcaaagttatgggtcatcaacagctggttgctgaatgtgttgagcagctgagccgcatgttcaagcctgacttcaaagccataaagaagaggattgaggatctcattacaagggactacttggagcgcgacaaggacaacgctaatacgtacaaataccttgcctga

SEQ ID NO: 13588 - protein, 770 aa, Zea mays
MAGQERRTIDLEEGWAFMQKGITKLKNILEGKPEPQFSSEDYMMLYTTIYNMCTQKPPHDYSQQLYDKYRESFEEYITSMISYSERSKAAWMGVFLAFVDGEQIVLSEPGAHMSTSNLVLPSLREKHDEFMLRELVQRWSNHKVMVRWLSRFFHYLDRYFISRRSLTPLKEVGLTCFRELIYQEIKGQVKDAVIALIDKEREGEQIDRGLLKNVLDIFVEIGLGQMECYENDFEDFLLKDTTEYYSVKAQSWILEDSCPDYMIKAEECLKREKERVGHYLHISSEQKLLEKVQNELLAQYATPLLEKEHSGCSALLRDDKVEDLSRMYRLFSKISRGLEPISNMFKTHVTNEGTALVKQAEDSASNKKVFVWKIIELHDKYVAYVTECFQGHTLFHKALKEAFEVFCNKGVSGSSSAELLATFCDNILKKGCSEKLSDEAIEDALEKVVRMLAYISDKDLFAEFYRKKLARRLLFDKSANDEHERSILTKLKQQCGGQFTSKMEGMVTDLTVARDHQTKFEEFVAGHPELNPGIDLAVTVLTTGFWPSYKTFDINLPAEMVKCVEVFKEFYQTRTKHRKLTWIYSLGTCNINAKFDAKPIELIVTTYQAALLLLFNGSDRLSYSEIVTQLNLSDDDVVRLLHSLSCAKYKILNKEPASRSISPNDVFEFNSKFTDRMRRIKVPLPPVDEKKKVVEDVDKDRRYAIDASIVRIMKSRKVMGHQQLVAECVEQLSRMFKPDFKAIKKRIEDLITRDYLERDKDNANTYKYLA

SEQ ID NO: 13589 - DNA, 2211 bp, Oryza sativa Japonica Group
  CDS (1)..(2211)
atgagcgggggcgggccgccgaagaaacgcaacttcaagatcgagctgttcaagcaccgcgtggagctcgaccccaagtacgcggagcggacatggaaggtcctggagcacgccatccacgagatctacaaccacaacgccagtggcctctccttcgaggagctctacaggagtgcctacaacatggtgctccacaagtatggtgagaagctatatgatggcctggagagaactatgacatggcgcttgaaggaaatatcaaaatcaatagaggctgcacagggtggtttgtttctggaggagctgaatgccaagtggatggatcacaataaggcattgcagatgatccgagatattctaatgtacatggatcgaacatatgtcccgcaatcccgtagaacacctgttcatgagcttggtttgaatttgtggagggatcacataattcactctcccatgattcatagtcggctgcttgatacccttctggatcttattcacagggagagaatgggtgaaatgattaacagaggcctgatgaggagcataacgaaaatgttaatggatcttggtgctgctgtatatcaagatgactttgagaagccgtttttggatgttacagctagcttctacagtggagagtctcaggagttcattgagtgctgtgactgtgggaactatcttaagaagtccgagagacgtctcaatgaggaaatggaacgtgtctcacactacttggattctggcactgaggcaaagataactagtgtggttgagaaagaaatgattgccaatcacatgcatagattggttcatatggaaaactcaggccttgtaaatatgcttgtagatgacaaatatgacgacttggctaggatgtacaacttattccgaagggtttttgatgggctatcgacaatcagagatgtgatgacttcatacctaagggaaacagggaagcagttagtgacagatcctgagaggttgaaagacccagtggaatttgttcagcgcttgttaaatgagaaggacaagcatgataagatcatcaacgttgcttttggcaatgacaaaactttccagaatgctctaaattcatcctttgagtacttcatcaacttaaacaacaggtcacctgaattcatatcgttgtatgttgatgataaacttcggaaaggattgaaaggagccacagaagaggatgtggaggttattctggacaaagtcatgatgctgtttcggtacctccaggagaaggatgtatttgagaagtactacaagcagcatttggcgaaaagactattgtctggcaaaactgtttctgatgatgctgagaggagtatgatagttaaactcaagacagaatgtgggtaccagttcacttccaaattagagggcatgttcactgacatgaagacctctcaggacactatgatagacttttatgccaagaagtctgaggaacttggcgatggcccaacacttgatgtccacattcttacaactggttcttggccaacacagccctgccctccctgcaaccttccaactgaaatccttgcaatatgtgataagttccggacatactaccttggaactcacagtggccggagattgacatggcaaacaaacatgggaacagctgacataaaagccacatttgggaaaggtcagaagcatgaactaaatgtatccacttatcagatgtgtgttctcatgctgtttaattctaccgatgggttaacctacaaagacatcgaacaagatactgcgatacctgcctcggatctaaagagatgccttcaatctcttgcttgtgtcaaggggaagaatgttctccgcaaggaacccatgagcaaagatatatcggaggatgacacattctacttcaacgacaagttcacaagcaagcttgttaaggtcaagattgggacagtagtggcgcaaaaggaatctgagccagagaaacaagagactcgtcaacgggttgaggaggacaggaaacctcaaattgaggctgctatcgtcaggattatgaaatccaggagggtcttggatcataacagcattgtagctgaggttaccaagcaattgcaagcccgattcatgccgaatcctgttgtcataaagaaacgcatagaatctctaattgagcgtgaattcttagagagggacaaagcagataggaagttatatcgctatcttgcatag

SEQ ID NO: 13590 - protein, 736 aa, Oryza sativa Japonica Group
MSGGGPPKKRNFKIELFKHRVELDPKYAERTWKVLEHAIHEIYNHNASGLSFEELYRSAYNMVLHKYGEKLYDGLERTMTWRLKEISKSIEAAQGGLFLEELNAKWMDHNKALQMIRDILMYMDRTYVPQSRRTPVHELGLNLWRDHIIHSPMIHSRLLDTLLDLIHRERMGEMINRGLMRSITKMLMDLGAAVYQDDFEKPFLDVTASFYSGESQEFIECCDCGNYLKKSERRLNEEMERVSHYLDSGTEAKITSVVEKEMIANHMHRLVHMENSGLVNMLVDDKYDDLARMYNLFRRVFDGLSTIRDVMTSYLRETGKQLVTDPERLKDPVEFVQRLLNEKDKHDKIINVAFGNDKTFQNALNSSFEYFINLNNRSPEFISLYVDDKLRKGLKGATEEDVEVILDKVMMLFRYLQEKDVFEKYYKQHLAKRLLSGKTVSDDAERSMIVKLKTECGYQFTSKLEGMFTDMKTSQDTMIDFYAKKSEELGDGPTLDVHILTTGSWPTQPCPPCNLPTEILAICDKFRTYYLGTHSGRRLTWQTNMGTADIKATFGKGQKHELNVSTYQMCVLMLFNSTDGLTYKDIEQDTAIPASDLKRCLQSLACVKGKNVLRKEPMSKDISEDDTFYFNDKFTSKLVKVKIGTVVAQKESEPEKQETRQRVEEDRKPQIEAAIVRIMKSRRVLDHNSIVAEVTKQLQARFMPNPVVIKKRIESLIEREFLERDKADRKLYRYLA

SEQ ID NO: 13591 - DNA, 2196 bp, Oryza sativa Japonica Group
  CDS (1)..(2196)
atgaactcgcagaagaagcgcagccccaagatcgagcccttccggcaccgcgtggatgcggacccaaagtccttcgacaaatcgtggaagaagctcgaggacgccatccgcgagatttacaaccacaacgccagcggcctctccttcgaggagctgtacaggactgcttataacttggttcttcacaagcatggtctgaagctatatgataaactcacagagaatttaaaaggacacctgaaagaaatgtgcagatcaatagaggatgcccaaggtagtttgtttctggaggaactgcagagaagatgggctgatcacaataaggcactacaaatgatcagagatatactcatgtatatggataggacatttattgcaactaacaaaaagacacctgtctttgaccttggtctagagttgtggagagatatcgttgtccgcactcccaaaattcatgggaggttgcttgacacactccttgaactcattcatagagagaggatgggtgagatgataaacagaggtctgatgaggagtaccaccaaaatgttgatggatctagggtcttctgtctatcatgatgactttgagaagccattccttgaggtatccgcaagtttctatagtggtgagtcacaacagttcattgagtgctgtgattgtggcgaatatctcaagaaagctgagagacggcttgctgaagagttggagcgtgtttctcagtatatggatgccaaaaccgcagacaaaataactagtgttgtggacactgagatgcttgcaaatcacatgcagcggttgattcttatggagaattctggtcttgtgaatatgcttgttgatgacaaacatgaagaccttagcaggatgtacaacttgtttaaacgtgttcctgatgggcattcaacaattagatctgtgatggcctctcatgttaaggaaagtggaaaggcattggtatctgacccagagaagataaaggaccctgttgagtttgtccagcgtcttctaaatgagaaagacaagtatgatgagatcataagtatttcattcagcaatgacaaggctttccaaaatgctctgaattcctccttcgagaatttcatcaacttgaacaaccgatctcctgaattcatttcgctgtttgttgatgacaagctccggaaaggggtgaaaggggccaatgaagaggatgttgaaactgtcttggacaaggtgatgatgctcttcagatatttgcaggagaaagatgtttttgagaaatattacaagcaacacttggccaaacgtcttctatctgggaaaactacttctgatgaagctgagaggagtatgcttgtgaagctgaagacggaatgtggctaccagtttacgtcaaaattggaaggcatgttcaatgatctgaagacatcgcatgatactatgcaaagtttttatgctaatctctctggtgatactgatagcccaacaatatcagtccagatactcaccactgggtcttggccaacacagccatgtaccccctgcaaacttccacctgaaattgttgatatatctgagaaattccgggcattctaccttggcacccacaatggcaggagattgacatggcaaacaaacatggggaatgcagatatcaaagcaacgttcggaggccgcaggcatgagttgaatgtctcgacatatcagatgtgtgtcctgatgctgtttaattcagcagatggcttgacttacggtgacattgagcaggccacaggtataccacatgctgatctgaaacgctgcctccagtctcttgcttgtgttaagggtaagaatgtgctgcggaaggaacccatgagcaaggatatatctgaagatgacactttctactacaatgacaagttcacaagcaagttggtcaaggtgaagattggcaccgtggttgctcagaaagaaacagaaccagagaagttggaaactcgccagagagttgaggaagacaggaaacctcaaattgaggctgcaattgtcagaatcatgaagtccagaagagtcttggaccacaatagcataatcacggaggtgacaaagcagcttcaatcgcgctttttgccaaatcctgttgtgataaagaaaagaatagagtccctgatcgagagggagttcttggagagggacaaggtagataggaagatgtaccgttatcttgcatag

SEQ ID NO: 13592 - protein, 731 aa, Oryza sativa Japonica Group
MNSQKKRSPKIEPFRHRVDADPKSFDKSWKKLEDAIREIYNHNASGLSFEELYRTAYNLVLHKHGLKLYDKLTENLKGHLKEMCRSIEDAQGSLFLEELQRRWADHNKALQMIRDILMYMDRTFIATNKKTPVFDLGLELWRDIVVRTPKIHGRLLDTLLELIHRERMGEMINRGLMRSTTKMLMDLGSSVYHDDFEKPFLEVSASFYSGESQQFIECCDCGEYLKKAERRLAEELERVSQYMDAKTADKITSVVDTEMLANHMQRLILMENSGLVNMLVDDKHEDLSRMYNLFKRVPDGHSTIRSVMASHVKESGKALVSDPEKIKDPVEFVQRLLNEKDKYDEIISISFSNDKAFQNALNSSFENFINLNNRSPEFISLFVDDKLRKGVKGANEEDVETVLDKVMMLFRYLQEKDVFEKYYKQHLAKRLLSGKTTSDEAERSMLVKLKTECGYQFTSKLEGMFNDLKTSHDTMQSFYANLSGDTDSPTISVQILTTGSWPTQPCTPCKLPPEIVDISEKFRAFYLGTHNGRRLTWQTNMGNADIKATFGGRRHELNVSTYQMCVLMLFNSADGLTYGDIEQATGIPHADLKRCLQSLACVKGKNVLRKEPMSKDISEDDTFYYNDKFTSKLVKVKIGTVVAQKETEPEKLETRQRVEEDRKPQIEAAIVRIMKSRRVLDHNSIITEVTKQLQSRFLPNPVVIKKRIESLIEREFLERDKVDRKMYRYLA

SEQ ID NO: 13593 - DNA, 2196 bp, Oryza sativa Japonica Group
  CDS (1)..(2196)
atgagttccaggaagaagccgtcgaggatcgagccgttcaggcacaaggtggagacggacccgaggttcttcgagaaggcgtggaggaagctcgacgacgccatccgcgagatctacaaccacaacgccagcggcctctccttcgaggagctctacaggactgcttataatctggtacttcacaaacatgggccaaagctctatgacaaactgacagaaaacatggaagatcacctgcaagaaatgcgcgtatcgattgaggctgctcaaggtggtttgttcttggtagaactacagaggaaatgggatgaccataacaaggctttgcaaatgatcagagatatcctgatgtacatggacagggtttttattcccaccaataaaaagacacctgtatttgatcttggattggatctttggagagatactattgttcggtcacccaagatccatggaaggttgcttgacactcttcttgatctcatacatagagagagaacaggtgaggtgataaacagatccttgatgaggagtacaactaaaatgttgatggatctaggttcttctgtttatcaggatgattttgaaaggccattccttgaggtgtctgctagtttttatagtggtgagtcacaaaaattcatagagtgttgttcctgtggtgaatatcttaagaaggctcagcagcggcttgatgaagaagcggaacgtgtttcacagtacatggatgccaaaacagacgagaaaataactgctgttgtggtgaaggaaatgcttgcgaatcacatgcagaggttgattcttatggagaactcaggtcttgttaatatgcttgtggaggacaagtatgaagacctgaccatgatgtacagcttgtttcaacgtgttcccgatggtcactcgacaattaaatctgtgatgaattcacatgttaaagaaaccgggaaggatatggtaatggatcctgagaggctgaaggaccctgttgattttgtccagaggcttctaaatgagaaggataagtatgacagtattgttaccacttcctttagcaatgacaagagtttccaaaatgctctgaattcctcctttgagcacttcattaacttaaacaatagatgccctgagttcatctcgctgtatgttgacgacaaactgcgtaaaggaatgaaagaggccaatgaggaggatgttgagactgtcctggacaaagtgatgatgctgtttaggtacttgcaagaaaaagatttgtttgagaaatactacaagcaacacttggcgaagcgccttctttctgggaaggctgcttctgatgattctgagagaagtatgcttgtgaagctcaagacagaatgtggatatcagttcacttcaaaattggagggcatgttcaatgatttgaagacctctcatgataccacacagcgattttacgctggtactcctgatttgggggatgcccctactatatctgtccagatactcaccactgggtcttggcccacacaaccatgtaacacctgcaaccttcctcctgagattcttggcgtgtccgagatgtttcggggtttctaccttggtacccacaatggcaggagactgacatggcaaacaaacatgggtactgcagacatcaaagcagtgtttggaaatggcagcaagcacgagctaaacgtgtcgacctaccagatgtgtgttctcatgttgttcaactcggcggactgtttgtcttaccgtgatatcgagcagactacagcgataccatccgcggacctgaagcgctgccttcagtctctcgcgcttgtgaagggcaagaacgttctgcgcaaggaacctatgagcagggacatctccgacgatgacaacttctacgtcaacgataagttcaccagcaagctgttcaaggtgaagatcggcacggtggcgacacagaaggagtctgagccagagaagatggagacccggcagagagtcgaggaggacaggaagcctcagatcgaggcggccatcgtgaggatcatgaagtcgaggagagtgctggatcacaacagcatagtgacagaggtgacgaagcagctgcagcctcgtttcatgccgaaccctgtggtgatcaagaagagagtcgagtctctgattgagcgcgagttcttggagagggacaagacagacaggaaactgtaccggtatcttgcataa

SEQ ID NO: 13594 - protein, 731 aa, Oryza sativa Japonica Group
MSSRKKPSRIEPFRHKVETDPRFFEKAWRKLDDAIREIYNHNASGLSFEELYRTAYNLVLHKHGPKLYDKLTENMEDHLQEMRVSIEAAQGGLFLVELQRKWDDHNKALQMIRDILMYMDRVFIPTNKKTPVFDLGLDLWRDTIVRSPKIHGRLLDTLLDLIHRERTGEVINRSLMRSTTKMLMDLGSSVYQDDFERPFLEVSASFYSGESQKFIECCSCGEYLKKAQQRLDEEAERVSQYMDAKTDEKITAVVVKEMLANHMQRLILMENSGLVNMLVEDKYEDLTMMYSLFQRVPDGHSTIKSVMNSHVKETGKDMVMDPERLKDPVDFVQRLLNEKDKYDSIVTTSFSNDKSFQNALNSSFEHFINLNNRCPEFISLYVDDKLRKGMKEANEEDVETVLDKVMMLFRYLQEKDLFEKYYKQHLAKRLLSGKAASDDSERSMLVKLKTECGYQFTSKLEGMFNDLKTSHDTTQRFYAGTPDLGDAPTISVQILTTGSWPTQPCNTCNLPPEILGVSEMFRGFYLGTHNGRRLTWQTNMGTADIKAVFGNGSKHELNVSTYQMCVLMLFNSADCLSYRDIEQTTAIPSADLKRCLQSLALVKGKNVLRKEPMSRDISDDDNFYVNDKFTSKLFKVKIGTVATQKESEPEKMETRQRVEEDRKPQIEAAIVRIMKSRRVLDHNSIVTEVTKQLQPRFMPNPVVIKKRVESLIEREFLERDKTDRKLYRYLA

SEQ ID NO: 13595 - DNA, 2229 bp, Arabidopsis thaliana
  CDS (1)..(2229)
atggcgaagaaggattctgtgttggaggcaggatggtctgtcatggaggctggtgttgcaaagctacaaaagattctggaagaagtgcctgatgagccaccatttgacccggttcaacgtatgcagctgtacacgactgtccacaatctgtgtacccagaaacctcctaatgattactcacagcagatctatgatcggtatggtggagtatatgttgattacaataaacaaactgtgttgccggctatacgtgagaagcatggtgaatatatgttgagagagcttgttaagagatgggccaaccagaaaattcttgttagatggttatcccacttcttcgaatatcttgaccgtttttatactcgtcgggggtctcatccaacactgagtgctgttggcttcatatccttccgcgacctggtttatcaagagttacagtccaaggccaaagacgctgtactagcacttattcataaagaacgcgagggcgaacagattgatagagcactattgaaaaacgtaatagatgtctattgtgggaatgggatgggagagctggttaaatacgaagaggattttgaaagcttcttgcttgaagattctgcatcttactactctcgcaacgcctcaaggtggaaccaggagaattcttgtcctgattacatgataaaggctgaggagtctctaagactggagaaggagagagtcaccaactaccttcattcaaccactgagccgaaactagttgcgaaagtacaaaatgaattgttggtagtggttgcaaaacaacttatagaaaatgagcactcaggatgccgtgcattgttaagagacgacaagatggatgatctcgccaggatgtacaggctttatcatccaataccgcaagggctggatcctgttgcagacttattcaagcaacatattactgtagagggaagtgcccttatcaaacaagctaccgaggcagctactgataaggctgcaagtactagtggactgaaggtgcaggaccaggtgcttatcagacaattaattgacctacacgataaattcatggtctacgtcgatgagtgttttcagaaacacagcctcttccataaggcattgaaggaggcatttgaagtcttctgtaacaagacagtggctggagtgtccagtgcagaaattcttgcaacgtattgcgataatatcctcaagacgggagggggaattgagaagcttgaaaatgaagatcttgaacttacgcttgagaaagtggttaagttgcttgtttatataagtgacaaggatcttttcgccgagtttttcaggaagaaacaagcccgtcggctcttgtttgatcgcaacggtaatgactaccacgaaagaagtttacttacaaagtttaaagaactactcggtgcgcagtttacttctaagatggagggcatgctgacggatatgacattggcaaaagaacaccaaaccaacttcgtggaatttttatcagttaacaagaccaaaaagctggggatggatttcactgtcactgtacttactactggtttttggccaagttacaaaacaaccgacctcaatctacccattgaaatggtcaactgtgttgaagcttttaaggcctattatggaacaaaaaccaattccaggagactttcatggatttattctttaggaacttgtcagttagctggaaaattcgataaaaaaacaattgagatagtagttaccacctaccaggctgctgtgcttttactcttcaacaacacagagagattaagctacactgagatcttggagcagctaaacctcggccatgaagatcttgccaggctgcttcattcactatcatgcttaaagtacaagattcttataaaggaaccaatgtcgagaaacatctccaacaccgatacctttgaattcaactccaagttcaccgataagatgaggagaattagggtgcctctgcctccgatggatgagaggaagaaaattgttgaagatgttgataaagatagacgctatgcaattgatgcagctcttgttcggatcatgaagagtagaaaagtgttggggcatcaacagttggtctctgaatgtgttgagcatctcagcaaaatgttcaagcctgatataaagatgataaagaaacggattgaggacttgatcagcagagattacttggagagggataccgacaatcccaacactttcaagtatttggcttag

SEQ ID NO: 13596 - protein, 742 aa, Arabidopsis thaliana
MAKKDSVLEAGWSVMEAGVAKLQKILEEVPDEPPFDPVQRMQLYTTVHNLCTQKPPNDYSQQIYDRYGGVYVDYNKQTVLPAIREKHGEYMLRELVKRWANQKILVRWLSHFFEYLDRFYTRRGSHPTLSAVGFISFRDLVYQELQSKAKDAVLALIHKEREGEQIDRALLKNVIDVYCGNGMGELVKYEEDFESFLLEDSASYYSRNASRWNQENSCPDYMIKAEESLRLEKERVTNYLHSTTEPKLVAKVQNELLVVVAKQLIENEHSGCRALLRDDKMDDLARMYRLYHPIPQGLDPVADLFKQHITVEGSALIKQATEAATDKAASTSGLKVQDQVLIRQLIDLHDKFMVYVDECFQKHSLFHKALKEAFEVFCNKTVAGVSSAEILATYCDNILKTGGGIEKLENEDLELTLEKVVKLLVYISDKDLFAEFFRKKQARRLLFDRNGNDYHERSLLTKFKELLGAQFTSKMEGMLTDMTLAKEHQTNFVEFLSVNKTKKLGMDFTVTVLTTGFWPSYKTTDLNLPIEMVNCVEAFKAYYGTKTNSRRLSWIYSLGTCQLAGKFDKKTIEIVVTTYQAAVLLLFNNTERLSYTEILEQLNLGHEDLARLLHSLSCLKYKILIKEPMSRNISNTDTFEFNSKFTDKMRRIRVPLPPMDERKKIVEDVDKDRRYAIDAALVRIMKSRKVLGHQQLVSECVEHLSKMFKPDIKMIKKRIEDLISRDYLERDTDNPNTFKYLA

SEQ ID NO: 13597 - DNA, 2199 bp, Arabidopsis thaliana
  CDS (1)..(2199)
atgagtaatcagaagaagaggaattttcagatagaggcgtttaagcatcgagtcgttgtggatcccaaatacgctgataaaacttggcagattcttgagcgtgcgatccatcagatttacaatcaagatgctagcggtctcagtttcgaagaactttacagaaatgcgtacaacatggtcctgcacaagtttggtgagaagctatatactgggtttattgctactatgacttctcatctcaaagaaaaatccaagcttatcgaggcagctcagggagggtcgtttctagaagagcttaataagaaatggaatgagcacaacaaagcgttagagatgattcgagacattctcatgtatatggataggacttatattgagagcaccaaaaagactcatgttcatccgatggggcttaacttgtggagggataatgttgtgcatttcactaagatacatacaaggcttctaaacactcttcttgatctagtgcagaaggaacggataggtgaagttattgatagggggttgatgaggaatgtcattaagatgtttatggatttgggtgaatctgtgtatcaggaggattttgagaagccgtttttggatgcgtcttctgagttttataaggttgagtctcaggagtttattgaatcttgtgattgtggggactatctgaagaaatcagagaaacgccttactgaagagatagagagggtagcgcactacttagatgccaagagcgaagagaagattactagtgtggttgagaaagagatgattgccaaccacatgcagagactggttcacatggagaactcaggtctggttaatatgcttctgaatgacaagtatgaggatttgggtagaatgtacaacttgtttcgcagggttactaatggtcttgttactgtcagagacgttatgacttcgcatcttagggagatgggaaaacaactggttactgatccggaaaagtcaaaggatccggtggaatttgtacaacgtctattggatgagcgggataaatatgacaaaatcatcaacaccgcatttggcaatgataaaacctttcagaatgccctgaattcttcattcgagtatttcatcaacttgaatgctcgttctcctgagtttatctccctgtttgttgatgacaagctacggaaaggacttaagggtatcaccgatgtggatgttgaggttatccttgataaagtgatgatgctgttccgttatttacaagagaaagatgtctttgagaagtactacaagcagcatttggctaaaaggcttctctcaggcaaaactgtgtcagatgacgcagaaaggagtttaatagtgaaactaaagacagaatgtggctatcagttcacttcaaaattggaaggcatgttcactgacatgaagacttcagaggacacaatgcgtgggttttatggcagtcaccccgagctttcagaaggacctacacttattgttcaggtacttacaactggttcttggccaacacagcctgcagtaccttgtaatctcccagctgaagtttcagttctctgtgagaagttccgttcttactaccttgggacacataccggtagaagattgtcctggcaaacaaacatgggcacagcagatatcaaagccatctttggaaagggtcagaaacatgaactgaacgtgtcgactttccagatgtgtgttctcatgttgttcaacaattctgatcgactcagctacaaagagatcgaacaggctacagaaatcccggcagcagatcttaaacgctgtttgcagtcgctagcttgtgtaaagggcaaaaacgtgataaagaaagaacccatgagcaaagacataggagaggaggatttgttcgttgtgaacgacaagttcactagcaagttttacaaagtgaagatcggaactgtggttgcccaaaaggaaacagaaccggagaagcaagagacgagacagagagtggaggaagacagaaaacctcagattgaagcagccatcgtaaggatcatgaagtccaggaaaatactagaccacaacaacataatcgccgaggtgacgaaacagttgcagccacggttcctagctaatcccacggagataaagaagagaatcgagtcgctcattgaacgagatttcttggaaagggatagtacagaccggaaactttaccgctatctagcctaa

SEQ ID NO: 13598 - protein, 732 aa, Arabidopsis thaliana
MSNQKKRNFQIEAFKHRVVVDPKYADKTWQILERAIHQIYNQDASGLSFEELYRNAYNMVLHKFGEKLYTGFIATMTSHLKEKSKLIEAAQGGSFLEELNKKWNEHNKALEMIRDILMYMDRTYIESTKKTHVHPMGLNLWRDNVVHFTKIHTRLLNTLLDLVQKERIGEVIDRGLMRNVIKMFMDLGESVYQEDFEKPFLDASSEFYKVESQEFIESCDCGDYLKKSEKRLTEEIERVAHYLDAKSEEKITSVVEKEMIANHMQRLVHMENSGLVNMLLNDKYEDLGRMYNLFRRVTNGLVTVRDVMTSHLREMGKQLVTDPEKSKDPVEFVQRLLDERDKYDKIINTAFGNDKTFQNALNSSFEYFINLNARSPEFISLFVDDKLRKGLKGITDVDVEVILDKVMMLFRYLQEKDVFEKYYKQHLAKRLLSGKTVSDDAERSLIVKLKTECGYQFTSKLEGMFTDMKTSEDTMRGFYGSHPELSEGPTLIVQVLTTGSWPTQPAVPCNLPAEVSVLCEKFRSYYLGTHTGRRLSWQTNMGTADIKAIFGKGQKHELNVSTFQMCVLMLFNNSDRLSYKEIEQATEIPAADLKRCLQSLACVKGKNVIKKEPMSKDIGEEDLFVVNDKFTSKFYKVKIGTVVAQKETEPEKQETRQRVEEDRKPQIEAAIVRIMKSRKILDHNNIIAEVTKQLQPRFLANPTEIKKRIESLIERDFLERDSTDRKLYRYLA

SEQ ID NO: 13599 - DNA, 2166 bp, Arabidopsis thaliana
  CDS (1)..(2166)
atggctacaatcttgttcaaggtcataatgatgaaggagttaatcctattggaggaaggatggtctgtcatgaagactggtgttgcaaagctacaaaggattctagaagatttgtctgagccaccgtttgaccccggtcaatatatcaatctgtacacgattatctacgatatgtgtctccaacaacctcctaatgattactcacaagagctttataataagtatcgtggagtggttgatcattacaataaagaaactgttttgccgtctatgagggagaggcatggtgaatatatgctgagagagcttgttaagagatgggctaaccataaaattctggttagatggttatctcgcttctgcttttatcttgaccgtttctatgttgctcggagaggtcttccaacactgaatgatgttggcttcacatcctttcacgacctagtttatcaagagatacagtccgaggccaaagatgtgctactagcacttattcataaagaacgtgaaggcgaacagattgatagaacactagtgaaaaacgtaatagatgtctattgtgggaatggggttggacagatggtaatatacgaagaggattttgaaagcttcttgcttcaagatactgcatcttactattctcgcaaggcctcaaggtggagccaggaggattcttgtcctgattacatgctaaaggctgaagagtgtcttaaattggagaaggaaagagtcactaactaccttcattctaccactgagcccaaactagttgagaaagtacaaaatgaattgttggtagtggttgcaaaacagcttatagaaaatgagcactctgggtgccttgcattgttaagagatgacaagatgggtgatctctcgaggatgtacaggctttatcgtctaatcccgcaagggttggaacctattgcagacttattcaagcagcatgttactgcagaaggaaatgcccttatcaaacaagccgccgacgcagctactaatcaagatgcaagtgctagtcaggtgcttgtcagaaaagagattgaactacacgataaatacatggtctatgtagatgagtgttttcagaaacacagcctcttccataagctattaaaagaggcgtttgaagtcttctgtaacaaaacagtggctggagcgtccagtgcagaaatacttgcaacctattgtgataatatcctcaagaccagaggtggaagtgagaagcttagtgatgaagctactgaaattacgcttgagaaagtagttaatttgcttgtttatataagtgacaaggatcttttcgccgagttttacaggaagaaacaagctcgtcggctcttatttgatcgcagcggaatcatgaaagaagtgacggatataacattggcaagagaactccaaaccaacttcgtggattatttatcagcaaacatgacaacaaagctggggattgattttactgtcactgttcttactactggtttttggccaagttacaaaacaacagaccttaatctacccactgaaatggtcaactgtgttgaagcttttaaggtcttttatggaacaaaaaccaattccaggagactttcatggatttattctcttggaacttgtcacattcttggaaaattcgagaaaaaaacaatggagttagtcgtttccacgtaccaggctgctgtgcttttgctcttcaacaacgcagagagattaagctacaccgagatttcagagcagctaaacctcagccatgaagatcttgtcaggctgcttcattcactgtcatgcttaaagtacaagattcttataaaggaaccaatgtcgagaaccatctcgaaaaccgatactttcgaattcaactccaagttcacagataagatgcggaagattagggtgcctttgcctccaatggatgagaggaagaaagtagttgaagatgttgataaagatagacgctatgcaatagatgcagctcttgttcggatcatgaagagtagaaaagtgttggcgcatcaacagttagtctctgaatgtgttgagcatcttagcaaaatgttcaagcctgatataaagatgataaagaaacggattgaggacttgatcaatagagattatttggagagggatacagaaaatgccaacactttcaagtatgtagcttag

SEQ ID NO: 13600 - protein, 721 aa, Arabidopsis thaliana
MATILFKVIMMKELILLEEGWSVMKTGVAKLQRILEDLSEPPFDPGQYINLYTIIYDMCLQQPPNDYSQELYNKYRGVVDHYNKETVLPSMRERHGEYMLRELVKRWANHKILVRWLSRFCFYLDRFYVARRGLPTLNDVGFTSFHDLVYQEIQSEAKDVLLALIHKEREGEQIDRTLVKNVIDVYCGNGVGQMVIYEEDFESFLLQDTASYYSRKASRWSQEDSCPDYMLKAEECLKLEKERVTNYLHSTTEPKLVEKVQNELLVVVAKQLIENEHSGCLALLRDDKMGDLSRMYRLYRLIPQGLEPIADLFKQHVTAEGNALIKQAADAATNQDASASQVLVRKEIELHDKYMVYVDECFQKHSLFHKLLKEAFEVFCNKTVAGASSAEILATYCDNILKTRGGSEKLSDEATEITLEKVVNLLVYISDKDLFAEFYRKKQARRLLFDRSGIMKEVTDITLARELQTNFVDYLSANMTTKLGIDFTVTVLTTGFWPSYKTTDLNLPTEMVNCVEAFKVFYGTKTNSRRLSWIYSLGTCHILGKFEKKTMELVVSTYQAAVLLLFNNAERLSYTEISEQLNLSHEDLVRLLHSLSCLKYKILIKEPMSRTISKTDTFEFNSKFTDKMRKIRVPLPPMDERKKVVEDVDKDRRYAIDAALVRIMKSRKVLAHQQLVSECVEHLSKMFKPDIKMIKKRIEDLINRDYLERDTENANTFKYVA

SEQ ID NO: 13601 - DNA, 2199 bp, Arabidopsis thaliana
  CDS (1)..(2199)
atgagtaatcagaagaagagaaatttccagattgaagcgtttaagcaacgagtcgtcgttgatccaaaatacgccgataaaacttggaagatccttgaacatgcgattcatgagatttacaatcacaacgctagtggtctcagtttcgaagagctttacagaaacgcatacaacatggttctacataagtatggtgataagctttatactggacttgttaccactatgacatttcatctcaaagagatatgtaagtctattgaagaagctcaaggaggagcatttttagaattgcttaataggaaatggaatgatcataacaaagcgttgcaaatgattagggatattctcatgtatatggatcgtacttacgtttctactactaagaaaactcatgttcatgagcttggacttcatctctggagagataatgttgtgtattcgagtaagattcagactaggctattgaatacgcttcttgatttagttcataaggaacggactggtgaagttatagatagggtgttgatgaggaatgtgattaagatgtttatggatttaggtgaatctgtttatcaagatgattttgagaagccgtttttggaagcttctgctgagttttataaggttgagtcaatggagtttattgagtcttgtgattgtggtgagtatttgaagaaagctgagaagcctttagtggaagaagtcgaaagggttgtgaattatttggatgctaagagcgaagcgaagattactagtgtggttgaaagagagatgattgctaaccatgtgcagagactagttcatatggagaattcaggtttggttaatatgcttttgaatgataagtatgaggatatgggtagaatgtatagtttgttccgtagggttgctaatggtcttgtaacggttagagatgttatgactttgcatcttagggaaatgggaaaacagttggttactgatccagagaaatcaaaggatccggttgaatttgtgcagcgtctattggatgagcgggataagtatgacagaattatcaacatggcatttaacaacgataagacgttccagaatgcgctaaattcttcgtttgagtatttcgtcaacttgaacacacgttctcctgagtttatctccctgtttgttgatgataagctacgaaaaggactaaaaggtgtgggagaggaggatgtcgatcttattcttgataaggtgatgatgttgtttcgctacttacaggagaaagacgtttttgagaaatattacaaacagcatctggcgaaaaggcttttatctggaaaaactgtgtcggatgatgcagagaggaatctgatagtgaaactgaagacggaatgtgggtatcaattcacttcgaaacttgaaggtatgttcactgacatgaagacctcacacgacacgctgctaggattttataatagccatcccgagctttcagaaggacctacacttgttgttcaggttctcacaaccggttcttggcccacacagccaaccatacaatgtaacctacctgcagaagtttctgttctgtgtgagaagttcaggtcatattacctcgggactcacaccggtaggagattgtcttggcaaacgaatatgggaacagcagatatcaaagcagtgtttggaaagggtcagaagcatgaactaaacgtttcgactttccaaatgtgtgtccttatgttgttcaacaactctgatcgactaagctacaaagagatcgaacaggcaactgaaatccccaccccagacctaaagcgttgcttgcagtcaatggcgtgtgtaaaaggtaaaaacgtgctaagaaaagaaccaatgagcaaggagatagcagaggaggactggtttgttgtgaacgacaggttcgcaagcaagttctacaaagtgaagataggaactgtggtggcacaaaaggagacagaaccagagaagcaagagacaagacagagagtagaagaagacagaaaacctcagatcgaagcagccatcgtgaggataatgaagtctagacgagtgttggatcacaacaacataatcgcagaggtcaccaaacagttgcagacgcggttcttggcaaacccaacagagataaagaagagaattgaatcactcattgagcgtgatttcttggagagggataatacagaccggaaactttaccgctatctagcgtaa

SEQ ID NO: 13602 - protein, 732 aa, Arabidopsis thaliana
MSNQKKRNFQIEAFKQRVVVDPKYADKTWKILEHAIHEIYNHNASGLSFEELYRNAYNMVLHKYGDKLYTGLVTTMTFHLKEICKSIEEAQGGAFLELLNRKWNDHNKALQMIRDILMYMDRTYVSTTKKTHVHELGLHLWRDNVVYSSKIQTRLLNTLLDLVHKERTGEVIDRVLMRNVIKMFMDLGESVYQDDFEKPFLEASAEFYKVESMEFIESCDCGEYLKKAEKPLVEEVERVVNYLDAKSEAKITSVVEREMIANHVQRLVHMENSGLVNMLLNDKYEDMGRMYSLFRRVANGLVTVRDVMTLHLREMGKQLVTDPEKSKDPVEFVQRLLDERDKYDRIINMAFNNDKTFQNALNSSFEYFVNLNTRSPEFISLFVDDKLRKGLKGVGEEDVDLILDKVMMLFRYLQEKDVFEKYYKQHLAKRLLSGKTVSDDAERNLIVKLKTECGYQFTSKLEGMFTDMKTSHDTLLGFYNSHPELSEGPTLVVQVLTTGSWPTQPTIQCNLPAEVSVLCEKFRSYYLGTHTGRRLSWQTNMGTADIKAVFGKGQKHELNVSTFQMCVLMLFNNSDRLSYKEIEQATEIPTPDLKRCLQSMACVKGKNVLRKEPMSKEIAEEDWFVVNDRFASKFYKVKIGTVVAQKETEPEKQETRQRVEEDRKPQIEAAIVRIMKSRRVLDHNNIIAEVTKQLQTRFLANPTEIKKRIESLIERDFLERDNTDRKLYRYLA

SEQ ID NO: 13603 - DNA, 2217 bp, Arabidopsis thaliana
  CDS (1)..(2217)
atggagcgcaagactattgacttggagcaaggatgggactatatgcagactggaattactaagctgaaacggattctggaaggattgaatgagccagcatttgactctgagcaatatatgatgctttatacgactatctacaacatgtgcacccagaaacctcctcatgattactcacagcagctttatgacaagtatcgggaagcatttgaggaatatattaactcaacagttttgcctgcgttgagggagaagcatgatgagtttatgctgcgggagctatttaaaagatggtcaaaccataaagtaatggtcagatggctatcccgcttcttctactaccttgaccgttacttcattgctcggagatcacttccaccactgaatgaagttggcctgacatgcttccgtgacctggtttataatgagctacattctaaggtcaaacaagctgtaatagctcttgttgataaagaacgggagggcgagcagattgatagggccctgctgaaaaacgtattagatatctatgtagagattggaatggggcagatggagaggtatgaagaagattttgaaagcttcatgcttcaagatacttcttcgtattattctcgcaaggcatcaagctggattcaggaagattcttgccctgattacatgttgaagtctgaagaatgtctaaagaaggagagggagagagtggctcactacctacactcaagcagtgagccaaagctggttgagaaagtacaacatgaattgctggttgtgtttgcaagtcagcttctagaaaaagaacactcagggtgccgtgcattgctaagagatgacaaggtggatgatctctccaggatgtacaggctttaccataaaattttgcgaggcttggaacctgttgcaaacatctttaagcagcatgtcacagcagagggtaacgctcttgtccaacaggccgaagacacggctactaatcaggttgcaaatactgctagcgtccaggaacaggttcttatcagaaaagtgattgaacttcatgataaatacatggtatatgtcaccgagtgtttccagaaccacaccctcttccataaggctttgaaagaggcatttgagattttttgtaacaaaacggttgctggaagttcaagtgcagaactacttgcaacattttgcgacaatattctcaaaaaggggggaagtgaaaagctgagtgatgaagctatcgaagatacgcttgagaaggttgtcaaattgcttgcatacataagtgacaaggatcttttcgctgagttctacaggaagaagctggcccgtaggctcttatttgatcgcagtgctaatgatgatcatgagagaagtatcctgacaaagctcaagcaacaatgtggtggacagtttacttctaagatggagggcatggtgacggatttgacactggcaagagaaaaccaaaacagtttcgaggattatctaggcagtaaccctgctgcaaacccagggattgacttgaccgtcactgttcttaccactggtttctggccaagttacaaatcatttgacataaatctacccagtgaaatgatcaagtgtgttgaagtcttcaaagggttttatgaaacgaaaacgaaacacaggaagcttacgtggatctattcactgggaacttgtcacataaacgggaagtttgatcaaaaggccatcgagttaatagtgtctacttaccaggctgctgtgcttctactctttaacacaactgacaagttaagttacactgagatcttggctcaactgaacctaagccatgaagatctagttaggttgcttcattccttgtcatgtgctaagtacaagatactccttaaggagccaaacaccaagactgtctcccagaatgatgcctttgagttcaactccaaattcaccgatagaatgcgcagaatcaagatccctcttcccccagttgatgaaaggaagaaagtcgttgaagatgtcgataaagacagaagatatgcaattgatgctgccattgtcaggatcatgaagagcaggaaagtattgggacatcaacaacttgtttctgagtgtgttgagcaacttagccgaatgttcaagcctgatatcaaagcgatcaagaagcgtatggaggatttaataaccagagattatttggagagggacaaggagaatcctaacatgtttaggtacttggcttag

SEQ ID NO: 13604 - protein, 738 aa, Arabidopsis thaliana
MERKTIDLEQGWDYMQTGITKLKRILEGLNEPAFDSEQYMMLYTTIYNMCTQKPPHDYSQQLYDKYREAFEEYINSTVLPALREKHDEFMLRELFKRWSNHKVMVRWLSRFFYYLDRYFIARRSLPPLNEVGLTCFRDLVYNELHSKVKQAVIALVDKEREGEQIDRALLKNVLDIYVEIGMGQMERYEEDFESFMLQDTSSYYSRKASSWIQEDSCPDYMLKSEECLKKERERVAHYLHSSSEPKLVEKVQHELLVVFASQLLEKEHSGCRALLRDDKVDDLSRMYRLYHKILRGLEPVANIFKQHVTAEGNALVQQAEDTATNQVANTASVQEQVLIRKVIELHDKYMVYVTECFQNHTLFHKALKEAFEIFCNKTVAGSSSAELLATFCDNILKKGGSEKLSDEAIEDTLEKVVKLLAYISDKDLFAEFYRKKLARRLLFDRSANDDHERSILTKLKQQCGGQFTSKMEGMVTDLTLARENQNSFEDYLGSNPAANPGIDLTVTVLTTGFWPSYKSFDINLPSEMIKCVEVFKGFYETKTKHRKLTWIYSLGTCHINGKFDQKAIELIVSTYQAAVLLLFNTTDKLSYTEILAQLNLSHEDLVRLLHSLSCAKYKILLKEPNTKTVSQNDAFEFNSKFTDRMRRIKIPLPPVDERKKVVEDVDKDRRYAIDAAIVRIMKSRKVLGHQQLVSECVEQLSRMFKPDIKAIKKRMEDLITRDYLERDKENPNMFRYLA

SEQ ID NO: 13605 - DNA, 2379 bp, Arabidopsis thaliana
  CDS (1)..(2379)
atgtctcttcctaccaaacgctctactttctccgccgcttctgcctccgacgactcttcttactcttctcctccgatgaaaaaggccaaaaacgacctccaccattcccctcaacaccctaataccgccgacaaggttgttggctttcatatggaggaagatccaactcccgccgccgctaatctctctcggaagaaagctacacttccgcaacctactaagaagtttgtaatcaagctcaataaagccaaaccaactctaccaacaaactttgaggagaatacatgggagaagttgcagtcagctatcagagctatattcctcaaaaaaaaaatttcgtttgacctcgagagcctttaccaggctgttgataacctttgcttgcataagttggatggaaagctttatgaccagattgagaaggagtgtgaagaacacatctctgcagctttgcaatctttagttgggcagaacactgatctgactgttttcttgtcacgtgttgagaaatgctggcaagacttttgtgaccagatgctcatgattcgtagtatagccttgactctggataggaagtatgtgatacagaatccaaatgtacgttcattatgggagatgggtttgcagcttttccggaagcatctttctctggcccctgaagttgagcagaggacggttaaaggtctcttaagtatgattgaaaaagaaaggttagcagaagctgttaataggactctactaagccatcttttgaagatgtttactgcactgggaatttatatggaaagctttgagaaacctttccttgaagggacctctgaattttatgccgctgaaggaatgaaatacatgcagcagtctgacgttccggagtacctgaagcatgttgagggaaggttgcatgaagagaatgagagatgcatactctacatagatgcagtaaccaggaaaccattgatcacaactgttgaaaggcaacttctcgaacgtcatatacttgttgttcttgaaaagggttttacaacattaatggatggacgtcgtacggaggaccttcagaggatgcaaaccttgttttctagggtcaatgcacttgagtctctgaggcaggcgctaagttcatatgttcggaaaactgggcagaagattgttatggatgaagagaaagacaaagatatggtacaatcactgttggacttcaaggcttctcttgacataatatgggaagagagcttttacaagaacgaatcatttggtaacacaatcaaagattcgtttgagcatctgattaatcttcgacagaaccggccagctgagcttattgccaagtttttggacgagaaactccgtgctgggaataagggtacttctgaagaagaattggagagtgttcttgaaaaagtcttggttttgttcagatttatccagggtaaagatgtgttcgaagcattttacaaaaaggatcttgcgaagagactcctgttgggaaagagtgcttcaatcgatgctgagaaatccatgatctctaagcttaagactgagtgtggtagccagtttacaaacaagctcgaagggatgttcaaggatattgaattgtcaaaggaaatcaacgagtcattcaaacaatcttcccaggccagaacaaaactgccatcgggaattgagatgagtgtccacgttttaacaacagggtactggccaacatatccgcctatggatgttaagcttcctcatgaactaaatgtctatcaggatatcttcaaagagttctatttaagcaagtacagtggtaggaggttaatgtggcaaaattcattaggccactgtgttttaaaggcagatttctccaaaggtaaaaaggagctggctgtttccctgtttcaggctgttgtgttaatgttatttaacgatgcaatgaaacttagctttgaagacattaaagattccaccagcatagaggacaaggagctgaggaggactttgcagtcgcttgcttgtgggaaagtccgtgtcctgcagaagaatcctaagggaagagatgtagaagacggtgatgaatttgaatttaatgatgagtttgcagctccgctgtatcgcattaaggtaaatgcgatccagatgaaagagacagtagaggagaacacaagtacaacggaaagagtattccaggaccgacaataccagatcgatgcagccattgttcgtattatgaagacaagaaaagtcttgagccatactcttctaatcactgagctcttccaacagctcaaattcccgataaagcctgctgatctgaagaagaggattgagagcttgatcgatcgagaatatttggagagggaaaaaagcaaccctcagatatacaattatcttgcttag

SEQ ID NO: 13606 - protein, 792 aa, Arabidopsis thaliana
MSLPTKRSTFSAASASDDSSYSSPPMKKAKNDLHHSPQHPNTADKVVGFHMEEDPTPAAANLSRKKATLPQPTKKFVIKLNKAKPTLPTNFEENTWEKLQSAIRAIFLKKKISFDLESLYQAVDNLCLHKLDGKLYDQIEKECEEHISAALQSLVGQNTDLTVFLSRVEKCWQDFCDQMLMIRSIALTLDRKYVIQNPNVRSLWEMGLQLFRKHLSLAPEVEQRTVKGLLSMIEKERLAEAVNRTLLSHLLKMFTALGIYMESFEKPFLEGTSEFYAAEGMKYMQQSDVPEYLKHVEGRLHEENERCILYIDAVTRKPLITTVERQLLERHILVVLEKGFTTLMDGRRTEDLQRMQTLFSRVNALESLRQALSSYVRKTGQKIVMDEEKDKDMVQSLLDFKASLDIIWEESFYKNESFGNTIKDSFEHLINLRQNRPAELIAKFLDEKLRAGNKGTSEEELESVLEKVLVLFRFIQGKDVFEAFYKKDLAKRLLLGKSASIDAEKSMISKLKTECGSQFTNKLEGMFKDIELSKEINESFKQSSQARTKLPSGIEMSVHVLTTGYWPTYPPMDVKLPHELNVYQDIFKEFYLSKYSGRRLMWQNSLGHCVLKADFSKGKKELAVSLFQAVVLMLFNDAMKLSFEDIKDSTSIEDKELRRTLQSLACGKVRVLQKNPKGRDVEDGDEFEFNDEFAAPLYRIKVNAIQMKETVEENTSTTERVFQDRQYQIDAAIVRIMKTRKVLSHTLLITELFQQLKFPIKPADLKKRIESLIDREYLEREKSNPQIYNYLA
